United States Patent Application Publication US 2011/0183924 A1 - sequence listing, part 184

SEQ ID NO: 447914 - DNA, 2629 bp, Homo sapiens
tagtaggcacactgatgcagatccctggtgtttagcctccccaagccaggcctgagctttgtctccatcctacacatacaggttttctcacattttgattttttctttttgactggcaatacacaaaaatagaggaagtaaactccttttatttttcctgcttagctatttaaaactccagctcctaagccaggcatggtggcacacacctgtagtcccagctattcgggaggcttagatgggagaatagcttgagcccaggagttcaggaccagcctgggcaacaaaacaaacccatctttagagggggggaggaaaaaaaaaaaaccctccggctcctgatgtgtaataatcatcagagaaaactgtgcttctttttccattgtaactcttcatcttttcctgttcaggatgtttgtacagcgctattaattacagccttcaattccctggcctggaaagatactctgtcctgccagaggacaacctcacagctctgctggcctctcctcaaacaagtatggttattcaccccttttccctgcccctcatggaaggtttgggtcatgcagactgactaaatcattcagaagaactggggtgctgaggccttgagagaggccccctgtggccctaaagcacagttgtctccccaggtgctgtcagggacactgctcgcagatgcagttacgtggcttttcaccagtgtgctgaaaggcttacagatgcacgggcagcacgacgggtgcatggcttccctggtccatctggccttccagatatacgaggcactgcgccccaggtacctggagataagagctgtaatggagcaaatccctgaaatacagaaggactcactggaccagtttgactgcaagcttttaaacccctccctgcagaaagtggctgacaagcgccgaaaggaccaattcaaacgcctcattgctggttgcattgggaaacccttgggagagcagttccgaaaagaagttcacattaagaatcttccctcacttttcaaaaaaacaaagccaatgctggagacggaggtgctggacaatgatgggggtggcctggccaccatctttgaaccctgaatcaagcttttgggcatccttcctcggcctttcttgtcatctcttctttccctttgtagccgatctctaggcccttcttgcactgccacctcactttccaccactgtcagcctggaaagagatccaggtctggagctggagagaacaggccctgtgcaggaccagaagtaattatactaaagtatcaagaaagggagttagggcttaaactattctgtctagatgtcccagatagttcccattctacttggagatttggcttttccaagaaaagctagagcagagcagcccttctcccacaagccctcccacccccgtgcagccacatacctgtacagaatggtaactaagggtgctgtgcccaaccctgcgactagcaaggctcgcagcaagagcacagccctcaactacttgtgccagagtttctcttggaccactccaactcccactgagcccttttgctgctgggctggcaggaaactttccccactccctaaggggcatgtctgggttaggtgctaagtgctgaagagaacttggtcagttctctcaactttgctttgggcaagaatctggtcacctgatgggatccatggtacaggctactgctaaacttggcacagtatcaagtatagtacctccaaggaccagggctgggcagtctttagtgctaacatcccctttagagttcacacatcttgcccttccatgaatgacccctcagtctggcctccccagcctcaaggtccactcaggcacaagagccacagtaccctagatagtgtcacatgacaccgttgtcatccaaggataatacagaccaactaggctacatctgtgatgagcagctagcaaagccgctggtcttctcctaggactaagtccaggtgccttccacaatctcatggtctttcaggtccctggttacttttctcaaaggccatttccaaaagaatacatgccttcacatcacaacctgtactgtgagtccattctagaggtcactgaaaggccctgtaaagagaggacatggatacgggacctggccctgaggttattactggccgtaaggcagagttaatccatacagaaaccagtgtgtccatgtgctctgcacaaaaacagacctgttgtccatccagtccactgacaagagggtttccccgagagccgaagtggactgaagctacagtttttagctggtgcgggccacaggcagggtcagattgagaagaagcaaagctggggaagcagaagttgggagtcttgtgttgctccctcttcctgtgtggtgctctgggtttctgtggatcgtgaaggcgatctcaagagtgtttccctccaaacctgatagctgcctattcctgtctggttggggctgtggaggatgtagttgtatttattgcattgtaatatttttaacatcctgtgacttcatgctagaaattttctattgtttatagaaactttttgtagaaacattaactctaaagcacatctgcatgtcagtaaaaatctcagtttcgtacaga

SEQ ID NO: 447915 - DNA, 3616 bp, Homo sapiens
gcgcagcgccggcttcttcccagcgcgagttgctgctaacgctcctcctccagcttcccacccccgccgcccgccgcggcccggtaccaacgggtggtctcgccgagggagctgtcgtgcctcgtggtcccgggactgcagtggtgtgcgctctcggcgcgtggcgctaggcatggcgatggatcaagtaaacgcgctgtgcgagcagctggtgaaagcggtgacggtcatgatggaccccaactccacccagcgctaccggctggaagccctcaagttttgtgaggagtttaaagaaaagtgtcctatctgtgtcccctgtggcttgaggttggctgagaaaacacaagttgccatcgtcagacattttggccttcagatcctggaacacgttgtcaagtttcggtggaacggcatgtctcgattggagaaggtgtatctgaagaacagtgtcatggagctgattgcaaatggaacattgaacattttggaagaggagaaccatattaaagatgctctgtctcgaattgtagtggaaatgatcaagcgagagtggccacagcattggcctgacatgctaatagaattggacactctttccaaacaaggggaaacacagacagaattggtgatgtttatccttttgcgactggcagaggatgtagtgacttttcagacacttccccctcaaagaagaagggacatccagcaaacattaacccagaacatggaaaggatcttcagttttctgcttaacacacttcaagaaaatgtaaacaagtatcagcaagtgaagacagatacttctcaggagtcaaaggcgcaagcaaactgtcgagtaggagttgcagcactgaatactctagcaggctatattgactgggtgtctatgagtcacatcactgctgaaaactgtaaactcctggagatactgtgtttgctgttgaatgaacaggaacttcagttgggagccgctgagtgtcttctcattgcagtcagcagaaaaggcaagttggaagaccggaagcccttgatggtcttatttggagatgttgccatgcattatatactctccgccgcacagactgctgatggaggaggtttggtagaaaaacactacgtctttctgaagaggctctgtcaggtgttgtgtgcgctgggcaatcagctgtgtgcattgctgggtgcagattctgatgtagaaacaccatcaaactttggaaaatacctggaatcttttcttgctttcacaacccatccaagtcagtttctacgctcttcaactcagatgacttggggagccctcttcaggcatgaaatcctgtcccgtgatcctttgctattagcaataataccaaaatatcttcgtgcttccatgactaacttggtcaagatgggctttccttctaaaacagacagccctagctgtgaatattctcggtttgattttgatagcgatgaggacttcaatgctttcttcaactcctcccgagcacaacaaggagaggtgatgaggttggcatgtcgtttggatcccaaaactagcttccagatggctggggagtggctaaagtatcaactatcaacttttcttgatgctggttctgtgaattcttgttctgcagttggaactggagaaggaagcctctgttccgtcttctcaccttcattcgtgcagtgggaagccatgactctttttttggaaagtgttatcacccagatgtttcgaacactaaatagagaagaaattcctgttaatgatggaatagagctattgcagatggttctgaactttgataccaaggatcccctcatcctgtcctgcgtccttactaatgtctctgcactctttccatttgtcacctacagaccagagttcctgccccaggtcttctctaagctattttcatctgtcacttttgaaactgttgaagaaagtaaggcccccagaacccgggcagtgaggaatgtgaggaggcatgcttgttcctccatcatcaagatgtgtcgtgactacccccagcttgtgctgcccaattttgacatgctttataaccatgtgaagcaactcctctccaatgagctactcctgacacaaatggagaagtgtgccctcatggaagccctggttctcattagcaaccaatttaagaactacgagcgtcagaaggtgttcctagaggagctgatggcaccagtggccagcatctggctttctcaagacatgcacagagtgctgtcagatgttgatgctttcattgcgtatgtgggtacagatcagaagagctgtgacccaggcctggaggatccgtgtggcttaaaccgtgcacgaatgagcttttgtgtatacagcattctgggtgtggtgaaacgaacttgctggcccactgacctagaagaggccaaagctgggggatttgtggtgggttatacatccagtggaaatccaatcttccgtaacccctgcacagagcagattctgaaacttcttgacaatttgcttgcgcttataagaacccacaatacattatatgcaccagaaatgctagccaaaatggcagagcctttcaccaaggctctggatatgcttgacgcggaaaaatctgctatattaggattacctcaacctctcttggaactcaatgactctcctgtcttcaaaaccgtcttggaaagaatgcagcgtttcttctctaccctctatgaaaactgttttcatatcctagggaaggcaggcccttccatgcagcaagacttctatactgtggaggaccttgctacccagcttctcagctcagcctttgtcaacttgaacaatattcctgactaccgactcagacccatgcttcgggtctttgtaaagcctctggtgctcttctgtcccccagagcactatgaagccctggtatcccccatcctcggacctcttttcacctacctccatatgaggctttctcagaaatggcaagttatcaaccaaaggagcctgctgtgtggagaagatgaggctgcagatgaaaacccagagtctcaagagatgctggaggagcaactggtgaggatgttaacccgagaagtcatggacctaatcacggtttgctgtgtttcaaagaagggtgctgaccacagtagtgctcccccagcagatggagacgatgaagaaatgatggccacagaggtcaccccctcagctatggcagagcttacagacctgttgtccatccagtccactgacaagagggtttccccgagagccgaagtggactgaagctacagtttttagctggtgcgggccacaggcagggtcagattgagaagaagcaaagctggggaagcagaagttgggagtcttgtgttgctccctcttcctgtgtggtgctctgggtttctgtggatcgtgaaggcgatctcaagagtgtttccctccaaacctgatagctgcctattcctgtctggttggggctgtggaggatgtagttgtatttattgcattgtaatatttttaacatcctgtgacttcatgctagaaattttctattgtttatagaaactttttgtagaaacattaactctaaagcacatctgcatgtcagtaaaaatctcagtttcgtacaga

SEQ ID NO: 447916 - DNA, 4226 bp, Homo sapiens
gcgcagcgccggcttcttcccagcgcgagttgctgctaacgctcctcctccagcttcccacccccgccgcccgccgcggcccggtaccaacgggtggtctcgccgagggagctgtcgtgcctcgtggtcccgggactgcagtggtgtgcgctctcggcgcgtggcgctaggcatggcgatggatcaagtaaacgcgctgtgcgagcagctggtgaaagcggtgacggtcatgatggaccccaactccacccagcgctaccggctggaagccctcaagttttgtgaggagtttaaagaaaagtgtcctatctgtgtcccctgtggcttgaggttggctgagaaaacacaagttgccatcgtcagacattttggccttcagatcctggaacacgttgtcaagtttcggtggaacggcatgtctcgattggagaaggtgtatctgaagaacagtgtcatggagctgattgcaaatggaacattgaacattttggaagaggagaaccatattaaagatgctctgtctcgaattgtagtggaaatgatcaagcgagagtggccacagcattggcctgacatgctaatagaattggacactctttccaaacaaggggaaacacagacagaattggtgatgtttatccttttgcgactggcagaggatgtagtgacttttcagacacttccccctcaaagaagaagggacatccagcaaacattaacccagaacatggaaaggatcttcagttttctgcttaacacacttcaagaaaatgtaaacaagtatcagcaagtgaagacagatacttctcaggagtcaaaggcgcaagcaaactgtcgagtaggagttgcagcactgaatactctagcaggctatattgactgggtgtctatgagtcacatcactgctgaaaactgtaaactcctggagatactgtgtttgctgttgaatgaacaggaacttcagttgggagccgctgagtgtcttctcattgcagtcagcagaaaaggcaagttggaagaccggaagcccttgatggtcttatttggagatgttgccatgcattatatactctccgccgcacagactgctgatggaggaggtttggtagaaaaacactacgtctttctgaagaggctctgtcaggtgttgtgtgcgctgggcaatcagctgtgtgcattgctgggtgcagattctgatgtagaaacaccatcaaactttggaaaatacctggaatcttttcttgctttcacaacccatccaagtcagtttctacgctcttcaactcagatgacttggggagccctcttcaggcatgaaatcctgtcccgtgatcctttgctattagcaataataccaaaatatcttcgtgcttccatgactaacttggtcaagatgggctttccttctaaaacagacagccctagctgtgaatattctcggtttgattttgatagcgatgaggacttcaatgctttcttcaactcctcccgagcacaacaaggagaggtgatgaggttggcatgtcgtttggatcccaaaactagcttccagatggctggggagtggctaaagtatcaactatcaacttttcttgatgctggttctgtgaattcttgttctgcagttggaactggagaaggaagcctctgttccgtcttctcaccttcattcgtgcagtgggaagccatgactctttttttggaaagtgttatcacccagatgtttcgaacactaaatagagaagaaattcctgttaatgatggaatagagctattgcagatggttctgaactttgataccaaggatcccctcatcctgtcctgcgtccttactaatgtctctgcactctttccatttgtcacctacagaccagagttcctgccccaggtcttctctaagctattttcatctgtcacttttgaaactgttgaagaaagtaaggcccccagaacccgggcagtgaggaatgtgaggaggcatgcttgttcctccatcatcaagatgtgtcgtgactacccccagcttgtgctgcccaattttgacatgctttataaccatgtgaagcaactcctctccaatgagctactcctgacacaaatggagaagtgtgccctcatggaagccctggttctcattagcaaccaatttaagaactacgagcgtcagaaggtgttcctagaggagctgatggcaccagtggccagcatctggctttctcaagacatgcacagagtgctgtcagatgttgatgctttcattgcgtatgtgggtacagatcagaagagctgtgacccaggcctggaggatccgtgtggcttaaaccgtgcacgaatgagcttttgtgtatacagcattctgggtgtggtgaaacgaacttgctggcccactgacctagaagaggccaaagctgggggatttgtggtgggttatacatccagtggaaatccaatcttccgtaacccctgcacagagcagattctgaaacttcttgacaatttgcttgcgcttataagaacccacaatacattatatgcaccagaaatgctagccaaaatggcagagcctttcaccaaggctctggatatgcttgacgcggaaaaatctgctatattaggattacctcaacctctcttggaactcaatgactctcctgtcttcaaaaccgtcttggaaagaatgcagcgtttcttctctaccctctatgaaaactgttttcatatcctagggaaggcaggcccttccatgcagcaagacttctatactgtggaggaccttgctacccagcttctcagctcagcctttgtcaacttgaacaatattcctgactaccgactcagacccatgcttcgggtctttgtaaagcctctggtgctcttctgtcccccagagcactatgaagccctggtatcccccatcctcggacctcttttcacctacctccatatgaggctttctcagaaatggcaagttatcaaccaaaggagcctgctgtgtggagaagatgaggctgcagatgaaaacccagagtctcaagagatgctggaggagcaactggtgaggatgttaacccgagaagtcatggacctaatcacggtttgctgtgtttcaaagaagggtgctgaccacagtagtgctcccccagcagatggagacgatgaagaaatgatggccacagaggtcaccccctcagctatggcagagcttacagacctgttgtccatccagtccactgacaagagggtttccccgagagccgaagtggactgaagctacagtttttagctggtgcgggccacaggcagggtcagattgagaagaagcaaagctggggaagcagaagttgggagtcttgtgttgctccctcttcctgtgtggtgctctgggtttctgtggatcgtgaaggcgatctcaagagtgtttccctccaaacctgatagctgcctattcctgtctggttggggctgtggaggatgtagttgtatttattgcattgtaatatttttaacatcctgtgacttcatgctagaaattttctattgtttatagaaactttttgtagaaacattaactctaaagcacatctgcatgtcagtaaaaatctcagtttcgtacagaaagggacccatctgcctttttcaacctagtcttaaaaccagtgacatactccagggttacttcatgagcacccgggactaaaacaggaagaaatgtgactgatgattctggtctttcaagctttctgaaatggtgtgccagttagaaaaggatttctattcctgacatacccagactaggcagcccataccattctcacagtgtctttcgtgtgtggctgctgggcctggcccacaggaattgctactgttctttgttggagctgtcaatagcaacatgaacttccctggtaaaccaggagataggtgaagtggcacattcactctagcttgaatgtttttctagggtttggctgtgctcccagaaaccaccttaatttgccaattctcaggaggtgttctttctgttgtttttgaaacagggtctcactgttacccgggctggagtgcacatctgatgttcttaattggtaaatgctaaaccagttctgaagtgaggccccctgtttttcgcggtggctcacacctgtaatcccaacactttgggaggccccaaggcaggcgtatcacttgaggtcaggagtttgacaccagcctgaccaacatggtga

SEQ ID NO: 447917 - DNA, 2891 bp, Homo sapiens
gcgcagcgccggcttcttcccagcgcgagttgctgctaacgctcctcctccagcttcccacccccgccgcccgccgcggcccggtaccaacgggtggtctcgccgagggagctgtcgtgcctcgtggtcccgggactgcagtggtgtgcgctctcggcgcgtggcgctaggcatggcgatggatcaagtaaacgcgctgtgcgagcagctggtgaaagcggtgacggtcatgatggaccccaactccacccagcgctaccggctggaagccctcaagttttgtgaggagtttaaagaaaagtgtcctatctgtgtcccctgtggcttgaggttggctgagaaaacacaagttgccatcgtcagacattttggccttcagatcctggaacacgttgtcaagtttcggtggaacggcatgtctcgattggagaaggtgtatctgaagaacagtgtcatggagctgattgcaaatggaacattgaacattttggaagaggagaaccatattaaagatgctctgtctcgaattgtagtggaaatgatcaagcgagagtggccacagcattggcctgacatgctaatagaattggacactctttccaaacaaggggaaacacagacagaattggtgatgtttatccttttgcgactggcagaggatgtagtgacttttcagacacttccccctcaaagaagaagggacatccagcaaacattaacccagaacatggaaaggatcttcagttttctgcttaacacacttcaagaaaatgtaaacaagtatcagcaagtgaagacagatacttctcaggagtcaaaggcgcaagcaaactgtcgagtaggagttgcagcactgaatactctagcaggctatattgactgggtgtctatgagtcacatcactgctgaaaactgtaaactcctggagatactgtgtttgctgttgaatgaacaggaacttcagttgggagccgctgagtgtcttctcattgcagtcagcagaaaaggcaagttggaagaccggaagcccttgatggtcttatttggagatgttgccatgcattatatactctccgccgcacagactgctgatggaggaggtttggtagaaaaacactacgtctttctgaagaggctctgtcaggtgttgtgtgcgctgggcaatcagctgtgtgcattgctgggtgcagattctgatgtagaaacaccatcaaactttggaaaatacctggaatcttttcttgctttcacaacccatccaagtcagtttctacgctcttcaactcagatgacttggggagccctcttcaggcatgaaatcctgtcccgtgatcctttgctattagcaataataccaaaatatcttcgtgcttccatgactaacttggtcaagatgggctttccttctaaaacagacagccctagctgtgaatattctcggtttgattttgatagcgatgaggacttcaatgctttcttcaactcctcccgagcacaacaaggagaggtgatgaggttggcatgtcgtttggatcccaaaactagcttccagatggctggggagtggctaaagtatcaactatcaacttttcttgatgctggttctgtgaattcttgttctgcagttggaactggagaaggaagcctctgttccgtcttctcaccttcattcgtgcagtgggaagccatgactctttttttggaaagtgttatcacccagatgtttcgaacactaaatagagaagaaattcctgttaatgatggaatagagctattgcagatggttctgaactttgataccaaggatcccctcatcctgtcctgcgtccttactaatgtctctgcactctttccatttgtcacctacagaccagagttcctgccccaggtcttctctaagctattttcatctgtcacttttgaaactgttgaagaaagtaaggcccccagaacccgggcagtgaggaatgtgaggaggcatgcttgttcctccatcatcaagatgtgtcgtgactacccccagcttgtgctgcccaattttgacatgctttataaccatgtgaagcaactcctctccaatgagctactcctgacacaaatggagaagtgtgccctcatggaagccctggttctcattagcaaccaatttaagaactacgagcgtcagaaggtgttcctagaggagctgatggcaccagtggccagcatctggctttctcaagacatgcacagagtgctgtcagatgttgatgctttcattgcgtatgtgggtacagatcagaagagctgtgacccaggcctggaggatccgtgtggcttaaaccgtgcacgaatgagcttttgtgtatacagcattctgggtgtggtgaaacgaacttgctggcccactgacctagaagaggccaaagctgggggatttgtggtgggttatacatccagtggaaatccaatcttccgtaacccctgcacagagcagattctgaaacttcttgacaatttgcttgcgcttataaggtgagtcagaataatggcttttctctgttgttttctactttaccttaaaaatttcaaaagtttagtctgtttacatgtcttcatatcttagtggtattaatgagggattgatttaagtcttatttctttctagagggtgtctcagttttggataatcccgggcttttcccattttgagcctcctctttgttgttcttccatttctttatacttcatccctatttttacttgtaagttttatttggtctaaattttttagtaaaggaattgctcattgggagcagggcagttgccttctataatgatgcttgtctaggtggtattcatatgagctaatctgaatttatcaatactgagtctgagctcagatgaaccaa

SEQ ID NO: 447918 - DNA, 845 bp, Homo sapiens
tgtaatgaattctgccactaagagaaaatgaatacaatctctttcttcacttctgaaataagattagctgtgatcttataggtgtctataaactcaaggtgatggtggtggttgcagaccatgacctgagccactacagaactggaagttccacttctttacctcaaatttctgtattcttgtatttctatattttgctttttttctaaatgacagataatgtataattgatagatagaatatgtgtagaataagtgccacattaacatggaaactatagaaatgtctgcattttacttggtttattttaccctcattttgttggagagaaaaagatacacattggtttcttcctatttttcccagctattgacctgaaaagtggttctggaaaagtgtaccaaggccctgcaaaaggtgctgctgatacaacaatcatactttcagatgaagatttcatggaggtggtcctgggcaagcttgaccctcagaaggcattctttagtggcaggctgaaggccagagggaacatcatgctgagccagaaacttcagatgattcttaaagactacgccaagctctgaagggcacactacactattaataaaaatggaatcattaaatactctcttcacccaaatatgcttgattattctgcaaaagtgattagaactaagatgcaggggaaattgcttaacattttcagatatcagataactgcagattttcattttctactaatttttcatgtatcattatttttacaaggaactatatataagctagcacataattatccttctgttcttagatctgtatcttcataataaaaaaattttgcccaa

SEQ ID NO: 447919 - DNA, 546 bp, Homo sapiens
  misc_feature (3)..(3): n is a, c, g, or t
  misc_feature (20)..(20): n is a, c, g, or t
  misc_feature (29)..(29): n is a, c, g, or t
  misc_feature (45)..(45): n is a, c, g, or t
  misc_feature (60)..(60): n is a, c, g, or t
agnaaaaacccttggggggngggagtttnagacacctttgtattngaggaaatatggggntaagtggctattgacctgaaaagtggttctggaaaagtgtaccaaggccctgcaaaaggtgctgctgatacaacaatcatactttcagatgaagatttcatggaggtggtcctgggcaagcttgaccctcagaaggcattctttagtggcaggctgaaggccagagggaacatcatgctgagccagaaacttcagatgattcttaaagactacgccaagctctgaagggcacactacactattaataaaaatggaatcattaaatactctcttcacccaaatatgcttgattattctgcaaaagtgattagaactaagatgcaggggaaattgcttaacattttcagatatcagataactgcagattttcattttctactaatttttcatgtatcattatttttacaaggaactatatataagctagcacataattatccttctgttcttagatctgtatcttcataataaaaaaattttgcccaa

SEQ ID NO: 447920 - DNA, 564 bp, Homo sapiens
cactgtcttccacagtggttgaactaatttacactcccaccaacagtgtaaaagcgttcttatttctccacatcctctgcagcatctgttgttcaggaacactatttcaaaccatagttttttagttttgctgagcttacagtggaaatgctattaaattctttcacatcttattatagtaatctttggtttttaagacactgtatttcttttacttttctttctaggaaaattaaaatgtgaagcagttgttgctgatgtcctagataaaggatccggtgtagtgattattatggatggtaatttatttacaattcttataataatattgttagattgataggctttgtgtatgacataatacttcaccatagaagttgattaataagttagtatttgtcttccaatttgttagaaaacaagataagcatttttatataactggctttaacttttcttttgacaggccaagccttggttctaaactgtttcctttttgactgttaaaacaccgaggacgcatgcaccggaactttcttggtttttttttggctcccccattgg

SEQ ID NO: 447921 - DNA, 2551 bp, Homo sapiens
attccccgcctcctcctgtcccgcagtcggcgtccagcggctctgcttgttcgtgtgtgtgtcgttgcaggccttattcatgggctcaccgctgaggttcgacgggcgggtggtactggtcaccggcgcgggggcaggattgggccgagcctatgccctggcttttgcagaaagaggagcgttagttgttgtgaatgatttgggaggggacttcaaaggagttggtaaaggctccttagctgctgataaggttgttgaagaaataagaaggagaggtggaaaagcagtggccaactatgattcagtggaagaaggagagaaggttgtgaagacagccctggatgcttttggaagaatagatgttgtggtcaacaatgctggaattctgagggatcgttcctttgctaggataagtgatgaagactgggatataatccacagagttcatttgcggggttcattccaagtgacacgggcagcatgggaacacatgaagaaacagaagtatggaaggattattatgacttcatcagcttcaggaatatatggcaactttggccaggccaattatagtgctgcaaagttgggtcttctgggccttgcaaattctcttgcaattgaaggcaggaaaagcaacattcattgtaacaccattgctcctaatgcgggatcacggatgactcagacagttatgcctgaagatcttgtggaagccctgaagccagagtatgtggcacctcttgtcctttggctttgtcacgagagttgtgaggagaatggtggcttgtttgaggttggagcaggatggattggaaaattacgctgggagcggactcttggagctattgtaagacaaaagaatcacccaatgactcctgaggcagtcaaggctaactggaagaagatctgtgactttgagaatgccagcaagcctcagagtatccaagaatcaactggcagtataattgaagttctgagtaaaatagattcagaaggaggagtttcagcaaatcatactagtcgtgcaacgtctacagcaacatcaggatttgctggagctattggccagaaactccctccattttcttatgcttatacggaactggaagctattatgtatgcccttggagtgggagcgtcaatcaaggatccaaaagatttgaaatttatttatgaaggaagttctgatttctcctgtttgcccaccttcggagttatcataggtcagaaatctatgatgggtggaggattagcagaaattcctggactttcaatcaactttgcaaaggttcttcatggagagcagtacttagagttatataaaccacttcccagagcaggaaaattaaaatgtgaagcagttgttgctgatgtcctagataaaggatccggtgtagtgattattatggatgtctattcttattctgagaaggaacttatatgccacaatcagttctctctctttcttgttggctctggaggctttggtggaaaacggacatcagacaaagtcaaggtagctgtagccatacctaatagacctcctgatgctgtacttacagataccacctctcttaatcaggctgctttgtaccgcctcagtggagactggaatcccttacacattgatcctaactttgctagtctagcaggttttgacaagcccatattacatggattatgtacatttggattttctgccaggcgtgtgttacagcagtttgcagataatgatgtgtcaagattcaaggcaattaaggctcgttttgcaaaaccagtatatccaggacaaactctacaaactgagatgtggaaggaaggaaacagaattcattttcaaaccaaggtccaagaaactggagacattgtcatttcaaatgcatatgtggatcttgcaccaacatctggtacttcagctaagacaccctctgagggcgggaagcttcagagtacctttgtatttgaggaaataggacgccgcctaaaggatattgggcctgaggtggtgaagaaagtaaatgctgtatttgagtggcatataaccaaaggcggaaatattggggctaagtggactattgacctgaaaagtggttctggaaaagtgtaccaaggccctgcaaaaggtgctgctgatacaacaatcatactttcagatgaagatttcatggaggtggtcctgggcaagcttgaccctcagaaggcattctttagtggcaggctgaaggccagagggaacatcatgctgagccagaaacttcagatgattcttaaagactacgccaagctctgaagggcacactacactattaataaaaatggaatcattaaatactctcttcacccaaatatgcttgattattctgcaaaagtgattagaactaagatgcaggggaaattgcttaacattttcagatatcagataactgcagattttcattttctactaatttttcatgtatcattatttttacaaggaactatatataagctagcacataattatccttctgttcttagatctgtatcttcataataaaaaaattttgcccaa

SEQ ID NO: 447922 - DNA, 2550 bp, Homo sapiens
catctcttgaggaggaaagagccggaaacacctggtctctcaagcaggattgggccgagcctatgccctggcttttgcagaaagaggagcgttagttgttgtgaatgatttgggaggggacttcaaaggagttggtaaaggctccttagctgctgataaggttgttgaagaaataagaaggagaggtggaaaagcagtggccaactatgattcagtggaagaaggagagaaggttgtgaagacagccctggatgcttttggaagaatagatgttgtggtcaacaatgctggaattctgagggatcgttcctttgctaggataagtgatgaagactgggatataatccacagagttcatttgcggggttcattccaagtgacacgggcagcatgggaacacatgaagaaacagaagtatggaaggattattatgacttcatcagcttcaggaatatatggcaactttggccaggccaattatagtgctgcaaagttgggtcttctgggccttgcaaattctcttgcaattgaaggcaggaaaagcaacattcattgtaacaccattgctcctaatgcgggatcacggatgactcagacagttatgcctgaagatcttgtggaagccctgaagccagagtatgtggcacctcttgtcctttggctttgtcacgagagttgtgaggagaatggtggcttgtttgaggttggagcaggatggattggaaaattacgctgggagcggactcttggagctattgtaagacaaaagaatcacccaatgactcctgaggcagtcaaggctaactggaagaagatctgtgactttgagaatgccagcaagcctcagagtatccaagaatcaactggcagtataattgaagttctgagtaaaatagattcagaaggaggagtttcagcaaatcatactagtcgtgcaacgtctacagcaacatcaggatttgctggagctattggccagaaactccctccattttcttatgcttatacggaactggaagctattatgtatgcccttggagtgggagcgtcaatcaaggatccaaaagatttgaaatttatttatgaaggaagttctgatttctcctgtttgcccaccttcggagttatcataggtcagaaatctatgatgggtggaggattagcagaaattcctggactttcaatcaactttgcaaaggttcttcatggagagcagtacttagagttatataaaccacttcccagagcaggaaaattaaaatgtgaagcagttgttgctgatgtcctagataaaggatccggtgtagtgattattatggatgtctattcttattctgagaaggaacttatatgccacaatcagttctctctctttcttgttggctctggaggctttggtggaaaacggacatcagacaaagtcaaggtagctgtagccatacctaatagacctcctgatgctgtacttacagataccacctctcttaatcaggctgctttgtaccgcctcagtggagactggaatcccttacacattgatcctaactttgctagtctagcaggttttgacaagcccatattacatggattatgtacatttggattttctgccaggcgtgtgttacagcagtttgcagataatgatgtgtcaagattcaaggcaattaaggctcgttttgcaaaaccagtatatccaggacaaactctacaaactgagatgtggaaggaaggaaacagaattcattttcaaaccaaggtccaagaaactggagacattgtcatttcaaatgcatatgtggatcttgcaccaacatctggtacttcagctaagacaccctctgagggcgggaagcttcagagtacctttgtatttgaggaaataggacgccgcctaaaggatattgggcctgaggtggtgaagaaagtaaatgctgtatttgagtggcatataaccaaaggcggaaatattggggctaagtggactattgacctgaaaagtggttctggaaaagtgtaccaaggccctgcaaaaggtgctgctgatacaacaatcatactttcagatgaagatttcatggaggtggtcctgggcaagcttgaccctcagaaggcattctttagtggcaggctgaaggccagagggaacatcatgctgagccagaaacttcagatgattcttaaagactacgccaagctctgaagggcacactacactattaataaaaatggaatcattaaatactctcttcacccaaatatgcttgattattctgcaaaagtgattagaactaagatgcaggggaaattgcttaacattttcagatatcagataactgcagattttcattttctactaatttttcatgtatcattatttttacaaggaactatatataagctagcacataattatccttctgttcttagatctgtatcttcataataaaaaaattttgcccaagtcctgtttccttagaatttgtgatagcattgataagttgaaaggaaaattaaatcaataaaggcctttgatacctttaaaaattggaa

SEQ ID NO: 447923 - DNA, 2371 bp, Homo sapiens
agaagagttagtgtctttgatttagaattaagctaagaagagcttttagtttctgcttcccttgtaacaactggggtaaaaaagaagctgagaaagataggatttgctggcaaagggggcctatgttggtgcttttcttggtgctgcaacgggactgagatataatccacagagttcatttgcggggttcattccaagtgacacgggcagcatgggaacacatgaagaaacagaagtatggaaggattattatgacttcatcagcttcaggaatatatggcaactttggccaggccaattatagtgctgcaaagttgggtcttctgggccttgcaaattctcttgcaattgaaggcaggaaaagcaacattcattgtaacaccattgctcctaatgcgggatcacggatgactcagacagttatgcctgaagatcttgtggaagccctgaagccagagtatgtggcacctcttgtcctttggctttgtcacgagagttgtgaggagaatggtggcttgtttgaggttggagcaggatggattggaaaattacgctgggagcggactcttggagctattgtaagacaaaagaatcacccaatgactcctgaggcagtcaaggctaactggaagaagatctgtgactttgagaatgccagcaagcctcagagtatccaagaatcaactggcagtataattgaagttctgagtaaaatagattcagaaggaggagtttcagcaaatcatactagtcgtgcaacgtctacagcaacatcaggatttgctggagctattggccagaaactccctccattttcttatgcttatacggaactggaagctattatgtatgcccttggagtgggagcgtcaatcaaggatccaaaagatttgaaatttatttatgaaggaagttctgatttctcctgtttgcccaccttcggagttatcataggtcagaaatctatgatgggtggaggattagcagaaattcctggactttcaatcaactttgcaaaggttcttcatggagagcagtacttagagttatataaaccacttcccagagcaggaaaattaaaatgtgaagcagttgttgctgatgtcctagataaaggatccggtgtagtgattattatggatgtctattcttattctgagaaggaacttatatgccacaatcagttctctctctttcttgttggctctggaggctttggtggaaaacggacatcagacaaagtcaaggtagctgtagccatacctaatagacctcctgatgctgtacttacagataccacctctcttaatcaggctgctttgtaccgcctcagtggagactggaatcccttacacattgatcctaactttgctagtctagcaggttttgacaagcccatattacatggattatgtacatttggattttctgccaggcgtgtgttacagcagtttgcagataatgatgtgtcaagattcaaggcaattaaggctcgttttgcaaaaccagtatatccaggacaaactctacaaactgagatgtggaaggaaggaaacagaattcattttcaaaccaaggtccaagaaactggagacattgtcatttcaaatgcatatgtggatcttgcaccaacatctggtacttcagctaagacaccctctgagggcgggaagcttcagagtacctttgtatttgaggaaataggacgccgcctaaaggatattgggcctgaggtggtgaagaaagtaaatgctgtatttgagtggcatataaccaaaggcggaaatattggggctaagtggactattgacctgaaaagtggttctggaaaagtgtaccaaggccctgcaaaaggtgctgctgatacaacaatcatactttcagatgaagatttcatggaggtggtcctgggcaagcttgaccctcagaaggcattctttagtggcaggctgaaggccagagggaacatcatgctgagccagaaacttcagatgattcttaaagactacgccaagctctgaagggcacactacactattaataaaaatggaatcattaaatactctcttcacccaaatatgcttgattattctgcaaaagtgattagaactaagatgcaggggaaattgcttaacattttcagatatcagataactgcagattttcattttctactaatttttcatgtatcattatttttacaaggaactatatataagctagcacataattatccttctgttcttagatctgtatcttcataataaaaaaattttgcccaagtcctgtttccttagaatttgtgatagcattgataagttgaaaggaaaattaaatcaataaaggcctttgatacctttaaaaattggaa

SEQ ID NO: 447924 - DNA, 2169 bp, Homo sapiens
aaaccggttacgcctgagtgccctggttgttgtgcttgacaatttctgtgtcgactgaggcgcagtcggcgtccagcggctctgcttgttcgtgtgtgtgtcgttgcaggccttattcatgggctcaccgctgaggttcgacgggcgggtggtactggtcaccggcgcgggggcaggattgggccgagcctatgccctggcttttgcagaaagaggagcgttagttgttgatcttgtggaagccctgaagccagagtatgtggcacctcttgtcctttggctttgtcacgagagttgtgaggagaatggtggcttgtttgaggttggagcaggatggattggaaaattacgctgggagcggactcttggagctattgtaagacaaaagaatcacccaatgactcctgaggcagtcaaggctaactggaagaagatctgtgactttgagaatgccagcaagcctcagagtatccaagaatcaactggcagtataattgaagttctgagtaaaatagattcagaaggaggagtttcagcaaatcatactagtcgtgcaacgtctacagcaacatcaggatttgctggagctattggccagaaactccctccattttcttatgcttatacggaactggaagctattatgtatgcccttggagtgggagcgtcaatcaaggatccaaaagatttgaaatttatttatgaaggaagttctgatttctcctgtttgcccaccttcggagttatcataggtcagaaatctatgatgggtggaggattagcagaaattcctggactttcaatcaactttgcaaaggttcttcatggagagcagtacttagagttatataaaccacttcccagagcaggaaaattaaaatgtgaagcagttgttgctgatgtcctagataaaggatccggtgtagtgattattatggatgtctattcttattctgagaaggaacttatatgccacaatcagttctctctctttcttgttggctctggaggctttggtggaaaacggacatcagacaaagtcaaggtagctgtagccatacctaatagacctcctgatgctgtacttacagataccacctctcttaatcaggctgctttgtaccgcctcagtggagactggaatcccttacacattgatcctaactttgctagtctagcaggttttgacaagcccatattacatggattatgtacatttggattttctgccaggcgtgtgttacagcagtttgcagataatgatgtgtcaagattcaaggcaattaaggctcgttttgcaaaaccagtatatccaggacaaactctacaaactgagatgtggaaggaaggaaacagaattcattttcaaaccaaggtccaagaaactggagacattgtcatttcaaatgcatatgtggatcttgcaccaacatctggtacttcagctaagacaccctctgagggcgggaagcttcagagtacctttgtatttgaggaaataggacgccgcctaaaggatattgggcctgaggtggtgaagaaagtaaatgctgtatttgagtggcatataaccaaaggcggaaatattggggctaagtggactattgacctgaaaagtggttctggaaaagtgtaccaaggccctgcaaaaggtgctgctgatacaacaatcatactttcagatgaagatttcatggaggtggtcctgggcaagcttgaccctcagaaggcattctttagtggcaggctgaaggccagagggaacatcatgctgagccagaaacttcagatgattcttaaagactacgccaagctctgaagggcacactacactattaataaaaatggaatcattaaatactctcttcacccaaatatgcttgattattctgcaaaagtgattagaactaagatgcaggggaaattgcttaacattttcagatatcagataactgcagattttcattttctactaatttttcatgtatcattatttttacaaggaactatatataagctagcacataattatccttctgttcttagatctgtatcttcataataaaaaaattttgcccaagtcctgtttccttagaatttgtgatagcattgataagttgaaaggaaaattaaatcaataaaggcctttgatacctttaaaaattggaa

SEQ ID NO: 447925 - DNA, 2313 bp, Homo sapiens
agaagagttagtgtctttgatttagaattaagctaagaagagcttttagtttctgcttcccttgtaacaactggggtaaaaaagaagctgagaaagataggatttgctggcaaagggggcctatgttggtgcttttcttggtgctgcaacgggactgagatataatccacagagttcatttgcggggttcattccaagtgacacgggcagcatgggaacacatgaagaaacagaagtatggaaggattattatgacttcatcagcttcaggaatatatggcaactttggccaggccaattatagtgctgcaaagttgggtcttctgggccttgcaaattctcttgcaattgaaggcaggaaaagcaacattcattgtaacaccattgctcctaatgcgggatcacggatgactcagacagttatgcctgaagatcttgtggaagccctgaagccagagtatgtggcacctcttgtcctttggctttgtcacgagagttgtgaggagaatggtggcttgtttgaggttggagcaggatggattggaaaattacgctgggagcggactcttggagctattgtaagacaaaagaatcacccaatgactcctgaggcagtcaagaatcaactggcagtataattgaagttctgagtaaaatagattcagaaggaggagtttcagcaaatcatactagtcgtgcaacgtctacagcaacatcaggatttgctggagctattggccagaaactccctccattttcttatgcttatacggaactggaagctattatgtatgcccttggagtgggagcgtcaatcaaggatccaaaagatttgaaatttatttatgaaggaagttctgatttctcctgtttgcccaccttcggagttatcataggtcagaaatctatgatgggtggaggattagcagaaattcctggactttcaatcaactttgcaaaggttcttcatggagagcagtacttagagttatataaaccacttcccagagcaggaaaattaaaatgtgaagcagttgttgctgatgtcctagataaaggatccggtgtagtgattattatggatgtctattcttattctgagaaggaacttatatgccacaatcagttctctctctttcttgttggctctggaggctttggtggaaaacggacatcagacaaagtcaaggtagctgtagccatacctaatagacctcctgatgctgtacttacagataccacctctcttaatcaggctgctttgtaccgcctcagtggagactggaatcccttacacattgatcctaactttgctagtctagcaggttttgacaagcccatattacatggattatgtacatttggattttctgccaggcgtgtgttacagcagtttgcagataatgatgtgtcaagattcaaggcaattaaggctcgttttgcaaaaccagtatatccaggacaaactctacaaactgagatgtggaaggaaggaaacagaattcattttcaaaccaaggtccaagaaactggagacattgtcatttcaaatgcatatgtggatcttgcaccaacatctggtacttcagctaagacaccctctgagggcgggaagcttcagagtacctttgtatttgaggaaataggacgccgcctaaaggatattgggcctgaggtggtgaagaaagtaaatgctgtatttgagtggcatataaccaaaggcggaaatattggggctaagtggactattgacctgaaaagtggttctggaaaagtgtaccaaggccctgcaaaaggtgctgctgatacaacaatcatactttcagatgaagatttcatggaggtggtcctgggcaagcttgaccctcagaaggcattctttagtggcaggctgaaggccagagggaacatcatgctgagccagaaacttcagatgattcttaaagactacgccaagctctgaagggcacactacactattaataaaaatggaatcattaaatactctcttcacccaaatatgcttgattattctgcaaaagtgattagaactaagatgcaggggaaattgcttaacattttcagatatcagataactgcagattttcattttctactaatttttcatgtatcattatttttacaaggaactatatataagctagcacataattatccttctgttcttagatctgtatcttcataataaaaaaattttgcccaagtcctgtttccttagaatttgtgatagcattgataagttgaaaggaaaattaaatcaataaaggcctttgatacctttaaaaattggaa

SEQ ID NO: 447926 - DNA, 1527 bp, Homo sapiens
cactgtcttccacagtggttgaactaatttacactcccaccaacagtgtaaaagcgttcttatttctccacatcctctgcagcatctgttgttcaggaacactatttcaaaccatagttttttagttttgctgagcttacagtggaaatgctattaaattctttcacatcttattatagtaatctttggtttttaagacactgtatttcttttacttttctttctaggaaaattaaaatgtgaagcagttgttgctgatgtcctagataaaggatccggtgtagtgattattatggatgtctattcttattctgagaaggaacttatatgccacaatcagttctctctctttcttgttggctctggaggctttggtggaaaacggacatcagacaaagtcaaggtagctgtagccatacctaatagacctcctgatgctgtacttacagataccacctctcttaatcaggctgctttgtaccgcctcagtggagactggaatcccttacacattgatcctaactttgctagtctagcaggttttgacaagcccatattacatggattatgtacatttggattttctgccaggcgtgtgttacagcagtttgcagataatgatgtgtcaagattcaaggcaattaaggctcgttttgcaaaaccagtatatccaggacaaactctacaaactgagatgtggaaggaaggaaacagaattcattttcaaaccaaggtccaagaaactggagacattgtcatttcaaatgcatatgtggatcttgcaccaacatctggtacttcagctaagacaccctctgagggcgggaagcttcagagtacctttgtatttgaggaaataggacgccgcctaaaggatattgggcctgaggtggtgaagaaagtaaatgctgtatttgagtggcatataaccaaaggcggaaatattggggctaagtggactattgacctgaaaagtggttctggaaaagtgtaccaaggccctgcaaaaggtgctgctgatacaacaatcatactttcagatgaagatttcatggaggtggtcctgggcaagcttgaccctcagaaggcattctttagtggcaggctgaaggccagagggaacatcatgctgagccagaaacttcagatgattcttaaagactacgccaagctctgaagggcacactacactattaataaaaatggaatcattaaatactctcttcacccaaatatgcttgattattctgcaaaagtgattagaactaagatgcaggggaaattgcttaacattttcagatatcagataactgcagattttcattttctactaatttttcatgtatcattatttttacaaggaactatatataagctagcacataattatccttctgttcttagatctgtatcttcataataaaaaaattttgcccaagtcctgtttccttagaatttgtgatagcattgataagttgaaaggaaaattaaatcaataaaggcctttgatacctttaaaaattggaa

SEQ ID NO: 447927 - DNA, 2654 bp, Homo sapiens
attccccgcctcctcctgtcccgcagtcggcgtccagcggctctgcttgttcgtgtgtgtgtcgttgcaggccttattcatgggctcaccgctgaggttcgacgggcgggtggtactggtcaccggcgcgggggcaggattgggccgagcctatgccctggcttttgcagaaagaggagcgttagttgttgtgaatgatttgggaggggacttcaaaggagttggtaaaggctccttagctgctgataaggttgttgaagaaataagaaggagaggtggaaaagcagtggccaactatgattcagtggaagaaggagagaaggttgtgaagacagccctggatgcttttggaagaatagatgttgtggtcaacaatgctggaattctgagggatcgttcctttgctaggataagtgatgaagactgggatataatccacagagttcatttgcggggttcattccaagtgacacgggcagcatgggaacacatgaagaaacagaagtatggaaggattattatgacttcatcagcttcaggaatatatggcaactttggccaggccaattatagtgctgcaaagttgggtcttctgggccttgcaaattctcttgcaattgaaggcaggaaaagcaacattcattgtaacaccattgctcctaatgcgggatcacggatgactcagacagttatgcctgaagatcttgtggaagccctgaagccagagtatgtggcacctcttgtcctttggctttgtcacgagagttgtgaggagaatggtggcttgtttgaggttggagcaggatggattggaaaattacgctgggagcggactcttggagctattgtaagacaaaagaatcacccaatgactcctgaggcagtcaaggctaactggaagaagatctgtgactttgagaatgccagcaagcctcagagtatccaagaatcaactggcagtataattgaagttctgagtaaaatagattcagaaggaggagtttcagcaaatcatactagtcgtgcaacgtctacagcaacatcaggatttgctggagctattggccagaaactccctccattttcttatgcttatacggaactggaagctattatgtatgcccttggagtgggagcgtcaatcaaggatccaaaagatttgaaatttatttatgaaggaagttctgatttctcctgtttgcccaccttcggagttatcataggtcagaaatctatgatgggtggaggattagcagaaattcctggactttcaatcaactttgcaaaggttcttcatggagagcagtacttagagttatataaaccacttcccagagcaggaaaattaaaatgtgaagcagttgttgctgatgtcctagataaaggatccggtgtagtgattattatggatgtctattcttattctgagaaggaacttatatgccacaatcagttctctctctttcttgttggctctggaggctttggtggaaaacggacatcagacaaagtcaaggtagctgtagccatacctaatagacctcctgatgctgtacttacagataccacctctcttaatcaggctgctttgtaccgcctcagtggagactggaatcccttacacattgatcctaactttgctagtctagcaggttttgacaagcccatattacatggattatgtacatttggattttctgccaggcgtgtgttacagcagtttgcagataatgatgtgtcaagattcaaggcaattaaggctcgttttgcaaaaccagtatatccaggacaaactctacaaactgagatgtggaaggaaggaaacagaattcattttcaaaccaaggtccaagaaactggagacattgtcatttcaaatgcatatgtggatcttgcaccaacatctggtacttcagctaagacaccctctgagggcgggaagcttcagagtacctttgtatttgaggaaataggacgccgcctaaaggatattgggcctgaggtggtgaagaaagtaaatgctgtatttgagtggcatataaccaaaggcggaaatattggggctaagtggactattgacctgaaaagtggttctggaaaagtgtaccaaggccctgcaaaaggtgctgctgatacaacaatcatactttcagatgaagatttcatggaggtggtcctgggcaagcttgaccctcagaaggcattctttagtggcaggctgaaggccagagggaacatcatgctgagccagaaacttcagatgattcttaaagactacgccaagctctgaagggcacactacactattaataaaaatggaatcattaaatactctcttcacccaaatatgcttgattattctgcaaaagtgattagaactaagatgcaggggaaattgcttaacattttcagatatcagataactgcagattttcattttctactaatttttcatgtatcattatttttacaaggaactatatataagctagcacataattatccttctgttcttagatctgtatcttcataataaaaaaattttgcccaagtcctgtttccttagaatttgtgatagcattgataagttgaaaggaaaattaaatcaataaaggcctggcctcgttggcctcagcggtggagctcgtcggccg

SEQ ID NO: 447928 - DNA, 2579 bp, Homo sapiens
attccccgcctcctcctgtcccgcagtcggcgtccagcggctctgcttgttcgtgtgtgtgtcgttgcaggccttattcatgggctcaccgctgaggttcgacgggcgggtggtactggtcaccggcgcgggggcaggattgggccgagcctatgccctggcttttgcagaaagaggagcgttagttgttgtgaatgatttgggaggggacttcaaaggagttggtaaaggctccttagctgctgataaggttgttgaagaaataagaaggagaggtggaaaagcagtggccaactatgattcagtggaagaaggagagaaggttgtgaagacagccctggatgcttttggaagaatagatgttgtggtcaacaatgctggaattctgagggatcgttcctttgctaggataagtgatgaagactgggatataatccacagagttcatttgcggggttcattccaagtgacacgggcagcatgggaacacatgaagaaacagaagtatggaaggattattatgacttcatcagcttcaggaatatatggcaactttggccaggccaattatagtgctgcaaagttgggtcttctgggccttgcaaattctcttgcaattgaaggcaggaaaagcaacattcattgtaacaccattgctcctaatgcgggatcacggatgactcagacagttatgcctgaagatcttgtggaagccctgaagccagagtatgtggcacctcttgtcctttggctttgtcacgagagttgtgaggagaatggtggcttgtttgaggttggagcaggatggattggaaaattacgctgggagcggactcttggagctattgtaagacaaaagaatcacccaatgactcctgaggcagtcaaggctaactggaagaagatctgtgactttgagaatgccagcaagcctcagagtatccaagaatcaactggcagtataattgaagttctgagtaaaatagattcagaaggaggagtttcagcaaatcatactagtcgtgcaacgtctacagcaacatcaggatttgctggagctattggccagaaactccctccattttcttatgcttatacggaactggaagctattatgtatgcccttggagtgggagcgtcaatcaaggatccaaaagatttgaaatttatttatgaaggaagttctgatttctcctgtttgcccaccttcggagttatcataggtcagaaatctatgatgggtggaggattagcagaaattcctggactttcaatcaactttgcaaaggttcttcatggagagcagtacttagagttatataaaccacttcccagagcaggaaaattaaaatgtgaagcagttgttgctgatgtcctagataaaggatccggtgtagtgattattatggatgtctattcttattctgagaaggaacttatatgccacaatcagttctctctctttcttgttggctctggaggctttggtggaaaacggacatcagacaaagtcaaggtagctgtagccatacctaatagacctcctgatgctgtacttacagataccacctctcttaatcaggctgctttgtaccgcctcagtggagactggaatcccttacacattgatcctaactttgctagtctagcaggttttgacaagcccatattacatggattatgtacatttggattttctgccaggcgtgtgttacagcagtttgcagataatgatgtgtcaagattcaaggcaattaaggctcgttttgcaaaaccagtatatccaggacaaactctacaaactgagatgtggaaggaaggaaacagaattcattttcaaaccaaggtccaagaaactggagacattgtcatttcaaatgcatatgtggatcttgcaccaacatctggtacttcagctaagacaccctctgagggcgggaagcttcagagtacctttgtatttgaggaaataggacgccgcctaaaggatattgggcctgaggtggtgaagaaagtaaatgctgtatttgagtggcatataaccaaaggcggaaatattggggctaagtggactattgacctgaaaagtggttctggaaaagtgtaccagtggtcctgggcaagcttgaccctcagaaggcattctttagtggcaggctgaaggccagagggaacatcatgctgagccagaaacttcagatgattcttaaagactacgccaagctctgaagggcacactacactattaataaaaatggaatcattaaatactctcttcacccaaatatgcttgattattctgcaaaagtgattagaactaagatgcaggggaaattgcttaacattttcagatatcagataactgcagattttcattttctactaatttttcatgtatcattatttttacaaggaactatatataagctagcacataattatccttctgttcttagatctgtatcttcataataaaaaaattttgcccaagtcctgtttccttagaatttgtgatagcattgataagttgaaaggaaaattaaatcaataaaggcctttgatacctttaaaaattggaa

SEQ ID NO: 447929 - DNA, 2642 bp, Homo sapiens
  misc_feature (2057)..(2057): n is a, c, g, or t
  misc_feature (2069)..(2069): n is a, c, g, or t
  misc_feature (2074)..(2074): n is a, c, g, or t
  misc_feature (2087)..(2087): n is a, c, g, or t
  misc_feature (2089)..(2089): n is a, c, g, or t
  misc_feature (2105)..(2105): n is a, c, g, or t
  misc_feature (2121)..(2122): n is a, c, g, or t
  misc_feature (2140)..(2141): n is a, c, g, or t
  misc_feature (2144)..(2145): n is a, c, g, or t
  misc_feature (2149)..(2150): n is a, c, g, or t
  misc_feature (2173)..(2173): n is a, c, g, or t
  misc_feature (2186)..(2186): n is a, c, g, or t
  misc_feature (2196)..(2196): n is a, c, g, or t
  misc_feature (2198)..(2198): n is a, c, g, or t
  misc_feature (2201)..(2201): n is a, c, g, or t
attccccgcctcctcctgtcccgcagtcggcgtccagcggctctgcttgttcgtgtgtgtgtcgttgcaggccttattcatgggctcaccgctgaggttcgacgggcgggtggtactggtcaccggcgcgggggcaggattgggccgagcctatgccctggcttttgcagaaagaggagcgttagttgttgtgaatgatttgggaggggacttcaaaggagttggtaaaggctccttagctgctgataaggttgttgaagaaataagaaggagaggtggaaaagcagtggccaactatgattcagtggaagaaggagagaaggttgtgaagacagccctggatgcttttggaagaatagatgttgtggtcaacaatgctggaattctgagggatcgttcctttgctaggataagtgatgaagactgggatataatccacagagttcatttgcggggttcattccaagtgacacgggcagcatgggaacacatgaagaaacagaagtatggaaggattattatgacttcatcagcttcaggaatatatggcaactttggccaggccaattatagtgctgcaaagttgggtcttctgggccttgcaaattctcttgcaattgaaggcaggaaaagcaacattcattgtaacaccattgctcctaatgcgggatcacggatgactcagacagttatgcctgaagatcttgtggaagccctgaagccagagtatgtggcacctcttgtcctttggctttgtcacgagagttgtgaggagaatggtggcttgtttgaggttggagcaggatggattggaaaattacgctgggagcggactcttggagctattgtaagacaaaagaatcacccaatgactcctgaggcagtcaaggctaactggaagaagatctgtgactttgagaatgccagcaagcctcagagtatccaagaatcaactggcagtataattgaagttctgagtaaaatagattcagaaggaggagtttcagcaaatcatactagtcgtgcaacgtctacagcaacatcaggatttgctggagctattggccagaaactccctccattttcttatgcttatacggaactggaagctattatgtatgcccttggagtgggagcgtcaatcaaggatccaaaagatttgaaatttatttatgaaggaagttctgatttctcctgtttgcccaccttcggagttatcataggtcagaaatctatgatgggtggaggattagcagaaattcctggactttcaatcaactttgcaaaggttcttcatggagagcagtacttagagttatataaaccacttcccagagcaggaaaattaaaatgtgaagcagttgttgctgatgtcctagataaaggatccggtgtagtgattattatggatgtctattcttattctgagaaggaacttatatgccacaatcagttctctctctttcttgttggctctggaggctttggtggaaaacggacatcagacaaagtcaaggtagctgtagccatacctaatagacctcctgatgctgtacttacagataccacctctcttaatcaggctgctttgtaccgcctcagtggagactggaatcccttacacattgatcctaactttgctagtctagcaggttttgacaagcccatattacatggattatgtacatttggattttctgccaggcgtgtgttacagcagtttgcagataatgatgtgtcaagattcaaggcaattaaggctcgttttgcaaaaccagtatatccaggacaaactctacaaactgagatgtggaaggaaggaaacagaattcattttcaaaccaaggtccaagaaactggagacattgtcatttcaaatgcatatgtggatcttgcaccaacatctggtacttcagctaagacaccctctgagggcgggaagcttcagagtacctttgtatttgaggaaataggacgccgcctaaaggatattgggcctgaggtggtgggggaggtgggggcggggggtggggggcggggtagccgggggcgggggnggggggctgggngggcngttggcctggaangnggggctggaagggggngccagggccctgcagnnggggcggcgggtgcggcnngcnnactnncgggtggggatgggcatgggggngggcgctgggcangctgggcccncnggnggcattctttagtggcaggctgaaggccagagggaacatcatgctgagccagaaacttcagatgattcttaaagactacgccaagctctgaagggcacactacactattaataaaaatggaatcattaaatactctcttcacccaaatatgcttgattattctgcaaaagtgattagaactaagatgcaggggaaattgcttaacattttcagatatcagataactgcagattttcattttctactaatttttcatgtatcattatttttacaaggaactatatataagctagcacataattatccttctgttcttagatctgtatcttcataataaaaaaattttgcccaagtcctgtttccttagaatttgtgatagcattgataagttgaaaggaaaattaaatcaataaaggcctttgatacctttaaaaattggaa

SEQ ID NO: 447930 - DNA, 2377 bp, Homo sapiens
  misc_feature (2342)..(2342): n is a, c, g, or t
attccccgcctcctcctgtcccgcagtcggcgtccagcggctctgcttgttcgtgtgtgtgtcgttgcaggccttattcatgggctcaccgctgaggttcgacgggcgggtggtactggtcaccggcgcgggggcaggattgggccgagcctatgccctggcttttgcagaaagaggagcgttagttgttgtgaatgatttgggaggggacttcaaaggagttggtaaaggctccttagctgctgataaggttgttgaagaaataagaaggagaggtggaaaagcagtggccaactatgattcagtggaagaaggagagaaggttgtgaagacagccctggatgcttttggaagaatagatgttgtggtcaacaatgctggaattctgagggatcgttcctttgctaggataagtgatgaagactgggatataatccacagagttcatttgcggggttcattccaagtgacacgggcagcatgggaacacatgaagaaacagaagtatggaaggattattatgacttcatcagcttcaggaatatatggcaactttggccaggccaattatagtgctgcaaagttgggtcttctgggccttgcaaattctcttgcaattgaaggcaggaaaagcaacattcattgtaacaccattgctcctaatgcgggatcacggatgactcagacagttatgcctgaagatcttgtggaagccctgaagccagagtatgtggcacctcttgtcctttggctttgtcacgagagttgtgaggagaatggtggcttgtttgaggttggagcaggatggattggaaaattacgctgggagcggactcttggagctattgtaagacaaaagaatcacccaatgactcctgaggcagtcaaggctaactggaagaagatctgtgactttgagaatgccagcaagcctcagagtatccaagaatcaactggcagtataattgaagttctgagtaaaatagattcagaaggaggagtttcagcaaatcatactagtcgtgcaacgtctacagcaacatcaggatttgctggagctattggccagaaactccctccattttcttatgcttatacggaactggaagctattatgtatgcccttggagtgggagcgtcaatcaaggatccaaaagatttgaaatttatttatgaaggaagttctgatttctcctgtttgcccaccttcggagttatcataggtcagaaatctatgatgggtggaggattagcagaaattcctggactttcaatcaactttgcaaaggttcttcatggagagcagtacttagagttatataaaccacttcccagagcaggaaaattaaaatgtgaagcagttgttgctgatgtcctagataaaggatccggtgtagtgattattatggatgtctattcttattctgagaaggaacttatatgccacaatcagttctctctctttcttgttggctctggaggctttggtggaaaacggacatcagacaaagtcaaggtagctgtagccatacctaatagacctcctgatgctgtacttacagataccacctctcttaatcaggctgctttgtaccgcctcagtggagactggaatcccttacacattgatcctaactttgctagtctagcaggttttgacaagcccatattacatggattatgtacatttggattttctgccaggcgtgtgttacagcagtttgcagataatgatgtgtcaagattcaaggcaattaaggctcgttttgcaaaaccagtatatccaggacaaactctacaaactgagatgtggaaggaaggaaacagaattcattttcaaaccaaggtccaagaaactggagacattgtcatttcaaatgcatatgtggatcttgcaccaacatctggtacttcagctaagacaccctctgagggcgggaagcttcagagtacctttgtatttgaggaaataggacgccgcctaaaggatattgggcctgaggtggtgaagaaagtaaatgctgtatttgagtggcatataaccaaaggcggaaatattggggctaagtggactattgacctgaaaagtggttctggaaaagtgtaccaaggccctgcaaaaggtgctgctgatacaacaatcatactttcagatgaagatttcatggaggtggtcctgggcaagcttgaccctcagaaggcattctttagtggcaggctgaaggccagagggaacatcatgctgagccagaaacttcagatgattcttaaagactacgccaagctctgaagggcacactacactattaataaaaatggaatcatgcgcgccagcctccctnctcttctaaatagcacgcacaactaaccctcgcac

SEQ ID NO: 447931 - DNA, 1925 bp, Homo sapiens
attccccgcctcctcctgtcccgcagtcggcgtccagcggctctgcttgttcgtgtgtgtgtcgttgcaggccttattcatgggctcaccgctgaggttcgacgggcgggtggtactggtcaccggcgcgggggcaggattgggccgagcctatgccctggcttttgcagaaagaggagcgttagttgttgtgaatgatttgggaggggacttcaaaggagttggtaaaggctccttagctgctgataaggttgttgaagaaataagaaggagaggtggaaaagcagtggccaactatgattcagtggaagaaggagagaaggttgtgaagacagccctggatgcttttggaagaatagatgttgtggtcaacaatgctggaattctgagggatcgttcctttgctaggataagtgatgaagactgggatataatccacagagttcatttgcggggttcattccaagtgacacgggcagcatgggaacacatgaagaaacagaagtatggaaggattattatgacttcatcagcttcaggaatatatggcaactttggccaggccaattatagtgctgcaaagttgggtcttctgggccttgcaaattctcttgcaattgaaggcaggaaaagcaacattcattgtaacaccattgctcctaatgcgggatcacggatgactcagacagttatgcctgaagatcttgtggaagccctgaagccagagtatgtggcacctcttgtcctttggctttgtcacgagagttgtgaggagaatggtggcttgtttgaggttggagcaggatggattggaaaattacgctgggagcggactcttggagctattgtaagacaaaagaatcacccaatgactcctgaggcagtcaaggctaactggaagaagatctgtgactttgagaatgccagcaagcctcagagtatccaagaatcaactggcagtataattgaagttctgagtaaaatagattcagaaggaggagtttcagcaaatcatactagtcgtgcaacgtctacagcaacatcaggatttgctggagctattggccagaaactccctccattttcttatgcttatacggaactggaagctattatgtatgcccttggagtgggagcgtcaatcaaggatccaaaagatttgaaatttatttatgaaggaagttctgatttctcctgtttgcccaccttcggagttatcataggtcagaaatctatgatgggtggaggattagcagaaattcctggactttcaatcaactttgcaaaggttcttcatggagagcagtacttagagttatataaaccacttcccagagcaggaaaattaaaatgtgaagcagttgttgctgatgtcctagataaaggatccggtgtagtgattattatggatgtctattcttattctgagaaggaacttatatgccacaatcagttctctctctttcttgttggctctggaggctttggtggaaaacggacatcagacaaagtcaaggtagctgtagccatacctaatagacctcctgatgctgtacttacagataccacctctcttaatcaggctgctttgtaccgcctcagtggagactggaatcccttacacattgatcctaactttgctagtctagcaggttttgacaagcccatattacatggattatgtacatttggattttctgccaggcgtgtgttacagcagtttgcagataatgatgtgtcaagattcaaggcaattaaggctcgttttgcaaaaccagtatatccaggacaaactctacaaactgagatgtggaaggaaggaaacagaattcattttcaaaccaaggtcctgcaactgggacgttgtcatttcaaacgcatatgtgcatcgataacaccggtccggctcgattcgtactctgttc

SEQ ID NO: 447932 - DNA, 934 bp, Homo sapiens
tgtaatgaattctgccactaagagaaaatgaatacaatctctttcttcacttctgaaataagattagctgtgatcttataggtgtctataaactcaaggtgatggtggtggttgcagaccatgacctgagccactacagaactggaagttccacttctttacctcaaatttctgtattcttgtatttctatattttgctttttttctaaatgacagataatgtataattgatagatagaatatgtgtagaataagtgccacattaacatggaaactatagaaatgtctgcattttacttggtttattttaccctcattttgttggagagaaaaagatacacattggtttcttcctatttttcccagctattgacctgaaaagtggttctggaaaagtgtaccaaggccctgcaaaaggtgctgctgatacaacaatcatactttcagatgaagatttcatggaggtggtcctgggcaagcttgaccctcagaaggcattctttagtggcaggctgaaggccagagggaacatcatgctgagccagaaacttcagatgattcttaaagactacgccaagctctgaagggcacactacactattaataaaaatggaatcattaaatactctcttcacccaaatatgcttgattattctgcaaaagtgattagaactaagatgcaggggaaattgcttaacattttcagatatcagataactgcagattttcattttctactaatttttcatgtatcattatttttacaaggaactatatataagctagcacataattatccttctgttcttagatctgtatcttcataataaaaaaattttgcccaagtcctgtttccttagaatttgtgatagcattgataagttgaaaggaaaattaaatcaataaaggcctttgatacctttaaaaattggaa

SEQ ID NO: 447933 - DNA, 1525 bp, Homo sapiens
attccccgcctcctcctgtcccgcagtcggcgtccagcggctctgcttgttcgtgtgtgtgtcgttgcaggccttattcatgggctcaccgctgaggttcgacgggcgggtggtactggtcaccggcgcgggggcaggattgggccgagcctatgccctggcttttgcagaaagaggagcgttagttgttgtgaatgatttgggaggggacttcaaaggagttggtaaaggctccttagctgctgataaggttgttgaagaaataagaaggagaggtggaaaagcagtggccaactatgattcagtggaagaaggagagaaggttgtgaagacagccctggatgcttttggaagaatagatgttgtggtcaacaatgctggaattctgagggatcgttcctttgctaggataagtgatgaagactgggatataatccacagagttcatttgcggggttcattccaagtgacacgggcagcatgggaacacatgaagaaacagaagtatggaaggattattatgacttcatcagcttcaggaatatatggcaactttggccaggccaattatagtgctgcaaagttgggtcttctgggccttgcaaattctcttgcaattgaaggcaggaaaagcaacattcattgtaacaccattgctcctaatgcgggatcacggatgactcagacagttatgcctgaagatcttgtggaagccctgaagccagagtatgtggcacctcttgtcctttggctttgtcacgagagttgtgaggagaatggtggcttgtttgaggttggagcaggatggattggaaaattacgctgggagcggactcttggagctattgtaagacaaaagaatcacccaatgactcctgaggcagtcaaggctaactggaagaagatctgtgactttgagaatgccagcaagcctcagagtatccaagaatcaactggcagtataattgaagttctgagtaaaatagattcagaaggaggagtttcagcaaatcatactagtcgtgcaacgtctacagcaacatcaggatttgctggagctattggccagaaactccctccattttcttatgcttatacggaactggaagctattatgtatgcccttggagtgggagcgtcaatcaaggatccaaaagatttgaaatttatttatgaaggaagttctgatttctcctgtttgcccaccttcggagttatcataggtcagaaatctatgatgggtggaggattagcagaaattcctggactttcaatcaactttgcaaaggtatgcctaataaaaaacctttattttgcttttctatttctgtaaatattattcattaatgtcatatcttatatatatgtgtgtggtgccagtcctgggtgtccagtggccccatacccttgcgttttagtaaaatgctgcccccattaccaccctggtctgtgcactttcggcacttggaatttggccattcttccaatccccaatgggggcaagccatggagcccttaaactttt

SEQ ID NO: 447934 - DNA, 494 bp, Homo sapiens
  misc_feature (52)..(52): n is a, c, g, or t
acaacacacaaacaacccaagcaaaacaacaaaaccccttttaggatacttntagcattctttagtggcaggctgaaggccagagggaacatcatgctgagccagaaacttcagatgattcttaaagactacgccaagctctgaagggcacactacactattaataaaaatggaatcattaaatactctcttcacccaaatatgcttgattattctgcaaaagtgattagaactaagatgcaggggaaattgcttaacattttcagatatcagataactgcagattttcattttctactaatttttcatgtatcattatttttacaaggaactatatataagctagcacataattatccttctgttcttagatctgtatcttcataataaaaaaattttgcccaagtcctgtttccttagaatttgtgatagcattgataagttgaaaggaaaattaaatcaataaaggcctttgatacctttaaaaattggaa

SEQ ID NO: 447935 - DNA, 453 bp, Homo sapiens
  misc_feature (346)..(346): n is a, c, g, or t
aaaccggttacgcctgagtgccctggttgttgtgcttgacaatttctgtgtcgactgaggcgcagtcggcgtccagcggctctgcttgttcgtgtgtgtgtcgttgcaggccttattcatgggctcaccgctgaggttcgacgggcgggtggtactggtcaccggcgcgggggcagattgggccgagcctatgccctggcttttgcaaaaaataggtcaggcctgcaatgcaggtagtgagaagcagaaagtgagaaagaaaagcagtgtaaagaccgtctcctcctcagcaacaacagtagcagaccccgttttcttaatgctttctatactccaagcactctgntaggcagtctgtatgcattatcttatttaagcttcatgacaagtgtaaaagctacaaatcatcatttgattttttaggtaacacttcataaagggctctctatagca

SEQ ID NO: 447936 - DNA, 608 bp, Homo sapiens
tcaaaccatagttttttagttttgctgagcttacagtggaaatgctattaaattctttcacatcttattatagtaatctttggtttttaagacactgtatttcttttacttttctttctaggaaaattaaaatgtgaagcagttgttgctgatgtcctagataaaggatccggtgtagtgattattatggatggtaatttatttacaattcttataataatattgttagattgataggctttgtgtatgacataatacttcaccatagaagttgattaataagttagtatttgtcttccaatttgttagaaaacaagataagcatttttaaactctttaagaaaaataaagaaggagggggagaagcatttatttctgggcttaggctgggaagggtgaggcatttcattggatttaagacaacataaccaaagcacaaaggtgataaatgtggcttgtattgataatgtagaggagaattaagcttgctggagtatgtttttggcaggaaggaatattagatagtcctcacttgacaattaggctgtgttttaggtattctttaatgtgttagctatttggaacttggaacatatttgaacactaaa

SEQ ID NO: 447937 - DNA, 352 bp, Homo sapiens
attattatgacttcatcagcttcaggaatatatggcaactttggccaggccaattatagtgctgcaaagttgggtcttctgggccttgcaaattctcttgcaattgaaggcaggaaaagcaacattcattgtaacaccattgctcctaatgcgggatcacggatgactcagacagttatgcctgaaggtaagtaagcaagcttatatttttcagtgctgttacttacaaacctatgtggaatgagctttacaaaagtatttaattttctgaatacttaaaaattattatttttttcaatttcgaaagcattatctgtaaattgtgttcattgtggaaaatttagaaaagcac

SEQ ID NO: 447938 - DNA, 152 bp, Homo sapiens
atgatttgggaggggacttcaaaggagttggtaaaggctccttagctgctgataaggttgttgaagaaataagaaggagaggtggaaaagcagtggccaactatggtatggtatttgagagaactatactatttattttccttcaactaatg

SEQ ID NO: 447939 - DNA, 768 bp, Homo sapiens
tcggcgtccagcggctctgcttgttcgtgtgtgtgtcgttgcaggccttattcatgggctcaccgctgaggttcgacgggcgggtggtactggtcaccggcgcgggggcaggtgagcatgcgaaggttggaggccgcgccccttgctgaggcgcagctggctgctcttttcgggccggcatacgcgcgcagccgcagctgaggtcaccccgctgaggtggtggggaggggaatggttattcttgaggcaccgcatctcttgaggaggaaagagccggaaacacctggtctctcaagcaggtacagcccgcttctccccagcaccccggtgtgggcttcccaaggtcctgcctgagaggagaggccaggctgggctgctgattgcaaaactgggtgaaagttctccctgacccttatctgtgggcatcgattgttactcttcctgcaattaactctcttagatctttgcctagtcttttaaaggactgaaaagccgcgaggggcgggggctggaattcgccccctgaagcgcagagatgtcagctcctgaaaagtcattcggtcgttcagtgtttgtttccctctgtcgtaagattttaagttcgtgagaggaccttctttaaagagggcgtctgataagagcccttccccgttggagtttgtatgcttagcaagtcacaatctgttctcgaaatccactggagtcttggcagaggttgtaagctcaaatgcgcacaggggtcaggcgtatgatggagaaagaaaatgg

SEQ ID NO: 447940 - DNA, 2679 bp, Homo sapiens
aaaccggttacgcctgagtgccctggttgttgtgcttgacaatttctgtgtcgactgaggcgcagtcggcgtccagcggctctgcttgttcgtgtgtgtgtcgttgcaggccttattcatgggctcaccgctgaggttcgacgggcgggtggtactggtcaccggcgcgggggcaggattgggccgagcctatgccctggcttttgcagaaagaggagcgttagttgttgtgaatgatttgggaggggacttcaaaggagttggtaaaggctccttagctgctgataaggttgttgaagaaataagaaggagaggtggaaaagcagtggccaactatgattcagtggaagaaggagagaaggttgtgaagacagccctggatgcttttggaagaatagatgttgtggtcaacaatgctggaattctgagggatcgttcctttgctaggataagtgatgaagactgggatataatccacagagttcatttgcggggttcattccaagtgacacgggcagcatgggaacacatgaagaaacagaagtatggaaggattattatgacttcatcagcttcaggaatatatggcaactttggccaggccaattatagtgctgcaaagttgggtcttctgggccttgcaaattctcttgcaattgaaggcaggaaaagcaacattcattgtaacaccattgctcctaatgcgggatcacggatgactcagacagttatgcctgaagatcttgtggaagccctgaagccagagtatgtggcacctcttgtcctttggctttgtcacgagagttgtgaggagaatggtggcttgtttgaggttggagcaggatggattggaaaattacgctgggagcggactcttggagctattgtaagacaaaagaatcacccaatgactcctgaggcagtcaaggctaactggaagaagatctgtgactttgagaatgccagcaagcctcagagtatccaagaatcaactggcagtataattgaagttctgagtaaaatagattcagaaggaggagtttcagcaaatcatactagtcgtgcaacgtctacagcaacatcaggatttgctggagctattggccagaaactccctccattttcttatgcttatacggaactggaagctattatgtatgcccttggagtgggagcgtcaatcaaggatccaaaagatttgaaatttatttatgaaggaagttctgatttctcctgtttgcccaccttcggagttatcataggtcagaaatctatgatgggtggaggattagcagaaattcctggactttcaatcaactttgcaaaggttcttcatggagagcagtacttagagttatataaaccacttcccagagcaggaaaattaaaatgtgaagcagttgttgctgatgtcctagataaaggatccggtgtagtgattattatggatgtctattcttattctgagaaggaacttatatgccacaatcagttctctctctttcttgttggctctggaggctttggtggaaaacggacatcagacaaagtcaaggtagctgtagccatacctaatagacctcctgatgctgtacttacagataccacctctcttaatcaggctgctttgtaccgcctcagtggagactggaatcccttacacattgatcctaactttgctagtctagcaggttttgacaagcccatattacatggattatgtacatttggattttctgccaggcgtgtgttacagcagtttgcagataatgatgtgtcaagattcaaggcaattaaggctcgttttgcaaaaccagtatatccaggacaaactctacaaactgagatgtggaaggaaggaaacagaattcattttcaaaccaaggtccaagaaactggagacattgtcatttcaaatgcatatgtggatcttgcaccaacatctggtacttcagctaagacaccctctgagggcgggaagcttcagagtacctttgtatttgaggaaataggacgccgcctaaaggatattgggcctgaggtggtgaagaaagtaaatgctgtatttgagtggcatataaccaaaggcggaaatattggggctaagtggactattgacctgaaaagtggttctggaaaagtgtaccaaggccctgcaaaaggtgctgctgatacaacaatcatactttcagatgaagatttcatggaggtggtcctgggcaagcttgaccctcagaaggcattctttagtggcaggctgaaggccagagggaacatcatgctgagccagaaacttcagatgattcttaaagactacgccaagctctgaagggcacactacactattaataaaaatggaatcattaaatactctcttcacccaaatatgcttgattattctgcaaaagtgattagaactaagatgcaggggaaattgcttaacattttcagatatcagataactgcagattttcattttctactaatttttcatgtatcattatttttacaaggaactatatataagctagcacataattatccttctgttcttagatctgtatcttcataataaaaaaattttgcccaagtcctgtttccttagaatttgtgatagcattgataagttgaaaggaaaattaaatcaataaaggcctttgatacctttaaaaattggaa

SEQ ID NO: 447941 - DNA, 2640 bp, Homo sapiens
attccccgcctcctcctgtcccgcagtcggcgtccagcggctctgcttgttcgtgtgtgtgtcgttgcaggccttattcatgggctcaccgctgaggttcgacgggcgggtggtactggtcaccggcgcgggggcaggattgggccgagcctatgccctggcttttgcagaaagaggagcgttagttgttgtgaatgatttgggaggggacttcaaaggagttggtaaaggctccttagctgctgataaggttgttgaagaaataagaaggagaggtggaaaagcagtggccaactatgattcagtggaagaaggagagaaggttgtgaagacagccctggatgcttttggaagaatagatgttgtggtcaacaatgctggaattctgagggatcgttcctttgctaggataagtgatgaagactgggatataatccacagagttcatttgcggggttcattccaagtgacacgggcagcatgggaacacatgaagaaacagaagtatggaaggattattatgacttcatcagcttcaggaatatatggcaactttggccaggccaattatagtgctgcaaagttgggtcttctgggccttgcaaattctcttgcaattgaaggcaggaaaagcaacattcattgtaacaccattgctcctaatgcgggatcacggatgactcagacagttatgcctgaagatcttgtggaagccctgaagccagagtatgtggcacctcttgtcctttggctttgtcacgagagttgtgaggagaatggtggcttgtttgaggttggagcaggatggattggaaaattacgctgggagcggactcttggagctattgtaagacaaaagaatcacccaatgactcctgaggcagtcaaggctaactggaagaagatctgtgactttgagaatgccagcaagcctcagagtatccaagaatcaactggcagtataattgaagttctgagtaaaatagattcagaaggaggagtttcagcaaatcatactagtcgtgcaacgtctacagcaacatcaggatttgctggagctattggccagaaactccctccattttcttatgcttatacggaactggaagctattatgtatgcccttggagtgggagcgtcaatcaaggatccaaaagatttgaaatttatttatgaaggaagttctgatttctcctgtttgcccaccttcggagttatcataggtcagaaatctatgatgggtggaggattagcagaaattcctggactttcaatcaactttgcaaaggttcttcatggagagcagtacttagagttatataaaccacttcccagagcaggaaaattaaaatgtgaagcagttgttgctgatgtcctagataaaggatccggtgtagtgattattatggatgtctattcttattctgagaaggaacttatatgccacaatcagttctctctctttcttgttggctctggaggctttggtggaaaacggacatcagacaaagtcaaggtagctgtagccatacctaatagacctcctgatgctgtacttacagataccacctctcttaatcaggctgctttgtaccgcctcagtggagactggaatcccttacacattgatcctaactttgctagtctagcaggttttgacaagcccatattacatggattatgtacatttggattttctgccaggcgtgtgttacagcagtttgcagataatgatgtgtcaagattcaaggcaattaaggctcgttttgcaaaaccagtatatccaggacaaactctacaaactgagatgtggaaggaaggaaacagaattcattttcaaaccaaggtccaagaaactggagacattgtcatttcaaatgcatatgtggatcttgcaccaacatctggtacttcagctaagacaccctctgagggcgggaagcttcagagtacctttgtatttgaggaaataggacgccgcctaaaggatattgggcctgaggtggtgaagaaagtaaatgctgtatttgagtggcatataaccaaaggcggaaatattggggctaagtggactattgacctgaaaagtggttctggaaaagtgtaccaaggccctgcaaaaggtgctgctgatacaacaatcatactttcagatgaagatttcatggaggtggtcctgggcaagcttgaccctcagaaggcattctttagtggcaggctgaaggccagagggaacatcatgctgagccagaaacttcagatgattcttaaagactacgccaagctctgaagggcacactacactattaataaaaatggaatcattaaatactctcttcacccaaatatgcttgattattctgcaaaagtgattagaactaagatgcaggggaaattgcttaacattttcagatatcagataactgcagattttcattttctactaatttttcatgtatcattatttttacaaggaactatatataagctagcacataattatccttctgttcttagatctgtatcttcataataaaaaaattttgcccaagtcctgtttccttagaatttgtgatagcattgataagttgaaaggaaaattaaatcaataaaggcctttgatacctttaaaaattggaa

SEQ ID NO: 447942 - DNA, 2625 bp, Homo sapiens
aaaccggttacgcctgagtgccctggttgttgtgcttgacaatttctgtgtcgactgaggcgcagtcggcgtccagcggctctgcttgttcgtgtgtgtgtcgttgcaggccttattcatgggctcaccgctgaggttcgacgggcgggtggtactggtcaccggcgcgggggcaggattgggccgagcctatgccctggcttttgcagaaagaggagcgttagttgttgtgaatgatttgggaggggacttcaaaggagttggtaaaggctccttagctgctgataaggttgttgaagaaataagaaggagaggtggagccctggatgcttttggaagaatagatgttgtggtcaacaatgctggaattctgagggatcgttcctttgctaggataagtgatgaagactgggatataatccacagagttcatttgcggggttcattccaagtgacacgggcagcatgggaacacatgaagaaacagaagtatggaaggattattatgacttcatcagcttcaggaatatatggcaactttggccaggccaattatagtgctgcaaagttgggtcttctgggccttgcaaattctcttgcaattgaaggcaggaaaagcaacattcattgtaacaccattgctcctaatgcgggatcacggatgactcagacagttatgcctgaagatcttgtggaagccctgaagccagagtatgtggcacctcttgtcctttggctttgtcacgagagttgtgaggagaatggtggcttgtttgaggttggagcaggatggattggaaaattacgctgggagcggactcttggagctattgtaagacaaaagaatcacccaatgactcctgaggcagtcaaggctaactggaagaagatctgtgactttgagaatgccagcaagcctcagagtatccaagaatcaactggcagtataattgaagttctgagtaaaatagattcagaaggaggagtttcagcaaatcatactagtcgtgcaacgtctacagcaacatcaggatttgctggagctattggccagaaactccctccattttcttatgcttatacggaactggaagctattatgtatgcccttggagtgggagcgtcaatcaaggatccaaaagatttgaaatttatttatgaaggaagttctgatttctcctgtttgcccaccttcggagttatcataggtcagaaatctatgatgggtggaggattagcagaaattcctggactttcaatcaactttgcaaaggttcttcatggagagcagtacttagagttatataaaccacttcccagagcaggaaaattaaaatgtgaagcagttgttgctgatgtcctagataaaggatccggtgtagtgattattatggatgtctattcttattctgagaaggaacttatatgccacaatcagttctctctctttcttgttggctctggaggctttggtggaaaacggacatcagacaaagtcaaggtagctgtagccatacctaatagacctcctgatgctgtacttacagataccacctctcttaatcaggctgctttgtaccgcctcagtggagactggaatcccttacacattgatcctaactttgctagtctagcaggttttgacaagcccatattacatggattatgtacatttggattttctgccaggcgtgtgttacagcagtttgcagataatgatgtgtcaagattcaaggcaattaaggctcgttttgcaaaaccagtatatccaggacaaactctacaaactgagatgtggaaggaaggaaacagaattcattttcaaaccaaggtccaagaaactggagacattgtcatttcaaatgcatatgtggatcttgcaccaacatctggtacttcagctaagacaccctctgagggcgggaagcttcagagtacctttgtatttgaggaaataggacgccgcctaaaggatattgggcctgaggtggtgaagaaagtaaatgctgtatttgagtggcatataaccaaaggcggaaatattggggctaagtggactattgacctgaaaagtggttctggaaaagtgtaccaaggccctgcaaaaggtgctgctgatacaacaatcatactttcagatgaagatttcatggaggtggtcctgggcaagcttgaccctcagaaggcattctttagtggcaggctgaaggccagagggaacatcatgctgagccagaaacttcagatgattcttaaagactacgccaagctctgaagggcacactacactattaataaaaatggaatcattaaatactctcttcacccaaatatgcttgattattctgcaaaagtgattagaactaagatgcaggggaaattgcttaacattttcagatatcagataactgcagattttcattttctactaatttttcatgtatcattatttttacaaggaactatatataagctagcacataattatccttctgttcttagatctgtatcttcataataaaaaaattttgcccaagtcctgtttccttagaatttgtgatagcattgataagttgaaaggaaaattaaatcaataaaggcctttgatacctttaaaaattggaa

SEQ ID NO: 447943 - DNA, 2586 bp, Homo sapiens
attccccgcctcctcctgtcccgcagtcggcgtccagcggctctgcttgttcgtgtgtgtgtcgttgcaggccttattcatgggctcaccgctgaggttcgacgggcgggtggtactggtcaccggcgcgggggcaggattgggccgagcctatgccctggcttttgcagaaagaggagcgttagttgttgtgaatgatttgggaggggacttcaaaggagttggtaaaggctccttagctgctgataaggttgttgaagaaataagaaggagaggtggaaaagcagtggccaactatgattcagtggaagaaggagagaaggttgtgaagacagccctggatgcttttggaagaatagatgttgtggtcaacaatgctggaattctgagggatcgttcctttgctaggataagtgatgaagactgggatataatccacagagttcatttgcggggttcattccaagtgacacgggcagcatgggaacacatgaagaaacagaagtatggaaggattattatgacttcatcagcttcaggaatatatggcaactttggccaggccaattatagtgctgcaaagttgggtcttctgggccttgcaaattctcttgcaattgaaggcaggaaaagcaacattcattgtaacaccattgctcctaatgcgggatcacggatgactcagacagttatgcctgaagatcttgtggaagccctgaagccagagtatgtggcacctcttgtcctttggctttgtcacgagagttgtgaggagaatggtggcttgtttgaggttggagcaggatggattggaaaattacgctgggagcggactcttggagctattgtaagacaaaagaatcacccaatgactcctgaggcagtcaaggctaactggaagaagatctgtgactttgagaatgccagcaagcctcagagtatccaagaatcaactggcagtataattgaagttctgagtaaaatagattcagaaggaggagtttcagcaaatcatactagtcgtgcaacgtctacagcaacatcaggatttgctggagctattggccagaaactccctccattttcttatgcttatacggaactggaagctattatgtatgcccttggagtgggagcgtcaatcaaggatccaaaagatttgaaatttatttatgaaggaagttctgatttctcctgtttgcccaccttcggagttatcataggtcagaaatctatgatgggtggaggattagcagaaattcctggactttcaatcaactttgcaaaggttcttcatggagagcagtacttagagttatataaaccacttcccagagcaggaaaattaaaatgtgaagcagttgttgctgatgtcctagataaaggatccggtgtagtgattattatggatgtctattcttattctgagaaggaacttatatgccacaatcagttctctctctttcttgttggctctggaggctttgctcctgatgctgtacttacagataccacctctcttaatcaggctgctttgtaccgcctcagtggagactggaatcccttacacattgatcctaactttgctagtctagcaggttttgacaagcccatattacatggattatgtacatttggattttctgccaggcgtgtgttacagcagtttgcagataatgatgtgtcaagattcaaggcaattaaggctcgttttgcaaaaccagtatatccaggacaaactctacaaactgagatgtggaaggaaggaaacagaattcattttcaaaccaaggtccaagaaactggagacattgtcatttcaaatgcatatgtggatcttgcaccaacatctggtacttcagctaagacaccctctgagggcgggaagcttcagagtacctttgtatttgaggaaataggacgccgcctaaaggatattgggcctgaggtggtgaagaaagtaaatgctgtatttgagtggcatataaccaaaggcggaaatattggggctaagtggactattgacctgaaaagtggttctggaaaagtgtaccaaggccctgcaaaaggtgctgctgatacaacaatcatactttcagatgaagatttcatggaggtggtcctgggcaagcttgaccctcagaaggcattctttagtggcaggctgaaggccagagggaacatcatgctgagccagaaacttcagatgattcttaaagactacgccaagctctgaagggcacactacactattaataaaaatggaatcattaaatactctcttcacccaaatatgcttgattattctgcaaaagtgattagaactaagatgcaggggaaattgcttaacattttcagatatcagataactgcagattttcattttctactaatttttcatgtatcattatttttacaaggaactatatataagctagcacataattatccttctgttcttagatctgtatcttcataataaaaaaattttgcccaagtcctgtttccttagaatttgtgatagcattgataagttgaaaggaaaattaaatcaataaaggcctttgatacctttaaaaattggaa

SEQ ID NO: 447944 - DNA, 2436 bp, Homo sapiens
gtttatacctctggtttttaaaaagaaaacaatgttaaaaattctccttatgcagcagtaatggtttttatgaatctgtgcattctaactgacttcttgtggaaatagaggtagagcaaagagaaggtaagggagaattatttggggccacctgttacactaaatttttgttaactgaagtctttgacctattatttactattagtcttcagtttgctaactcagcgaagctctattcagttatcttcattttataaacaagaagaatgaagtatattactttggggatctgtggtcatgaagtcagtcttttgatgtgattattatataattaaactttttcacatacagcataacattctacctttagtactgtctggcatagtcagaggagaaatttttcccttcagcttcaaatgtttctttaaattgaccttatcctagtgggtttgttgggaaaaattcattttaaggcttatggtaaaactctttaggagttagaatccctttttttctgaatttcctttctctttaaaaatgaaagggttcttatgcatcttactttctgtctctcaactatgtgctcagtatgttagttttgtttctataaccagtacgctgggagcggactcttggagctattgtaagacaaaagaatcacccaatgactcctgaggcagtcaaggctaactggaagaagatctgtgactttgagaatgccagcaagcctcagagtatccaagaatcaactggcagtataattgaagttctgagtaaaatagattcagaaggaggagtttcagcaaatcatactagtcgtgcaacgtctacagcaacatcaggatttgctggagctattggccagaaactccctccattttcttatgcttatacggaactggaagctattatgtatgcccttggagtgggagcgtcaatcaaggatccaaaagatttgaaatttatttatgaaggaagttctgatttctcctgtttgcccaccttcggagttatcataggtcagaaatctatgatgggtggaggattagcagaaattcctggactttcaatcaactttgcaaaggttcttcatggagagcagtacttagagttatataaaccacttcccagagcaggaaaattaaaatgtgaagcagttgttgctgatgtcctagataaaggatccggtgtagtgattattatggatgtctattcttattctgagaaggaacttatatgccacaatcagttctctctctttcttgttggctctggaggctttggtggaaaacggacatcagacaaagtcaaggtagctgtagccatacctaatagacctcctgatgctgtacttacagataccacctctcttaatcaggctgctttgtaccgcctcagtggagactggaatcccttacacattgatcctaactttgctagtctagcaggttttgacaagcccatattacatggattatgtacatttggattttctgccaggcgtgtgttacagcagtttgcagataatgatgtgtcaagattcaaggcaattaaggctcgttttgcaaaaccagtatatccaggacaaactctacaaactgagatgtggaaggaaggaaacagaattcattttcaaaccaaggtccaagaaactggagacattgtcatttcaaatgcatatgtggatcttgcaccaacatctggtacttcagctaagacaccctctgagggcgggaagcttcagagtacctttgtatttgaggaaataggacgccgcctaaaggatattgggcctgaggtggtgaagaaagtaaatgctgtatttgagtggcatataaccaaaggcggaaatattggggctaagtggactattgacctgaaaagtggttctggaaaagtgtaccaaggccctgcaaaaggtgctgctgatacaacaatcatactttcagatgaagatttcatggaggtggtcctgggcaagcttgaccctcagaaggcattctttagtggcaggctgaaggccagagggaacatcatgctgagccagaaacttcagatgattcttaaagactacgccaagctctgaagggcacactacactattaataaaaatggaatcattaaatactctcttcacccaaatatgcttgattattctgcaaaagtgattagaactaagatgcaggggaaattgcttaacattttcagatatcagataactgcagattttcattttctactaatttttcatgtatcattatttttacaaggaactatatataagctagcacataattatccttctgttcttagatctgtatcttcataataaaaaaattttgcccaagtcctgtttccttagaatttgtgatagcattgataagttgaaaggaaaattaaatcaataaaggcctttgatacctttaaaaattggaa

SEQ ID NO: 447945 - DNA, 2576 bp, Homo sapiens
attccccgcctcctcctgtcccgcagtcggcgtccagcggctctgcttgttcgtgtgtgtgtcgttgcaggccttattcatgggctcaccgctgaggttcgacgggcgggtggtactggtcaccggcgcgggggcaggattgggccgagcctatgccctggcttttgcagaaagaggagcgttagttgttgtgaatgatttgggaggggacttcaaaggagttggtaaaggctccttagctgctgataaggttgttgaagaaataagaaggagaggtggaaaagcagtggccaactatgattcagtggaagaaggagagaaggttgtgaagacagccctggatgcttttggaagaatagatgttgtggtcaacaatgctggaattctgagggatcgttcctttgctaggataagtgatgaagactgggatataatccacagagttcatttgcggggttcattccaagtgacacgggcagcatgggaacacatgaagaaacagaagtatggaaggattattatgacttcatcagcttcaggaatatatggcaactttggccaggccaattatagtgctgcaaagttgggtcttctgggccttgcaaattctcttgcaattgaaggcaggaaaagcaacattcattgtaacaccattgctcctaatgcgggatcacggatgactcagacagttatgcctgaagatcttgtggaagccctgaagccagagtatgtggcacctcttgtcctttggctttgtcacgagagttgtgaggagaatggtggcttgtttgaggttggagcaggatggattggaaaattacgctgggagcggactcttggagctattgtaagacaaaagaatcacccaatgactcctgaggcagtcaaggctaactggaagaagatctgtgactttgagaatgccagcaagcctcagagtatccaagaatcaactggcagtataattgaagttctgagtaaaatagattcagaaggaggagtttcagcaaatcatactagtcgtgcaacgtctacagcaacatcaggatttgctggagctattggccagaaactccctccattttcttatgcttatacggaactggaagctattatgtatgcccttggagtgggagcgtcaatcaaggatccaaaagatttgaaatttatttatgaaggaagttctgatttctcctgtttgcccaccttcggagttatcataggtcagaaatctatgatgggtggaggattagcagaaattcctggactttcaatcaactttgcaaaggttcttcatggagagcagtacttagagttatataaaccacttcccagagcaggaaaattaaaatgtgaagcagttgttgctgatgtcctagataaaggatccggtgtagtgattattatggatgtctattcttattctgagaaggaacttatatgccacaatcagttctctctctttcttgttggctctggaggctttggtggaaaacggacatcagacaaagtcaaggtagctgtagccatacctaatagacctcctgatgctgtacttacagataccacctctcttaatcaggctgctttgtaccgcctcagtggagactggaatcccttacacattgatcctaactttgctagtctagcaggttttgacaagcccatattacatggattatgtacatttggattttctgccaggcgtgtgttacagcagtttgcagataatgatgtgtcaagattcaaggcaattaaggctcgttttgcaaaaccagtatatccaggacaaactctacaaactgagatgtggaaggaaggaaacagaattcattttcaaaccaaggtccaagaaactggagacattgtcatttcaaatgcatatgtggatcttgcaccaacatctggtacttcagctaagacaccctctgagggcgggaagcttcagagtacctttgtatttgaggaaataggacgccgcctaaaggatattgggcctgaggtggtgaagaaagtaaatgctgtatttgagtggcatataaccaaggccctgcaaaaggtgctgctgatacaacaatcatactttcagatgaagatttcatggaggtggtcctgggcaagcttgaccctcagaaggcattctttagtggcaggctgaaggccagagggaacatcatgctgagccagaaacttcagatgattcttaaagactacgccaagctctgaagggcacactacactattaataaaaatggaatcattaaatactctcttcacccaaatatgcttgattattctgcaaaagtgattagaactaagatgcaggggaaattgcttaacattttcagatatcagataactgcagattttcattttctactaatttttcatgtatcattatttttacaaggaactatatataagctagcacataattatccttctgttcttagatctgtatcttcataataaaaaaattttgcccaagtcctgtttccttagaatttgtgatagcattgataagttgaaaggaaaattaaatcaataaaggcctttgatacctttaaaaattggaa

SEQ ID NO: 447946 - DNA, 3549 bp, Homo sapiens
attccccgcctcctcctgtcccgcagtcggcgtccagcggctctgcttgttcgtgtgtgtgtcgttgcaggccttattcatgggctcaccgctgaggttcgacgggcgggtggtactggtcaccggcgcgggggcaggattgggccgagcctatgccctggcttttgcagaaagaggagcgttagttgttgtgaatgatttgggaggggacttcaaaggagttggtaaaggctccttagctgctgataaggttgttgaagaaataagaaggagaggtggaaaagcagtggccaactatgattcagtggaagaaggagagaaggttgtgaagacagccctggatgcttttggaagaatagatgttgtggtcaacaatgctggaattctgagggatcgttcctttgctaggataagtgatgaagactgggatataatccacagagttcatttgcggggttcattccaagtgacacgggcagcatgggaacacatgaagaaacagaagtatggaaggattattatgacttcatcagcttcaggaatatatggcaactttggccaggccaattatagtgctgcaaagttgggtcttctgggccttgcaaattctcttgcaattgaaggcaggaaaagcaacattcattgtaacaccattgctcctaatgcgggatcacggatgactcagacagttatgcctgaagatcttgtggaagccctgaagccagagtatgtggcacctcttgtcctttggctttgtcacgagagttgtgaggagaatggtggcttgtttgaggttggagcaggatggattggaaaattacgctgggagcggactcttggagctattgtaagacaaaagaatcacccaatgactcctgaggcagtcaaggctaactggaagaagatctgtgactttgagaatgccagcaagcctcagagtatccaagaatcaactggcagtataattgaagttctgagtaaaatagattcagaaggaggagtttcagcaaatcatactagtcgtgcaacgtctacagcaacatcaggatttgctggagctattggccagaaactccctccattttcttatgcttatacggaactggaagctattatgtatgcccttggagtgggagcgtcaatcaaggatccaaaagatttgaaatttatttatgaaggaagttctgatttctcctgtttgcccaccttcggagttatcataggtcagaaatctatgatgggtggaggattagcagaaattcctggactttcaatcaactttgcaaaggttcttcatggagagcagtacttagagttatataaaccacttcccagagcaggaaaattaaaatgtgaagcagttgttgctgatgtcctagataaaggatccggtgtagtgattattatggatgtctattcttattctgagaaggaacttatatgccacaatcagttctctctctttcttgttggctctggaggctttggtggaaaacggacatcagacaaagtcaaggtagctgtagccatacctaatagacctcctgatgctgtacttacagataccacctctcttaatcaggctgctttgtaccgcctcagtggagactggaatcccttacacattgatcctaactttgctagtctagcaggttttgacaagcccatattacatggattatgtacatttggattttctgccaggcgtgtgttacagcagtttgcagataatgatgtgtcaagattcaaggcaattaaggctcgttttgcaaaaccagtatatccaggacaaactctacaaactgagatgtggaaggaaggaaacagaattcattttcaaaccaaggtccaagaaactggagacattgtcatttcaaatgcatatgtggatcttgcaccaacatctggtacttcagctaagacaccctctgagggcgggaagcttcagagtacctttgtatttgaggaaataggacgccgcctaaaggatattgggcctgaggtggtgaagaaagtaaatgctgtatttgagtggcatataaccaaaggcggaaatattggggctaagtggactattgacctgaaaagtggttctggaaaagtgtaccaaggccctgcaaaaggtgctgctgatacaacaatcatactttcagatgaagatttcatggaggtggtcctgggcaagcttgaccctcagaaggcattctttagtggcaggctgaaggccagagggaacatcatgctgagccagaaacttcagatgattcttaaagactacgccaagctctgaagggcacactacactattaataaaaatggaatcattaaatactctcttcacccaaatatgcttgattattctgcaaaagtgattagaactaagatgcaggggaaattgcttaacattttcagatatcagataactgcagattttcattttctactaatttttcatgtatcattatttttacaaggaactatatataagctagcacataattatccttctgttcttagatctgtatcttcataataaaaaaattttgcccaaaaaaaaaaaaaaaaaaaaaaaaaaaaaaaaaaaaaaaaaaaaaggggggggagcgaaaaaaactccacccaggggggcacaagaaaacgagaccccagcatacgagggaaacaagggggcacacaaaagagagggcgacataaaaaaacaaagaaagaggggcacaaaccacaacacccggcagaaacgggacacaacaacgaaaccacagggcgacaccgggtgcgcgacaggacaccactcacaacgacggaggaagagacaccaacaggggggcccccaccacccgacaaagagcatacagcaaggccagcagaaggacaacaaaacaaacaccacacggagagcaaccagggagcaaaacccacacgcgggaaaaaacgaaggagccaccgacaacacacacagcgcgaacacacgggcgaacacaacacaacaaacaaacccccaccaccgcaagaaggaacctacaagaccacacacagcacaggaggagcgccggagggaggaggagggcaaggagcggacgagggaagagaggaggagaggaagaggacggaggcaggggcgggaggcgcggagaacagaagggaagcgcgggaccgagcgcacagccgggaggccggagacagacgacgaaacagacccacaaaacaacaaaagcaaccaccacacacgcaccagaacaataacctagcctacagaaaacagcgaacacaaagaagacagacagcgcggacgacgaggcgccacgacaagaaggagtacaggacagatacagaccgaagaagagaccgcgaggagcagaccagaacagccaagacgacgacagataagcaagcagatgacacaaaaaacagacaagcgtaaacggaaggcgcgagacgcaacacagcaagcacaagaagaacaagcggaagcgaccgagacaatcaacacagcagaaaagacgaaagacgtaaaacaacaccaagcccagaacacacgaaagacacaaa

SEQ ID NO: 447947 - DNA, 905 bp, Homo sapiens
catgatgtgattgttcatgatgtgattgttcatgatgtgattgttcatgatgtgattgttctacaaactgagatgtggaaggaaggaaacagaattcattttcaaaccaaggtccaagaaactggagacattgtcatttcaaatgcatatgtggatcttgcaccaacatctggtacttcagctaagacaccctctgagggcgggaagcttcagagtacctttgtatttgaggaaataggacgccgcctaaaggatattgggcctgaggtggtgaagaaagtaaatgctgtatttgagtggcatataaccaaaggcggaaatattggggctaagtggactattgacctgaaaagtggttctggaaaagtgtaccaaggccctgcaaaaggtgctgctgatacaacaatcatactttcagatgaagatttcatggaggtggtcctgggcaagcttgaccctcagaaggcattctttagtggcaggctgaaggccagagggaacatcatgctgagccagaaacttcagatgattcttaaagactacgccaagctctgaagggcacactacactattaataaaaatggaatcattaaatactctcttcacccaaatatgcttgattattctgcaaaagtgattagaactaagatgcaggggaaattgcttaacattttcagatatcagataactgcagattttcattttctactaatttttcatgtatcattatttttacaaggaactatatataagctagcacataattatccttctgttcttagatctgtatcttcataataaaaaaattttgcccaagtcctgtttccttagaatttgtgatagcattgataagttgaaaggaaaattaaatcaataaaggcctttgatacctttaaaaattggaa

SEQ ID NO: 447948 - DNA, 1970 bp, Homo sapiens
attccccgcctcctcctgtcccgcagtcggcgtccagcggctctgcttgttcgtgtgtgtgtcgttgcaggccttattcatgggctcaccgctgaggttcgacgggcgggtggtactggtcaccggcgcgggggcaggattgggccgagcctatgccctggcttttgcagaaagaggagcgttagttgttgtgaatgatttgggaggggacttcaaaggagttggtaaaggctccttagctgctgataaggttgttgaagaaataagaaggagaggtggaaaagcagtggccaactatgattcagtggaagaaggagagaaggttgtgaagacagccctggatgcttttggaagaatagatgttgtggtcaacaatgctggaattctgagggatcgttcctttgctaggataagtgatgaagactgggatataatccacagagttcatttgcggggttcattccaagtgacacgggcagcatgggaacacatgaagaaacagaagtatggaaggattattatgacttcatcagcttcaggaatatatggcaactttggccaggccaattatagtgctgcaaagttgggtcttctgggccttgcaaattctcttgcaattgaaggcaggaaaagcaacattcattgtaacaccattgctcctaatgcgggatcacggatgactcagacagttatgcctgaagatcttgtggaagccctgaagccagagtatgtggcacctcttgtcctttggctttgtcacgagagttgtgaggagaatggtggcttgtttgaggttggagcaggatggattggaaaattacgctgggagcggactcttggagctattgtaagacaaaagaatcacccaatgactcctgaggcagtcaaggctaactggaagaagatctgtgactttgagaatgccagcaagcctcagagtatccaagaatcaactggcagtataattgaagttctgagtaaaatagattcagaaggaggagtttcagcaaatcatactagtcgtgcaacgtctacagcaacatcaggatttgctggagctattggccagaaactccctccattttcttatgcttatacggaactggaagctattatgtatgcccttggagtgggagcgtcaatcaaggatccaaaagatttgaaatttatttatgaaggaagttctgatttctcctgtttgcccaccttcggagttatcataggtcagaaatctatgatgggtggaggattagcagaaattcctggactttcaatcaactttgcaaaggttcttcatggagagcagtacttagagttatataaaccacttcccagagcaggaaaattaaaatgtgaagcagttgttgctgatgtcctagataaaggatccggtgtagtgattattatggatgtctattcttattctgagaaggaacttatatgccacaatcagttctctctctttcttgttggctctggaggctttggtggaaaacggacatcagacaaagtcaaggtagctgtagccatacctaatagacctcctgatgctgtacttacagataccacctctcttaatcaggctgctttgtaccgcctcagtggagactggaatcccttacacattgatcctaactttgctagtctagcaggttttgacaagcccatattacatggattatgtacatttggattttctgccaggcgtgtgttacagcagtttgcagataatgatgtgtcaagattcaaggcaattaaggctcgttttgcaaaaccagtatatccaggacaaactctacaaactgagatgtggaaggaaggaaacagaattcattttcaaaccaaggtccaagaaactggagactaagaaattaagtttcgttttgacatcttcagtcctgtgtgctttcagaaaaccattttctctgcaaagaaaggaaacagatttgcaaactttaaagtctgtcgtg

SEQ ID NO: 447949 - DNA, 686 bp, Homo sapiens
  misc_feature (632)..(632): n is a, c, g, or t
attccccgcctcctcctgtcccgcagtcggcgtccagcggctctgcttgttcgtgtgtgtgtcgttgcaggccttattcatgggctcaccgctgaggttcgacgggcgggtggtactggtcaccggcgcgggggcaggattgggccgagcctatgccctggcttttgcagaaagaggagcgttagttgttgtgaatgatttgggaggggacttcaaaggagttggtaaaggctccttagctgctgataaggttgttgaagaaataagaaggagaggtggaaaagcagtggccaactatgattcagtggaagaaggagagaaggttgtgaagacagccctggatgcttttggaagaatagatgttgtggtcaacaatgctggaattctgagggatcgttcctttgctaggataagtgatgaagactgggatataatccacagagttcatttgcggggttcattccaagtgacacgggcagcatgggaacacatgaagaaacagaagtatggaaggattattatgacttcatcagcttcaggaatatatggcaactttggccaggccaattatagtgctgcaaagttgggtcttctgggccttgcaaattctcttgcaattgaaggcaggacanacaggtatgcctgaagatcttgtggaagccctgaaccacaattgtggcctctgg

SEQ ID NO: 447950 - DNA, 577 bp, Homo sapiens
acgcggcggcgtgccagcctagccactctagcgacggcggggaagagtgtgtacgtggtgggggcttcctcggtggcgggcatggaggcttcgcgctgccggctcagtcccagcggcgacaggtcagacagggccgtggcaggtctcctcctgagcgaggcggaggggcgaagcgagaaggcggagtgtttgtccctgattcgggatggtctgactgatttgccagtgggccacaccccttgtttgtgcgcctctttctctgccagagggagagcctcggaaaaaaaaggatccaaaatctcagcgtgtcactttcttgttcgctaggttaatgagaagttaatgggaagccgtttgaaatcattggttagaaactttggcgtcatctgaggatttaagccctacacgccaactgtataccccgctttttattccattaccaagacaaagatttggggccaggcgccttggaacacgtctattatccccagcactttgggaggccaaggcaggaggatcgcttggtctcaggagttcgagaccagcctggacaagatagcgagacccccatctctag

SEQ ID NO: 447951 - DNA, 3108 bp, Homo sapiens
acgcggcggcgtgccagcctagccactctagcgacggcggggaagagtgtgtacgtggtgggggcttcctcggtggcgggcatggaggcttcgcgctgccggctcagtcccagcggcgacagtgtcttccatgaagaaatgatgaagatgcgacaggctaagctggattatcagaggctactacttgagaagaggcaaaggaaaaagcgccttgagccatttatggtgcagcccaatccagaagccaggctacgtcgggcaaagccaagggccagtgatgagcagactcccttggtgaactgtcatactccccacagcaatgtcatcttacatggtattgatggtccagctgctgtcctgaaaccagacgaagttcatgctccatcagtaagctcctctgttgtggaagaagatgctgaaaacaccgtggatactgcttccaagccaggacttcaggagcgtctccaaaagcatgatatctctgaaagtgtgaacttcgatgaggagactgatggaatatcccagtcagcatgtttagaaagacccaattctgcatcaagccagaattcaaccgatacaggcacttccggttctgctactgccgcccaaccagctgataacctcctgggagacatagacgacctggaggactttgtgtatagtcctgcccctcaaggtgtcacagtaagatgtcggataatccgggataaaaggggaatggatcggggtctcttccccacctactatatgtacttggaaaaagaagaaaatcagaagatatttcttcttgcagctagaaagcggaaaaagagcaaaacagccaactaccttatctccattgatccagttgatttatctcgtgaaggagaaagttatgtcggcaagcttagatccaacctcatggggaccaagtttacagtttatgaccgtggcatctgccccatgaagggccggggtttggtaggagcggcccacacccggcaggagctggctgccatctcctatgaaacaaacgtacttggatttaaaggtcctaggaaaatgtctgtgatcattcctggaatgacactgaatcataagcagatcccctatcagccacaaaacaaccatgacagtttgctctcaaggtggcagaacagaactatggaaaatctggttgagctgcacaacaaggcccccgtctggaacagtgacactcagtcctatgtcctcaacttccgtggccgggtcactcaggcgtctgtgaagaacttccagatagtccacaaaaatgaccctgattatatagtcatgcagtttggacgtgtggcagatgacgtgttcacactggattacaactacccactttgtgcagtacaggcctttggcatcggtctttctagctttgacagtaagctggcgtgtgaatgagagaacagtcaggcagggagcccttctccccacagagctttcaggagcagacagtggcctccccttcccctccctgccccaggacttaaagagcaatagtttgccccttttggaatgatctctgaatatataaaacacacacacaaagagcaatagtttgccccttttggaacgacccctgaatatataaaacacacacacgaagagcaatagtttgccccttttggaacgacccctgaatatataaaacacacacgaagagcaatagtttgccccttttggaacgacccctgaatatataaaacacacacacgaagagcaatagtttgccccttttggaacgacccctgaatatataaaacacacacacaccccgcgcactctcactccttttccaggtttcatagacttggtgagggatcacagcttagcatgggtgagagatgatttaaagcacagggagattcttgtcacattggggtctccaaagctagaatgggatttcatgtgcttggaaacttgcagtagaatcagggactgacatcgcagttcctctcctctcttcattccctcacagcagattggccggcaccaatcttagtcaagagtggctgtgatcacatttgtgatcaattatgtgagaattttatataattgtcttcatttcaattaaggctgaaagcataaactctagaggtgactcagtcaggactgacagtaatgtgataattgccttcattttcaacccaggagtgcctctcacagctatatgactacggatccattagtgaggagcgacacacacacctgtaggcatcctgtgcaaacactttgtcattatcaagagagatggcagtattgaccatttagtttagttaaaaaaaaaaaaaaaggtggcaggagaggctttggggaggatcagccagcagacatgagcactgctggcccgtgtggcagagctgtggactttcttctcggctccctcaaccctggctcaggcacagaaggtgttttgctacgtttttttgattattacacccctccacgtattatgtgactcttacaccagttcacccttcccagaacgtatccaaaccttgagaatgcaggagctctgtgagctccaccgtcagcaccattcagctgcatcccttgtgcacagaactgtttgccagcgttgggtgggacacccgtggcggctgctccctcagacctcccttctgtggactgacctctcacctccgcctgttgttcctgcaccacatcagataagcatgtgaaggagggccaactggcagctgcgggacccttggcttgtcccccaccgacaagtcccacctgctgggtgaggacgagactgtttccatctcaggcatgtatcccaccaagtgcctccctcacagccatgcccagaagcctcacacctcgtcaccaccaccaccccccaccccatcctgaggcactgcctggcagataaccctggttggccacagaagctattaatacacgacagcatgtggggaaggacttatggtgggccaggtggacctcatcctgcttcttcctccctctggtttaaagagatatataaactaatttcacataatttgtgtgtgcaggtgattggtttttacataagtcctatttataccttttatatgttacagaaataaaagttaatttatataaaaaaagtca

SEQ ID NO: 447952 - DNA, 2532 bp, Homo sapiens
acgcggcggcgtgccagcctagccactctagcgacggcggggaagagtgtgtacgtggtgggggcttcctcggtggcgggcatggaggcttcgcgctgccggctcagtcccagcggcgacagtgtcttccatgaagaaatgatgaagatgcgacaggctaagctggattatcagaggctactacttgagaagaggcaaaggaaaaagcgccttgagccatttatggtgcagcccaatccagaagccaggctacgtcgggcaaagccaagggccagtgatgagcagactcccttggtgaactgtcatactccccacagcaatgtcatcttacatggtattgatggtccagctgctgtcctgaaaccagacgaagttcatgctccatcagtaagctcctctgttgtggaagaagatgctgaaaacaccgtggatactgcttccaagccaggacttcaggagcgtctccaaaagcatgatatctctgaaagtgtgaacttcgatgaggagactgatggaatatcccagtcagcatgtttagaaagacccaattctgcatcaagccagaattcaaccgatacaggcacttccggttctgctactgccgcccaaccagctgataacctcctgggagacatagacgacctggaggactttgtgtatagtcctgcccctcaaggtgtcacagtaagatgtcggataatccgggataaaaggggaatggatcggggtctcttccccacctactatatgtacttggaaaaagaagaaaatcagaagatatttcttcttgcagctagaaagcggaaaaagagcaaaacagccaactaccttatctccattgatccagttgatttatctcgtgaaggagaaagttatgtcggcaagcttagatccaacctcatggggaccaagtttacagtttatgaccgtggcatctgccccatgaagggccggggtttggtaggagcggcccacacccggcaggagctggctgccatctcctatgaaacaaacgtacttggatttaaaggtcctaggaaaatgtctgtgatcattcctggaatgacactgaatcataagcagatcccctatcagccacaaaacaaccatgacagtttgctctcaaggtggcagaacagaactatggaaaatctggttgagctgcacaacaaggcccccgtctggaacagtgacactcagtcctatgtcctcaacttccgtggccgggtcactcaggcgtctgtgaagaacttccagatagtccacaaaaatgaccctgattatatagtcatgcagtttggacgtgtggcagatgacgtgttcacactggattacaactacccactttgtgcagtacaggcctttggcatcggtctttctagctttgacagtaagctggcgtgtgaatgagagaacagtcaggcagggagcccttctccccacagagctttcaggagcagacagtggcctccccttcccctccctgccccaggacttaaagagcaatagtttgccccttttggaatgatctctgaatatataaaacacacacacgaagagcaatagtttgccccttttggaacgacccctgaatatataaaacacacacacgaagagcaatagtttgccccttttggaacgacccctgaatatataaaacacacacacaccccgcgcactctcactccttttccaggtttcatagacttggtgagggatcacagcttagcatgggtgagagatgatttaaagcacagggagattcttgtcacattggggtctccaaagctagaatgggatttcatgtgcttggaaacttgcagtagaatcagggactgacatcgcagttcctctcctctcttcattccctcacagcagattggccggcaccaatcttagtcaagagtggctgtgatcacatttgtgatcaattatgtgagaattttatataattgtcttcatttcaattaaggctgaaagcataaactctagaggtgactcagtcaggactgacagtaatgtgataattgccttcattttcaacccaggagtgcctctcacagctatatgactacggatccattagtgaggagcgacacacacacctgtaggcatcctgtgcaaacactttgtcattatcaagagagatggcagtattgaccatttagtttagttaaaaaaaaaaaaaaaggtggcaggagaggctttggggaggatcagccagcagacatgagcactgctggcccgtgtggcagagctgtggactttcttctcggctccctcaaccctggctcaggcacagaaggtgttttgctacgtttttttgattattacacccctccacgtattatgtgactcttacaccagttcacccttcccagactcatcctgcttcttcctccctctggtttaaagagatatataaactaatttcacataatttgtgtgtgcaggtgattggtttttacataagtcctatttataccttttatatgttacagaaataaaagttaatttatataaaaaaagtca

SEQ ID NO: 447953 - DNA, 2499 bp, Homo sapiens
attctgataagagagttagagaaagggataaaggcccaaagattaacagcttgacatatgctgaggacttgctaagcactggctgaatgaatatgtaggacaaccatgaccagaggtggggcaggttctctggacttcatttttgactgacactttttcttttcccagatatttcttcttgcagctagaaagcggaaaaagagcaaaacagccaactaccttatctccattgatccagttgatttatctcgtgaaggagaaagttatgtcggcaagcttagatccaacctcatggggaccaagtttacagtttatgaccgtggcatctgccccatgaagggccggggtttggtaggagcggcccacacccggcaggagctggctgccatctcctatgaaacaaacgtacttggatttaaaggtcctaggaaaatgtctgtgatcattcctggaatgacactgaatcataagcagatcccctatcagccacaaaacaaccatgacagtttgctctcaaggtggcagaacagaactatggaaaatctggttgagctgcacaacaaggcccccgtctggaacagtgacactcagtcctatgtcctcaacttccgtggccgggtcactcaggcgtctgtgaagaacttccagatagtccacaaaaatgaccctgattatatagtcatgcagtttggacgtgtggcagatgacgtgttcacactggattacaactacccactttgtgcagtacaggcctttggcatcggtctttctagctttgacagtaagctggcgtgtgaatgagagaacagtcaggcagggagcccttctccccacagagctttcaggagcagacagtggcctccccttcccctccctgccccaggacttaaagagcaatagtttgccccttttggaatgatctctgaatatataaaacacacacacaaagagcaatagtttgccccttttggaacgacccctgaatatataaaacacacacacgaagagcaatagtttgccccttttggaacgacccctgaatatataaaacacacacgaagagcaatagtttgccccttttggaacgacccctgaatatataaaacacacacacgaagagcaatagtttgccccttttggaacgacccctgaatatataaaacacacacacaccccgcgcactctcactccttttccaggtttcatagacttggtgagggatcacagcttagcatgggtgagagatgatttaaagcacagggagattcttgtcacattggggtctccaaagctagaatgggatttcatgtgcttggaaacttgcagtagaatcagggactgacatcgcagttcctctcctctcttcattccctcacagcagattggccggcaccaatcttagtcaagagtggctgtgatcacatttgtgatcaattatgtgagaattttatataattgtcttcatttcaattaaggctgaaagcataaactctagaggtgactcagtcaggactgacagtaatgtgataattgccttcattttcaacccaggagtgcctctcacagctatatgactacggatccattagtgaggagcgacacacacacctgtaggcatcctgtgcaaacactttgtcattatcaagagagatggcagtattgaccatttagtttagttaaaaaaaaaaaaaaaggtggcaggagaggctttggggaggatcagccagcagacatgagcactgctggcccgtgtggcagagctgtggactttcttctcggctccctcaaccctggctcaggcacagaaggtgttttgctacgtttttttgattattacacccctccacgtattatgtgactcttacaccagttcacccttcccagaacgtatccaaaccttgagaatgcaggagctctgtgagctccaccgtcagcaccattcagctgcatcccttgtgcacagaactgtttgccagcgttgggtgggacacccgtggcggctgctccctcagacctcccttctgtggactgacctctcacctccgcctgttgttcctgcaccacatcagataagcatgtgaaggagggccaactggcagctgcgggacccttggcttgtcccccaccgacaagtcccacctgctgggtgaggacgagactgtttccatctcaggcatgtatcccaccaagtgcctccctcacagccatgcccagaagcctcacacctcgtcaccaccaccaccccccaccccatcctgaggcactgcctggcagataaccctggttggccacagaagctattaatacacgacagcatgtggggaaggacttatggtgggccaggtggacctcatcctgcttcttcctccctctggtttaaagagatatataaactaatttcacataatttgtgtgtgcaggtgattggtttttacataagtcctatttataccttttatatgttacagaaataaaagttaatttatataaaaaaagtca

SEQ ID NO: 447954 - DNA, 2338 bp, Homo sapiens
acgcggcggcgtgccagcctagccactctagcgacggcggggaagagtgtgtacgtggtgggggcttcctcggtggcgggcatggaggcttcgcgctgccggctcagtcccagcggcgacagtgtcttccatgaagaaatgatgaagatgcgacaggctaagctggattatcagaggctactacttgagaagaggcaaaggaaaaagcgccttgagccatttatggtgcagcccaatccagaagccaggctacgtcgggcaaagccaagggccagtgatgagcagactcccttggtgaactgtcatactccccacagcaatgtcatcttacatggtattgatggtccagctgctgtcctgaaaccagacgaagttcatgctccatcagtaagctcctctgttgtggaagaagatgctgaaaacaccgtggatactgcttccaagccaggacttcaggagcgtctccaaaagcatgatatctctgaaagtgtgaacttcgatgaggagactgatggaatatcccagtcagcatgtttagaaagacccaattctgcatcaagccagaattcaaccgatacaggcacttccggttctgctactgccgcccaaccagctgataacctcctgggagacatagacgacctggaggactttgtgtatagtcctgcccctcaaggtgtcacagtaagatgtcggataatccgggataaaaggggaatggatcggggtctcttccccacctactatatgtacttggaaaaagaagaaaatcagaagatatttcttcttgcagctagaaagcggaaaaagagcaaaacagccaactaccttatctccattgatccagttgatttatctcgtgaaggagaaagttatgtcggcaagcttagatccaacctcatggggaccaagtttacagtttatgaccgtggcatctgccccatgaagggccggggtttggtaggagcggcccacacccggcaggagctggctgccatctcctatgaaacaaacgtacttggatttaaaggtcctaggaaaatgtctgtgatcattcctggaatgacactgaatcataagcagatcccctatcagccacaaaacaaccatgacagtttgctctcaaggtggcagaacagaactatggaaaatctggttgagctgcacaacaaggcccccgtctggaacagtgacactcagtcctatgtcctcaacttccgtggccgggtcactcaggcgtctgtgaagaacttccagatagtccacaaaaatgaccctgattatatagtcatgcagtttggacgtgtggcagatgacgtgttcacactggattacaactacccactttgtgcagtacaggcctttggcatcggtctttctagctttgacagagtgcctctcacagctatatgactacggatccattagtgaggagcgacacacacacctgtaggcatcctgtgcaaacactttgtcattatcaagagagatggcagtattgaccatttagtttagttaaaaaaaaaaaaaaaggtggcaggagaggctttggggaggatcagccagcagacatgagcactgctggcccgtgtggcagagctgtggactttcttctcggctccctcaaccctggctcaggcacagaaggtgttttgctacgtttttttgattattacacccctccacgtattatgtgactcttacaccagttcacccttcccagaacgtatccaaaccttgagaatgcaggagctctgtgagctccaccgtcagcaccattcagctgcatcccttgtgcacagaactgtttgccagcgttgggtgggacacccgtggcggctgctccctcagacctcccttctgtggactgacctctcacctccgcctgttgttcctgcaccacatcagataagcatgtgaaggagggccaactggcagctgcgggacccttggcttgtcccccaccgacaagtcccacctgctgggtgaggacgagactgtttccatctcaggcatgtatcccaccaagtgcctccctcacagccatgcccagaagcctcacacctcgtcaccaccaccaccccccaccccatcctgaggcactgcctggcagataaccctggttggccacagaagctattaatacacgacagcatgtggggaaggacttatggtgggccaggtggacctcatcctgcttcttcctccctctggtttaaagagatatataaactaatttcacataatttgtgtgtgcaggtgattggtttttacataagtcctatttataccttttatatgttacagaaataaaagttaatttatataaaaaaagtca

SEQ ID NO: 447955 - DNA, 1001 bp, Homo sapiens
acgcggcggcgtgccagcctagccactctagcgacggcggggaagagtgtgtacgtggtgggggcttcctcggtggcgggcatggaggcttcgcgctgccggctcagtcccagcggcgacagtgtcttccatgaagaaatgatgaagatgcgacaggctaagctggattatcagaggctactacttgagaagaggcaaaggaaaaagcgccttgagccatttatggtgcagcccaatccagaagccaggctacgtcgggcaaagccaagggccagtgatgagcagactcccttggtgaactgtcatactccccacagcaatgtcatcttacatggtattgatggtccagctgctgtcctgaaaccagacgaagttcatgctccatcagtaagctcctctgttgtggaagaagatgctgaaaacaccgtggatactgcttccaagccaggacttcaggagcgtctccaaaagcatgatatctctgaaagtgtgaacttcgatgaggagactgatggaatatcccagtcagcatgtttagaaagacccaattctgcatcaagccagaattcaaccgatacaggcacttccggttctgctactgccgcccaaccagctgataacctcctgggagacatagacgacctggaggactttgtgtatagtcctgcccctcaaggtgtcacagtaagatgtcggataatccgggataaaaggggaatggatcggggtctcttccccacctactatatgtacttggaaaaagaagaaaatcagaagatatttcttcttgcagctagaaagcggaaaaagagcaaaacagccaactaccttatctccattgatccagttgatttatctcgtgaaggagaaagttatgtcggcaagcttaggtgaaagcaaccttagatcactgtcctattctttctgatagtcttattcctatagttgcagaacagtccttatcttggttacaactagcatgtattgatgttgtaatctta

SEQ ID NO: 447956 - DNA, 225 bp, Homo sapiens
tgggacgggaggtcaaggctgcagtgagctgtggtcattccactaggctccagccagggcgacagagcaaaaccccatctaagaaaaggaagaaaaagaaaaagatttccctgagtgcaaccacattatattctaacatgttgatttctttctgtttctagctgattatatagtcatgcagtttggacgtgtggcagatgacgtgttcacactggattacaacta

SEQ ID NO: 447957 - DNA, 2996 bp, Homo sapiens
acgcggcggcgtgccagcctagccactctagcgacggcggggaagagtgtgtacgtggtgggggcttcctcggtggcgggcatggaggcttcgcgctgccggctcagtcccagcggcgacagtgtcttccatgaagaaatgatgaagatgcgacaggctaagctggattatcagaggctactacttgagaagaggcaaaggaaaaagcgccttgagccatttatggtgcagcccaatccagaagccaggctacgtcgggcaaagccaagggccagtgatgagcagactcccttggtgaactgtcatactccccacagcaatgtcatcttacatggtattgatggtccagctgctgtcctgaaaccagacgaagttcatgctccatcagtaagctcctctgttgtggaagaagatgctgaaaacaccgtggatactgcttccaagccaggacttcaggagcgtctccaaaagcatgatatctctgaaagtgtgaacttcgatgaggagactgatggaatatcccagtcagcatgtttagaaagacccaattctgcatcaagccagaattcaaccgatacaggcacttccggttctgctactgccgcccaaccagctgataacctcctgggagacatagacgacctggaggactttgtgtatagtcctgcccctcaaggtgtcacagtaagatgtcggataatccgggataaaaggggaatggatcggggtctcttccccacctactatatgtacttggaaaaagaagaaaatcagaagatatttcttcttgcagctagaaagcggaaaaagagcaaaacagccaactaccttatctccattgatccagttgatttatctcgtgaaggagaaagttatgtcggcaagcttagatccaacctcatggggaccaagtttacagtttatgaccgtggcatctgccccatgaagggccggggtttggtaggagcggcccacacccggcaggagctggctgccatctcctatgaaacaaacgtacttggatttaaaggtcctaggaaaatgtctgtgatcattcctggaatgacactgaatcataagcagatcccctatcagccacaaaacaaccatgacagtttgctctcaaggtggcagaacagaactatggaaaatctggttgagctgcacaacaaggcccccgtctggaacagtgacactcagtcctatgtcctcaacttccgtggccgggtcactcaggcgtctgtgaagaacttccagatagtccacaaaaatgaccctgattatatagtcatgcagtttggacgtgtggcagatgacgtgttcacactggattacaactacccactttgtgcagtacaggcctttggcatcggtctttctagctttgacagtaagctggcgtgtgaatgagagaacagtcaggcagggagcccttctccccacagagctttcaggagcagacagtggcctccccttcccctccctgccccaggacttaaagagcaatagtttgccccttttggaatgatctctgaatatataaaacacacacacgaagagcaatagtttgccccttttggaacgacccctgaatatataaaacacacacacgaagagcaatagtttgccccttttggaacgacccctgaatatataaaacacacacacaccccgcgcactctcactccttttccaggtttcatagacttggtgagggatcacagcttagcatgggtgagagatgatttaaagcacagggagattcttgtcacattggggtctccaaagctagaatgggatttcatgtgcttggaaacttgcagtagaatcagggactgacatcgcagttcctctcctctcttcattccctcacagcagattggccggcaccaatcttagtcaagagtggctgtgatcacatttgtgatcaattatgtgagaattttatataattgtcttcatttcaattaaggctgaaagcataaactctagaggtgactcagtcaggactgacagtaatgtgataattgccttcattttcaacccaggagtgcctctcacagctatatgactacggatccattagtgaggagcgacacacacacctgtaggcatcctgtgcaaacactttgtcattatcaagagagatggcagtattgaccatttagtttagttaaaaaaaaaaaaaaaggtggcaggagaggctttggggaggatcagccagcagacatgagcactgctggcccgtgtggcagagctgtggactttcttctcggctccctcaaccctggctcaggcacagaaggtgttttgctacgtttttttgattattacacccctccacgtattatgtgactcttacaccagttcacccttcccagaacgtatccaaaccttgagaatgcaggagctctgtgagctccaccgtcagcaccattcagctgcatcccttgtgcacagaactgtttgccagcgttgggtgggacacccgtggcggctgctccctcagacctcccttctgtggactgacctctcacctccgcctgttgttcctgcaccacatcagataagcatgtgaaggagggccaactggcagctgcgggacccttggcttgtcccccaccgacaagtcccacctgctgggtgaggacgagactgtttccatctcaggcatgtatcccaccaagtgcctccctcacagccatgcccagaagcctcacacctcgtcaccaccaccaccccccaccccatcctgaggcactgcctggcagataaccctggttggccacagaagctattaatacacgacagcatgtggggaaggacttatggtgggccaggtggacctcatcctgcttcttcctccctctggtttaaagagatatataaactaatttcacataatttgtgtgtgcaggtgattggtttttacataagtcctatttataccttttatatgttacagaaataaaagttaatttatataaaaaaagtca

SEQ ID NO: 447958 - DNA, 2792 bp, Homo sapiens
gtaagctcaaatttagtttatgatctaattttttctgtctcaggtcagctattgtgaggctttgtcccattttgatacttacttttcattactctcaatattcatatacttaatttaacttttcagttttcctcattctgtcagaagactgaagacacgggtaaattactaagttgctttgtccactaagtgtttttcaaagagaatcagattttgagtctcggcctgttgttgctcatgtatggctgtcctttcaggatacaggcacttccggttctgctactgccgcccaaccagctgataacctcctgggagacatagacgacctggaggactttgtgtatagtcctgcccctcaaggtgtcacagtaagatgtcggataatccgggataaaaggggaatggatcggggtctcttccccacctactatatgtacttggaaaaagaagaaaatcagaagatatttcttcttgcagctagaaagcggaaaaagagcaaaacagccaactaccttatctccattgatccagttgatttatctcgtgaaggagaaagttatgtcggcaagcttagatccaacctcatggggaccaagtttacagtttatgaccgtggcatctgccccatgaagggccggggtttggtaggagcggcccacacccggcaggagctggctgccatctcctatgaaacaaacgtacttggatttaaaggtcctaggaaaatgtctgtgatcattcctggaatgacactgaatcataagcagatcccctatcagccacaaaacaaccatgacagtttgctctcaaggtggcagaacagaactatggaaaatctggttgagctgcacaacaaggcccccgtctggaacagtgacactcagtcctatgtcctcaacttccgtggccgggtcactcaggcgtctgtgaagaacttccagatagtccacaaaaatgaccctgattatatagtcatgcagtttggacgtgtggcagatgacgtgttcacactggattacaactacccactttgtgcagtacaggcctttggcatcggtctttctagctttgacagtaagctggcgtgtgaatgagagaacagtcaggcagggagcccttctccccacagagctttcaggagcagacagtggcctccccttcccctccctgccccaggacttaaagagcaatagtttgccccttttggaatgatctctgaatatataaaacacacacacaaagagcaatagtttgccccttttggaacgacccctgaatatataaaacacacacacgaagagcaatagtttgccccttttggaacgacccctgaatatataaaacacacacgaagagcaatagtttgccccttttggaacgacccctgaatatataaaacacacacacgaagagcaatagtttgccccttttggaacgacccctgaatatataaaacacacacacaccccgcgcactctcactccttttccaggtttcatagacttggtgagggatcacagcttagcatgggtgagagatgatttaaagcacagggagattcttgtcacattggggtctccaaagctagaatgggatttcatgtgcttggaaacttgcagtagaatcagggactgacatcgcagttcctctcctctcttcattccctcacagcagattggccggcaccaatcttagtcaagagtggctgtgatcacatttgtgatcaattatgtgagaattttatataattgtcttcatttcaattaaggctgaaagcataaactctagaggtgactcagtcaggactgacagtaatgtgataattgccttcattttcaacccaggagtgcctctcacagctatatgactacggatccattagtgaggagcgacacacacacctgtaggcatcctgtgcaaacactttgtcattatcaagagagatggcagtattgaccatttagtttagttaaaaaaaaaaaaaaaggtggcaggagaggctttggggaggatcagccagcagacatgagcactgctggcccgtgtggcagagctgtggactttcttctcggctccctcaaccctggctcaggcacagaaggtgttttgctacgtttttttgattattacacccctccacgtattatgtgactcttacaccagttcacccttcccagaacgtatccaaaccttgagaatgcaggagctctgtgagctccaccgtcagcaccattcagctgcatcccttgtgcacagaactgtttgccagcgttgggtgggacacccgtggcggctgctccctcagacctcccttctgtggactgacctctcacctccgcctgttgttcctgcaccacatcagataagcatgtgaaggagggccaactggcagctgcgggacccttggcttgtcccccaccgacaagtcccacctgctgggtgaggacgagactgtttccatctcaggcatgtatcccaccaagtgcctccctcacagccatgcccagaagcctcacacctcgtcaccaccaccaccccccaccccatcctgaggcactgcctggcagataaccctggttggccacagaagctattaatacacgacagcatgtggggaaggacttatggtgggccaggtggacctcatcctgcttcttcctccctctggtttaaagagatatataaactaatttcacataatttgtgtgtgcaggtgattggtttttacataagtcctatttataccttttatatgttacagaaataaaagttaatttatataaaaaaagtca

SEQ ID NO: 447959 - DNA, 1857 bp, Homo sapiens
acgcggcggcgtgccagcctagccactctagcgacggcggggaagagtgtgtacgtggtgggggcttcctcggtggcgggcatggaggcttcgcgctgccggctcagtcccagcggcgacagtgtcttccatgaagaaatgatgaagatgcgacaggctaagctggattatcagaggctactacttgagaagaggcaaaggaaaaagcgccttgagccatttatggtgcagcccaatccagaagccaggctacgtcgggcaaagccaagggccagtgatgagcagactcccttggtgaactgtcatactccccacagcaatgtcatcttacatggtattgatggtccagctgctgtcctgaaaccagacgaagttcatgctccatcagtaagctcctctgttgtggaagaagatgctgaaaacaccgtggatactgcttccaagccaggacttcaggagcgtctccaaaagcatgatatctctgaaagtgtgaacttcgatgaggagactgatggaatatcccagtcagcatgtttagaaagacccaattctgcatcaagccagaattcaaccgatacaggcacttccggttctgctactgccgcccaaccagctgataacctcctgggagacatagacgacctggaggactttgtgtatagtcctgcccctcaaggtgtcacagtaagatgtcggataatccgggataaaaggggaatggatcggggtctcttccccacctactatatgtacttggaaaaagaagaaaatcagaagatatttcttcttgcagctagaaagcggaaaaagagcaaaacagccaactaccttatctccattgatccagttgatttatctcgtgaaggagaaagttatgtcggcaagcttagatccaacctcatggggaccaagtttacagtttatgaccgtggcatctgccccatgaagggccggggtttggtaggagcggcccacacccggcaggagctggctgccatctcctatgaaacaaacgtacttggatttaaaggtcctaggaaaatgtctgtgatcattcctggaatgacactgaatcataagcagatcccctatcagccacaaaacaaccatgacagtttgctctcaaggtggcagaacagaactatggaaaatctggttgagctgcacaacaaggcccccgtctggaacagtgacactcagtcctatgtcctcaacttccgtggccgggtcactcaggcgtctgtgaagaacttccagatagtccacaaaaatgaccctgattatatagtcatgcagtttggacgtgtggcagatgacgtgttcacactggattacaactacccactttgtgcagtacaggcctttggcatcggtctttctagctttgacagtaagctggcgtgtgaatgagagaacagtcaggcagggagcccttctccccacagagctttcaggagcagacagtggcctccccttcccctccctgccccaggacttaaagagcaatagtttgccccttttggaatgatctctgaatatataaaacacacacacaaagagcaatagtttgccccttttggaacgacccctgaatatataaaacacacacacgaagagcaatagtttgccccttttggaacgacccctgaatatataaaacacacacgaagagcaatagtttgccccttttggaacgacccctgaatatataaaacacacacacgaagagcaatagtttgccccttttggaacgacccctgaatatataaaacacacacgatgagcaatagttcgcccctttgggaacgacgcatgaatatataaaacacacggcacgaagaagcatagtttggccct

SEQ ID NO: 447960 - DNA, 2004 bp, Homo sapiens
acgcggcggcgtgccagcctagccactctagcgacggcggggaagagtgtgtacgtggtgggggcttcctcggtggcgggcatggaggcttcgcgctgccggctcagtcccagcggcgacagtgtcttccatgaagaaatgatgaagatgcgacaggctaagctggattatcagaggctactacttgagaagaggcaaaggaaaaagcgccttgagccatttatggtgcagcccaatccagaagccaggctacgtcgggcaaagccaagggccagtgatgagcagactcccttggtgaactgtcatactccccacagcaatgtcatcttacatggtattgatggtccagctgctgtcctgaaaccagacgaagttcatgctccatcagtaagctcctctgttgtggaagaagatgctgaaaacaccgtggatactgcttccaagccaggacttcaggagcgtctccaaaagcatgatatctctgaaagtgtgaacttcgatgaggagactgatggaatatcccagtcagcatgtttagaaagacccaattctgcatcaagccagaattcaaccgatacaggcacttccggttctgctactgccgcccaaccagctgataacctcctgggagacatagacgacctggaggactttgtgtatagtcctgcccctcaaggtgtcacagtaagatgtcggataatccgggataaaaggggaatggatcggggtctcttccccacctactatatgtacttggaaaaagaagaaaatcagaagatatttcttcttgcagctagaaagcggaaaaagagcaaaacagccaactaccttatctccattgatccagttgatttatctcgtgaaggagaaagttatgtcggcaagcttagatccaacctcatggggaccaagtttacagtttatgaccgtggcatctgccccatgaagggccggggtttggtaggagcggcccacacccggcaggagctggctgccatctcctatgaaacaaacgtacttggatttaaaggtcctaggaaaatgtctgtgatcattcctggaatgacactgaatcataagcagatcccctatcagccacaaaacaaccatgacagtttgctctcaaggtggcagaacagaactatggaaaatctggttgagctgcacaacaaggcccccgtctggaacagtgacactcagtcctatgtcctcaacttccgtggccgggtcactcaggcgtctgtgaagaacttccagatagtccacaaaaatgaccctgattatatagtcatgcagtttggacgtgtggcagatgacgtgttcacactggattacaactacccactttgtgcagtacaggcctttggcatcggtctttctagctttgacaacgtatccaaaccttgagaatgcaggagctctgtgagctccaccgtcagcaccattcagctgcatcccttgtgcacagaactgtttgccagcgttgggtgggacacccgtggcggctgctccctcagacctcccttctgtggactgacctctcacctccgcctgttgttcctgcaccacatcagataagcatgtgaaggagggccaactggcagctgcgggacccttggcttgtcccccaccgacaagtcccacctgctgggtgaggacgagactgtttccatctcaggcatgtatcccaccaagtgcctccctcacagccatgcccagaagcctcacacctcgtcaccaccaccaccccccaccccatcctgaggcactgcctggcagataaccctggttggccacagaagctattaatacacgacagcatgtggggaaggacttatggtgggccaggtggacctcatcctgcttcttcctccctctggtttaaagagatatataaactaatttcacataatttgtgtgtgcaggtgattggtttttacataagtcctatttataccttttatatgttacagaaataaaagttaatttatataaaaaaagtca

SEQ ID NO: 447961 - DNA, 2109 bp, Homo sapiens
attagtagaatctgaaatgagatttttagatcatcaaagtctcttcttgtaaatgtgttagataggctttgtatctgcattttattttctaagagcatgttagggttttccttatgtgggaggtatgttacttgaaaaaagtgtaagtaaatgattattttaaaatgtattcttgtttaataaacgagtaaaaaattcatatagctgtcagctacatagtcgcctgatttgtttcatatattttgtggattattagtctttgccttatgtttgcactcagattctggcaattaaccgtggagaaaatttgaaggtactgacggttaaggtcaatatttctgatggagtgaaggatgaattctgtaggtggtgcatccaaaacaggtctgtttacagatatttacagaattttctttgtttcttttctaaaatatgataccgatatctatatgtactgatatgtaaagatgtctattacgtgaacatttttaaaaagccagtgacaggccgggcgcggtggctcacgcctgtaatcccagcactttcggaggcttgtcttgaactcctgacctagggtgatccacccgcctcggccaatacatacaatcttaatgtaatttccacaagggaagtacttccagtaggacttaattcagtggagacaaaaaggcaacctattacgttggtgcaaaagtaattgcggtttttgcctttttgttgtataacggcaaaaaccacaattatttttgctccaaccttaacacgtcatgatcactgttgaaacttgtgattccacatttgacttaaggcatttgcattattctctttcatttgcttttaaaaaaataaattggaacttaacctttttatgatatcattattataaaacatcacctcctgaagaaaattccacatttaggaggaataaagaggcagaggagtcactggcaaaaataccagatcagatattcaagcatctccctctggtgtcttttgtgtccaataaaagcctcaaagatcagtgtcatacactttgacctctgaatgttaaacggtaccagaatccaagttcataccatggctacaaagttaccaaggatttacatacttgtacatgaagttacatggtgttgtagggagatgaagggttccctgagtctggctgtgatcagctctaaacagaggattcaggtagtcggcccgattcttccacaggtgagcccataatgagtatgttctttcttgaatcctgttataaagaaaataagtctataaatgacctattttggtgcttacacacagtagatatgttatattaatgctggaaaggaactaataattgttacctgaaaaccacgtgtctgttcgatagcaggtaaatgtatcatcttggtgacttcatggtatagagggagaacactgtaataatctcaacttcaccaccatctgtactggccttgacaaggtgttcgattcgtgtgtgtgtgtgtgtgtgttaagctgttcttttggggggagttttttcccccaaatagtcattggacatttataatttgtcacacactattctaaatgttccacgttttctctcatttaatcctcactgagttgctgtgagctatgtctaatttacagatgaagaaactgaggaatagagagaataagtggtttcccaaagtcctatagctagtaagtggaaaagccatattcagacccaagcagatactgttagaattggctagtcaggtacaagaaaacaggtgaccctaaaggatacactctgctccttctaaatcatctccatctccatggaatcacacttgagcttccttagagaaaacaaactagtatccactacaaaaattaattttctttatgagtccatttcatttgaactgatcattccccaaattaaatctgataatgttgtatacaccatagttaaaaccatttcattttatgaaaatttaaaaaatgttctctcatgtatactgcctaaatcactttgttgtaagttttttactgtcacttattttaaagtccacaatttatctacttttacccttggataaatcaatacagttttaatctgaataaattctggctttt

SEQ ID NO: 447962 - DNA, 2591 bp, Homo sapiens
caggggagctcagtctgctatcgtacattaggcctgacgttaaagggctttcaacgcttcaggatattgaaataggagtgcagcatattttagcagatatgattgctaaagacaaagacacgcttgacttcattcggaacttgtgccagaagagacatgtttgtatccagtcatctctggcaaaagtatcctcaaaaaaggtaaatgagaaagatgttgataagtttctgctctaccagcatttttcctgcaacataagaaacattcaccatcatcagattctggcaattaaccgtggagaaaatttgaaggtactgacggttaaggtcaatatttctgatggagtgaaggatgaattctgtaggtggtgcatccaaaacaggtggagaccacgtagctttgcaaggccagagttaatgaagatcttatataattcactgaatgattcctttaaacgccttatttatcctcttctctgtagagaattcagagccaaactaacatcagatgcagagaaggaatcagtaatgatgtttggacggaaccttcgtcagctccttttaacaagccctgttccagggcgcaccttaatgggagtggatcctggttataaacatggttgcaaattagctataatttctcctactagtcagatacttcatactgatgtggtttacttgcattgtggacaaggcttccgagaggcggagaaaataaagacacttttgctgaatttcaactgcagcacagtagtgattggaaatggaactgcctgcagggaaacagaagcttactttgctgacctgataatgaagaattattttgcaccactggatgttgtttactgtatcgtcagtgaagcaggagcatcaatctacagtgtcagccctgaagctaacaaagagatgccagggctggaccctaatttgagaagtgcagtttccatagcaaggcgtgtacaagatccattagctgagctagtgaaaattgagccaaagcacattggagttggaatgtatcagcatgacgtatcccagactttactcaaggcaacactggacagtgttgtagaagaatgtgtcagctttgtgggagtggatattaacatctgttcagaagttttgttaaggcatattgcaggactcaatgccaacagggccaaaaatattattgaatggcgagagaaaaatggaccctttatcaaccgagaacagctgaagaaagtgaaagggctgggcccaaaatccttccaacagtgtgctggcttcatcagaatcaaccaggattatatccgaacgttttgcagtcagcaaactgaaacttcaggccaaattcaaggagttgctgtgacatcttcagcagacgttgaggtcacaaatgagaagcagggcaaaaagaagagcaaaactgcagtgaatgttttactgaagccaaatcctttggaccaaacttgtattcatccagaatcatatgacatagcaatgaggtttttgtcatccattggagggacactgtatgaggttggaaagcctgaaatgcaacaaaaaataaattcattccttgaaaaggaaggaatggagaaaattgcagaaagattgcaaacaacagtacacaccttacaggtcatcatagatggtctcagccagcctgaaagctttgactttcgaacagattttgataaacctgatttcaagagaagcatagtatgcctggaagatctgcagattgggacagttcttacaggcaaagttgagaatgccactctctttggaatttttgtggatataggagtggggaaatctgggctgattcccatacgaaatgtaacagaagcaaaactttcaaaaacaaagaagagaagaagccttggactgggccccggagaaagagtggaagtccaagtactcaacattgacatcccccgatctaggattactctggacctcattcgggtgttatgagtatcccacgaaggccagacgctgattttattttctcatttccacagattgacaaggataagtcagttgtttgtaaactctaggtagcagatgagaaataattcacttaatatcagaaatattttccaaacactttcctttattttttcttctgaataaatagaaaaccaacagtttgatttccttttcccttaaaggaaacaactaatacacattcttatatggctttatgtagtaatagttttctgactaaaattttgttttttattttttgtaatttatctttaactccttttgcattttgtataacagattgcttaacttctacttgccaacatctgccttgctggacttgtatgggattgtcttcttgatttgaattgtaccgtctttgttgacacagtagggctgggcagtgtttaatccttccattttatagatttttttttaatcaggccttttggacttcattcataattttgcaataatctcttttcccttgtcatgcaagccaaaaatataccagtaaaacagattctgacgtgtttgtagttatcaaatgaatggctcgaaacacttctcaaaaggatatacgtattgaccccaacaataaatgtttgtggctagtga

SEQ ID NO: 447963 - DNA, 2340 bp, Homo sapiens
gggtcttcctgtgtgtcaggattttttattctggcaattaaccgtggagaaaatttgaaggtactgacggttaaggtcaatatttctgatggagtgaaggatgaattctgtaggtggtgcatccaaaacaggtggagaccacgtagctttgcaaggccagagttaatgaagatcttatataattcactgaatgattcctttaaacgccttatttatcctcttctctgtagagaattcagagccaaactaacatcagatgcagagaaggaatcagtaatgatgtttggacggaaccttcgtcagctccttttaacaagccctgttccagggcgcaccttaatgggagtggatcctggttataaacatggttgcaaattagctataatttctcctactagtcagatacttcatactgatgtggtttacttgcattgtggacaaggcttccgagaggcggagaaaataaagacacttttgctgaatttcaactgcagcacagtagtgattggaaatggaactgcctgcagggaaacagaagcttactttgctgacctgataatgaagaattattttgcaccactggatgttgtttactgtatcgtcagtgaagcaggagcatcaatctacagtgtcagccctgaagctaacaaagagatgccagggctggaccctaatttgagaagtgcagtttccatagcaaggcgtgtacaagatccattagctgagctagtgaaaattgagccaaagcacattggagttggaatgtatcagcatgacgtatcccagactttactcaaggcaacactggacagtgttgtagaagaatgtgtcagctttgtgggagtggatattaacatctgttcagaagttttgttaaggcatattgcaggactcaatgccaacagggccaaaaatattattgaatggcgagagaaaaatggaccctttatcaaccgagaacagctgaagaaagtgaaagggctgggcccaaaatccttccaacagtgtgctggcttcatcagaatcaaccaggattatatccgaacgttttgcagtcagcaaactgaaacttcaggccaaattcaaggagttgctgtgacatcttcagcagacgttgaggtcacaaatgagaagcagggcaaaaagaagagcaaaactgcagtgaatgttttactgaagccaaatcctttggaccaaacttgtattcatccagaatcatatgacatagcaatgaggtttttgtcatccattggagggacactgtatgaggttggaaagcctgaaatgcaacaaaaaataaattcattccttgaaaaggaaggaatggagaaaattgcagaaagattgcaaacaacagtacacaccttacaggtcatcatagatggtctcagccagcctgaaagctttgactttcgaacagattttgataaacctgatttcaagagaagcatagtatgcctggaagatctgcagattgggacagttcttacaggcaaagttgagaatgccactctctttggaatttttgtggatataggagtggggaaatctgggctgattcccatacgaaatgtaacagaagcaaaactttcaaaaacaaagaagagaagaagccttggactgggccccggagaaagagtggaagtccaagtactcaacattgacatcccccgatctaggattactctggacctcattcgggtgttatgagtatcccacgaaggccagacgctgattttattttctcatttccacagattgacaaggataagtcagttgtttgtaaactctaggtagcagatgagaaataattcacttaatatcagaaatattttccaaacactttcctttattttttcttctgaataaatagaaaaccaacagtttgatttccttttcccttaaaggaaacaactaatacacattcttatatggctttatgtagtaatagttttctgactaaaattttgttttttattttttgtaatttatctttaactccttttgcattttgtataacagattgcttaacttctacttgccaacatctgccttgctggacttgtatgggattgtcttcttgatttgaattgtaccgtctttgttgacacagtagggctgggcagtgtttaatccttccattttatagatttttttttaatcaggccttttggacttcattcataattttgcaataatctcttttcccttgtcatgcaagccaaaaatataccagtaaaacagattctgacgtgtttgtagttatcaaatgaatggctcgaaacacttctcaaaaggatatacgtattgaccccaacaataaatgtttgtggctagtga

SEQ ID NO: 447964 - DNA, 1232 bp, Homo sapiens
agcaatcagagagactccgtgggcgtaggaccctccgagccatgtgcgggatataatctcgtggtgcgccgttttttaagccggtccgaaaagcgcaatattcgggtgggagtgacccgattttccagtttttgtcatccattggagggacactgtatgaggttggaaagcctgaaatgcaacaaaaaataaattcattccttgaaaaggaaggaatggagaaaattgcagaaagattgcaaacaacagtacacaccttacaggtcatcatagatggtctcagccagcctgaaagctttgactttcgaacagattttgataaacctgatttcaagagaagcatagtatgcctggaagatctgcagattgggacagttcttacaggcaaagttgagaatgccactctctttggaatttttgtggatataggagtggggaaatctgggctgattcccatacgaaatgtaacagaagcaaaactttcaaaaacaaagaagagaagaagccttggactgggccccggagaaagagtggaagtccaagtactcaacattgacatcccccgatctaggattactctggacctcattcgggtgttatgagtatcccacgaaggccagacgctgattttattttctcatttccacagattgacaaggataagtcagttgtttgtaaactctaggtagcagatgagaaataattcacttaatatcagaaatattttccaaacactttcctttattttttcttctgaataaatagaaaaccaacagtttgatttccttttcccttaaaggaaacaactaatacacattcttatatggctttatgtagtaatagttttctgactaaaattttgttttttattttttgtaatttatctttaactccttttgcattttgtataacagattgcttaacttctacttgccaacatctgccttgctggacttgtatgggattgtcttcttgatttgaattgtaccgtctttgttgacacagtagggctgggcagtgtttaatccttccattttatagatttttttttaatcaggccttttggacttcattcataattttgcaataatctcttttcccttgtcatgcaagccaaaaatataccagtaaaacagattctgacgtgtttgtagttatcaaatgaatggctcgaaacacttctcaaaaggatatacgtattgaccccaacaataaatgtttgtggctagtga

SEQ ID NO: 447965 - DNA, 2496 bp, Homo sapiens
caggggagctcagtctgctatcgtacattaggcctgacgttaaagggctttcaacgcttcaggatattgaaataggagtgcagcatattttagcagatatgattgctaaagacaaagacacgcttgacttcattcggaacttgtgccagaagagacatgtttgtatccagtcatctctggcaaaagtatcctcaaaaaaggtaaatgagaaagatgttgataagtttctgctctaccagcatttttcctgcaacataagaaacattcaccatcatcagattctggcaattaaccgtggagaaaatttgaaggtactgacggttaaggtcaatatttctgatggagtgaaggatgaattctgtaggtggtgcatccaaaacaggtggagaccacgtagctttgcaaggccagagttaatgaagatcttatataattcactgaatgattcctttaaacgccttatttatcctcttctctgtagagaattcagagccaaactaacatcagatgcagagaaggaatcagtaatgatgtttggacggaaccttcgtcagctccttttaacaagccctgttccagggcgcaccttaatgggagtggatcctggttataaacatggttgcaaattagctataatttctcctactagtcagatacttcatactgatgtggtttacttgcattgtggacaaggcttccgagaggcggagaaaataaagacacttttgctgaatttcaactgcagcacagtagtgattggaaatggaactgcctgcagggaaacagaagcttactttgctgacctgataatgaagaattattttgcaccactggatgttgtttactgtatcgtcagtgaagcaggagcatcaatctacagtgtcagccctgaagctaacaaagagatgccagggctggaccctaatttgagaagtgcagtttccatagcaaggcgtgtacaagatccattagctgagctagtgaaaattgagccaaagcacattggagttggaatgtatcagcatgacgtatcccagactttactcaaggcaacactggacagtgttgtagaagaatgtgtcagctttgtgggagtggatattaacatctgttcagaagttttgttaaggcatattgcaggactcaatgccaacagggccaaaaatattattgaatggcgagagaaaaatggaccctttatcaaccgagaacagctgaagaaagtgaaagggctgggcccaaaatccttccaacagtgtgctggcttcatcagaatcaaccaggattatatccgaacgttttgcagtcagcaaactgaaacttcaggccaaattcaaggagttgctgtgacatcttcagcagacgttgaggtcacaaatgagaagcagggcaaaaagaagagcaaaactgcagtgaatgttttactgaagccaaatcctttggaccaaacttgtattcatccagaatcatatgacatagcaatgaggtttttgtcatccattggagggacactgtatgaggttggaaagcctgaaatgcaacaaaaaataaattcattccttgaaaaggaaggaatggagaaaattgcagaaagattgcaaacaacagtacacaccttacaggtcatcatagatggtctcagccagcctgaaagctttgactttcgaacagattttgataaacctgatttcaagagaagcatagtatgcctggaagatctgcagattgggacagttcttacaggcaaagttgagaatgccactctctttggaatttttgtggatataggagtggggaaatctgggctgattcccatacgaaatgtaacagaagcaaaactttcaaaaacaaagaagagaagaagccttggactgggccccggagaaagagtggaagtccaagtactcaacattgacatcccccgatctaggattactctggacctcattcgggtgttatgagtatcccacgaaggccagacgctgattttattttctcatttccacagattgacaaggataagtcagttgtttgtaaactctaggtagcagatgagaaataattcacttaatatcagaaatattttccaaacactttcctttattttttcttctgaataaatagaaaaccaacagtttgatttccttttcccttaaaggaaacaactaatacacattcttatatggctttatgtagtaatagttttctgactaaaattttgttttttattttttgtaatttatctttaactccttttgcattttgtataacagattgcttaacttctacttgccaacatctgccttgctggacttgtatgggattgtcttcttgatttgaattgtaccgtctttgttgacacagtagggctgggcagtgtttaatccttccattttatagatttttttttaatcaggccttttggacttcattcataattttgcaataatctcttttcccttgtcatgcaagccaaaaatataccagtaaaacaga

SEQ ID NO: 447966 - DNA, 2529 bp, Homo sapiens
caggggagctcagtctgctatcgtacattaggcctgacgttaaagggctttcaacgcttcaggatattgaaataggagtgcagcatattttagcagatatgattgctaaagacaaagacacgcttgacttcattcggaacttgtgccagaagagacatgtttgtatccagtcatctctggcaaaagtatcctcaaaaaaggtaaatgagaaagatgttgataagtttctgctctaccagcatttttcctgcaacataagaaacattcaccatcatcagattctggcaattaaccgtggagaaaatttgaaggtactgacggttaaggtcaatatttctgatggagtgaaggatgaattctgtaggtggtgcatccaaaacaggtggagaccacgtagctttgcaaggccagagttaatgaagatcttatataattcactgaatgattcctttaaacgccttatttatcctcttctctgtagagaattcagagccaaactaacatcagatgcagagaaggaatcagtaatgatgtttggacggaaccttcgtcagctccttttaacaagccctgttccagggcgcaccttaatgggagtggatcctggttataaacatggttgcaaattagctataatttctcctactagtcagatacttcatactgatgtggtttacttgcattgtggacaaggcttccgagaggcggagaaaataaagacacttttgctgaatttcaactgcagcacagtagtgattggaaatggaactgcctgcagggaaacagaagcttactttgctgacctgataatgaagaattattttgcaccactggatgttgtttactgtatcgtcagtgaagcaggagcatcaatctacagtgtcagccctgaagctaacaaagagatgccagggctggaccctaatttgagaagtgcagtttccatagcaaggcgtgtacaagatccattagctgagctagtgaaaattgagccaaagcacattggagttggaatgtatcagctttgtgggagtggatattaacatctgttcagaagttttgttaaggcatattgcaggactcaatgccaacagggccaaaaatattattgaatggcgagagaaaaatggaccctttatcaaccgagaacagctgaagaaagtgaaagggctgggcccaaaatccttccaacagtgtgctggcttcatcagaatcaaccaggattatatccgaacgttttgcagtcagcaaactgaaacttcaggccaaattcaaggagttgctgtgacatcttcagcagacgttgaggtcacaaatgagaagcagggcaaaaagaagagcaaaactgcagtgaatgttttactgaagccaaatcctttggaccaaacttgtattcatccagaatcatatgacatagcaatgaggtttttgtcatccattggagggacactgtatgaggttggaaagcctgaaatgcaacaaaaaataaattcattccttgaaaaggaaggaatggagaaaattgcagaaagattgcaaacaacagtacacaccttacaggtcatcatagatggtctcagccagcctgaaagctttgactttcgaacagattttgataaacctgatttcaagagaagcatagtatgcctggaagatctgcagattgggacagttcttacaggcaaagttgagaatgccactctctttggaatttttgtggatataggagtggggaaatctgggctgattcccatacgaaatgtaacagaagcaaaactttcaaaaacaaagaagagaagaagccttggactgggccccggagaaagagtggaagtccaagtactcaacattgacatcccccgatctaggattactctggacctcattcgggtgttatgagtatcccacgaaggccagacgctgattttattttctcatttccacagattgacaaggataagtcagttgtttgtaaactctaggtagcagatgagaaataattcacttaatatcagaaatattttccaaacactttcctttattttttcttctgaataaatagaaaaccaacagtttgatttccttttcccttaaaggaaacaactaatacacattcttatatggctttatgtagtaatagttttctgactaaaattttgttttttattttttgtaatttatctttaactccttttgcattttgtataacagattgcttaacttctacttgccaacatctgccttgctggacttgtatgggattgtcttcttgatttgaattgtaccgtctttgttgacacagtagggctgggcagtgtttaatccttccattttatagatttttttttaatcaggccttttggacttcattcataattttgcaataatctcttttcccttgtcatgcaagccaaaaatataccagtaaaacagattctgacgtgtttgtagttatcaaatgaatggctcgaaacacttctcaaaaggatatacgtattgaccccaacaataaatgtttgtggctagtga

SEQ ID NO: 447967 - DNA, 2537 bp, Homo sapiens
caggggagctcagtctgctatcgtacattaggcctgacgttaaagggctttcaacgcttcaggatattgaaataggagtgcagcatattttagcagatatgattgctaaagacaaagacacgcttgacttcattcggaacttgtgccagaagagacatgtttgtatccagtcatctctggcaaaagtatcctcaaaaaaggtaaatgagaaagatgttgataagtttctgctctaccagcatttttcctgcaacataagaaacattcaccatcatcagattctggcaattaaccgtggagaaaatttgaaggtactgacggttaaggtcaatatttctgatggagtgaaggatgaattctgtaggtggtgcatccaaaacaggtggagaccacgtagctttgcaaggccagagttaatgaagatcttatataattcactgaatgattcctttaaacgccttatttatcctcttctctgtagagaattcagagccaaactaacatcagatgcagagaaggaatcagtaatgatgtttggacggaaccttcgtcagctccttttaacaagccctgttccagggcgcaccttaatgggagtggatcctggttataaacatggttgcaaattagctataatttctcctactagtcagatacttcatactgatgtggtttacttgcattgtggacaaggcttccgagaggcggagaaaataaagacacttttgctgaatttcaactgcagcacagtagtgattggaaatggaactgcctgcagggaaacagaagcttactttgctgacctgataatgaagaattattttgcaccactggatgttgtttactgtatcgtcagtgaagcaggagcatcaatctacagtgtcagccctgaagctaacaaagagatgccagggctggaccctaatttgagaagtgcagtttccatagcaaggcgtgtacaagatccattagctgagctagtgaaaattgagccaaagcacattggagttggaatgtatcagcatgacgtatcccagactttactcaaggcaacactggacagtgttgtagaagaatgtgtcagctttgtgggagtggatattaacatctgttcagaagttttgttaaggcatattgcaggactcaatgccaacagggccaaaaatattattgaatggcgagagaaaaatggaccctttatcaaccgagaacagctgaagaaagtgaaagggctgggcccaaaatccttccaacagtgtgctggcttcatcagaatcaaccaggattatatccgaacgttttgcagtcagcaaactgaaacttcaggccaaattcaaggagttgctgtgacatcttcagcagacgttgaggtcacaaatgagaagcagggcaaaaagaagagcaaaactgcagtgaatgttttactgaagccaaatcctttggaccaaacttgtattcatccagaatcatatgacatagcaatgaggtttttgtcatccattggagggacactgtatgaggttggaaagcctgaaatgcaacaaaaaataaattcattccttgaaaaggaaggaatggagaaaattgcagaaagattgcaaacaacagtacacaccttacaggtcatcatagatggtctcagccagcctgaaagctttgactttcgaacagattttgataaacctgatttcaagagaagcatagtatgcctggaagatctgcagattgggacagttcttacaggcaaagttgagaatgccactctctttggaatttttgtggatataggagtggggaaatctgggctgattcccatacgaaatgtaacagaagcaaaactttcaaaaacaaagaagagaagaagccttggactgggccccggagaaagagtggaagtccaagtactcaacattgacatcccccgatctaggattactctggacctcattcgggtgttatgagtatcccacgaaggccagacgctgattttattttctcatttccacagattgacaaggataagtcagttgtttgtaaactctaggtagcagatgagaaataattcacttaatatcagaaatattttccaaacactttcctttattttttcttctgaataaatagaaaaccaacagtttgatttccttttcccttaaaggaaacaactaatacacattcttatatggctttatgtagtaatagttttctgagtataacagattgcttaacttctacttgccaacatctgccttgctggacttgtatgggattgtcttcttgatttgaattgtaccgtctttgttgacacagtagggctgggcagtgtttaatccttccattttatagatttttttttaatcaggccttttggacttcattcataattttgcaataatctcttttcccttgtcatgcaagccaaaaatataccagtaaaacagattctgacgtgtttgtagttatcaaatgaatggctcgaaacacttctcaaaaggatatacgtattgaccccaacaataaatgtttgtggctagtga

SEQ ID NO: 447968 - DNA, 1468 bp, Homo sapiens
gaaagagccgaggtgggctcgaggccgacgcgaccatcgtttgtcgacgccgctgccaccgcctgcctgagagaagtcgtcgcggccgaccccgtcgcctccgccggctaccatgtccgcccaggcgcagatgcgggccctgctggaccagctcatgggcacggctcgggacggagacgaaaccagacagagggtcaagtttacagatgaccgtgtctgcaagagtcaccttctggactgctgcccccatgacatcctggctgggacgcgcatggatttaggagaatgtaccaaaatccacgacttggccctccgagcagattatgagattgcaagtaaagaaagagacctgttttttgaattagatgcaatggatcacttggagtcctttattgctgaatgtgatcggagaactgagctcgccaagaagcggctggcagaaacacaggaggaaatcagtgcggaagtttctgcaaaggcagaaaaagtacatgagttaaatgaagaaataggaaaactccttgctaaagccgaacagctaggggctgaaggtaatgtggatgaatcccagaagattcttatggaagtggaaaaagttcgtgcgaagaaaaaagaagctgaggaagaatacagaaattccatgcctgcatccagttttcagcagcaaaagctgcgtgtctgcgaggtctgttcagcctaccttggtctccatgacaatgaccgtcgcctggcagaccacttcggtggcaagttacacttggggttcattcagatccgagagaagcttgatcagttgaggaaaactgtcgctgaaaagcaggagaagagaaatcaggatcgcttgaggaggagagaggagagggaacgggaggagcgtctgagcaggaggtcgggatcaagaaccagagatcgcaggaggtcacgctcccgggatcggcgtcggaggcggtcaagatctacctcccgagagcgacggaaattgtcccggtcccggtcccgagatagacatcggcgccaccgcagccgttcccggagccacagccggggacatcgtcgggcttcccgggaccgaagtgcgaaatacaagttctccagagagcgggcatccagagaggagtcctgggagagcgggcggagcgagcgagggcccccggactggaggcttgagagctccaacgggaagatggcttcacggaggtcagaagagaaggaggccggcgagatctgaacccgtctcccgggtgctgtaaatagtctgataaacgttcacacagtctaaaattaccctttatatttgctgaatacaactcatcttttgtagtttaaaatttctattgttttggagctagctgtgagtttctagaagtgtacagagttgctcctgtgttcccgggtcatgttgagtaggaataaataaatctgatgctgcctcctgaggctgcggggggtttctgctgtcctctgcgta

SEQ ID NO: 447969 - DNA, 316 bp, Homo sapiens
  misc_feature (21)..(21): n is a, c, g, or t
  misc_feature (304)..(304): n is a, c, g, or t
tctagagtttcccctgtgganaagaggagatgtgggaagaatagatctagattatttaacagtcttcgatagagtttgaaagctttcttcttcattcaattttgggcaaaatactgcctctgcatttgttcataacaaaaagattagattaataagtagcttttgttggtggaaattaccagctctataagtcacccttggtggttcatggacctctgattagcttgggttttgcccaaaattgaatgaagaagaaagctttcaaactctatcgaagactgttaaataatctagatctattctncacatatcctgt

SEQ ID NO: 447970 - DNA, 1436 bp, Homo sapiens
gaaagagccgaggtgggctcgaggccgacgcgaccatcgtttgtcgacgccgctgccaccgcctgcctgagagaagtcgtcgcggccgaccccgtcgcctccgccggctaccatgtccgcccaggcgcagatgcgggccctgctggaccagctcatgggcacggctcgggacggagacgaaaccagacagagggtcaagtttacagatgaccgtgtctgcaagagtcaccttctggactgctgcccccatgacatcctggctgggacgcgcatggatttaggagaatgtaccaaaatccacgacttggccctccgagcagattatgagattgcaagtaaagaaagagacctgttttttgaattagatgcaatggatcacttggagtcctttattgctgaatgtgatcggagaactgagctcgccaagaagcggctggcagaaacacaggaggaaatcagtgcggaagtttctgcaaaggcagaaaaagtacatgagttaaatgaagaaataggaaaactccttgctaaagccgaacagctaggggctgaaggtaatgtggatgaatcccagaagattcttatggaagtggaaaaagttcgtgcgaagaaaaaagaagctgaggaagaatacagaaattccatgcctgcatccagttttcagcagcaaaagctgcgtgtctgcgaggtctgttcagcctaccttggtctccatgacaatgaccgtcgcctggcagaccacttcggtggcaagttacacttggggttcattcagatccgagagaagcttgatcagttgaggaaaactgtcgctgaaaagcaggagaagagaaatcaggatcgcttgaggaggagagaggagagggaacgggaggagcgtctgagcaggaggtcgggatcaagaaccagagatcgcaggaggtcacgctcccgggatcggcgtcggaggcggtcaagatctacctcccgagagcgacggaaattgtcccggtcccggtcccgagatagacatcggcgccaccgcagccgttcccggagccacagccggggacatcgtcgggcttcccgggaccgaagtgcgaaatacaagttctccagagagcgggcatccagagaggagtcctgggagagcgggcggagcgagcgagggcccccggactggaggcttgagagctccaacgggaagatggcttcacggaggtcagaagagaaggaggccggcgagatctgaacccgtctcccgggtgctgtaaatagtctgataaacgttcacacagtctaaaattaccctttatatttgctgaatacaactcatcttttgtagtttaaaatttctattgttttggagctagctgtgagtttctagaagtgtacagagttgctcctgtgttcccgggtcatgttgagtaggaataaataaatctgatgctgcctcctga

SEQ ID NO: 447971 - DNA, 1531 bp, Homo sapiens
gaaagagccgaggtgggctcgaggccgacgcgaccatcgtttgtcgacgccgctgccaccgcctgcctgagagaagtcgtcgcggccgaccccgtcgcctccgccggctaccatgtccgcccaggcgcagatgcgggccctgctggaccagctcatgggcacggctcgggacggagacgaaaccagacagagggtcaagtttacagatgaccgtgtctgcaagagtcaccttctggactgctgcccccatgacatcctggctgggacgcgcatggatttaggagaatgtaccaaaatccacgacttggccctccgagcagattatgagattgcaagtaaagaaagagacctgttttttgaattagatgcaatggatcacttggagtcctttattgctgaatgtgatcggagaactgagctcgccaagaagcggctggcagaaacacaggaggaaatcagtgcggaagtttctgcaaaggcagaaaaagtacatgagttaaatgaagaaataggaaaactccttgctaaagccgaacagctaggggctgaaggtaatgtggatgaatcccagaagattcttatggaagtggaaaaagttcgtgcgaagaaaaaagaagctgaggaagaatacagaaattccatgcctgcatccagttttcagcagcaaaagctgcgtgtctgcgaggtctgttcagcctaccttggtctccatgacaatgaccgtcgcctggcagaccacttcggtggcaagttacacttggggttcattcagatccgagagaagcttgatcagttgaggaaaactgtcgctgaaaagcaggagaagagaaatcaggatcgcttgaggaggagagaggagagggaacgggaggagcgtctgagcaggaggtcgggatcaagaaccagagatcgcaggaggtcacgctcccgggatcggcgtcggaggcggtcaagatctacctcccgagagcgacggaaattgtcccggtcccggtcccgagatagacatcggcgccaccgcagccgttcccggagccacagccggggacatcgtcgggcttcccgggaccgaagtgcgaaatacaagtaactactctgactccttcggtagctgcaaccaggagtgagcccttctctgtgttcccagggtctgctgagggccgtgtctggtggggatggggctgggctcaccctcaggagtagggctggggagtcgtgaacgggactcaggtgtgggaagaggcgagagggctgtggaggagctcgcacggcgccaggtgatgggctgcacaggcactgtcccctgcctgcgtcctggggcctgtgcactgttgcgtccatgctcagagtggctgagacttgtgtcctgaccaggccctgcttacctctgttttggtttttgtttttgatatttttttttccattgtgtttttacgtagtgtcatgttctgtgcatatagtgttgtattctcctttgcactgtttatgttacagtgaaggctctccttattaaaaatcttcgcaaaggtca

SEQ ID NO: 447972 - DNA, 3378 bp, Homo sapiens
  misc_feature (1993)..(1993): n is a, c, g, or t
gaaagagccgaggtgggctcgaggccgacgcgaccatcgtttgtcgacgccgctgccaccgcctgcctgagagaagtcgtcgcggccgaccccgtcgcctccgccggctaccatgtccgcccaggcgcagatgcgggccctgctggaccagctcatgggcacggctcgggacggtgagtcagagcggccaaccaggcgagggtctggggtgggagtgaggcgaggccgccgggcggcctgaggcgggggccgcgatcgtctgcgcctgcgcctgcgcggggcatcgctcctcctcccccgcgctccgaccgcaggcgccgggcctttgtctaagccggtgcgtctctgaggcggccgtgggtccaggtcgggctcctctctcggagtctgcgccatggatggggcttcagcctccttcctatgtaccgtcctgctacttcctccccggcgggcgccgcggctccgtgcccctccgcgaactgtggagtcggcggagggctggaatcagcgtgggctccaggtcgctggcagccgggtggcagaactcttccgaggctccttgggaagaagctacacccgagggagccggatgggcctcgaaaacctggcccgctctggttctgtaccattgcaaggggaaccgtaaactgagcttttctaacgtgggtttctgccaagtacttttccagctgcccccttccccccagcacacaggagagcctctgtgtagccagcgcttgacagtcgttaggtaggttgtactgtgtagggaggagctcaagatcatgatggttgtcacaggagaaagcggttgcatctttgcaaaactatatacctgctgtggtttgtgttttcttttctgctgagtaatgaagttgtaagttcacactggcacattctcagggctgtgcagattatttgcactttatttcataggtgaataagtgctttttagctttctttgtatattgagttgcttttgaattgcttcccatatttttatttcatacaaactgaacaattgtggcccctctattttatttataaaggttcagtgtatctttgcctgcctacatcaatctgcaagggagttgcagaaagcctcatgttcatcgagccgtgagtcacaaccaatttctaagctgttataacaaaaaagtgtttgctttttttcacaagtaactttaaaagtgtagtttagaaagaaaacattttcaataaaaagacactacattaatcctggatgcttgcaaatcctaaaatatattcctcctctagcgttgcacagctctgtgttgtatacacagactagctttaaaatttgtcacataccactttacctttacttttatgtatcattcccccgacttccttactgcaggtgtgggcaagaaaacttttcctttaacacttttcaacagcgggcataaaattctgcagctgaggtcttgaagaatgcagatgggtacagtatgtgttggagctcacagtgtgtattgactaacctagttccttttttgctttttttggtattgtcttgttaaaagtgactcccaggtagcaactctcttttttaagggtgggaacgaaagggacgtaggaagaatagatctagattatttaacagtcttcgatagagtttgaaagctttcttcttcattcaattttgggcaaaatactgcctctgcatttgttcataacaaaaagattagattaataagtagcttttgttggtggaaattaccagctctataagtcacccttggtggttcatggacctctgattagcttgggttttgcagtctcattgccacatgtatatgtggagccaatggccttttggtgctcagctgtttacgtctgactccttgacttctttggtacagtgatggagtcagatctcattaagtgtgattctccatgatataactagcctcaaaaaaatgtgtattccactccagttgtaaatatctttagatcagcttttcattgnatttgatggggagaacacagaaatgatagtctgcaaatcatccaggtgaattgttatactagttattttttggtggttaatgtgataatattgtcttatttaaaaccacaaatgaatttcaggagacgaaaccagacagagggtcaagtttacagatgaccgtgtctgcaagagtcaccttctggactgctgcccccatgacatcctggctgggacgcgcatggatttaggagaatgtaccaaaatccacgacttggccctccgagcagattatgagattgcaagtaaagaaagagacctgttttttgaattagatgcaatggatcacttggagtcctttattgctgaatgtgatcggagaactgagctcgccaagaagcggctggcagaaacacaggaggaaatcagtgcggaagtttctgcaaaggcagaaaaagtacatgagttaaatgaagaaataggaaaactccttgctaaagccgaacagctaggggctgaaggtaatgtggatgaatcccagaagattcttatggaagtggaaaaagttcgtgcgaagaaaaaagaagctgaggaagaatacagaaattccatgcctgcatccagttttcagcagcaaaagctgcgtgtctgcgaggtctgttcagcctaccttggtctccatgacaatgaccgtcgcctggcagaccacttcggtggcaagttacacttggggttcattcagatccgagagaagcttgatcagttgaggaaaactgtcgctgaaaagcaggagaagagaaatcaggatcgcttgaggaggagagaggagagggaacgggaggagcgtctgagcaggaggtcgggatcaagaaccagagatcgcaggaggtcacgctcccgggatcggcgtcggaggcggtcaagatctacctcccgagagcgacggaaattgtcccggtcccggtcccgagatagacatcggcgccaccgcagccgttcccggagccacagccggggacatcgtcgggcttcccgggaccgaagtgcgaaatacaagttctccagagagcgggcatccagagaggagtcctgggagagcgggcggagcgagcgagggcccccggactggaggcttgagagctccaacgggaagatggcttcacggaggtcagaagagaaggaggccggcgagatctgaacccgtctcccgggtgctgtaaatagtctgataaacgttcacacagtctaaaattaccctttatatttgctgaatacaactcatcttttgtagtttaaaatttctattgttttggagctagctgtgagtttctagaagtgtacagagttgctcctgtgttcccgggtcatgttgagtaggaataaataaatctgatgctgcctcctga

SEQ ID NO: 447973 - DNA, 3080 bp, Homo sapiens
  misc_feature (1695)..(1695): n is a, c, g, or t
gaaagagccgaggtgggctcgaggccgacgcgaccatcgtttgtcgacgccgctgccaccgcctgcctgagagaagtcgtcgcggccgaccccgtcgcctccgccggctaccatgtccgcccaggcgcagatgcgggccctgctggaccagctcatgggcacggctcgggacggtgagtcagagcggccaaccaggcgagggtctggggtgggagtgaggcgaggccgccgggcggcctgaggcgggggccgcgatcgtctgcgcctgcgcctgcgcggggcatcgctcctcctcccccgcgctccgaccgcaggcgccgggcctttgtctaagccggtgcgtctctgaggcggccgtgggtccaggtcgggctcctctctcggagtctgcgccatggatggggcttcagcctccttcctatgtaccgtcctgctacttcctccccggcgggcgccgcggctccgtgcccctccgcgaactgtggagtcggcggagggctggaatcagcgtgggctccaggtcgctggcagccgggtggcagaactcttccgaggctccttgggaagaagctacacccgagggagccggatgggcctcgaaaacctggcccgctctggttctgtaccattgcaaggggaaccgtaaactgagcttttctaacgtgggtttctgccaagtacttttccagctgcccccttccccccagcacacaggagagcctctgtgtagccagcgcttgacagtcgttaggttcagtgtatctttgcctgcctacatcaatctgcaagggagttgcagaaagcctcatgttcatcgagccgtgagtcacaaccaatttctaagctgttataacaaaaaagtgtttgctttttttcacaagtaactttaaaagtgtagtttagaaagaaaacattttcaataaaaagacactacattaatcctggatgcttgcaaatcctaaaatatattcctcctctagcgttgcacagctctgtgttgtatacacagactagctttaaaatttgtcacataccactttacctttacttttatgtatcattcccccgacttccttactgcaggtgtgggcaagaaaacttttcctttaacacttttcaacagcgggcataaaattctgcagctgaggtcttgaagaatgcagatgggtacagtatgtgttggagctcacagtgtgtattgactaacctagttccttttttgctttttttggtattgtcttgttaaaagtgactcccaggtagcaactctcttttttaagggtgggaacgaaagggacgtaggaagaatagatctagattatttaacagtcttcgatagagtttgaaagctttcttcttcattcaattttgggcaaaatactgcctctgcatttgttcataacaaaaagattagattaataagtagcttttgttggtggaaattaccagctctataagtcacccttggtggttcatggacctctgattagcttgggttttgcagtctcattgccacatgtatatgtggagccaatggccttttggtgctcagctgtttacgtctgactccttgacttctttggtacagtgatggagtcagatctcattaagtgtgattctccatgatataactagcctcaaaaaaatgtgtattccactccagttgtaaatatctttagatcagcttttcattgnatttgatggggagaacacagaaatgatagtctgcaaatcatccaggtgaattgttatactagttattttttggtggttaatgtgataatattgtcttatttaaaaccacaaatgaatttcaggagacgaaaccagacagagggtcaagtttacagatgaccgtgtctgcaagagtcaccttctggactgctgcccccatgacatcctggctgggacgcgcatggatttaggagaatgtaccaaaatccacgacttggccctccgagcagattatgagattgcaagtaaagaaagagacctgttttttgaattagatgcaatggatcacttggagtcctttattgctgaatgtgatcggagaactgagctcgccaagaagcggctggcagaaacacaggaggaaatcagtgcggaagtttctgcaaaggcagaaaaagtacatgagttaaatgaagaaataggaaaactccttgctaaagccgaacagctaggggctgaaggtaatgtggatgaatcccagaagattcttatggaagtggaaaaagttcgtgcgaagaaaaaagaagctgaggaagaatacagaaattccatgcctgcatccagttttcagcagcaaaagctgcgtgtctgcgaggtctgttcagcctaccttggtctccatgacaatgaccgtcgcctggcagaccacttcggtggcaagttacacttggggttcattcagatccgagagaagcttgatcagttgaggaaaactgtcgctgaaaagcaggagaagagaaatcaggatcgcttgaggaggagagaggagagggaacgggaggagcgtctgagcaggaggtcgggatcaagaaccagagatcgcaggaggtcacgctcccgggatcggcgtcggaggcggtcaagatctacctcccgagagcgacggaaattgtcccggtcccggtcccgagatagacatcggcgccaccgcagccgttcccggagccacagccggggacatcgtcgggcttcccgggaccgaagtgcgaaatacaagttctccagagagcgggcatccagagaggagtcctgggagagcgggcggagcgagcgagggcccccggactggaggcttgagagctccaacgggaagatggcttcacggaggtcagaagagaaggaggccggcgagatctgaacccgtctcccgggtgctgtaaatagtctgataaacgttcacacagtctaaaattaccctttatatttgctgaatacaactcatcttttgtagtttaaaatttctattgttttggagctagctgtgagtttctagaagtgtacagagttgctcctgtgttcccgggtcatgttgagtaggaataaataaatctgatgctgcctcctga

SEQ ID NO: 447974 - DNA, 2064 bp, Homo sapiens
gaaagagccgaggtgggctcgaggccgacgcgaccatcgtttgtcgacgccgctgccaccgcctgcctgagagaagtcgtcgcggccgaccccgtcgcctccgccggctaccatgtccgcccaggcgcagatgcgggccctgctggaccagctcatgggcacggctcgggacggagacgaaaccagacagagggtcaagtttacagatgaccgtgtctgcaagagtcaccttctggactgctgcccccatgacatcctggctgggacgcgcatggatttaggagaatgtaccaaaatccacgacttggccctccgagcagattatgagattgcaagtaaagaaagagacctgttttttgaattagatgcaatggatcacttggagtcctttattgctgaatgtgatcggagaactgagctcgccaagaagcggctggcagaaacacaggaggaaatcagtgcggaagtttctgcaaaggcagaaaaagtacatgagttaaatgaagaaataggaaaactccttgctaaagccgaacagctaggggctgaaggtaatgtggatgaatcccagaagattcttatggaagtggaaaaagttcgtgcgaagaaaaaagaagctgaggaagaatacagaaattccatgcctgcatccagttttcagcagcaaaagctgcgtgtctgcgaggtctgttcagcctaccttggtctccatgacaatgaccgtcgcctggcagaccacttcggtggcaagttacacttggggttcattcagatccgagagaagcttgatcagttgaggaaaactgtcgctgaaaagcaggagaagagaaatcaggatcgcttgaggaggagagaggagagggaacgggaggagcgtctgagcaggaggtcgggatcaagaaccagagatcgcaggaggtcacgctcccgggatcggcgtcggaggcggtcaagatctacctcccgagagcgacggaaattgtcccggtcccggtcccgagatagacatcggcgccaccgcagccgttcccggagccacagccggggacatcgtcgggcttcccgggaccgaagtgcgaaatacaagtaactactctgactccttcggtagctgcaaccaggagtgagcccttctctgtgttcccagggtctgctgagggccgtgtctggtggggatggggctgggctcaccctcaggagtagggctggggagtcgtgaacgggactcaggtgtgggaagaggcgagagggctgtggaggagctcgcacggcgccaggtgatgggctgcacaggcactgtcccctgcctgcgtcctggggcctgtgcactgttgcgtccatgctcagagtggctgagacttgtgtcctgaccaggccctgcttacctctgttttggtttttgtttttgatatttttttttccattgtgtttttacgtagtgtcatgttctgtgcatatagtgttgtattctcctttgcactgtttatgttacagtgaaggctctccttattaaaaatcttcgcaaaggtcactttttaatggctatctaacactccatatgtggtgggcaagtctggttggcctccggggggtttccaggtataggggatgtagggccttgcctggcctggtctgcgggtccatcgtcagtgcctgagcggccagcagaaggggggcagcagcctccactgagcctctggttcccatttcccaggttctccagagagcgggcatccagagaggagtcctgggagagcgggcggagcgagcgagggcccccggactggaggcttgagagctccaacgggaagatggcttcacggaggtcagaagagaaggaggccggcgagatctgaacccgtctcccgggtgctgtaaatagtctgataaacgttcacacagtctaaaattaccctttatatttgctgaatacaactcatcttttgtagtttaaaatttctattgttttggagctagctgtgagtttctagaagtgtacagagttgctcctgtgttcccgggtcatgttgagtaggaataaataaatctgatgctgcctcctga

SEQ ID NO: 447975 - DNA, 3854 bp, Homo sapiens
  misc_feature (1993)..(1993): n is a, c, g, or t
gaaagagccgaggtgggctcgaggccgacgcgaccatcgtttgtcgacgccgctgccaccgcctgcctgagagaagtcgtcgcggccgaccccgtcgcctccgccggctaccatgtccgcccaggcgcagatgcgggccctgctggaccagctcatgggcacggctcgggacggtgagtcagagcggccaaccaggcgagggtctggggtgggagtgaggcgaggccgccgggcggcctgaggcgggggccgcgatcgtctgcgcctgcgcctgcgcggggcatcgctcctcctcccccgcgctccgaccgcaggcgccgggcctttgtctaagccggtgcgtctctgaggcggccgtgggtccaggtcgggctcctctctcggagtctgcgccatggatggggcttcagcctccttcctatgtaccgtcctgctacttcctccccggcgggcgccgcggctccgtgcccctccgcgaactgtggagtcggcggagggctggaatcagcgtgggctccaggtcgctggcagccgggtggcagaactcttccgaggctccttgggaagaagctacacccgagggagccggatgggcctcgaaaacctggcccgctctggttctgtaccattgcaaggggaaccgtaaactgagcttttctaacgtgggtttctgccaagtacttttccagctgcccccttccccccagcacacaggagagcctctgtgtagccagcgcttgacagtcgttaggtaggttgtactgtgtagggaggagctcaagatcatgatggttgtcacaggagaaagcggttgcatctttgcaaaactatatacctgctgtggtttgtgttttcttttctgctgagtaatgaagttgtaagttcacactggcacattctcagggctgtgcagattatttgcactttatttcataggtgaataagtgctttttagctttctttgtatattgagttgcttttgaattgcttcccatatttttatttcatacaaactgaacaattgtggcccctctattttatttataaaggttcagtgtatctttgcctgcctacatcaatctgcaagggagttgcagaaagcctcatgttcatcgagccgtgagtcacaaccaatttctaagctgttataacaaaaaagtgtttgctttttttcacaagtaactttaaaagtgtagtttagaaagaaaacattttcaataaaaagacactacattaatcctggatgcttgcaaatcctaaaatatattcctcctctagcgttgcacagctctgtgttgtatacacagactagctttaaaatttgtcacataccactttacctttacttttatgtatcattcccccgacttccttactgcaggtgtgggcaagaaaacttttcctttaacacttttcaacagcgggcataaaattctgcagctgaggtcttgaagaatgcagatgggtacagtatgtgttggagctcacagtgtgtattgactaacctagttccttttttgctttttttggtattgtcttgttaaaagtgactcccaggtagcaactctcttttttaagggtgggaacgaaagggacgtaggaagaatagatctagattatttaacagtcttcgatagagtttgaaagctttcttcttcattcaattttgggcaaaatactgcctctgcatttgttcataacaaaaagattagattaataagtagcttttgttggtggaaattaccagctctataagtcacccttggtggttcatggacctctgattagcttgggttttgcagtctcattgccacatgtatatgtggagccaatggccttttggtgctcagctgtttacgtctgactccttgacttctttggtacagtgatggagtcagatctcattaagtgtgattctccatgatataactagcctcaaaaaaatgtgtattccactccagttgtaaatatctttagatcagcttttcattgnatttgatggggagaacacagaaatgatagtctgcaaatcatccaggtgaattgttatactagttattttttggtggttaatgtgataatattgtcttatttaaaaccacaaatgaatttcaggagacgaaaccagacagagggtcaagtttacagatgaccgtgtctgcaagagtcaccttctggactgctgcccccatgacatcctggctgggacgcgcatggatttaggagaatgtaccaaaatccacgacttggccctccgagcagattatgagattgcaagtaaagaaagagacctgttttttgaattagatgtgaaaggggggaccctaccctcagaacatgagggaataatatttacgtggctcacaaagaccagtgagtacatcatatgcatctctcacaactccccagaagagggcctccagcacgagtctaggctcagccttttctgtccctccgagaactctatgaattgctgccaagtgttttaattttcctcagaatttctttgtaatgttattgagggttggaggtccttttacaaattttggaaataagtaaatcaaatgagaagaccatgcttccaaacaatcattctgtttaacagatccccttgatttaatgcaattatgaatgcgttagtggtagtgtagtttaagatctttcccttgaatgtacaggctttaaagaaacgaacctaggagtgtatttcctatcaagcaaatgggttctaagactttacgctttacacatcattgattatagcgctgtgcttttcccgtgctaggcaatggatcacttggagtcctttattgctgaatgtgatcggagaactgagctcgccaagaagcggctggcagaaacacaggaggaaatcagtgcggaagtttctgcaaaggcagaaaaagtacatgagttaaatgaagaaataggaaaactccttgctaaagccgaacagctaggggctgaaggtaatgtggatgaatcccagaagattcttatggaagtggaaaaagttcgtgcgaagaaaaaagaagctgaggaagaatacagaaattccatgcctgcatccagttttcagcagcaaaagctgcgtgtctgcgaggtctgttcagcctaccttggtctccatgacaatgaccgtcgcctggcagaccacttcggtggcaagttacacttggggttcattcagatccgagagaagcttgatcagttgaggaaaactgtcgctgaaaagcaggagaagagaaatcaggatcgcttgaggaggagagaggagagggaacgggaggagcgtctgagcaggaggtcgggatcaagaaccagagatcgcaggaggtcacgctcccgggatcggcgtcggaggcggtcaagatctacctcccgagagcgacggaaattgtcccggtcccggtcccgagatagacatcggcgccaccgcagccgttcccggagccacagccggggacatcgtcgggcttcccgggaccgaagtgcgaaatacaagttctccagagagcgggcatccagagaggagtcctgggagagcgggcggagcgagcgagggcccccggactggaggcttgagagctccaacgggaagatggcttcacggaggtcagaagagaaggaggccggcgagatctgaacccgtctcccgggtgctgtaaatagtctgataaacgttcacacagtctaaaattaccctttatatttgctgaatacaactcatcttttgtagtttaaaatttctattgttttggagctagctgtgagtttctagaagtgtacagagttgctcctgtgttcccgggtcatgttgagtaggaataaataaatctgatgctgcctcctga

SEQ ID NO: 447976 - DNA, 1313 bp, Homo sapiens
gaccccaagctcaatggggcaaccgggctcgggaccggagtatcgacaaagccaaggagccagaaggggggtcaagtttacagatgaccgtgtctgcaagagtcaccttctggactgctgcccccatgacatcctggctgggacgcgcatggatttaggagaatgtaccaaaatccacgacttggccctccgagcagattatgagattgcaagtaaagaaagagacctgttttttgaattagatgcaatggatcacttggagtcctttattgctgaatgtgatcggagaactgagctcgccaagaagcggctggcagaaacacaggaggaaatcagtgcggaagtttctgcaaaggcagaaaaagtacatgagttaaatgaagaaataggaaaactccttgctaaagccgaacagctaggggctgaaggtaatgtggatgaatcccagaagattcttatggaagtggaaaaagttcgtgcgaagaaaaaagaagctgaggaagaatacagaaattccatgcctgcatccagttttcagcagcaaaagctgcgtgtctgcgaggtctgttcagcctaccttggtctccatgacaatgaccgtcgcctggcagaccacttcggtggcaagttacacttggggttcattcagatccgagagaagcttgatcagttgaggaaaactgtcgctgaaaagcaggagaagagaaatcaggatcgcttgaggaggagagaggagagggaacgggaggagcgtctgagcaggaggtcgggatcaagaaccagagatcgcaggaggtcacgctcccgggatcggcgtcggaggcggtcaagatctacctcccgagagcgacggaaattgtcccggtcccggtcccgagatagacatcggcgccaccgcagccgttcccggagccacagccggggacatcgtcgggcttcccgggaccgaagtgcgaaatacaagttctccagagagcgggcatccagagaggagtcctgggagagcgggcggagcgagcgagggcccccggactggaggcttgagagctccaacgggaagatggcttcacggaggtcagaagagaaggaggccggcgagatctgaacccgtctcccgggtgctgtaaatagtctgataaacgttcacacagtctaaaattaccctttatatttgctgaatacaactcatcttttgtagtttaaaatttctattgttttggagctagctgtgagtttctagaagtgtacagagttgctcctgtgttcccgggtcatgttgagtaggaataaataaatctgatgctgcctcctga

SEQ ID NO: 447977 - DNA, 2469 bp, Homo sapiens
gaaagagccgaggtgggctcgaggccgacgcgaccatcgtttgtcgacgccgctgccaccgcctgcctgagagaagtcgtcgcggccgaccccgtcgcctccgccggctaccatgtccgcccaggcgcagatgcgggccctgctggaccagctcatgggcacggctcgggacggagacgaaaccagacagagggtcaagtttacagatgaccgtgtctgcaagagtcaccttctggactgctgcccccatgacatcctggctgggacgcgcatggatttaggagaatgtaccaaaatccacgacttggccctccgagcagattatgagattgcaagtaaagaaagagacctgttttttgaattagatgcaatggatcacttggagtcctttattgctgaatgtgatcggagaactgagctcgccaagaagcggctggcagaaacacaggaggaaatcagtgcggaagtttctgcaaaggcagaaaaagtacatgagttaaatgaagaaataggaaaactccttgctaaagccgaacagctaggggctgaaggtaatgtggatgaatcccagaagattcttatggaagtggaaaaagttcgtgcgaagaaaaaagaagctgaggaagaatacagaaattccatgcctgcatccagttttcagcagcaaaagctgcgtgtctgcgaggtctgttcagcctaccttggtctccatgacaatgaccgtcgcctggcagaccacttcggtggcaagttacacttggggttcattcagatccgagagaagcttgatcagttgaggaaaactgtcgctgaaaagcaggagaagagaaatcaggatcgcttgaggaggagagaggagagggaacgggaggagcgtctgagcaggaggtcgggatcaagaaccagagatcgcaggaggtaggtttccaggtccattaaaatgttctcaaatttttttttccataagcatttttcttaatatttaatgattatgcctttacaaatgttacctggcaggtagggctggcttgtgaagggcacagggcaagaggttgcttggtgccgtggagggttcccagtgttaatgagagggaaggtcggggcctgcagggtgacaggagtatccaggccacatgttttcaggagacctcattggaaggacctagccattggagatgaactgatggaaatattttaaacctaaatttgtgggagtaaaggagaaaatgtcagtaaagcagcaagcagaatctgctgaggggtggggccctcatagtgttggcacctatagagtctcagccttggagccttctgattgttcaggtcacgctcccgggatcggcgtcggaggcggtcaagatctacctcccgagagcgacggaaattgtcccggtcccggtcccgagatagacatcggcgccaccgcagccgttcccggagccacagccggggacatcgtcgggcttcccgggaccgaagtgcgaaatacaagtaactactctgactccttcggtagctgcaaccaggagtgagcccttctctgtgttcccagggtctgctgagggccgtgtctggtggggatggggctgggctcaccctcaggagtagggctggggagtcgtgaacgggactcaggtgtgggaagaggcgagagggctgtggaggagctcgcacggcgccaggtgatgggctgcacaggcactgtcccctgcctgcgtcctggggcctgtgcactgttgcgtccatgctcagagtggctgagacttgtgtcctgaccaggccctgcttacctctgttttggtttttgtttttgatatttttttttccattgtgtttttacgtagtgtcatgttctgtgcatatagtgttgtattctcctttgcactgtttatgttacagtgaaggctctccttattaaaaatcttcgcaaaggtcactttttaatggctatctaacactccatatgtggtgggcaagtctggttggcctccggggggtttccaggtataggggatgtagggccttgcctggcctggtctgcgggtccatcgtcagtgcctgagcggccagcagaaggggggcagcagcctccactgagcctctggttcccatttcccaggttctccagagagcgggcatccagagaggagtcctgggagagcgggcggagcgagcgagggcccccggactggaggcttgagagctccaacgggaagatggcttcacggaggtcagaagagaaggaggccggcgagatctgaacccgtctcccgggtgctgtaaatagtctgataaacgttcacacagtctaaaattaccctttatatttgctgaatacaactcatcttttgtagtttaaaatttctattgttttggagctagctgtgagtttctagaagtgtacagagttgctcctgtgttcccgggtcatgttgagtaggaataaataaatctgatgctgcctcctga

SEQ ID NO: 447978 - DNA, 1915 bp, Homo sapiens
tttttgtatttttattagagaccatgttggctagactggtcttgaactcctgacctcatgatccgcccaccttggcctcacaaagtgctgggattacaggtgtgagccactgcgtccggtcctgtctctgtttttatctgaaattatgttagcctttgcctagttatggtgaattaaccttagcatatgatagttctcttaatgtttcccaccacccttttcagagtaagcaatttgacgtctacagcttcttttcctttatctctttgggtaaatagcaaccaatttttcctgctactttagatagtaggcaataacaaaatgtattcatagctctcagtaatatttgttctattgttttgtttttgaggtgaaaggggggaccctaccctcagaacatgagggaataatatttacgtggctcacaaagaccagtgagtacatcatatgcatctctcacaactccccagaagagggcctccagcacgagtctaggctcagccttttctgtccctccgagaactctatgaattgctgccaagtgttttaattttcctcagaatttctttgtaatgttattgagggttggaggtccttttacaaattttggaaataagtaaatcaaatgagaagaccatgcttccaaacaatcattctgtttaacagatccccttgatttaatgcaattatgaatgcgttagtggtagtgtagtttaagatctttcccttgaatgtacaggctttaaagaaacgaacctaggagtgtatttcctatcaagcaaatgggttctaagactttacgctttacacatcattgattatagcgctgtgcttttcccgtgctaggcaatggatcacttggagtcctttattgctgaatgtgatcggagaactgagctcgccaagaagcggctggcagaaacacaggaggaaatcagtgcggaagtttctgcaaaggcagaaaaagtacatgagttaaatgaagaaataggaaaactccttgctaaagccgaacagctaggggctgaaggtaatgtggatgaatcccagaagattcttatggaagtggaaaaagttcgtgcgaagaaaaaagaagctgaggaagaatacagaaattccatgcctgcatccagttttcagcagcaaaagctgcgtgtctgcgaggtctgttcagcctaccttggtctccatgacaatgaccgtcgcctggcagaccacttcggtggcaagttacacttggggttcattcagatccgagagaagcttgatcagttgaggaaaactgtcgctgaaaagcaggagaagagaaatcaggatcgcttgaggaggagagaggagagggaacgggaggagcgtctgagcaggaggtcgggatcaagaaccagagatcgcaggaggtcacgctcccgggatcggcgtcggaggcggtcaagatctacctcccgagagcgacggaaattgtcccggtcccggtcccgagatagacatcggcgccaccgcagccgttcccggagccacagccggggacatcgtcgggcttcccgggaccgaagtgcgaaatacaagttctccagagagcgggcatccagagaggagtcctgggagagcgggcggagcgagcgagggcccccggactggaggcttgagagctccaacgggaagatggcttcacggaggtcagaagagaaggaggccggcgagatctgaacccgtctcccgggtgctgtaaatagtctgataaacgttcacacagtctaaaattaccctttatatttgctgaatacaactcatcttttgtagtttaaaatttctattgttttggagctagctgtgagtttctagaagtgtacagagttgctcctgtgttcccgggtcatgttgagtaggaataaataaatctgatgctgcctcctga

SEQ ID NO: 447979 - DNA, 1132 bp, Homo sapiens
ggtaccctttcaacatctcatttctttacttgcatagaaagagacctgttttttgaattagatgcaatggatcacttggagtcctttattgctgaatgtgatcggagaactgagctcgccaagaagcggctggcagaaacacaggaggaaatcagtgcggaagtttctgcaaaggcagaaaaagtacatgagttaaatgaagaaataggaaaactccttgctaaagccgaacagctaggggctgaaggtaatgtggatgaatcccagaagattcttatggaagtggaaaaagttcgtgcgaagaaaaaagaagctgaggaagaatacagaaattccatgcctgcatccagttttcagcagcaaaagctgcgtgtctgcgaggtctgttcagcctaccttggtctccatgacaatgaccgtcgcctggcagaccacttcggtggcaagttacacttggggttcattcagatccgagagaagcttgatcagttgaggaaaactgtcgctgaaaagcaggagaagagaaatcaggatcgcttgaggaggagagaggagagggaacgggaggagcgtctgagcaggaggtcgggatcaagaaccagagatcgcaggaggtcacgctcccgggatcggcgtcggaggcggtcaagatctacctcccgagagcgacggaaattgtcccggtcccggtcccgagatagacatcggcgccaccgcagccgttcccggagccacagccggggacatcgtcgggcttcccgggaccgaagtgcgaaatacaagttctccagagagcgggcatccagagaggagtcctgggagagcgggcggagcgagcgagggcccccggactggaggcttgagagctccaacgggaagatggcttcacggaggtcagaagagaaggaggccggcgagatctgaacccgtctcccgggtgctgtaaatagtctgataaacgttcacacagtctaaaattaccctttatatttgctgaatacaactcatcttttgtagtttaaaatttctattgttttggagctagctgtgagtttctagaagtgtacagagttgctcctgtgttcccgggtcatgttgagtaggaataaataaatctgatgctgcctcctga

SEQ ID NO: 447980 - DNA, 941 bp, Homo sapiens
caaaaattagttgggtgtggtggcatgtgcctgtaatcccagctacttgggaggccgaggcagaagaataggttgaactcgaggtggaagttgcagtgagccgagatcacgccactgcactccagcctggtgacagtgagacaccgtttcaaagagaaaaaaaaaagtattcccatttcctaaaagtgtcccttcaatttttaaattaccaatactgagctcatataaaggtgatttgttaagtagcattcacactctggtttgtgtaacttgctcttcctcattttttgtttcatttatttagaaaactgtcgctgaaaagcaggagaagagaaatcaggatcgcttgaggaggagagaggagagggaacgggaggagcgtctgagcaggaggtcgggatcaagaaccagagatcgcaggaggtcacgctcccgggatcggcgtcggaggcggtcaagatctacctcccgagagcgacggaaattgtcccggtcccggtcccgagatagacatcggcgccaccgcagccgttcccggagccacagccggggacatcgtcgggcttcccgggaccgaagtgcgaaatacaagttctccagagagcgggcatccagagaggagtcctgggagagcgggcggagcgagcgagggcccccggactggaggcttgagagctccaacgggaagatggcttcacggaggtcagaagagaaggaggccggcgagatctgaacccgtctcccgggtgctgtaaatagtctgataaacgttcacacagtctaaaattaccctttatatttgctgaatacaactcatcttttgtagtttaaaatttctattgttttggagctagctgtgagtttctagaagtgtacagagttgctcctgtgttcccgggtcatgttgagtaggaataaataaatctgatgctgcctcctga

SEQ ID NO: 447981 - DNA, 2358 bp, Homo sapiens
  misc_feature (1993)..(1993): n is a, c, g, or t
gaaagagccgaggtgggctcgaggccgacgcgaccatcgtttgtcgacgccgctgccaccgcctgcctgagagaagtcgtcgcggccgaccccgtcgcctccgccggctaccatgtccgcccaggcgcagatgcgggccctgctggaccagctcatgggcacggctcgggacggtgagtcagagcggccaaccaggcgagggtctggggtgggagtgaggcgaggccgccgggcggcctgaggcgggggccgcgatcgtctgcgcctgcgcctgcgcggggcatcgctcctcctcccccgcgctccgaccgcaggcgccgggcctttgtctaagccggtgcgtctctgaggcggccgtgggtccaggtcgggctcctctctcggagtctgcgccatggatggggcttcagcctccttcctatgtaccgtcctgctacttcctccccggcgggcgccgcggctccgtgcccctccgcgaactgtggagtcggcggagggctggaatcagcgtgggctccaggtcgctggcagccgggtggcagaactcttccgaggctccttgggaagaagctacacccgagggagccggatgggcctcgaaaacctggcccgctctggttctgtaccattgcaaggggaaccgtaaactgagcttttctaacgtgggtttctgccaagtacttttccagctgcccccttccccccagcacacaggagagcctctgtgtagccagcgcttgacagtcgttaggtaggttgtactgtgtagggaggagctcaagatcatgatggttgtcacaggagaaagcggttgcatctttgcaaaactatatacctgctgtggtttgtgttttcttttctgctgagtaatgaagttgtaagttcacactggcacattctcagggctgtgcagattatttgcactttatttcataggtgaataagtgctttttagctttctttgtatattgagttgcttttgaattgcttcccatatttttatttcatacaaactgaacaattgtggcccctctattttatttataaaggttcagtgtatctttgcctgcctacatcaatctgcaagggagttgcagaaagcctcatgttcatcgagccgtgagtcacaaccaatttctaagctgttataacaaaaaagtgtttgctttttttcacaagtaactttaaaagtgtagtttagaaagaaaacattttcaataaaaagacactacattaatcctggatgcttgcaaatcctaaaatatattcctcctctagcgttgcacagctctgtgttgtatacacagactagctttaaaatttgtcacataccactttacctttacttttatgtatcattcccccgacttccttactgcaggtgtgggcaagaaaacttttcctttaacacttttcaacagcgggcataaaattctgcagctgaggtcttgaagaatgcagatgggtacagtatgtgttggagctcacagtgtgtattgactaacctagttccttttttgctttttttggtattgtcttgttaaaagtgactcccaggtagcaactctcttttttaagggtgggaacgaaagggacgtaggaagaatagatctagattatttaacagtcttcgatagagtttgaaagctttcttcttcattcaattttgggcaaaatactgcctctgcatttgttcataacaaaaagattagattaataagtagcttttgttggtggaaattaccagctctataagtcacccttggtggttcatggacctctgattagcttgggttttgcagtctcattgccacatgtatatgtggagccaatggccttttggtgctcagctgtttacgtctgactccttgacttctttggtacagtgatggagtcagatctcattaagtgtgattctccatgatataactagcctcaaaaaaatgtgtattccactccagttgtaaatatctttagatcagcttttcattgnatttgatggggagaacacagaaatgatagtctgcaaatcatccaggtgaattgttatactagttattttttggtggttaatgtgataatattgtcttatttaaaaccacaaatgaatttcaggagacgaaaccagacagagggtcaagtttacagatgaccgtgtctgcaagagtcaccttctggactgctgcccccatgacatcctggctgggacgcgcatggatttaggagaatgtaccaaaatccacgacttggccctccgagcagattatgagattgcaagtaaagaaagagacctgttttttgaattagatgtaagttttatttaatgttgatttattcctactgcgaagaacccaatat

SEQ ID NO: 447982 - DNA, 403 bp, Homo sapiens
ttgctaaagccgaacagctaggggctgaaggtaatgtggatgaatcccagaagattcttatggaagtggaaaaagttcgtgcgaagaaaaaagaagctgaggttggtgagataagtgccttagggcaagagaaatcttagtaatttggcagcgttgaccgttggaattaattgagcccatgcttgctcccattttttaaaaaatttatacattttgggcccagcacagtggctcacgcctgtcatcccagcactttggaaggccgaggcgggcggatcacgaggtcaggagataagaccatcctggctaacacagcgaatccccgtctctactaaaaatacaaaaaaattagccgggcatggcgccaggcacctgtagtcccagctgctccggaggctgagga

SEQ ID NO: 447983 - DNA, 1505 bp, Homo sapiens
gaaagagccgaggtgggctcgaggccgacgcgaccatcgtttgtcgacgccgctgccaccgcctgcctgagagaagtcgtcgcggccgaccccgtcgcctccgccggctaccatgtccgcccaggcgcagatgcgggccctgctggaccagctcatgggcacggctcgggacggagacgaaaccagacagagggtcaagtttacagatgaccgtgtctgcaagagtcaccttctggactgctgcccccatgacatcctggctgggacgcgcatggatttaggagaatgtaccaaaatccacgacttggccctccgagcagattatgagattgcaagtaaagaaagagacctgttttttgaattagatgcaatggatcacttggagtcctttattgctgaatgtgatcggagaactgagctcgccaagaagcggctggcagaaacacaggaggaaatcagtgcggaagtttctgcaaaggcagaaaaagtacatgagttaaatgaagaaataggaaaactccttgctaaagccgaacagctaggggctgaaggtaatgtggatgaatcccagaagattcttatggaagtggaaaaagttcgtgcgaagaaaaaagaagctgaggaagaatacagaaattccatgcctgcatccagttttcagcagcaaaagctgcgtgtctgcgaggtctgttcagcctaccttggtctccatgacaatgaccgtcgcctggcagaccacttcggtggcaagttacacttggggttcattcagatccgagagaagcttgatcagttgaggaaaactgtcgctgaaaagcaggagaagagaaatcaggatcgcttgaggaggagagaggagagggaacgggaggagcgtctgagcaggaggtcgggatcaagaaccagagatcgcaggaggtcacgctcccgggatcggcgtcggaggcggtcaagatctacctcccgagagcgacggaaattgtcccggtcccggtcccgagatagacatcggcgccaccgcagccgttcccggagccacagccggggacatcgtcgggcttcccgggaccgaagtgcgaaatacaagtaactactctgactccttcggtagctgcaaccaggagttctccagagagcgggcatccagagaggagtcctgggagagcgggcggagcgagcgagggcccccggactggaggcttgagagctccaacgggaagatggcttcacggaggtcagaagagaaggaggccggcgagatctgaacccgtctcccgggtgctgtaaatagtctgataaacgttcacacagtctaaaattaccctttatatttgctgaatacaactcatcttttgtagtttaaaatttctattgttttggagctagctgtgagtttctagaagtgtacagagttgctcctgtgttcccgggtcatgttgagtaggaataaataaatctgatgctgcctcctgaggctgcggggggtttctgctgtcctctgcgta

SEQ ID NO: 447984 - DNA, 2096 bp, Homo sapiens
gaaagagccgaggtgggctcgaggccgacgcgaccatcgtttgtcgacgccgctgccaccgcctgcctgagagaagtcgtcgcggccgaccccgtcgcctccgccggctaccatgtccgcccaggcgcagatgcgggccctgctggaccagctcatgggcacggctcgggacggagacgaaaccagacagagggtcaagtttacagatgaccgtgtctgcaagagtcaccttctggactgctgcccccatgacatcctggctgggacgcgcatggatttaggagaatgtaccaaaatccacgacttggccctccgagcagattatgagattgcaagtaaagaaagagacctgttttttgaattagatgcaatggatcacttggagtcctttattgctgaatgtgatcggagaactgagctcgccaagaagcggctggcagaaacacaggaggaaatcagtgcggaagtttctgcaaaggcagaaaaagtacatgagttaaatgaagaaataggaaaactccttgctaaagccgaacagctaggggctgaaggtaatgtggatgaatcccagaagattcttatggaagtggaaaaagttcgtgcgaagaaaaaagaagctgaggaagaatacagaaattccatgcctgcatccagttttcagcagcaaaagctgcgtgtctgcgaggtctgttcagcctaccttggtctccatgacaatgaccgtcgcctggcagaccacttcggtggcaagttacacttggggttcattcagatccgagagaagcttgatcagttgaggaaaactgtcgctgaaaagcaggagaagagaaatcaggatcgcttgaggaggagagaggagagggaacgggaggagcgtctgagcaggaggtcgggatcaagaaccagagatcgcaggaggtcacgctcccgggatcggcgtcggaggcggtcaagatctacctcccgagagcgacggaaattgtcccggtcccggtcccgagatagacatcggcgccaccgcagccgttcccggagccacagccggggacatcgtcgggcttcccgggaccgaagtgcgaaatacaagtaactactctgactccttcggtagctgcaaccaggagtgagcccttctctgtgttcccagggtctgctgagggccgtgtctggtggggatggggctgggctcaccctcaggagtagggctggggagtcgtgaacgggactcaggtgtgggaagaggcgagagggctgtggaggagctcgcacggcgccaggtgatgggctgcacaggcactgtcccctgcctgcgtcctggggcctgtgcactgttgcgtccatgctcagagtggctgagacttgtgtcctgaccaggccctgcttacctctgttttggtttttgtttttgatatttttttttccattgtgtttttacgtagtgtcatgttctgtgcatatagtgttgtattctcctttgcactgtttatgttacagtgaaggctctccttattaaaaatcttcgcaaaggtcactttttaatggctatctaacactccatatgtggtgggcaagtctggttggcctccggggggtttccaggtataggggatgtagggccttgcctggcctggtctgcgggtccatcgtcagtgcctgagcggccagcagaaggggggcagcagcctccactgagcctctggttcccatttcccaggttctccagagagcgggcatccagagaggagtcctgggagagcgggcggagcgagcgagggcccccggactggaggcttgagagctccaacgggaagatggcttcacggaggtcagaagagaaggaggccggcgagatctgaacccgtctcccgggtgctgtaaatagtctgataaacgttcacacagtctaaaattaccctttatatttgctgaatacaactcatcttttgtagtttaaaatttctattgttttggagctagctgtgagtttctagaagtgtacagagttgctcctgtgttcccgggtcatgttgagtaggaataaataaatctgatgctgcctcctgaggctgcggggggtttctgctgtcctctgcgta

SEQ ID NO: 447985 - DNA, 1473 bp, Homo sapiens
gaaagagccgaggtgggctcgaggccgacgcgaccatcgtttgtcgacgccgctgccaccgcctgcctgagagaagtcgtcgcggccgaccccgtcgcctccgccggctaccatgtccgcccaggcgcagatgcgggccctgctggaccagctcatgggcacggctcgggacggagacgaaaccagacagagggtcaagtttacagatgaccgtgtctgcaagagtcaccttctggactgctgcccccatgacatcctggctgggacgcgcatggatttaggagaatgtaccaaaatccacgacttggccctccgagcagattatgagattgcaagtaaagaaagagacctgttttttgaattagatgcaatggatcacttggagtcctttattgctgaatgtgatcggagaactgagctcgccaagaagcggctggcagaaacacaggaggaaatcagtgcggaagtttctgcaaaggcagaaaaagtacatgagttaaatgaagaaataggaaaactccttgctaaagccgaacagctaggggctgaaggtaatgtggatgaatcccagaagattcttatggaagtggaaaaagttcgtgcgaagaaaaaagaagctgaggaagaatacagaaattccatgcctgcatccagttttcagcagcaaaagctgcgtgtctgcgaggtctgttcagcctaccttggtctccatgacaatgaccgtcgcctggcagaccacttcggtggcaagttacacttggggttcattcagatccgagagaagcttgatcagttgaggaaaactgtcgctgaaaagcaggagaagagaaatcaggatcgcttgaggaggagagaggagagggaacgggaggagcgtctgagcaggaggtcgggatcaagaaccagagatcgcaggaggtcacgctcccgggatcggcgtcggaggcggtcaagatctacctcccgagagcgacggaaattgtcccggtcccggtcccgagatagacatcggcgccaccgcagccgttcccggagccacagccggggacatcgtcgggcttcccgggaccgaagtgcgaaatacaagtaactactctgactccttcggtagctgcaaccaggagttctccagagagcgggcatccagagaggagtcctgggagagcgggcggagcgagcgagggcccccggactggaggcttgagagctccaacgggaagatggcttcacggaggtcagaagagaaggaggccggcgagatctgaacccgtctcccgggtgctgtaaatagtctgataaacgttcacacagtctaaaattaccctttatatttgctgaatacaactcatcttttgtagtttaaaatttctattgttttggagctagctgtgagtttctagaagtgtacagagttgctcctgtgttcccgggtcatgttgagtaggaataaataaatctgatgctgcctcctga

SEQ ID NO: 447986 - DNA, 3442 bp, Homo sapiens
  misc_feature (1993)..(1993): n is a, c, g, or t
gaaagagccgaggtgggctcgaggccgacgcgaccatcgtttgtcgacgccgctgccaccgcctgcctgagagaagtcgtcgcggccgaccccgtcgcctccgccggctaccatgtccgcccaggcgcagatgcgggccctgctggaccagctcatgggcacggctcgggacggtgagtcagagcggccaaccaggcgagggtctggggtgggagtgaggcgaggccgccgggcggcctgaggcgggggccgcgatcgtctgcgcctgcgcctgcgcggggcatcgctcctcctcccccgcgctccgaccgcaggcgccgggcctttgtctaagccggtgcgtctctgaggcggccgtgggtccaggtcgggctcctctctcggagtctgcgccatggatggggcttcagcctccttcctatgtaccgtcctgctacttcctccccggcgggcgccgcggctccgtgcccctccgcgaactgtggagtcggcggagggctggaatcagcgtgggctccaggtcgctggcagccgggtggcagaactcttccgaggctccttgggaagaagctacacccgagggagccggatgggcctcgaaaacctggcccgctctggttctgtaccattgcaaggggaaccgtaaactgagcttttctaacgtgggtttctgccaagtacttttccagctgcccccttccccccagcacacaggagagcctctgtgtagccagcgcttgacagtcgttaggtaggttgtactgtgtagggaggagctcaagatcatgatggttgtcacaggagaaagcggttgcatctttgcaaaactatatacctgctgtggtttgtgttttcttttctgctgagtaatgaagttgtaagttcacactggcacattctcagggctgtgcagattatttgcactttatttcataggtgaataagtgctttttagctttctttgtatattgagttgcttttgaattgcttcccatatttttatttcatacaaactgaacaattgtggcccctctattttatttataaaggttcagtgtatctttgcctgcctacatcaatctgcaagggagttgcagaaagcctcatgttcatcgagccgtgagtcacaaccaatttctaagctgttataacaaaaaagtgtttgctttttttcacaagtaactttaaaagtgtagtttagaaagaaaacattttcaataaaaagacactacattaatcctggatgcttgcaaatcctaaaatatattcctcctctagcgttgcacagctctgtgttgtatacacagactagctttaaaatttgtcacataccactttacctttacttttatgtatcattcccccgacttccttactgcaggtgtgggcaagaaaacttttcctttaacacttttcaacagcgggcataaaattctgcagctgaggtcttgaagaatgcagatgggtacagtatgtgttggagctcacagtgtgtattgactaacctagttccttttttgctttttttggtattgtcttgttaaaagtgactcccaggtagcaactctcttttttaagggtgggaacgaaagggacgtaggaagaatagatctagattatttaacagtcttcgatagagtttgaaagctttcttcttcattcaattttgggcaaaatactgcctctgcatttgttcataacaaaaagattagattaataagtagcttttgttggtggaaattaccagctctataagtcacccttggtggttcatggacctctgattagcttgggttttgcagtctcattgccacatgtatatgtggagccaatggccttttggtgctcagctgtttacgtctgactccttgacttctttggtacagtgatggagtcagatctcattaagtgtgattctccatgatataactagcctcaaaaaaatgtgtattccactccagttgtaaatatctttagatcagcttttcattgnatttgatggggagaacacagaaatgatagtctgcaaatcatccaggtgaattgttatactagttattttttggtggttaatgtgataatattgtcttatttaaaaccacaaatgaatttcaggagacgaaaccagacagagggtcaagtttacagatgaccgtgtctgcaagagtcaccttctggactgctgcccccatgacatcctggctgggacgcgcatggatttaggagaatgtaccaaaatccacgacttggccctccgagcagattatgagattgcaagtaaagaaagagacctgttttttgaattagatgtgaaaggggggaccctaccctcagaacatgagggaataatatttacgtggctcacaaagaccagcaatggatcacttggagtcctttattgctgaatgtgatcggagaactgagctcgccaagaagcggctggcagaaacacaggaggaaatcagtgcggaagtttctgcaaaggcagaaaaagtacatgagttaaatgaagaaataggaaaactccttgctaaagccgaacagctaggggctgaaggtaatgtggatgaatcccagaagattcttatggaagtggaaaaagttcgtgcgaagaaaaaagaagctgaggaagaatacagaaattccatgcctgcatccagttttcagcagcaaaagctgcgtgtctgcgaggtctgttcagcctaccttggtctccatgacaatgaccgtcgcctggcagaccacttcggtggcaagttacacttggggttcattcagatccgagagaagcttgatcagttgaggaaaactgtcgctgaaaagcaggagaagagaaatcaggatcgcttgaggaggagagaggagagggaacgggaggagcgtctgagcaggaggtcgggatcaagaaccagagatcgcaggaggtcacgctcccgggatcggcgtcggaggcggtcaagatctacctcccgagagcgacggaaattgtcccggtcccggtcccgagatagacatcggcgccaccgcagccgttcccggagccacagccggggacatcgtcgggcttcccgggaccgaagtgcgaaatacaagttctccagagagcgggcatccagagaggagtcctgggagagcgggcggagcgagcgagggcccccggactggaggcttgagagctccaacgggaagatggcttcacggaggtcagaagagaaggaggccggcgagatctgaacccgtctcccgggtgctgtaaatagtctgataaacgttcacacagtctaaaattaccctttatatttgctgaatacaactcatcttttgtagtttaaaatttctattgttttggagctagctgtgagtttctagaagtgtacagagttgctcctgtgttcccgggtcatgttgagtaggaataaataaatctgatgctgcctcctga

SEQ ID NO: 447987 - DNA, 2502 bp, Homo sapiens
  misc_feature (1117)..(1117): n is a, c, g, or t
gaaagagccgaggtgggctcgaggccgacgcgaccatcgtttgtcgacgccgctgccaccgcctgcctgagagaagtcgtcgcggccgaccccgtcgcctccgccggctaccatgtccgcccaggcgcagatgcgggccctgctggaccagctcatgggcacggctcgggacggttcagtgtatctttgcctgcctacatcaatctgcaagggagttgcagaaagcctcatgttcatcgagccgtgagtcacaaccaatttctaagctgttataacaaaaaagtgtttgctttttttcacaagtaactttaaaagtgtagtttagaaagaaaacattttcaataaaaagacactacattaatcctggatgcttgcaaatcctaaaatatattcctcctctagcgttgcacagctctgtgttgtatacacagactagctttaaaatttgtcacataccactttacctttacttttatgtatcattcccccgacttccttactgcaggtgtgggcaagaaaacttttcctttaacacttttcaacagcgggcataaaattctgcagctgaggtcttgaagaatgcagatgggtacagtatgtgttggagctcacagtgtgtattgactaacctagttccttttttgctttttttggtattgtcttgttaaaagtgactcccaggtagcaactctcttttttaagggtgggaacgaaagggacgtaggaagaatagatctagattatttaacagtcttcgatagagtttgaaagctttcttcttcattcaattttgggcaaaatactgcctctgcatttgttcataacaaaaagattagattaataagtagcttttgttggtggaaattaccagctctataagtcacccttggtggttcatggacctctgattagcttgggttttgcagtctcattgccacatgtatatgtggagccaatggccttttggtgctcagctgtttacgtctgactccttgacttctttggtacagtgatggagtcagatctcattaagtgtgattctccatgatataactagcctcaaaaaaatgtgtattccactccagttgtaaatatctttagatcagcttttcattgnatttgatggggagaacacagaaatgatagtctgcaaatcatccaggtgaattgttatactagttattttttggtggttaatgtgataatattgtcttatttaaaaccacaaatgaatttcaggagacgaaaccagacagagggtcaagtttacagatgaccgtgtctgcaagagtcaccttctggactgctgcccccatgacatcctggctgggacgcgcatggatttaggagaatgtaccaaaatccacgacttggccctccgagcagattatgagattgcaagtaaagaaagagacctgttttttgaattagatgcaatggatcacttggagtcctttattgctgaatgtgatcggagaactgagctcgccaagaagcggctggcagaaacacaggaggaaatcagtgcggaagtttctgcaaaggcagaaaaagtacatgagttaaatgaagaaataggaaaactccttgctaaagccgaacagctaggggctgaaggtaatgtggatgaatcccagaagattcttatggaagtggaaaaagttcgtgcgaagaaaaaagaagctgaggaagaatacagaaattccatgcctgcatccagttttcagcagcaaaagctgcgtgtctgcgaggtctgttcagcctaccttggtctccatgacaatgaccgtcgcctggcagaccacttcggtggcaagttacacttggggttcattcagatccgagagaagcttgatcagttgaggaaaactgtcgctgaaaagcaggagaagagaaatcaggatcgcttgaggaggagagaggagagggaacgggaggagcgtctgagcaggaggtcgggatcaagaaccagagatcgcaggaggtcacgctcccgggatcggcgtcggaggcggtcaagatctacctcccgagagcgacggaaattgtcccggtcccggtcccgagatagacatcggcgccaccgcagccgttcccggagccacagccggggacatcgtcgggcttcccgggaccgaagtgcgaaatacaagttctccagagagcgggcatccagagaggagtcctgggagagcgggcggagcgagcgagggcccccggactggaggcttgagagctccaacgggaagatggcttcacggaggtcagaagagaaggaggccggcgagatctgaacccgtctcccgggtgctgtaaatagtctgataaacgttcacacagtctaaaattaccctttatatttgctgaatacaactcatcttttgtagtttaaaatttctattgttttggagctagctgtgagtttctagaagtgtacagagttgctcctgtgttcccgggtcatgttgagtaggaataaataaatctgatgctgcctcctga

SEQ ID NO: 447988 - DNA, 1841 bp, Homo sapiens
gaaagagccgaggtgggctcgaggccgacgcgaccatcgtttgtcgacgccgctgccaccgcctgcctgagagaagtcgtcgcggccgaccccgtcgcctccgccggctaccatgtccgcccaggcgcagatgcgggccctgctggaccagctcatgggcacggctcgggacggagacgaaaccagacagagggtcaagtttacagatgaccgtgtctgcaagagtcaccttctggactgctgcccccatgacatcctggctgggacgcgcatggatttaggagaatgtaccaaaatccacgacttggccctccgagcagattatgagattgcaagtaaagaaagagacctgttttttgaattagatgcaatggatcacttggagtcctttattgctgaatgtgatcggagaactgagctcgccaagaagcggctggcagaaacacaggaggaaatcagtgcggaagtttctgcaaaggcagaaaaagtacatgagttaaatgaagaaataggaaaactccttgctaaagccgaacagctaggggctgaaggtaatgtggatgaatcccagaagattcttatggaagtggaaaaagttcgtgcgaagaaaaaagaagctgaggaagaatacagaaattccatgcctgcatccagttttcagcagcaaaagctgcgtgtctgcgaggtctgttcagcctaccttggtctccatgacaatgaccgtcgcctggcagaccacttcggtggcaagttacacttggggttcattcagatccgagagaagcttgatcagttgaggaaaactgtcgctgaaaagcaggagaagagaaatcaggatcgcttgaggaggagagaggagagggaacgggaggagcgtctgagcaggaggtcgggatcaagaaccagagatcgcaggaggtaggtttccaggtccattaaaatgttctcaaatttttttttccataagcatttttcttaatatttaatgattatgcctttacaaatgttacctggcaggtagggctggcttgtgaagggcacagggcaagaggttgcttggtgccgtggagggttcccagtgttaatgagagggaaggtcggggcctgcagggtgacaggagtatccaggccacatgttttcaggagacctcattggaaggacctagccattggagatgaactgatggaaatattttaaacctaaatttgtgggagtaaaggagaaaatgtcagtaaagcagcaagcagaatctgctgaggggtggggccctcatagtgttggcacctatagagtctcagccttggagccttctgattgttcaggtcacgctcccgggatcggcgtcggaggcggtcaagatctacctcccgagagcgacggaaattgtcccggtcccggtcccgagatagacatcggcgccaccgcagccgttcccggagccacagccggggacatcgtcgggcttcccgggaccgaagtgcgaaatacaagttctccagagagcgggcatccagagaggagtcctgggagagcgggcggagcgagcgagggcccccggactggaggcttgagagctccaacgggaagatggcttcacggaggtcagaagagaaggaggccggcgagatctgaacccgtctcccgggtgctgtaaatagtctgataaacgttcacacagtctaaaattaccctttatatttgctgaatacaactcatcttttgtagtttaaaatttctattgttttggagctagctgtgagtttctagaagtgtacagagttgctcctgtgttcccgggtcatgttgagtaggaataaataaatctgatgctgcctcctga

SEQ ID NO: 447989 - DNA, 1279 bp, Homo sapiens
gaaagagccgaggtgggctcgaggccgacgcgaccatcgtttgtcgacgccgctgccaccgcctgcctgagagaagtcgtcgcggccgaccccgtcgcctccgccggctaccatgtccgcccaggcgcagatgcgggccctgctggaccagctcatgggcacggctcgggacggagacgaaaccagacagagggtcaagtttacagatgaccgtgtctgcaagagtcaccttctggactgctgcccccatgacatcctggctgggacgcgcatggatttaggagaatgtaccaaaatccacgacttggccctccgagcagattatgagattgcaagtaaagaaagagacctgttttttgaattagatgcaatggatcacttggagtcctttattgctgaatgtgatcggagaactgagctcgccaagaagcggctggcagaaacacaggaggaaatcagtgcggaagtttctgcaaaggcagaaaaagtacatgagttaaatgaagaaataggaaaactccttgctaaagccgaacagctaggggctgaaggtaatgtggatgaatcccagaagattcttatggaagtggaaaaagttcgtgcgaagaaaaaagaagctgaggaagaatacagaaattccatgcctgcatccagttttcagcagcaaaagctgcgtgtctgcgaggtctgttcagcctaccttggtctccatgacaatgaccgtcgcctggcagaccacttcggtggcaagttacacttggggttcattcagatccgagagaagcttgatcagttgaggaaaactgtcgctgaaaagcaggagaagagaaatcaggatcgcttgaggaggagagaggagagggaacgggaggagcgtctgagcaggaggtcgggatcaagaaccagagatcgcaggaggtcacgctcccgggatcggcgtcggaggcggtcaagatctacctcccgagaagcgggcggagcgagcgagggcccccggactggaggcttgagagctccaacgggaagatggcttcacggaggtcagaagagaaggaggccggcgagatctgaacccgtctcccgggtgctgtaaatagtctgataaacgttcacacagtctaaaattaccctttatatttgctgaatacaactcatcttttgtagtttaaaatttctattgttttggagctagctgtgagtttctagaagtgtacagagttgctcctgtgttcccgggtcatgttgagtaggaataaataaatctgatgctgcctcctga

SEQ ID NO: 447990 - DNA, 1503 bp, Homo sapiens
tttttgtatttttattagagaccatgttggctagactggtcttgaactcctgacctcatgatccgcccaccttggcctcacaaagtgctgggattacaggtgtgagccactgcgtccggtcctgtctctgtttttatctgaaattatgttagcctttgcctagttatggtgaattaaccttagcatatgatagttctcttaatgtttcccaccacccttttcagagtaagcaatttgacgtctacagcttcttttcctttatctctttgggtaaatagcaaccaatttttcctgctactttagatagtaggcaataacaaaatgtattcatagctctcagtaatatttgttctattgttttgtttttgaggtgaaaggggggaccctaccctcagaacatgagggaataatatttacgtggctcacaaagaccagcaatggatcacttggagtcctttattgctgaatgtgatcggagaactgagctcgccaagaagcggctggcagaaacacaggaggaaatcagtgcggaagtttctgcaaaggcagaaaaagtacatgagttaaatgaagaaataggaaaactccttgctaaagccgaacagctaggggctgaaggtaatgtggatgaatcccagaagattcttatggaagtggaaaaagttcgtgcgaagaaaaaagaagctgaggaagaatacagaaattccatgcctgcatccagttttcagcagcaaaagctgcgtgtctgcgaggtctgttcagcctaccttggtctccatgacaatgaccgtcgcctggcagaccacttcggtggcaagttacacttggggttcattcagatccgagagaagcttgatcagttgaggaaaactgtcgctgaaaagcaggagaagagaaatcaggatcgcttgaggaggagagaggagagggaacgggaggagcgtctgagcaggaggtcgggatcaagaaccagagatcgcaggaggtcacgctcccgggatcggcgtcggaggcggtcaagatctacctcccgagagcgacggaaattgtcccggtcccggtcccgagatagacatcggcgccaccgcagccgttcccggagccacagccggggacatcgtcgggcttcccgggaccgaagtgcgaaatacaagttctccagagagcgggcatccagagaggagtcctgggagagcgggcggagcgagcgagggcccccggactggaggcttgagagctccaacgggaagatggcttcacggaggtcagaagagaaggaggccggcgagatctgaacccgtctcccgggtgctgtaaatagtctgataaacgttcacacagtctaaaattaccctttatatttgctgaatacaactcatcttttgtagtttaaaatttctattgttttggagctagctgtgagtttctagaagtgtacagagttgctcctgtgttcccgggtcatgttgagtaggaataaataaatctgatgctgcctcctga

SEQ ID NO: 447991 - DNA, 590 bp, Homo sapiens
atttacaaagcttgctgtatttcaggcttctaatatgttgctacaattatttagatgcctgactaaaaggaggtcacgctcccgggatcggcgtcggaggcggtcaagatctacctcccgagagcgacggaaattgtcccggtcccggtcccgagatagacatcggcgccaccgcagccgttcccggagccacagccggggacatcgtcgggcttcccgggaccgaagtgcgaaatacaagttctccagagagcgggcatccagagaggagtcctgggagagcgggcggagcgagcgagggcccccggactggaggcttgagagctccaacgggaagatggcttcacggaggtcagaagagaaggaggccggcgagatctgaacccgtctcccgggtgctgtaaatagtctgataaacgttcacacagtctaaaattaccctttatatttgctgaatacaactcatcttttgtagtttaaaatttctattgttttggagctagctgtgagtttctagaagtgtacagagttgctcctgtgttcccgggtcatgttgagtaggaataaataaatctgatgctgcctcctga

SEQ ID NO: 447992 - DNA, 3190 bp, Homo sapiens
  misc_feature (1)..(1): n is a, c, g, or t
ncatctgtgggtcctgtcccatccatcctgacctgttccatctcagccccaggactcagtactgcggttgccaacactgctgccaggcatgatggatgggccacgttccgatgtgggccgttggggtggcaaccccttgcagccccctaccacgccatctccagagccagagccagagccagacggacgctctcgcagaggaggaggccgttccttctgggctcgctgctgtggctgctgttcatgccgaaatgcggcagatgacgactggggacctgaaccctctgactccaggggtcgagggtccagctctggcactcgaagacctggctcccggggctcagactcccgccggcctgtatcccggggcagcggtgtcaatgcagctggagatggcaccatccgagagggcatgctagtagtgaacggtgtggacttgctgagctcgcgctcggaccagaaccgccgagagcaccacacagacgagtatgagtacgacgagctgatagtgcgccgcgggcagcctttccatatgctcctcctcctgtcccggacctatgaatcctctgatcgcatcacccttgagttactcatcggaaacaaccccgaggtgggcaagggcacgcacgtgatcatcccagtgggcaaggggggcagtggaggctggaaagcccaggtggtcaaggccagtgggcagaatctgaacctgcgggtccacacttcccccaacgccatcatcggcaagtttcagttcacagtccgcacacaatcagacgctggggagttccagttgccctttgacccccgcaatgagatctacatcctcttcaacccctggtgcccagaggacattgtgtacgtggaccatgaggattggcggcaggagtatgttcttaatgagtctgggagaatttactacgggaccgaagcacagattggtgagcggacctggaactacggccagtttgaccacggggtgctggatgcctgcttatacatcctggaccggcgggggatgccatatggaggccgtggagacccagtcaatgtctcccgggtcatctctgccatggtgaactccctggatgacaatggagtcctgattgggaactggtctggtgattactcccgaggcaccaacccatcagcgtgggtgggcagcgtggagatcctgcttagctacctacgcacgggatattccgtcccctatggccagtgctgggtctttgctggcgtgaccaccacagtgctgcgctgcctgggtctggccacccgtactgtcaccaacttcaactccgcccacgacacagacacatcccttaccatggacatctacttcgacgagaacatgaagcccctggagcacctgaaccatgattctgtctggaacttccatgtgtggaacgactgctggatgaagaggccggatctgccctcgggctttgatgggtggcaggtggtggatgccacaccccaagagactagcagtggcatcttctgctgcggcccctgctctgtggagtccatcaagaatggcctggtctacatgaagtacgacacgcctttcatttttgctgaggtgaatagtgacaaggtgtactggcagcggcaggatgatggcagcttcaagattgtttatgtggaggagaaggccatcggcacactcattgtcacaaaggccatcagctccaacatgcgggaggacatcacctacctctataagcacccagaaggctcagacgcagagcggaaggcagtagagacagcagcagcccacggcagcaaacccaatgtgtatgccaaccggggctcagcggaggatgtggccatgcaggtggaggcacaggacgcggtgatggggcaggatctgatggtctctgtgatgctgatcaatcacagcagcagccgccgcacagtgaaactgcacctctacctctcagtcactttctatactggtgtcagtggtaccatcttcaaggagaccaagaaggaagtggagctggcaccaggggcctcggaccgtgtgaccatgccagtggcctacaaggaataccggccccatcttgtggaccagggggccatgctgctcaatgtctcaggccacgtcaaggagagcgggcaggtgctggccaagcagcacaccttccgtctgcgcaccccagacctctccctcacgttactgggagcagcagtggttggccaggagtgtgaagtacagattgtcttcaagaacccccttcccgtcaccctcaccaatgtcgtcttccggctcgaaggctctgggttacagaggcccaagatcctcaacgttggggacattggaggcaatgaaacagtgacactgcgccagtcgtttgtgcctgtgcgaccaggcccccgccagctcattgccagcttggacagcccacagctctcccaggtgcacggtgtcatccaggtggatgtggccccagcccctggggatgggggcttcttctcagacgctggaggtgacagtcacttaggagagaccatccctatggcatctcgaggtggagcttagccctgtgccaggagcaatgggactggagtcagatgagcaaggacattgccccaagataggggcacactacagagcagctccccaggagctcaggtggggagtccagggctcccggagagggagtcagtcttcacttgcactgggggaacagatgctaataaactgttttttaatgaaaaaagcaccaccacacagacaaaccaacaaagaaaacaaacaaagaaacacaaaacaacacaaaaaaaggggggggcacgccaagaaatgaccacccagggggcgccccgaagataggagcaaaccaaacaccaagagaacaaagggaggcacaaaaaggagagagagcagacaaaaaagcagaggaaacaaccacgaaaacgaaaacacgcacgcagtcgggagacacaagcggagcacaggcggaaacacacagtggaaggaagacaccaccacacgacaggaggacgagaagacaacaaatagagggcgaacaacgcgcccccacgcacgagactaaagcacccccaaggcagagagaacaacaacaacgtagaacgaggacaaaggaggtcaaaaaaaaaaacgagaaagaacgcgcggcgacagaaacgtatgccaacacagagagaaaacaaggcgaaacaaatc

SEQ ID NO: 447993 - DNA, 520 bp, Homo sapiens
gcatcttctgctgcggcccctgctctgtggagtccatcaagaatggcctggtctacatgaagtacgacacgcctttcatttttgctgaggtgagggctgggctccaggtgccttcttgggcttcagtcatgggttctctggtcccaacttcaccgctgactgaccagctctgcgacccggggcaagtcactcattatacaagtcagtttcctcacctgtaaaaggggataatcaaggctgccttgcttcctatactcgggatcagaagagataacgggtatgaaactgcttcactagtcgtaaagtcagccattgagtgtgagggattactgatattgccaaagtgctctgccaggagcctcccagaccagcttcttccctgcactctggcctcgtctggctcgtcttggaaagtctccccttgggctctgccaggaagctcccacccttgggaccaagccctgtcccatagctcctgggatcaggggaaggaggccgggagtcaggccaccctcagacc

SEQ ID NO: 447994 - DNA, 2345 bp, Homo sapiens
  misc_feature (1)..(1): n is a, c, g, or t
ncatctgtgggtcctgtcccatccatcctgacctgttccatctcagccccaggactcagtactgcggttgccaacactgctgccaggcatgatggatgggccacgttccgatgtgggccgttggggtggcaaccccttgcagccccctaccacgccatctccagagccagagccagagccagacggacgctctcgcagaggaggaggccgttccttctgggctcgctgctgtggctgctgttcatgccgaaatgcggcagatgacgactggggacctgaaccctctgactccaggggtcgagggtccagctctggcactcgaagacctggctcccggggctcagactcccgccggcctgtatcccggggcagcggtgtcaatgcagctggagatggcaccatccgagagggcatgctagtagtgaacggtgtggacttgctgagctcgcgctcggaccagaaccgccgagagcaccacacagacgagtatgagtacgacgagctgatagtgcgccgcgggcagcctttccatatgctcctcctcctgtcccggacctatgaatcctctgatcgcatcacccttgagttactcatcggaaacaaccccgaggtgggcaagggcacgcacgtgatcatcccagtgggcaaggggggcagtggaggctggaaagcccaggtggtcaaggccagtgggcagaatctgaacctgcgggtccacacttcccccaacgccatcatcggcaagtttcagttcacagtccgcacacaatcagacgctggggagttccagttgccctttgacccccgcaatgagatctacatcctcttcaacccctggtgcccagaggacattgtgtacgtggaccatgaggattggcggcaggagtatgttcttaatgagtctgggagaatttactacgggaccgaagcacagattggtgagcggacctggaactacggccagtttgaccacggggtgctggatgcctgcttatacatcctggaccggcgggggatgccatatggaggccgtggagacccagtcaatgtctcccgggtcatctctgccatggtgaactccctggatgacaatggagtcctgattgggaactggtctggtgattactcccgaggcaccaacccatcagcgtgggtgggcagcgtggagatcctgcttagctacctacgcacgggatattccgtcccctatggccagtgctgggtctttgctggcgtgaccaccacagtgctgcgctgcctgggtctggccacccgtactgtcaccaacttcaactccgcccacgacacagacacatcccttaccatggacatctacttcgacgagaacatgaagcccctggagcacctgaaccatgattctgtctggaacttccatgtgtggaacgactgctggatgaagaggccggatctgccctcgggctttgatgggtggcaggtggtggatgccacaccccaagagactagcagtggcatcttctgctgcggcccctgctctgtggagtccatcaagaatggcctggtctacatgaagtacgacacgcctttcatttttgctgaggtgaatagtgacaaggtgtactggcagcggcaggatgatggcagcttcaagattgtttatgtggaggagaaggccatcggcacactcattgtcacaaaggccatcagctccaacatgcgggaggacatcacctacctctataagcacccagaaggctcagacgcagagcggaaggcagtagagacagcagcagcccacggcagcaaacccaatgtgtatgccaaccggggctcagcggaggatgtggccatgcaggtggaggcacaggacgcggtgatggggcaggatctgatggtctctgtgatgctgatcaatcacagcagcagccgccgcacagtgaaactgcacctctacctctcagtcactttctatactggtgtcagtggtaccatcttcaaggagaccaagaaggaagtggagctggcaccaggggcctcggaccgtgtgaccatgccagtggcctacaaggaataccggccccatcttgtggaccagggggccatgctgctcaatgtctcaggccacgtcaaggagagcgggcaggtgctggccaagcagcacaccttccgtctgcgcaccccagacctctccctcacgttactgggagcagcagtggttggccaggagtgtgaagtacagattgtcttcaagaacccccttcccgtcaccctcaccaatgtcgtcttccggctcgaaggctctgggttacagaggcccaagatcctcaacgttgggtgagtctggcctctccccctacccctgcttc

SEQ ID NO: 447995 - DNA, 433 bp, Homo sapiens
aagaaaaaaaaaaaaaaaaaaaaaagaatgcggccgcgatgcgctccatggcatctggaggtggtgttcccactgatgaagagcaggcgactgggttggagagggagatcatgctggctgcaaagaagggactggacccatacaatgtactggccccaaagggagcttcaggcaccagggaagaccctaatttagtcccctccatctccaacaagagaatagtaggctgcatctgtgaagaggacaataccagcgtcgtctggttttggctgcacaaaggcgaggcccagcgatgcccccgctgtggagcccattacaagctggtgccccagcagctggcacactgagcacctgcactaaattactcaaaatgtgctgtaaagtttcttctttccagtaaagactagccattgcattggctccttctcccata

SEQ ID NO: 447996 - DNA, 681 bp, Homo sapiens
  misc_feature (641)..(641): n is a, c, g, or t
  misc_feature (673)..(673): n is a, c, g, or t
ccccccaaccccctctcttttacacttaaattactcagaaaatgagtttctaaaaacagaaaagagagacagagatctcgtgccaaattcggcacgaacgcggacgcaatggcttcaaggttacttcgcggagctggaacgctggccgcgcaggccctgagggctcgcggccccagtggcgcggccgcgatgcgctccatggcatctggaggtggtgttcccactgatgaagagcaggcgactgggttggagagggagatcatgctggctgcaaagaagggactggacccatacaatgtactggccccaaagggagcttcaggcaccagggaagaccctaatttagtcccctccatctccaacaagagaatagtaggctgcatctgtgaagaggacaataccagcgtcgtctggttttggctgcacaaaggcgaggcccagcgatgcccccgctgtggagcccattacaagctggtgccccagcagctggcacactgagcacctgcactaaattactcaaaatgtgctgtaaagtttcttctttccagtaaagactagccattgcattggctccttctcccataaaaatccctttccaataactccttttcccaaaaacagcacgtttctctaccaagccngtcagtcatcactaaaccccgccgactgggtnatttagat

SEQ ID NO: 447997 - DNA, 364 bp, Homo sapiens
cctcaatttcttcatctgaagaatgggaggagggcttgaactgatctcttaagatatcaaccatagtcttacttgtgtatcagagatgtctgaggaaaagaaattcatgttgaaagtctccctttctaggttggatgaccataaaccaccttttttcccttttaggtgaagaggacaataccagcgtcgtctggttttggctgcacaaaggcgaggcccagcgatgcccccgctgtggagcccattacaagctggtgccccagcagctggcacactgagcacctgcactaaattactcaaaatgtgctgtaaagtttcttctttccagtaaagactagccattgcattggctccttctcccata

SEQ ID NO: 447998 - DNA, 848 bp, Homo sapiens
cggacgcgtgggtccggacgcgtgggtcgacccacgcgtccgagatcatgctggctgcaaagaagggactggacccatacaatgtactggccccaaagggagcttcaggcaccagggaagaccctaatttagtcccctccatctccaacaagagaatagtaggctgcatctgtgaagaggacaataccagcgtcgtctggttttggctgcacaaaggcgaggcccagcgatgcccccgctgtggagcccattacaagctggtgccccagcagctggcacactgagcacctgcactaaattactcaaaatgtgctgtaaagtttcttctttccagtaaagactagccattgcattggctccttctcccataatcccttaaaacaagaagaactacaacagaggcgcgcacgactcctcgaaggtacgtccacctcaaagaggggaccccaaaggcaattaacggcggaataaccccagaggaatacacatttgagtacccaaaaacacgcgcggagcatcaccccggcacaactacggggtgccgagtctccccgagtaactccgaagtaacgaagcgccctacggcgcacaccctttgggaccccggtcttcacgagcatatacagcttaacccaacatacgcgacatccaggagggcggacacccttggcgcggtgcaagcgaaacaagccgtaggccccctaatgcagcactcgttgggcggtaccacaccgtgatagtagaccgcgcaaccaaggtggaaaccccgcccttcagcgccgagtcacacccctgcgggtggcgccacgcccgtcgccaccgcgccctaacacaccctgtcggcggga

SEQ ID NO: 447999 - DNA, 878 bp, Homo sapiens
acgcagtgatctttaggagcccacttctaaattcaaatcatttggggttcagtaagtctcttcacagacggggacctaatagcttccattagcagcctccacgtttgctgaacacgactacggggccagacccacaggaactccaatgtggttcagccgctcaactccagggaccaaaaagactttcccacctcccagcgttattaaaggcaaccccgcccccaagcctcagccactacgcggtgcagaaagaggcagagctgggcatgcgcaatttccgcccccgccacagtcttgggagtgggcgggctcgagggctgggaggaagccgaaagctgaccgagaggagaaagaagcccgcccccggaagtccctcctgtctctgcagcttgttcccggaagttttgctgctagtcgcggacgcaatggcttcaaggttacttcgcggagctggaacgctggccgcgcagtggcgcggccgcgatgcgctccatggcatctggaggtggtgttcccactgatgaagagcaggcgactgggttggagagggagatcatgctggctgcaaagaagggactggacccatacaatgtactggccccaaagggagcttcaggcaccagggaagaccctaatttagtcccctccatctccaacaagagaatagtaggctgcatctgtgaagaggacaataccagcgtcgtctggttttggctgcacaaaggcgaggcccagcgatgcccccgctgtggagcccattacaagctggtgccccagcagctggcacactgagcacctgcactaaattactcaaaatgtgctgtaaagtttcttctttccagtaaagactagccattgcattggctccttctcccata

SEQ ID NO: 448000 - DNA, 1280 bp, Homo sapiens
acgcagtgatctttaggagcccacttctaaattcaaatcatttggggttcagtaagtctcttcacagacggggacctaatagcttccattagcagcctccacgtttgctgaacacgactacggggccagacccacaggaactccaatgtggttcagccgctcaactccagggaccaaaaagactttcccacctcccagcgttattaaaggcaaccccgcccccaagcctcagccactacgcggtgcagaaagaggcagagctgggcatgcgcaatttccgcccccgccacagtcttgggagtgggcgggctcgagggctgggaggaagccgaaagctgaccgagaggagaaagaagcccgcccccggaagtccctcctgtctctgcagcttgttcccggaagttttgctgctagtcgcggacgcaatggcttcaaggttacttcgcggagctggaacgctggccgcgcaggccctgagggctcgcggccccagtggcgcggccgcgatgcgctccatggcatctggaggtggtgttcccactgatgaagagcaggcgactgggttggagagggagatcatgctggctgcaaagaagggactggacccatacaatgtactggccccaaagggagcttcaggcaccagggaagaccctaatttagtcccctccatctccaacaagagaatagtaggctgcatctgtgaagaggacaataccagcgtcgtctggttttggctgcacaaaggcgaggcccagcgatgcccccgctgtggagcccattacaagctggtgccccagcagctggcacactgagcacctgcactaaattactcaaaatgtgctgtaaagtttcttctttccagtaaagactagccattgcattggctccttctcccataaaaaaaaaaaaaaaaaaaaaaaaaaaaaaaaaaaaaaaaaaaaaaaaaaaaaaaaaaaaaaaaaaaaaagacaagaccaaaaggaacagaggaacaccaacacaaacacaacaagaaaaaaaaaaaaatttggggcccttttggcaccccggctttttaactcggcgagtttttttgtgggggcccaattttggggctaatttggccaaatcccccttaaagggggcggttttaacaactctagggggcgcgggtttaaaaagcgtgggcattggaaaaaacccgggggttcccacattataacgcttttgagggaaatacccctttttcgcgggtggggcaaatatacacaaagggcctcaccgcgaggccctttccc

SEQ ID NO: 448001 - DNA, 703 bp, Homo sapiens
cagggaccagagtgttgccctcccagggtggtcccagggcggcaaagcggcgcggctcgtgcagcttctcgaggtcccagtggccgctttacggtccccagtgcctcaggctctgcaggcatctccctgtaattctggaccgctgctcctgccgctccccgaactcactccgctgcgaaaacaaatgtcgacaaatttgcctcggtggttggagaaagaaaagctcataggccgggcgcggtggctcacaactgtaatcccagcactttgggaggccgaggcggacagatcccctgaggtcaggagctcaagaccagcctggccaacatggtggtgttcccactgatgaagagcaggcgactgggttggagagggagatcatgctggctgcaaagaagggactggacccatacaatgtactggccccaaagggagcttcaggcaccagggaagaccctaatttagtcccctccatctccaacaagagaatagtaggctgcatctgtgaagaggacaataccagcgtcgtctggttttggctgcacaaaggcgaggcccagcgatgcccccgctgtggagcccattacaagctggtgccccagcagctggcacactgagcacctgcactaaattactcaaaatgtgctgtaaagtttcttctttccagtaaagactagccattgcattggctccttctcccata

SEQ ID NO: 448002 - DNA, 1040 bp, Homo sapiens
  misc_feature (908)..(908): n is a, c, g, or t
acgcagtgatctttaggagcccacttctaaattcaaatcatttggggttcagtaagtctcttcacagacggggacctaatagcttccattagcagcctccacgtttgctgaacacgactacggggccagacccacaggaactccaatgtggttcagccgctcaactccagggaccaaaaagactttcccacctcccagcgttattaaaggcaaccccgcccccaagcctcagccactacgcggtgcagaaagaggcagagctgggcatgcgcaatttccgcccccgccacagtcttgggagtgggcgggctcgagggctgggaggaagccgaaagctgaccgagaggagaaagaagcccgcccccggaagtccctcctgtctctgcagcttgttcccggaagttttgctgctagtcgcggacgcaatggcttcaaggttacttcgcggagctggaacgctggccgcgcaggccctgagggctcgcggccccagtggcgcggccgcgatgcgctccatggcatctggaggtggtgttcccactgatgaagagcaggcgactgggttggagagggagatcatgctggctgcaaagaagggactggacccatacaatgtactggccccaaagggagcttcaggcaccagggaagaccctaatttagtcccctccatctccaacaagagaatagtaggctgcatctgtgaagaggacaataccagcgtcgtctggttttggctgcacaaaggcgaggcccagcgatgcccccgctgtggagcccattacaagctggtgccccagcagctggcacactgagcacctgcactaaattactcaaaatgtgctgtaaagtttcttctttccagtaaagactagccattgcattggctccttctcccataaacattngggttctgatatctgaggccagtaactataaaatatctctcggggggggccccgggaccgagtttcccctatagggagcctaattacaaatccttggccgaagatttacaacggcaagactggaaaaaccct

SEQ ID NO: 448003 - DNA, 1367 bp, Homo sapiens
  misc_feature (1235)..(1235): n is a, c, g, or t
cagggaccagagtgttgccctcccagggtggtcccagggcggcaaagcggcgcggctcgtgcagcttctcgaggtcccagtggccgctttacggtccccagtgcctcaggctctgcaggcatctccctgtaattctggaccgctgctcctgccgctccccgaactcactccgctgcgaaagtatcctaaacggaggtgccgggtgaccttgggagggaccggggctgccaccgggatggggaggggtccggcctcccttcaaacctgcgcccacctcaagcagagtgggttctacatgcttttagacaaatgtcgacaaatttgcctcggtggttggagaaagaaaagctcataggccgggcgcggtggctcacaactgtaatcccagcactttgggaggccgaggcggacagatcccctgaggtcaggagctcaagaccagcctggccaacatggtaaaaccccgtttctactaaaaatacaaaaattagccgggcgtggtggcgcgcgcctgtagtcccagctactcgggaggctgaggcaggagaatcgcttaaacccgggaggcggaggttcccgtgagccaacatcgcgccattgcactccagcctgggcaacaagagcaaaactccgtctcaaaaaagaaaaaaaaagctcccccgagtgctgccgcttgtgtggatgggtacttggtggttcttaggggaccatggatatgagtagcctttaggagcttgtgagcccgctaaaacttatacagaagtttcggggcaccattttccttgatcatttctgtttgtagtttttctatcagtcatttcagtcagcgtcataattcacgttatcttcctttaggtggtgttcccactgatgaagagcaggcgactgggttggagagggagatcatgctggctgcaaagaagggactggacccatacaatgtactggccccaaagggagcttcaggcaccagggaagaccctaatttagtcccctccatctccaacaagagaatagtaggctgcatctgtgaagaggacaataccagcgtcgtctggttttggctgcacaaaggcgaggcccagcgatgcccccgctgtggagcccattacaagctggtgccccagcagctggcacactgagcacctgcactaaattactcaaaatgtgctgtaaagtttcttctttccagtaaagactagccattgcattggctccttctcccataaacattngggttctgatatctgaggccagtaactataaaatatctctcggggggggccccgggaccgagtttcccctatagggagcctaattacaaatccttggccgaagatttacaacggcaagactggaaaaaccct

SEQ ID NO: 448004 - DNA, 1020 bp, Homo sapiens
acgcagtgatctttaggagcccacttctaaattcaaatcatttggggttcagtaagtctcttcacagacggggacctaatagcttccattagcagcctccacgtttgctgaacacgactacggggccagacccacaggaactccaatgtggttcagccgctcaactccagggaccaaaaagactttcccacctcccagcgttattaaaggcaaccccgcccccaagcctcagccactacgcggtgcagaaagaggcagagctgggcatgcgcaatttccgcccccgccacagtcttgggagtgggcgggctcgagggctgggaggaagccgaaagctgaccgagaggagaaagaagcccgcccccggaagtccctcctgtctctgcagcttgttcccggaagttttgctgctagtcgcggacgcaatggcttcaaggttacttcgcggagctggaacgctggccgcgcaggccctgagggctcgcggccccagtggcgcggccgcgatgcgctccatggcatctggaggtggtgttcccactgatgaagagcaggcgactgggttggagagggagatcatgctggctgcaaagaagggactggacccatacaatgtactggccccaaagggagcttcaggcaccagggaagaccctaatttagtcccctccatctccaacaagagaatagtaggctgcatctgtaagtacctcacctctattttttatccacttgcttaatatatcctacaatagtgtgtaagctgcctcaaatcttcagtgtgtgagtgcatgttggtaagtttgtctaagggtcttgacactctcaagcctcattatgcctgatagttcatccttactgggaagaagcgcagcacagcggtaagactggctcactgggagtgcggcatgaaggagtacccacccagcaaatatttattgttatactgcttctatgccaggcatcattttagacactagggatacataccagaacggaccctgctttgcgttctacata

SEQ ID NO: 448005 - DNA, 901 bp, Homo sapiens
acgcagtgatctttaggagcccacttctaaattcaaatcatttggggttcagtaagtctcttcacagacggggacctaatagcttccattagcagcctccacgtttgctgaacacgactacggggccagacccacaggaactccaatgtggttcagccgctcaactccagggaccaaaaagactttcccacctcccagcgttattaaaggcaaccccgcccccaagcctcagccactacgcggtgcagaaagaggcagagctgggcatgcgcaatttccgcccccgccacagtcttgggagtgggcgggctcgagggctgggaggaagccgaaagctgaccgagaggagaaagaagcccgcccccggaagtccctcctgtctctgcagcttgttcccggaagttttgctgctagtcgcggacgcaatggcttcaaggttacttcgcggagctggaacgctggccgcgcaggccctgagggctcgcggccccagtggcgcggccgcgatgcgctccatggcatctggaggtggtgttcccactgatgaagagcaggcgactgggttggagagggagatcatgctggctgcaaagaagggactggacccatacaatgtactggccccaaagggagcttcaggcaccagggaagaccctaatttagtcccctccatctccaacaagagaatagtaggctgcatctgtgaagaggacaataccagcgtcgtctggttttggctgcacaaaggcgaggcccagcgatgcccccgctgtggagcccattacaagctggtgccccagcagctggcacactgagcacctgcactaaattactcaaaatgtgctgtaaagtttcttctttccagtaaagactagccattgcattggctccttctcccata

SEQ ID NO: 448006 - DNA, 553 bp, Homo sapiens
  misc_feature (4)..(4): n is a, c, g, or t
  misc_feature (7)..(7): n is a, c, g, or t
  misc_feature (23)..(23): n is a, c, g, or t
  misc_feature (40)..(40): n is a, c, g, or t
ttanagncctttatgctaatatngccagcgcctactactntatgcgatgcccgacagaatgaaaggccgcggacgcaatggcttcaaggttacttcgcggagctggaacgctggccgcgcaggccctgagggctcgcggccccagtggcgcggccgcgatgcgctccatggcatctggaggtggtgttcccactgatgaagagcaggcgactgggttggagagggagatcatgctggctgcaaagaagggactggacccatacaatgtactggccccaaagggagcttcaggcaccagggaagaccctaatttagtcccctccatctccaacaagagaatagtaggctgcatctgtgaagaggacaataccagcgtcgtctggttttggctgcacaaaggcgaggcccagcgatgcccccgctgtggagcccattacaagctggtgccccagcagctggcacactgagcacctgcactaaattactcaaaatgtgctgtaaagtttcttctttccagtaaagactagccattgcattggctccttctcccata

SEQ ID NO: 448007 - DNA, 1136 bp, Homo sapiens
  misc_feature (970)..(970): n is a, c, g, or t
acgcagtgatctttaggagcccacttctaaattcaaatcatttggggttcagtaagtctcttcacagacggggacctaatagcttccattagcagcctccacgtttgctgaacacgactacggggccagacccacaggaactccaatgtggttcagccgctcaactccagggaccaaaaagactttcccacctcccagcgttattaaaggcaaccccgcccccaagcctcagccactacgcggtgcagaaagaggcagagctgggcatgcgcaatttccgcccccgccacagtcttgggagtgggcgggctcgagggctgggaggaagccgaaagctgaccgagaggagaaagaagcccgcccccggaagtccctcctgtctctgcagcttgttcccggaagttttgctgctagtcgcggacgcaatggcttcaaggttacttcgcggagctggaacgctggccgcgcaggccctgagggctcgcggccccagtggcgcggccgcgatgcgctccatggcatctggaggtggtgttcccactgatgaagagcaggcgactgggttggagagggagatcatgctggctgcaaagaagggactggacccatacaatgtactggccccaaagggagcttcaggcaccagggaagaccctaatttagtcccctccatctccaacaagagaatagtaggctgcatctgtgaagaggacaataccagcgtcgtctggttttggctgcacaaaggcgaggcccagcgatgcccccgctgtggagcccattacaagctggtgccccagcagctggcacactgagcacctgcactaaattactcaaaatgtgctgtaaagtttcttctttccagtaaagactagccattgcattggctccttctcccataaaaaaaaaaaaaaaaaaaaaaaaaaaaaaaaaaaaaaaaaaaaaaaaaaaaaaaaaaaaaaaaaaaacnggggggcgttattatttgggggggggaaacaagagggttattataaagggccactatgttacataggtggtttctgaggacccagttttttttgcaacacggggggaatagtcgggggcgccccataggagggggtatatattggagacggcggggttaccgggat

SEQ ID NO: 448008 - DNA, 1228 bp, Homo sapiens
cagggaccagagtgttgccctcccagggtggtcccagggcggcaaagcggcgcggctcgtgcagcttctcgaggtcccagtggccgctttacggtccccagtgcctcaggctctgcaggcatctccctgtaattctggaccgctgctcctgccgctccccgaactcactccgctgcgaaagtatcctaaacggaggtgccgggtgaccttgggagggaccggggctgccaccgggatggggaggggtccggcctcccttcaaacctgcgcccacctcaagcagagtgggttctacatgcttttagacaaatgtcgacaaatttgcctcggtggttggagaaagaaaagctcataggccgggcgcggtggctcacaactgtaatcccagcactttgggaggccgaggcggacagatcccctgaggtcaggagctcaagaccagcctggccaacatggtaaaaccccgtttctactaaaaatacaaaaattagccgggcgtggtggcgcgcgcctgtagtcccagctactcgggaggctgaggcaggagaatcgcttaaacccgggaggcggaggttcccgtgagccaacatcgcgccattgcactccagcctgggcaacaagagcaaaactccgtctcaaaaaagaaaaaaaaagctcccccgagtgctgccgcttgtgtggatgggtacttggtggttcttaggggaccatggatatgagtagcctttaggagcttgtgagcccgctaaaacttatacagaagtttcggggcaccattttccttgatcatttctgtttgtagtttttctatcagtcatttcagtcagcgtcataattcacgttatcttcctttaggtggtgttcccactgatgaagagcaggcgactgggttggagagggagatcatgctggctgcaaagaagggactggacccatacaatgtactggccccaaagggagcttcaggcaccagggaagaccctaatttagtcccctccatctccaacaagagaatagtaggctgcatctgtgaagaggacaataccagcgtcgtctggttttggctgcacaaaggcgaggcccagcgatgcccccgctgtggagcccattacaagctggtgccccagcagctggcacactgagcacctgcactaaattactcaaaatgtgctgtaaagtttcttctttccagtaaagactagccattgcattggctccttctcccata

SEQ ID NO: 448009 - DNA, 1114 bp, Homo sapiens
  misc_feature (948)..(948): n is a, c, g, or t
acgcagtgatctttaggagcccacttctaaattcaaatcatttggggttcagtaagtctcttcacagacggggacctaatagcttccattagcagcctccacgtttgctgaacacgactacggggccagacccacaggaactccaatgtggttcagccgctcaactccagggaccaaaaagactttcccacctcccagcgttattaaaggcaaccccgcccccaagcctcagccactacgcggtgcagaaagaggcagagctgggcatgcgcaatttccgcccccgccacagtcttgggagtgggcgggctcgagggctgggaggaagccgaaagctgaccgagaggagaaagaagcccgcccccggaagtccctcctgtctctgcagcttgttcccggaagttttgctgctagtcgcggacgcaatggcttcaaggttacttcgcggagctggaacgctggccgcgcaggccctgagggctcgcggccccagtggcgcggccgcgatgcgctccatggcatctggaggtggtgttcccactgatgaagagcaggcgactgggttggagagggagatcatgctggctgcaaagaagggactggacccatacaatgtactggccccaaagggagcttcaggcaccagggaagaccctaatttagtcccctccatctccaacaagagaatagtaggctgcatctgtgaagaggacaataccagcgtcgtctggttttggctgcacaaaggcgaggcccagcgatgcccccgctgtggagcccattacaagctggtgccccagcagctggcacactgagcacctgcactaaattactcaaaatgtgctgtaaagtttcttctttccagtaaagactagccattgcattggctccttctcccataaaaaaaaaaaaaaaaaaaaaaaaaaaaaaaaaaaaaaaaaaaaaacnggggggcgttattatttgggggggggaaacaagagggttattataaagggccactatgttacataggtggtttctgaggacccagttttttttgcaacacggggggaatagtcgggggcgccccataggagggggtatatattggagacggcggggttaccgggat

SEQ ID NO: 448010 - DNA, 447 bp, Homo sapiens
attagagatcggcgagtgatggtcagtattcgggagtgacgtgcggaggctatggtcggccagtggcgcgatggtcatggattgaggtgtgtccactgataagagcagggactggttgagaggagatcatgtggctgaaagaagggctgacccatacaatgtactggccccaaagggagcttcaggcaccagggaagaccctaatttagtcccctccatctccaacaagagaatagtaggctgcatctgtgaagaggacaataccagcgtcgtctggttttggctgcacaaaggcgaggcccagcgatgcccccgctgtggagcccattacaagctggtgccccagcagctggcacactgagcacctgcactaaattactcaaaatgtgctgtaaagtttcttctttccagtaaagactagccattgcattggctccttctcccata

SEQ ID NO: 448011 - DNA, 1347 bp, Homo sapiens
cagggaccagagtgttgccctcccagggtggtcccagggcggcaaagcggcgcggctcgtgcagcttctcgaggtcccagtggccgctttacggtccccagtgcctcaggctctgcaggcatctccctgtaattctggaccgctgctcctgccgctccccgaactcactccgctgcgaaagtatcctaaacggaggtgccgggtgaccttgggagggaccggggctgccaccgggatggggaggggtccggcctcccttcaaacctgcgcccacctcaagcagagtgggttctacatgcttttagacaaatgtcgacaaatttgcctcggtggttggagaaagaaaagctcataggccgggcgcggtggctcacaactgtaatcccagcactttgggaggccgaggcggacagatcccctgaggtcaggagctcaagaccagcctggccaacatggtaaaaccccgtttctactaaaaatacaaaaattagccgggcgtggtggcgcgcgcctgtagtcccagctactcgggaggctgaggcaggagaatcgcttaaacccgggaggcggaggttcccgtgagccaacatcgcgccattgcactccagcctgggcaacaagagcaaaactccgtctcaaaaaagaaaaaaaaagctcccccgagtgctgccgcttgtgtggatgggtacttggtggttcttaggggaccatggatatgagtagcctttaggagcttgtgagcccgctaaaacttatacagaagtttcggggcaccattttccttgatcatttctgtttgtagtttttctatcagtcatttcagtcagcgtcataattcacgttatcttcctttaggtggtgttcccactgatgaagagcaggcgactgggttggagagggagatcatgctggctgcaaagaagggactggacccatacaatgtactggccccaaagggagcttcaggcaccagggaagaccctaatttagtcccctccatctccaacaagagaatagtaggctgcatctgtaagtacctcacctctattttttatccacttgcttaatatatcctacaatagtgtgtaagctgcctcaaatcttcagtgtgtgagtgcatgttggtaagtttgtctaagggtcttgacactctcaagcctcattatgcctgatagttcatccttactgggaagaagcgcagcacagcggtaagactggctcactgggagtgcggcatgaaggagtacccacccagcaaatatttattgttatactgcttctatgccaggcatcattttagacactagggatacataccagaacggaccctgctttgcgttctacata

SEQ ID NO: 448012 - DNA, 3872 bp, Homo sapiens
atctaagctgaaagtgtttggggagatcagacattgctgtctggtgctcctctctcagtggccatcatgtctttgacatctgcttaccagcataaattagcagagaagctcactatcctgaatgatcgcggtcagggggttctcatccgtatgtataacatcaagaagacttgttcagaccccaaatctaagccacctttcttactggaaaagtccatggaaccatctctcaagtatatcaacaagaaatttcccaacatagatgtccgaaacagcacgcaacatttaggaccagtacatcgtgaaaaagccgagataattagattcctcaccaactactaccagtcatttgtggatgtcatggaatttcgggatcatgtatatgaacttctcaacaccattgatgcctgccagtgccattttgatatcaatctcaactttgatttcactcggagttacctggacttgattgtaacttacacctcagtcattttacttctgtcacggattgaagatcggcggatactcattggcatgtacaattgtgcccatgagatgctgcatgggcatggtgaccccagttttgcccgtctgggtcagatggtcttggagtatgaccaccctctgaagaagctgacagaagagtttgggcctcacacaaaggctgtgagtggagccctcctctctttgcatttcctctttgtccgaagaaaccagggggctgagcagtggcgcagtgcccaacttctaagcctcatcagcaaccccccagccatgattaaccctgctaattcagatacaatggcctgtgagtatctgtctgtggaagtaatggagcgctggattatcattgggtttcttctttgtcatgggtgcctcaactccaatagccagtgccagaagctgtggaagctgtgtctgcagggctccctctacatcacccttatccgtgaggatgtgctgcaggtgcacaaagtcaccgaggacctgtttagcagtttgaaagggtatggcaagagagtggcagacataaaggagagcaaggaacatgtaattgcaaacagtggccagtttcattgtcaacggcggcaatttctgcggatggcagtgaaggagctggagactgtgttggctgatgaaccgggactactgggtcctaaggctctttttgctttcatggccctgtccttcattcgtgatgaggtcacctggctggttcgccacacagagaatgtcaccaagacaaagacacctgaggactatgctgactcgagcattgcagagctacttttcttgttggaggggattaggtctctggtccgaagacacatcaaagtgatacagcaataccaccttcagtacttggcaagatttgatgctcttgtgctcagtgacatcattcagaacttgtctgtgtgtccagaggaggagtccatcatcatgtcctcattcgtcagtatcctctcctctctgaatctcaaacaagttgataatggagaaaaatttgaattctcaggattgaggctggactggttccgcctacaggcatacactagcgtggctaaggcccctctgcacctgcatgagaaccctgacttagccaaggtgatgaacctcattgtcttccactcccgaatgctggactccgtagaaaaattgctggtggaaacttctgatctgtctactttctgctttcatcttcgtatctttgagaagatgtttgccatgaccttggaggaatctgccatgttgcgttatgccattgctttccccctgatttgtgctcactttgtccactgcactcatgagatgtgcccagaggagtacccccacctcaagaaccatggtcttcaccactgcaactccttcctggaagagttggccaagcagaccagcaattgcgtcctggagatctgtgctgagcagcgaaacctgagcgagcagcttctacctaagcactgtgccactacaatcagcaaagccaagaacaagaaaaccaggaagcagaggcagactcccagaaaaggagagcccgagagggacaagccaggagctgagagtcaccggaagaaccgcagcattgtcaccaacatggacaagctacacctaaacttgacagaactggcactgacaatgaatcatgtatacagtttctccgtgtttgaacatactatcttcccttctgagtacctcagcagccacctggaggccagactcaacagagccattgtgtggctggctggctacaatgccacgacccaggagatcgtacggccttctgagctgttggcaggagtcaaagcatacattggtttcatacagtcactggcccagtttttgggtgcagatgcttccagagtcatccgcaacgccctcctgcagcagacacaaccactggattcctgtggggaacagacaatcaccacactctacacaaactggtacctggaaagtctgcttagacaggcaagcagtgggaccatcatcctctccccagccatgcaggccttcgtcagcctgcccagagaaggggagcagaacttcagtgcagaggagttctctgacatctctgagatgcgggccttggcagaactcctgggcccctatggcatgaagttcctgagtgaaaacctgatgtggcatgtgacctctcagattgtggagctgaagaagctggtggtggaaaacatggacatacttgttcagatcagatccaactttagcaagccggacttgatggcttccctgctgccccagctgacaggggctgaaaatgtgctaaagcgcatgaccatcattggggttatcctcagtttcagggccatggcccaagagggacttcgggaggttttctcctcccactgcccatttcttatgggtcccattgagtgcttgaaggagtttgtcactccagacacagacatcaaggtgaccttgagtatctttgagctggcatctgctgcaggtgtgggctgtgacattgacccagccttggtggctgccattgctaatctgaaagctgatacttcatctcctgaggaggaatataaggtggcctgcctgctcttgatctttctggcagtttccctcccactccttgccactgacccttcttccttttatagcattgagaaggatggttacaacaacaatattcattgcttgaccaaagccatcatccaggtgtctgctgccctcttcacgctctacaacaagaacattgaaactcacctcaaggaatttctggtggtggcctctgtcagcctcttgcagctgggccaggagactgacaagcttaaaaccagaaatcgagaatccatttctctgctcatgcgcttggtggtggaggagtcatccttcctgaccctggacatgctggagtcctgtttcccttatgtcctgcttcgaaatgcctatcgggaggtgtctcgggccttccacctaaactgaatgcctgccagtacccactgaagagccctttggaccttcctaaacccttgccatagtggaagctgtggtcactttcgcagggggtgggaatggggtggggtcactaaggagagagggtcaggagccagagttgatgagcagatctgtggaagaacaatccagggctgagaaatcgtagagcagtgaggcaggctgggagcatggaggacagcttatggaaaaagttagggcgtggggccacatgtgtgaattttacaatgaaaaaaggagtaacgtacaagtatattttctatcttctggtgacttgagcttgagctctgacaggcatgggcctctccgaccttcatcactattcttaggataatgctggcgggcagagatgatcaatcatcatattaaatcataatgagcttataatcctc

SEQ ID NO: 448013 - DNA, 1555 bp, Homo sapiens
gcggccgcctactactactactactgctcgaattcaagcttctaacgatgtacggggaccctgtagtcccactactcaggaggctgaggcagcagaataacttgatcccgggaggcggaggttgcagtaagctaagatcctgccacagcattccaggctgagtgacagagcgagactctgtctcaaaaaataaataataatttaaaaaaagatacagaacagttccatcaccacaaggatccctcgcattgctcttttatagcaattttatagcaattttctcctcccacaacccccttccccatctctagctcctggtaacacagatatattctctatttctaaaattttgtcatttgatatatctttttgtaaacatataattatacacacatatttctctaccacttatactttttcaaagtgctttcacatccttatagcaattctgcaaggtagccagggaaggctttcctatttcaggtcagaaaacagatttagaaatattaaatgacttaatgaaggtcacatgtttagcagtagaactagaactgggacccaagtctgatgttcagtcctagaccttttctacttgcccggtctgcctcttcacaagggaagacttgggttttagaatccagagaccttagaaggagcaaattggagaaggtgaggacatgatggcctttactaccggaagcaaaaagtgaatgtccagaggtgaagggacagagaagtaacaggacccatcagcatttcaggcaatttgcttcctttaccaggagggtctctgtcctcttacaacctgggaaaaaataagttgtgtcccaggttgtaagtttgctttacttaggcccaaaggaactaaagaatggatatcagaaatctcaccccaattgttttgtcttacaggcacagaataggttctagcctcagcattttcattaatgtagtgtttttattaacatctccattaacttgcttgcagcaatgagatggaattatgcctcccacaaggcctggggcaagatacttgcataggtgcccccttttgtttggacagtagaaacactgcctcccctgccatggtgttcaatccagttggcaggtgggccagcttcaaagtgcagaaggaactgggtgtggtggctcacccctgtaatcccagcactttgggaggcaggcggatcgcttgaactcaggagtttgagaccactctgggcaacacagtgaaaccctgtctctccaaaaatacaaaaaattagctgggcatggtggctgttgtctgtaatcccaacactttgggaggctgaggccagtggatctcttgagctaaggaggttaagaccagcctggtcaacatggcgaactccgtctctacaaaaaaatacgaaaattagctgggcgtagtagttcctgcctgtagtcctagctacttggaaggctgaggtggggaggatcgcttgagtccgggaggcagaggttgcagtgagcgaagatgatgccattgcactccagtctgggtgacagagcaagatcctgtctcacaaaaaaa

SEQ ID NO: 448014 - DNA, 795 bp, Homo sapiens
acccgaggaagcaggcaacatatacggctaggtacgaggcctgggtggttgctgtggaagtaatggagcgctggattatcattgggtttcttctttgtcatgggtgcctcaactccaatagccagtgccagaagctgtggaagctgtgtctgcagggctccctctacatcacccttatccgtgaggatgtgctgcaggtgcacaaagtcaccgaggacctgtttagcagtttgaaagggtatggcaagagagtggcagacataaaggagagcaaggaacatgtaattgcaaacagtggccagtttcattgtcaacggcggcaatttctgcggatggcagtgaaggagctggagactgtgttggctgatgaaccgggactactgggtcctaaggctctttttgctttcatggccctgtccttcattcgtgatgaggtcacctggctggttcgccacacagagaatgtcaccaagacaaagacacctgaggactatgctgactcgagcattgcagagctacttttcttgttggaggggattaggtctctggtccgaagacacatcaaagtgatacagcaataccaccttcagtacttggcaagatttgatgctcttgtgctcagtgacatcattcagaacttgtctgtgtgtccagaggaggagtccatcatcatgtcctcattcgtcagtatcctctcctctctgaatctcaaacaagtgatcatgggaaaatttgaattctccggattggcgggggctggtccgcctacggctacctacggggtaggccctcggc

SEQ ID NO: 448015 - DNA, 441 bp, Homo sapiens
tcatatttctagtcttattcatctctgttctcatcctaaactttataggagcattgcagagctacttttcttgttggaggggattaggtctctggtccgaagacacatcaaagtgatacagcaataccaccttcagtacttggcaagatttgatgctcttgtgctcagtgacatcattcaggtatgatatttaattgattatactttggaaatttcaggatgatccctagtgattttcctattgaaaccgcgcctggccttttgtgttcttataaaatcttttcttgccaactacagtggtgtgttcctgttacccaacttgcttgggagactgaggcaggaggatcacttgaggccagaagttccaggctgtagtagactatgatcacacctgtgaatagacactgcattctagcctgggcaacatagcaagactctatc

SEQ ID NO: 448016 - DNA, 6715 bp, Homo sapiens
atctaagctgaaagtgtttggggagatcagacattgctgtctggtgctcctctctcagtggccatcatgtctttgacatctgcttaccagcataaattagcagagaagctcactatcctgaatgatcgcggtcagggggttctcatccgtatgtataacatcaagaagacttgttcagaccccaaatctaagccacctttcttactggaaaagtccatggaaccatctctcaagtatatcaacaagaaatttcccaacatagatgtccgaaacagcacgcaacatttaggaccagtacatcgtgaaaaagccgagataattagattcctcaccaactactaccagtcatttgtggatgtcatggaatttcgggatcatgtatatgaacttctcaacaccattgatgcctgccagtgccattttgatatcaatctcaactttgatttcactcggagttacctggacttgattgtaacttacacctcagtcattttacttctgtcacggattgaagatcggcggatactcattggcatgtacaattgtgcccatgagatgctgcatgggcatggtgaccccagttttgcccgtctgggtcagatggtcttggagtatgaccaccctctgaagaagctgacagaagagtttgggcctcacacaaaggctgtgagtggagccctcctctctttgcatttcctctttgtccgaagaaaccagggggctgagcagtggcgcagtgcccaacttctaagcctcatcagcaaccccccagccatgattaaccctgctaattcagatacaatggcctgtgagtatctgtctgtggaagtaatggagcgctggattatcattgggtttcttctttgtcatgggtgcctcaactccaatagccagtgccagaagctgtggaagctgtgtctgcagggctccctctacatcacccttatccgtgaggatgtgctgcaggtgcacaaagtcaccgaggacctgtttagcagtttgaaagggtatggcaagagagtggcagacataaaggagagcaaggaacatgtaattgcaaacagtggccagtttcattgtcaacggcggcaatttctgcggatggcagtgaaggagctggagactgtgttggctgatgaaccgggactactgggtcctaaggctctttttgctttcatggccctgtccttcattcgtgatgaggtcacctggctggttcgccacacagagaatgtcaccaagacaaagacacctgaggactatgctgactcgagcattgcagagctacttttcttgttggaggggattaggtctctggtccgaagacacatcaaagtgatacagcaataccaccttcagtacttggcaagatttgatgctcttgtgctcagtgacatcattcagaacttgtctgtgtgtccagaggaggagtccatcatcatgtcctcattcgtcagtatcctctcctctctgaatctcaaacaagttgataatggagaaaaatttgaattctcaggattgaggctggactggttccgcctacaggcatacactagcgtggctaaggcccctctgcacctgcatgagaaccctgacttagccaaggtgatgaacctcattgtcttccactcccgaatgctggactccgtagaaaaattgctggtggaaacttctgatctgtctactttctgctttcatcttcgtatctttgagaagatgtttgccatgaccttggaggaatctgccatgttgcgttatgccattgctttccccctgatttgtgctcactttgtccactgcactcatgagatgtgcccagaggagtacccccacctcaagaaccatggtcttcaccactgcaactccttcctggaagagttggccaagcagaccagcaattgcgtcctggagatctgtgctgagcagcgaaacctgagcgagcagcttctacctaagcactgtgccactacaatcagcaaagccaagaacaagaaaaccaggaagcagaggcagactcccagaaaaggagagcccgagagggacaagccaggagctgagagtcaccggaagaaccgcagcattgtcaccaacatggacaagctacacctaaacttgacagaactggcactgacaatgaatcatgtatacagtttctccgtgtttgaacatactatcttcccttctgagtacctcagcagccacctggaggccagactcaacagagccattgtgtggctggctggctacaatgccacgacccaggagatcgtacggccttctgagctgttggcaggagtcaaagcatacattggtttcatacagtcactggcccagtttttgggtgcagatgcttccagagtcatccgcaacgccctcctgcagcagacacaaccactggattcctgtggggaacagacaatcaccacactctacacaaactggtacctggaaagtctgcttagacaggcaagcagtgggaccatcatcctctccccagccatgcaggccttcgtcagcctgcccagagaaggggagcagaacttcagtgcagaggagttctctgacatctctgagatgcgggccttggcagaactcctgggcccctatggcatgaagttcctgagtgaaaacctgatgtggcatgtgacctctcagattgtggagctgaagaagctggtggtggaaaacatggacatacttgttcagatcagatccaactttagcaagccggacttgatggcttccctgctgccccagctgacaggggctgaaaatgtgctaaagcgcatgaccatcattggggttatcctcagtttcagggccatggcccaagagggacttcgggaggttttctcctcccactgcccatttcttatgggtcccattgagtgcttgaaggagtttgtcactccagacacagacatcaaggtgaccttgagtatctttgagctggcatctgctgcaggtgtgggctgtgacattgacccagccttggtggctgccattgctaatctgaaagctgatacttcatctcctgaggaggaatataaggtggcctgcctgctcttgatctttctggcagtttccctcccactccttgccactgacccttcttccttttatagcattgagaaggatggttacaacaacaatattcattgcttgaccaaagccatcatccaggtgtctgctgccctcttcacgctctacaacaagaacattgaaactcacctcaaggaatttctggtggtggcctctgtcagcctcttgcagctgggccaggagactgacaagcttaaaaccagaaatcgagaatccatttctctgctcatgcgcttggtggtggaggagtcatccttcctgaccctggacatgctggagtcctgtttcccttatgtcctgcttcgaaatgcctatcgggaggtgtctcgggccttccacctaaactgaatgcctgccagtacccactgaagagccctttggaccttcctaaacccttgccatagtggaagctgtggtcactttcgcagggggtgggaatggggtggggtcactaaggagagagggtcaggagccagagttgatgagcagatctgtggaagaacaatccagggctgagaaatcgtagagcagtgaggcaggctgggagcatggaggacagcttatggaaaaagttagggcgtggggccacatgtgtgaattttacaatgaaaaaaggagtaacgtacaagtatattttctatcttctggtgacttgagcttgagctctgacaggcatgggcctctccgaccttcatcactattcttaggataatgctggcgggcagagatgatcaatcatcatattaaatcataatgagcttataatcctcacactggagctgctattgtctcctgcacattcattaggaccattatcttctctcttcctttttcaaatgtgttcagcaaacattcaacctgctcctactgcagagtagcagcaaaggagcccctcttttcctttgtggggctcttcgaggggtcattgggtctcttcctttgcccccagcttgactgcgtttcctactggggcaaggaggaagtgcccttcagagatgttcactgcccacctactctactacattgtttgttacaagttctctcttgctttaacccctcctgctttgatatctccacaacccagagcagagggtcagttagtctccgtcaattctaggttacatgacaactgattggcccagacttaggtgggttttccctcctgtaccatttgggggtactctgccttttattgggagggactaatttaaccccaaatccttttgtcagcctatttgatagctgttttggggttttgtacaggtgtttgctttttatttcttgagacccaggcttagtcaatactttcttaacttggcacccataatcaacatacagatttttcttagcaacagttgtctgctctttagggtggaagcgatagagaatcctgcttcgtgcatcagcaaatcctccttccttgctatgggaagggcttatgttctaaagggtgattcagtgtcaggcttatgagactgagagtaaagttgatgaggaagaggaggctcagaagtatctgaacaactactctatatgtttatatttttctgcttgaggggatagagatccctcctccatctgcatctgcatatagaactgcttaagaggacagcaagacaagttgctgcagggggatggagggtagacagaatgcctttttttaaaactgaaaattttattgagatacttaatccacctgcacttgtaagaaatcatacagagaaattctattttcctttacacagtttccctgaatgctaacatctagcaaaactgtagtacactgccacaaccaggataactgacattgatataatctactgatcttgttcagatttccttccccagttttgcttatgttcatttctctctgtgtgtgcacgtgtgtgtgttatctatttctatacagctttatcatgtgtaggtttgtgtatctgccactgcagtcaacatacagaacaggccgggcgcagtggctcacgcctgtaatcccagcactttgggaggccaaggcaggtggatcacctgaggtcaggggtttgagagcagcctggccaatatagtgaaacaccgtctctactaaaaataccaaaactagccgggcgtggtggtgcatgcctgtagtcccactactcaggaggctgaggcagcagaataacttgatcccgggaggcggaggttgcagtaagctaagatcctgccacagcattccaggctgagtgacagagcgagactctgtctcaaaaaataaataataatttaaaaaaagatacagaacagttccatcaccacaaggatccctcgcattgctcttttatagcaattttatagcaattttctcctcccacaacccccttccccatctctagctcctggtaacacagatatattctctatttctaaaattttgtcatttgatatatctttttgtaaacatataattatacacacatatttctctaccacttatactttttcaaagtgctttcacatccttatagcaattctgcaaggtagccagggaaggctttcctatttcaggtcagaaaacagatttagaaatattaaatgacttaatgaaggtcacatgtttagcagtagaactagaactgggacccaagtctgatgttcagtcctagaccttttctacttgcccggtctgcctcttcacaagggaagacttgggttttagaatccagagaccttagaaggagcaaattggagaaggtgaggacatgatggcctttactaccggaagcaaaaagtgaatgtccagaggtgaagggacagagaagtaacaggacccatcagcatttcaggcaatttgcttcctttaccaggagggtctctgtcctcttacaacctgggaaaaaataagttgtgtcccaggttgtaagtttgctttacttaggcccaaaggaactaaagaatggatatcagaaatctcaccccaattgttttgtcttacaggcacagaataggttctagcctcagcattttcattaatgtagtgtttttattaacatctccattaacttgcttgcagcaatgagatggaattatgcctcccacaaggcctggggcaagatacttgcataggtgcccccttttgtttggacagtagaaacactgcctcccctgccatggtgttcaatccagttggcaggtgggccagcttcaaagtgcagaaggaactgggtgtggtggctcacccctgtaatcccagcactttgggaggcaggcggatcgcttgaactcaggagtttgagaccactctgggcaacacagtgaaaccctgtctctccaaaaatacaaaaaattagctgggcatggtggctgttgtctgtaatcccaacactttgggaggctgaggccagtggatctcttgagctaaggaggttaagaccagcctggtcaacatggcgaactccgtctctacaaaaaaatacgaaaattagctgggcgtagtagttcctgcctgtagtcctagctacttggaaggctgaggtggggaggatcgcttgagtccgggaggcagaggttgcagtgagcgaagatgatgccattgcactccagtctgggtgacagagcaagatcctgtctcacaaaaaaa

SEQ ID NO: 448017 - DNA, 6096 bp, Homo sapiens
atctaagctgaaagtgtttggggagatcagacattgctgtctggtgctcctctctcagtggccatcatgtctttgacatctgcttaccagcataaattagcagagaagctcactatcctgaatgatcgcggtcagggggttctcatccgtatgtataacatcaagaagacttgttcagaccccaaatctaagccacctttcttactggaaaagtccatggaaccatctctcaagtatatcaacaagaaatttcccaacatagatgtccgaaacagcacgcaacatttaggaccagtacatcgtgaaaaagccgagataattagattcctcaccaactactaccagtcatttgtggatgtcatggaatttcgggatcatgtatatgaacttctcaacaccattgatgcctgccagtgccattttgatatcaatctcaactttgatttcactcggagttacctggacttgattgtaacttacacctcagtcattttacttctgtcacggattgaagatcggcggatactcattggcatgtacaattgtgcccatgagatgctgcatgggcatggtgaccccagttttgcccgtctgggtcagatggtcttggagtatgaccaccctctgaagaagctgacagaagagtttgggcctcacacaaaggctgtgagtggagccctcctctctttgcatttcctctttgtccgaagaaaccagggggctgagcagtggcgcagtgcccaacttctaagcctcatcagcaaccccccagccatgattaaccctgctaattcagatacaatggcctgtgagtatctgtctgtggaagtaatggagcgctggattatcattgggtttcttctttgtcatgggtgcctcaactccaatagccagtgccagaagctgtggaagctgtgtctgcagggctccctctacatcacccttatccgtgaggatgtgctgcaggtgcacaaagtcaccgaggacctgtttagcagtttgaaagggtatggcaagagagtggcagacataaaggagagcaaggaacatgtaattgcaaacagtggccagtttcattgtcaacggcggcaatttctgcggatggcagtgaaggagctggagactgtgttggctgatgaaccgggactactgggtcctaaggctctttttgctttcatggccctgtccttcattcgtgatgaggtcacctggctggttcgccacacagagaatgtcaccaagacaaagacacctgaggactatgctgactcgagcattgcagagctacttttcttgttggaggggattaggtctctggtccgaagacacatcaaagtgatacagcaataccaccttcagtacttggcaagatttgatgctcttgtgctcagtgacatcattcagaacttgtctgtgtgtccagaggaggagtccatcatcatgtcctcattcgtcagtatcctctcctctctgaatctcaaacaagttgataatggagaaaaatttgaattctcaggattgaggctggactggttccgcctacaggcatacactagcgtggctaaggcccctctgcacctgcatgagaaccctgacttagccaaggtgatgaacctcattgtcttccactcccgaatgctggactccgtagaaaaattgctggtggaaacttctgatctgtctactttctgctttcatcttcgtatctttgagaagatgtttgccatgaccttggaggaatctgccatgttgcgttatgccattgctttccccctgatttgtgctcactttgtccactgcactcatgagatgtgcccagaggagtacccccacctcaagaaccatggtcttcaccactgcaactccttcctggaagagttggccaagcagaccagcaattgcgtcctggagatctgtgctgagcagcgaaacctgagcgagcagcttctacctaagcactgtgccactacaatcagcaaagccaagaacaagaaaaccaggaagcagaggcagactcccagaaaaggagagcccgagagggacaagccaggagctgagagtcaccggaagaaccgcagcattgtcaccaacatggacaagctacacctaaacttgacagaactggcactgacaatgaatcatgtatacagtttctccgtgtttgaacatactatcttcccttctgagtacctcagcagccacctggaggccagactcaacagagccattgtgtggctggctggctacaatgccacgacccaggagatcgtacggccttctgagctgttggcaggagtcaaagcatacattggtttcatacagtcactggcccagtttttgggtgcagatgcttccagagtcatccgcaacgccctcctgcagcagacacaaccactggattcctgtggggaacagacaatcaccacactctacacaaactggtacctggaaagtctgcttagacaggcaagcagtgggaccatcatcctctccccagccatgcaggccttcgtcagcctgcccagagaaggggagcagaacttcagtgcagaggagttctctgacatctctgagatgcgggccttggcagaactcctgggcccctatggcatgaagttcctgagtgaaaacctgatgtggcatgtgacctctcagattgtggagctgaagaagctggtggtggaaaacatggacatacttgttcagatcagatccaactttagcaagccggacttgatggcttccctgctgccccagctgacaggggctgaaaatgtgctaaagcgcatgaccatcattggggttatcctcagtttcagggccatggcccaagagggacttcgggaggttttctcctcccactgcccatttcttatgggtcccattgagtgcttgaaggagtttgtcactccagacacagacatcaaggtgaccttgagtatctttgagctggcatctgctgcaggtgtgggctgtgacattgacccagccttggtggctgccattgctaatctgaaagctggctgggagcatggaggacagcttatggaaaaagttagggcgtggggccacatgtgtgaattttacaatgaaaaaaggagtaacgtacaagtatattttctatcttctggtgacttgagcttgagctctgacaggcatgggcctctccgaccttcatcactattcttaggataatgctggcgggcagagatgatcaatcatcatattaaatcataatgagcttataatcctcacactggagctgctattgtctcctgcacattcattaggaccattatcttctctcttcctttttcaaatgtgttcagcaaacattcaacctgctcctactgcagagtagcagcaaaggagcccctcttttcctttgtggggctcttcgaggggtcattgggtctcttcctttgcccccagcttgactgcgtttcctactggggcaaggaggaagtgcccttcagagatgttcactgcccacctactctactacattgtttgttacaagttctctcttgctttaacccctcctgctttgatatctccacaacccagagcagagggtcagttagtctccgtcaattctaggttacatgacaactgattggcccagacttaggtgggttttccctcctgtaccatttgggggtactctgccttttattgggagggactaatttaaccccaaatccttttgtcagcctatttgatagctgttttggggttttgtacaggtgtttgctttttatttcttgagacccaggcttagtcaatactttcttaacttggcacccataatcaacatacagatttttcttagcaacagttgtctgctctttagggtggaagcgatagagaatcctgcttcgtgcatcagcaaatcctccttccttgctatgggaagggcttatgttctaaagggtgattcagtgtcaggcttatgagactgagagtaaagttgatgaggaagaggaggctcagaagtatctgaacaactactctatatgtttatatttttctgcttgaggggatagagatccctcctccatctgcatctgcatatagaactgcttaagaggacagcaagacaagttgctgcagggggatggagggtagacagaatgcctttttttaaaactgaaaattttattgagatacttaatccacctgcacttgtaagaaatcatacagagaaattctattttcctttacacagtttccctgaatgctaacatctagcaaaactgtagtacactgccacaaccaggataactgacattgatataatctactgatcttgttcagatttccttccccagttttgcttatgttcatttctctctgtgtgtgcacgtgtgtgtgttatctatttctatacagctttatcatgtgtaggtttgtgtatctgccactgcagtcaacatacagaacaggccgggcgcagtggctcacgcctgtaatcccagcactttgggaggccaaggcaggtggatcacctgaggtcaggggtttgagagcagcctggccaatatagtgaaacaccgtctctactaaaaataccaaaactagccgggcgtggtggtgcatgcctgtagtcccactactcaggaggctgaggcagcagaataacttgatcccgggaggcggaggttgcagtaagctaagatcctgccacagcattccaggctgagtgacagagcgagactctgtctcaaaaaataaataataatttaaaaaaagatacagaacagttccatcaccacaaggatccctcgcattgctcttttatagcaattttatagcaattttctcctcccacaacccccttccccatctctagctcctggtaacacagatatattctctatttctaaaattttgtcatttgatatatctttttgtaaacatataattatacacacatatttctctaccacttatactttttcaaagtgctttcacatccttatagcaattctgcaaggtagccagggaaggctttcctatttcaggtcagaaaacagatttagaaatattaaatgacttaatgaaggtcacatgtttagcagtagaactagaactgggacccaagtctgatgttcagtcctagaccttttctacttgcccggtctgcctcttcacaagggaagacttgggttttagaatccagagaccttagaaggagcaaattggagaaggtgaggacatgatggcctttactaccggaagcaaaaagtgaatgtccagaggtgaagggacagagaagtaacaggacccatcagcatttcaggcaatttgcttcctttaccaggagggtctctgtcctcttacaacctgggaaaaaataagttgtgtcccaggttgtaagtttgctttacttaggcccaaaggaactaaagaatggatatcagaaatctcaccccaattgttttgtcttacaggcacagaataggttctagcctcagcattttcattaatgtagtgtttttattaacatctccattaacttgcttgcagcaatgagatggaattatgcctcccacaaggcctggggcaagatacttgcataggtgcccccttttgtttggacagtagaaacactgcctcccctgccatggtgttcaatccagttggcaggtgggccagcttcaaagtgcagaaggaactgggtgtggtggctcacccctgtaatcccagcactttgggaggcaggcggatcgcttgaactcaggagtttgagaccactctgggcaacacagtgaaaccctgtctctccaaaaatacaaaaaattagctgggcatggtggctgttgtctgtaatcccaacactttgggaggctgaggccagtggatctcttgagctaaggaggttaagaccagcctggtcaacatggcgaactccgtctctacaaaaaaatacgaaaattagctgggcgtagtagttcctgcctgtagtcctagctacttggaaggctgaggtggggaggatcgcttgagtccgggaggcagaggttgcagtgagcgaagatgatgccattgcactccagtctgggtgacagagcaagatcctgtctcacaaaaaaa

SEQ ID NO: 448018 - DNA, 5059 bp, Homo sapiens
atctaagctgaaagtgtttggggagatcagacattgctgtctggtgctcctctctcagtggccatcatgtctttgacatctgcttaccagcataaattagcagagaagctcactatcctgatttgtgctcactttgtccactgcactcatgagatgtgcccagaggagtacccccacctcaagaaccatggtcttcaccactgcaactccttcctggaagagttggccaagcagaccagcaattgcgtcctggagatctgtgctgagcagcgaaacctgagcgagcagcttctacctaagcactgtgccactacaatcagcaaagccaagaacaagaaaaccaggaagcagaggcagactcccagaaaaggagagcccgagagggacaagccaggagctgagagtcaccggaagaaccgcagcattgtcaccaacatggacaagctacacctaaacttgacagaactggcactgacaatgaatcatgtatacagtttctccgtgtttgaacatactatcttcccttctgagtacctcagcagccacctggaggccagactcaacagagccattgtgtggctggctggctacaatgccacgacccaggagatcgtacggccttctgagctgttggcaggagtcaaagcatacattggtttcatacagtcactggcccagtttttgggtgcagatgcttccagagtcatccgcaacgccctcctgcagcagacacaaccactggattcctgtggggaacagacaatcaccacactctacacaaactggtacctggaaagtctgcttagacaggcaagcagtgggaccatcatcctctccccagccatgcaggccttcgtcagcctgcccagagaaggggagcagaacttcagtgcagaggagttctctgacatctctgagatgcgggccttggcagaactcctgggcccctatggcatgaagttcctgagtgaaaacctgatgtggcatgtgacctctcagattgtggagctgaagaagctggtggtggaaaacatggacatacttgttcagatcagatccaactttagcaagccggacttgatggcttccctgctgccccagctgacaggggctgaaaatgtgctaaagcgcatgaccatcattggggttatcctcagtttcagggccatggcccaagagggacttcgggaggttttctcctcccactgcccatttcttatgggtcccattgagtgcttgaaggagtttgtcactccagacacagacatcaaggtgaccttgagtatctttgagctggcatctgctgcaggtgtgggctgtgacattgacccagccttggtggctgccattgctaatctgaaagctgatacttcatctcctgaggaggaatataaggtggcctgcctgctcttgatctttctggcagtttccctcccactccttgccactgacccttcttccttttatagcattgagaaggatggttacaacaacaatattcattgcttgaccaaagccatcatccaggtgtctgctgccctcttcacgctctacaacaagaacattgaaactcacctcaaggaatttctggtggtggcctctgtcagcctcttgcagctgggccaggagactgacaagcttaaaaccagaaatcgagaatccatttctctgctcatgcgcttggtggtggaggagtcatccttcctgaccctggacatgctggagtcctgtttcccttatgtcctgcttcgaaatgcctatcgggaggtgtctcgggccttccacctaaactgaatgcctgccagtacccactgaagagccctttggaccttcctaaacccttgccatagtggaagctgtggtcactttcgcagggggtgggaatggggtggggtcactaaggagagagggtcaggagccagagttgatgagcagatctgtggaagaacaatccagggctgagaaatcgtagagcagtgaggcaggctgggagcatggaggacagcttatggaaaaagttagggcgtggggccacatgtgtgaattttacaatgaaaaaaggagtaacgtacaagtatattttctatcttctggtgacttgagcttgagctctgacaggcatgggcctctccgaccttcatcactattcttaggataatgctggcgggcagagatgatcaatcatcatattaaatcataatgagcttataatcctcacactggagctgctattgtctcctgcacattcattaggaccattatcttctctcttcctttttcaaatgtgttcagcaaacattcaacctgctcctactgcagagtagcagcaaaggagcccctcttttcctttgtggggctcttcgaggggtcattgggtctcttcctttgcccccagcttgactgcgtttcctactggggcaaggaggaagtgcccttcagagatgttcactgcccacctactctactacattgtttgttacaagttctctcttgctttaacccctcctgctttgatatctccacaacccagagcagagggtcagttagtctccgtcaattctaggttacatgacaactgattggcccagacttaggtgggttttccctcctgtaccatttgggggtactctgccttttattgggagggactaatttaaccccaaatccttttgtcagcctatttgatagctgttttggggttttgtacaggtgtttgctttttatttcttgagacccaggcttagtcaatactttcttaacttggcacccataatcaacatacagatttttcttagcaacagttgtctgctctttagggtggaagcgatagagaatcctgcttcgtgcatcagcaaatcctccttccttgctatgggaagggcttatgttctaaagggtgattcagtgtcaggcttatgagactgagagtaaagttgatgaggaagaggaggctcagaagtatctgaacaactactctatatgtttatatttttctgcttgaggggatagagatccctcctccatctgcatctgcatatagaactgcttaagaggacagcaagacaagttgctgcagggggatggagggtagacagaatgcctttttttaaaactgaaaattttattgagatacttaatccacctgcacttgtaagaaatcatacagagaaattctattttcctttacacagtttccctgaatgctaacatctagcaaaactgtagtacactgccacaaccaggataactgacattgatataatctactgatcttgttcagatttccttccccagttttgcttatgttcatttctctctgtgtgtgcacgtgtgtgtgttatctatttctatacagctttatcatgtgtaggtttgtgtatctgccactgcagtcaacatacagaacaggccgggcgcagtggctcacgcctgtaatcccagcactttgggaggccaaggcaggtggatcacctgaggtcaggggtttgagagcagcctggccaatatagtgaaacaccgtctctactaaaaataccaaaactagccgggcgtggtggtgcatgcctgtagtcccactactcaggaggctgaggcagcagaataacttgatcccgggaggcggaggttgcagtaagctaagatcctgccacagcattccaggctgagtgacagagcgagactctgtctcaaaaaataaataataatttaaaaaaagatacagaacagttccatcaccacaaggatccctcgcattgctcttttatagcaattttatagcaattttctcctcccacaacccccttccccatctctagctcctggtaacacagatatattctctatttctaaaattttgtcatttgatatatctttttgtaaacatataattatacacacatatttctctaccacttatactttttcaaagtgctttcacatccttatagcaattctgcaaggtagccagggaaggctttcctatttcaggtcagaaaacagatttagaaatattaaatgacttaatgaaggtcacatgtttagcagtagaactagaactgggacccaagtctgatgttcagtcctagaccttttctacttgcccggtctgcctcttcacaagggaagacttgggttttagaatccagagaccttagaaggagcaaattggagaaggtgaggacatgatggcctttactaccggaagcaaaaagtgaatgtccagaggtgaagggacagagaagtaacaggacccatcagcatttcaggcaatttgcttcctttaccaggagggtctctgtcctcttacaacctgggaaaaaataagttgtgtcccaggttgtaagtttgctttacttaggcccaaaggaactaaagaatggatatcagaaatctcaccccaattgttttgtcttacaggcacagaataggttctagcctcagcattttcattaatgtagtgtttttattaacatctccattaacttgcttgcagcaatgagatggaattatgcctcccacaaggcctggggcaagatacttgcataggtgcccccttttgtttggacagtagaaacactgcctcccctgccatggtgttcaatccagttggcaggtgggccagcttcaaagtgcagaaggaactgggtgtggtggctcacccctgtaatcccagcactttgggaggcaggcggatcgcttgaactcaggagtttgagaccactctgggcaacacagtgaaaccctgtctctccaaaaatacaaaaaattagctgggcatggtggctgttgtctgtaatcccaacactttgggaggctgaggccagtggatctcttgagctaaggaggttaagaccagcctggtcaacatggcgaactccgtctctacaaaaaaatacgaaaattagctgggcgtagtagttcctgcctgtagtcctagctacttggaaggctgaggtggggaggatcgcttgagtccgggaggcagaggttgcagtgagcgaagatgatgccattgcactccagtctgggtgacagagcaagatcctgtctcacaaaaaaa

SEQ ID NO: 448019 - DNA, 4304 bp, Homo sapiens
gcaaatgccagttggggccaggcaggaaaggtacctggaaagtctgcttagacaggcaagcagtgggaccatcatcctctccccagccatgcaggccttcgtcagcctgcccagagaaggggagcagaacttcagtgcagaggagttctctgacatctctgagatgcgggccttggcagaactcctgggcccctatggcatgaagttcctgagtgaaaacctgatgtggcatgtgacctctcagattgtggagctgaagaagctggtggtggaaaacatggacatacttgttcagatcagatccaactttagcaagccggacttgatggcttccctgctgccccagctgacaggggctgaaaatgtgctaaagcgcatgaccatcattggggttatcctcagtttcagggccatggcccaagagggacttcgggaggttttctcctcccactgcccatttcttatgggtcccattgagtgcttgaaggagtttgtcactccagacacagacatcaaggtgaccttgagtatctttgagctggcatctgctgcaggtgtgggctgtgacattgacccagccttggtggctgccattgctaatctgaaagctgatacttcatctcctgaggaggaatataaggtggcctgcctgctcttgatctttctggcagtttccctcccactccttgccactgacccttcttccttttatagcattgagaaggatggttacaacaacaatattcattgcttgaccaaagccatcatccaggtgtctgctgccctcttcacgctctacaacaagaacattgaaactcacctcaaggaatttctggtggtggcctctgtcagcctcttgcagctgggccaggagactgacaagcttaaaaccagaaatcgagaatccatttctctgctcatgcgcttggtggtggaggagtcatccttcctgaccctggacatgctggagtcctgtttcccttatgtcctgcttcgaaatgcctatcgggaggtgtctcgggccttccacctaaactgaatgcctgccagtacccactgaagagccctttggaccttcctaaacccttgccatagtggaagctgtggtcactttcgcagggggtgggaatggggtggggtcactaaggagagagggtcaggagccagagttgatgagcagatctgtggaagaacaatccagggctgagaaatcgtagagcagtgaggcaggctgggagcatggaggacagcttatggaaaaagttagggcgtggggccacatgtgtgaattttacaatgaaaaaaggagtaacgtacaagtatattttctatcttctggtgacttgagcttgagctctgacaggcatgggcctctccgaccttcatcactattcttaggataatgctggcgggcagagatgatcaatcatcatattaaatcataatgagcttataatcctcacactggagctgctattgtctcctgcacattcattaggaccattatcttctctcttcctttttcaaatgtgttcagcaaacattcaacctgctcctactgcagagtagcagcaaaggagcccctcttttcctttgtggggctcttcgaggggtcattgggtctcttcctttgcccccagcttgactgcgtttcctactggggcaaggaggaagtgcccttcagagatgttcactgcccacctactctactacattgtttgttacaagttctctcttgctttaacccctcctgctttgatatctccacaacccagagcagagggtcagttagtctccgtcaattctaggttacatgacaactgattggcccagacttaggtgggttttccctcctgtaccatttgggggtactctgccttttattgggagggactaatttaaccccaaatccttttgtcagcctatttgatagctgttttggggttttgtacaggtgtttgctttttatttcttgagacccaggcttagtcaatactttcttaacttggcacccataatcaacatacagatttttcttagcaacagttgtctgctctttagggtggaagcgatagagaatcctgcttcgtgcatcagcaaatcctccttccttgctatgggaagggcttatgttctaaagggtgattcagtgtcaggcttatgagactgagagtaaagttgatgaggaagaggaggctcagaagtatctgaacaactactctatatgtttatatttttctgcttgaggggatagagatccctcctccatctgcatctgcatatagaactgcttaagaggacagcaagacaagttgctgcagggggatggagggtagacagaatgcctttttttaaaactgaaaattttattgagatacttaatccacctgcacttgtaagaaatcatacagagaaattctattttcctttacacagtttccctgaatgctaacatctagcaaaactgtagtacactgccacaaccaggataactgacattgatataatctactgatcttgttcagatttccttccccagttttgcttatgttcatttctctctgtgtgtgcacgtgtgtgtgttatctatttctatacagctttatcatgtgtaggtttgtgtatctgccactgcagtcaacatacagaacaggccgggcgcagtggctcacgcctgtaatcccagcactttgggaggccaaggcaggtggatcacctgaggtcaggggtttgagagcagcctggccaatatagtgaaacaccgtctctactaaaaataccaaaactagccgggcgtggtggtgcatgcctgtagtcccactactcaggaggctgaggcagcagaataacttgatcccgggaggcggaggttgcagtaagctaagatcctgccacagcattccaggctgagtgacagagcgagactctgtctcaaaaaataaataataatttaaaaaaagatacagaacagttccatcaccacaaggatccctcgcattgctcttttatagcaattttatagcaattttctcctcccacaacccccttccccatctctagctcctggtaacacagatatattctctatttctaaaattttgtcatttgatatatctttttgtaaacatataattatacacacatatttctctaccacttatactttttcaaagtgctttcacatccttatagcaattctgcaaggtagccagggaaggctttcctatttcaggtcagaaaacagatttagaaatattaaatgacttaatgaaggtcacatgtttagcagtagaactagaactgggacccaagtctgatgttcagtcctagaccttttctacttgcccggtctgcctcttcacaagggaagacttgggttttagaatccagagaccttagaaggagcaaattggagaaggtgaggacatgatggcctttactaccggaagcaaaaagtgaatgtccagaggtgaagggacagagaagtaacaggacccatcagcatttcaggcaatttgcttcctttaccaggagggtctctgtcctcttacaacctgggaaaaaataagttgtgtcccaggttgtaagtttgctttacttaggcccaaaggaactaaagaatggatatcagaaatctcaccccaattgttttgtcttacaggcacagaataggttctagcctcagcattttcattaatgtagtgtttttattaacatctccattaacttgcttgcagcaatgagatggaattatgcctcccacaaggcctggggcaagatacttgcataggtgcccccttttgtttggacagtagaaacactgcctcccctgccatggtgttcaatccagttggcaggtgggccagcttcaaagtgcagaaggaactgggtgtggtggctcacccctgtaatcccagcactttgggaggcaggcggatcgcttgaactcaggagtttgagaccactctgggcaacacagtgaaaccctgtctctccaaaaatacaaaaaattagctgggcatggtggctgttgtctgtaatcccaacactttgggaggctgaggccagtggatctcttgagctaaggaggttaagaccagcctggtcaacatggcgaactccgtctctacaaaaaaatacgaaaattagctgggcgtagtagttcctgcctgtagtcctagctacttggaaggctgaggtggggaggatcgcttgagtccgggaggcagaggttgcagtgagcgaagatgatgccattgcactccagtctgggtgacagagcaagatcctgtctcacaaaaaaa

SEQ ID NO: 448020 - DNA, 3744 bp, Homo sapiens
atctaagctgaaagtgtttggggagatcagacattgctgtctggtgctcctctctcagtggccatcatgtctttgacatctgcttaccagcataaattagcagagaagctcactatcctgaatgatcgcggtcagggggttctcatccgtatgtataacatcaagaagacttgttcagaccccaaatctaagccacctttcttactggaaaagtccatggaaccatctctcaagtatatcaacaagaaatttcccaacatagatgtccgaaacagcacgcaacatttaggaccagtacatcgtgaaaaagccgagataattagattcctcaccaactactaccagtcatttgtggatgtcatggaatttcgggatcatgtatatgaacttctcaacaccattgatgcctgccagtgccattttgatatcaatctcaactttgatttcactcggagttacctggacttgattgtaacttacacctcagtcattttacttctgtcacggattgaagatcggcggatactcattggcatgtacaattgtgcccatgagatgctgcatgggcatggtgaccccagttttgcccgtctgggtcagatggtcttggagtatgaccaccctctgaagaagctgacagaagagtttgggcctcacacaaaggctgtgagtggagccctcctctctttgcatttcctctttgtccgaagaaaccagggggctgagcagtggcgcagtgcccaacttctaagcctcatcagcaaccccccagccatgattaaccctgctaattcagatacaatggcctgtgagtatctgtctgtggaagtaatggagcgctggattatcattgggtttcttctttgtcatgggtgcctcaactccaatagccagtgccagaagctgtggaagctgtgtctgcagggctccctctacatcacccttatccgtgaggatgtgctgcaggtgcacaaagtcaccgaggacctgtttagcagtttgaaagggtatggcaagagagtggcagacataaaggagagcaaggaacatgtaattgcaaacagtggccagtttcattgtcaacggcggcaatttctgcggatggcagtgaaggagctggagactgtgttggctgatgaaccgggactactgggtcctaaggctctttttgctttcatggccctgtccttcattcgtgatgaggtcacctggctggttcgccacacagagaatgtcaccaagacaaagacacctgaggactatgctgactcgagcattgcagagctacttttcttgttggaggggattaggtctctggtccgaagacacatcaaagtgatacagcaataccaccttcagtacttggcaagatttgatgctcttgtgctcagtgacatcattcagaacttgtctgtgtgtccagaggaggagtccatcatcatgtcctcattcgtcagtatcctctcctctctgaatctcaaacaagttgataatggagaaaaatttgaattctcaggattgaggctggactggttccgcctacaggcatacactagcgtggctaaggcccctctgcacctgcatgagaaccctgacttagccaaggtgatgaacctcattgtcttccactcccgaatgctggactccgtagaaaaattgctggtggaaacttctgatctgtctactttctgctttcatcttcgtatctttgagaagatgtttgccatgaccttggaggaatctgccatgttgcgttatgccattgctttccccctgatttgtgctcactttgtccactgcactcatgagatgtgcccagaggagtacccccacctcaagaaccatggtcttcaccactgcaactccttcctggaagagttggccaagcagaccagcaattgcgtcctggagatctgtgctgagcagcgaaacctgagcgagcagcttctacctaagcactgtgccactacaatcagcaaagccaagaacaagaaaaccaggaagcagaggcagactcccagaaaaggagagcccgagagggacaagccaggagctgagagtcaccggaagaaccgcagcattgtcaccaacatggacaagctacacctaaacttgacagaactggcactgacaatgaatcatgtatacagtttctccgtgtttgaacatactatcttcccttctgagtacctcagcagccacctggaggccagactcaacagagccattgtgtggctggctggctacaatgccacgacccaggagatcgtacggccttctgagctgttggcaggagtcaaagcatacattggtttcatacagtcactggcccagtttttgggtgcagatgcttccagagtcatccgcaacgccctcctgcagcagacacaaccactggattcctgtggggaacagacaatcaccacactctacacaaactggtacctggaaagtctgcttagacaggcaagcagtgggaccatcatcctctccccagccatgcaggccttcgtcagcctgcccagagaaggggagcagaacttcagtgcagaggagttctctgacatctctgagatgcgggccttggcagaactcctgggcccctatggcatgaagttcctgagtgaaaacctgatgtggcatgtgacctctcagattgtggagctgaagaagctggtggtggaaaacatggacatacttgttcagatcagatccaactttagcaagccggacttgatggcttccctgctgccccagctgacaggggctgaaaatgtgctaaagcgcatgaccatcattggggttatcctcagtttcagggccatggcccaagagggacttcgggaggttttctcctcccactgcccatttcttatgggtcccattgagtgcttgaaggagtttgtcactccagacacagacatcaaggtgaccttgagtatctttgagctggcatctgctgcaggtgtgggctgtgacattgacccagccttggtggctgccattgctaatctgaaagctgatacttcatctcctgaggaggaatataaggtggcctgcctgctcttgatctttctggcagtttccctcccactccttgccactgacccttcttccttttatagcattgagaaggatggttacaacaacaatattcattgcttgaccaaagccatcatccaggtgtctgctgccctcttcacgctctacaacaagaacattgaaactcacctcaaggaatttctggtggtggcctctgtcagcctcttgcagctgggccaggagactgacaagcttaaaaccagaaatcgagaatccatttctctgctcatgcgcttggtggtggaggagtcatccttcctgaccctggacatgctggagtcctgtttcccttatgtcctgcttcgaaatgcctatcgggaggtgtctcgggccttccacctaaactgaatgcctgccagtacccactgaagaaacaatccagggctgagaaatcgtagagcagtgaggcaggctgggagcatggaggacagcttatggaaaaagttagggcgtggggccacatgtgtgaattttacaatgaaaaaaggagtaacgtacaagtatattttctatcttctggtgacttgagcttgagctctgacaggcatgggcctctccgaccttcatcactattcttaggataatgctggcgggcagagatgatcaatcatcatattaaatcataatgagcttataatcctc

SEQ ID NO: 448021 - DNA, 2581 bp, Homo sapiens
atctaagctgaaagtgtttggggagatcagacattgctgtctggtgctcctctctcagtggccatcatgtctttgacatctgcttaccagcataaattagcagagaagctcactatcctgaatgatcgcggtcagggggttctcatccgtatgtataacatcaagaagacttgttcagaccccaaatctaagccacctttcttactggaaaagtccatggaaccatctctcaagtatatcaacaagaaatttcccaacatagatgtccgaaacagcacgcaacatttaggaccagtacatcgtgaaaaagccgagataattagattcctcaccaactactaccagtcatttgtggatgtcatggaatttcgggatcatgtatatgaacttctcaacaccattgatgcctgccagtgccattttgatatcaatctcaactttgatttcactcggagttacctggacttgattgtaacttacacctcagtcattttacttctgtcacggattgaagatcggcggatactcattggcatgtacaattgtgcccatgagatgctgcatgggcatggtgaccccagttttgcccgtctgggtcagatggtcttggagtatgaccaccctctgaagaagctgacagaagagtttgggcctcacacaaaggctgtgagtggagccctcctctctttgcatttcctctttgtccgaagaaaccagggggctgagcagtggcgcagtgcccaacttctaagcctcatcagcaaccccccagccatgattaaccctgctaattcagatacaatggcctgtgagtatctgtctgtggaagtaatggagcgctggattatcattgggtttcttctttgtcatgggtgcctcaactccaatagccagtgccagaagctgtggaagctgtgtctgcagggctccctctacatcacccttatccgtgaggatgtgctgcaggtgcacaaagtcaccgaggacctgtttagcagtttgaaagggtatggcaagagagtggcagacataaaggagagcaaggaacatgtaattgcaaacagtggccagtttcattgtcaacggcggcaatttctgcggatggcagtgaaggagctggagactgtgttggctgatgaaccgggactactgggtcctaaggctctttttgctttcatggccctgtccttcattcgtgatgaggtcacctggctggttcgccacacagagaatgtcaccaagacaaagacacctgaggactatgctgactcgagcattgcagagctacttttcttgttggaggggattaggtctctggtccgaagacacatcaaagtgatacagcaataccaccttcagtacttggcaagatttgatgctcttgtgctcagtgacatcattcagaacttgtctgtgtgtccagaggaggagtccatcatcatgtcctcattcgtcagtatcctctcctctctgaatctcaaacaagttgataatggagaaaaatttgaattctcaggattgaggctggactggttccgcctacaggcatacactagcgtggctaaggcccctctgcacctgcatgagaaccctgacttagccaaggtgatgaacctcattgtcttccactcccgaatgctggactccgtagaaaaattgctggtggaaacttctgatctgtctactttctgctttcatcttcgtatctttgagaagatgtttgccatgaccttggaggaatctgccatgttgcgttatgccattgctttccccctgatttgtgctcactttgtccactgcactcatgagatgtgcccagaggagtacccccacctcaagaaccatggtcttcaccactgcaactccttcctggaagagttggccaagcagaccagcaattgcgtcctggagatctgtgctgagcagcgaaacctgagcgagcagcttctacctaagcactgtgccactacaatcagcaaagccaagaacaagaaaaccaggaagcagaggcagactcccagaaaaggagagcccgagagggacaagccaggagctgagagtcaccggaagaaccgcagcattgtcaccaacatggacaagctacacctaaacttgacagaactggcactgacaatgaatcatgtatacagtttctccgtgtttgaacatactatcttcccttctgagtacctcagcagccacctggaggccagactcaacagagccattgtgtggctggctggctacaatgccacgacccaggagatcgtacggccttctgagctgttggcaggagtcaaagcatacattggtttcatacagtcactggcccagtttttgggtgcagatgcttccagagtcatccgcaacgccctcctgcagcagacacaaccactggattcctgtggggaacagacaatcaccacactctacacaaactggtcagtgttgcttaggcttttccactgccttactttgtgttggcactttttcctttacacggtaggacctcagggcccgagcattttagctcccagggtcatagactccaaaatggagggttgcttctccttgaggaatg

SEQ ID NO: 448022 - DNA, 2015 bp, Homo sapiens
tgtgctagaggttgagtctgagggagtgagtaagggtggagacagactaaatacatagtttctaagaaatgaaaattttattgagatacttaatccacctgcacttgtaagaaatcatacagagaaattctattttcctttacacagtttccctgaatgctaacatctagcaaaactgtagtacactgccacaaccaggataactgacattgatataatctactgatcttgttcagatttccttccccagttttgcttatgttcatttctctctgtgtgtgcacgtgtgtgtgttatctatttctatacagctttatcatgtgtaggtttgtgtatctgccactgcagtcaacatacagaacaggccgggcgcagtggctcacgcctgtaatcccagcactttgggaggccaaggcaggtggatcacctgaggtcaggggtttgagagcagcctggccaatatagtgaaacaccgtctctactaaaaataccaaaactagccgggcgtggtggtgcatgcctgtagtcccactactcaggaggctgaggcagcagaataacttgatcccgggaggcggaggttgcagtaagctaagatcctgccacagcattccaggctgagtgacagagcgagactctgtctcaaaaaataaataataatttaaaaaaagatacagaacagttccatcaccacaaggatccctcgcattgctcttttatagcaattttatagcaattttctcctcccacaacccccttccccatctctagctcctggtaacacagatatattctctatttctaaaattttgtcatttgatatatctttttgtaaacatataattatacacacatatttctctaccacttatactttttcaaagtgctttcacatccttatagcaattctgcaaggtagccagggaaggctttcctatttcaggtcagaaaacagatttagaaatattaaatgacttaatgaaggtcacatgtttagcagtagaactagaactgggacccaagtctgatgttcagtcctagaccttttctacttgcccggtctgcctcttcacaagggaagacttgggttttagaatccagagaccttagaaggagcaaattggagaaggtgaggacatgatggcctttactaccggaagcaaaaagtgaatgtccagaggtgaagggacagagaagtaacaggacccatcagcatttcaggcaatttgcttcctttaccaggagggtctctgtcctcttacaacctgggaaaaaataagttgtgtcccaggttgtaagtttgctttacttaggcccaaaggaactaaagaatggatatcagaaatctcaccccaattgttttgtcttacaggcacagaataggttctagcctcagcattttcattaatgtagtgtttttattaacatctccattaacttgcttgcagcaatgagatggaattatgcctcccacaaggcctggggcaagatacttgcataggtgcccccttttgtttggacagtagaaacactgcctcccctgccatggtgttcaatccagttggcaggtgggccagcttcaaagtgcagaaggaactgggtgtggtggctcacccctgtaatcccagcactttgggaggcaggcggatcgcttgaactcaggagtttgagaccactctgggcaacacagtgaaaccctgtctctccaaaaatacaaaaaattagctgggcatggtggctgttgtctgtaatcccaacactttgggaggctgaggccagtggatctcttgagctaaggaggttaagaccagcctggtcaacatggcgaactccgtctctacaaaaaaatacgaaaattagctgggcgtagtagttcctgcctgtagtcctagctacttggaaggctgaggtggggaggatcgcttgagtccgggaggcagaggttgcagtgagcgaagatgatgccattgcactccagtctgggtgacagagcaagatcctgtctcacaaaaaaa

SEQ ID NO: 448023 - DNA, 678 bp, Homo sapiens
atctaagctgaaagtgtttggggagatcagacattgctgtctggtgctcctctctcagtggccatcatgtctttgacatctgcttaccagcataaattagcagagaagctcactatcctgaatgatcgcggtcagggggttctcatccgtatgtataacatcaagaagacttgttcagaccccaaatctaagccacctttcttactggaaaagtccatggaaccatctctcaagtatatcaacaagaaatttcccaacatagatgtccgaaacagcacgcaacatttaggaccagtacatcgtgaaaaagccgagataattagattcctcaccaactactaccagtcatttgtggatgtcatggaatttcgggtgagctctcttgagccgtttccaatgtaggcaaggtctttcagaggctattctttctttagatgttcatgtatttgcttaaaacaagttcttgaaaaaatgagagagatgtactaatatggaaggatatctaagttgtattgttaaatgaaagcaaatttcaaaatagtatatgatacatcacatttctattttaaaagagtatgtatgtatatgtatttagtaaatatctaggaaagatctggactattttacattaaactgttaaaaataactacctttggggactgattatgactggcttca

SEQ ID NO: 448024 - DNA, 428 bp, Homo sapiens
gtaagtttagtgggattagatgggagtggatgaagcagtatgttatatgaagaacaagttctaaaagtcttcctctgcactgttttcccacctacagttgggtttcttctttgtcatgggtgcctcaactccaatagccagtgccagaagctgtggaagctgtgtctgcagggctccctctacatcacccttatccgtgaggatgtgctgcaggtgcacaaagtcaccgaggacctgtttagcagtttgaaagggtgagagacacgagagccaaactgatcttccttgaatagtttttagcccctccaatatcctttttcagtctccacaagtgttcccagatataggtggtaacgattaattctaactattgaagaaatatacattaaatacctactattagctaagtgcttcactgggttttaggg

SEQ ID NO: 448025 - DNA, 350 bp, Homo sapiens
gggaggcaggacatatgtgaggatgaacatcttttatccggaaatattgatctttgagccaggaagtaggacaagatgtttttgaagaggatctaccattctatgtagttggatattggtgtgctgtttattgtttccttttatacttccgtttttcttgcagttgataatggagaaaaatttgaattctcaggattgaggctggactggttccgcctacaggtaatgatctgttcctgttaaagattctcatcctcagattcttcctcccccacaatcccttctctttttatctcctaaatttgctttatggagtgagtcaactttgaaaactgctaattggacaagac

SEQ ID NO: 448026 - DNA, 3734 bp, Homo sapiens
atctaagctgaaagtgtttggggagatcagacattgctgtctggtgctcctctctcagtggccatcatgtctttgacatctgcttaccagcataaattagcagagaagctcactatcctgaatgatcgcggtcagggggttctcatccgtatgtataacatcaagaagacttgttcagaccccaaatctaagccacctttcttactggaaaagtccatggaaccatctctcaagtatatcaacaagaaatttcccaacatagatgtccgaaacagcacgcaacatttaggaccagtacatcgtgaaaaagccgagataattagattcctcaccaactactaccagtcatttgtggatgtcatggaatttcgggatcatgtatatgaacttctcaacaccattgatgcctgccagtgccattttgatatcaatctcaactttgatttcactcggagttacctggacttgattgtaacttacacctcagtcattttacttctgtcacggattgaagatcggcggatactcattggcatgtacaattgtgcccatgagatgctgcatgggcatggtgaccccagttttgcccgtctgggtcagatggtcttggagtatgaccaccctctgaagaagctgacagaagagtttgggcctcacacaaaggctgtgagtggagccctcctctctttgcatttcctctttgtccgaagaaaccagggggctgagcagtggcgcagtgcccaacttctaagcctcatcagcaaccccccagccatgattaaccctgctaattcagatacaatggcctgtgagtatctgtctgtggaagtaatggagcgctggattatcattgggtttcttctttgtcatgggtgcctcaactccaatagccagtgccagaagctgtggaagctgtgtctgcagggctccctctacatcacccttatccgtgaggatgtgctgcaggtgcacaaagtcaccgaggacctgtttagcagtttgaaagggtatggcaagagagtggcagacataaaggagagcaaggaacatgtaattgcaaacagtggccagtttcattgtcaacggcggcaatttctgcggatggcagtgaaggagctggagactgtgttggctgatgaaccgggactactgggtcctaaggctctttttgctttcatggccctgtccttcattcgtgatgaggtcacctggctggttcgccacacagagaatgtcaccaagacaaagacacctgaggactatgctgactcgagcattgcagagctacttttcttgttggaggggattaggtctctggtccgaagacacatcaaagtgatacagcaataccaccttcagtacttggcaagatttgatgctcttgtgctcagtgacatcattcagaacttgtctgtgtgtccagaggaggagtccatcatcatgtcctcattcgtcagtatcctctcctctctgaatctcaaacaagttgataatggagaaaaatttgaattctcaggattgaggctggactggttccgcctacaggcatacactagcgtggctaaggcccctctgcacctgcatgagaaccctgacttagccaaggtgatgaacctcattgtcttccactcccgaatgctggactccgtagaaaaattgctggtggaaacttctgatctgtctactttctgctttcatcttcgtatctttgagaagatgtttgccatgaccttggaggaatctgccatgttgcgttatgccattgctttccccctgatttgtgctcactttgtccactgcactcatgagatgtgcccagaggagtacccccacctcaagaaccatggtcttcaccactgcaactccttcctggaagagttggccaagcagaccagcaattgcgtcctggagatctgtgctgagcagcgaaacctgagcgagcagcttctacctaagcactgtgccactacaatcagcaaagccaagaacaagaaaaccaggaagcagaggcagactcccagaaaaggagagcccgagagggacaagccaggagctgagagtcaccggaagaaccgcagcattgtcaccaacatggacaagctacacctaaacttgacagaactggcactgacaatgaatcatgtatacagtttctccgtgtttgaacatactatcttcccttctgagtacctcagcagccacctggaggccagactcaacagagccattgtgtggctggctggctacaatgccacgacccaggagatcgtacggccttctgagctgttggcaggagtcaaagcatacattggtttcatacagtcactggcccagtttttgggtgcagatgcttccagagtcatccgcaacgccctcctgcagcagacacaaccactggattcctgtggggaacagacaatcaccacactctacacaaactggtacctggaaagtctgcttagacaggcaagcagtgggaccatcatcctctccccagccatgcaggccttcgtcagcctgcccagagaaggggagcagaacttcagtgcagaggagttctctgacatctctgagatgcgggccttggcagaactcctgggcccctatggcatgaagttcctgagtgaaaacctgatgtggcatgtgacctctcagattgtggagctgaagaagctggtggtggaaaacatggacatacttgttcagatcagatccaactttagcaagccggacttgatggcttccctgctgccccagctgacaggggctgaaaatgtgctaaagcgcatgaccatcattggggttatcctcagtttcagggccatggcccaagagggacttcgggaggttttctcctcccactgcccatttcttatgggtcccattgagtgcttgaaggagtttgtcactccagacacagacatcaaggtgaccttgagtatctttgagctggcatctgctgcaggtgtgggctgtgacattgacccagccttggtggctgccattgctaatctgaaagctgatacttcatctcctgaggaggaatataaggtggcctgcctgctcttgatctttctggcagtttccctcccactccttgccactgacccttcttccttttatagcattgagaaggatggttacaacaacaatattcattgcttgaccaaagccatcatccaggtgtctgctgccctcttcacgctctacaacaagaacattgaaactcacctcaaggaatttctggtggtggcctctgtcagcctcttgcagctgggccaggagactgacaagcttaaaaccagaaatcgagaatccatttctctgctcatgcgcttggtggtggaggagtcatccttcctgaccctggacatgctggagtcctgtttcccttatgtcctgcttcgaaatgcctatcgggaggtgtctcgggccttccacctaaactgaatgcctgccagtacccactgaagagccctttggaccttcctaaacccttgccatagtggaagctgtggtcactttcgcagggggtgggaatggggtggggtcactaaggagagagggtcaggagccagagttgatgagcagatctgtggaagaacaatccagggctgagaaatcgtagagcagtgaggcaggctgggagcatggaggacagcttatggaaaaagttagggcgtggggccacatgtgtgaattttacaatgaaaaaaggagtaacgtacaagtat

SEQ ID NO: 448027 - DNA, 5946 bp, Homo sapiens
acccgaggaagcaggcaacatatacggctaggtacgaggcctgggtggttgctgtggaagtaatggagcgctggattatcattgggtttcttctttgtcatgggtgcctcaactccaatagccagtgccagaagctgtggaagctgtgtctgcagggctccctctacatcacccttatccgtgaggatgtgctgcaggtgcacaaagtcaccgaggacctgtttagcagtttgaaagggtatggcaagagagtggcagacataaaggagagcaaggaacatgtaattgcaaacagtggccagtttcattgtcaacggcggcaatttctgcggatggcagtgaaggagctggagactgtgttggctgatgaaccgggactactgggtcctaaggctctttttgctttcatggccctgtccttcattcgtgatgaggtcacctggctggttcgccacacagagaatgtcaccaagacaaagacacctgaggactatgctgactcgagcattgcagagctacttttcttgttggaggggattaggtctctggtccgaagacacatcaaagtgatacagcaataccaccttcagtacttggcaagatttgatgctcttgtgctcagtgacatcattcagaacttgtctgtgtgtccagaggaggagtccatcatcatgtcctcattcgtcagtatcctctcctctctgaatctcaaacaagttgataatggagaaaaatttgaattctcaggattgaggctggactggttccgcctacaggcatacactagcgtggctaaggcccctctgcacctgcatgagaaccctgacttagccaaggtgatgaacctcattgtcttccactcccgaatgctggactccgtagaaaaattgctggtggaaacttctgatctgtctactttctgctttcatcttcgtatctttgagaagatgtttgccatgaccttggaggaatctgccatgttgcgttatgccattgctttccccctgatttgtgctcactttgtccactgcactcatgagatgtgcccagaggagtacccccacctcaagaaccatggtcttcaccactgcaactccttcctggaagagttggccaagcagaccagcaattgcgtcctggagatctgtgctgagcagcgaaacctgagcgagcagcttctacctaagcactgtgccactacaatcagcaaagccaagaacaagaaaaccaggaagcagaggcagactcccagaaaaggagagcccgagagggacaagccaggagctgagagtcaccggaagaaccgcagcattgtcaccaacatggacaagctacacctaaacttgacagaactggcactgacaatgaatcatgtatacagtttctccgtgtttgaacatactatcttcccttctgagtacctcagcagccacctggaggccagactcaacagagccattgtgtggctggctggctacaatgccacgacccaggagatcgtacggccttctgagctgttggcaggagtcaaagcatacattggtttcatacagtcactggcccagtttttgggtgcagatgcttccagagtcatccgcaacgccctcctgcagcagacacaaccactggattcctgtggggaacagacaatcaccacactctacacaaactggtacctggaaagtctgcttagacaggcaagcagtgggaccatcatcctctccccagccatgcaggccttcgtcagcctgcccagagaaggggagcagaacttcagtgcagaggagttctctgacatctctgagatgcgggccttggcagaactcctgggcccctatggcatgaagttcctgagtgaaaacctgatgtggcatgtgacctctcagattgtggagctgaagaagctggtggtggaaaacatggacatacttgttcagatcagatccaactttagcaagccggacttgatggcttccctgctgccccagctgacaggggctgaaaatgtgctaaagcgcatgaccatcattggggttatcctcagtttcagggccatggcccaagagggacttcgggaggttttctcctcccactgcccatttcttatgggtcccattgagtgcttgaaggagtttgtcactccagacacagacatcaaggtgaccttgagtatctttgagctggcatctgctgcaggtgtgggctgtgacattgacccagccttggtggctgccattgctaatctgaaagctgatacttcatctcctgaggaggaatataaggtggcctgcctgctcttgatctttctggcagtttccctcccactccttgccactgacccttcttccttttatagcattgagaaggatggttacaacaacaatattcattgcttgaccaaagccatcatccaggtgtctgctgccctcttcacgctctacaacaagaacattgaaactcacctcaaggaatttctggtggtggcctctgtcagcctcttgcagctgggccaggagactgacaagcttaaaaccagaaatcgagaatccatttctctgctcatgcgcttggtggtggaggagtcatccttcctgaccctggacatgctggagtcctgtttcccttatgtcctgcttcgaaatgcctatcgggaggtgtctcgggccttccacctaaactgaatgcctgccagtacccactgaagagccctttggaccttcctaaacccttgccatagtggaagctgtggtcactttcgcagggggtgggaatggggtggggtcactaaggagagagggtcaggagccagagttgatgagcagatctgtggaagaacaatccagggctgagaaatcgtagagcagtgaggcaggctgggagcatggaggacagcttatggaaaaagttagggcgtggggccacatgtgtgaattttacaatgaaaaaaggagtaacgtacaagtatattttctatcttctggtgacttgagcttgagctctgacaggcatgggcctctccgaccttcatcactattcttaggataatgctggcgggcagagatgatcaatcatcatattaaatcataatgagcttataatcctcacactggagctgctattgtctcctgcacattcattaggaccattatcttctctcttcctttttcaaatgtgttcagcaaacattcaacctgctcctactgcagagtagcagcaaaggagcccctcttttcctttgtggggctcttcgaggggtcattgggtctcttcctttgcccccagcttgactgcgtttcctactggggcaaggaggaagtgcccttcagagatgttcactgcccacctactctactacattgtttgttacaagttctctcttgctttaacccctcctgctttgatatctccacaacccagagcagagggtcagttagtctccgtcaattctaggttacatgacaactgattggcccagacttaggtgggttttccctcctgtaccatttgggggtactctgccttttattgggagggactaatttaaccccaaatccttttgtcagcctatttgatagctgttttggggttttgtacaggtgtttgctttttatttcttgagacccaggcttagtcaatactttcttaacttggcacccataatcaacatacagatttttcttagcaacagttgtctgctctttagggtggaagcgatagagaatcctgcttcgtgcatcagcaaatcctccttccttgctatgggaagggcttatgttctaaagggtgattcagtgtcaggcttatgagactgagagtaaagttgatgaggaagaggaggctcagaagtatctgaacaactactctatatgtttatatttttctgcttgaggggatagagatccctcctccatctgcatctgcatatagaactgcttaagaggacagcaagacaagttgctgcagggggatggagggtagacagaatgcctttttttaaaactgaaaattttattgagatacttaatccacctgcacttgtaagaaatcatacagagaaattctattttcctttacacagtttccctgaatgctaacatctagcaaaactgtagtacactgccacaaccaggataactgacattgatataatctactgatcttgttcagatttccttccccagttttgcttatgttcatttctctctgtgtgtgcacgtgtgtgtgttatctatttctatacagctttatcatgtgtaggtttgtgtatctgccactgcagtcaacatacagaacaggccgggcgcagtggctcacgcctgtaatcccagcactttgggaggccaaggcaggtggatcacctgaggtcaggggtttgagagcagcctggccaatatagtgaaacaccgtctctactaaaaataccaaaactagccgggcgtggtggtgcatgcctgtagtcccactactcaggaggctgaggcagcagaataacttgatcccgggaggcggaggttgcagtaagctaagatcctgccacagcattccaggctgagtgacagagcgagactctgtctcaaaaaataaataataatttaaaaaaagatacagaacagttccatcaccacaaggatccctcgcattgctcttttatagcaattttatagcaattttctcctcccacaacccccttccccatctctagctcctggtaacacagatatattctctatttctaaaattttgtcatttgatatatctttttgtaaacatataattatacacacatatttctctaccacttatactttttcaaagtgctttcacatccttatagcaattctgcaaggtagccagggaaggctttcctatttcaggtcagaaaacagatttagaaatattaaatgacttaatgaaggtcacatgtttagcagtagaactagaactgggacccaagtctgatgttcagtcctagaccttttctacttgcccggtctgcctcttcacaagggaagacttgggttttagaatccagagaccttagaaggagcaaattggagaaggtgaggacatgatggcctttactaccggaagcaaaaagtgaatgtccagaggtgaagggacagagaagtaacaggacccatcagcatttcaggcaatttgcttcctttaccaggagggtctctgtcctcttacaacctgggaaaaaataagttgtgtcccaggttgtaagtttgctttacttaggcccaaaggaactaaagaatggatatcagaaatctcaccccaattgttttgtcttacaggcacagaataggttctagcctcagcattttcattaatgtagtgtttttattaacatctccattaacttgcttgcagcaatgagatggaattatgcctcccacaaggcctggggcaagatacttgcataggtgcccccttttgtttggacagtagaaacactgcctcccctgccatggtgttcaatccagttggcaggtgggccagcttcaaagtgcagaaggaactgggtgtggtggctcacccctgtaatcccagcactttgggaggcaggcggatcgcttgaactcaggagtttgagaccactctgggcaacacagtgaaaccctgtctctccaaaaatacaaaaaattagctgggcatggtggctgttgtctgtaatcccaacactttgggaggctgaggccagtggatctcttgagctaaggaggttaagaccagcctggtcaacatggcgaactccgtctctacaaaaaaatacgaaaattagctgggcgtagtagttcctgcctgtagtcctagctacttggaaggctgaggtggggaggatcgcttgagtccgggaggcagaggttgcagtgagcgaagatgatgccattgcactccagtctgggtgacagagcaagatcctgtctcacaaaaaaa

SEQ ID NO: 448028 - DNA, 4707 bp, Homo sapiens
atctaagctgaaagtgtttggggagatcagacattgctgtctggtgctcctctctcagtggccatcatgtctttgacatctgcttaccagcataaattagcagagaagctcactatcctgaatgatcgcggtcagggggttctcatccgtatgtataacatcaagaagacttgttcagaccccaaatctaagccacctttcttactggaaaagtccatggaaccatctctcaagtatatcaacaagaaatttcccaacatagatgtccgaaacagcacgcaacatttaggaccagtacatcgtgaaaaagccgagataattagattcctcaccaactactaccagtcatttgtggatgtcatggaatttcgggatcatgtatatgaacttctcaacaccattgatgcctgccagtgccattttgatatcaatctcaactttgatttcactcggagttacctggacttgattgtaacttacacctcagtcattttacttctgtcacggattgaagatcggcggatactcattggcatgtacaattgtgcccatgagatgctgcatgggcatggtgaccccagttttgcccgtctgggtcagatggtcttggagtatgaccaccctctgaagaagctgacagaagagtttgggcctcacacaaaggctgtgagtggagccctcctctctttgcatttcctctttgtccgaagaaaccagggggctgagcagtggcgcagtgcccaacttctaagcctcatcagcaaccccccagccatgattaaccctgctaattcagatacaatggcctgtgagtatctgtctgtggaagtaatggagcgctggattatcattgggtttcttctttgtcatgggtgcctcaactccaatagccagtgccagaagctgtggaagctgtgtctgcagggctccctctacatcacccttatccgtgaggatgtgctgcaggtgcacaaagtcaccgaggacctgtttagcagtttgaaagggtatggcaagagagtggcagacataaaggagagcaaggaacatgtaattgcaaacagtggccagtttcattgtcaacggcggcaatttctgcggatggcagtgaaggagctggagactgtgttggctgatgaaccgggactactgggtcctaaggctctttttgctttcatggccctgtccttcattcgtgatgaggtcacctggctggttcgccacacagagaatgtcaccaagacaaagacacctgaggactatgctgactcgagcattgcagagctacttttcttgttggaggggattaggtctctggtccgaagacacatcaaagtgatacagcaataccaccttcagtacttggcaagatttgatgctcttgtgctcagtgacatcattcagaacttgtctgtgtgtccagaggaggagtccatcatcatgtcctcattcgtcagtatcctctcctctctgaatctcaaacaagttgataatggagaaaaatttgaattctcaggattgaggctggactggttccgcctacaggcatacactagcgtggctaaggcccctctgcacctgcatgagaaccctgacttagccaaggtgatgaacctcattgtcttccactcccgaatgctggactccgtagaaaaattgctggtggaaacttctgatctgtctactttctgctttcatcttcgtatctttgagaagatgtttgccatgaccttggaggaatctgccatgttgcgttatgccattgctttccccctgatttgtgctcactttgtccactgcactcatgagatgtgcccagaggagtacccccacctcaagaaccatggtcttcaccactgcaactccttcctggaagagttggccaagcagaccagcaattgcgtcctggagatctgtgctgagcagcgaaacctgagcgagcagcttctacctaagcactgtgccactacaatcagcaaagccaagaacaagaaaaccaggaagcagaggcagactcccagaaaaggagagcccgagagggacaagccaggagctgagagtcaccggaagaaccgcagcattgtcaccaacatggacaagctacacctaaacttgacagaactggcactgacaatgaatcatgtatacagtttctccgtgtttgaacatactatcttcccttctgagtacctcagcagccacctggaggccagactcaacagagccattgtgtggctggctggctacaatgccacgacccaggagatcgtacggccttctgagctgttggcaggagtcaaagcatacattggtttcatacagtcactggcccagtttttgggtgcagatgcttccagagtcatccgcaacgccctcctgcagcagacacaaccactggattcctgtggggaacagacaatcaccacactctacacaaactggtacctggaaagtctgcttagacaggcaagcagtgggaccatcatcctctccccagccatgcaggccttcgtcagcctgcccagagaaggggagcagaacttcagtgcagaggagttctctgacatctctgagatgcgggccttggcagaactcctgggcccctatggcatgaagttcctgagtgaaaacctgatgtggcatgtgacctctcagattgtggagctgaagaagctggtggtggaaaacatggacatacttgttcagatcagatccaactttagcaagccggacttgatggcttccctgctgccccagctgacaggggctgaaaatgtgctaaagcgcatgaccatcattggggttatcctcagtttcagggccatggcccaagagggacttcgggaggttttctcctcccactgcccatttcttatgggtcccattgagtgcttgaaggagtttgtcactccagacacagacatcaaggtgaccttgagtatctttgagctggcatctgctgcaggtgtgggctgtgacattgacccagccttggtggctgccattgctaatctgaaagctgatacttcatctcctgaggaggaatataaggtggcctgcctgctcttgatctttctggcagtttccctcccactccttgccactgacccttcttccttttatagcattgagaaggatggttacaacaacaatattcattgcttgaccaaagccatcatccaggtgtctgctgccctcttcacgctctacaacaagaacattgaaactcacctcaaggaatttctggtggtggcctctgtcagcctcttgcagctgggccaggagactgacaagcttaaaaccagaaatcgagaatccatttctctgctcatgcgcttggtggtggaggagtcatccttcctgaccctggacatgctggagtcctgtttcccttatgtcctgcttcgaaatgcctatcgggaggtgtctcgggccttccacctaaactgaatgcctgccagtacccactgaagagccctttggaccttcctaaacccttgccatagtggaagctgtggtcactttcgcagggggtgggaatggggtggggtcactaaggagagagggtcaggagccagagttgatgagcagatctgtggaagaacaatccagggctgagaaatcgtagagcagtgaggcaggctgggagcatggaggacagcttatggaaaaagttagggcgtggggccacatgtgtgaattttacaatgaaaaaaggagtaacgtacaagtatattttctatcttctggtgacttgagcttgagctctgacaggcatgggcctctccgaccttcatcactattcttaggataatgctggcgggcagagatgatcaatcatcatattaaatcataatgagcttataatcctcacactggagctgctattgtctcctgcacattcattaggaccattatcttctctcttcctttttcaaatgtgttcagcaaacattcaacctgctcctactgcagagtagcagcaaaggagcccctcttttcctttgtggggctcttcgaggggtcattgggtctcttcctttgcccccagcttgactgcgtttcctactggggcaaggaggaagtgcccttcagagatgttcactgcccacctactctactacattgtttgttacaagttctctcttgctttaacccctcctgctttgatatctccacaacccagagcagagggtcagttagtctccgtcaattctaggttacatgacaactgattggcccagacttaggtgggttttccctcctgtaccatttgggggtactctgccttttattgggagggactaatttaaccccaaatccttttgtcagcctgggtatagctgttgctccaggaagggatttctcttctggatcttaaatttcacagacctcattaggttgtatggccctgagagtgggtatccttgagggagtacaagctgtttcaacttagcccttttctgcgctaattagaatttcaagcgtcacagagcctgggggctttcaagatagcactaaactaggtttacttaactccttggcaggaaatagtggcccccatgcatcacttctgtgaatccactgccagggagaagtggagaaacagatcatatatgtcacaggtctagagtggttggaattgacaaatataattagctagttggttaattagggtcatgtccatactttcatgatgaaagggaa

SEQ ID NO: 448029 - DNA, 3525 bp, Homo sapiens
atctaagctgaaagtgtttggggagatcagacattgctgtctggtgctcctctctcagtggccatcatgtctttgacatctgcttaccagcataaattagcagagaagctcactatcctgaatgatcgcggtcagggggttctcatccgtatgtataacatcaagaagacttgttcagaccccaaatctaagccacctttcttactggaaaagtccatggaaccatctctcaagtatatcaacaagaaatttcccaacatagatgtccgaaacagcacgcaacatttaggaccagtacatcgtgaaaaagccgagataattagattcctcaccaactactaccagtcatttgtggatgtcatggaatttcgggatcatgtatatgaacttctcaacaccattgatgcctgccagtgccattttgatatcaatctcaactttgatttcactcggagttacctggacttgattgtaacttacacctcagtcattttacttctgtcacggattgaagatcggcggatactcattggcatgtacaattgtgcccatgagatgctgcatgggcatggtgaccccagttttgcccgtctgggtcagatggtcttggagtatgaccaccctctgaagaagctgacagaagagtttgggcctcacacaaaggctgtgagtggagccctcctctctttgcatttcctctttgtccgaagaaaccagggggctgagcagtggcgcagtgcccaacttctaagcctcatcagcaaccccccagccatgattaaccctgctaattcagatacaatggcctgtgagtatctgtctgtggaagtaatggagcgctggattatcattgggtttcttctttgtcatgggtgcctcaactccaatagccagtgccagaagctgtggaagctgtgtctgcagggctccctctacatcacccttatccgtgaggatgtgctgcaggtgcacaaagtcaccgaggacctgtttagcagtttgaaagggtatggcaagagagtggcagacataaaggagagcaaggaacatgtaattgcaaacagtggccagtttcattgtcaacggcggcaatttctgcggatggcagtgaaggagctggagactgtgttggctgatgaaccgggactactgggtcctaaggctctttttgctttcatggccctgtccttcattcgtgatgaggtcacctggctggttcgccacacagagaatgtcaccaagacaaagacacctgaggactatgctgactcgagcattgcagagctacttttcttgttggaggggattaggtctctggtccgaagacacatcaaagtgatacagcaataccaccttcagtacttggcaagatttgatgctcttgtgctcagtgacatcattcagaacttgtctgtgtgtccagaggaggagtccatcatcatgtcctcattcgtcagtatcctctcctctctgaatctcaaacaagttgataatggagaaaaatttgaattctcaggattgaggctggactggttccgcctacaggcatacactagcgtggctaaggcccctctgcacctgcatgagaaccctgacttagccaaggtgatgaacctcattgtcttccactcccgaatgctggactccgtagaaaaattgctggtggaaacttctgatctgtctactttctgctttcatcttcgtatctttgagaagatgtttgccatgaccttggaggaatctgccatgttgcgttatgccattgctttccccctgatttgtgctcactttgtccactgcactcatgagatgtgcccagaggagtacccccacctcaagaaccatggtcttcaccactgcaactccttcctggaagagttggccaagcagaccagcaattgcgtcctggagatctgtgctgagcagcgaaacctgagcgagcagcttctacctaagcactgtgccactacaatcagcaaagccaagaacaagaaaaccaggaagcagaggcagactcccagaaaaggagagcccgagagggacaagccaggagctgagagtcaccggaagaaccgcagcattgtcaccaacatggacaagctacacctaaacttgacagaactggcactgacaatgaatcatgtatacagtttctccgtgtttgaacatactatcttcccttctgagtacctcagcagccacctggaggccagactcaacagagccattgtgtggctggctggctacaatgccacgacccaggagatcgtacggccttctgagctgttggcaggagtcaaagcatacattggtttcatacagtcactggcccagtttttgggtgcagatgcttccagagtcatccgcaacgccctcctgcagcagacacaaccactggattcctgtggggaacagacaatcaccacactctacacaaactggtacctggaaagtctgcttagacaggcaagcagtgggaccatcatcctctccccagccatgcaggccttcgtcagcctgcccagagaaggggagcagaacttcagtgcagaggagttctctgacatctctgagatgcgggccttggcagaactcctgggcccctatggcatgaagttcctgagtgaaaacctgatgtggcatgtgacctctcagattgtggagctgaagaagctggtggtggaaaacatggacatacttgttcagatcagatccaactttagcaagccggacttgatggcttccctgctgccccagctgacaggggctgaaaatgtgctaaagcgcatgaccatcattggggttatcctcagtttcagggccatggcccaagagggacttcgggaggttttctcctcccactgcccatttcttatgggtcccattgagtgcttgaaggagtttgtcactccagacacagacatcaaggtgaccttgagtatctttgagctggcatctgctgcaggtgtgggctgtgacattgacccagccttggtggctgccattgctaatctgaaagctgatacttcatctcctgaggaggaatataaggtggcctgcctgctcttgatctttctggcagtttccctcccactccttgccactgacccttcttccttttatagcattgagaaggatggtaagtaaggggtaggtttgagacaccagtgctattcaagttagtgtcctggggtagagagaggagacagagatactggaaaatatagacttctgacttgggtgtaaagttctgtttcaaaaagcacttgaaggctggacaccgtggctcatgcctgtaatcctagcactttgggaggccaaggtgaggtgggtagatcacttgagcccatgagttccagaccagcctaggcaacgtggtgaaaccctgtttctacaaaaataaataaactagctgggcagggtggcctgtagtcccagctacctgggaggctgaggtaggaggatggcttgagcccaaggggtcaaggttgtagtgagccatgattgcgccactgcactccagca

SEQ ID NO: 448030 - DNA, 3278 bp, Homo sapiens
atctaagctgaaagtgtttggggagatcagacattgctgtctggtgctcctctctcagtggccatcatgtctttgacatctgcttaccagcataaattagcagagaagctcactatcctgaatgatcgcggtcagggggttctcatccgtatgtataacatcaagaagacttgttcagaccccaaatctaagccacctttcttactggaaaagtccatggaaccatctctcaagtatatcaacaagaaatttcccaacatagatgtccgaaacagcacgcaacatttaggaccagtacatcgtgaaaaagccgagataattagattcctcaccaactactaccagtcatttgtggatgtcatggaatttcgggatcatgtatatgaacttctcaacaccattgatgcctgccagtgccattttgatatcaatctcaactttgatttcactcggagttacctggacttgattgtaacttacacctcagtcattttacttctgtcacggattgaagatcggcggatactcattggcatgtacaattgtgcccatgagatgctgcatgggcatggtgaccccagttttgcccgtctgggtcagatggtcttggagtatgaccaccctctgaagaagctgacagaagagtttgggcctcacacaaaggctgtgagtggagccctcctctctttgcatttcctctttgtccgaagaaaccagggggctgagcagtggcgcagtgcccaacttctaagcctcatcagcaaccccccagccatgattaaccctgctaattcagatacaatggcctgtgagtatctgtctgtggaagtaatggagcgctggattatcattgggtttcttctttgtcatgggtgcctcaactccaatagccagtgccagaagctgtggaagctgtgtctgcagggctccctctacatcacccttatccgtgaggatgtgctgcaggtgcacaaagtcaccgaggacctgtttagcagtttgaaagggtatggcaagagagtggcagacataaaggagagcaaggaacatgtaattgcaaacagtggccagtttcattgtcaacggcggcaatttctgcggatggcagtgaaggagctggagactgtgttggctgatgaaccgggactactgggtcctaaggctctttttgctttcatggccctgtccttcattcgtgatgaggtcacctggctggttcgccacacagagaatgtcaccaagacaaagacacctgaggactatgctgactcgagcattgcagagctacttttcttgttggaggggattaggtctctggtccgaagacacatcaaagtgatacagcaataccaccttcagtacttggcaagatttgatgctcttgtgctcagtgacatcattcagaacttgtctgtgtgtccagaggaggagtccatcatcatgtcctcattcgtcagtatcctctcctctctgaatctcaaacaagttgataatggagaaaaatttgaattctcaggattgaggctggactggttccgcctacaggcatacactagcgtggctaaggcccctctgcacctgcatgagaaccctgacttagccaaggtgatgaacctcattgtcttccactcccgaatgctggactccgtagaaaaattgctggtggaaacttctgatctgtctactttctgctttcatcttcgtatctttgagaagatgtttgccatgaccttggaggaatctgccatgttgcgttatgccattgctttccccctgatttgtgctcactttgtccactgcactcatgagatgtgcccagaggagtacccccacctcaagaaccatggtcttcaccactgcaactccttcctggaagagttggccaagcagaccagcaattgcgtcctggagatctgtgctgagcagcgaaacctgagcgagcagcttctacctaagcactgtgccactacaatcagcaaagccaagaacaagaaaaccaggaagcagaggcagactcccagaaaaggagagcccgagagggacaagccaggagctgagagtcaccggaagaaccgcagcattgtcaccaacatggacaagctacacctaaacttgacagaactggcactgacaatgaatcatgtatacagtttctccgtgtttgaacatactatcttcccttctgagtacctcagcagccacctggaggccagactcaacagagccattgtgtggctggctggctacaatgccacgacccaggagatcgtacggccttctgagctgttggcaggagtcaaagcatacattggtttcatacagtcactggcccagtttttgggtgcagatgcttccagagtcatccgcaacgccctcctgcagcagacacaaccactggattcctgtggggaacagacaatcaccacactctacacaaactggtacctggaaagtctgcttagacaggcaagcagtgggaccatcatcctctccccagccatgcaggccttcgtcagcctgcccagagaaggggagcagaacttcagtgcagaggagttctctgacatctctgagatgcgggccttggcagaactcctgggcccctatggcatgaagttcctgagtgaaaacctgatgtggcatgtgacctctcagattgtggagctgaagaagctggtggtggaaaacatggacatacttgttcagatcagatccaactttagcaagccggacttgatggcttccctgctgccccagctgacaggggctgaaaatgtgctaaagcgcatgaccatcattggggttatcctcagtttcagggccatggcccaagagggacttcgggaggttttctcctcccactgcccatttcttatgggtcccattgagtgcttgaaggagtttgtcactccagacacagacatcaaggtgaccttgagtatctttgagctggcatctgctgcaggtgtgggctgtgacattgacccagccttggtggctgccattgctaatctgaaagctgatacttcatctcctgaggaggaatataaggtggcctgcctgctcttgatctttctggcagtttccctcccactccttgccactgacccttcttccttttatagcattgagaaggatggttacaacaacaatatttcagtcaaagctgtgcccctgggtctgacccgagatctaatctctgtgctctgtgtattggcgacgagcagggtgagaataagtgcgtgcccacagcaacgagagatataggctacacccgg

SEQ ID NO: 448031 - DNA, 1458 bp, Homo sapiens
atctaagctgaaagtgtttggggagatcagacattgctgtctggtgctcctctctcagtggccatcatgtctttgacatctgcttaccagcataaattagcagagaagctcactatcctgaatgatcgcggtcagggggttctcatccgtatgtataacatcaagaagacttgttcagaccccaaatctaagccacctttcttactggaaaagtccatggaaccatctctcaagtatatcaacaagaaatttcccaacatagatgtccgaaacagcacgcaacatttaggaccagtacatcgtgaaaaagccgagataattagattcctcaccaactactaccagtcatttgtggatgtcatggaatttcgggatcatgtatatgaacttctcaacaccattgatgcctgccagtgccattttgatatcaatctcaactttgatttcactcggagttacctggacttgattgtaacttacacctcagtcattttacttctgtcacggattgaagatcggcggatactcattggcatgtacaattgtgcccatgagatgctgcatgggcatggtgaccccagttttgcccgtctgggtcagatggtcttggagtatgaccaccctctgaagaagctgacagaagagtttgggcctcacacaaaggctgtgagtggagccctcctctctttgcatttcctctttgtccgaagaaaccagggggctgagcagtggcgcagtgcccaacttctaagcctcatcagcaaccccccagccatgattaaccctgctaattcagatacaatggcctgtgagtatctgtctgtggaagtaatggagcgctggattatcattgggtttcttctttgtcatgggtgcctcaactccaatagccagtgccagaagctgtggaagctgtgtctgcagggctccctctacatcacccttatccgtgaggatgtgctgcaggtgcacaaagtcaccgaggacctgtttagcagtttgaaagggtgagagacacgagagccaaactgatcttccttgaatagtttttagcccctccaatatcctttttcagtctccacaagtgttcccagatataggtggtaacgattaattctaactattgaagaaatatacattaaatacctactattagctaagtgcttcactgggttttagggacacaataatgaataagacaacatggaggttaagagcacagactctgaaactagattgcttgggtttgaattcaggctctaccactagttgtgtggccttgggcaagttgctcaaatttcccatgccattacctcaatttcctcatctataaaatgtggataatagtagtacctccctatggcctacctcatagggttgttgtgaagaataaaagtgttattatttgtaaagcaggtagaaaagttcctggtacattgtaagtgctatgtgcttgtt

SEQ ID NO: 448032 - DNA, 1079 bp, Homo sapiens
  misc_feature (887)..(887): n is a, c, g, or t
  misc_feature (889)..(891): n is a, c, g, or t
  misc_feature (893)..(893): n is a, c, g, or t
  misc_feature (897)..(897): n is a, c, g, or t
  misc_feature (907)..(907): n is a, c, g, or t
  misc_feature (917)..(917): n is a, c, g, or t
  misc_feature (921)..(921): n is a, c, g, or t
cggacgcgtgggtcgacccacgcgtcgcaaagtcgccgacatcggcctggctgcctggggacgcaaggccctggacattgctgagaacgagatgccgggcctgatgcgtatgcgggagcggtactcggcctccaagccactgaagggcgcccgcatcgctggctgcctgcacatgaccgtggagacggccgtcctcattgagaccctcgtcaccctgggtgctgaggtgcagtggtccagctgcaacatcttctccacccaggaccatgcggcggctgccattgccaaggctggcattccggtgtatgcctggaagggcgaaacggacgaggagtacctgtggtgcattgagcagaccctgtacttcaaggacgggcccctcaacatgattctggacgacgggggcgacctcaccaacctcatccacaccaagtacccgcagcttctgccaggcatccgaggcatctctgaggagaccacgactggggtccacaacctctacaagatgatggccaatgggatcctcaaggtgcctgccatcaatgtcaatgactccgtcaccaagagcaagtttgacaacctctatggctgccgggagtccctcatagatggcatcaagcgggccacagatgtgatgattgccggcaaggtagcggtggtagcaggctatggtgatgtgggcaagggctgtgcccaggccctgcggggtttcggagcccgcgtcatcatcaccgagattgaccccatcaacgcactgcaggctgccatggagggctatgaggtgaccaccatggatgaggcctgtcaggagggcaacatctttgtcaccaccacaggctgtattgacatcatccttggccgcctttgagcgttgagttgtgccttgngnnncntggnccttgccggngatcgggcantggncacgggacgcgggggagggactccagcccgggacgcctcggtgaaggggccgctccgtggcgggcgggcccggggcggcccctggggactccccacgtggcgcggtgccccacccgggttccacgtgggggccggtggtcaacctggccccccgcgct

SEQ ID NO: 448033 - DNA, 660 bp, Homo sapiens
tcttcgcgactctgaggatcccccaggtccttaagccggatcactaccgctactgagagccaggtctgcgtttcaccctccagctgctgtccttgcccaggccccacctctcctccctaagagctaatggcaccaactttgtgattggtttgtcagtgtcccccatcgactctctggggctgatcacttagtttttggcctctgctgcagccgtcatactgttccaaatgtggcagcgggaacagagtaccctcttcaagccccggtcatgatggaggtcccagccacagggaaccatgagctcagtggtcttggaacagctcactaagtcagtccttccttagcctggaagtcagtagtggagtcacaaagcccatgtgttttgccatctaggccttcacctggtctgtggacttatacctgtgtgcttggtttacaggtccagtggttcttcagcccatgacagatgagaaggggctatattgaagggcaaagaggaactgttgtttgaattttcctgagagcctggcttagtgctgggccttctcttaaacctcattacaatgaggttagtacttttagtccctgttttacaggggttagaatagactgttacccttggggctaaggcccttggggcttataggacctgtcttaagg

SEQ ID NO: 448034 - DNA, 1160 bp, Homo sapiens
gtggcgggggctgcagggccgactcggggctctctggaccccctggaatcgcagcctcggcgcgtttctggccgcgcgaagccagctggaagttggagttctcgcgcggccatgagcgggccgttccgggtggccgtggactacaagtcccagcatgccccgcgacgccggggccgccgcgcggtctgcgagccgcaaactggcggcgtgctccgcgggagagcacacctggccacggcctgggacggctggcacctgccggaccctgctcggggggcctgcgcccggcctcctaggcctggaccggaccctgtccagctgggcggccccgacgagcgtccacccctctctgggcctcctacagggacggcgagggcaccccggagggtgtatgaggagaggcctggaaagcgagccccaggccggctccgatcctcctctcccctgggactttgggccagttacccaacctgtggggtcccccacccctccagcaggggcagccttgcagaaatctcgaagaaaatttggagtggtttgaaaaatcctgctgtcccaccgattgaagtgtaatacagggatagttaacgtttacttagtgtttcctgtgggatcggcactgccttctagctttattctagtctcatggctctgtagggaaactgttctcattttatgatgagaatcctgaggcagaggtaacttgccctcagtcttacagctggtggtgatggagcaagattggaacgcaggccatctagatctctgagcgcaccctttcaccactgtgtgcaagcgaatacacgcggaacaatcctagtgaattttcagcaaaaaccagttcagtttggctggtagcttttcaagtaactttgacactattggaccgggtgtggtggctcacccctctcaaagtgctgggattacaggctgtgagccactgcgcccagcctgagaagtgacagtttagatgaaggtggtgagatgcagttggattgcttatatatttcacttgttgagccaaaaacgtgctgattgaggtgaaagaggaaaagaggaatcaaatcttaagtttttgggcagagtagctggttgaatggtggtttcatttcctaaaatgggaagattgggagagtaaccggttctgggggcacacagga

SEQ ID NO: 448035 - DNA, 2266 bp, Homo sapiens
agatatttaaaggcgtcggcgccacgcgcatatccctgctcggcgctgcccgcccagttcctgttcccagactgaggcccagcccccttcgcccgtttccatcacgagtgccgccagcatgtctgacaaactgccctacaaagtcgccgacatcggcctggctgcctggggacgcaaggccctggacattgctgagaacgagatgccgggcctgatgcgtatgcgggagcggtactcggcctccaagccactgaagggcgcccgcatcgctggctgcctgcacatgaccgtggagacggccgtcctcattgagaccctcgtcaccctgggtgctgaggtgcagtggtccagctgcaacatcttctccacccaggaccatgcggcggctgccattgccaaggctggcattccggtgtatgcctggaagggcgaaacggacgaggagtacctgtggtgcattgagcagaccctgtacttcaaggacgggcccctcaacatgattctggacgacgggggcgacctcaccaacctcatccacaccaagtacccgcagcttctgccaggcatccgaggcatctctgaggagaccacgactggggtccacaacctctacaagatgatggccaatgggatcctcaaggtgcctgccatcaatgtcaatgactccgtcaccaagagcaagtttgacaacctctatggctgccgggagtccctcatagatggcatcaagcgggccacagatgtgatgattgccggcaaggtagcggtggtagcaggctatggtgatgtgggcaagggctgtgcccaggccctgcggggtttcggagcccgcgtcatcatcaccgagattgaccccatcaacgcactgcaggctgccatggagggctatgaggtgaccaccatggatgaggcctgtcaggagggcaacatctttgtcaccaccacaggctgtattgacatcatccttggccggcactttgagcagatgaaggatgatgccattgtgtgtaacattggacactttgacgtggagatcgatgtcaagtggctcaacgagaacgccgtggagaaggtgaacatcaagccgcaggtggaccggtatcggttgaagaatgggcgccgcatcatcctgctggccgagggtcggctggtcaacctgggttgtgccatgggccaccccagcttcgtgatgagtaactccttcaccaaccaggtgatggcgcagatcgagctgtggacccatccagacaagtaccccgttggggttcatttcctgcccaagaagctggatgaggcagtggctgaagcccacctgggcaagctgaatgtgaagttgaccaagctaactgagaagcaagcccagtacctgggcatgtcctgtgatggccccttcaagccggatcactaccgctactgagagccaggtctgcgtttcaccctccagctgctgtccttgcccaggccccacctctcctccctaagagctaatggcaccaactttgtgattggtttgtcagtgtcccccatcgactctctggggctgatcacttagtttttggcctctgctgcagccgtcatactgttccaaatgtggcagcgggaacagagtaccctcttcaagccccggtcatgatggaggtcccagccacagggaaccatgagctcagtggtcttggaacagctcactaagtcagtccttccttagcctggaagtcagtagtggagtcacaaagcccatgtgttttgccatctaggccttcacctggtctgtggacttatacctgtgtgcttggtttacaggtccagtggttcttcagcccatgacagatgagaaggggctatattgaagggcaaagaggaactgttgtttgaattttcctgagagcctggcttagtgctgggccttctcttaaacctcattacaatgaggttagtacttttagtccctgttttacaggggttagaatagactgttaaggggcaactgagaaagaacagagaagtgacagctaggggttgagaggggccagaaaaacatgaatgcaggcagatttcgtgaaatctgccaccactttataaccagatggttcctttcacaaccctgggtcaaaaagagaataatttggcctataatgttaaaagaaagcaggaaggtgggtaaataaaaatcttggtgcctggaaaaaaaaaaaacaaaacaaccaaaagggggcgggcgaaaaaatcccgggggcccacatccgacccctttttgcaaggcccccaa

SEQ ID NO: 448036 - DNA, 2574 bp, Homo sapiens
agatatttaaaggcgtcggcgccacgcgcatatccctgctcggcgctgcccgcccagttcctgttcccagactgaggcccagcccccttcgcccgtttccatcacgagtgccgccagcatgtctgacaaactgccctacaaagtcgccgacatcggcctggctgcctggggacgcaaggccctggacattgctgagaacgagatgccgggcctgatgcgtatgcgggagcggtactcggcctccaagccactgaagggcgcccgcatcgctggctgcctgcacatgaccgtggagacggccgtcctcattgagaccctcgtcaccctgggtgctgaggtgcagtggtccagctgcaacatcttctccacccaggaccatgcggcggctgccattgccaaggctggcattccggtgtatgcctggaagggcgaaacggacgaggagtacctgtggtgcattgagcagaccctgtacttcaaggacgggcccctcaacatgattctggacgacgggggcgacctcaccaacctcatccacaccaagtacccgcagcttctgccaggcatccgaggcatctctgaggagaccacgactggggtccacaacctctacaagatgatggccaatgggatcctcaaggtgcctgccatcaatgtcaatgactccgtcaccaagagcaagtttgacaacctctatggctgccgggagtccctcatagatggcatcaagcgggccacagatgtgatgattgccggcaaggtagcggtggtagcaggctatggtgatgtgggcaagggctgtgcccaggccctgcggggtttcggagcccgcgtcatcatcaccgagattgaccccatcaacgcactgcaggctgccatggagggctatgaggtgaccaccatggatgaggcctgtcaggagggcaacatctttgtcaccaccacaggctgtattgacatcatccttggccggcactttgagcagatgaaggatgatgccattgtgtgtaacattggacactttgacgtggagatcgatgtcaagtggctcaacgagaacgccgtggagaaggtgaacatcaagccgcaggtggaccggtatcggttgaagaatgggcgccgcatcatcctgctggccgagggtcggctggtcaacctgggttgtgccatgggccaccccagcttcgtgatgagtaactccttcaccaaccaggtgatggcgcagatcgagctgtggacccatccagacaagtaccccgttggggttcatttcctgcccaagaagctggatgaggcagtggctgaagcccacctgggcaagctgaatgtgaagttgaccaagctaactgagaagcaagcccagtacctgggcatgtcctgtgatggccccttcaagccggatcactaccgctactgagagccaggtctgcgtttcaccctccagctgctgtccttgcccaggccccacctctcctccctaagagctaatggcaccaactttgtgattggtttgtcagtgtcccccatcgactctctggggctgatcacttagtttttggcctctgctgcagccgtcatactgttccaaatgtggcagcgggaacagagtaccctcttcaagccccggtcatgatggaggtcccagccacagggaaccatgagctcagtggtcttggaacagctcactaagtcagtccttccttagcctggaagtcagtagtggagtcacaaagcccatgtgttttgccatctaggccttcacctggtctgtggacttatacctgtgtgcttggtttacaggtccagtggttcttcagcccatgacagatgagaaggggctatattgaagggcaaagaggaactgttgtttgaattttcctgagagcctggcttagtgctgggccttctcttaaacctcattacaatgaggttagtacttttagtccctgttttacaggggttagaatagactgttaaggggcaactgagaaagaacagagaagtgacagctaggggttgagaggggccagaaaaacatgaatgcaggcagatttcgtgaaatctgccaccactttataaccagatggttcctttcacaaccctgggtcaaaaagagaataatttggcctataatgttaaaagaaagcaggaaggtgggtaaataaaaatcttggtgcctggaaaaaaaaaaaaaaaaaaaaaaaaaaaaaaagggggggggggcaaaaagtttcccaggggggcccaagtataacaggttacccaaggttttcgtgtaacaagggggtgccccctattaggggaggccgaataaaaagagtaggagaccgtggccgggcgttttaaccaacgccggggacctggggaaccaacgtggctacctgtgggaaacctttggagaagaaacccttttccttggggcgggggcaccatagttgggccaaatacaccctacagacgagtttaagcgcctcagggaacattattacacttgcaaaggtttcacgtgtttaccaacgtgtatatgtctggccgatagaaatttggcaccggatatgtttctgcaacttttcg

SEQ ID NO: 448037 - DNA, 2281 bp, Homo sapiens
agatatttaaaggcgtcggcgccacgcgcatatccctgctcggcgctgcccgcccagttcctgttcccagactgaggcccagcccccttcgcccgtttccatcacgagtgccgccagcatgtctgacaaactgccctacaaagtcgccgacatcggcctggctgcctggggacgcaaggccctggacattgctgagaacgagatgccgggcctgatgcgtatgcgggagcggtactcggcctccaagccactgaagggcgcccgcatcgctggctgcctgcacatgaccgtggagacggccgtcctcattgagaccctcgtcaccctgggtgctgaggtgcagtggtccagctgcaacatcttctccacccaggaccatgcggcggctgccattgccaaggctggcattccggtgtatgcctggaagggcgaaacggacgaggagtacctgtggtgcattgagcagaccctgtacttcaaggacgggcccctcaacatgattctggacgacgggggcgacctcaccaacctcatccacaccaagtacccgcagcttctgccaggcatccgaggcatctctgaggagaccacgactggggtccacaacctctacaagatgatggccaatgggatcctcaaggtgcctgccatcaatgtcaatgactccgtcaccaagagcaagtttgacaacctctatggctgccgggagtccctcatagatggcatcaagcgggccacagatgtgatgattgccggcaaggtagcggtggtagcaggctatggtgatgtgggcaagggctgtgcccaggccctgcggggtttcggagcccgcgtcatcatcaccgagattgaccccatcaacgcactgcaggctgccatggagggctatgaggtgaccaccatggatgaggcctgtcaggagggcaacatctttgtcaccaccacaggctgtattgacatcatccttggccggtaggtgccagatggggggtcccggggagtgagggaggagggcagagttgggacagctttctgtccctgacaatctcccacggtcttgggctgcctgagcactttgagcagatgaaggatgatgccattgtgtgtaacattggacactttgacgtggagatcgatgtcaagtggctcaacgagaacgccgtggagaaggtgaacatcaagccgcaggtggaccggtatcggttgaagaatgggcgccgcatcatcctgctggccgagggtcggctggtcaacctgggttgtgccatgggccaccccagcttcgtgatgagtaactccttcaccaaccaggtgatggcgcagatcgagctgtggacccatccagacaagtaccccgttggggttcatttcctgcccaagaagctggatgaggcagtggctgaagcccacctgggcaagctgaatgtgaagttgaccaagctaactgagaagcaagcccagtacctgggcatgtcctgtgatggccccttcaagccggatcactaccgctactgagagccaggtctgcgtttcaccctccagctgctgtccttgcccaggccccacctctcctccctaagagctaatggcaccaactttgtgattggtttgtcagtgtcccccatcgactctctggggctgatcacttagtttttggcctctgctgcagccgtcatactgttccaaatgtggcagcgggaacagagtaccctcttcaagccccggtcatgatggaggtcccagccacagggaaccatgagctcagtggtcttggaacagctcactaagtcagtccttccttagcctggaagtcagtagtggagtcacaaagcccatgtgttttgccatctaggccttcacctggtctgtggacttatacctgtgtgcttggtttacaggtccagtggttcttcagcccatgacagatgagaaggggctatattgaagggcaaagaggaactgttgtttgaattttcctgagagcctggcttagtgctgggccttctcttaaacctcattacaatgaggttagtacttttagtccctgttttacaggggttagaatagactgttaaggggcaactgagaaagaacagagaagtgacagctaggggttgagaggggccagaaaaacatgaatgcaggcagatttcgtgaaatctgccaccactttataaccagatggttcctttcacaaccctgggtcaaaaagagaataatttggcctataatgttaaaagaaagcaggaaggtgggtaaataaaaatcttggtgcctggaa

SEQ ID NO: 448038 - DNA, 2021 bp, Homo sapiens
agatatttaaaggcgtcggcgccacgcgcatatccctgctcggcgctgcccgcccagttcctgttcccagactgaggcccagcccccttcgcccgtttccatcacgagtgccgccagcatgtctgacaaactgccctacaaagtcgccgacatcggcctggctgcctggggacgcaaggccctggacattgctgagaacgagatgccgggcctgatgcgtatgcgggagcggtactcggcctccaagccactgaagggcgcccgcatcgctggctgcctgcacatgaccgtggagacggccgtcctcattgagaccctcgtcaccctgggtgctgaggtgcagtggtccagctgcaacatcttctccacccaggaccatgcggcggctgccattgccaaggctggcattccggtgtatgcctggaagggcgaaacggacgaggagtacctgtggtgcattgagcagaccctgtacttcaaggacgggcccctcaacatgattctggacgacgggggcgacctcaccaacctcatccacaccaagtacccgcagcttctgccaggcatccgaggcatctctgaggagaccacgactggggtccacaacctctacaagatgatggccaatgggatcctcaaggtgcctgccatcaatgtcaatgactccgtcaccaagagcaagtttgacaacctctatggctgccgggagtccctcatagatggcatcaagcgggccacagatgtgatgattgccggcaaggtagcggtggtagcaggctatggtgatgtgggcaagggctgtgcccaggccctgcggggtttcggagcccgcgtcatcatcaccgagattgaccccatcaacgcactgcaggctgccatggagggctatgaggtgaccaccatggatgaggcctgtcaggagggcaacatctttgtcaccaccacaggctgtattgacatcatccttggccggcactttgagcagatgaaggatgatgccattgtgtgtaacattggacactttgacgtggagatcgatgtcaagtggctcaacgagaacgccgtggagaaggtgaacatcaagccgcaggtggaccggtatcggttgaagaatgggcgccgcatcatcctgctggccgagggtcggctggtcaacctgggttgtgccatgggccaccccagcttcgtgatgagtaactccttcaccaaccaggtgatggcgcagatcgagctgtggacccatccagacaagtaccccgttggggttcatttcctgcccaagaagctggatgaggcagtggctgaagcccacctgggcaagctgaatgtgaagttgaccaagctaactgagaagcaagcccagtacctgggcatgtcctgtgatggccccttcaagccggatcactaccgctactgagagccaggtctgcgtttcaccctccagctgctgtccttgcccaggccccacctctcctccctaagagctaatggcaccaactttgtgattggtttgtcagtgtcccccatcgactctctggggctgatcacttagtttttggcctctgctgcagccgtcatactgttccaaatgtggcagcgggaacagagtaccctcttcaagccccggtcatgatggaggtcccagccacagggaaccatgagctcagtggtcttggaacagctcactaagtcagtccttccttagcctggaagtcagtagtggagtcacaaagcccatgtgttttgccatctaggccttcacctggtctgtggacttatacctgtgtgcttggtttacaggtccagtggttcttcagcccatgacagatgagaaggggctatattgaagggcaaagaggaactgttgtttgaattttcctgagagcctggcttagtgctgggccttctcttaaacctcattacaatgaggttagtacttttagtccctgttttacaggggttagaatagactgttacccttggggctaaggcccttggggcttataggacctgtcttaagg

SEQ ID NO: 448039 - DNA, 2072 bp, Homo sapiens
cggacgcgtgggtcgacccacgcgtcgcaaagtcgccgacatcggcctggctgcctggggacgcaaggccctggacattgctgagaacgagatgccgggcctgatgcgtatgcgggagcggtactcggcctccaagccactgaagggcgcccgcatcgctggctgcctgcacatgaccgtggagacggccgtcctcattgagaccctcgtcaccctgggtgctgaggtgcagtggtccagctgcaacatcttctccacccaggaccatgcggcggctgccattgccaaggctggcattccggtgtatgcctggaagggcgaaacggacgaggagtacctgtggtgcattgagcagaccctgtacttcaaggacgggcccctcaacatgattctggacgacgggggcgacctcaccaacctcatccacaccaagtacccgcagcttctgccaggcatccgaggcatctctgaggagaccacgactggggtccacaacctctacaagatgatggccaatgggatcctcaaggtgcctgccatcaatgtcaatgactccgtcaccaagagcaagtttgacaacctctatggctgccgggagtccctcatagatggcatcaagcgggccacagatgtgatgattgccggcaaggtagcggtggtagcaggctatggtgatgtgggcaagggctgtgcccaggccctgcggggtttcggagcccgcgtcatcatcaccgagattgaccccatcaacgcactgcaggctgccatggagggctatgaggtgaccaccatggatgaggcctgtcaggagggcaacatctttgtcaccaccacaggctgtattgacatcatccttggccggcactttgagcagatgaaggatgatgccattgtgtgtaacattggacactttgacgtggagatcgatgtcaagtggctcaacgagaacgccgtggagaaggtgaacatcaagccgcaggtggaccggtatcggttgaagaatgggcgccgcatcatcctgctggccgagggtcggctggtcaacctgggttgtgccatgggccaccccagcttcgtgatgagtaactccttcaccaaccaggtgatggcgcagatcgagctgtggacccatccagacaagtaccccgttggggttcatttcctgcccaagaagctggatgaggcagtggctgaagcccacctgggcaagctgaatgtgaagttgaccaagctaactgagaagcaagcccagtacctgggcatgtcctgtgatggccccttcaagccggatcactaccgctactgagagccaggtctgcgtttcaccctccagctgctgtccttgcccaggccccacctctcctccctaagagctaatggcaccaactttgtgattggtttgtcagtgtcccccatcgactctctggggctgatcacttagtttttggcctctgctgcagccgtcatactgttccaaatgtggcagcgggaacagagtaccctcttcaagccccggtcatgatggaggtcccagccacagggaaccatgagctcagtggtcttggaacagctcactaagtcagtccttccttagcctggaagtcagtagtggagtcacaaagcccatgtgttttgccatctaggccttcacctggtctgtggacttatacctgtgtgcttggtttacaggtccagtggttcttcagcccatgacagatgagaaggggctatattgaagggcaaagaggaactgttgtttgaattttcctgagagcctggcttagtgctgggccttctcttaaacctcattacaatgaggttagtacttttagtccctgttttacaggggttagaatagactgttaaggggcaactgagaaagaacagagaagtgacagctaggggttgagaggggccagaaaaacatgaatgcaggcagatttcgtgaaatctgccaccactttataaccagatggttcctttcacaaccctgggtcaaaaagagaataatttggcctataatgttaaaagaaagcaggaaggtgggtaaataaaaatcttggtgcctggaa

SEQ ID NO: 448040 - DNA, 2070 bp, Homo sapiens
agatatttaaaggcgtcggcgccacgcgcatatccctgctcggcgctgcccgcccagttcctgttcccagactgaggcccagcccccttcgcccgtttccatcacgagtgccgccagcatgtctgacaaactgccctacaaagtcgccgacatcggcctggctgcctggggacgcaaggccctggacattgctgagaacgagatgccgggcctgatgcgtatgcgggagcggtactcggcctccaagccactgaagggcgcccgcatcgctggctgcctgcacatgaccgtggagacggccgtcctcattgagaccctcgtcaccctgggtgctgaggtgcagtggtccagctgcaacatcttctccacccaggaccatgcggcggctgccattgccaaggctggcattccggtgtatgcctggaagggcgaaacggacgaggagtacctgtggtgcattgagcagaccctgtacttcaaggacgggcccctcaacatgattctggacgacgggggcgacctcaccaacctcatccacaccaagtacccgcagcttctgccaggcatccgaggcatctctgaggagaccacgactggggtccacaacctctacaagatgatggccaatgggatcctcaaggtgcctgccatcaatgtcaatgactccgtcaccaagagcaagtttgacaacctctatggctgccgggagtccctcatagatggcatcaagcgggccacagatgtgatgattgccggcaaggtagcggtggtagcaggctatggtgatgtgggcaagggctgtgcccaggccctgcggggtttcggagcccgcgtcatcatcaccgagattgaccccatcgcactttgagcagatgaaggatgatgccattgtgtgtaacattggacactttgacgtggagatcgatgtcaagtggctcaacgagaacgccgtggagaaggtgaacatcaagccgcaggtggaccggtatcggttgaagaatgggcgccgcatcatcctgctggccgagggtcggctggtcaacctgggttgtgccatgggccaccccagcttcgtgatgagtaactccttcaccaaccaggtgatggcgcagatcgagctgtggacccatccagacaagtaccccgttggggttcatttcctgcccaagaagctggatgaggcagtggctgaagcccacctgggcaagctgaatgtgaagttgaccaagctaactgagaagcaagcccagtacctgggcatgtcctgtgatggccccttcaagccggatcactaccgctactgagagccaggtctgcgtttcaccctccagctgctgtccttgcccaggccccacctctcctccctaagagctaatggcaccaactttgtgattggtttgtcagtgtcccccatcgactctctggggctgatcacttagtttttggcctctgctgcagccgtcatactgttccaaatgtggcagcgggaacagagtaccctcttcaagccccggtcatgatggaggtcccagccacagggaaccatgagctcagtggtcttggaacagctcactaagtcagtccttccttagcctggaagtcagtagtggagtcacaaagcccatgtgttttgccatctaggccttcacctggtctgtggacttatacctgtgtgcttggtttacaggtccagtggttcttcagcccatgacagatgagaaggggctatattgaagggcaaagaggaactgttgtttgaattttcctgagagcctggcttagtgctgggccttctcttaaacctcattacaatgaggttagtacttttagtccctgttttacaggggttagaatagactgttaaggggcaactgagaaagaacagagaagtgacagctaggggttgagaggggccagaaaaacatgaatgcaggcagatttcgtgaaatctgccaccactttataaccagatggttcctttcacaaccctgggtcaaaaagagaataatttggcctataatgttaaaagaaagcaggaaggtgggtaaataaaaatcttggtgcctggaa

SEQ ID NO: 448041 - DNA, 1646 bp, Homo sapiens
ccacaaccgaattagctaggtacgaggcatccgaggcatctctgaggagaccacgactggggtccacaacctctacaagatgatggccaatgggatcctcaaggtgcctgccatcaatgtcaatgactccgtcaccaagagcaagtttgacaacctctatggctgccgggagtccctcatagatggcatcaagcgggccacagatgtgatgattgccggcaaggtagcggtggtagcaggctatggtgatgtgggcaagggctgtgcccaggccctgcggggtttcggagcccgcgtcatcatcaccgagattgaccccatcaacgcactgcaggctgccatggagggctatgaggtgaccaccatggatgaggcctgtcaggagggcaacatctttgtcaccaccacaggctgtattgacatcatccttggccggcactttgagcagatgaaggatgatgccattgtgtgtaacattggacactttgacgtggagatcgatgtcaagtggctcaacgagaacgccgtggagaaggtgaacatcaagccgcaggtggaccggtatcggttgaagaatgggcgccgcatcatcctgctggccgagggtcggctggtcaacctgggttgtgccatgggccaccccagcttcgtgatgagtaactccttcaccaaccaggtgatggcgcagatcgagctgtggacccatccagacaagtaccccgttggggttcatttcctgcccaagaagctggatgaggcagtggctgaagcccacctgggcaagctgaatgtgaagttgaccaagctaactgagaagcaagcccagtacctgggcatgtcctgtgatggccccttcaagccggatcactaccgctactgagagccaggtctgcgtttcaccctccagctgctgtccttgcccaggccccacctctcctccctaagagctaatggcaccaactttgtgattggtttgtcagtgtcccccatcgactctctggggctgatcacttagtttttggcctctgctgcagccgtcatactgttccaaatgtggcagcgggaacagagtaccctcttcaagccccggtcatgatggaggtcccagccacagggaaccatgagctcagtggtcttggaacagctcactaagtcagtccttccttagcctggaagtcagtagtggagtcacaaagcccatgtgttttgccatctaggccttcacctggtctgtggacttatacctgtgtgcttggtttacaggtccagtggttcttcagcccatgacagatgagaaggggctatattgaagggcaaagaggaactgttgtttgaattttcctgagagcctggcttagtgctgggccttctcttaaacctcattacaatgaggttagtacttttagtccctgttttacaggggttagaatagactgttaaggggcaactgagaaagaacagagaagtgacagctaggggttgagaggggccagaaaaacatgaatgcaggcagatttcgtgaaatctgccaccactttataaccagatggttcctttcacaaccctgggtcaaaaagagaataatttggcctataatgttaaaagaaagcaggaaggtgggtaaataaaaatcttggtgcctggaa

SEQ ID NO: 448042 - DNA, 1811 bp, Homo sapiens
agatatttaaaggcgtcggcgccacgcgcatatccctgctcggcgctgcccgcccagttcctgttcccagactgaggcccagcccccttcgcccgtttccatcacgagtgccgccagcatgtctgacaaactgccctacaaagtcgccgacatcggcctggctgcctggggacgcaaggccctggacattgctgagaacgagatgccgggcctgatgcgtatgcgggagcggtactcggcctccaagccactgaagggcgcccgcatcgctggctgcctgcacatgaccgtggagacggccgtcctcattgagaccctcgtcaccctgggtgctgaggtgcagtggtccagctgcaacatcttctccacccaggaccatgcggcggctgccattgccaaggctggcattccggtgtatgcctggaagggcgaaacggacgaggagtacctgtggtgcattgagcagaccctgtacttcaaggacgggcccctcaacatgattctggacgacgggggcgacctcaccaacctcatccacaccaagtacccgcagcttctgccaggcatccgaggcatctctgaggagaccacgactggggtccacaacctctacaagatgatggccaatgggatcctcaaggtgcctgccatcaatgtcaatgactccgtcaccaagagcaagtttgacaacctctatggctgccgggagtccctcatagatggcatcaagcgggccacagatgtgatgattgccggcaaggtagcggtggtagcaggctatggtgatgtgggcaagggctgtgcccaggccctgcggggtttcggagcccgcgtcatcatcaccgagattgaccccatcaacgcactgcaggctgccatggagggctatgaggtgaccaccatggatgaggcctgtcaggagggcaacatctttgtcaccaccacaggctgtattgacatcatccttggccggcactttgagcagatgaaggatgatgccattgtgtgtaacattggacactttgacgtggagatcgatgtcaagtggctcaacgagaacgccgtggagaaggtgaacatcaagccgcaggtggaccggtatcggttgaagaatgggcgccgcatcatcctgctggccgagggtcggctggtcaacctgggttgtgccatgggccaccccagcttcgtgatgagtaactccttcaccaaccaggtgatggcgcagatcgagctgtggacccatccagacaagtaccccgttggggttcatttcctgcccaagaagctggatgaggcagtggctgaagcccacctgggcaagctgaatgtgaagttgaccaagctaactgagaagcaagcccagtacctgggcatgtcctgtgatggccccttcaagccggatcactaccgctactgagagccagacaggtccagtggttcttcagcccatgacagatgagaaggggctatattgaagggcaaagaggaactgttgtttgaattttcctgagagcctggcttagtgctgggccttctcttaaacctcattacaatgaggttagtacttttagtccctgttttacaggggttagaatagactgttaaggggcaactgagaaagaacagagaagtgacagctaggggttgagaggggccagaaaaacatgaatgcaggcagatttcgtgaaatctgccaccactttataaccagatggttcctttcacaaccctgggtcaaaaagagaataatttggcctataatgttaaaagaaagcaggaaggtgggtaaataaaaatcttggtgcctggaa

SEQ ID NO: 448043 - DNA, 1891 bp, Homo sapiens
agatatttaaaggcgtcggcgccacgcgcatatccctgctcggcgctgcccgcccagttcctgttcccagactgaggcccagcccccttcgcccgtttccatcacgagtgccgccagcatgtctgacaaactgccctacaaagtcgccgacatcggcctggctgcctggggacgcaaggccctggacattgctgagaacgagatgccgggcctgatgcgtatgcgggagcggtactcggcctccaagccactgaagggcgcccgcatcgctggctgcctgcacatgaccgtggagacggccgtcctcattgagaccctcgtcaccctgggtgctgaggtgcagtggtccagctgcaacatcttctccacccaggaccatgcggcggctgccattgccaaggctggcattccggtgtatgcctggaagggcgaaacggacgaggagtacctgtggtgcattgagcagaccctgtacttcaaggacgggcccctcaacatgattctggacgacgggggcgacctcaccaacctcatccacaccaagtacccgcagcttctgccaggcatccgaggcatctctgaggagaccacgactggggtccacaacctctacaagatgatggccaatgggatcctcaaggtgcctgccatcaatgtcaatgactccgtcaccaagagcaagtttgacaacctctatggctgccgggagtccctcatagatggcatcaagcgggccacagatgtgatgattgccggcaaggtagcggtggtagcaggctatggtgatgtgggcaagggctgtgcccaggccctgcggggtttcggagcccgcgtcatcatcaccgagattgaccccatcaacgcactgcaggctgccatggagggctatgaggtgaccaccatggatgaggcctgtcaggagggcaacatctttgtcaccaccacaggctgtattgacatcatccttggccggcactttgagcagatgaaggatgatgccattgtgtgtaacattggacactttgacgtggagatcgatgtcaagtggctcaacgagaacgccgtggagaaggtgaacatcaagccgcaggtggaccggtatcggttgaagaatgggcgccgcatcatcctgctggccgagggtcggctggtcaacctgggttgtgccatgggccaccccagcttcgtgatgagtaactccttcaccaaccaggtgatggcgcagatcgagctgtggacccatccagacaagtaccccgttggggttcatttcctgcccaagaagctggatgaggcagtggctgaagcccacctgggcaagctgaatgtgaagttgaccaagctaactgagaagcaagcccagtacctgggcatgtcctgtgatggccccttcaagccggatcactaccgctactgagagccagaaggcggagccaggtgtacggggtggaacatgaaagcggaccaggagcgtgaccgctgaagcacagcatcacagggagatggtcaggcctctggaggctgcgggtgggcctgactgatgtcaggccttccacaagaggtggtggagcagagtcttctctaactcccccggggaaagggagactccctttctcggtctgctaagtaaccggtgccttcccgagcactgatgctaccactagaccaaggtccactaggtaatgggtgccttcccaggtgctggcattactgctagaccaggaagccctctagtggccctgtccgggcgtaacagagggctcacactcttgtcttctggtcacttgctcaccgtgtcccttcagctcctatctctgtatggcctggtttttcctaggttataattgtagaacaaagattattataatattggaataaagagtaatgctac

SEQ ID NO: 448044 - DNA, 2081 bp, Homo sapiens
agatatttaaaggcgtcggcgccacgcgcatatccctgctcggcgctgcccgcccagttcctgttcccagactgaggcccagcccccttcgcccgtttccatcacgagtgccgccagcatgtctgacaaactgccctacaaagtcgccgacatcggcctggctgcctggggacgcaaggccctggacattgctgagaacgagatgccgggcctgatgcgtatgcgggagcggtactcggcctccaagccactgaagggcgcccgcatcgctggctgcctgcacatgaccgtggagacggccgtcctcattgagaccctcgtcaccctgggtgctgaggtgcagtggtccagctgcaacatcttctccacccaggaccatgcggcggctgccattgccaaggctggcattccggtgtatgcctggaagggcgaaacggacgaggagtacctgtggtgcattgagcagaccctgtacttcaaggacgggcccctcaacatgattctggacgacgggggcgacctcaccaacctcatccacaccaagtacccgcagcttctgccaggcatccgaggcatctctgaggagaccacgactggggtccacaacctctacaagatgatggccaatgggatcctcaaggtgcctgccatcaatgtcaatgactccgtcaccaagagcaagtttgacaacctctatggctgccgggagtccctcatagatggcatcaagcgggccacagatgtgatgattgccggcaaggtagcggtggtagcaggctatggtgatgtgggcaagggctgtgcccaggccctgcggggtttcggagcccgcgtcatcatcaccgagattgaccccatcaacgcactgcaggctgccatggagggctatgaggtgaccaccatggatgaggcctgtcaggagggcaacatctttgtcaccaccacaggctgtattgacatcatccttggccggcactttgagcagatgaaggatgatgccattgtgtgtaacattggacactttgacgtggagatcgatgtcaagtggctcaacgagaacgccgtggagaaggtgaacatcaagccgcaggtggaccggtatcggttgaagaatgggcgccgcatcatcctgctggccgagggtcggctggtcaacctgggttgtgccatgggccaccccagcttcgtgatgagtaactccttcaccaaccaggtgatggcgcagatcgagctgtggacccatccagacaagtaccccgttggggttcatttcctgcccaagaagctggatgaggcagtggctgaagcccacctgggcaagctgaatgtgaagttgaccaagctaactgagaagcaagcccagtacctgggcatgtcctgtgatggccccttcaagccggatcactaccgctactgagagccagccctgccaagcaccaatggccagagacctgggggttcttggtaaagctcatccctgtgaaggacagtgaacacagatcaagaagtatcagctggaccccagcatggaggagcaactgcagacttcagcagactcattcaggtcaatcacttgatgtggcctcttactggcaacattagccatggattttgtacccttaggagctatgatgaaaaaaacaacacaagattaaatcaaatgcgagagaaaataatgtgcaaacaagagatgcggtaaacatgaaatatatgaggatactgtgggtataacatgacatactgttttacagtaaactgtttgttgttgtttttgttgttgtttttctgagtctcgctctgtcacccaggctggagtacagtggcgcaatctcggctcactgcaacctctgcctcctgggttcaaatgattctcctggctcagcctcagcctcagcctcccgagtagctgggattataggcgcctgccaccacgcccggcgaatttttgtatttttagtagagatggggtttcgccatgttggtcaggctggtttataggaccactgtcatatatgcagtccgtcatatacacttgggcaacagagtgaggaagaaagaaaggaaagaaaggaaggaaggaa

SEQ ID NO: 448045 - DNA, 1190 bp, Homo sapiens
  misc_feature (998)..(998): n is a, c, g, or t
  misc_feature (1000)..(1002): n is a, c, g, or t
  misc_feature (1004)..(1004): n is a, c, g, or t
  misc_feature (1008)..(1008): n is a, c, g, or t
  misc_feature (1018)..(1018): n is a, c, g, or t
  misc_feature (1028)..(1028): n is a, c, g, or t
  misc_feature (1032)..(1032): n is a, c, g, or t
agatatttaaaggcgtcggcgccacgcgcatatccctgctcggcgctgcccgcccagttcctgttcccagactgaggcccagcccccttcgcccgtttccatcacgagtgccgccagcatgtctgacaaactgccctacaaagtcgccgacatcggcctggctgcctggggacgcaaggccctggacattgctgagaacgagatgccgggcctgatgcgtatgcgggagcggtactcggcctccaagccactgaagggcgcccgcatcgctggctgcctgcacatgaccgtggagacggccgtcctcattgagaccctcgtcaccctgggtgctgaggtgcagtggtccagctgcaacatcttctccacccaggaccatgcggcggctgccattgccaaggctggcattccggtgtatgcctggaagggcgaaacggacgaggagtacctgtggtgcattgagcagaccctgtacttcaaggacgggcccctcaacatgattctggacgacgggggcgacctcaccaacctcatccacaccaagtacccgcagcttctgccaggcatccgaggcatctctgaggagaccacgactggggtccacaacctctacaagatgatggccaatgggatcctcaaggtgcctgccatcaatgtcaatgactccgtcaccaagagcaagtttgacaacctctatggctgccgggagtccctcatagatggcatcaagcgggccacagatgtgatgattgccggcaaggtagcggtggtagcaggctatggtgatgtgggcaagggctgtgcccaggccctgcggggtttcggagcccgcgtcatcatcaccgagattgaccccatcaacgcactgcaggctgccatggagggctatgaggtgaccaccatggatgaggcctgtcaggagggcaacatctttgtcaccaccacaggctgtattgacatcatccttggccgcctttgagcgttgagttgtgccttgngnnncntggnccttgccggngatcgggcantggncacgggacgcgggggagggactccagcccgggacgcctcggtgaaggggccgctccgtggcgggcgggcccggggcggcccctggggactccccacgtggcgcggtgccccacccgggttccacgtgggggccggtggtcaacctggccccccgcgct

SEQ ID NO: 448046 - DNA, 1336 bp, Homo sapiens
agatatttaaaggcgtcggcgccacgcgcatatccctgctcggcgctgcccgcccagttcctgttcccagactgaggcccagcccccttcgcccgtttccatcacgagtgccgccagcatgtctgacaaactgccctacaaagtcgccgacatcggcctggctgcctggggacgcaaggccctggacattgctgagaacgagatgccgggcctgatgcgtatgcgggagcggtactcggcctccaagccactgaagggcgcccgcatcgctggctgcctgcacatgaccgtggagacggccgtcctcattgagaccctcgtcaccctgggtgctgaggtgcagtggtccagctgcaacatcttctccacccaggaccatgcggcggctgccattgccaaggctggcattccggtgtatgcctggaagggcgaaacggacgaggagtacctgtggtgcattgagcagaccctgtacttcaaggacgggcccctcaacatgattctggacgacgggggcgacctcaccaacctcatccacaccaagtacccgcagcttctgccaggcatccgaggcatctctgaggagaccacgactggggtccacaacctctacaagatgatggccaatgggatcctcaaggtgcctgccatcaatgtcaatgactccgtcaccaagagcaagtttgacaacctctatggctgccgggagtccctcatagatggcatcaagcgggccacagatgtgatgattgccggcaaggtagcggtggtagcaggctatggtgatgtgggcaagggctgtgcccaggccctgcggggtttcggagcccgcgtcatcatcaccgagattgaccccatcaacgcactgcaggctgccatggagggctatgaggtgaccaccatggatgaggcctgtcaggagggcaacatctttgtcaccaccacaggctgtattgacatcatccttggccggtaggtgccagatggggggtcccggggagtgagggaggagggcagagttgggacagctttctgtccctgacaatctcccacggtcttgggctgcctgagcactttgagcagatgaaggatgatgccattgtgtgtaacattggacactttgacgtggagatcgatgtcaagtggctcaacgagaacgccgtggagaaggtgaacatcaagccgcaggtgagaagctcccgccttgccagtgggctgggcagatgggagtgcagaggagtgctggctgccagggaggagagctgaggagatggtggcaacctgtgcagggggatggggagaagagggcctagcatcagagccagccagacgtggc

SEQ ID NO: 448047 - DNA, 824 bp, Homo sapiens
  misc_feature (34)..(34): n is a, c, g, or t
gcgcggaccccaagaccttaagcccaagggtccntagccggatcactaccgctactgagagccaggtctgcgtttcaccctccagctgctgtccttgcccaggccccacctctcctccctaagagctaatggcaccaactttgtgattggtttgtcagtgtcccccatcgactctctggggctgatcacttagtttttggcctctgctgcagccgtcatactgttccaaatgtggcagcgggaacagagtaccctcttcaagccccggtcatgatggaggtcccagccacagggaaccatgagctcagtggtcttggaacagctcactaagtcagtccttccttagcctggaagtcagtagtggagtcacaaagcccatgtgttttgccatctaggccttcacctggtctgtggacttatacctgtgtgcttggtttacaggtccagtggttcttcagcccatgacagatgagaaggggctatattgaagggcaaagaggaactgttgtttgaattttcctgagagcctggcttagtgctgggccttctcttaaacctcattacaatgaggttagtacttttagtccctgttttacaggggttagaatagactgttaaggggcaactgagaaagaacagagaagtgacagctaggggttgagaggggccagaaaaacatgaatgcaggcagatttcgtgaaatctgccaccactttataaccagatggttcctttcacaaccctgggtcaaaaagagaataatttggcctataatgttaaaagaaagcaggaaggtgggtaaataaaaatcttggtgcctggaa

SEQ ID NO: 448048 - DNA, 822 bp, Homo sapiens
tcttcgcgactctgaggatcccccaggtccttaagccggatcactaccgctactgagagccaggtctgcgtttcaccctccagctgctgtccttgcccaggccccacctctcctccctaagagctaatggcaccaactttgtgattggtttgtcagtgtcccccatcgactctctggggctgatcacttagtttttggcctctgctgcagccgtcatactgttccaaatgtggcagcgggaacagagtaccctcttcaagccccggtcatgatggaggtcccagccacagggaaccatgagctcagtggtcttggaacagctcactaagtcagtccttccttagcctggaagtcagtagtggagtcacaaagcccatgtgttttgccatctaggccttcacctggtctgtggacttatacctgtgtgcttggtttacaggtccagtggttcttcagcccatgacagatgagaaggggctatattgaagggcaaagaggaactgttgtttgaattttcctgagagcctggcttagtgctgggccttctcttaaacctcattacaatgaggttagtacttttagtccctgttttacaggggttagaatagactgttaaggggcaactgagaaagaacagagaagtgacagctaggggttgagaggggccagaaaaacatgaatgcaggcagatttcgtgaaatctgccaccactttataaccagatggttcctttcacaaccctgggtcaaaaagagaataatttggcctataatgttaaaagaaagcaggaaggtgggtaaataaaaatcttggtgcctggaa

SEQ ID NO: 448049 - DNA, 654 bp, Homo sapiens
  misc_feature (34)..(34): n is a, c, g, or t
atcgagctcggctaccatccccactgtgtgctcngtttacaggtccagtggtttcagcccatgacagatgagaaggggctatattgaagggcaaagaggaactgtggaggtcccagccacagggaaccatgagctcagtggtcttggaacagctcactaagtcagtccttccttagcctggaagtcagtagtggagtcacaaagcccatgtgttttgccatctaggccttcacctggtctgtggacttatacctgtgtgcttggtttacaggtccagtggttcttcagcccatgacagatgagaaggggctatattgaagggcaaagaggaactgttgtttgaattttcctgagagcctggcttagtgctgggccttctcttaaacctcattacaatgaggttagtacttttagtccctgttttacaggggttagaatagactgttaaggggcaactgagaaagaacagagaagtgacagctaggggttgagaggggccagaaaaacatgaatgcaggcagatttcgtgaaatctgccaccactttataaccagatggttcctttcacaaccctgggtcaaaaagagaataatttggcctataatgttaaaagaaagcaggaaggtgggtaaataaaaatcttggtgcctggaa

SEQ ID NO: 448050 - DNA, 588 bp, Homo sapiens
catcttcagttcttagaactgggacttaatggcaagctgggtcaaatgttctaggatggacccacgtgatgccgtgcagagtgatttggtcaacagtccaaagttaatgatccacaagtcagtagtggagtcacaaagcccatgtgttttgccatctaggccttcacctggtctgtggacttatacctgtgtgcttggtttacaggtccagtggttcttcagcccatgacagatgagaaggggctatattgaagggcaaagaggaactgttgtttgaattttcctgagagcctggcttagtgctgggccttctcttaaacctcattacaatgaggttagtacttttagtccctgttttacaggggttagaatagactgttaaggggcaactgagaaagaacagagaagtgacagctaggggttgagaggggccagaaaaacatgaatgcaggcagatttcgtgaaatctgccaccactttataaccagatggttcctttcacaaccctgggtcaaaaagagaataatttggcctataatgttaaaagaaagcaggaaggtgggtaaataaaaatcttggtgcctggaa

SEQ ID NO: 448051 - DNA, 455 bp, Homo sapiens
tcagctcgaccacatatgctccaccgctccggcgactgattgatattctaaccctgttctctttagtcacaggtccagtggttcttcagcccatgacagatgagaaggggctatattgaagggcaaagaggaactgttgtttgaattttcctgagagcctggcttagtgctgggccttctcttaaacctcattacaatgaggttagtacttttagtccctgttttacaggggttagaatagactgttaaggggcaactgagaaagaacagagaagtgacagctaggggttgagaggggccagaaaaacatgaatgcaggcagatttcgtgaaatctgccaccactttataaccagatggttcctttcacaaccctgggtcaaaaagagaataatttggcctataatgttaaaagaaagcaggaaggtgggtaaataaaaatcttggtgcctggaa

SEQ ID NO: 448052 - DNA, 633 bp, Homo sapiens
agatatttaaaggcgtcggcgccacgcgcatatccctgctcggcgctgcccgcccagttcctgttcccagactgaggcccagcccccttcgcccgtttccatcacgagtgccgccagcatgtctgacaaactgccctacaaagtcgccgacatcggcctggctgcctggggacgcaaggccctggacattgctgagaacgagatgccgggcctgatgcgtatgcgggagcggtactcggcctccaagccactgaagggcgcccgcatcgctggctgcctgcacatgaccgtggagacggccgtcctcattgagaccctcgtcaccctgggtgctgaggtgcagtggtccagctgcaacatcttctccacccaggaccatgcggcggctgccattgccaaggctggcattccggtgtatgcctggaagggcgaaacggacgaggagtacctgtggtgcattgagcagaccctgtacttcaaggacgggcccctcaacatgattctggacgacgggggcgacctcaccaacctcatccgtttcgcccttccaggcatacaccggaatgccagccttggcaatggcagccgccgcatggtcctgggtggagaagatgttgcacagtcaccctgcac

SEQ ID NO: 448053 - DNA, 2183 bp, Homo sapiens
agatatttaaaggcgtcggcgccacgcgcatatccctgctcggcgctgcccgcccagttcctgttcccagactgaggcccagcccccttcgcccgtttccatcacgagtgccgccagcatgtctgacaaactgccctacaaagtcgccgacatcggcctggctgcctggggacgcaaggccctggacattgctgagaacgagatgccgggcctgatgcgtatgcgggagcggtactcggcctccaagccactgaagggcgcccgcatcgctggctgcctgcacatgaccgtggagacggccgtcctcattgagaccctcgtcaccctgggtgctgaggtgcagtggtccagctgcaacatcttctccacccaggaccatgcggcggctgccattgccaaggctggcattccggtgtatgcctggaagggcgaaacggacgaggagtacctgtggtgcattgagcagaccctgtacttcaaggacgggcccctcaacatgattctggacgacgggggcgacctcaccaacctcatccacaccaagtacccgcagcttctgccaggcatccgaggcatctctgaggagaccacgactggggtccacaacctctacaagatgatggccaatgggatcctcaaggtgcctgccatcaatgtcaatgactccgtcaccaagagcaagtttgacaacctctatggctgccgggagtccctcatagatggcatcaagcgggccacagatgtgatgattgccggcaaggtagcggtggtagcaggctatggtgatgtgggcaagggctgtgcccaggccctgcggggtttcggagcccgcgtcatcatcaccgagattgaccccatcaacgcactgcaggctgccatggagggctatgaggtgaccaccatggatgaggcctgtcaggagggcaacatctttgtcaccaccacaggctgtattgacatcatccttggccggcactttgagcagatgaaggatgatgccattgtgtgtaacattggacactttgacgtggagatcgatgtcaagtggctcaacgagaacgccgtggagaaggtgaacatcaagccgcaggtggaccggtatcggttgaagaatgggcgccgcatcatcctgctggccgagggtcggctggtcaacctgggttgtgccatgggccaccccagcttcgtgatgagtaactccttcaccaaccaggtgatggcgcagatcgagctgtggacccatccagacaagtaccccgttggggttcatttcctgcccaagaagctggatgaggcagtggctgaagcccacctgggcaagctgaatgtgaagttgaccaagctaactgagaagcaagcccagtacctgggcatgtcctgtgatggccccttcaagccggatcactaccgctactgagagccaggtctgcgtttcaccctccagctgctgtccttgcccaggccccacctctcctccctaagagctaatggcaccaactttgtgattggtttgtcagtgtcccccatcgactctctggggctgatcacttagtttttggcctctgctgcagccgtcatactgttccaaatgtggcagcgggaacagagtaccctcttcaagccccggtcatgatggaggtcccagccacagggaaccatgagctcagtggtcttggaacagctcactaagtcagtccttccttagcctggaagtcagtagtggagtcacaaagcccatgtgttttgccatctaggccttcacctggtctgtggacttatacctgtgtgcttggtttacaggtccagtggttcttcagcccatgacagatgagaaggggctatattgaagggcaaagaggaactgttgtttgaattttcctgagagcctggcttagtgctgggccttctcttaaacctcattacaatgaggttagtacttttagtccctgttttacaggggttagaatagactgttaaggggcaactgagaaagaacagagaagtgacagctaggggttgagaggggccagaaaaacatgaatgcaggcagatttcgtgaaatctgccaccactttataaccagatggttcctttcacaaccctgggtcaaaaagagaataatttggcctataatgttaaaagaaagcaggaaggtgggtaaataaaaatcttggtgcctggaa

SEQ ID NO: 448054 - DNA, 2161 bp, Homo sapiens
cggacgcgtgggtcgacccacgcgtcgcaaagtcgttcctgttcccagactgaggcccagcccccttcgcccgtttccatcacgagtgccgccagcatgtctgacaaactgccctacaaagtcgccgacatcggcctggctgcctggggacgcaaggccctggacattgctgagaacgagatgccgggcctgatgcgtatgcgggagcggtactcggcctccaagccactgaagggcgcccgcatcgctggctgcctgcacatgaccgtggagacggccgtcctcattgagaccctcgtcaccctgggtgctgaggtgcagtggtccagctgcaacatcttctccacccaggaccatgcggcggctgccattgccaaggctggcattccggtgtatgcctggaagggcgaaacggacgaggagtacctgtggtgcattgagcagaccctgtacttcaaggacgggcccctcaacatgattctggacgacgggggcgacctcaccaacctcatccacaccaagtacccgcagcttctgccaggcatccgaggcatctctgaggagaccacgactggggtccacaacctctacaagatgatggccaatgggatcctcaaggtgcctgccatcaatgtcaatgactccgtcaccaagagcaagtttgacaacctctatggctgccgggagtccctcatagatggcatcaagcgggccacagatgtgatgattgccggcaaggtagcggtggtagcaggctatggtgatgtgggcaagggctgtgcccaggccctgcggggtttcggagcccgcgtcatcatcaccgagattgaccccatcaacgcactgcaggctgccatggagggctatgaggtgaccaccatggatgaggcctgtcaggagggcaacatctttgtcaccaccacaggctgtattgacatcatccttggccggcactttgagcagatgaaggatgatgccattgtgtgtaacattggacactttgacgtggagatcgatgtcaagtggctcaacgagaacgccgtggagaaggtgaacatcaagccgcaggtggaccggtatcggttgaagaatgggcgccgcatcatcctgctggccgagggtcggctggtcaacctgggttgtgccatgggccaccccagcttcgtgatgagtaactccttcaccaaccaggtgatggcgcagatcgagctgtggacccatccagacaagtaccccgttggggttcatttcctgcccaagaagctggatgaggcagtggctgaagcccacctgggcaagctgaatgtgaagttgaccaagctaactgagaagcaagcccagtacctgggcatgtcctgtgatggccccttcaagccggatcactaccgctactgagagccaggtctgcgtttcaccctccagctgctgtccttgcccaggccccacctctcctccctaagagctaatggcaccaactttgtgattggtttgtcagtgtcccccatcgactctctggggctgatcacttagtttttggcctctgctgcagccgtcatactgttccaaatgtggcagcgggaacagagtaccctcttcaagccccggtcatgatggaggtcccagccacagggaaccatgagctcagtggtcttggaacagctcactaagtcagtccttccttagcctggaagtcagtagtggagtcacaaagcccatgtgttttgccatctaggccttcacctggtctgtggacttatacctgtgtgcttggtttacaggtccagtggttcttcagcccatgacagatgagaaggggctatattgaagggcaaagaggaactgttgtttgaattttcctgagagcctggcttagtgctgggccttctcttaaacctcattacaatgaggttagtacttttagtccctgttttacaggggttagaatagactgttaaggggcaactgagaaagaacagagaagtgacagctaggggttgagaggggccagaaaaacatgaatgcaggcagatttcgtgaaatctgccaccactttataaccagatggttcctttcacaaccctgggtcaaaaagagaataatttggcctataatgttaaaagaaagcaggaaggtgggtaaataaaaatcttggtgcctggaa

SEQ ID NO: 448055 - DNA, 2267 bp, Homo sapiens
agatatttaaaggcgtcggcgccacgcgcatatccctgctcggcgctgcccgcccagttcctgttcccagactgaggcccagcccccttcgcccgtttccatcacgagtgccgccagcatgtctgacaaactgccctacaaagtcgccgacatcggcctggctgcctggggacgcaaggccctggacattgctgagaacgagatgccgggcctgatgcgtatgcgggagcggtactcggcctccaagccactgaagggcgcccgcatcgctggctgcctgcacatgaccgtggagacggccgtcctcattgagaccctcgtcaccctgggtgctgaggtgcagtggtccagctgcaacatcttctccacccaggaccatgcggcggctgccattgccaaggctggcattccggtgtatgcctggaagggcgaaacggacgaggagtacctgtggtgcattgagcagaccctgtacttcaaggacgggcccctcaacatgattctggacgacgggggcgacctcaccaacctcatccacaccaagtacccgcagcttctgccaggcatccgaggcatctctgaggagaccacgactggggtccacaacctctacaagatgatggccaatgggatcctcaaggtgcctgccatcaatgtcaatgactccgtcaccaagagcaagtttgacaacctctatggctgccgggagtccctcatagatggcatcaagcgggccacagatgtgatgattgccggcaaggtagcggtggtagcaggctatggtgatgtgggcaagggctgtgcccaggccctgcggggtttcggagcccgcgtcatcatcaccgagattgaccccatcaacgcactgcaggctgccatggagggctatgaggtgaccaccatggatgaggcctgtcaggagggcaacatctttgtcaccaccacaggctgtattgacatcatccttggccggcactttgagcagatgaaggatgatgccattgtgtgtaacattggacactttgacgtggagatcgatgtcaagtggctcaacgagaacgccgtggagaaggtgaacatcaagccgcaggtggaccggtatcggttgaagaatgggcgccgcatcatcctgctggccgagggtcggctggtcaacctgggttgtgccatgggccaccccagcttcgtgatgagtaactccttcaccaaccaggtgatggcgcagatcgagctgtggacccatccagacaagtaccccgttggggttcatttcctgcccaagaagctggatgaggcagtggctgaagcccacctgggcaagctgaatgtgaagttgaccaagctaactgagaagcaagcccagtacctgggcatgtcctgtgatggccccttcaagccggatcactaccgctactgagagccaggtctgcgtttcaccctccagctgctgtccttgcccaggccccacctctcctccctaagagctaatggcaccaactttgtgattggtttgtcagtgtcccccatcgactctctggggctgatcacttagtttttggcctctgctgcagccgtcatactgttccaaatgtggcagcgggaacagagtaccctcttcaagccccggtcatgatggaggtcccagccacagggaaccatgagctcagtggtcttggaacagctcactaagtcagtccttccttagcctggaagtcagtagtggagtcacaaagcccatgtgttttgccatctaggccttcacctggtctgtggacttatacctgtgtgcttggtttacaggtccagtggttcttcagcccatgacagatgagaaggggctatattgaagggcaaagaggaactgttgtttgaattttcctgagagcctggcttagtgctgggccttctcttaaacctcattacaatgaggttagtacttttagtccctgttttacaggggttagaatagactgttaaggggcaactgagaaagaacagagaagtgacagctaggggttgagaggggccagaaaaacatgaatgcaggcagatttcgtgaaatctgccaccactttataaccagatggttcctttcacaaccctgggtcaaaaagagaataatttggcctataatgttaaaagaaagcaggaaggtgggtaaataaaaatcttggtgcctggaaaaacaaaaaaaaaaaaaaaaaaaaaaaaaaaaaaaaaaaaaaaaaaaaaaaaaaaaaaaaaaagggggggcgcgcgccgccgaa

SEQ ID NO: 448056 - DNA, 2365 bp, Homo sapiens
agatatttaaaggcgtcggcgccacgcgcatatccctgctcggcgctgcccgcccagttcctgttcccagactgaggcccagcccccttcgcccgtttccatcacgagtgccgccagcatgtctgacaaactgccctacaaagtcgccgacatcggcctggctgcctggggacgcaaggccctggacattgctgagaacgagatgccgggcctgatgcgtatgcgggagcggtactcggcctccaagccactgaagggcgcccgcatcgctggctgcctgcacatgaccgtggagacggccgtcctcattgagaccctcgtcaccctgggtgctgaggtgcagtggtccagctgcaacatcttctccacccaggaccatgcggcggctgccattgccaaggctggcattccggtgtatgcctggaagggcgaaacggacgaggagtacctgtggtgcattgagcagaccctgtacttcaaggacgggcccctcaacatgattctggacgacgggggcgacctcaccaacctcatccacaccaagtacccgcagcttctgccaggcatccgaggcatctctgaggagaccacgactggggtccacaacctctacaagatgatggccaatgggatcctcaaggtgcctgccatcaatgtcaatgactccgtcaccaagagcaagtttgacaacctctatggctgccgggagtccctcatagatggcatcaagcgggccacagatgtgatgattgccggcaaggtagcggtggtagcaggctatggtgatgtgggcaagggctgtgcccaggccctgcggggtttcggagcccgcgtcatcatcaccgagattgaccccatcaacgcactgcaggctgccatggagggctatgaggtgaccaccatggatgaggcctgtcaggagggcaacatctttgtcaccaccacaggctgtattgacatcatccttggccggcactttgagcagatgaaggatgatgccattgtgtgtaacattggacactttgacgtggagatcgatgtcaagtggctcaacgagaacgccgtggagaaggtgaacatcaagccgcaggtggaccggtatcggttgaagaatgggcgccgcatcatcctgctggccgagggtcggctggtcaacctgggttgtgccatgggccaccccagcttcgtgatgagtaactccttcaccaaccaggtgatggcgcagatcgagctgtggacccatccagacaagtaccccgttggggttcatttcctgcccaagaagctggatgaggcagtggctgaagcccacctgggcaagctgaatgtgaagttgaccaagctaactgagaagcaagcccagtacctgggcatgtcctgtgatggccccttcaagccggatcactaccgctactgagagccaggtctgcgtttcaccctccagctgctgtccttgcccaggccccacctctcctccctaagagctaatggcaccaactttgtgattggtttgtcagtgtcccccatcgactctctggggctgatcacttagtttttggcctctgctgcagccgtcatactgttccaaatgtggcagcgggaacagagtaccctcttcaagccccggtcatgatggaggtcccagccacagggaaccatgagctcagtggtcttggaacagctcactaagtcagtccttccttagcctggaagtcagtagtggagtcacaaagcccatgtgttttgccatctaggccttcacctggtctgtggacttatacctgtgtgcttggtttacaggtccagtggttcttcagcccatgacagatgagaaggggctatattgaagggcaaagaggaactgttgtttgaattttcctgagagcctggcttagtgctgggccttctcttaaacctcattacaatgaggttagtacttttagtccctgttttacaggggttagaatagactgttaaggggcaactgagaaagaacagagaagtgacagctaggggttgagaggggtcacccacaaaccccctccattcccacaagcacctcaaatccactgctcacaactggactcatgtttttcaccggattctgacctcctactagctgccaaatcttggtaagtagtgcttgtatccaccaggtactctaaccagaaacagagtcatcctggatacctccctttccctctgcttctctgtcttgctggcgtcttaataagtgctgcttccacattccttgcggtttctcttcatctgctttattgcatcatggcttagtggtcctgctgtagtttcctaacagtcctttggttgacactgttgataccaacaggcattcgccattcacagc

SEQ ID NO: 448057 - DNA, 2281 bp, Homo sapiens
aaaaaaagacactattaagtctggagaatgccatccacatttatggaaacacttgctgtatatctggtgatttacgtgtgtttacacaataatcttcatagagatggacgtaatcccgttatatagagcatgaaactgaggcccttgggaggtgacttgcaaagattctgttgaagtagttcatcaagttgctaccagagtagactgtctccattgtgtggatgctgaaactgaacccagaaagccgacatcggcctggctgcctggggacgcaaggccctggacattgctgagaacgagatgccgggcctgatgcgtatgcgggagcggtactcggcctccaagccactgaagggcgcccgcatcgctggctgcctgcacatgaccgtggagacggccgtcctcattgagaccctcgtcaccctgggtgctgaggtgcagtggtccagctgcaacatcttctccacccaggaccatgcggcggctgccattgccaaggctggcattccggtgtatgcctggaagggcgaaacggacgaggagtacctgtggtgcattgagcagaccctgtacttcaaggacgggcccctcaacatgattctggacgacgggggcgacctcaccaacctcatccacaccaagtacccgcagcttctgccaggcatccgaggcatctctgaggagaccacgactggggtccacaacctctacaagatgatggccaatgggatcctcaaggtgcctgccatcaatgtcaatgactccgtcaccaagagcaagtttgacaacctctatggctgccgggagtccctcatagatggcatcaagcgggccacagatgtgatgattgccggcaaggtagcggtggtagcaggctatggtgatgtgggcaagggctgtgcccaggccctgcggggtttcggagcccgcgtcatcatcaccgagattgaccccatcaacgcactgcaggctgccatggagggctatgaggtgaccaccatggatgaggcctgtcaggagggcaacatctttgtcaccaccacaggctgtattgacatcatccttggccggcactttgagcagatgaaggatgatgccattgtgtgtaacattggacactttgacgtggagatcgatgtcaagtggctcaacgagaacgccgtggagaaggtgaacatcaagccgcaggtggaccggtatcggttgaagaatgggcgccgcatcatcctgctggccgagggtcggctggtcaacctgggttgtgccatgggccaccccagcttcgtgatgagtaactccttcaccaaccaggtgatggcgcagatcgagctgtggacccatccagacaagtaccccgttggggttcatttcctgcccaagaagctggatgaggcagtggctgaagcccacctgggcaagctgaatgtgaagttgaccaagctaactgagaagcaagcccagtacctgggcatgtcctgtgatggccccttcaagccggatcactaccgctactgagagccaggtctgcgtttcaccctccagctgctgtccttgcccaggccccacctctcctccctaagagctaatggcaccaactttgtgattggtttgtcagtgtcccccatcgactctctggggctgatcacttagtttttggcctctgctgcagccgtcatactgttccaaatgtggcagcgggaacagagtaccctcttcaagccccggtcatgatggaggtcccagccacagggaaccatgagctcagtggtcttggaacagctcactaagtcagtccttccttagcctggaagtcagtagtggagtcacaaagcccatgtgttttgccatctaggccttcacctggtctgtggacttatacctgtgtgcttggtttacaggtccagtggttcttcagcccatgacagatgagaaggggctatattgaagggcaaagaggaactgttgtttgaattttcctgagagcctggcttagtgctgggccttctcttaaacctcattacaatgaggttagtacttttagtccctgttttacaggggttagaatagactgttaaggggcaactgagaaagaacagagaagtgacagctaggggttgagaggggccagaaaaacatgaatgcaggcagatttcgtgaaatctgccaccactttataaccagatggttcctttcacaaccctgggtcaaaaagagaataatttggcctataatgttaaaagaaagcaggaaggtgggtaaataaaaatcttggtgcctggaa

SEQ ID NO: 448058 - DNA, 2877 bp, Homo sapiens
gtggcgggggctgcagggccgactcggggctctctggaccccctggaatcgcagcctcggcgcgtttctggccgcgcgaagccagctggaagttggagttctcgcgcggccatgagcgggccgttccgggtggccgtggactacaagtcccagcatgccccgcgacgccggggccgccgcgcggtctgcgagccgcaaactggcggcgtgctccgcgggagagcacacctggccacggcctgggacggctggcacctgccggaccctgctcggggggcctgcgcccggcctcctaggcctggaccggaccctgtccagctgggcggccccgacgagcgtccacccctctctgggcctcctacagggacggcgagggcaccccggagggtgtatgaggagaggcctggaaagcgagccccaggccggctccgatcctcctctcccctgggactttgggccagttacccaacctgtggggtcccccacccctccagcaggggcagccttgcagaaatctcgaagaaaatttggagtggtttgaaaaatcctgctgtcccaccgattgaagtgtaatacagggatagttaacgtttacttagtgtttcctgtgggatcggcactgccttctagctttattctagtctcatggctctgtagggaaactgttctcattttatgatgagaatcctgaggcagaggtaacttgccctcagtcttacagctggtggtgatggagcaagattggaacgcaggccatctagatctctgagcgcaccctttcaccactgtgtgcaagcgaatacacgcggaacaatcctagtgaattttcagcaaaaaccaccgacatcggcctggctgcctggggacgcaaggccctggacattgctgagaacgagatgccgggcctgatgcgtatgcgggagcggtactcggcctccaagccactgaagggcgcccgcatcgctggctgcctgcacatgaccgtggagacggccgtcctcattgagaccctcgtcaccctgggtgctgaggtgcagtggtccagctgcaacatcttctccacccaggaccatgcggcggctgccattgccaaggctggcattccggtgtatgcctggaagggcgaaacggacgaggagtacctgtggtgcattgagcagaccctgtacttcaaggacgggcccctcaacatgattctggacgacgggggcgacctcaccaacctcatccacaccaagtacccgcagcttctgccaggcatccgaggcatctctgaggagaccacgactggggtccacaacctctacaagatgatggccaatgggatcctcaaggtgcctgccatcaatgtcaatgactccgtcaccaagagcaagtttgacaacctctatggctgccgggagtccctcatagatggcatcaagcgggccacagatgtgatgattgccggcaaggtagcggtggtagcaggctatggtgatgtgggcaagggctgtgcccaggccctgcggggtttcggagcccgcgtcatcatcaccgagattgaccccatcaacgcactgcaggctgccatggagggctatgaggtgaccaccatggatgaggcctgtcaggagggcaacatctttgtcaccaccacaggctgtattgacatcatccttggccggcactttgagcagatgaaggatgatgccattgtgtgtaacattggacactttgacgtggagatcgatgtcaagtggctcaacgagaacgccgtggagaaggtgaacatcaagccgcaggtggaccggtatcggttgaagaatgggcgccgcatcatcctgctggccgagggtcggctggtcaacctgggttgtgccatgggccaccccagcttcgtgatgagtaactccttcaccaaccaggtgatggcgcagatcgagctgtggacccatccagacaagtaccccgttggggttcatttcctgcccaagaagctggatgaggcagtggctgaagcccacctgggcaagctgaatgtgaagttgaccaagctaactgagaagcaagcccagtacctgggcatgtcctgtgatggccccttcaagccggatcactaccgctactgagagccaggtctgcgtttcaccctccagctgctgtccttgcccaggccccacctctcctccctaagagctaatggcaccaactttgtgattggtttgtcagtgtcccccatcgactctctggggctgatcacttagtttttggcctctgctgcagccgtcatactgttccaaatgtggcagcgggaacagagtaccctcttcaagccccggtcatgatggaggtcccagccacagggaaccatgagctcagtggtcttggaacagctcactaagtcagtccttccttagcctggaagtcagtagtggagtcacaaagcccatgtgttttgccatctaggccttcacctggtctgtggacttatacctgtgtgcttggtttacaggtccagtggttcttcagcccatgacagatgagaaggggctatattgaagggcaaagaggaactgttgtttgaattttcctgagagcctggcttagtgctgggccttctcttaaacctcattacaatgaggttagtacttttagtccctgttttacaggggttagaatagactgttaaggggcaactgagaaagaacagagaagtgacagctaggggttgagaggggccagaaaaacatgaatgcaggcagatttcgtgaaatctgccaccactttataaccagatggttcctttcacaaccctgggtcaaaaagagaataatttggcctataatgttaaaagaaagcaggaaggtgggtaaataaaaatcttggtgcctggaa

SEQ ID NO: 448059 - DNA, 2033 bp, Homo sapiens
agatatttaaaggcgtcggcgccacgcgcatatccctgctcggcgctgcccgcccagttcctgttcccagactgaggcccagcccccttcgcccgtttccatcacgagtgccgccagcatgtctgacaaactgccctacaaagtcgccgacatcggcctggctgcctggggacgcaaggccctggacattgctgagaacgagatgccgggcctgatgcgtatgcgggagcggtactcggcctccaagccactgaagggcgcccgcatcgctggctgcctgcacatgaccgtggagacggccgtcctcattgagaccctcgtcaccctgggtgctgaggtgcagtggtccagctgcaacatcttctccacccaggaccatgcggcggctgccattgccaaggctggcattccggtgtatgcctggaagggcgaaacggacgaggagtacctgtggtgcattgagcagaccctgtacttcaaggacgggcccctcaacatgattctggacgacgggggcgacctcaccaacctcatccacaccaagtacccgcagcttctgccaggcatccgaggcatctctgaggagaccacgactggggtccacaacctctacaagatgatggccaatgggatcctcaaggtgcctgccatcaatgtcaatgactccgtcaccaagagcaagtttgacaacctctatggctgccgggagtccctcatagatggcatcaagcgggccacagatgtgatgattgccggcaaggtagcggtggtagcaggctatggtgatgtgggcaagggctgtgcccaggccctgcggggtttcggagcccgcgtcatcatcaccgagattgaccccatcaacgcactgcaggctgccatggagggctatgaggtgaccaccatggatgaggcctgtcaggagggcaacatctttgtcaccaccacaggctgtattgacatcatccttggccggcactttgagcagatgaaggatgatgccattgtgtgtaacattggacactttgacgtggagatcgatgtcaagtggctcaacgagaacgccgtggagaaggtgaacatcaagccgcaggtgatggcgcagatcgagctgtggacccatccagacaagtaccccgttggggttcatttcctgcccaagaagctgggcaagctgaatgtgaagttgaccaagctaactgagaagcaagcccagtacctgggcatgtcctgtgatggccccttcaagccggatcactaccgctactgagagccaggtctgcgtttcaccctccagctgctgtccttgcccaggccccacctctcctccctaagagctaatggcaccaactttgtgattggtttgtcagtgtcccccatcgactctctggggctgatcacttagtttttggcctctgctgcagccgtcatactgttccaaatgtggcagcgggaacagagtaccctcttcaagccccggtcatgatggaggtcccagccacagggaaccatgagctcagtggtcttggaacagctcactaagtcagtccttccttagcctggaagtcagtagtggagtcacaaagcccatgtgttttgccatctaggccttcacctggtctgtggacttatacctgtgtgcttggtttacaggtccagtggttcttcagcccatgacagatgagaaggggctatattgaagggcaaagaggaactgttgtttgaattttcctgagagcctggcttagtgctgggccttctcttaaacctcattacaatgaggttagtacttttagtccctgttttacaggggttagaatagactgttaaggggcaactgagaaagaacagagaagtgacagctaggggttgagaggggccagaaaaacatgaatgcaggcagatttcgtgaaatctgccaccactttataaccagatggttcctttcacaaccctgggtcaaaaagagaataatttggcctataatgttaaaagaaagcaggaaggtgggtaaataaaaatcttggtgcctggaa

SEQ ID NO: 448060 - DNA, 1690 bp, Homo sapiens
cccatcaatgtcaatgacttgctcttggtgacggagtcattgacattgatggcaggcaccttgaggatcccattggacatcatcttgtagaggttgtggaccccagtcgtggtctcctcagagatgcctcggatgcctggcagaagctgcgggtactatggtgtggctgactccgtcaccaagagcaagtttgacaacctctatggctgccgggagtccctcatagatggcatcaagcgggccacagatgtgatgattgccggcaaggtagcggtggtagcaggctatggtgatgtgggcaagggctgtgcccaggccctgcggggtttcggagcccgcgtcatcatcaccgagattgaccccatcaacgcactgcaggctgccatggagggctatgaggtgaccaccatggatgaggcctgtcaggagggcaacatctttgtcaccaccacaggctgtattgacatcatccttggccggcactttgagcagatgaaggatgatgccattgtgtgtaacattggacactttgacgtggagatcgatgtcaagtggctcaacgagaacgccgtggagaaggtgaacatcaagccgcaggtggaccggtatcggttgaagaatgggcgccgcatcatcctgctggccgagggtcggctggtcaacctgggttgtgccatgggccaccccagcttcgtgatgagtaactccttcaccaaccaggtgatggcgcagatcgagctgtggacccatccagacaagtaccccgttggggttcatttcctgcccaagaagctggatgaggcagtggctgaagcccacctgggcaagctgaatgtgaagttgaccaagctaactgagaagcaagcccagtacctgggcatgtcctgtgatggccccttcaagccggatcactaccgctactgagagccaggtctgcgtttcaccctccagctgctgtccttgcccaggccccacctctcctccctaagagctaatggcaccaactttgtgattggtttgtcagtgtcccccatcgactctctggggctgatcacttagtttttggcctctgctgcagccgtcatactgttccaaatgtggcagcgggaacagagtaccctcttcaagccccggtcatgatggaggtcccagccacagggaaccatgagctcagtggtcttggaacagctcactaagtcagtccttccttagcctggaagtcagtagtggagtcacaaagcccatgtgttttgccatctaggccttcacctggtctgtggacttatacctgtgtgcttggtttacaggtccagtggttcttcagcccatgacagatgagaaggggctatattgaagggcaaagaggaactgttgtttgaattttcctgagagcctggcttagtgctgggccttctcttaaacctcattacaatgaggttagtacttttagtccctgttttacaggggttagaatagactgttaaggggcaactgagaaagaacagagaagtgacagctaggggttgagaggggccagaaaaacatgaatgcaggcagatttcgtgaaatctgccaccactttataaccagatggttcctttcacaaccctgggtcaaaaagagaataatttggcctataatgttaaaagaaagcaggaaggtgggtaaataaaaatcttggtgcctggaa

SEQ ID NO: 448061 - DNA, 1941 bp, Homo sapiens
agatatttaaaggcgtcggcgccacgcgcatatccctgctcggcgctgcccgcccagttcctgttcccagactgaggcccagcccccttcgcccgtttccatcacgagtgccgccagcatgtctgacaaactgccctacaaagtcgccgacatcggcctggctgcctggggacgcaaggccctggacattgctgagaacgagatgccgggcctgatgcgtatgcgggagcggtactcggcctccaagccactgaagggcgcccgcatcgctggctgcctgcacatgaccgtggagacggccgtcctcattgagaccctcgtcaccctgggtgctgaggtgcagtggtccagctgcaacatcttctccacccaggaccatgcggcggctgccattgccaaggctggcattccggtgtatgcctggaagggcgaaacggacgaggagtacctgtggtgcattgagcagaccctgtacttcaaggacgggcccctcaacatgattctggacgacgggggcgacctcaccaacctcatccacaccaagtacccgcagcttctgccaggcatccgaggcatctctgaggagaccacgactggggtccacaacctctacaagatgatggccaatgggatcctcaaggtgcctgccatcaatgtcaatgactccgtcaccaagagcaagtttgacaacctctatggctgccgggagtccctcatagatggcatcaagcgggccacagatgtgatgattgccggcaaggtagcggtggtagcaggctatggtgatgtgggcaagggctgtgcccaggccctgcggggtttcggagcccgcgtcatcatcaccgagattgaccccatcaacgcactgcaggctgccatggagggctatgaggtgaccaccatggatgaggcctgtcaggagggcaacatctttgtcaccaccacaggctgtattgacatcatccttggccggcactttgagcagatgaaggatgatgccattgtgtgtaacattggacactttgacgtggagatcgatgtcaagtggctcaacgagaacgccgtggagaaggtgaacatcaagccgcaggtggaccggtatcggttgaagaatgggcgccgcatcatcctgctggccgagggtcggctggtcaacctgggttgtgccatgggccaccccagcttcgtgatgagtaactccttcaccaaccaggtgatggcgcagatcgagctgtggacccatccagacaagtaccccgttggggttcatttcctgcccaagaagctggatgaggcagtggctgaagcccacctgggcaagctgaatgtgaagttgaccaagctaactgagaagcaagcccagtacctgggcatgtcctgtgatggccccttcaagccggatcactaccgctactgagagccaggtcaatcacttgatgtggcctcttactggcaacattagccatggattttgtacccttaggagctatgatgaaaaaaacaacacaagattaaatcaaatgcgagagaaaataatgtgcaaacaagagatgcggtaaacatgaaatatatgaggatactgtgggtataacatgacatactgttttacagtaaactgtttgttgttgtttttgttgttgtttttctgagtctcgctctgtcacccaggctggagtacagtggcgcaatctcggctcactgcaacctctgcctcctgggttcaaatgattctcctggctcagcctcagcctcagcctcccgagtagctgggattataggcgcctgccaccacgcccggcgaatttttgtatttttagtagagatggggtttcgccatgttggtcaggctggtttataggaccactgtcatatatgcagtccgtcatatacacttgggcaacagagtgaggaagaaagaaaggaaagaaaggaaggaaggaa

SEQ ID NO: 448062 - DNA, 1268 bp, Homo sapiens
atttcttaataaatattggctgttatttttgtgctaagccatgtgctggaggttgttttggagcagttcggactcctcatgggcactgttggaggcagagaggcctgccagatcagagggtgggctgtgggagcggggccctgcctgccttcactgttgccctgcctgcgtgtaggtggaccggtatcggttgaagaatgggcgccgcatcatcctgctggccgagggtcggctggtcaacctgggttgtgccatgggccaccccagcttcgtgatgagtaactccttcaccaaccaggtgatggcgcagatcgagctgtggacccatccagacaagtaccccgttggggttcatttcctgcccaagaagctggatgaggcagtggctgaagcccacctgggcaagctgaatgtgaagttgaccaagctaactgagaagcaagcccagtacctgggcatgtcctgtgatggccccttcaagccggatcactaccgctactgagagccaggtctgcgtttcaccctccagctgctgtccttgcccaggccccacctctcctccctaagagctaatggcaccaactttgtgattggtttgtcagtgtcccccatcgactctctggggctgatcacttagtttttggcctctgctgcagccgtcatactgttccaaatgtggcagcgggaacagagtaccctcttcaagccccggtcatgatggaggtcccagccacagggaaccatgagctcagtggtcttggaacagctcactaagtcagtccttccttagcctggaagtcagtagtggagtcacaaagcccatgtgttttgccatctaggccttcacctggtctgtggacttatacctgtgtgcttggtttacaggtccagtggttcttcagcccatgacagatgagaaggggctatattgaagggcaaagaggaactgttgtttgaattttcctgagagcctggcttagtgctgggccttctcttaaacctcattacaatgaggttagtacttttagtccctgttttacaggggttagaatagactgttaaggggcaactgagaaagaacagagaagtgacagctaggggttgagaggggccagaaaaacatgaatgcaggcagatttcgtgaaatctgccaccactttataaccagatggttcctttcacaaccctgggtcaaaaagagaataatttggcctataatgttaaaagaaagcaggaaggtgggtaaataaaaatcttggtgcctggaa

SEQ ID NO: 448063 - DNA, 1390 bp, Homo sapiens
agatatttaaaggcgtcggcgccacgcgcatatccctgctcggcgctgcccgcccagttcctgttcccagactgaggcccagcccccttcgcccgtttccatcacgagtgccgccagcatgtctgacaaactgccctacaaagtcgccgacatcggcctggctgcctggggacgcaaggccctggacattgctgagaacgagatgccgggcctgatgcgtatgcgggagcggtactcggcctccaagccactgaagggcgcccgcatcgctggctgcctgcacatgaccgtggagacggccgtcctcattgagaccctcgtcaccctgggtgctgaggtgcagtggtccagctgcaacatcttctccacccaggaccatgcggcggctgccattgccaaggctggcattccggtgtatgcctggaagggcgaaacggacgaggagtacctgtggtgcattgagcagaccctgtacttcaaggacgggcccctcaacatgattctggacgacgggggcgacctcaccaacctcatccacaccaagtacccgcagcttctgccaggcatccgaggcatctctgaggagaccacgactggggtccacaacctctacaagatgatggccaatgggatcctcaaggtgcctgccatcaatgtcaatgactccgtcaccaagagcaagtttgacaacctctatggctgccgggagtccctcatagatggcatcaagcgggccacagatgtgatgattgccggcaaggtagcggtggtagcaggctatggtgatgtgggcaagggctgtgcccaggccctgcggggtttcggagcccgcgtcatcatcaccgagattgaccccatcaacgcactgcaggctgccatggagggctatgaggtgaccaccatggatgaggcctgtcaggagggcaacatctttgtcaccaccacagcggtttgcactttaccctgggcaggacattgaccccaatgaactgagtgacgacccggtgtggtcgcaggtggaaccatggacagcgggcgacacacgcgcacaggcgcagccaaaaacagcgggggaaaggcgggagctaactaccacgacgcgggacagacggaatgctcggagataagagatggcggcaacaaactgactcaagcacggagccggcagcgagaccacaacagaagaccgatgacgaccaccgaaggaggacaggagacagcaaccagagcagaggacttgaagagtgatgatagaacgaaacacggaggcagacacgcagcagaaagacgcagcgacgaccagaggaacggagacacgaggagagaagaaagatgaagagcgagccgcctgcctgctccttgcctgctctcagcggagggtcgatgcaga

SEQ ID NO: 448064 - DNA, 1242 bp, Homo sapiens
ggactgctcttccagaggcaagaccaaccaagatgagtgccctgggagctgtcattgccctcctgctctggggacagctttttgcagtggactcaggcaatgatgtcacggatatcgcagatgacggctgcccgaagccccccgagattgcacatggctatgtggagcactcggttcgctaccagtgtaagaactactacaaactgcgcacagaaggagatggagtgtacaccttaaacaatgagaagcagtggataaataaggctgttggagataaacttcctgaatgtgaagcagtatgtgggaagcccaagaatccggcaaacccagtgcagcggatcctgggtggacacctggatgccaaaggcagctttccctggcaggctaagatggtttcccaccataatctcaccacaggtgccacgctgatcaatgaacaatggctgctgaccacggctaaaaatctcttcctgaaccattcagaaaatgcaacagcgaaagacattgcccctactttaacactctatgtggggaaaaagcagcttgtagagattgagaaggttgttctacaccctaactactcccaggtagatattgggctcatcaaactcaaacagaaggtgtctgttaatgagagagtgatgcccatctgcctaccttcaaaggattatgcagaagtagggcgtgtgggttatgtttctggctgggggcgaaatgccaattttaaatttactgaccatctgaagtatgtcatgctgcctgtggctgaccaagaccaatgcataaggcattatgaaggcagcacagtccccgaaaagaagacaccgaagagccctgtaggggtgcagccccatactgaatgaacacaccttctgtgctggcatgtctaagtaccaagaagacacctgctatggcgatgcgggcagtgcctttgccgttcacgacctggaggaggacacctggtatgcgactgggatcttaagctttgataagagctgtgctgtggctgagtatggtgtgtatgtgaaggtgacttccatccaggactgggttcagaagaccatagctgagaactaatgcaaggctggccggaagcccttgcctgaaagcaagatttcagcctggaagagggcaaagtggacgggagtggacaggagtggatgcgataagatgtggtttgaagctgatgggtgccagccctgcattgctgagtcaatcaataaagagctttcttttgaccca

SEQ ID NO: 448065 - DNA, 1423 bp, Homo sapiens
ggactgctcttccagaggcaagaccaaccaagatgagtgccctgggagctgtcattgccctcctgctctggggacagctttttgcagtggactcaggcaatgatgtcacggatatcgcagatgacggctgcccgaagccccccgagattgcacatggctatgtggagcactcggttcgctaccagtgtaagaactactacaaactgcgcacagaaggagatggagtgtacaccttaaacaatgagaagcagtggataaataaggctgttggagataaacttcctgaatgtgaagcagtatgtgggaagcccaagaatccggcaaacccagtgcagcggatcctgggtggacacctggatgccaaaggcagctttccctggcaggctaagatggtttcccaccataatctcaccacaggtgccacgctgatcaatgaacaatggctgctgaccacggctaaaaatctcttcctgaaccattcagaaaatgcaacagcgaaagacattgcccctactttaacactctatgtggggaaaaagcagcttgtagagattgagaaggttgttctacaccctaactactcccaggtagatattgggctcatcaaactcaaacagaaggtgtctgttaatgagagagtgatgcccatctgcctaccttcaaaggattatgcagaagtagggcgtgtgggttatgtttctggctgggggcgaaatgccaattttaaatttactgaccatctgaagtatgtcatgctgcctgtggctgaccaagaccaatgcataaggcattatgaaggcagcacagtccccgaaaagaagacaccgaagagccctgtaggggtgcagccccatactgaatgaacacaccttctgtgctggcatgtctaagtaccaagaagacacctgctatggcgatgcgggcagtgcctttgccgttcacgacctggaggaggacacctggtatgcgactgggatcttaagctttgataagagctgtgctgtggctgagtatggtgtgtatgtgaaggtgacttccatccaggactgggttcagaagaccatagctgagaactaatgcaaggctggccggaagcccttgcctgaaagcaagatttcagcctggaagagggcaaagtggacgggagtggacaggagtggatgcgataagatgtggtttgaagctgatgggtgccagccctgcattgctgagtcaatcaataaagagctttcttttgacccaaaaaaaaaacagactctcacgtcacacaaaccttggttggggcgcccctgggcccctgggaaaggttttttaaacccctctccgtgggggcgccgggcccctgtgggttatgggaaaccgtggccacagggcgtgtccccaaaggaaactccggggcacgaactagggggtgggtttcccc

SEQ ID NO: 448066 - DNA, 681 bp, Homo sapiens
ggactgctcttccagaggcaagaccaaccaagatgagtgccctgggagctgtcattgccctcctgctctggggacagctttttgcagtggactcaggcaatgatgtcacggatatcgcagatgacggctgcccgaagccccccgagattgcacatggctatgtggagcactcggttcgctaccagtgtaagaactactacaaactgcgcacagaaggagatggagtgtacaccttaaacaatgagaagcagtggataaataaggctgttggagataaacttcctgaatgtgaagcagaatgaacacaccttctgtgctggcatgtctaagtaccaagaagacacctgctatggcgatgcgggcagtgcctttgccgttcacgacctggaggaggacacctggtatgcgactgggatcttaagctttgataagagctgtgctgtggctgagtatggtgtgtatgtgaaggtgacttccatccaggactgggttcagaagaccatagctgagaactaatgcaaggctggccggaagcccttgcctgaaagcaagatttcagcctggaagagggcaaagtggacgggagtggacaggagtggatgcgataagatgtggtttgaagctgatgggtgccagccctgcattgctgagtcaatcaataaagagctttcttttgaccca

SEQ ID NO: 448067 - DNA, 635 bp, Homo sapiens
ggactgctcttccagaggcaagaccaaccaagatgagtgccctgggagctgtcattgccctcctgctctggggacagctttttgcagtggactcaggcaatgatgtcacggatatcgcagatgacggctgcccgaagccccccgagattgcacatggctatgtggagcactcggttcgctaccagtgtaagaactactacaaactgcgcacagaaggagatggagtgtacaccttaaacaatgagaagcagtggataaataaggctgttggagataaacttcctgaatgtgaagcagtatgtgggaagcccaagaatccggcaaacccagtgcagcggatcctgggtggaccctggtatgcgactgggatcttaagctttgataagagctgtgctgtggctgagtatggtgtgtatgtgaaggtgacttccatccaggactgggttcagaagaccatagctgagaactaatgcaaggctggccggaagcccttgcctgaaagcaagatttcagcctggaagagggcaaagtggacgggagtggacaggagtggatgcgataagatgtggtttgaagctgatgggtgccagccctgcattgctgagtcaatcaataaagagctttcttttgaccca

SEQ ID NO: 448068 - DNA, 617 bp, Homo sapiens
ggactgctcttccagaggcaagaccaaccaagatgagtgccctgggagctgtcattgccctcctgctctggggacagctttttgcagtggactcaggcaatgatgtcacggatatcgcagatgacggctgcccgaagccccccgagattgcacatggctatgtggagcactcggttcgctaccagtgtaagaactactacaaactgcgcacagaaggagatgagacacctgctatggcgatgcgggcagtgcctttgccgttcacgacctggaggaggacacctggtatgcgactgggatcttaagctttgataagagctgtgctgtggctgagtatggtgtgtatgtgaaggtgacttccatccaggactgggttcagaagaccatagctgagaactaatgcaaggctggccggaagcccttgcctgaaagcaagatttcagcctggaagagggcaaagtggacgggagtggacaggagtggatgcgataagatgtggtttgaagctgatgggtgccagccctgcattgctgagtcaatcaataaagagctttcttttgacccaaaaaaaaaaaaaaaaaaaaaaaaaaaaaaaaaaaaaaaaaaatttggggcgc

SEQ ID NO: 448069 - DNA, 765 bp, Homo sapiens
ggactgctcttccagaggcaagaccaaccaagatgagtgccctgggagctgtcattgccctcctgctctggggacagctttttgcagtggactcaggcaatgatgtcacggatatcgcagatgacggctgcccgaagccccccgagattgcacatggctatgtggagcactcggttcgctaccagtgtaagaactactacaaactgcgcacagaaggagatggagtatacaccttaaatgataagaagcagtggataaataaggctgttggagataaacttcctgaatgtgaagcagtgacttccatccaggactgggttcagaagaccatagctgagaactaatgcaaggctggccggaagcccttgcctgaaagcaagatttcagcctggaagagggcaaagtggacgggagtggacaggagtggatgcgataagatgtggtttgaagctgatgggtgccagccctgcattgctgagtcaatcaataaagagctttcttttgacccaacaaaaagacccatataaacaaacatggaaagcgcatgttgccgggcggccctcgaggaccttgacgaaaaatattttttaaaggaacgacaataccgtttagtggagcggcgcgcccccttattgactgtggagaacaggtgtcctaaagacgtatctgcctgaaggaaatccggggtggaaaacacagggcgtgaacattccccctgtttaaaaaacgcggggggaacagccaagacttcttgaaccattccaa

SEQ ID NO: 448070 - DNA, 516 bp, Homo sapiens
ggactgctcttccagaggcaagaccaaccaagatgagtgccctgggagctgtcattgccctcctgctctggggacagctttttgcagtggactcaggcaatgatgtcacggatatcgcagatgacggctgcccgaagccccccgagattgcacatggctatgtggagcactcggttcgctaccagtgtaagaactactacaaactgcgcacagaaggagatgagtatacacctttaagattgcccggaggaagcaaactcttcgtataaaaaaagcaggccatctgcttaacccttggctccaccataaggcactgggactcggatttctctatctgatagaggtattttctgtggccctgggagctgtctgtctttcccctacccccaaggatgccaggaagacgtccaccattagccatgtggcaacctttacttctatgcctcacaagtgcctttcagagagccccaattctgctttcccacaaaataaacctaatgccatcaggcaaaacat

SEQ ID NO: 448071 - DNA, 600 bp, Homo sapiens
cttttttttttgtgagacagagtctcactctgtcaccaggatggagtgagtggcgcgatctcagctcatcgcaacctccccctccccggttcaagcaattctcctgcctcagcctcccaagtagctaggactacaggcgtgtgccaccacgcccagctaatttttgtatttttagtagcgatgtggttcaccatgttggcccggatgatctcgatctcttgacctcgtgatccacctgtctcggcctcccaaagtctgctatggcgatgcgggcagtgcctttgccgttcacgacctggaggaggacacctggtacgcggctgggatcctaagctttgataagagctgtgctgtggctgagtatggtgtgtatgtgaaggtgacttccatccagcactgggttcagaagaccatagctgagaactaatgcaaggctggccggaagcccttgcctgaaagcaagatttcagcctggaagagggcaaagtggacgggagtggacaggagtggatgcgataagatgtggtttgaagctgatgggtgccagccctgcattgctgagtcaatcaataaagagctttcttttgacccatttctgtg

SEQ ID NO: 448072 - DNA, 1529 bp, Homo sapiens
acacagagcccgggccacaggcagctccttgccagctctcctcctcgcacagccgctcgaaccgcctgctgagccccatggcccgcgccacgctctccgccgcccccagcaatccccggctcctgcgggtggcgctgctgctcctgctcctggtggccgccagccggcgcgcagcaggtgggtcccggcgccctggggtccccgggccggacgcggctggggtgggcgccccgcgccgacagccccgctcaatcagcgagtctcttcttccctaggagcgcccctggccactgaactgcgctgccagtgcttgcagaccctgcagggaattcacctcaagaacatccaaagtgtgaaggtgaagtcccccggaccccactgcgcccaaaccgaagtcatgtaagtctcgcccatcgctgccgctgccactgctggggtccccgactctcccgctgccccaaaccctgtcctcagcccgacctcctgtctcacgagattcccttctctctgcagagccacactcaagaatgggcagaaagcttgtctcaaccccgcatcgcccatggttaagaaaatcatcgaaaagatgctgaaaaagtaagttataatttccatgtacacaggcgactggagctgttggtcagaaatactggcgtctgccccctaaaaagtaaatcaggaaaacccagggttagctgcaggactgaaaaaattattattttcacaaagttgccattaaggttattaatctgttctggtgccagaggatattcccagtgcccagggtcaccacccaggttcttccctcctgccagtgaatgtaggtaaaactgctttcatgtaaggtctcattggagtttgccagttgtgctgaagtgttttccacctgttaaaaaacacaagcttcatttcccctagttcctactgactttcagacctgaaaagcagaccccctggttttttgtaaaagtttagggttgaagtgcagagatttcacaataatattgcactgggtatataactggttgccaccacctattagccatgtcactcagagacaatattatttagtttatctgagactcagcaaaacagggaaaataatggtagctacatcatgaggttgccctgaggctcaagtgaggcccagtatgacaaagagcaataggctctggctgttttagccagtaaaacagtgtagactgccactcctccaccccacgtcacccccattcctaaaagagcatcccaagcctagaggttgctttgaggctcaagtgaggcccagtgtggctgagtatggtgtgtatgtgaaggtgacttccatccaggactgggttcagaagaccatagctgagaactaatgcaaggctggccggaagcccttgcctgaaagcaagatttcagcctggaagagggcaaagtggacgggagtggacaggagtggatgcgataagatgtggtttgaagctgatgggtgccagccctgcattgctgagtcaatcaataaagagctttcttttgaccca

SEQ ID NO: 448073 - DNA, 364 bp, Homo sapiens
gatcccagtcgcataccaggtgtcctcctccaggtcgtgaacggcaaaggcactgcccgcatcgccatagcaggtgtcttcttggtacttagacatgccagcacagaaggtgtgttcattcagtatgggctgcacccctacagggctcttcgtgacttccatccaggactgggttcagaagaccatagctgagaactaatgcaaggctggccggaagcccttgcctgaaagcaagatttcagcctggaagagggcaaagtggacgggagtggacaggagtggatgcgataagatgtggtttgaagctgatgggtgccagccctgcattgctgagtcaatcaataaagagctttcttttgaccca

SEQ ID NO: 448074 - DNA, 631 bp, Homo sapiens
  misc_feature (19)..(19): n is a, c, g, or t
  misc_feature (58)..(58): n is a, c, g, or t
  misc_feature (91)..(91): n is a, c, g, or t
  misc_feature (100)..(100): n is a, c, g, or t
ttacagagctgttagtganccgcagatcgctacgatacgcaagctcgaattaccctcntaaaggaccaaagctgagctcacgcgggtgcgncgctctagnccggcggatccccgggctgcagtgaccatctgaagtatgtcatgctgcctgtggctgaccaagaccaatgcataaggcattatgaaggcagcacagtccccgaaaagaagacaccgaagagccctgtaggggtgcagccccatactgaatgaacacaccttctgtgctggcatgtctaagtaccaagaagacacctgctatggcgatgcgggcagtgcctttgccgttcacgacctggaggaggacacctggtatgcgactgggatcttaagctttgataagagctgtgctgtggctgagtatggtgtgtatgtgaaggtgacttccatccaggactgggttcagaagaccatagctgagaactaatgcaaggctggccggaagcccttgcctgaaagcaagatttcagcctggaagagggcaaagtggacgggagtggacaggagtggatgcgataagatgtggtttgaagctgatgggtgccagccctgcattgctgagtcaatcaataaagagctttcttttgaccca

SEQ ID NO: 448075 - DNA, 1469 bp, Homo sapiens
gaattcttcagagatgtaagaataggatactatcagagaacaagatagaccttggaatttaaaaacaaaaatgggaaaacaaattcaataaatggatgataaagtcaaggaaatctttcaaaaagcgagtgtgtgtgtatgcatgtgtgtgtgtgcgtgtgtgtgtgtgtgtacatgcctgtgtgtgtggatgcatgcatgtgctgtgaagcagggagaccagctttccgctccttcttgttttctctctgcagtgacctgggagctgtcatttccctcctgctctggggacgacagctttttgcactgtactcaggcaatgatgtcacggatatttcagatgaccgcttcccgaagccccctgagattgcaaatggctatgtggagcacttgtttcgctaccagtgtaagaactactacagactgcgcacagaaggagatggagtatacaccttaaatgataagaagcagtggataaataaggctgttggagataaacttcctgaatgtgaagcagtatgtgggaagcccaagaatccggcaaacccagtgcagcggatcctgggtggacacctggatgccaaaggcagctttccctggcaggctaagatggtttcccaccataatctcaccacaggtgccacgctgatcaatgaacaatggctgctgaccacggctaaaaatctcttcctgaaccattcagaaaatgcaacagcgaaagacattgcccctactttaacactctatgtggggaaaaagcagcttgtagagattgagaaggtggttctacaccctaactaccaccaggtagatattgggctcatcaaactcaaacagaaggtgcttgttaatgagagagtgatgcccatctgcctaccttcaaagaattatgcagaagtagggcgtgtgggttacgtgtctggctggggacaaagtgacaactttaaacttactgaccatctgaagtatgtcatgctgcctgtggctgaccaatacgattgcataacgcattatgaaggcagcacatgccccaaatggaaggcaccgaagagccctgtaggggtgcagcccatactgaacgaacacaccttctgtgtcggcatgtctaagtaccaggaagacacctgctatggcgatgcgggcagtgcctttgccgttcacgacctggaggaggacacctggtacgcggctgggatcctaagctttgataagagctgtgctgtggctgagtatggtgtgtatgtgaaggtgacttccatccagcactgggttcagaagaccatagctgagaactaatgcaaggctggccggaagcccttgcctgaaagcaagatttcagcctggaagagggcaaagtggacgggagtggacaggagtggatgcgataagatgtggtttgaagctgatgggtgccagccctgcattgctgagtcaatcaataaagagctttcttttgacccatttctgtg

SEQ ID NO: 448076 - DNA, 427 bp, Homo sapiens
ggactgctcttccagaggcaagaccaaccaagatgagtgccctgggagctgtcattgccctcctgctctggggacagctttttgcagtggactcaggcaatgatgtcacggatatcgcagatgacggctgcccgaagccccccgagattcccttctttactaaacaaatcccatggattctgatttctgggtcttaggattttaaaagtgaagggatatttttcttatatttgtgagttcagttccgatggtgcccgtggtcaaaagcgaaaaacatggacaattcctattcattcttagcactttgacatgtcttggggaaaagcttacattttaatttaaaagaaagatcaattatatccatgcttaacaggatcagcaggagctttataaatgactttacagagactaataagggatttgatct

SEQ ID NO: 448077 - DNA, 1294 bp, Homo sapiens
ggactgctcttccagaggcaagaccaaccaagatgagtgccctgggagctgtcattgccctcctgctctggggacagctttttgcagtggactcaggcaatgatgtcacggatatcgcagatgacggctgcccgaagccccccgagattgcacatggctatgtggagcactcggttcgctaccagtgtaagaactactacaaactgcgcacagaaggagatggagtgtacaccttaaacaatgagaagcagtggataaataaggctgttggagataaacttcctgaatgtgaagcagtatgtgggaagcccaagaatccggcaaacccagtgcagcggatcctgggtggacacctggatgccaaaggcagctttccctggcaggctaagatggtttcccaccataatctcaccacaggtgccacgctgatcaatgaacaatggctgctgaccacggctaaaaatctcttcctgaaccattcagaaaatgcaacagcgaaagacattgcccctactttaacactctatgtggggaaaaagcagcttgtagagattgagaaggttgttctacaccctaactactcccaggtagatattgggctcatcaaactcaaacagaaggtgtctgttaatgagagagtgatgcccatctgcctaccttcaaaggattatgcagaagtagggcgtgtgggttatgtttctggctgggggcgaaatgccaattttaaatttactgaccatctgaagtatgtcatgctgcctgtggctgaccaagaccaatgcataaggcattatgaaggcagcacagtccccgaaaagaagacaccgaagagccctgtaggggtgcagccccatactgaatgaacacaccttctgtgctggcatgtctaagtaccaagaagacacctgctatggcgatgcgggcagtgcctttgccgttcacgacctggaggaggacacctggtatgcgactgggatcttaagctttgataagagctgtgctgtggctgagtatggtgtgtatgtgaaggtgacttccatccaggactgggttcagaagaccatagctgagaactaatgcaaggctggccggaagcccttgcctgaaagcaagatttcagcctggaagagggcaaagtggacgggagtggacaggagtggatgcgataagatgtggtttgaagctgatgggtgccagccctgcattgctgagtcaatcaataaagagctttcttttgacccaaaaaaaaaaaaaaaaaaaaaaaaaaaaaaaaaaaaaaaaaaatttggggcgc

SEQ ID NO: 448078 - DNA, 1513 bp, Homo sapiens
  misc_feature (1244)..(1245): n is a, c, g, or t
ggactgctcttccagaggcaagaccaaccaagatgagtgccctgggagctgtcattgccctcctgctctggggacagctttttgcagtggactcaggcaatgatgtcacggatatcgcagatgacggctgcccgaagccccccgagattgcacatggctatgtggagcactcggttcgctaccagtgtaagaactactacaaactgcgcacagaaggagatggagtgtacaccttaaacaatgagaagcagtggataaataaggctgttggagataaacttcctgaatgtgaagcagtatgtgggaagcccaagaatccggcaaacccagtgcagcggatcctgggtggacacctggatgccaaaggcagctttccctggcaggctaagatggtttcccaccataatctcaccacaggtgccacgctgatcaatgaacaatggctgctgaccacggctaaaaatctcttcctgaaccattcagaaaatgcaacagcgaaagacattgcccctactttaacactctatgtggggaaaaagcagcttgtagagattgagaaggttgttctacaccctaactactcccaggtagatattgggctcatcaaactcaaacagaaggtgtctgttaatgagagagtgatgcccatctgcctaccttcaaaggattatgcagaagtagggcgtgtgggttatgtttctggctgggggcgaaatgccaattttaaatttactgaccatctgaagtatgtcatgctgcctgtggctgaccaagaccaatgcataaggcattatgaaggcagcacagtccccgaaaagaagacaccgaagagccctgtaggggtgcagccccatactgaatgaacacaccttctgtgctggcatgtctaagtaccaagaagacacctgctatggcgatgcgggcagtgcctttgccgttcacgacctggaggaggacacctggtatgcgactgggatcttaagctttgataagagctgtgctgtggctgagtatggtgtgtatgtgaaggtgacttccatccaggactgggttcagaagaccatagctgagaactaatgcaaggctggccggaagcccttgcctgaaagcaagatttcagcctggaagagggcaaagtggacgggagtggacaggagtggatgcgataagatgtggtttgaagctgatgggtgccagccctgcattgctgagtcaatcaataaagagctttcttttgacccatnnaaaaaaaaccacaacaaaaacttttggcccccttgggccccggaaaagtttcaaaacattcgttggggcggggcgcaaggggaacgggaaccgggcaaagcggtccaaggaaacccgtgcgccagagaaaagagcggagagatttcccaccatgtaaaaaaagcccggggggaacaccggcgcgttctggaacacactccgagagggccctcagaggcacaaaacgggacgcatccagagggtgccagaggaaaccgcaataaaaccg

SEQ ID NO: 448079 - DNA, 1207 bp, Homo sapiens
ggactgctcttccagaggcaagaccaaccaagatgagtgccctgggagctgtcattgccctcctgctctggggacagctttttgcagtggactcaggcaatgatgtcacggatatcgcagggctatgtggagcactcggttcgctaccagtgtaagaactactacaaactgcgcacagaaggagatggagtgtacaccttaaacaatgagaagcagtggataaataaggctgttggagataaacttcctgaatgtgaagcagtatgtgggaagcccaagaatccggcaaacccagtgcagcggatcctgggtggacacctggatgccaaaggcagctttccctggcaggctaagatggtttcccaccataatctcaccacaggtgccacgctgatcaatgaacaatggctgctgaccacggctaaaaatctcttcctgaaccattcagaaaatgcaacagcgaaagacattgcccctactttaacactctatgtggggaaaaagcagcttgtagagattgagaaggttgttctacaccctaactactcccaggtagatattgggctcatcaaactcaaacagaaggtgtctgttaatgagagagtgatgcccatctgcctaccttcaaaggattatgcagaagtagggcgtgtgggttatgtttctggctgggggcgaaatgccaattttaaatttactgaccatctgaagtatgtcatgctgcctgtggctgaccaagaccaatgcataaggcattatgaaggcagcacagtccccgaaaagaagacaccgaagagccctgtaggggtgcagccccatactgaatgaacacaccttctgtgctggcatgtctaagtaccaagaagacacctgctatggcgatgcgggcagtgcctttgccgttcacgacctggaggaggacacctggtatgcgactgggatcttaagctttgataagagctgtgctgtggctgagtatggtgtgtatgtgaaggtgacttccatccaggactgggttcagaagaccatagctgagaactaatgcaaggctggccggaagcccttgcctgaaagcaagatttcagcctggaagagggcaaagtggacgggagtggacaggagtggatgcgataagatgtggtttgaagctgatgggtgccagccctgcattgctgagtcaatcaataaagagctttcttttgaccca

SEQ ID NO: 448080 - DNA, 1167 bp, Homo sapiens
ggactgctcttccagaggcaagaccaaccaagatgagtgccctgggagctgtcattgccctcctgctctggggacagctttttgcagtggactcaggcaatgatgtcacggatatcgcagatgacggctgcccgaagccccccgagattgcacatggctatgtggagcactcggttcgctaccagtgtaagaactactacaaactgcgcacagaaggagatgtatgtgggaagcccaagaatccggcaaacccagtgcagcggatcctgggtggacacctggatgccaaaggcagctttccctggcaggctaagatggtttcccaccataatctcaccacaggtgccacgctgatcaatgaacaatggctgctgaccacggctaaaaatctcttcctgaaccattcagaaaatgcaacagcgaaagacattgcccctactttaacactctatgtggggaaaaagcagcttgtagagattgagaaggttgttctacaccctaactactcccaggtagatattgggctcatcaaactcaaacagaaggtgtctgttaatgagagagtgatgcccatctgcctaccttcaaaggattatgcagaagtagggcgtgtgggttatgtttctggctgggggcgaaatgccaattttaaatttactgaccatctgaagtatgtcatgctgcctgtggctgaccaagaccaatgcataaggcattatgaaggcagcacagtccccgaaaagaagacaccgaagagccctgtaggggtgcagccccatactgaatgaacacaccttctgtgctggcatgtctaagtaccaagaagacacctgctatggcgatgcgggcagtgcctttgccgttcacgacctggaggaggacacctggtatgcgactgggatcttaagctttgataagagctgtgctgtggctgagtatggtgtgtatgtgaaggtgacttccatccaggactgggttcagaagaccatagctgagaactaatgcaaggctggccggaagcccttgcctgaaagcaagatttcagcctggaagagggcaaagtggacgggagtggacaggagtggatgcgataagatgtggtttgaagctgatgggtgccagccctgcattgctgagtcaatcaataaagagctttcttttgaccca

SEQ ID NO: 448081 - DNA, 1113 bp, Homo sapiens
ggactgctcttccagaggcaagaccaaccaagatgagtgccctgggagctgtcattgccctcctgctctggggacagctttttgcagtggactcaggcaatgatgtcacggatatcgcagatgacggctgcccgaagccccccgagattgcacatggctatgtggagcactcggttcgctaccagtgtaagaactactacaaactgcgcacagaaggagatgacctggatgccaaaggcagctttccctggcaggctaagatggtttcccaccataatctcaccacaggtgccacgctgatcaatgaacaatggctgctgaccacggctaaaaatctcttcctgaaccattcagaaaatgcaacagcgaaagacattgcccctactttaacactctatgtggggaaaaagcagcttgtagagattgagaaggttgttctacaccctaactactcccaggtagatattgggctcatcaaactcaaacagaaggtgtctgttaatgagagagtgatgcccatctgcctaccttcaaaggattatgcagaagtagggcgtgtgggttatgtttctggctgggggcgaaatgccaattttaaatttactgaccatctgaagtatgtcatgctgcctgtggctgaccaagaccaatgcataaggcattatgaaggcagcacagtccccgaaaagaagacaccgaagagccctgtaggggtgcagccccatactgaatgaacacaccttctgtgctggcatgtctaagtaccaagaagacacctgctatggcgatgcgggcagtgcctttgccgttcacgacctggaggaggacacctggtatgcgactgggatcttaagctttgataagagctgtgctgtggctgagtatggtgtgtatgtgaaggtgacttccatccaggactgggttcagaagaccatagctgagaactaatgcaaggctggccggaagcccttgcctgaaagcaagatttcagcctggaagagggcaaagtggacgggagtggacaggagtggatgcgataagatgtggtttgaagctgatgggtgccagccctgcattgctgagtcaatcaataaagagctttcttttgaccca

SEQ ID NO: 448082 - DNA, 1177 bp, Homo sapiens
ggactgctcttccagaggcaagaccaaccaagatgagtgccctgggagctgtcattgccctcctgctctggggacagctttttgcagtggactcaggcaatgatgtcacggatatcgcagatgacggctgcccgaagccccccgagattgcacatggctatgtggagcactcggttcgctaccagtgtaagaactactacaaactgcgcacagaaggagatggagtgtacaccttaaacaatgagaagcagtggataaataaggctgttggagataaacttcctgaatgtgaagcagtatgtgggaagcccaagaatccggcaaacccagtgcagcggatcctgggtggacacctggatgccaaaggcagctttccctggcaggctaagatggtttcccaccataatctcaccacaggtgccacgctgatcaatgaacaatggctgctgaccacggctaaaaatctcttcctgaaccattcagaaaatgcaacagcgaaagacattgcccctactttaacacgtagatattgggctcatcaaactcaaacagaaggtgtctgttaatgagagagtgatgcccatctgcctaccttcaaaggattatgcagaagtagggcgtgtgggttatgtttctggctgggggcgaaatgccaattttaaatttactgaccatctgaagtatgtcatgctgcctgtggctgaccaagaccaatgcataaggcattatgaaggcagcacagtccccgaaaagaagacaccgaagagccctgtaggggtgcagccccatactgaatgaacacaccttctgtgctggcatgtctaagtaccaagaagacacctgctatggcgatgcgggcagtgcctttgccgttcacgacctggaggaggacacctggtatgcgactgggatcttaagctttgataagagctgtgctgtggctgagtatggtgtgtatgtgaaggtgacttccatccaggactgggttcagaagaccatagctgagaactaatgcaaggctggccggaagcccttgcctgaaagcaagatttcagcctggaagagggcaaagtggacgggagtggacaggagtggatgcgataagatgtggtttgaagctgatgggtgccagccctgcattgctgagtcaatcaataaagagctttcttttgaccca

SEQ ID NO: 448083 - DNA, 1137 bp, Homo sapiens
ggactgctcttccagaggcaagaccaaccaagatgagtgccctgggagctgtcattgccctcctgctctggggacagctttttgcagtggactcaggcaatgatgtcacggatatcgcagatgacggctgcccgaagccccccgagattgcacatggctatgtggagcactcggttcgctaccagtgtaagaactactacaaactgcgcacagaaggagatggagtgtacaccttaaacaatgagaagcagtggataaataaggctgttggagataaacttcctgaatgtgaagcagataatctcaccacaggtgccacgctgatcaatgaacaatggctgctgaccacggctaaaaatctcttcctgaaccattcagaaaatgcaacagcgaaagacattgcccctactttaacactctatgtggggaaaaagcagcttgtagagattgagaaggttgttctacaccctaactactcccaggtagatattgggctcatcaaactcaaacagaaggtgtctgttaatgagagagtgatgcccatctgcctaccttcaaaggattatgcagaagtagggcgtgtgggttatgtttctggctgggggcgaaatgccaattttaaatttactgaccatctgaagtatgtcatgctgcctgtggctgaccaagaccaatgcataaggcattatgaaggcagcacagtccccgaaaagaagacaccgaagagccctgtaggggtgcagccccatactgaatgaacacaccttctgtgctggcatgtctaagtaccaagaagacacctgctatggcgatgcgggcagtgcctttgccgttcacgacctggaggaggacacctggtatgcgactgggatcttaagctttgataagagctgtgctgtggctgagtatggtgtgtatgtgaaggtgacttccatccaggactgggttcagaagaccatagctgagaactaatgcaaggctggccggaagcccttgcctgaaagcaagatttcagcctggaagagggcaaagtggacgggagtggacaggagtggatgcgataagatgtggtttgaagctgatgggtgccagccctgcattgctgagtcaatcaataaagagctttcttttgaccca

SEQ ID NO: 448084 - DNA, 1171 bp, Homo sapiens
ggactgctcttccagaggcaagaccaaccaagatgagtgccctgggagctgtcattgccctcctgctctggggacagctttttgcagtggactcaggcaatgatgtcacggatatcgcagatgacggctgcccgaagccccccgagattgcacatggctatgtggagcactcggttcgctaccagtgtaagaactactacaaactgcgcacagaaggagatggagtgtacaccttaaacaatgagaagcagtggataaataaggctgttggagataaacttcctgaatgtgaagcagtatgtgggaagcccaagaatccggcaaacccagtgcagcggatcctgggtggacacctggatgccaaaggcagctttccctggcaggctaagatggtttcccaccataatctcaccacaggtgccacgctgatcaatgaacaatggctgctgaccacggctaaaaatctcttcctgaaccattcagaaaatgcaacagcgaaagacattgcccctactttaacactctatgtggggaaaaagcagcttgtagagattgagaaggttgttctacaccctaactactcccaggtagatattgggctcatcaaactcaaatgtgggttatgtttctggctgggggcgaaatgccaattttaaatttactgaccatctgaagtatgtcatgctgcctgtggctgaccaagaccaatgcataaggcattatgaaggcagcacagtccccgaaaagaagacaccgaagagccctgtaggggtgcagccccatactgaatgaacacaccttctgtgctggcatgtctaagtaccaagaagacacctgctatggcgatgcgggcagtgcctttgccgttcacgacctggaggaggacacctggtatgcgactgggatcttaagctttgataagagctgtgctgtggctgagtatggtgtgtatgtgaaggtgacttccatccaggactgggttcagaagaccatagctgagaactaatgcaaggctggccggaagcccttgcctgaaagcaagatttcagcctggaagagggcaaagtggacgggagtggacaggagtggatgcgataagatgtggtttgaagctgatgggtgccagccctgcattgctgagtcaatcaataaagagctttcttttgaccca

SEQ ID NO: 448085 - DNA, 942 bp, Homo sapiens
ggactgctcttccagaggcaagaccaaccaagatgagtgccctgggagctgtcattgccctcctgctctggggacagctttttgcagtggactcaggcaatgatgtcacggatatcgcagatgacggctgcccgaagccccccgagattgcacatggctatgtggagcactcggttcgctaccagtgtaagaactactacaaactgcgcacagaaggagatgtctatgtggggaaaaagcagcttgtagagattgagaaggttgttctacaccctaactactcccaggtagatattgggctcatcaaactcaaacagaaggtgtctgttaatgagagagtgatgcccatctgcctaccttcaaaggattatgcagaagtagggcgtgtgggttatgtttctggctgggggcgaaatgccaattttaaatttactgaccatctgaagtatgtcatgctgcctgtggctgaccaagaccaatgcataaggcattatgaaggcagcacagtccccgaaaagaagacaccgaagagccctgtaggggtgcagccccatactgaatgaacacaccttctgtgctggcatgtctaagtaccaagaagacacctgctatggcgatgcgggcagtgcctttgccgttcacgacctggaggaggacacctggtatgcgactgggatcttaagctttgataagagctgtgctgtggctgagtatggtgtgtatgtgaaggtgacttccatccaggactgggttcagaagaccatagctgagaactaatgcaaggctggccggaagcccttgcctgaaagcaagatttcagcctggaagagggcaaagtggacgggagtggacaggagtggatgcgataagatgtggtttgaagctgatgggtgccagccctgcattgctgagtcaatcaataaagagctttcttttgaccca

SEQ ID NO: 448086 - DNA, 956 bp, Homo sapiens
ggactgctcttccagaggcaagaccaaccaagatgagtgccctgggagctgtcattgccctcctgctctggggacagctttttgcagtggactcaggcaatgatgtcacggatatcgcagatgacggctgcccgaagccccccgagattgcacatggctatgtggagcactcggttcgctaccagtgtaagaactactacaaactgcgcacagaaggagatggagtgtacaccttaaacaatgagaagcagtggataaataaggctgttggagataaacttcctgaatgtgaagcagtatgtgggaagcccaagaatccggcaaacccagtgcagcggatcctgggtggacacctggatgccaaaggcagctttccctggcaggctaagatggtttcccaccataatctcaccacaggtgccacgctgatcaatgaacaatggctgctgaccacggctaaaaatctcttcctgaaccattcagaaaatgcaacagcgaaagacattgcccctactttaacacccccgaaaagaagacaccgaagagccctgtaggggtgcagccccatactgaatgaacacaccttctgtgctggcatgtctaagtaccaagaagacacctgctatggcgatgcgggcagtgcctttgccgttcacgacctggaggaggacacctggtatgcgactgggatcttaagctttgataagagctgtgctgtggctgagtatggtgtgtatgtgaaggtgacttccatccaggactgggttcagaagaccatagctgagaactaatgcaaggctggccggaagcccttgcctgaaagcaagatttcagcctggaagagggcaaagtggacgggagtggacaggagtggatgcgataagatgtggtttgaagctgatgggtgccagccctgcattgctgagtcaatcaataaagagctttcttttgaccca

SEQ ID NO: 448087 - DNA, 860 bp, Homo sapiens
ggactgctcttccagaggcaagaccaaccaagatgagtgccctgggagctgtcattgccctcctgctctggggacagctttttgcagtggactcaggcaatgatgtcacggatatcgcagatgacggctgcccgaagccccccgagattgcacatggctatgtggagcactcggttcgctaccagtgtaagaactactacaaactgcgcacagaaggagatggagtgtacaccttaaacaatgagaagcagtggataaataaggctgttggagataaacttcctgaatgtgaagcagtatgtgggaagcccaagaatccggcaaacccagtgcagcggatcctgggtggacacctggatgccaaaggcagctttccctggcaggctaagatggtttcccaccataatctcaccacaggtgccacgctgatcaatgaacaatggctgctgaccacggctaaaaatctcttcctgaacaatgaacacaccttctgtgctggcatgtctaagtaccaagaagacacctgctatggcgatgcgggcagtgcctttgccgttcacgacctggaggaggacacctggtatgcgactgggatcttaagctttgataagagctgtgctgtggctgagtatggtgtgtatgtgaaggtgacttccatccaggactgggttcagaagaccatagctgagaactaatgcaaggctggccggaagcccttgcctgaaagcaagatttcagcctggaagagggcaaagtggacgggagtggacaggagtggatgcgataagatgtggtttgaagctgatgggtgccagccctgcattgctgagtcaatcaataaagagctttcttttgaccca

SEQ ID NO: 448088 - DNA, 656 bp, Homo sapiens
ggactgctcttccagaggcaagaccaaccaagatgagtgccctgggagctgtcattgccctcctgctctggggacagctttttgcagtggactcaggcaatgatgtcacggatatcgcagatgacggctgcccgaagccccccgagattgcacatggctatgtggagcactcggttcgctaccagtgtaagaactactacaaactgcgcacagaaggagatgccccgaaaagaagacaccgaagagccctgtaggggtgcagccccatactgaatgaacacaccttctgtgctggcatgtctaagtaccaagaagacacctgctatggcgatgcgggcagtgcctttgccgttcacgacctggaggaggacacctggtatgcgactgggatcttaagctttgataagagctgtgctgtggctgagtatggtgtgtatgtgaaggtgacttccatccaggactgggttcagaagaccatagctgagaactaatgcaaggctggccggaagcccttgcctgaaagcaagatttcagcctggaagagggcaaagtggacgggagtggacaggagtggatgcgataagatgtggtttgaagctgatgggtgccagccctgcattgctgagtcaatcaataaagagctttcttttgaccca

SEQ ID NO: 448089 - DNA, 1012 bp, Homo sapiens
ggactgctcttccagaggcaagaccaaccaagatgagtgccctgggagctgtcattgccctcctgctctggggacagctttttgcagtggactcaggcaatgatgtcacggatatcgcagatgacggctgcccgaagccccccgagattgcacatggctatgtggagcactcggttcgctaccagtgtaagaactactacaaactgcgcacagaaggagatggagtgtacaccttaaacaatgagaagcagtggataaataaggctgttggagataaacttcctgaatgtgaagcagataatctcaccacaggtgccacgctgatcaatgaacaatggctgctgaccacggctaaaaatctcttcctgaaccattcagaaaatgcaacagcgaaagacattgcccctactttaacactctatgtggggaaaaagcagcttgtagagattgagaaggttgttctacaccctaactactcccaggtagatattgggctcatcaaactcaaacagaaggtgtctgttaatgagagagtgatgcccatctgcctaccttcaaaggattatgcagaagtagggcgtgtgggttatgtttctggctgggggcgaaatgccaattttaaatttacaatgaacacaccttctgtgctggcatgtctaagtaccaagaagacacctgctatggcgatgcgggcagtgcctttgccgttcacgacctggaggaggacacctggtatgcgactgggatcttaagctttgataagagctgtgctgtggctgagtatggtgtgtatgtgaaggtgacttccatccaggactgggttcagaagaccatagctgagaactaatgcaaggctggccggaagcccttgcctgaaagcaagatttcagcctggaagagggcaaagtggacgggagtggacaggagtggatgcgataagatgtggtttgaagctgatgggtgccagccctgcattgctgagtcaatcaataaagagctttcttttgaccca

SEQ ID NO: 448090 - DNA, 1005 bp, Homo sapiens
ggactgctcttccagaggcaagaccaaccaagatgagtgccctgggagctgtcattgccctcctgctctggggacagctttttgcagtggactcaggcaatgatgtcacggatatcgcagatgacggctgcccgaagccccccgagattgcacatggctatgtggagcactcggttcgctaccagtgtaagaactactacaaactgcgcacagaaggagatggagtatacaccttaaatgataagaagcagtggataaataaggctgttggagataaacttcctgaatgtgaagcagatgacggctgcccgaagccccccgagattgcacatggctatgtggagcactcggttcgctaccagtgtaagaactactacaaactgcgcacagaaggagatggtaagatgtggacaactgtctccatgccctacatacaacccccttctctgacatttccatgatgggtggtgctgaggtgattcgccagaaagttcgttgctctccttggagccaggagatttagattctaataagcgttttgtcgccagtagccatggccctttgggcagactaacttttgtcagcctcaagttttctgttttgttaaggggaggcgatgccatgcagcctacctcatgtaaatctcagagtcagatttacatctccagcagatgtgggaaaagaaggaatgctgatgatgatgtcaccctcacctagtgagtcttgctgtcctggcactgctctaagggctttatacttatttgctcacttagtcctcacagtatccctctgaacagagtttattgttttcactttgctgataaggaaactgaggcacagacaggttgagtatcttgcccaaattcaggcagcctgtaagaggcagagtcaggatttgaaccctgagccctccctgtactgcttggctgtgaccgccatgaccacagtgtgttctgctgggcttaactggcatccaggcacttggcttccagcacagcactcttt

SEQ ID NO: 448091 - DNA, 966 bp, Homo sapiens
  misc_feature (966)..(966): n is a, c, g, or t
ggactgctcttccagaggcaagaccaaccaagatgagtgccctgggagctgtcattgccctcctgctctggggacagctttttgcagtggactcaggcaatgatgtcacggatatcgcagatgacggctgcccgaagccccccgagattgcacatggctatgtggagcactcggttcgctaccagtgtaagaactactacaaactgcgcacagaaggagatggagtgtacaccttaaacaatgagaagcagtggataaataaggctgttggagatatcaaagctctgtttgtgtctgaggaggagacaaagctgactcggccaggaggtctacatcaagaatggggatacagaaaggcaagctgtgcagagagatgctcaagcatgccccaggctatgacaaagtccaggacatctcagtaggtggtcacccatcggatcctcatgtacggcaggagtgagtcccctatgcagaccccaaacaacttgccagaggtgatctggcggccctgacagtctccacacagagaacgtcgacccatacaagcacggtgcaacccagcacgaggcacacagcaggagccagcacacaacccagcacagcggcaccaagccggtacctgccacaggcccgacactgcaaacattcaacccccttaagctgcaggccgcatgaacgagacaccccaagcagcgcatagagtcatcaagacggggctaccgtgcggaactcgaggctaggcatcgatcaaacgtggaaaacaaaaacaacaaccacaacgacaacacaacctgcacaaaacaaccacaacaaatggcgagccaagagcatcacaatactcggcgagaccgagaacgcaaaacgtaccagacatcacactccatagtcgagcaaggcacacggacaatgacaagaaacacaagatacacagacacaacacggcgatccaggcggatccacagtcgn

SEQ ID NO: 448092 - DNA, 615 bp, Homo sapiens
ggactgctcttccagaggcaagaccaaccaagatgagtgccctgggagctgtcattgccctcctgctctggggacagctttttgcagtggactcaggcaatgatgtcacggatatcgcagatgacggctgcccgaagccccccgagattgcacatggctatgtggagcactcggttcgctaccagtgtaagaactactacaaactgcgcacagaaggagatgaatgaacacaccttctgtgctggcatgtctaagtaccaagaagacacctgctatggcgatgcgggcagtgcctttgccgttcacgacctggaggaggacatgtggctgagtatggtgtgtatgtgaaggtgacttccatccaggactgggttcagaagaccatagctgagaactaatgcaaggctggccggaagcccttgcctgaaagcaagatttcagcctggaagagggcaaagtggacgggagtggacaggagtggatgcgataagatgtggtttgaagctgatgggtgccagccctgcattgctgagtcaatcaataaagagctttcttttgacccaaaaaaaaaaaaaaaaaaaaaaaaaaaaaaaaaaaaaaaaaaatttggggcgc

SEQ ID NO: 448093 - DNA, 448 bp, Homo sapiens
ggactgctcttccagaggcaagaccaaccaagatgagtgccctgggagctgtcattgccctcctgctctggggacagctttttgcagtggactcaggcaatgatgtcacggatatcgcagatgacggctgcccgaagccccccgagattgcacattgtggctgagtatggtgtgtatgtgaaggtgacttccatccaggactgggttcagaagaccatagctgagaactaatgcaaggctggccggaagcccttgcctgaaagcaagatttcagcctggaagagggcaaagtggacgggagtggacaggagtggatgcgataagatgtggtttgaagctgatgggtgccagccctgcattgctgagtcaatcaataaagagctttcttttgacccaaaaaaaaaaaaaaaaaaaaaaaaaaaaaaaaaaaaaaaaaaatttggggcgc

SEQ ID NO: 448094 - DNA, 269 bp, Homo sapiens
ctctctgcagtgacctgggagctgtcatttccctcctgctctggggacgacagctttttgcactgtactcaggcaatgatgtcacggatatttcaggtcagtctttgagttgggtaggagcatgcatccctggcactgccacatcccactctgactctctcgggtctgcattctttctttgagaacacacagttccccattcttatcctgacctctgggctttcaggactgccaagaacattggggatcctgccagaaatgaggggagc

SEQ ID NO: 448095 - DNA, 515 bp, Homo sapiens
gaaactgaggcacagacaggttgagtatcttgcccaaattcaggcagcctgtaagaggcagagtcaggatttgaaccctgagccctccctgtactgcttggctgtgaccgccatgaccacagtgtgttctgctgggcttaactggcatccaggcacttggcttccagcacagcactctttcccttcctccttctcatatactctctccttttccccttcctttttgtccccttttcctcttccttttagttcttctctttaaatgccttctcactctgcacggggtctagacttgacttctcctttggctcacttcttgccttttgtttcaggagtgtacaccttaaacaatgagaagcagtggataaataaggctgttggagataaacttcctgaatgtgaagcaggtgggtgctgagcacttaagagagcaggcaggcgtccagcggggaacgtcctagaggcacagccttccagtgcggcttcctctgagcacacaagagccaggaggaggg

SEQ ID NO: 448096 - DNA, 386 bp, Homo sapiens
gggtgcagccccatactgaatgaacacaccttctgtgctggcatgtctaagtaccaagaagacacctgctatggcgatgcgggcagtgcctttgccgttcacgacctggaggaggacacctggtatgcgactgggatcttaagctttgataagagctgtgctgtggctgagtatggtgtgtatgtgaaggtgacttccatccaggactgggttcagaagaccatagctgagaactaatgcaaggctggccggaagcccttgcctgaaagcaagatttcagcctggaagagggcaaagtggacgggagtggacaggagtggatgcgataagatgtggtttgaagctgatgggtgccagccctgcattgctgagtcaatcaataaaga

SEQ ID NO: 448097 - DNA, 1419 bp, Homo sapiens
ggactgctcttccagaggcaagaccaaccaagatgagtgccctgggagctgtcattgccctcctgctctggggacagctttttgcagtggactcaggcaatgatgtcacggatatcgcagatgacggctgcccgaagccccccgagattgcacatggctatgtggagcactcggttcgctaccagtgtaagaactactacaaactgcgcacagaaggagatggagtatacaccttaaatgataagaagcagtggataaataaggctgttggagataaacttcctgaatgtgaagcagatgacggctgcccgaagccccccgagattgcacatggctatgtggagcactcggttcgctaccagtgtaagaactactacaaactgcgcacagaaggagatggagtgtacaccttaaacaatgagaagcagtggataaataaggctgttggagataaacttcctgaatgtgaagcagtatgtgggaagcccaagaatccggcaaacccagtgcagcggatcctgggtggacacctggatgccaaaggcagctttccctggcaggctaagatggtttcccaccataatctcaccacaggtgccacgctgatcaatgaacaatggctgctgaccacggctaaaaatctcttcctgaaccattcagaaaatgcaacagcgaaagacattgcccctactttaacactctatgtggggaaaaagcagcttgtagagattgagaaggttgttctacaccctaactactcccaggtagatattgggctcatcaaactcaaacagaaggtgtctgttaatgagagagtgatgcccatctgcctaccttcaaaggattatgcagaagtagggcgtgtgggttatgtttctggctgggggcgaaatgccaattttaaatttactgaccatctgaagtatgtcatgctgcctgtggctgaccaagaccaatgcataaggcattatgaaggcagcacagtccccgaaaagaagacaccgaagagccctgtaggggtgcagccccatactgaatgaacacaccttctgtgctggcatgtctaagtaccaagaagacacctgctatggcgatgcgggcagtgcctttgccgttcacgacctggaggaggacacctggtatgcgactgggatcttaagctttgataagagctgtgctgtggctgagtatggtgtgtatgtgaaggtgacttccatccaggactgggttcagaagaccatagctgagaactaatgcaaggctggccggaagcccttgcctgaaagcaagatttcagcctggaagagggcaaagtggacgggagtggacaggagtggatgcgataagatgtggtttgaagctgatgggtgccagccctgcattgctgagtcaatcaataaagagctttcttttgaccca

SEQ ID NO: 448098 - DNA, 718 bp, Homo sapiens
ggactgctcttccagaggcaagaccaaccaagatgagtgccctgggagctgtcattgccctcctgctctggggacagctttttgcagtggactcaggcaatgatgtcacggatatcgcagatgacggctgcccgaagccccccgagattgcacatggctatgtggagcactcggttcgctaccagtgtaagaactactacaaactgcgcacagaaggagatggagtgtacaccttaaacaatgagaagcagtggataaataaggctgttggagataaacttcctgaatgtgaagcagtatgtgggaagcccaagaatccggcaaacccagtgcagcggatcctgggtggacacctggatgccaaaggcagctttccctggcaggctaagatggtttcccacctgcctttgccgttcacgacctggaggaggacacctggtatgcgactgggatcttaagctttgataagagctgtgctgtggctgagtatggtgtgtatgtgaaggtgacttccatccaggactgggttcagaagaccatagctgagaactaatgcaaggctggccggaagcccttgcctgaaagcaagatttcagcctggaagagggcaaagtggacgggagtggacaggagtggatgcgataagatgtggtttgaagctgatgggtgccagccctgcattgctgagtcaatcaataaagagctttcttttgaccca

SEQ ID NO: 448099 - DNA, 565 bp, Homo sapiens
ggactgctcttccagaggcaagaccaaccaagatgagtgccctgggagctgtcattgccctcctgctctggggacagctttttgcagtggactcaggcaatgatgtcacggatatcgcagatgacggctgcccgaagccccccgagattgcacatggctatgtggagcactcggttcgctaccagtgtaagaactactacaaactgcgcacagaaggagatgagacacctgctatggcgatgcgggcagtgcctttgccgttcacgacctggaggaggacacctggtatgcgactgggatcttaagctttgataagagctgtgctgtggctgagtatggtgtgtatgtgaaggtgacttccatccaggactgggttcagaagaccatagctgagaactaatgcaaggctggccggaagcccttgcctgaaagcaagatttcagcctggaagagggcaaagtggacgggagtggacaggagtggatgcgataagatgtggtttgaagctgatgggtgccagccctgcattgctgagtcaatcaataaagagctttcttttgaccca

SEQ ID NO: 448100 - DNA, 624 bp, Homo sapiens
ggactgctcttccagaggcaagaccaaccaagatgagtgccctgggagctgtcattgccctcctgctctggggacagctttttgcagtggactcaggcaatgatgtcacggatatcgcagatgacggctgcccgaagccccccgagattgcacatggctatgtggagcactcggttcgctaccagtgtaagaactactacaaactgcgcacagaaggagatgcttctagtaggagggctgaaagggagcaacttttcctccaatcctggaaattcgacacaattagatttgaactgctggaaatacaacacatgttaaatcttaagtacaagggggaaaaaataaatcagttattgaaacataaaaatgaataccaaggacctgatcaaatttcacacagcagtttccttgcaacactttcagctccccatgctccagaatacccacccaagaaaataataggctttaaaacaatatcggctcctcatccaaagaacaactgctgattgaaacacctcattagctgagtgtagagaagtgcatcttatgaaacagtcttagcagtggtaggttgggaaggagatagctgcaaccaaaaaagaaataaatattctataaaccttc

SEQ ID NO: 448101 - DNA, 809 bp, Homo sapiens
  misc_feature (540)..(541): n is a, c, g, or t
ggactgctcttccagaggcaagaccaaccaagatgagtgccctgggagctgtcattgccctcctgctctggggacagctttttgcagtggactcaggcaatgatgtcacggatatcgcagatgacggctgcccgaagccccccgagattgcacatggctatgtggagcactcggttcgctaccagtgtaagaactactacaaactgcgcacagaaggagatgtgcctttgccgttcacgacctggaggaggacacctggtatgcgactgggatcttaagctttgataagagctgtgctgtggctgagtatggtgtgtatgtgaaggtgacttccatccaggactgggttcagaagaccatagctgagaactaatgcaaggctggccggaagcccttgcctgaaagcaagatttcagcctggaagagggcaaagtggacgggagtggacaggagtggatgcgataagatgtggtttgaagctgatgggtgccagccctgcattgctgagtcaatcaataaagagctttcttttgacccatnnaaaaaaaaccacaacaaaaacttttggcccccttgggccccggaaaagtttcaaaacattcgttggggcggggcgcaaggggaacgggaaccgggcaaagcggtccaaggaaacccgtgcgccagagaaaagagcggagagatttcccaccatgtaaaaaaagcccggggggaacaccggcgcgttctggaacacactccgagagggccctcagaggcacaaaacgggacgcatccagagggtgccagaggaaaccgcaataaaaccg

SEQ ID NO: 448102 - DNA, 399 bp, Homo sapiens
ggactgctcttccagaggcaagaccaaccaagatgagtgccctgggagctgtcattgccctcctgctctggggacagctttttgcagtggactcaggcaatgatgtcacggatatcgcagatgacggctgcccgaagccccccgagattgcacatggctatgtggagcactcggttcgctaccagtgtaagaactactacaaactgcgcacagaaggagatgtgtggctgagtatggtgtgtatgtgaaggtgacttccatccaggactgggttcagcctggaagagggcaaagtggacgggagtggacaggagtggatgcgataagatgtggtttgaagctgatgggtgccagccctgcattgctgagtcaatcaataaagagctttcttttgaccca

SEQ ID NO: 448103 - DNA, 828 bp, Homo sapiens
ggactgctcttccagaggcaagaccaaccaagatgagtgccctgggagctgtcattgccctcctgctctggggacagctttttgcagtggactcaggcaatgatgtcacggatatcgcagatgacggctgcccgaagccccccgagattgcacatggctatgtggagcactcggttcgctaccagtgtaagaactactacaaactgcgcacagaaggagatggtaagatgtggacaactgtctccatgccctacatacaacccccttctctgacatttccatgatgggtggtgctgaggtgattcgccagaaagttcgttgctctccttggagccaggagatttagattctaataagcgttttgtcgccagtagccatggccctttgggcagactaacttttgtcagcctcaagttttctgttttgttaaggggaggcgatgccatgcagcctacctcatgtaaatctcagagtcagatttacatctccagcagatgtgggaaaagaaggaatgctgatgatgatgtcaccctcacctagtgagtcttgctgtcctggcactgctctaagggctttatacttatttgctcacttagtcctcacagtatccctctgaacagagtttattgttttcactttgctgataaggaaactgaggcacagacaggttgagtatcttgcccaaattcaggcagcctgtaagaggcagagtcaggatttgaaccctgagccctccctgtactgcttggctgtgaccgccatgaccacagtgtgttctgctgggcttaactggcatccaggcacttggcttccagcacagcactcttt

SEQ ID NO: 448104 - DNA, 1443 bp, Homo sapiens
  misc_feature (1443)..(1443): n is a, c, g, or t
ggactgctcttccagaggcaagaccaaccaagatgagtgccctgggagctgtcattgccctcctgctctggggacagctttttgcagtggactcaggcaatgatgtcacggatatcgcagatgacggctgcccgaagccccccgagattgcacatggctatgtggagcactcggttcgctaccagtgtaagaactactacaaactgcgcacagaaggagatggagtgtacaccttaaacaatgagaagcagtggataaataaggctgttggagataaacttcctgaatgtgaagcagtatgtgggaagcccaagaatccggcaaacccagtgcagcggatcctgggtggacacctggatgccaaaggcagctttccctggcaggctaagatggtttcccaccataatctcaccacaggtgccacgctgatcaatgaacaatggctgctgaccacggctaaaaatctcttcctgaaccattcagaaaatgcaacagcgaaagacattgcccctactttaacactctatgtggggaaaaagcagcttgtagagattgagaaggttgttctacaccctaactactcccaggtagatattgggctcatcaaactcaaacagaaggtgtctgttaatgagagagtgatgcccatctgcctaccttcaaaggattatgcagaagtagggcgtgtgggttatgtttctggctgggggcgaaatgccaattttaaatttactgaccatctgaagtatgtcatgctgcctgtggctgaccaagaccaatgcataaggcattatgaaggcagcacagtccccgaaaagaagacaccgaagagccctgtaggggtgcagccccatactgaatgaacacaccttctgtgctggcatgtctaagtaccaagaagacacctgctatggcgatgcgggcagtgcctttgccgttcacgacctggaggaggacacctggtatgcgactgggatcttaagctttgataagagctgtgctgtggctgagtatggtgtgtatgtgaaggtgacttccatccaggactgggttcagaagaccatagctgagaactaatgcaaggctggccggaagcccttgcctgaaagcaagatttcagcctggaagagggcaaagtggacgggagtggacaggagtggatgcgataagatgtggtttgaagctgatgggtgccagccctgcattgctgagtcaatcaataaagagctttcttttgacccaaaaaaaaaaaaaaaaaaaaaaaaaaaaaaattgtggtggggggattgggcccttgaaaagggttttgaaaacattctgggtgggagcccgggggccaagatgggataggtggaccatgggacaaaaggggttcccaaggaaaaccggggaccaagaaacaaagggcgagggatttctccacaagttaaaaaaggcccggan

SEQ ID NO: 448105 - DNA, 1264 bp, Homo sapiens
ggactgctcttccagaggcaagaccaaccaagatgagtgccctgggagctgtcattgccctcctgctctggggacagctttttgcagtggactcaggcaatgatgtcacggatatcgcagatgacggctgcccgaagccccccgagattgcacatggctatgtggagcactcggttcgctaccagtgtaagaactactacaaactgcgcacagaaggagatggagtgtacaccttaaacaatgagaagcagtggataaataaggctgttggagataaacttcctgaatgtgaagcagtatgtgggaagcccaagaatccggcaaacccagtgcagcggatcctgggtggacacctggatgccaaaggcagctttccctggcaggctaagatggtttcccaccataatctcaccacaggtgccacgctgatcaatgaacaatggctgctgaccacggctaaaaatctcttcctgaaccattcagaaaatgcaacagcgaaagacattgcccctactttaacactctatgtggggaaaaagcagcttgtagagattgagaaggttgttctacaccctaactactcccaggtagatattgggctcatcaaactcaaacagaaggtgtctgttaatgagagagtgatgcccatctgcctaccttcaaaggattatgcagaagtagggcgtgtgggttatgtttctggctgggggcgaaatgccaattttaaatttactgaccatctgaagtatgtcatgctgcctgtggctgaccaagaccaatgcataaggcattatgaaggcagcacagtccccgaaaagaagacaccgaagagccctgtaggggtgcagccccatactgaatgaacacaccttctgtgctggcatgtctaagtaccaagaagacacctgctatggcgatgcgggcagtgcctttgccgttcacgacctggaggaggacacctggtatgcgactgggatcttaagctttgataagagctgtgctgtggctgagtatggtgtgtatgtgaaggtgacttccatccaggactgggttcagaagaccatagctgagaactaatgcaaggctggccggaagcccttgcctgaaagcaagatttcagcctggaagagggcaaagtggacgggagtggacaggagtggatgcgataagatgtggtttgaagctgatgggtgccagccctgcattgctgagtcaatcaataaagagctttcttttgacccaaaaaaaaaaaaatttggggcgc

SEQ ID NO: 448106 - DNA, 1192 bp, Homo sapiens
ggactgctcttccagaggcaagaccaaccaagatgagtgccctgggagctgtcattgccctcctgctctggggacagctttttgcagtggactcaggcaatgatgtcacggatatcgcagatgacggctgcccgaagccccccgagattgcacatggctatgtggagcactcggttcgctaccagtgtaagaactactacaaactgcgcacagaaggagatggagtgtacaccttaaacaatgagaagcagtggataaataaggctgttggagataaacttcctgaatgtgaagcagtatgtgggaagcccaagaatccggcaaacccagtgcagcggatcctgggtggacacctggatgccaaaggcagctttccctggcaggctaagatggtttcccaccataatctcaccacaggtgccacgctgatcaatgaacaatggctgctgaccacggctaaaaatctcttcctgaaccattcagaaaatgcaacagcgaaagacattgcccctactttaacactctatgtggggaaaaagcagcttgtagagattgagaaggttgttctacaccctaactactcccaggtagatattgggctcatcaaactcaaacagaaggtgtctgttaatgagagagtgatgcccatctgcctaccttcaaaggattatgcagaagtagggcgtgtgggttatgtttctggctgggggcgaaatgccaattttaaatttactgaccatctgaagtatgtcatgctgcctgtggctgaccaagaccaatgcataaggcattatgaaggcagcacagtaatgaacacaccttctgtgctggcatgtctaagtaccaagaagacacctgctatggcgatgcgggcagtgcctttgccgttcacgacctggaggaggacacctggtatgcgactgggatcttaagctttgataagagctgtgctgtggctgagtatggtgtgtatgtgaaggtgacttccatccaggactgggttcagaagaccatagctgagaactaatgcaaggctggccggaagcccttgcctgaaagcaagatttcagcctggaagagggcaaagtggacgggagtggacaggagtggatgcgataagatgtggtttgaagctgatgggtgccagccctgcattgctgagtcaatcaataaagagctttcttttgaccca

SEQ ID NO: 448107 - DNA, 1191 bp, Homo sapiens
ggactgctcttccagaggcaagaccaaccaagatgagtgccctgggagctgtcattgccctcctgctctggggacagctttttgcagtggactcaggcaatgatgtcacggatatcgcagatgacggctgcccgaagccccccgagattgcacatggctatgtggagcactcggttcgctaccagtgtaagaactactacaaactgcgcacagaaggagatggagtgtacaccttaaacaatgagaagcagtggataaataaggctgttggagataaacttcctgaatgtgaagcagtatgtgggaagcccaagaatccggcaaacccagtgcagcggatcctgggtggacataatctcaccacaggtgccacgctgatcaatgaacaatggctgctgaccacggctaaaaatctcttcctgaaccattcagaaaatgcaacagcgaaagacattgcccctactttaacactctatgtggggaaaaagcagcttgtagagattgagaaggttgttctacaccctaactactcccaggtagatattgggctcatcaaactcaaacagaaggtgtctgttaatgagagagtgatgcccatctgcctaccttcaaaggattatgcagaagtagggcgtgtgggttatgtttctggctgggggcgaaatgccaattttaaatttactgaccatctgaagtatgtcatgctgcctgtggctgaccaagaccaatgcataaggcattatgaaggcagcacagtccccgaaaagaagacaccgaagagccctgtaggggtgcagccccatactgaatgaacacaccttctgtgctggcatgtctaagtaccaagaagacacctgctatggcgatgcgggcagtgcctttgccgttcacgacctggaggaggacacctggtatgcgactgggatcttaagctttgataagagctgtgctgtggctgagtatggtgtgtatgtgaaggtgacttccatccaggactgggttcagaagaccatagctgagaactaatgcaaggctggccggaagcccttgcctgaaagcaagatttcagcctggaagagggcaaagtggacgggagtggacaggagtggatgcgataagatgtggtttgaagctgatgggtgccagccctgcattgctgagtcaatcaataaagagctttcttttgaccca

SEQ ID NO: 448108 - DNA, 1062 bp, Homo sapiens
ggactgctcttccagaggcaagaccaaccaagatgagtgccctgggagctgtcattgccctcctgctctggggacagctttttgcagtggactcaggcaatgatgtcacggatatcgcagatgacggctgcccgaagccccccgagattgcacatggctatgtggagcactcggttcgctaccagtgtaagaactactacaaactgcgcacagaaggagatgataatctcaccacaggtgccacgctgatcaatgaacaatggctgctgaccacggctaaaaatctcttcctgaaccattcagaaaatgcaacagcgaaagacattgcccctactttaacactctatgtggggaaaaagcagcttgtagagattgagaaggttgttctacaccctaactactcccaggtagatattgggctcatcaaactcaaacagaaggtgtctgttaatgagagagtgatgcccatctgcctaccttcaaaggattatgcagaagtagggcgtgtgggttatgtttctggctgggggcgaaatgccaattttaaatttactgaccatctgaagtatgtcatgctgcctgtggctgaccaagaccaatgcataaggcattatgaaggcagcacagtccccgaaaagaagacaccgaagagccctgtaggggtgcagccccatactgaatgaacacaccttctgtgctggcatgtctaagtaccaagaagacacctgctatggcgatgcgggcagtgcctttgccgttcacgacctggaggaggacacctggtatgcgactgggatcttaagctttgataagagctgtgctgtggctgagtatggtgtgtatgtgaaggtgacttccatccaggactgggttcagaagaccatagctgagaactaatgcaaggctggccggaagcccttgcctgaaagcaagatttcagcctggaagagggcaaagtggacgggagtggacaggagtggatgcgataagatgtggtttgaagctgatgggtgccagccctgcattgctgagtcaatcaataaagagctttcttttgaccca

SEQ ID NO: 448109 - DNA, 1612 bp, Homo sapiens
ggactgctcttccagaggcaagaccaaccaagatgagtgccctgggagctgtcattgccctcctgctctggggacagctttttgcagtggactcaggcaatgatgtcacggatatcgcagatgacggctgcccgaagccccccgagattgcacatggctatgtggagcactcggttcgctaccagtgtaagaactactacaaactgcgcacagaaggagatggagtgtacaccttaaacaatgagaagcagtggataaataaggctgttggagataaacttcctgaatgtgaagcagtatgtgggaagcccaagaatccggcaaacccagtgcagcggatcctgggtggacacctggatgccaaaggcagctttccctggcaggctaagatggtttcccaccataatctcaccacaggtgccacgctgatcaatgaacaatggctgctgaccacggctaaaaatctcttcctgaaccattcagaaaatgcaacagcgaaagacattgcccctactttaacactctatgtggggaaaaagcagcttgtagagattgagaaggttgttctacaccctaactactcccaggtagatattgggctcatcaaactcaaacagaaggtgtctgttaatgagagagtgatgcccatctgcctaccttcaaaggattatgcagaagtagggcgtgtgggttatgtttctggctgggggcgaaatgccaattttaaatttacctttccctggcaggctaagatggtttcccaccataatctcaccacaggtgccacgctgatcaatgaacaatggctgctgaccacggctaaaaatctcttcctgaaccattcagaaaatgcaacagcgaaagacattgcccctactttaacactctatgtggggaaaaagcagcttgtagagattgagaaggtggttctacaccctaactaccaccaggtagatattgggctcatcaaactcaaacagaaggtgcttgttaatgagagagtgatgcccatctgcctaccttcaaagaattatgcagaagtagggcgtgtgggttacgtgtctggctggggacaaagtgacaactttaaacttactgaccatctgaagtatgtcatgctgcctgtggctgaccaatacgattgcataacgcattatgaaggcagcacatgccccaaatggaaggcaccgaagagccctgtaggggtgcagcccatactgaacgaacacaccttctgtgtcggcatgtctaagtaccaggaagacacctgctatggcgatgcgggcagtgcctttgccgttcacgacctggaggaggacacctggtacgcggctgggatcctaagctttgataagagctgtgctgtggctgagtatggtgtgtatgtgaaggtgacttccatccagcactgggttcagaagaccatagctgagaactaatgcaaggctggccggaagcccttgcctgaaagcaagatttcagcctggaagagggcaaagtggacgggagtggacaggagtggatgcgataagatgtggtttgaagctgatgggtgccagccctgcattgctgagtcaatcaataaagagctttcttttgacccatttctgtg

SEQ ID NO: 448110 - DNA, 811 bp, Homo sapiens
ggactgctcttccagaggcaagaccaaccaagatgagtgccctgggagctgtcattgccctcctgctctggggacagctttttgcagtggactcaggcaatgatgtcacggatatcgcagatgacggctgcccgaagccccccgagattgcacatggctatgtggagcactcggttcgctaccagtgtaagaactactacaaactgcgcacagaaggagatgctaccttcaaaggattatgcagaagtagggcgtgtgggttatgtttctggctgggggcgaaatgccaattttaaatttactgaccatctgaagtatgtcatgctgcctgtggctgaccaagaccaatgcataaggcattatgaaggcagcacagtccccgaaaagaagacaccgaagagccctgtaggggtgcagccccatactgaatgaacacaccttctgtgctggcatgtctaagtaccaagaagacacctgctatggcgatgcgggcagtgcctttgccgttcacgacctggaggaggacacctggtatgcgactgggatcttaagctttgataagagctgtgctgtggctgagtatggtgtgtatgtgaaggtgacttccatccaggactgggttcagaagaccatagctgagaactaatgcaaggctggccggaagcccttgcctgaaagcaagatttcagcctggaagagggcaaagtggacgggagtggacaggagtggatgcgataagatgtggtttgaagctgatgggtgccagccctgcattgctgagtcaatcaataaagagctttcttttgaccca

SEQ ID NO: 448111 - DNA, 906 bp, Homo sapiens
ggactgctcttccagaggcaagaccaaccaagatgagtgccctgggagctgtcattgccctcctgctctggggacagctttttgcagtggactcaggcaatgatgtcacggatatcgcagatgacggctgcccgaagccccccgagattgcacatggctatgtggagcactcggttcgctaccagtgtaagaactactacaaactgcgcacagaaggagatggagtgtacaccttaaacaatgagaagcagtggataaataaggctgttggagataaacttcctgaatgtgaagcagtatgtgggaagcccaagaatccggcaaacccagtgcagcggatcctgggtggacacctggatgccaaaggcagctttccctggcaggctaagatggtttcccaccataatctcaccacaggtgccacgctgatcaatgaacaatggctgctgaccacggctaaaaatctcttcctgaaccattcagaaaatgcaacagcgaaagacattgcccctactttaacacaatgaacacaccttctgtgctggcatgtctaagtaccaagaagacacctgctatggcgatgcgggcagtgcctttgccgttcacgacctggaggaggacacctggtatgcgactgggatcttaagctttgataagagctgtgctgtggctgagtatggtgtgtatgtgaaggtgacttccatccaggactgggttcagaagaccatagctgagaactaatgcaaggctggccggaagcccttgcctgaaagcaagatttcagcctggaagagggcaaagtggacgggagtggacaggagtggatgcgataagatgtggtttgaagctgatgggtgccagccctgcattgctgagtcaatcaataaagagctttcttttgaccca

SEQ ID NO: 448112 - DNA, 799 bp, Homo sapiens
  misc_feature (621)..(621): n is a, c, g, or t
  misc_feature (666)..(666): n is a, c, g, or t
  misc_feature (702)..(702): n is a, c, g, or t
  misc_feature (780)..(780): n is a, c, g, or t
ggactgctcttccagaggcaagaccaaccaagatgagtgccctgggagctgtcattgccctcctgctctggggacagctttttgcagtggactcaggcaatgatgtcacggatatcgcagatgacggctgcccgaagccccccgagattgcacatggctatgtggagcactcggttcgctaccagtgtaagaactactacaaactgcgcacagaaggagatggagtgtacaccttaaacaatgagaagcagtggataaataaggctgttggagataaacttcctgaatgtgaagcagtatgtgggaagcccaagaatccggcaaacccagtgcagcggatcctgggtggacacctggatgccaaaggcagctttccctggcaggctaagatggtttcccaccataatctcaccacaggtgccacgctgatcaatgaacaatggctgctgaccacggctaaaaatctcttcctgaaccattcagaaaatgcaacagcgaaagacattgcccctactttaacacgtagatattgggctcatcaaactcaaacagaaggtgtctgttaatgagagagtgatgcccatctgcctaccttcaaaggattatgcagaagtagggcgngtgtgggtttatgttctgggctggggcgaaatgccaatatgatanggcatatgaggcagacagtcccgaaagagacacganagcctgtaggtgcagcatctgatgaccactctggctgatgttagtccagagcactgtatgcatcgcatgcctgcgtcnactgagagcactgatgcaa

SEQ ID NO: 448113 - DNA, 864 bp, Homo sapiens
ggactgctcttccagaggcaagaccaaccaagatgagtgccctgggagctgtcattgccctcctgctctggggacagctttttgcagtggactcaggcaatgatgtcacggatatcgcagatgacggctgcccgaagccccccgagattgcacatggctatgtggagcactcggttcgctaccagtgtaagaactactacaaactgcgcacagaaggagatggagtatacaccttaaatgataagaagcagtggataaataaggctgttggagataaacttcctgaatgtgaagcagataatctcaccacaggtgccacgctgatcaatgaacaatggctgctgaccacggctaaaaatctcttcctgaaccattcagaaaatgcaacagcgaaagacattgcccctactttaacactctatgtggggaaaaagcagcttgtagagattgagaaggttgttctacaccctaactactcccaggtagatattgggctcatcaaactcaaacagaaggtgtctgttaatgagagagtgatgcccatctgcctaccttcaaaggattatgcagaagtagggcgcctggtatgcgactgggatcttaagctttgataagagctgtgctgtggctgagtatggtgtgtatgtgaaggtgacttccatccaggactgggttcagaagaccatagctgagaactaatgcaaggctggccggaagcccttgcctgaaagcaagatttcagcctggaagagggcaaagtggacgggagtggacaggagtggatgcgataagatgtggtttgaagctgatgggtgccagccctgcattgctgagtcaatcaataaagagctttcttttgaccca

SEQ ID NO: 448114 - DNA, 351 bp, Homo sapiens
  misc_feature (348)..(348): n is a, c, g, or t
ggactgctcttccagaggcaagaccaaccaagatgagtgccctgggagctgtcattgccctcctgctctggggacagctttttgcagtggactcaggcaatgatgtcacggatatcgcagatgacggctgcccgaagccccccgagattgcacatggctatgtggagcactcggttcgctaccagtgtaagaactactacaaactgcgcacagaaggagatggagtatacaccttaaatgataagaagcagtggataaataaggctgttggagataaacttcctgaatgtgaagcagacaatccggggaagcctaagtattccctacctcgtggggctagccatcgangcc

SEQ ID NO: 448115 - DNA, 3474 bp, Homo sapiens
aggttgggagagcggcggagaagcgagtgaggagggcgagcgcgaagccgggaagaggggcgcgcgtggagggggtgccgggcgccgcgagggcctgctccgggcacctgcgaacgcgcggcgctctcaaggagcgcctggctctcgcccgccagcctccggccgcgacgcgcccagggcgcggagagggggtggggacggattgggattctgccatcgccctcaccggctgggccctggagccgctcccaggataactccacgttggggagggcgcccgccgagcctccccggcctgtgcagacggcgcgcgcggcgggagggcgcggaccagcgtccccagcccggccccgggcggaaggcgagcggagcgcggccgcgcgggcagcagacggcagacggtgcccggcgcccacgggggctgcccctgatggggcctggcaatgactgagcaggcccagccccagaggacaaggaagagaaggcatattgaggagggcaagaagtgacgcccggtgtagaatgactgccctgggagggtggttccttgggccctggcagggttgctgacccttaccctgcaaaacacaaagagcaggactccagactcttcttgtgaatggtcccctgccctgcagctccaccatgaggcttctcgtggccccactcttgctagcttgggtggctggtgccactgccgctgtgcccgtggtaccctggcatgttccctgcccccctcagtgtgcctgccagatccggccctggtatacgccccgctcgtcctaccgcgaggctaccactgtggactgcaatgacctattcctgacggcagtccccccggcactccccgcaggcacacagaccctgctcctgcagagcaacagcattgtccgtgtggaccagagtgagctgggctacctggccaatctcacagagctggacctgtcccagaacagcttttcggatgcccgagactgtgatttccatgccctgccccagctgctgagcctgcacctagaggagaaccagctgacccggctggaggaccacagctttgcagggctggccagcctacaggaactctatctcaaccacaaccagctctaccgcatcgcccccagggccttttctggcctcagcaacttgctgcggctgcacctcaactccaacctcctgagggccattgacagccgctggtttgaaatgctgcccaacttggagatactcatgattggcggcaacaaggtagatgccatcctggacatgaacttccggcccctggccaacctgcgtagcctggtgctagcaggcatgaacctgcgggagatctccgactatgccctggaggggctgcaaagcctggagagcctctccttctatgacaaccagctggcccgggtgcccaggcgggcactggaacaggtgcccgggctcaagttcctagacctcaacaagaacccgctccagcgggtagggccgggggactttgccaacatgctgcaccttaaggagctgggactgaacaacatggaggagctggtctccatcgacaagtttgccctggtgaacctccccgagctgaccaagctggacatcaccaataacccacggctgtccttcatccacccccgcgccttccaccacctgccccagatggagaccctcatgctcaacaacaacgctctcagtgccttgcaccagcagacggtggagtccctgcccaacctgcaggaggtaggtctccacggcaaccccatccgctgtgactgtgtcatccgctgggccaatgccacgggcacccgtgtccgcttcatcgagccgcaatccaccctgtgtgcggagcctccggacctccagcgcctcccggtccgtgaggtgcccttccgggagatgacggaccactgtttgcccctcatctccccacgaagcttccccccaagcctccaggtagccagtggagagagcatggtgctgcattgccgggcactggccgaacccgaacccgagatctactgggtcactccagctgggcttcgactgacacctgcccatgcaggcaggaggtaccgggtgtaccccgaggggaccctggagctgcggagggtgacagcagaagaggcagggctatacacctgtgtggcccagaacctggtgggggctgacactaagacggttagtgtggttgtgggccgtgctctcctccagccaggcagggacgaaggacaggggctggagctccgggtgcaggagacccacccctatcacatcctgctatcttgggtcaccccacccaacacagtgtccaccaacctcacctggtccagtgcctcctccctccggggccagggggccacagctctggcccgcctgcctcggggaacccacagctacaacattacccgcctccttcaggccacggagtactgggcctgcctgcaagtggcctttgctgatgcccacacccagttggcttgtgtatgggccaggaccaaagaggccacttcttgccacagagccttaggggatcgtcctgggctcattgccatcctggctctcgctgtccttctcctggcagctgggctagcggcccaccttggcacaggccaacccaggaagggtgtgggtgggaggcggcctctccctccagcctgggctttctggggctggagtgccccttctgtccgggttgtgtctgctcccctcgtcctgccctggaatccagggaggaagctgcccagatcctcagaaggggagacactgttgccaccattgtctcaaaattcttgaagctcagcctgttctcagcagtagagaaatcactaggactactttttaccaaaagagaagcagtctgggccagatgccctgccaggaaagggacatggacccacgtgcttgaggcctggcagctgggccaagacagatggggctttgtggccctgggggtgcttctgcagccttgaaaaagttgcccttacctcctagggtcacctctgctgccattctgaggaacatctccaaggaacaggagggactttggctagagcctcctgcctccccatcttctctctgcccagaggctcctgggcctggcttggctgtcccctacctgtgtccccgggctgcaccccttcctcttctctttctctgtacagtctcagttgcttgctcttgtgcctcctgggcaagggctgaaggaggccactccatctcacctcggggggctgccctcaatgtgggagtgaccccagccagatctgaaggacatttgggagagggatgcccaggaacgcctcatctcagcagcctgggctcggcattccgaagctgactttctataggcaattttgtacctttgtggagaaatgtgtcacctcccccaacccgattcactcttttctcctgttttgtaaaaaataaaaataaataataacaataatacgggggaaaggaacgaaaggaaaataaaaatct

SEQ ID NO: 448116 - DNA, 3079 bp, Homo sapiens
gtcacggtaacctcaacccaaaagggctgcccctgatggggcctggcaatgactgagcaggcccagccccagaggacaaggaagagaaggcatattgaggagggcaagaagtgacgcccggtgtagaatgactgccctgggagggtggttccttgggccctggcagggttgctgacccttaccctgcaaaacacaaagagcaggactccagactcttcttgtgaatggtcccctgccctgcagctccaccatgaggcttctcgtggccccactcttgctagcttgggtggctggtgccactgccgctgtgcccgtggtaccctggcatgttccctgcccccctcagtgtgcctgccagatccggccctggtatacgccccgctcgtcctaccgcgaggctaccactgtggactgcaatgacctattcctgacggcagtccccccggcactccccgcaggcacacagaccctgctcctgcagagcaacagcattgtccgtgtggaccagagtgagctgggctacctggccaatctcacagagctggacctgtcccagaacagcttttcggatgcccgagactgtgatttccatgccctgccccagctgctgagcctgcacctagaggagaaccagctgacccggctggaggaccacagctttgcagggctggccagcctacaggaactctatctcaaccacaaccagctctaccgcatcgcccccagggccttttctggcctcagcaacttgctgcggctgcacctcaactccaacctcctgagggccattgacagccgctggtttgaaatgctgcccaacttggagatactcatgattggcggcaacaaggtagatgccatcctggacatgaacttccggcccctggccaacctgcgtagcctggtgctagcaggcatgaacctgcgggagatctccgactatgccctggaggggctgcaaagcctggagagcctctccttctatgacaaccagctggcccgggtgcccaggcgggcactggaacaggtgcccgggctcaagttcctagacctcaacaagaacccgctccagcgggtagggccgggggactttgccaacatgctgcaccttaaggagctgggactgaacaacatggaggagctggtctccatcgacaagtttgccctggtgaacctccccgagctgaccaagctggacatcaccaataacccacggctgtccttcatccacccccgcgccttccaccacctgccccagatggagaccctcatgctcaacaacaacgctctcagtgccttgcaccagcagacggtggagtccctgcccaacctgcaggaggtaggtctccacggcaaccccatccgctgtgactgtgtcatccgctgggccaatgccacgggcacccgtgtccgcttcatcgagccgcaatccaccctgtgtgcggagcctccggacctccagcgcctcccggtccgtgaggtgcccttccgggagatgacggaccactgtttgcccctcatctccccacgaagcttccccccaagcctccaggtagccagtggagagagcatggtgctgcattgccgggcactggccgaacccgaacccgagatctactgggtcactccagctgggcttcgactgacacctgcccatgcaggcaggaggtaccgggtgtaccccgaggggaccctggagctgcggagggtgacagcagaagaggcagggctatacacctgtgtggcccagaacctggtgggggctgacactaagacggttagtgtggttgtgggccgtgctctcctccagccaggcagggacgaaggacaggggctggagctccgggtgcaggagacccacccctatcacatcctgctatcttgggtcaccccacccaacacagtgtccaccaacctcacctggtccagtgcctcctccctccggggccagggggccacagctctggcccgcctgcctcggggaacccacagctacaacattacccgcctccttcaggccacggagtactgggcctgcctgcaagtggcctttgctgatgcccacacccagttggcttgtgtatgggccaggaccaaagaggccacttcttgccacagagccttaggggatcgtcctgggctcattgccatcctggctctcgctgtccttctcctggcagctgggctagcggcccaccttggcacaggccaacccaggaagggtgtgggtgggaggcggcctctccctccagcctgggctttctggggctggagtgccccttctgtccgggttgtgtctgctcccctcgtcctgccctggaatccagggaggaagctgcccagatcctcagaaggggagacactgttgccaccattgtctcaaaattcttgaagctcagcctgttctcagcagtagagaaatcactaggactactttttaccaaaagagaagcagtctgggccagatgccctgccaggaaagggacatggacccacgtgcttgaggcctggcagctgggccaagacagatggggctttgtggccctgggggtgcttctgcagccttgaaaaagttgcccttacctcctagggtcacctctgctgccattctgaggaacatctccaaggaacaggagggactttggctagagcctcctgcctccccatcttctctctgcccagaggctcctgggcctggcttggctgtcccctacctgtgtccccgggctgcaccccttcctcttctctttctctgtacagtctcagttgcttgctcttgtgcctcctgggcaagggctgaaggaggccactccatctcacctcggggggctgccctcaatgtgggagtgaccccagccagatctgaaggacatttgggagagggatgcccaggaacgcctcatctcagcagcctgggctcggcattccgaagctgactttctataggcaattttgtacctttgtggagaaatgtgtcacctcccccaacccgattcactcttttctcctgttttgtaaaaaataaaaataaataataacaataatacgggggaaaggaacgaaaggaaaataaaaatct

SEQ ID NO: 448117 - DNA, 3577 bp, Homo sapiens
aggttgggagagcggcggagaagcgagtgaggagggcgagcgcgaagccgggaagaggggcgcgcgtggagggggtgccgggcgccgcgagggcctgctccgggcacctgcgaacgcgcggcgctctcaaggagcgcctggctctcgcccgccagcctccggccgcgacgcgcccagggcgcggagagggggtggggacggattgggattctgccatcgccctcaccggctgggccctggagccgctcccaggataactccacgttggggagggcgcccgccgagcctccccggcctgtgcagacggcgcgcgcggcgggagggcgcggaccagcgtccccagcccggccccgggcggaaggcgagcggagcgcggccgcgcgggcagcagacggcagacggtgcccggcgcccacgggttctggaggctgggaagtccaagacaaggtgccagcatctggtgaaggctgctgtctgctttcaagatggtgcctcgaatgctgtttcctcacatggcagaagggctgcccctgatggggcctggcaatgactgagcaggcccagccccagaggacaaggaagagaaggcatattgaggagggcaagaagtgacgcccggtgtagaatgactgccctgggagggtggttccttgggccctggcagggttgctgacccttaccctgcaaaacacaaagagcaggactccagactcttcttgtgaatggtcccctgccctgcagctccaccatgaggcttctcgtggccccactcttgctagcttgggtggctggtgccactgccgctgtgcccgtggtaccctggcatgttccctgcccccctcagtgtgcctgccagatccggccctggtatacgccccgctcgtcctaccgcgaggctaccactgtggactgcaatgacctattcctgacggcagtccccccggcactccccgcaggcacacagaccctgctcctgcagagcaacagcattgtccgtgtggaccagagtgagctgggctacctggccaatctcacagagctggacctgtcccagaacagcttttcggatgcccgagactgtgatttccatgccctgccccagctgctgagcctgcacctagaggagaaccagctgacccggctggaggaccacagctttgcagggctggccagcctacaggaactctatctcaaccacaaccagctctaccgcatcgcccccagggccttttctggcctcagcaacttgctgcggctgcacctcaactccaacctcctgagggccattgacagccgctggtttgaaatgctgcccaacttggagatactcatgattggcggcaacaaggtagatgccatcctggacatgaacttccggcccctggccaacctgcgtagcctggtgctagcaggcatgaacctgcgggagatctccgactatgccctggaggggctgcaaagcctggagagcctctccttctatgacaaccagctggcccgggtgcccaggcgggcactggaacaggtgcccgggctcaagttcctagacctcaacaagaacccgctccagcgggtagggccgggggactttgccaacatgctgcaccttaaggagctgggactgaacaacatggaggagctggtctccatcgacaagtttgccctggtgaacctccccgagctgaccaagctggacatcaccaataacccacggctgtccttcatccacccccgcgccttccaccacctgccccagatggagaccctcatgctcaacaacaacgctctcagtgccttgcaccagcagacggtggagtccctgcccaacctgcaggaggtaggtctccacggcaaccccatccgctgtgactgtgtcatccgctgggccaatgccacgggcacccgtgtccgcttcatcgagccgcaatccaccctgtgtgcggagcctccggacctccagcgcctcccggtccgtgaggtgcccttccgggagatgacggaccactgtttgcccctcatctccccacgaagcttccccccaagcctccaggtagccagtggagagagcatggtgctgcattgccgggcactggccgaacccgaacccgagatctactgggtcactccagctgggcttcgactgacacctgcccatgcaggcaggaggtaccgggtgtaccccgaggggaccctggagctgcggagggtgacagcagaagaggcagggctatacacctgtgtggcccagaacctggtgggggctgacactaagacggttagtgtggttgtgggccgtgctctcctccagccaggcagggacgaaggacaggggctggagctccgggtgcaggagacccacccctatcacatcctgctatcttgggtcaccccacccaacacagtgtccaccaacctcacctggtccagtgcctcctccctccggggccagggggccacagctctggcccgcctgcctcggggaacccacagctacaacattacccgcctccttcaggccacggagtactgggcctgcctgcaagtggcctttgctgatgcccacacccagttggcttgtgtatgggccaggaccaaagaggccacttcttgccacagagccttaggggatcgtcctgggctcattgccatcctggctctcgctgtccttctcctggcagctgggctagcggcccaccttggcacaggccaacccaggaagggtgtgggtgggaggcggcctctccctccagcctgggctttctggggctggagtgccccttctgtccgggttgtgtctgctcccctcgtcctgccctggaatccagggaggaagctgcccagatcctcagaaggggagacactgttgccaccattgtctcaaaattcttgaagctcagcctgttctcagcagtagagaaatcactaggactactttttaccaaaagagaagcagtctgggccagatgccctgccaggaaagggacatggacccacgtgcttgaggcctggcagctgggccaagacagatggggctttgtggccctgggggtgcttctgcagccttgaaaaagttgcccttacctcctagggtcacctctgctgccattctgaggaacatctccaaggaacaggagggactttggctagagcctcctgcctccccatcttctctctgcccagaggctcctgggcctggcttggctgtcccctacctgtgtccccgggctgcaccccttcctcttctctttctctgtacagtctcagttgcttgctcttgtgcctcctgggcaagggctgaaggaggccactccatctcacctcggggggctgccctcaatgtgggagtgaccccagccagatctgaaggacatttgggagagggatgcccaggaacgcctcatctcagcagcctgggctcggcattccgaagctgactttctataggcaattttgtacctttgtggagaaatgtgtcacctcccccaacccgattcactcttttctcctgttttgtaaaaaataaaaataaataataacaataatacgggggaaaggaacgaaaggaaaataaaaatct

SEQ ID NO: 448118 - DNA, 3602 bp, Homo sapiens
aggttgggagagcggcggagaagcgagtgaggagggcgagcgcgaagccgggaagaggggcgcgcgtggagggggtgccgggcgccgcgagggcctgctccgggcacctgcgaacgcgcggcgctctcaaggagcgcctggctctcgcccgccagcctccggccgcgacgcgcccagggcgcggagagggggtggggacggattgggattctgccatcgccctcaccggctgggccctggagccgctcccaggataactccacgttggggagggcgcccgccgagcctccccggcctgtgcagacggcgcgcgcggcgggagggcgcggaccagcgtccccagcccggccccgggcggaaggcgagcggagcgcggccgcgcgggcagcagacggcagacggtgcccggcgcccacgggaagctgaagatacagcggtatacaaacctccatgtctcaagctgaccacacttgtatctggacttgccagctgattagctctgttcccaccaggctcgttcaaagacccacagcttgagggggcagagggctgcccctgatggggcctggcaatgactgagcaggcccagccccagaggacaaggaagagaaggcatattgaggagggcaagaagtgacgcccggtgtagaatgactgccctgggagggtggttccttgggccctggcagggttgctgacccttaccctgcaaaacacaaagagcaggactccagactcttcttgtgaatggtcccctgccctgcagctccaccatgaggcttctcgtggccccactcttgctagcttgggtggctggtgccactgccgctgtgcccgtggtaccctggcatgttccctgcccccctcagtgtgcctgccagatccggccctggtatacgccccgctcgtcctaccgcgaggctaccactgtggactgcaatgacctattcctgacggcagtccccccggcactccccgcaggcacacagaccctgctcctgcagagcaacagcattgtccgtgtggaccagagtgagctgggctacctggccaatctcacagagctggacctgtcccagaacagcttttcggatgcccgagactgtgatttccatgccctgccccagctgctgagcctgcacctagaggagaaccagctgacccggctggaggaccacagctttgcagggctggccagcctacaggaactctatctcaaccacaaccagctctaccgcatcgcccccagggccttttctggcctcagcaacttgctgcggctgcacctcaactccaacctcctgagggccattgacagccgctggtttgaaatgctgcccaacttggagatactcatgattggcggcaacaaggtagatgccatcctggacatgaacttccggcccctggccaacctgcgtagcctggtgctagcaggcatgaacctgcgggagatctccgactatgccctggaggggctgcaaagcctggagagcctctccttctatgacaaccagctggcccgggtgcccaggcgggcactggaacaggtgcccgggctcaagttcctagacctcaacaagaacccgctccagcgggtagggccgggggactttgccaacatgctgcaccttaaggagctgggactgaacaacatggaggagctggtctccatcgacaagtttgccctggtgaacctccccgagctgaccaagctggacatcaccaataacccacggctgtccttcatccacccccgcgccttccaccacctgccccagatggagaccctcatgctcaacaacaacgctctcagtgccttgcaccagcagacggtggagtccctgcccaacctgcaggaggtaggtctccacggcaaccccatccgctgtgactgtgtcatccgctgggccaatgccacgggcacccgtgtccgcttcatcgagccgcaatccaccctgtgtgcggagcctccggacctccagcgcctcccggtccgtgaggtgcccttccgggagatgacggaccactgtttgcccctcatctccccacgaagcttccccccaagcctccaggtagccagtggagagagcatggtgctgcattgccgggcactggccgaacccgaacccgagatctactgggtcactccagctgggcttcgactgacacctgcccatgcaggcaggaggtaccgggtgtaccccgaggggaccctggagctgcggagggtgacagcagaagaggcagggctatacacctgtgtggcccagaacctggtgggggctgacactaagacggttagtgtggttgtgggccgtgctctcctccagccaggcagggacgaaggacaggggctggagctccgggtgcaggagacccacccctatcacatcctgctatcttgggtcaccccacccaacacagtgtccaccaacctcacctggtccagtgcctcctccctccggggccagggggccacagctctggcccgcctgcctcggggaacccacagctacaacattacccgcctccttcaggccacggagtactgggcctgcctgcaagtggcctttgctgatgcccacacccagttggcttgtgtatgggccaggaccaaagaggccacttcttgccacagagccttaggggatcgtcctgggctcattgccatcctggctctcgctgtccttctcctggcagctgggctagcggcccaccttggcacaggccaacccaggaagggtgtgggtgggaggcggcctctccctccagcctgggctttctggggctggagtgccccttctgtccgggttgtgtctgctcccctcgtcctgccctggaatccagggaggaagctgcccagatcctcagaaggggagacactgttgccaccattgtctcaaaattcttgaagctcagcctgttctcagcagtagagaaatcactaggactactttttaccaaaagagaagcagtctgggccagatgccctgccaggaaagggacatggacccacgtgcttgaggcctggcagctgggccaagacagatggggctttgtggccctgggggtgcttctgcagccttgaaaaagttgcccttacctcctagggtcacctctgctgccattctgaggaacatctccaaggaacaggagggactttggctagagcctcctgcctccccatcttctctctgcccagaggctcctgggcctggcttggctgtcccctacctgtgtccccgggctgcaccccttcctcttctctttctctgtacagtctcagttgcttgctcttgtgcctcctgggcaagggctgaaggaggccactccatctcacctcggggggctgccctcaatgtgggagtgaccccagccagatctgaaggacatttgggagagggatgcccaggaacgcctcatctcagcagcctgggctcggcattccgaagctgactttctataggcaattttgtacctttgtggagaaatgtgtcacctcccccaacccgattcactcttttctcctgttttgtaaaaaataaaaataaataataacaataatacgggggaaaggaacgaaaggaaaataaaaatct

SEQ ID NO: 448119 - DNA, 3577 bp, Homo sapiens
tgtacacacacacatacacacacatacaccttcctctccttcactgaagactcacagtcactcactctgtgagcaggtcatagaaaaggacactaaagccttaaggacaggcctggccattacctctgcagctcctttggcttgttgagtcaaaaaacatgggaggggccaggcacggtgactcacacctgtaatcccagcattttgggagaccgaggtgagcagatcacttgaggtcaggagttcgagaccagcctggccaacatggagaaacccccatctctactaaaaatacaaaaattagccaggagtggtggcaggtgcctgtaatcccagctactcaggtggctgagccaggagaatcgcttgaatccaggaggcggaggatgcagtcagctgagtgcaccgctgcactccagcctgggtgacagaatgagactctgtctcaaacaaacaaacacgggaggaggggtagatactgcttctctgcaacctccttaactctgcatcctcttctttcagggctgcccctgatggggcctggcaatgactgagcaggcccagccccagaggacaaggaagagaaggcatattgaggagggcaagaagtgacgcccggtgtagaatgactgccctgggagggtggttccttgggccctggcagggttgctgacccttaccctgcaaaacacaaagagcaggactccagactcttcttgtgaatggtcccctgccctgcagctccaccatgaggcttctcgtggccccactcttgctagcttgggtggctggtgccactgccgctgtgcccgtggtaccctggcatgttccctgcccccctcagtgtgcctgccagatccggccctggtatacgccccgctcgtcctaccgcgaggctaccactgtggactgcaatgacctattcctgacggcagtccccccggcactccccgcaggcacacagaccctgctcctgcagagcaacagcattgtccgtgtggaccagagtgagctgggctacctggccaatctcacagagctggacctgtcccagaacagcttttcggatgcccgagactgtgatttccatgccctgccccagctgctgagcctgcacctagaggagaaccagctgacccggctggaggaccacagctttgcagggctggccagcctacaggaactctatctcaaccacaaccagctctaccgcatcgcccccagggccttttctggcctcagcaacttgctgcggctgcacctcaactccaacctcctgagggccattgacagccgctggtttgaaatgctgcccaacttggagatactcatgattggcggcaacaaggtagatgccatcctggacatgaacttccggcccctggccaacctgcgtagcctggtgctagcaggcatgaacctgcgggagatctccgactatgccctggaggggctgcaaagcctggagagcctctccttctatgacaaccagctggcccgggtgcccaggcgggcactggaacaggtgcccgggctcaagttcctagacctcaacaagaacccgctccagcgggtagggccgggggactttgccaacatgctgcaccttaaggagctgggactgaacaacatggaggagctggtctccatcgacaagtttgccctggtgaacctccccgagctgaccaagctggacatcaccaataacccacggctgtccttcatccacccccgcgccttccaccacctgccccagatggagaccctcatgctcaacaacaacgctctcagtgccttgcaccagcagacggtggagtccctgcccaacctgcaggaggtaggtctccacggcaaccccatccgctgtgactgtgtcatccgctgggccaatgccacgggcacccgtgtccgcttcatcgagccgcaatccaccctgtgtgcggagcctccggacctccagcgcctcccggtccgtgaggtgcccttccgggagatgacggaccactgtttgcccctcatctccccacgaagcttccccccaagcctccaggtagccagtggagagagcatggtgctgcattgccgggcactggccgaacccgaacccgagatctactgggtcactccagctgggcttcgactgacacctgcccatgcaggcaggaggtaccgggtgtaccccgaggggaccctggagctgcggagggtgacagcagaagaggcagggctatacacctgtgtggcccagaacctggtgggggctgacactaagacggttagtgtggttgtgggccgtgctctcctccagccaggcagggacgaaggacaggggctggagctccgggtgcaggagacccacccctatcacatcctgctatcttgggtcaccccacccaacacagtgtccaccaacctcacctggtccagtgcctcctccctccggggccagggggccacagctctggcccgcctgcctcggggaacccacagctacaacattacccgcctccttcaggccacggagtactgggcctgcctgcaagtggcctttgctgatgcccacacccagttggcttgtgtatgggccaggaccaaagaggccacttcttgccacagagccttaggggatcgtcctgggctcattgccatcctggctctcgctgtccttctcctggcagctgggctagcggcccaccttggcacaggccaacccaggaagggtgtgggtgggaggcggcctctccctccagcctgggctttctggggctggagtgccccttctgtccgggttgtgtctgctcccctcgtcctgccctggaatccagggaggaagctgcccagatcctcagaaggggagacactgttgccaccattgtctcaaaattcttgaagctcagcctgttctcagcagtagagaaatcactaggactactttttaccaaaagagaagcagtctgggccagatgccctgccaggaaagggacatggacccacgtgcttgaggcctggcagctgggccaagacagatggggctttgtggccctgggggtgcttctgcagccttgaaaaagttgcccttacctcctagggtcacctctgctgccattctgaggaacatctccaaggaacaggagggactttggctagagcctcctgcctccccatcttctctctgcccagaggctcctgggcctggcttggctgtcccctacctgtgtccccgggctgcaccccttcctcttctctttctctgtacagtctcagttgcttgctcttgtgcctcctgggcaagggctgaaggaggccactccatctcacctcggggggctgccctcaatgtgggagtgaccccagccagatctgaaggacatttgggagagggatgcccaggaacgcctcatctcagcagcctgggctcggcattccgaagctgactttctataggcaattttgtacctttgtggagaaatgtgtcacctcccccaacccgattcactcttttctcctgttttgtaaaaaataaaaataaataataacaataatacgggggaaaggaacgaaaggaaaataaaaatct

SEQ ID NO: 448120 - DNA, 266 bp, Homo sapiens
aaatgaagaatgttgaaccctcacaaagagataaaggttatttgatacatgttggtggcctctgcccttcagtatctgaggccgatttaaggtctcatttccaaaaataccaagtttctgaaatttcaatttatgattctactaattacagatatgcatctcttgcttttacaaaaaacagcgatgcaaagatagctgtgaaagaaatgaatgggatagaaataaatggaaagtcagtaaatgtgtggcctgttaaaattcttgga

SEQ ID NO: 448121 - DNA, 661 bp, Homo sapiens
ggtctctatctcctgacctcgtgatccacccgcctcagcctcccaaagtgctgggattacaggcgtgagccaccgtgcccggccaagagcatacattttcatgattctatttccctaatccacaactggaccatagtcagaggaaagcactttgggaacagtgctagcagaagaaggagggtggttttagtagtcactgctgtcaaaatagcctgtgtcaggcagtggtaaattctctgtcattgaagatattcagtcagaggaaaggatgccatagaaagaattaacatatcaaggaatgattggacaaggtgtggtttaaaacagtggacaaccaaacagggttttcacttgtctgcaacaagatgagaaaaaggccgagcaacagtggctcacacctctaatcccaacacttttgggaagtcaaggcaggaggatcgcttgaggccaggagtttaaaaccagcctggtcaacatggcaagaccccatctcaacaaagaaaaagaggaaaacaaggcaatacctgaatcaggtatgtgcagcctttgtcggggtaaggggggatgccttgactgaaatatgtcaccataaagttgctaacttcctattttgtgatggggttttactttattctgaataataaaatgttatttcatcttt

SEQ ID NO: 448122 - DNA, 481 bp, Homo sapiens
  misc_feature (437)..(437): n is a, c, g, or t
  misc_feature (441)..(441): n is a, c, g, or t
  misc_feature (468)..(468): n is a, c, g, or t
  misc_feature (470)..(472): n is a, c, g, or t
tatctgatactttacttactggcagaaatcaatatgcagaatggcattggcaataaaaggtgtcctaaaatggtcaaaagacacaaaacatgggatgaaccaaataagagagagcggagataacactgtgaatggagaaaggtaccactgaataccatccaaaccagaagatcctggctcaatacgtctcacgttaacagtcttccggcagaatggtgtgaagctcttcacagttttacagcagagaccagtgatgacttatcattcaagaggggagaccggatccagattctggaacgtctggattctgactggtgcaggggcagactgcaggacagggaggggatcttcccagcagtgtttgtgaggccctgcccagctgaggcaggaggatcacttgagcctgggaggtcaagactacagtgagctatgattgncctnctattctccagcctgggtaacagtganannntgtctcaaa

SEQ ID NO: 448123 - DNA, 5343 bp, Homo sapiens
tgaaatccaacttctgaaatgttctgggtggtagatagttaagggtgaagctgtattggtcttagtatttgcagatgttgtagctgactgctcatttttccccctccccattctgttagaagcttctgccaaccatgattcatggaatgatttttttgagctgagtaatctgtggctttgcagtttccttgctttctttccttagctaaatctcttctagtgttagcaaagtatttagcacaggaaagatcttataaaatgaaataatgcatgtaatgatgcattttccaagtagatgattttaacaaaccgtaagcttttatgcctgtccttcattgtgtcttttctgcctctgtcaggcgaactgtgatgaagagccttatacttaggaagacacaactacctttgaacagtcctttgtgaaatctaatgatcgcaacgaacgaaataaaccagaacatcgttcttcaagccaaggacccttgtcatccattagagcggtaatcaagagatcttctcggacttctattcagagtgaacttcatcgagatagaaggcgcccagagatcaccattgtggcagctgagccactgaggccagcctcgtggtttccaggaaccccacccccaggactgggatttcctacatcatctgcagcaggctcttggaggcctaatgagctggttcctgctgagctcccaccatcttatgaacaagttataaaagaaatcaaccaagttcaagttaatactacaaataataataatgctgctgctactccaaggcacactattacttctgcaactcagactgacttttcagaagaaatagacaacgatctgcctcaaagtaatgcaacactacaggcacctctcaagcctcttcagcctttctcagcagtctcgtctggcaatcttccaacaaatgtggcacctttaatcgtctttgatatttctgaagaaccgaattgtccagaaaaccccagtgctacaagatgtccagtgccaaaaccaagatcaaaaagcaacctcagaccaatacccagagattctcacattaaagagcaaagtcaacagaaaatcagcccagcagccgtaggagaggagtcatccccaggccggccccagtctctgctggacaacgctagcacctcagacagtcaggcagtgatgaacattatgaacacagaacaaagccaaaatagtattgtttccagaattaaagtgtttgagggtcagacaaacatagaaacctcaggactgcccaagaaaccagaaattactccacgttcacttcctccaaagcctactgtttcctcagggaaaccttctgtagctcccaaaccagctgctaacagagcttctggagagtgggactctgggactgagaacagactcaaggtgacctccaaggaaggactcaccccataccctcccctgcaagaagcgggaagcatcccagtaaccaaacctgaattgccaaagaaaccaaaccctggccttatacgaagtgttaatcctgagattccgggaagagggcccctggctgagagctctgatagtgggaagaaagtgccaactcctgccccgcggcctttgctgctgaagaaatctgtttcctcagaaaaccccacctacccttcagctccactgaaacctgtcactgttcctccccgactcgcaggggcatcacaagccaaagcatacaagtcactgggagaagggcccccagccaaccccccagttccagttctgcagagcaagcccttggtggacatcgatctcatcagctttgatgatgatgttttgcccaccccatcggggaacctggctgaagaatctgttggttcagagatggttctagatccctttcagctccctgcaaaaacagaaccaataaaagaacgagcagttcaaccagcacccaccaggaagcccactgtaattcgaattccagccaaaccaggaaaatgtttacatgaggatccacaaagtccacctcctctccctgctgaaaaacctattggaaacactttcagtacagtatctggaaagctcagtaatgttgagagaactagaaacttggaatccaaccacccaggtcaaacaggaggttttgtgcgagtacccccaaggttgccaccgagacctgtgaatggaaaaaccattccaactcaacagcctccaaccaaggtgccccctgagagaccacctcccccaaagctttctgcaaccagaagatctaataagaaactgccttttaatcgatcctcttctgacatggatcttcagaaaaaacaaagtaacttggcaactggactctcaaaagccaagagtcaagtttttaaaaatcaagatccggtgctaccccctcgtcccaaaccaggacaccctctctacagtaaatacatgctgtctgtgcctcatggaattgccaatgaagatattgtctctcaaaaccccggagaactctcttgtaagcgtggggatgtacttgtgatgctgaagcagacggaaaataattacttggagtgccaaaagggagaagacactggcagagttcacctgtctcaaatgaagattatcactccacttgatgaacatcttagaagcagaccaaacgatccaagccacgctcagaagcctgttgacagtggtgctcctcatgctgtcgttcttcatgatttcccagcagagcaagttgatgatttgaacctcacttctggagaaattgtttatcttctggagaagatagatacagattggtacagagggaactgtagaaaccagattggcatatttcctgccaactatgtcaaagtgattattgatatcccagaaggaggaaatgggaaaagagaatgtgtttcatctcattgtgttaaaggctcaagatgtgttgctcggtttgaatatattggagagcagaaggatgagttgagtttctcagagggagaaattattattcttaaagagtatgtgaatgaggaatgggccagaggagaagttcgaggcagaactgggattttccccctgaactttgtggagcctgttgaggattatcccacctctggtgcaaatgttttaagcacaaaggtaccactgaaaaccaaaaaagaagattctggctcaaactctcaggttaacagtcttccggcagaatggtgtgaagctcttcacagttttacagcagagaccagtgatgacttatcattcaagaggggagaccggatccagattctggaacgtctggattctgactggtgcaggggcagactgcaggacagggaggggatcttcccagcagtgtttgtgaggccctgcccagctgaggcaaaaagtatgttggccatagtaccgaaggggaggaaggccaaagccttatatgatttccgaggggagaatgaagatgaactttccttcaaggctggagatataataacagagctggaatctgtagatgatgactggatgagtggagaacttatgggaaaatctggaatatttcccaaaaactacatacagtttctacagatcagctagaggagaagcttgtctgtgttccttggcacaagaactcacttgaactatcaccttgactatcagatatgtttttgcactattttttttaactgaaaaagaaatatctaagctgtacatggtacactagaattttctgaaagcagaaaacgttcagattttgtagttaattttcattacaatagaaacatgcacatggaaacccatgagctaggattctaccgaggaaaacatctagtgggattagcaaggtgaagggaaagcatctggtggcatggcagcatggggaggctcacacacagaagttgcacgtggacatctgttttaatcagcacaagtgaattaaccatgcttcttcatttttttactttagttaaaaaagaggacatttaatattctacatgctgtaactatcaggacatggttagcaatctcaatttcatttttgatattcaaattaattcttacagcttgagcatatcagccttattaccagagcaaatccttccttcagatgggatagtttactgactagttggagcatttgtaagcacatggtgaaatcagcccctgcccaccaaaataatctttatgttaccaagtgattcccatttgtctaaggatttgaagggggtctaaattggatgtatcttagtctaaagaaccaaaaccatccctgaaatgccttgctaatacaactaatccttccatatatgtgccatacttatttttttcctcagtgtatactttatgttaacagggttattacaaagcacattttctgaatctgcaatcattcctttgacaattactggacccaaaggaaaattcattttctttgcattattccagtaatatataaaaactgtgtcttgttatagtagtacattatgaatcacatataaaatcttacaatacagaacaactgttaagatggaaaacagtgccaaacctccacagctcatttctttgtaatataatcagaatgaaaaataatttaagaggacagaagactggtacttttttgttttattttttctctagcttatccctgcacaattattagagtgaatgaaaaaccactttcctgctttccattgttataaattctaagcttaagataaaagtggttctttacatgactgaatcaattacaatttatgggctagagccaaataggttgaagacaatcatccaaacagatcaatggaatagaatttcattggaaatgtaaaacactttcccaacaatggtcatgactttcttctgtttttgagaagagtttcatatgctggaccacattttagcttttattgttttttttttcccattgtccaaaaagttaagcaacaagtggccacacttttacgtgactacaacctggagttctgcaaagaaggtaatatttacttggtctttgactaaagttatctccccattctatggttacattttattttggactatggggacttctaatacgttttggtaaagaagagagtataaagaaaattcttgtcaaatttcactcaaaagtaatttcatgagaaatcaatgatttaaagcattatccaaattaaattatcatttgcagcaaactgtacaacagcaggaaggatatggaatggaacatgaggtatatatctttgcctttataattttaacatcttatattgaagattctgaaaacctatctttattagaggaaaatctcaatcttcagttttggccttctgtcaccagaatgataagtgcaatagttgtaaatctacttgacactgtaataaactgaactgaactttca

SEQ ID NO: 448124 - DNA, 5050 bp, Homo sapiens
cccttcctcttgtgtgttgtaccactaggaagattagtggggaaatttgctattacatgcctaagtaaactatgtaactaggatcacagccacaggaaatgatgttctggacagagttttagctcggctttagccacagatcgcaacgaacgaaataaaccagaacatcgttcttcaagccaaggacccttgtcatccattagagcggtaatcaagagatcttctcggacttctattcagagtgaacttcatcgagatagaaggcgcccagagatcaccattgtggcagctgagccactgaggccagcctcgtggtttccaggaaccccacccccaggactgggatttcctacatcatctgcagcaggctcttggaggcctaatgagctggttcctgctgagctcccaccatcttatgaacaagttataaaagaaatcaaccaagttcaagttaatactacaaataataataatgctgctgctactccaaggcacactattacttctgcaactcagactgacttttcagaagaaatagacaacgatctgcctcaaagtaatgcaacactacaggcacctctcaagcctcttcagcctttctcagcagtctcgtctggcaatcttccaacaaatgtggcacctttaatcgtctttgatatttctgaagaaccgaattgtccagaaaaccccagtgctacaagatgtccagtgccaaaaccaagatcaaaaagcaacctcagaccaatacccagagattctcacattaaagagcaaagtcaacagaaaatcagcccagcagccgtaggagaggagtcatccccaggccggccccagtctctgctggacaacgctagcacctcagacagtcaggcagtgatgaacattatgaacacagaacaaagccaaaatagtattgtttccagaattaaagtgtttgagggtcagacaaacatagaaacctcaggactgcccaagaaaccagaaattactccacgttcacttcctccaaagcctactgtttcctcagggaaaccttctgtagctcccaaaccagctgctaacagagcttctggagagtgggactctgggactgagaacagactcaaggtgacctccaaggaaggactcaccccataccctcccctgcaagaagcgggaagcatcccagtaaccaaacctgaattgccaaagaaaccaaaccctggccttatacgaagtgttaatcctgagattccgggaagagggcccctggctgagagctctgatagtgggaagaaagtgccaactcctgccccgcggcctttgctgctgaagaaatctgtttcctcagaaaaccccacctacccttcagctccactgaaacctgtcactgttcctccccgactcgcaggggcatcacaagccaaagcatacaagtcactgggagaagggcccccagccaaccccccagttccagttctgcagagcaagcccttggtggacatcgatctcatcagctttgatgatgatgttttgcccaccccatcggggaacctggctgaagaatctgttggttcagagatggttctagatccctttcagctccctgcaaaaacagaaccaataaaagaacgagcagttcaaccagcacccaccaggaagcccactgtaattcgaattccagccaaaccaggaaaatgtttacatgaggatccacaaagtccacctcctctccctgctgaaaaacctattggaaacactttcagtacagtatctggaaagctcagtaatgttgagagaactagaaacttggaatccaaccacccaggtcaaacaggaggttttgtgcgagtacccccaaggttgccaccgagacctgtgaatggaaaaaccattccaactcaacagcctccaaccaaggtgccccctgagagaccacctcccccaaagctttctgcaaccagaagatctaataagaaactgccttttaatcgatcctcttctgacatggatcttcagaaaaaacaaagtaacttggcaactggactctcaaaagccaagagtcaagtttttaaaaatcaagatccggtgctaccccctcgtcccaaaccaggacaccctctctacagtaaatacatgctgtctgtgcctcatggaattgccaatgaagatattgtctctcaaaaccccggagaactctcttgtaagcgtggggatgtacttgtgatgctgaagcagacggaaaataattacttggagtgccaaaagggagaagacactggcagagttcacctgtctcaaatgaagattatcactccacttgatgaacatcttagaagcagaccaaacgatccaagccacgctcagaagcctgttgacagtggtgctcctcatgctgtcgttcttcatgatttcccagcagagcaagttgatgatttgaacctcacttctggagaaattgtttatcttctggagaagatagatacagattggtacagagggaactgtagaaaccagattggcatatttcctgccaactatgtcaaagtgattattgatatcccagaaggaggaaatgggaaaagagaatgtgtttcatctcattgtgttaaaggctcaagatgtgttgctcggtttgaatatattggagagcagaaggatgagttgagtttctcagagggagaaattattattcttaaagagtatgtgaatgaggaatgggccagaggagaagttcgaggcagaactgggattttccccctgaactttgtggagcctgttgaggattatcccacctctggtgcaaatgttttaagcacaaaggtaccactgaaaaccaaaaaagaagattctggctcaaactctcaggttaacagtcttccggcagaatggtgtgaagctcttcacagttttacagcagagaccagtgatgacttatcattcaagaggggagaccggatccagattctggaacgtctggattctgactggtgcaggggcagactgcaggacagggaggggatcttcccagcagtgtttgtgaggccctgcccagctgaggcaaaaagtatgttggccatagtaccgaaggggaggaaggccaaagccttatatgatttccgaggggagaatgaagatgaactttccttcaaggctggagatataataacagagctggaatctgtagatgatgactggatgagtggagaacttatgggaaaatctggaatatttcccaaaaactacatacagtttctacagatcagctagaggagaagcttgtctgtgttccttggcacaagaactcacttgaactatcaccttgactatcagatatgtttttgcactattttttttaactgaaaaagaaatatctaagctgtacatggtacactagaattttctgaaagcagaaaacgttcagattttgtagttaattttcattacaatagaaacatgcacatggaaacccatgagctaggattctaccgaggaaaacatctagtgggattagcaaggtgaagggaaagcatctggtggcatggcagcatggggaggctcacacacagaagttgcacgtggacatctgttttaatcagcacaagtgaattaaccatgcttcttcatttttttactttagttaaaaaagaggacatttaatattctacatgctgtaactatcaggacatggttagcaatctcaatttcatttttgatattcaaattaattcttacagcttgagcatatcagccttattaccagagcaaatccttccttcagatgggatagtttactgactagttggagcatttgtaagcacatggtgaaatcagcccctgcccaccaaaataatctttatgttaccaagtgattcccatttgtctaaggatttgaagggggtctaaattggatgtatcttagtctaaagaaccaaaaccatccctgaaatgccttgctaatacaactaatccttccatatatgtgccatacttatttttttcctcagtgtatactttatgttaacagggttattacaaagcacattttctgaatctgcaatcattcctttgacaattactggacccaaaggaaaattcattttctttgcattattccagtaatatataaaaactgtgtcttgttatagtagtacattatgaatcacatataaaatcttacaatacagaacaactgttaagatggaaaacagtgccaaacctccacagctcatttctttgtaatataatcagaatgaaaaataatttaagaggacagaagactggtacttttttgttttattttttctctagcttatccctgcacaattattagagtgaatgaaaaaccactttcctgctttccattgttataaattctaagcttaagataaaagtggttctttacatgactgaatcaattacaatttatgggctagagccaaataggttgaagacaatcatccaaacagatcaatggaatagaatttcattggaaatgtaaaacactttcccaacaatggtcatgactttcttctgtttttgagaagagtttcatatgctggaccacattttagcttttattgttttttttttcccattgtccaaaaagttaagcaacaagtggccacacttttacgtgactacaacctggagttctgcaaagaaggtaatatttacttggtctttgactaaagttatctccccattctatggttacattttattttggactatggggacttctaatacgttttggtaaagaagagagtataaagaaaattcttgtcaaatttcactcaaaagtaatttcatgagaaatcaatgatttaaagcattatccaaattaaattatcatttgcagcaaactgtacaacagcaggaaggatatggaatggaacatgaggtatatatctttgcctttataattttaacatcttatattgaagattctgaaaacctatctttattagaggaaaatctcaatcttcagttttggccttctgtcaccagaatgataagtgcaatagttgtaaatctacttgacactgtaataaactgaactgaactttca

SEQ ID NO: 448125 - DNA, 5129 bp, Homo sapiens
gaagagagcgggagtgggagtgggaaaggccaggattaagaggccgccgggacgccgcaaggaggcggggaatcggctcggcccgcgccctgccgctgcccggccggctgcaggtggagttcgcggaggtggccatttccacagccgccgccgacgcctcctctccgggagccgccttccccccggcccgagggcggtggcgtggggcgccgggtgcaggcgttctggggcgccggggccgcagctcgctggccatcccgcggctgcgccccgcgcctcgcccatggctgagggccggcggcgggaggacgaggaggaagagctacgcgagcgccgcgaacttggtggccagcgccgcgcccggggccgtgcgctctcgggccactcggccgcagatcgcaacgaacgaaataaaccagaacatcgttcttcaagccaaggacccttgtcatccattagagcggtaatcaagagatcttctcggacttctattcagagtgaacttcatcgagatagaaggcgcccagagatcaccattgtggcagctgagccactgaggccagcctcgtggtttccaggaaccccacccccaggactgggatttcctacatcatctgcagcaggctcttggaggcctaatgagctggttcctgctgagctcccaccatcttatgaacaagttataaaagaaatcaaccaagttcaagttaatactacaaataataataatgctgctgctactccaaggcacactattacttctgcaactcagactgacttttcagaagaaatagacaacgatctgcctcaaagtaatgcaacactacaggcacctctcaagcctcttcagcctttctcagcagtctcgtctggcaatcttccaacaaatgtggcacctttaatcgtctttgatatttctgaagaaccgaattgtccagaaaaccccagtgctacaagatgtccagtgccaaaaccaagatcaaaaagcaacctcagaccaatacccagagattctcacattaaagagcaaagtcaacagaaaatcagcccagcagccgtaggagaggagtcatccccaggccggccccagtctctgctggacaacgctagcacctcagacagtcaggcagtgatgaacattatgaacacagaacaaagccaaaatagtattgtttccagaattaaagtgtttgagggtcagacaaacatagaaacctcaggactgcccaagaaaccagaaattactccacgttcacttcctccaaagcctactgtttcctcagggaaaccttctgtagctcccaaaccagctgctaacagagcttctggagagtgggactctgggactgagaacagactcaaggtgacctccaaggaaggactcaccccataccctcccctgcaagaagcgggaagcatcccagtaaccaaacctgaattgccaaagaaaccaaaccctggccttatacgaagtgttaatcctgagattccgggaagagggcccctggctgagagctctgatagtgggaagaaagtgccaactcctgccccgcggcctttgctgctgaagaaatctgtttcctcagaaaaccccacctacccttcagctccactgaaacctgtcactgttcctccccgactcgcaggggcatcacaagccaaagcatacaagtcactgggagaagggcccccagccaaccccccagttccagttctgcagagcaagcccttggtggacatcgatctcatcagctttgatgatgatgttttgcccaccccatcggggaacctggctgaagaatctgttggttcagagatggttctaggtttacatgaggatccacaaagtccacctcctctccctgctgaaaaacctattggaaacactttcagtacagtatctggaaagctcagtaatgttgagagaactagaaacttggaatccaaccacccaggtcaaacaggaggttttgtgcgagtacccccaaggttgccaccgagacctgtgaatggaaaaaccattccaactcaacagcctccaaccaaggtgccccctgagagaccacctcccccaaagctttctgcaaccagaagatctaataagaaactgccttttaatcgatcctcttctgacatggatcttcagaaaaaacaaagtaacttggcaactggactctcaaaagccaagagtcaagtttttaaaaatcaagatccggtgctaccccctcgtcccaaaccaggacaccctctctacagtaaatacatgcgtggggatgtacttgtgatgctgaagcagacggaaaataattacttggagtgccaaaagggagaagacactggcagagttcacctgtctcaaatgaagattatcactccacttgatgaacatcttagaagcagaccaaacgatccaagccacgctcagaagcctgttgacagtggtgctcctcatgctgtcgttcttcatgatttcccagcagagcaagttgatgatttgaacctcacttctggagaaattgtttatcttctggagaagatagatacagattggtacagagggaactgtagaaaccagattggcatatttcctgccaactatgtcaaagtgattattgatatcccagaaggaggaaatgggaaaagagaatgtgtttcatctcattgtgttaaaggctcaagatgtgttgctcggtttgaatatattggagagcagaaggatgagttgagtttctcagagggagaaattattattcttaaagagtatgtgaatgaggaatgggccagaggagaagttcgaggcagaactgggattttccccctgaactttgtggagcctgttgaggattatcccacctctggtgcaaatgttttaagcacaaaggtaccactgaaaaccaaaaaagaagattctggctcaaactctcaggttaacagtcttccggcagaatggtgtgaagctcttcacagttttacagcagagaccagtgatgacttatcattcaagaggggagaccggatccagattctggaacgtctggattctgactggtgcaggggcagactgcaggacagggaggggatcttcccagcagtgtttgtgaggccctgcccagctgaggcaaaaagtatgttggccatagtaccgaaggggaggaaggccaaagccttatatgatttccgaggggagaatgaagatgaactttccttcaaggctggagatataataacagagctggaatctgtagatgatgactggatgagtggagaacttatgggaaaatctggaatatttcccaaaaactacatacagtttctacagatcagctagaggagaagcttgtctgtgttccttggcacaagaactcacttgaactatcaccttgactatcagatatgtttttgcactattttttttaactgaaaaagaaatatctaagctgtacatggtacactagaattttctgaaagcagaaaacgttcagattttgtagttaattttcattacaatagaaacatgcacatggaaacccatgagctaggattctaccgaggaaaacatctagtgggattagcaaggtgaagggaaagcatctggtggcatggcagcatggggaggctcacacacagaagttgcacgtggacatctgttttaatcagcacaagtgaattaaccatgcttcttcatttttttactttagttaaaaaagaggacatttaatattctacatgctgtaactatcaggacatggttagcaatctcaatttcatttttgatattcaaattaattcttacagcttgagcatatcagccttattaccagagcaaatccttccttcagatgggatagtttactgactagttggagcatttgtaagcacatggtgaaatcagcccctgcccaccaaaataatctttatgttaccaagtgattcccatttgtctaaggatttgaagggggtctaaattggatgtatcttagtctaaagaaccaaaaccatccctgaaatgccttgctaatacaactaatccttccatatatgtgccatacttatttttttcctcagtgtatactttatgttaacagggttattacaaagcacattttctgaatctgcaatcattcctttgacaattactggacccaaaggaaaattcattttctttgcattattccagtaatatataaaaactgtgtcttgttatagtagtacattatgaatcacatataaaatcttacaatacagaacaactgttaagatggaaaacagtgccaaacctccacagctcatttctttgtaatataatcagaatgaaaaataatttaagaggacagaagactggtacttttttgttttattttttctctagcttatccctgcacaattattagagtgaatgaaaaaccactttcctgctttccattgttataaattctaagcttaagataaaagtggttctttacatgactgaatcaattacaatttatgggctagagccaaataggttgaagacaatcatccaaacagatcaatggaatagaatttcattggaaatgtaaaacactttcccaacaatggtcatgactttcttctgtttttgagaagagtttcatatgctggaccacattttagcttttattgttttttttttcccattgtccaaaaagttaagcaacaagtggccacacttttacgtgactacaacctggagttctgcaaagaaggtaatatttacttggtctttgactaaagttatctccccattctatggttacattttattttggactatggggacttctaatacgttttggtaaagaagagagtataaagaaaattcttgtcaaatttcactcaaaagtaatttcatgagaaatcaatgatttaaagcattatccaaattaaattatcatttgcagcaaactgtacaacagcaggaaggatatggaatggaacatgaggtatatatctttgcctttataattttaacatcttatattgaagattctgaaaacctatctttattagaggaaaatctcaatcttcagttttggccttctgtcaccagaatgataagtgcaatagttgtaaatctacttgacactgtaataaactgaactgaactttca

SEQ ID NO: 448126 - DNA, 3444 bp, Homo sapiens
tagattatccccaactacagcactattccatgaagcccactgtaattcgaattccagccaaaccaggaaaatgtttacatgaggatccacaaagtccacctcctctccctgctgaaaaacctattggaaacactttcagtacagtatctggaaagctcagtaatgttgagagaactagaaacttggaatccaaccacccaggtcaaacaggaggttttgtgcgagtacccccaaggttgccaccgagacctgtgaatggaaaaaccattccaactcaacagcctccaaccaaggtgccccctgagagaccacctcccccaaagctttctgcaaccagaagatctaataagaaactgccttttaatcgatcctcttctgacatggatcttcagaaaaaacaaagtaacttggcaactggactctcaaaagccaagagtcaagtttttaaaaatcaagatccggtgctaccccctcgtcccaaaccaggacaccctctctacagtaaatacatgctgtctgtgcctcatggaattgccaatgaagatattgtctctcaaaaccccggagaactctcttgtaagcgtggggatgtacttgtgatgctgaagcagacggaaaataattacttggagtgccaaaagggagaagacactggcagagttcacctgtctcaaatgaagattatcactccacttgatgaacatcttagaagcagaccaaacgatccaagccacgctcagaagcctgttgacagtggtgctcctcatgctgtcgttcttcatgatttcccagcagagcaagttgatgatttgaacctcacttctggagaaattgtttatcttctggagaagatagatacagattggtacagagggaactgtagaaaccagattggcatatttcctgccaactatgtcaaagtgattattgatatcccagaaggaggaaatgggaaaagagaatgtgtttcatctcattgtgttaaaggctcaagatgtgttgctcggtttgaatatattggagagcagaaggatgagttgagtttctcagagggagaaattattattcttaaagagtatgtgaatgaggaatgggccagaggagaagttcgaggcagaactgggattttccccctgaactttgtggagcctgttgaggattatcccacctctggtgcaaatgttttaagcacaaaggtaccactgaaaaccaaaaaagaagattctggctcaaactctcaggttaacagtcttccggcagaatggtgtgaagctcttcacagttttacagcagagaccagtgatgacttatcattcaagaggggagaccggatccagattctggaacgtctggattctgactggtgcaggggcagactgcaggacagggaggggatcttcccagcagtgtttgtgaggccctgcccagctgaggcaaaaagtatgttggccatagtaccgaaggggaggaaggccaaagccttatatgatttccgaggggagaatgaagatgaactttccttcaaggctggagatataataacagagctggaatctgtagatgatgactggatgagtggagaacttatgggaaaatctggaatatttcccaaaaactacatacagtttctacagatcagctagaggagaagcttgtctgtgttccttggcacaagaactcacttgaactatcaccttgactatcagatatgtttttgcactattttttttaactgaaaaagaaatatctaagctgtacatggtacactagaattttctgaaagcagaaaacgttcagattttgtagttaattttcattacaatagaaacatgcacatggaaacccatgagctaggattctaccgaggaaaacatctagtgggattagcaaggtgaagggaaagcatctggtggcatggcagcatggggaggctcacacacagaagttgcacgtggacatctgttttaatcagcacaagtgaattaaccatgcttcttcatttttttactttagttaaaaaagaggacatttaatattctacatgctgtaactatcaggacatggttagcaatctcaatttcatttttgatattcaaattaattcttacagcttgagcatatcagccttattaccagagcaaatccttccttcagatgggatagtttactgactagttggagcatttgtaagcacatggtgaaatcagcccctgcccaccaaaataatctttatgttaccaagtgattcccatttgtctaaggatttgaagggggtctaaattggatgtatcttagtctaaagaaccaaaaccatccctgaaatgccttgctaatacaactaatccttccatatatgtgccatacttatttttttcctcagtgtatactttatgttaacagggttattacaaagcacattttctgaatctgcaatcattcctttgacaattactggacccaaaggaaaattcattttctttgcattattccagtaatatataaaaactgtgtcttgttatagtagtacattatgaatcacatataaaatcttacaatacagaacaactgttaagatggaaaacagtgccaaacctccacagctcatttctttgtaatataatcagaatgaaaaataatttaagaggacagaagactggtacttttttgttttattttttctctagcttatccctgcacaattattagagtgaatgaaaaaccactttcctgctttccattgttataaattctaagcttaagataaaagtggttctttacatgactgaatcaattacaatttatgggctagagccaaataggttgaagacaatcatccaaacagatcaatggaatagaatttcattggaaatgtaaaacactttcccaacaatggtcatgactttcttctgtttttgagaagagtttcatatgctggaccacattttagcttttattgttttttttttcccattgtccaaaaagttaagcaacaagtggccacacttttacgtgactacaacctggagttctgcaaagaaggtaatatttacttggtctttgactaaagttatctccccattctatggttacattttattttggactatggggacttctaatacgttttggtaaagaagagagtataaagaaaattcttgtcaaatttcactcaaaagtaatttcatgagaaatcaatgatttaaagcattatccaaattaaattatcatttgcagcaaactgtacaacagcaggaaggatatggaatggaacatgaggtatatatctttgcctttataattttaacatcttatattgaagattctgaaaacctatctttattagaggaaaatctcaatcttcagttttggccttctgtcaccagaatgataagtgcaatagttgtaaatctacttgacactgtaataaactgaactgaactttca

SEQ ID NO: 448127 - DNA, 5324 bp, Homo sapiens
gaagagagcgggagtgggagtgggaaaggccaggattaagaggccgccgggacgccgcaaggaggcggggaatcggctcggcccgcgccctgccgctgcccggccggctgcaggtggagttcgcggaggtggccatttccacagccgccgccgacgcctcctctccgggagccgccttccccccggcccgagggcggtggcgtggggcgccgggtgcaggcgttctggggcgccggggccgcagctcgctggccatcccgcggctgcgccccgcgcctcgcccatggctgagggccggcggcgggaggacgaggaggaagagctacgcgagcgccgcgaacttggtggccagcgccgcgcccggggccgtgcgctctcgggccactcggccgcagatcgcaacgaacgaaataaaccagaacatcgttcttcaagccaaggacccttgtcatccattagagcggtaatcaagagatcttctcggacttctattcagagtgaacttcatcgagatagaaggcgcccagagatcaccattgtggcagctgagccactgaggccagcctcgtggtttccaggaaccccacccccaggactgggatttcctacatcatctgcagcaggctcttggaggcctaatgagctggttcctgctgagctcccaccatcttatgaacaagttataaaagaaatcaaccaagttcaagttaatactacaaataataataatgctgctgctactccaaggcacactattacttctgcaactcagactgacttttcagaagaaatagacaacgatctgcctcaaagtaatgcaacactacaggcacctctcaagcctcttcagcctttctcagcagtctcgtctggcaatcttccaacaaatgtggcacctttaatcgtctttgatatttctgaagaaccgaattgtccagaaaaccccagtgctacaagatgtccagtgccaaaaccaagatcaaaaagcaacctcagaccaatacccagagattctcacattaaagagcaaagtcaacagaaaatcagcccagcagccgtaggagaggagtcatccccaggccggccccagtctctgctggacaacgctagcacctcagacagtcaggcagtgatgaacattatgaacacagaacaaagccaaaatagtattgtttccagaattaaagtgtttgagggtcagacaaacatagaaacctcaggactgcccaagaaaccagaaattactccacgttcacttcctccaaagcctactgtttcctcagggaaaccttctgtagctcccaaaccagctgctaacagagcttctggagagtgggactctgggactgagaacagactcaaggtgacctccaaggaaggactcaccccataccctcccctgcaagaagcgggaagcatcccagtaaccaaacctgaattgccaaagaaaccaaaccctggccttatacgaagtgttaatcctgagattccgggaagagggcccctggctgagagctctgatagtgggaagaaagtgccaactcctgccccgcggcctttgctgctgaagaaatctgtttcctcagaaaaccccacctacccttcagctccactgaaacctgtcactgttcctccccgactcgcaggggcatcacaagccaaagcatacaagtcactgggagaagggcccccagccaaccccccagttccagttctgcagagcaagcccttggtggacatcgatctcatcagctttgatgatgatgttttgcccaccccatcggggaacctggctgaagaatctgttggttcagagatggttctagatccctttcagctccctgcaaaaacagaaccaataaaagaacgagcagttcaaccagcacccaccaggaagcccactgtaattcgaattccagccaaaccaggaaaatgtttacatgaggatccacaaagtccacctcctctccctgctgaaaaacctattggaaacactttcagtacagtatctggaaagctcagtaatgttgagagaactagaaacttggaatccaaccacccaggtcaaacaggaggttttgtgcgagtacccccaaggttgccaccgagacctgtgaatggaaaaaccattccaactcaacagcctccaaccaaggtgccccctgagagaccacctcccccaaagctttctgcaaccagaagatctaataagaaactgccttttaatcgatcctcttctgacatggatcttcagaaaaaacaaagtaacttggcaactggactctcaaaagccaagagtcaagtttttaaaaatcaagatccggtgctaccccctcgtcccaaaccaggacaccctctctacagtaaatacatgctgtctgtgcctcatggaattgccaatgaagatattgtctctcaaaaccccggagaactctcttgtaagcgtggggatgtacttgtgatgctgaagcagacggaaaataattacttggagtgccaaaagggagaagacactggcagagttcacctgtctcaaatgaagattatcactccacttgatgaacatcttagaagcagaccaaaccccttttctccccctaaggatccaagccacgctcagaagcctgttgacagtggtgctcctcatgctgtcgttcttcatgatttcccagcagagcaagttgatgatttgaacctcacttctggagaaattgtttatcttctggagaagatagatacagattggtacagagggaactgtagaaaccagattggcatatttcctgccaactatgtcaaagtgattattgatatcccagaaggaggaaatgggaaaagagaatgtgtttcatctcattgtgttaaaggctcaagatgtgttgctcggtttgaatatattggagagcagaaggatgagttgagtttctcagagggagaaattattattcttaaagagtatgtgaatgaggaatgggccagaggagaagttcgaggcagaactgggattttccccctgaactttgtggagcctgttgaggattatcccacctctggtgcaaatgttttaagcacaaaggtaccactgaaaaccaaaaaagaagattctggctcaaactctcaggttaacagtcttccggcagaatggtgtgaagctcttcacagttttacagcagagaccagtgatgacttatcattcaagaggggagaccggatccagattctggaacgtctggattctgactggtgcaggggcagactgcaggacagggaggggatcttcccagcagtgtttgtgaggccctgcccagctgaggcaaaaagtatgttggccatagtaccgaaggggaggaaggccaaagccttatatgatttccgaggggagaatgaagatgaactttccttcaaggctggagatataataacagagctggaatctgtagatgatgactggatgagtggagaacttatgggaaaatctggaatatttcccaaaaactacatacagtttctacagatcagctagaggagaagcttgtctgtgttccttggcacaagaactcacttgaactatcaccttgactatcagatatgtttttgcactattttttttaactgaaaaagaaatatctaagctgtacatggtacactagaattttctgaaagcagaaaacgttcagattttgtagttaattttcattacaatagaaacatgcacatggaaacccatgagctaggattctaccgaggaaaacatctagtgggattagcaaggtgaagggaaagcatctggtggcatggcagcatggggaggctcacacacagaagttgcacgtggacatctgttttaatcagcacaagtgaattaaccatgcttcttcatttttttactttagttaaaaaagaggacatttaatattctacatgctgtaactatcaggacatggttagcaatctcaatttcatttttgatattcaaattaattcttacagcttgagcatatcagccttattaccagagcaaatccttccttcagatgggatagtttactgactagttggagcatttgtaagcacatggtgaaatcagcccctgcccaccaaaataatctttatgttaccaagtgattcccatttgtctaaggatttgaagggggtctaaattggatgtatcttagtctaaagaaccaaaaccatccctgaaatgccttgctaatacaactaatccttccatatatgtgccatacttatttttttcctcagtgtatactttatgttaacagggttattacaaagcacattttctgaatctgcaatcattcctttgacaattactggacccaaaggaaaattcattttctttgcattattccagtaatatataaaaactgtgtcttgttatagtagtacattatgaatcacatataaaatcttacaatacagaacaactgttaagatggaaaacagtgccaaacctccacagctcatttctttgtaatataatcagaatgaaaaataatttaagaggacagaagactggtacttttttgttttattttttctctagcttatccctgcacaattattagagtgaatgaaaaaccactttcctgctttccattgttataaattctaagcttaagataaaagtggttctttacatgactgaatcaattacaatttatgggctagagccaaataggttgaagacaatcatccaaacagatcaatggaatagaatttcattggaaatgtaaaacactttcccaacaatggtcatgactttcttctgtttttgagaagagtttcatatgctggaccacattttagcttttattgttttttttttcccattgtccaaaaagttaagcaacaagtggccacacttttacgtgactacaacctggagttctgcaaagaaggtaatatttacttggtctttgactaaagttatctccccattctatggttacattttattttggactatggggacttctaatacgttttggtaaagaagagagtataaagaaaattcttgtcaaatttcactcaaaagtaatttcatgagaaatcaatgatttaaagcattatccaaattaaattatcatttgcagcaaactgtacaacagcaggaaggatatggaatggaacatgaggtatatatctttgcctttataattttaacatcttatattgaagattctgaaaacctatctttattagaggaaaatctcaatcttcagttttggccttctgtcaccagaatgataagtgcaatagttgtaaatctacttgacactgtaataaactgaactgaactttca

SEQ ID NO: 448128 - DNA, 4708 bp, Homo sapiens
cactttcagtaggtaaattttattgtatgtgggttatatctcaaagatgtttaacaaattcattgagctaatgcatataaggtatttaacacagtgactagcacatggtgaatgagcagtaaatattagctattcttaatattacaaaaccatttgcattagcagttatagtcatattagaaagacctttgcattatgttatatttacctaccagatacctaccccagtggtatggtctgaattgtatggaccacttgttggcaaccctgtctagcctgttcctcttgcccttcacctgctaggctgggttgatgagcagcattgccagtgatatccatacactgaaggcagagaagggaaaatgtgtgactgggaggcacaaattatcccctccctccaaggactggtttatgtttaggcctctggtccatttggagatttcatgtttgtgtttggtgtgtggtaggtctctgacatcattttttccaaatggataggcatctagcctaataacacttattgaatagtaattcctttttctccacagatgtaaatcagaaaaaaatgaaaatcacacatgcacatgtataacacattatataaataataattaatttgtttaactttttttggagagagtcactcagtcatccaagtcagagtatagtgacagagcaagaccctgtgtcaaagaaaaaaaagccatgtcagacctaaaatatctcagaattcatgaaatttccatattgttcatttatttagagaaaagcattaagcagtccatgaaaaaatgttagggtcttcttagtaagctaatatagtaagctacattagccattagagtcttaagttatatttcagtttacctaacttgagagaatgaaagttttgtttctgcaggtgcattttggttgaaagagcagctgagatttagaaaagatctcagcaaaggtgctgcagggttgaaatggagaaagtggaccatcattcacagtgcgctgcaatcagcctggtgcatcatggccaggggaagggcagaggtatagatgtgtcaggacgtctctaaggggacaagagttattagaggaggtgaagagacaagaaagggcacaaaaatctgcctttatttatttcacaggcttgccagtgttgaagagtgttaagttataactccaaataatatccttcagtgggatttgatgatgatgaggataagcctgtctcttgatataaagaaactaagaataacaattgctagtcaataagaagaggtcgctcttcagctttgccttatcctctggccaatctcggcatttggctagatggatagagaatgttagattctttttgctaatttatttagaactactgttgaataaaccattcagattaaatacaaaatgcagaccaggcatgggaggtagcattgctttcaaattagaaaaagcacttagttaagtggtaataaatgaaatggattttactttttgtgaattatacttctgttgaaagtcattagctcctttcattacaaaaggcaagagcataaatcatagaactttcttcttttcccatcctaataaagacacaacttttaagactctgtcttgatcacagttttaaggaaaaagctattcttgaaagggaaagaggtcaaaaaccactactttggggtagaatagatactgtttcaaaataaataaacagttcccttttgttttactctctcagcttaaaaaagcaaaaagaaaacatactgggggatattttaattgagattttcgtcctcccttagcaaggacacattcttcttcaacttgataataattcccttgtttggctcaactgtgtggtttgcatcatgtactcataatgtaattgtgtcaagaggactctaatgagaaaaaaaaaattggtctcagagtgaataataaatccaccatctatcctgcacacttcattcacagcccttttctccccctaaggatccaagccacgctcagaagcctgttgacagtggtgctcctcatgctgtcgttcttcatgatttcccagcagagcaagttgatgatttgaacctcacttctggagaaattgtttatcttctggagaagatagatacagattggtacagagggaactgtagaaaccagattggcatatttcctgccaactatgtcaaagtgattattgatatcccagaaggaggaaatgggaaaagagaatgtgtttcatctcattgtgttaaaggctcaagatgtgttgctcggtttgaatatattggagagcagaaggatgagttgagtttctcagagggagaaattattattcttaaagagtatgtgaatgaggaatgggccagaggagaagttcgaggcagaactgggattttccccctgaactttgtggagcctgttgaggattatcccacctctggtgcaaatgttttaagcacaaaggtaccactgaaaaccaaaaaagaagattctggctcaaactctcaggttaacagtcttccggcagaatggtgtgaagctcttcacagttttacagcagagaccagtgatgacttatcattcaagaggggagaccggatccagattctggaacgtctggattctgactggtgcaggggcagactgcaggacagggaggggatcttcccagcagtgtttgtgaggccctgcccagctgaggcaaaaagtatgttggccatagtaccgaaggggaggaaggccaaagccttatatgatttccgaggggagaatgaagatgaactttccttcaaggctggagatataataacagagctggaatctgtagatgatgactggatgagtggagaacttatgggaaaatctggaatatttcccaaaaactacatacagtttctacagatcagctagaggagaagcttgtctgtgttccttggcacaagaactcacttgaactatcaccttgactatcagatatgtttttgcactattttttttaactgaaaaagaaatatctaagctgtacatggtacactagaattttctgaaagcagaaaacgttcagattttgtagttaattttcattacaatagaaacatgcacatggaaacccatgagctaggattctaccgaggaaaacatctagtgggattagcaaggtgaagggaaagcatctggtggcatggcagcatggggaggctcacacacagaagttgcacgtggacatctgttttaatcagcacaagtgaattaaccatgcttcttcatttttttactttagttaaaaaagaggacatttaatattctacatgctgtaactatcaggacatggttagcaatctcaatttcatttttgatattcaaattaattcttacagcttgagcatatcagccttattaccagagcaaatccttccttcagatgggatagtttactgactagttggagcatttgtaagcacatggtgaaatcagcccctgcccaccaaaataatctttatgttaccaagtgattcccatttgtctaaggatttgaagggggtctaaattggatgtatcttagtctaaagaaccaaaaccatccctgaaatgccttgctaatacaactaatccttccatatatgtgccatacttatttttttcctcagtgtatactttatgttaacagggttattacaaagcacattttctgaatctgcaatcattcctttgacaattactggacccaaaggaaaattcattttctttgcattattccagtaatatataaaaactgtgtcttgttatagtagtacattatgaatcacatataaaatcttacaatacagaacaactgttaagatggaaaacagtgccaaacctccacagctcatttctttgtaatataatcagaatgaaaaataatttaagaggacagaagactggtacttttttgttttattttttctctagcttatccctgcacaattattagagtgaatgaaaaaccactttcctgctttccattgttataaattctaagcttaagataaaagtggttctttacatgactgaatcaattacaatttatgggctagagccaaataggttgaagacaatcatccaaacagatcaatggaatagaatttcattggaaatgtaaaacactttcccaacaatggtcatgactttcttctgtttttgagaagagtttcatatgctggaccacattttagcttttattgttttttttttcccattgtccaaaaagttaagcaacaagtggccacacttttacgtgactacaacctggagttctgcaaagaaggtaatatttacttggtctttgactaaagttatctccccattctatggttacattttattttggactatggggacttctaatacgttttggtaaagaagagagtataaagaaaattcttgtcaaatttcactcaaaagtaatttcatgagaaatcaatgatttaaagcattatccaaattaaattatcatttgcagcaaactgtacaacagcaggaaggatatggaatggaacatgaggtatatatctttgcctttataattttaacatcttatattgaagattctgaaaacctatctttattagaggaaaatctcaatcttcagttttggccttctgtcaccagaatgataagtgcaatagttgtaaatctacttgacactgtaataaactgaactgaactttca

SEQ ID NO: 448129 - DNA, 4035 bp, Homo sapiens
gaagagagcgggagtgggagtgggaaaggccaggattaagaggccgccgggacgccgcaaggaggcggggaatcggctcggcccgcgccctgccgctgcccggccggctgcaggtggagttcgcggaggtggccatttccacagccgccgccgacgcctcctctccgggagccgccttccccccggcccgagggcggtggcgtggggcgccgggtgcaggcgttctggggcgccggggccgcagctcgctggccatcccgcggctgcgccccgcgcctcgcccatggctgagggccggcggcgggaggacgaggaggaagagctacgcgagcgccgcgaacttggtggccagcgccgcgcccggggccgtgcgctctcgggccactcggccgcagatcgcaacgaacgaaataaaccagaacatcgttcttcaagccaaggacccttgtcatccattagagcggtaatcaagagatcttctcggacttctattcagagtgaacttcatcgagatagaaggcgcccagagatcaccattgtggcagctgagccactgaggccagcctcgtggtttccaggaaccccacccccaggactgggatttcctacatcatctgcagcaggctcttggaggcctaatgagctggttcctgctgagctcccaccatcttatgaacaagttataaaagaaatcaaccaagttcaagttaatactacaaataataataatgctgctgctactccaaggcacactattacttctgcaactcagactgacttttcagaagaaatagacaacgatctgcctcaaagtaatgcaacactacaggcacctctcaagcctcttcagcctttctcagcagtctcgtctggcaatcttccaacaaatgtggcacctttaatcgtctttgatatttctgaagaaccgaattgtccagaaaaccccagtgctacaagatgtccagtgccaaaaccaagatcaaaaagcaacctcagaccaatacccagagattctcacattaaagagcaaagtcaacagaaaatcagcccagcagccgtaggagaggagtcatccccaggccggccccagtctctgctggacaacgctagcacctcagacagtcaggcagtgatgaacattatgaacacagaacaaagccaaaatagtattgtttccagaattaaagtgtttgagggtcagacaaacatagaaacctcaggactgcccaagaaaccagaaattactccacgttcacttcctccaaagcctactgtttcctcagggaaaccttctgtagctcccaaaccagctgctaacagagcttctggagagtgggactctgggactgagaacagactcaaggtgacctccaaggaaggactcaccccataccctcccctgcaagaagcgggaagcatcccagtaaccaaacctgaattgccaaagaaaccaaaccctggccttatacgaagtgttaatcctgagattccgggaagagggcccctggctgagagctctgatagtgggaagaaagtgccaactcctgccccgcggcctttgctgctgaagaaatctgtttcctcagaaaaccccacctacccttcagctccactgaaacctgtcactgttcctccccgactcgcaggggcatcacaagccaaagcatacaagtcactgggagaagggcccccagccaaccccccagttccagttctgcagagcaagcccttggtggacatcgatctcatcagctttgatgatgatgttttgcccaccccatcggggaacctggctgaagaatctgttggttcagagatggttctaggtttacatgaggatccacaaagtccacctcctctccctgctgaaaaacctattggaaacactttcagtacagtatctggaaagctcagtaatgttgagagaactagaaacttggaatccaaccacccaggtcaaacaggaggttttgtgcgagtacccccaaggttgccaccgagacctgtgaatggaaaaaccattccaactcaacagcctccaaccaaggtgccccctgagagaccacctcccccaaagctttctgcaaccagaagatctaataagaaactgccttttaatcgatcctcttctgacatggatcttcagaaaaaacaaagtaacttggcaactggactctcaaaagccaagagtcaagtttttaaaaatcaagatccggtgctaccccctcgtcccaaaccaggacaccctctctacagtaaatacatgcgtggggatgtacttgtgatgctgaagcagacggaaaataattacttggagtgccaaaagggagaagacactggcagagttcacctgtctcaaatgaagattatcactccacttgatgaacatcttagaagcagaccaaacgatccaagccacgctcagaagcctgttgacagtggtgctcctcatgctgtcgttcttcatgatttcccagcagagcaagttgatgatttgaacctcacttctggagaaattgtttatcttctggagaagatagatacagattggtacagagggaactgtagaaaccagattggcatatttcctgccaactatgtcaaagtgattattgatatcccagaaggaggaaatgggaaaagagaatgtgtttcatctcattgtgttaaaggctcaagatgtgttgctcggtttgaatatattggagagcagaaggatgagttgagtttctcagagggagaaattattattcttaaagagtatgtgaatgaggaatgggccagaggagaagttcgaggcagaactgggattttccccctgaactttgtggagcctgttgaggattatcccacctctggtgcaaatgttttaagcacaaaggtaccactgaaaaccaaaaaagaagattctggctcaaactctcaggttaacagtcttccggcagaatggtgtgaagctcttcacagttttacagcagagaccagtgatgacttatcattcaagaggggagaccggatccagattctggaacgtctggattctgactggtgcaggggcagactgcaggacagggaggggatcttcccagcagtgtttgtgaggccctgcccagctgaggcaaaaagtatgttggccatagtaccgaaggggaggaaggccaaagccttatatgatttccgaggggagaatgaagatgaactttccttcaaggctggagatataataacagagctggaatctgtagatgatgactggatgagtggagaacttatgggaaaatctggaatatttcccaaaaactacatacagtttctacagatcagctagaggagaagcttgtctgtgttccttggcacaagaactcacttgaactatcaccttgactatcagatatgtttttgcactattttttttaactgaaaaagaaatatctaagctgtacatggtacactagaattttctgaaagcagaaaacgttcagattttgtagttaattttcattacaatagaaacatgcacatggaaacccatgagctaggattctaccgaggaaaacatctagtgggattagcaaggtgaagggaaagcatctggtggcatggcagcatggggaggctcacacacagaagttgcacgtggacatctgttttaatcagcacaagtgaattaaccatgcttcttcatttttttactttagttaaaaaagaggacatttaatattctacatgctgtaactatcaggacatggttagcaatctcaatttcatttttgatattcaaattaattcttacagcttgagcatatcagccttattaccagagcaaatccttccttcagatgggatagtttactgactagttggagcatttgtaagcacatggtgaaatcagcccctgcccaccaaaataatctttatgttaccaagtgattcccatttgtctaaggatttgaagggggtctaaattggatgtatcttagtctaaagaaccaaaaccatccctgaaatgccttgctaatacaactaatccttcca

SEQ ID NO: 448130 - DNA, 2128 bp, Homo sapiens
agcggggtcgccttccaccaggccctaccgccaacactggggattatgattcaacttgagatttggtggctacacagatccaaaccatatcaggctcttcgccattcaaatcctccctacacagtgaagcattatccatctctggtactggcaagggcaaaactcagactttgttgatggcatctggatgcaatcgtctttgagtacatcgctggagatataataacagagctggaatctgtagatgatgactggatgagtggagaacttatgggaaaatctggaatatttcccaaaaactacatacagtttctacagatcagctagaggagaagcttgtctgtgttccttggcacaagaactcacttgaactatcaccttgactatcagatatgtttttgcactattttttttaactgaaaaagaaatatctaagctgtacatggtacactagaattttctgaaagcagaaaacgttcagattttgtagttaattttcattacaatagaaacatgcacatggaaacccatgagctaggattctaccgaggaaaacatctagtgggattagcaaggtgaagggaaagcatctggtggcatggcagcatggggaggctcacacacagaagttgcacgtggacatctgttttaatcagcacaagtgaattaaccatgcttcttcatttttttactttagttaaaaaagaggacatttaatattctacatgctgtaactatcaggacatggttagcaatctcaatttcatttttgatattcaaattaattcttacagcttgagcatatcagccttattaccagagcaaatccttccttcagatgggatagtttactgactagttggagcatttgtaagcacatggtgaaatcagcccctgcccaccaaaataatctttatgttaccaagtgattcccatttgtctaaggatttgaagggggtctaaattggatgtatcttagtctaaagaaccaaaaccatccctgaaatgccttgctaatacaactaatccttccatatatgtgccatacttatttttttcctcagtgtatactttatgttaacagggttattacaaagcacattttctgaatctgcaatcattcctttgacaattactggacccaaaggaaaattcattttctttgcattattccagtaatatataaaaactgtgtcttgttatagtagtacattatgaatcacatataaaatcttacaatacagaacaactgttaagatggaaaacagtgccaaacctccacagctcatttctttgtaatataatcagaatgaaaaataatttaagaggacagaagactggtacttttttgttttattttttctctagcttatccctgcacaattattagagtgaatgaaaaaccactttcctgctttccattgttataaattctaagcttaagataaaagtggttctttacatgactgaatcaattacaatttatgggctagagccaaataggttgaagacaatcatccaaacagatcaatggaatagaatttcattggaaatgtaaaacactttcccaacaatggtcatgactttcttctgtttttgagaagagtttcatatgctggaccacattttagcttttattgttttttttttcccattgtccaaaaagttaagcaacaagtggccacacttttacgtgactacaacctggagttctgcaaagaaggtaatatttacttggtctttgactaaagttatctccccattctatggttacattttattttggactatggggacttctaatacgttttggtaaagaagagagtataaagaaaattcttgtcaaatttcactcaaaagtaatttcatgagaaatcaatgatttaaagcattatccaaattaaattatcatttgcagcaaactgtacaacagcaggaaggatatggaatggaacatgaggtatatatctttgcctttataattttaacatcttatattgaagattctgaaaacctatctttattagaggaaaatctcaatcttcagttttggccttctgtcaccagaatgataagtgcaatagttgtaaatctacttgacactgtaataaactgaactgaactttca

SEQ ID NO: 448131 - DNA, 3865 bp, Homo sapiens
gaagagagcgggagtgggagtgggaaaggccaggattaagaggccgccgggacgccgcaaggaggcggggaatcggctcggcccgcgccctgccgctgcccggccggctgcaggtggagttcgcggaggtggccatttccacagccgccgccgacgcctcctctccgggagccgccttccccccggcccgagggcggtggcgtggggcgccgggtgcaggcgttctggggcgccggggccgcagctcgctggccatcccgcggctgcgccccgcgcctcgcccatggctgagggccggcggcgggaggacgaggaggaagagctacgcgagcgccgcgaacttggtggccagcgccgcgcccggggccgtgcgctctcgggccactcggccgcagatcgcaacgaacgaaataaaccagaacatcgttcttcaagccaaggacccttgtcatccattagagcggtaatcaagagatcttctcggacttctattcagagtgaacttcatcgagatagaaggcgcccagagatcaccattgtggcagctgagccactgaggccagcctcgtggtttccaggaaccccacccccaggactgggatttcctacatcatctgcagcaggctcttggaggcctaatgagctggttcctgctgagctcccaccatcttatgaacaagttataaaagaaatcaaccaagttcaagttaatactacaaataataataatgctgctgctactccaaggcacactattacttctgcaactcagactgacttttcagaagaaatagacaacgatctgcctcaaagtaatgcaacactacaggcacctctcaagcctcttcagcctttctcagcagtctcgtctggcaatcttccaacaaatgtggcacctttaatcgtctttgatatttctgaagaaccgaattgtccagaaaaccccagtgctacaagatgtccagtgccaaaaccaagatcaaaaagcaacctcagaccaatacccagagattctcacattaaagagcaaagtcaacagaaaatcagcccagcagccgtaggagaggagtcatccccaggccggccccagtctctgctggacaacgctagcacctcagacagtcaggcagtgatgaacattatgaacacagaacaaagccaaaatagtattgtttccagaattaaagtgtttgagggtcagacaaacatagaaacctcaggactgcccaagaaaccagaaattactccacgttcacttcctccaaagcctactgtttcctcagggaaaccttctgtagctcccaaaccagctgctaacagagcttctggagagtgggactctgggactgagaacagactcaaggtgacctccaaggaaggactcaccccataccctcccctgcaagaagcgggaagcatcccagtaaccaaacctgaattgccaaagaaaccaaaccctggccttatacgaagtgttaatcctgagattccgggaagagggcccctggctgagagctctgatagtgggaagaaagtgccaactcctgccccgcggcctttgctgctgaagaaatctgtttcctcagaaaaccccacctacccttcagctccactgaaacctgtcactgttcctccccgactcgcaggggcatcacaagccaaagcatacaagtcactgggagaagggcccccagccaaccccccagttccagttctgcagagcaagcccttggtggacatcgatctcatcagctttgatgatgatgttttgcccaccccatcggggaacctggctgaagaatctgttggttcagagatggttctaggtttacatgaggatccacaaagtccacctcctctccctgctgaaaaacctattggaaacactttcagtacagtatctggaaagctcagtaatgttgagagaactagaaacttggaatccaaccacccaggtcaaacaggaggttttgtgcgagtacccccaaggttgccaccgagacctgtgaatggaaaaaccattccaactcaacagcctccaaccaaggtgccccctgagagaccacctcccccaaagctttctgcaaccagaagatctaataagaaactgccttttaatcgatcctcttctgacatggatcttcagaaaaaacaaagtaacttggcaactggactctcaaaagccaagagtcaagtttttaaaaatcaagatccggtgctaccccctcgtcccaaaccaggacaccctctctacagtaaatacatgcgtggggatgtacttgtgatgctgaagcagacggaaaataattacttggagtgccaaaagggagaagacactggcagagttcacctgtctcaaatgaagattatcactccacttgatgaacatcttagaagcagaccaaacgatccaagccacgctcagaagcctgttgacagtggtgctcctcatgctgtcgttcttcatgatttcccagcagagcaagttgatgatttgaacctcacttctggagaaattgtttatcttctggagaagatagatacagattggtacagagggaactgtagaaaccagattggcatatttcctgccaactatgtcaaagtgattattgatatcccagaaggaggaaatgggaaaagagaatgtgtttcatctcattgtgttaaaggctcaagatgtgttgctcggtttgaatatattggagagcagaaggatgagttgagtttctcagagggagaaattattattcttaaagagtatgtgaatgaggaatgggccagaggagaagttcgaggcagaactgggattttccccctgaactttgtggagcctgttgaggattatcccacctctggtgcaaatgttttaagcacaaaggtaccactgaaaaccaaaaaagaagattctggctcaaactctcaggttaacagtcttccggcagaatggtgtgaagctcttcacagttttacagcagagaccagtgatgacttatcattcaagaggggagaccggatccagattctggaacgtctggattctgactggtgcaggggcagactgcaggacagggaggggatcttcccagcagtgtttgtgaggccctgcccagctgaggcaaaaagtatgttggccatagtaccgaaggggaggaaggccaaagccttatatgatttccgaggggagaatgaagatgaactttccttcaaggtcagaatgtgtatctcttcataactgcattaagcactataattttttaaatgttttccattgaaggatggaacatttgggtggaatattaatcattactcaagaatgaagagatctcaggccctgattctaggggaagacattagagaaagtgaacagtcagaagaaggagggtggttttagtagtcactgctgtcaaaatagcctgtgtcaggcagtggtaaattctctgtcattgaagatattcagtcagaggaaaggatgccatagaaagaattaacatatcaaggaatgattggacaaggtgtggtttaaaacagtggacaaccaaacagggttttcacttgtctgcaacaagatgagaaaaaggccgagcaacagtggctcacacctctaatcccaacacttttgggaagtcaaggcaggaggatcgcttgaggccaggagtttaaaaccagcctggtcaacatggcaagaccccatctcaacaaagaaaaagaggaaaacaaggcaatacctgaatcaggtatgtgcagcctttgtcggggtaaggggggatgccttgactgaaatatgtcaccataaagttgctaacttcctattttgtgatggggttttactttattctgaataataaaatgttatttcatcttt

SEQ ID NO: 448132 - DNA, 3215 bp, Homo sapiens
  misc_feature (3171)..(3171): n is a, c, g, or t
  misc_feature (3175)..(3175): n is a, c, g, or t
  misc_feature (3202)..(3202): n is a, c, g, or t
  misc_feature (3204)..(3206): n is a, c, g, or t
gaagagagcgggagtgggagtgggaaaggccaggattaagaggccgccgggacgccgcaaggaggcggggaatcggctcggcccgcgccctgccgctgcccggccggctgcaggtggagttcgcggaggtggccatttccacagccgccgccgacgcctcctctccgggagccgccttccccccggcccgagggcggtggcgtggggcgccgggtgcaggcgttctggggcgccggggccgcagctcgctggccatcccgcggctgcgccccgcgcctcgcccatggctgagggccggcggcgggaggacgaggaggaagagctacgcgagcgccgcgaacttggtggccagcgccgcgcccggggccgtgcgctctcgggccactcggccgcagatcgcaacgaacgaaataaaccagaacatcgttcttcaagccaaggacccttgtcatccattagagcggtaatcaagagatcttctcggacttctattcagagtgaacttcatcgagatagaaggcgcccagagatcaccattgtggcagctgagccactgaggccagcctcgtggtttccaggaaccccacccccaggactgggatttcctacatcatctgcagcaggctcttggaggcctaatgagctggttcctgctgagctcccaccatcttatgaacaagttataaaagaaatcaaccaagttcaagttaatactacaaataataataatgctgctgctactccaaggcacactattacttctgcaactcagactgacttttcagaagaaatagacaacgatctgcctcaaagtaatgcaacactacaggcacctctcaagcctcttcagcctttctcagcagtctcgtctggcaatcttccaacaaatgtggcacctttaatcgtctttgatatttctgaagaaccgaattgtccagaaaaccccagtgctacaagatgtccagtgccaaaaccaagatcaaaaagcaacctcagaccaatacccagagattctcacattaaagagcaaagtcaacagaaaatcagcccagcagccgtaggagaggagtcatccccaggccggccccagtctctgctggacaacgctagcacctcagacagtcaggcagtgatgaacattatgaacacagaacaaagccaaaatagtattgtttccagaattaaagtgtttgagggtcagacaaacatagaaacctcaggactgcccaagaaaccagaaattactccacgttcacttcctccaaagcctactgtttcctcagggaaaccttctgtagctcccaaaccagctgctaacagagcttctggagagtgggactctgggactgagaacagactcaaggtgacctccaaggaaggactcaccccataccctcccctgcaagaagcgggaagcatcccagtaaccaaacctgaattgccaaagaaaccaaaccctggccttatacgaagtgttaatcctgagattccgggaagagggcccctggctgagagctctgatagtgggaagaaagtgccaactcctgccccgcggcctttgctgctgaagaaatctgtttcctcagaaaaccccacctacccttcagctccactgaaacctgtcactgttcctccccgactcgcaggggcatcacaagccaaagcatacaagtcactgggagaagggcccccagccaaccccccagttccagttctgcagagcaagcccttggtggacatcgatctcatcagctttgatgatgatgttttgcccaccccatcggggaacctggctgaagaatctgttggttcagagatggttctaggtttacatgaggatccacaaagtccacctcctctccctgctgaaaaacctattggaaacactttcagtacagtatctggaaagctcagtaatgttgagagaactagaaacttggaatccaaccacccaggtcaaacaggaggttttgtgcgagtacccccaaggttgccaccgagacctgtgaatggaaaaaccattccaactcaacagcctccaaccaaggtgccccctgagagaccacctcccccaaagctttctgcaaccagaagatctaataagaaactgccttttaatcgatcctcttctgacatggatcttcagaaaaaacaaagtaacttggcaactggactctcaaaagccaagagtcaagtttttaaaaatcaagatccggtgctaccccctcgtcccaaaccaggacaccctctctacagtaaatacatgcgtggggatgtacttgtgatgctgaagcagacggaaaataattacttggagtgccaaaagggagaagacactggcagagttcacctgtctcaaatgaagattatcactccacttgatgaacatcttagaagcagaccaaacgatccaagccacgctcagaagcctgttgacagtggtgctcctcatgctgtcgttcttcatgatttcccagcagagcaagttgatgatttgaacctcacttctggagaaattgtttatcttctggagaagatagatacagattggtacagagggaactgtagaaaccagattggcatatttcctgccaactatgtcaaagtgattattgatatcccagaaggaggaaatgggaaaagagaatgtgtttcatctcattgtgttaaaggctcaagatgtgttgctcggtttgaatatattggagagcagaaggatgagttgagtttctcagagggagaaattattattcttaaagagtatgtgaatgaggaatgggccagaggagaagttcgaggcagaactgggattttccccctgaactttgtggagcctgttgaggattatcccacctctggtgcaaatgttttaagcacaaaggtaccactgaaaaccaaaaaagaagattctggctcaaactctcaggttaacagtcttccggcagaatggtgtgaagctcttcacagttttacagcagagaccagtgatgacttatcattcaagaggggagaccggatccagattctggaacgtctggattctgactggtgcaggggcagactgcaggacagggaggggatcttcccagcagtgtttgtgaggccctgcccagctgaggcaggaggatcacttgagcctgggaggtcaagactacagtgagctatgattgncctnctattctccagcctgggtaacagtganannntgtctcaaa

SEQ ID NO: 448133 - DNA, 2319 bp, Homo sapiens
  misc_feature (2288)..(2290): n is a, c, g, or t
cactttcagtaggtaaattttattgtatgtgggttatatctcaaagatgtttaacaaattcattgagctaatgcatataaggtatttaacacagtgactagcacatggtgaatgagcagtaaatattagctattcttaatattacaaaaccatttgcattagcagttatagtcatattagaaagacctttgcattatgttatatttacctaccagatacctaccccagtggtatggtctgaattgtatggaccacttgttggcaaccctgtctagcctgttcctcttgcccttcacctgctaggctgggttgatgagcagcattgccagtgatatccatacactgaaggcagagaagggaaaatgtgtgactgggaggcacaaattatcccctccctccaaggactggtttatgtttaggcctctggtccatttggagatttcatgtttgtgtttggtgtgtggtaggtctctgacatcattttttccaaatggataggcatctagcctaataacacttattgaatagtaattcctttttctccacagatgtaaatcagaaaaaaatgaaaatcacacatgcacatgtataacacattatataaataataattaatttgtttaactttttttggagagagtcactcagtcatccaagtcagagtatagtgacagagcaagaccctgtgtcaaagaaaaaaaagccatgtcagacctaaaatatctcagaattcatgaaatttccatattgttcatttatttagagaaaagcattaagcagtccatgaaaaaatgttagggtcttcttagtaagctaatatagtaagctacattagccattagagtcttaagttatatttcagtttacctaacttgagagaatgaaagttttgtttctgcaggtgcattttggttgaaagagcagctgagatttagaaaagatctcagcaaaggtgctgcagggttgaaatggagaaagtggaccatcattcacagtgcgctgcaatcagcctggtgcatcatggccaggggaagggcagaggtatagatgtgtcaggacgtctctaaggggacaagagttattagaggaggtgaagagacaagaaagggcacaaaaatctgcctttatttatttcacaggcttgccagtgttgaagagtgttaagttataactccaaataatatccttcagtgggatttgatgatgatgaggataagcctgtctcttgatataaagaaactaagaataacaattgctagtcaataagaagaggtcgctcttcagctttgccttatcctctggccaatctcggcatttggctagatggatagagaatgttagattctttttgctaatttatttagaactactgttgaataaaccattcagattaaatacaaaatgcagaccaggcatgggaggtagcattgctttcaaattagaaaaagcacttagttaagtggtaataaatgaaatggattttactttttgtgaattatacttctgttgaaagtcattagctcctttcattacaaaaggcaagagcataaatcatagaactttcttcttttcccatcctaataaagacacaacttttaagactctgtcttgatcacagttttaaggaaaaagctattcttgaaagggaaagaggtcaaaaaccactactttggggtagaatagatactgtttcaaaataaataaacagttcccttttgttttactctctcagcttaaaaaagcaaaaagaaaacatactgggggatattttaattgagattttcgtcctcccttagcaaggacacattcttcttcaacttgataataattcccttgtttggctcaactgtgtggtttgcatcatgtactcataatgtaattgtgtcaagaggactctaatgagaaaaaaaaaattggtctcagagtgaataataaatccaccatctatcctgcacacttcattcacagcccttttctccccctaaggatccaagccacgctcagaagcctgttgacagtggtgctcctcatgctgtcgttcttcatgatttcccagcaggtaaggatgtaaataatgcagtgggagaaccacaggatccaggagtaagtctttttccctgccgggggttagcctctcaaggacatccttcttcatttttctgtgcctatagagtccgagactggagaggtcatcttatccaggactccacttcaagaagggttgattgtaccagccattccagaaagcttagttgtatacccttgcctttgaagctccccctcgaggnnnccccccccgccccacgcggttggcagcac

SEQ ID NO: 448134 - DNA, 914 bp, Homo sapiens
attgaacatgtttttaaaaatgtttttctttgcctaatatcactacctctgaagagaagatactgtgtttttagagcgataagcgttttttttaaaaaaatgttagatttgtgttttagtccactgtgtttctatatatttaaattttttatgtcttcacagctgaggcaaaaagtatgttggccatagtaccgaaggggaggaaggccaaagccttatatgatttccgaggggagaatgaagatgaactttccttcaaggtcagaatgtgtatctcttcataactgcattaagcactataattttttaaatgttttccattgaaggatggaacatttgggtggaatattaatcattactcaagaatgaagagatctcaggccctgattctaggggaagacattagagaaagtgaacagtcagaagaaggagggtggttttagtagtcactgctgtcaaaatagcctgtgtcaggcagtggtaaattctctgtcattgaagatattcagtcagaggaaaggatgccatagaaagaattaacatatcaaggaatgattggacaaggtgtggtttaaaacagtggacaaccaaacagggttttcacttgtctgcaacaagatgagaaaaaggccgagcaacagtggctcacacctctaatcccaacacttttgggaagtcaaggcaggaggatcgcttgaggccaggagtttaaaaccagcctggtcaacatggcaagaccccatctcaacaaagaaaaagaggaaaacaaggcaatacctgaatcaggtatgtgcagcctttgtcggggtaaggggggatgccttgactgaaatatgtcaccataaagttgctaacttcctattttgtgatggggttttactttattctgaataataaaatgttatttcatcttt

SEQ ID NO: 448135 - DNA, 342 bp, Homo sapiens
gtaagtaaatgtgggaaaagttagagaaaaattaatgactcagagacccaactcttttttatcaccaagattgagtgttgttggccttgaatctttttttagagataaaataatctcaccgatttcacgcaggcccctaatccactgtctgctcctaatggtaggttgtgggaatctctgctccctttttaacacagttcaactcatagagcatttatttcctcaaataaatgaacaagactcatttctgaacttaaaacagctccacttctagaatatacgtatacatgcacacaaacaccctcctggttaagaaactggtttttggcatttccgaaggag

SEQ ID NO: 448136 - DNA, 459 bp, Homo sapiens
gacagtcatgctcctgaattccttttaaagcttaggcaactaggttcactcttttctcttcctttcctcttctataaccccttctttttttcccttagcactcatgaatagtacacagcaaaaatgccccgtggaagaggtatgtttgtgatgataacatgaagtcttttaaaagtgttatccctgctgatttcagcattagtgatggtggtgatgtgattgtagcaaacttgaatgggcctctgacttaatgaaaccattcttacaaatcagacacaccatgcagagctctagcctccctgtcagcttggtttagctcttgataaaaatgttaatagtcagtcaaaccagttgatgatatgaatatgaggacatcctccaagtagaaacccaggggtttggtttcagatcttagaggtttgctttgccaacccagcagaggttcacctgttacggctc

SEQ ID NO: 448137 - DNA, 503 bp, Homo sapiens
tctttttgaaagttaaataagttcaaaattaattgaacatgtttttaaaaatgtttttctttgcctaatatcactacctctgaagagaagatactgtgtttttagagcgataagcgttttttttaaaaaaatgttagatttgtgttttagtccactgtgtttctatatatttaaattttttatgtcttcacagctgaggcaaaaagtatgttggccatagtaccgaaggggaggaaggccaaagccttatatgatttccgaggggagaatgaagatgaactttccttcaaggtcagaatgtgtatctcttcataactgcattaagcactataattttttaaatgttttccattgaaggatggaacatttgggtggaatattaatcattactcaagaatgaagagatctcaggccctgattctaggggaagacattagagaaagtgaacagtgcaaataggcctgttaatttacagtatcaaccaggcattaatgtacttagag

SEQ ID NO: 448138 - DNA, 5306 bp, Homo sapiens
gaagagagcgggagtgggagtgggaaaggccaggattaagaggccgccgggacgccgcaaggaggcggggaatcggctcggcccgcgccctgccgctgcccggccggctgcaggtggagttcgcggaggtggccatttccacagccgccgccgacgcctcctctccgggagccgccttccccccggcccgagggcggtggcgtggggcgccgggtgcaggcgttctggggcgccggggccgcagctcgctggccatcccgcggctgcgccccgcgcctcgcccatggctgagggccggcggcgggaggacgaggaggaagagctacgcgagcgccgcgaacttggtggccagcgccgcgcccggggccgtgcgctctcgggccactcggccgcagatcgcaacgaacgaaataaaccagaacatcgttcttcaagccaaggacccttgtcatccattagagcggtaatcaagagatcttctcggacttctattcagagtgaacttcatcgagatagaaggcgcccagagatcaccattgtggcagctgagccactgaggccagcctcgtggtttccaggaaccccacccccaggactgggatttcctacatcatctgcagcaggctcttggaggcctaatgagctggttcctgctgagctcccaccatcttatgaacaagttataaaagaaatcaaccaagttcaagttaatactacaaataataataatgctgctgctactccaaggcacactattacttctgcaactcagactgacttttcagaagaaatagacaacgatctgcctcaaagtaatgcaacactacaggcacctctcaagcctcttcagcctttctcagcagtctcgtctggcaatcttccaacaaatgtggcacctttaatcgtctttgatatttctgaagaaccgaattgtccagaaaaccccagtgctacaagatgtccagtgccaaaaccaagatcaaaaagcaacctcagaccaatacccagagattctcacattaaagagcaaagtcaacagaaaatcagcccagcagccgtaggagaggagtcatccccaggccggccccagtctctgctggacaacgctagcacctcagacagtcaggcagtgatgaacattatgaacacagaacaaagccaaaatagtattgtttccagaattaaagtgtttgagggtcagacaaacatagaaacctcaggactgcccaagaaaccagaaattactccacgttcacttcctccaaagcctactgtttcctcagggaaaccttctgtagctcccaaaccagctgctaacagagcttctggagagtgggactctgggactgagaacagactcaaggtgacctccaaggaaggactcaccccataccctcccctgcaagaagcgggaagcatcccagtaaccaaacctgaattgccaaagaaaccaaaccctggccttatacgaagtgttaatcctgagattccgggaagagggcccctggctgagagctctgatagtgggaagaaagtgccaactcctgccccgcggcctttgctgctgaagaaatctgtttcctcagaaaaccccacctacccttcagctccactgaaacctgtcactgttcctccccgactcgcaggggcatcacaagccaaagcatacaagtcactgggagaagggcccccagccaaccccccagttccagttctgcagagcaagcccttggtggacatcgatctcatcagctttgatgatgatgttttgcccaccccatcggggaacctggctgaagaatctgttggttcagagatggttctagatccctttcagctccctgcaaaaacagaaccaataaaagaacgagcagttcaaccagcacccaccaggaagcccactgtaattcgaattccagccaaaccaggaaaatgtttacatgaggatccacaaagtccacctcctctccctgctgaaaaacctattggaaacactttcagtacagtatctggaaagctcagtaatgttgagagaactagaaacttggaatccaaccacccaggtcaaacaggaggttttgtgcgagtacccccaaggttgccaccgagacctgtgaatggaaaaaccattccaactcaacagcctccaaccaaggtgccccctgagagaccacctcccccaaagctttctgcaaccagaagatctaataagaaactgccttttaatcgatcctcttctgacatggatcttcagaaaaaacaaagtaacttggcaactggactctcaaaagccaagagtcaagtttttaaaaatcaagatccggtgctaccccctcgtcccaaaccaggacaccctctctacagtaaatacatgctgtctgtgcctcatggaattgccaatgaagatattgtctctcaaaaccccggagaactctcttgtaagcgtggggatgtacttgtgatgctgaagcagacggaaaataattacttggagtgccaaaagggagaagacactggcagagttcacctgtctcaaatgaagattatcactccacttgatgaacatcttagaagcagaccaaacgatccaagccacgctcagaagcctgttgacagtggtgctcctcatgctgtcgttcttcatgatttcccagcagagcaagttgatgatttgaacctcacttctggagaaattgtttatcttctggagaagatagatacagattggtacagagggaactgtagaaaccagattggcatatttcctgccaactatgtcaaagtgattattgatatcccagaaggaggaaatgggaaaagagaatgtgtttcatctcattgtgttaaaggctcaagatgtgttgctcggtttgaatatattggagagcagaaggatgagttgagtttctcagagggagaaattattattcttaaagagtatgtgaatgaggaatgggccagaggagaagttcgaggcagaactgggattttccccctgaactttgtggagcctgttgaggattatcccacctctggtgcaaatgttttaagcacaaaggtaccactgaaaaccaaaaaagaagattctggctcaaactctcaggttaacagtcttccggcagaatggtgtgaagctcttcacagttttacagcagagaccagtgatgacttatcattcaagaggggagaccggatccagattctggaacgtctggattctgactggtgcaggggcagactgcaggacagggaggggatcttcccagcagtgtttgtgaggccctgcccagctgaggcaaaaagtatgttggccatagtaccgaaggggaggaaggccaaagccttatatgatttccgaggggagaatgaagatgaactttccttcaaggctggagatataataacagagctggaatctgtagatgatgactggatgagtggagaacttatgggaaaatctggaatatttcccaaaaactacatacagtttctacagatcagctagaggagaagcttgtctgtgttccttggcacaagaactcacttgaactatcaccttgactatcagatatgtttttgcactattttttttaactgaaaaagaaatatctaagctgtacatggtacactagaattttctgaaagcagaaaacgttcagattttgtagttaattttcattacaatagaaacatgcacatggaaacccatgagctaggattctaccgaggaaaacatctagtgggattagcaaggtgaagggaaagcatctggtggcatggcagcatggggaggctcacacacagaagttgcacgtggacatctgttttaatcagcacaagtgaattaaccatgcttcttcatttttttactttagttaaaaaagaggacatttaatattctacatgctgtaactatcaggacatggttagcaatctcaatttcatttttgatattcaaattaattcttacagcttgagcatatcagccttattaccagagcaaatccttccttcagatgggatagtttactgactagttggagcatttgtaagcacatggtgaaatcagcccctgcccaccaaaataatctttatgttaccaagtgattcccatttgtctaaggatttgaagggggtctaaattggatgtatcttagtctaaagaaccaaaaccatccctgaaatgccttgctaatacaactaatccttccatatatgtgccatacttatttttttcctcagtgtatactttatgttaacagggttattacaaagcacattttctgaatctgcaatcattcctttgacaattactggacccaaaggaaaattcattttctttgcattattccagtaatatataaaaactgtgtcttgttatagtagtacattatgaatcacatataaaatcttacaatacagaacaactgttaagatggaaaacagtgccaaacctccacagctcatttctttgtaatataatcagaatgaaaaataatttaagaggacagaagactggtacttttttgttttattttttctctagcttatccctgcacaattattagagtgaatgaaaaaccactttcctgctttccattgttataaattctaagcttaagataaaagtggttctttacatgactgaatcaattacaatttatgggctagagccaaataggttgaagacaatcatccaaacagatcaatggaatagaatttcattggaaatgtaaaacactttcccaacaatggtcatgactttcttctgtttttgagaagagtttcatatgctggaccacattttagcttttattgttttttttttcccattgtccaaaaagttaagcaacaagtggccacacttttacgtgactacaacctggagttctgcaaagaaggtaatatttacttggtctttgactaaagttatctccccattctatggttacattttattttggactatggggacttctaatacgttttggtaaagaagagagtataaagaaaattcttgtcaaatttcactcaaaagtaatttcatgagaaatcaatgatttaaagcattatccaaattaaattatcatttgcagcaaactgtacaacagcaggaaggatatggaatggaacatgaggtatatatctttgcctttataattttaacatcttatattgaagattctgaaaacctatctttattagaggaaaatctcaatcttcagttttggccttctgtcaccagaatgataagtgcaatagttgtaaatctacttgacactgtaataaactgaactgaactttca

SEQ ID NO: 448139 - DNA, 5020 bp, Homo sapiens
cgagctcgtaccatatggttggacgaggaggaagagctacgcgagcgccgcgaacttggtggccagcgccgcgcccggggccgtgcgctctcgggccactcggccgcagatcgcaacgaacgaaataaaccagaacatcgttcttcaagccaaggacccttgtcatccattagagcggtaatcaagagatcttctcggacttctattcagagtgaacttcatcgagatagaaggcgcccagagatcaccattgtggcagctgagccactgaggccagcctcgtggtttccaggaaccccacccccaggactgggatttcctacatcatctgcagcaggctcttggaggcctaatgagctggttcctgctgagctcccaccatcttatgaacaagttataaaagaaatcaaccaagttcaagttaatactacaaataataataatgctgctgctactccaaggcacactattacttctgcaactcagactgacttttcagaagaaatagacaacgatctgcctcaaagtaatgcaacactacaggcacctctcaagcctcttcagcctttctcagcagtctcgtctggcaatcttccaacaaatgtggcacctttaatcgtctttgatatttctgaagaaccgaattgtccagaaaaccccagtgctacaagatgtccagtgccaaaaccaagatcaaaaagcaacctcagaccaatacccagagattctcacattaaagagcaaagtcaacagaaaatcagcccagcagccgtaggagaggagtcatccccaggccggccccagtctctgctggacaacgctagcacctcagacagtcaggcagtgatgaacattatgaacacagaacaaagccaaaatagtattgtttccagaattaaagtgtttgagggtcagacaaacatagaaacctcaggactgcccaagaaaccagaaattactccacgttcacttcctccaaagcctactgtttcctcagggaaaccttctgtagctcccaaaccagctgctaacagagcttctggagagtgggactctgggactgagaacagactcaaggtgacctccaaggaaggactcaccccataccctcccctgcaagaagcgggaagcatcccagtaaccaaacctgaattgccaaagaaaccaaaccctggccttatacgaagtgttaatcctgagattccgggaagagggcccctggctgagagctctgatagtgggaagaaagtgccaactcctgccccgcggcctttgctgctgaagaaatctgtttcctcagaaaaccccacctacccttcagctccactgaaacctgtcactgttcctccccgactcgcaggggcatcacaagccaaagcatacaagtcactgggagaagggcccccagccaaccccccagttccagttctgcagagcaagcccttggtggacatcgatctcatcagctttgatgatgatgttttgcccaccccatcggggaacctggctgaagaatctgttggttcagagatggttctagatccctttcagctccctgcaaaaacagaaccaataaaagaacgagcagttcaaccagcacccaccaggaagcccactgtaattcgaattccagccaaaccaggaaaatgtttacatgaggatccacaaagtccacctcctctccctgctgaaaaacctattggaaacactttcagtacagtatctggaaagctcagtaatgttgagagaactagaaacttggaatccaaccacccaggtcaaacaggaggttttgtgcgagtacccccaaggttgccaccgagacctgtgaatggaaaaaccattccaactcaacagcctccaaccaaggtgccccctgagagaccacctcccccaaagctttctgcaaccagaagatctaataagaaactgccttttaatcgatcctcttctgacatggatcttcagaaaaaacaaagtaacttggcaactggactctcaaaagccaagagtcaagtttttaaaaatcaagatccggtgctaccccctcgtcccaaaccaggacaccctctctacagtaaatacatgctgtctgtgcctcatggaattgccaatgaagatattgtctctcaaaaccccggagaactctcttgtaagcgtggggatgtacttgtgatgctgaagcagacggaaaataattacttggagtgccaaaagggagaagacactggcagagttcacctgtctcaaatgaagattatcactccacttgatgaacatcttagaagcagaccaaacgatccaagccacgctcagaagcctgttgacagtggtgctcctcatgctgtcgttcttcatgatttcccagcagagcaagttgatgatttgaacctcacttctggagaaattgtttatcttctggagaagatagatacagattggtacagagggaactgtagaaaccagattggcatatttcctgccaactatgtcaaagtgattattgatatcccagaaggaggaaatgggaaaagagaatgtgtttcatctcattgtgttaaaggctcaagatgtgttgctcggtttgaatatattggagagcagaaggatgagttgagtttctcagagggagaaattattattcttaaagagtatgtgaatgaggaatgggccagaggagaagttcgaggcagaactgggattttccccctgaactttgtggagcctgttgaggattatcccacctctggtgcaaatgttttaagcacaaaggtaccactgaaaaccaaaaaagaagattctggctcaaactctcaggttaacagtcttccggcagaatggtgtgaagctcttcacagttttacagcagagaccagtgatgacttatcattcaagaggggagaccggatccagattctggaacgtctggattctgactggtgcaggggcagactgcaggacagggaggggatcttcccagcagtgtttgtgaggccctgcccagctgaggcaaaaagtatgttggccatagtaccgaaggggaggaaggccaaagccttatatgatttccgaggggagaatgaagatgaactttccttcaaggctggagatataataacagagctggaatctgtagatgatgactggatgagtggagaacttatgggaaaatctggaatatttcccaaaaactacatacagtttctacagatcagctagaggagaagcttgtctgtgttccttggcacaagaactcacttgaactatcaccttgactatcagatatgtttttgcactattttttttaactgaaaaagaaatatctaagctgtacatggtacactagaattttctgaaagcagaaaacgttcagattttgtagttaattttcattacaatagaaacatgcacatggaaacccatgagctaggattctaccgaggaaaacatctagtgggattagcaaggtgaagggaaagcatctggtggcatggcagcatggggaggctcacacacagaagttgcacgtggacatctgttttaatcagcacaagtgaattaaccatgcttcttcatttttttactttagttaaaaaagaggacatttaatattctacatgctgtaactatcaggacatggttagcaatctcaatttcatttttgatattcaaattaattcttacagcttgagcatatcagccttattaccagagcaaatccttccttcagatgggatagtttactgactagttggagcatttgtaagcacatggtgaaatcagcccctgcccaccaaaataatctttatgttaccaagtgattcccatttgtctaaggatttgaagggggtctaaattggatgtatcttagtctaaagaaccaaaaccatccctgaaatgccttgctaatacaactaatccttccatatatgtgccatacttatttttttcctcagtgtatactttatgttaacagggttattacaaagcacattttctgaatctgcaatcattcctttgacaattactggacccaaaggaaaattcattttctttgcattattccagtaatatataaaaactgtgtcttgttatagtagtacattatgaatcacatataaaatcttacaatacagaacaactgttaagatggaaaacagtgccaaacctccacagctcatttctttgtaatataatcagaatgaaaaataatttaagaggacagaagactggtacttttttgttttattttttctctagcttatccctgcacaattattagagtgaatgaaaaaccactttcctgctttccattgttataaattctaagcttaagataaaagtggttctttacatgactgaatcaattacaatttatgggctagagccaaataggttgaagacaatcatccaaacagatcaatggaatagaatttcattggaaatgtaaaacactttcccaacaatggtcatgactttcttctgtttttgagaagagtttcatatgctggaccacattttagcttttattgttttttttttcccattgtccaaaaagttaagcaacaagtggccacacttttacgtgactacaacctggagttctgcaaagaaggtaatatttacttggtctttgactaaagttatctccccattctatggttacattttattttggactatggggacttctaatacgttttggtaaagaagagagtataaagaaaattcttgtcaaatttcactcaaaagtaatttcatgagaaatcaatgatttaaagcattatccaaattaaattatcatttgcagcaaactgtacaacagcaggaaggatatggaatggaacatgaggtatatatctttgcctttataattttaacatcttatattgaagattctgaaaacctatctttattagaggaaaatctcaatcttcagttttggccttctgtcaccagaatgataagtgcaatagttgtaaatctacttgacactgtaataaactgaactgaactttca

SEQ ID NO: 448140 - DNA, 4871 bp, Homo sapiens
cactcatgaatagtacacagcaaaaatgccccgtggaagagcttctcggacttctattcagagtgaacttcatcgagatagaaggcgcccagagatcaccattgtggcagctgagccactgaggccagcctcgtggtttccaggaaccccacccccaggactgggatttcctacatcatctgcagcaggctcttggaggcctaatgagctggttcctgctgagctcccaccatcttatgaacaagttataaaagaaatcaaccaagttcaagttaatactacaaataataataatgctgctgctactccaaggcacactattacttctgcaactcagactgacttttcagaagaaatagacaacgatctgcctcaaagtaatgcaacactacaggcacctctcaagcctcttcagcctttctcagcagtctcgtctggcaatcttccaacaaatgtggcacctttaatcgtctttgatatttctgaagaaccgaattgtccagaaaaccccagtgctacaagatgtccagtgccaaaaccaagatcaaaaagcaacctcagaccaatacccagagattctcacattaaagagcaaagtcaacagaaaatcagcccagcagccgtaggagaggagtcatccccaggccggccccagtctctgctggacaacgctagcacctcagacagtcaggcagtgatgaacattatgaacacagaacaaagccaaaatagtattgtttccagaattaaagtgtttgagggtcagacaaacatagaaacctcaggactgcccaagaaaccagaaattactccacgttcacttcctccaaagcctactgtttcctcagggaaaccttctgtagctcccaaaccagctgctaacagagcttctggagagtgggactctgggactgagaacagactcaaggtgacctccaaggaaggactcaccccataccctcccctgcaagaagcgggaagcatcccagtaaccaaacctgaattgccaaagaaaccaaaccctggccttatacgaagtgttaatcctgagattccgggaagagggcccctggctgagagctctgatagtgggaagaaagtgccaactcctgccccgcggcctttgctgctgaagaaatctgtttcctcagaaaaccccacctacccttcagctccactgaaacctgtcactgttcctccccgactcgcaggggcatcacaagccaaagcatacaagtcactgggagaagggcccccagccaaccccccagttccagttctgcagagcaagcccttggtggacatcgatctcatcagctttgatgatgatgttttgcccaccccatcggggaacctggctgaagaatctgttggttcagagatggttctagatccctttcagctccctgcaaaaacagaaccaataaaagaacgagcagttcaaccagcacccaccaggaagcccactgtaattcgaattccagccaaaccaggaaaatgtttacatgaggatccacaaagtccacctcctctccctgctgaaaaacctattggaaacactttcagtacagtatctggaaagctcagtaatgttgagagaactagaaacttggaatccaaccacccaggtcaaacaggaggttttgtgcgagtacccccaaggttgccaccgagacctgtgaatggaaaaaccattccaactcaacagcctccaaccaaggtgccccctgagagaccacctcccccaaagctttctgcaaccagaagatctaataagaaactgccttttaatcgatcctcttctgacatggatcttcagaaaaaacaaagtaacttggcaactggactctcaaaagccaagagtcaagtttttaaaaatcaagatccggtgctaccccctcgtcccaaaccaggacaccctctctacagtaaatacatgctgtctgtgcctcatggaattgccaatgaagatattgtctctcaaaaccccggagaactctcttgtaagcgtggggatgtacttgtgatgctgaagcagacggaaaataattacttggagtgccaaaagggagaagacactggcagagttcacctgtctcaaatgaagattatcactccacttgatgaacatcttagaagcagaccaaacgatccaagccacgctcagaagcctgttgacagtggtgctcctcatgctgtcgttcttcatgatttcccagcagagcaagttgatgatttgaacctcacttctggagaaattgtttatcttctggagaagatagatacagattggtacagagggaactgtagaaaccagattggcatatttcctgccaactatgtcaaagtgattattgatatcccagaaggaggaaatgggaaaagagaatgtgtttcatctcattgtgttaaaggctcaagatgtgttgctcggtttgaatatattggagagcagaaggatgagttgagtttctcagagggagaaattattattcttaaagagtatgtgaatgaggaatgggccagaggagaagttcgaggcagaactgggattttccccctgaactttgtggagcctgttgaggattatcccacctctggtgcaaatgttttaagcacaaaggtaccactgaaaaccaaaaaagaagattctggctcaaactctcaggttaacagtcttccggcagaatggtgtgaagctcttcacagttttacagcagagaccagtgatgacttatcattcaagaggggagaccggatccagattctggaacgtctggattctgactggtgcaggggcagactgcaggacagggaggggatcttcccagcagtgtttgtgaggccctgcccagctgaggcaaaaagtatgttggccatagtaccgaaggggaggaaggccaaagccttatatgatttccgaggggagaatgaagatgaactttccttcaaggctggagatataataacagagctggaatctgtagatgatgactggatgagtggagaacttatgggaaaatctggaatatttcccaaaaactacatacagtttctacagatcagctagaggagaagcttgtctgtgttccttggcacaagaactcacttgaactatcaccttgactatcagatatgtttttgcactattttttttaactgaaaaagaaatatctaagctgtacatggtacactagaattttctgaaagcagaaaacgttcagattttgtagttaattttcattacaatagaaacatgcacatggaaacccatgagctaggattctaccgaggaaaacatctagtgggattagcaaggtgaagggaaagcatctggtggcatggcagcatggggaggctcacacacagaagttgcacgtggacatctgttttaatcagcacaagtgaattaaccatgcttcttcatttttttactttagttaaaaaagaggacatttaatattctacatgctgtaactatcaggacatggttagcaatctcaatttcatttttgatattcaaattaattcttacagcttgagcatatcagccttattaccagagcaaatccttccttcagatgggatagtttactgactagttggagcatttgtaagcacatggtgaaatcagcccctgcccaccaaaataatctttatgttaccaagtgattcccatttgtctaaggatttgaagggggtctaaattggatgtatcttagtctaaagaaccaaaaccatccctgaaatgccttgctaatacaactaatccttccatatatgtgccatacttatttttttcctcagtgtatactttatgttaacagggttattacaaagcacattttctgaatctgcaatcattcctttgacaattactggacccaaaggaaaattcattttctttgcattattccagtaatatataaaaactgtgtcttgttatagtagtacattatgaatcacatataaaatcttacaatacagaacaactgttaagatggaaaacagtgccaaacctccacagctcatttctttgtaatataatcagaatgaaaaataatttaagaggacagaagactggtacttttttgttttattttttctctagcttatccctgcacaattattagagtgaatgaaaaaccactttcctgctttccattgttataaattctaagcttaagataaaagtggttctttacatgactgaatcaattacaatttatgggctagagccaaataggttgaagacaatcatccaaacagatcaatggaatagaatttcattggaaatgtaaaacactttcccaacaatggtcatgactttcttctgtttttgagaagagtttcatatgctggaccacattttagcttttattgttttttttttcccattgtccaaaaagttaagcaacaagtggccacacttttacgtgactacaacctggagttctgcaaagaaggtaatatttacttggtctttgactaaagttatctccccattctatggttacattttattttggactatggggacttctaatacgttttggtaaagaagagagtataaagaaaattcttgtcaaatttcactcaaaagtaatttcatgagaaatcaatgatttaaagcattatccaaattaaattatcatttgcagcaaactgtacaacagcaggaaggatatggaatggaacatgaggtatatatctttgcctttataattttaacatcttatattgaagattctgaaaacctatctttattagaggaaaatctcaatcttcagttttggccttctgtcaccagaatgataagtgcaatagttgtaaatctacttgacactgtaataaactgaactgaactttca

SEQ ID NO: 448141 - DNA, 5667 bp, Homo sapiens
gaagagagcgggagtgggagtgggaaaggccaggattaagaggccgccgggacgccgcaaggaggcggggaatcggctcggcccgcgccctgccgctgcccggccggctgcaggtggagttcgcggaggtggccatttccacagccgccgccgacgcctcctctccgggagccgccttccccccggcccgagggcggtggcgtggggcgccgggtgcaggcgttctggggcgccggggccgcagctcgctggccatcccgcggctgcgccccgcgcctcgcccatggctgagggccggcggcgggaggacgaggaggaagagctacgcgagcgccgcgaacttggtggccagcgccgcgcccggggccgtgcgctctcgggccactcggccgcagatcgcaacgaacgaaataaaccagaacatcgttcttcaagccaaggacccttgtcatccattagagcggtaatcaagagatcttctcggacttctattcagagtgaacttcatcgagatagaaggcgcccagagatcaccattgtggcagctgagccactgaggccagcctcgtggtttccaggaaccccacccccaggactgggatttcctacatcatctgcagcaggctcttggaggcctaatgagctggttcctgctgagctcccaccatcttatgaacaagttataaaagaaatcaaccaagttcaagttaatactacaaataataataatgctgctgctactccaaggcacactattacttctgcaactcagactgacttttcagaagaaatagacaacgatctgcctcaaagtaatgcaacactacaggcacctctcaagcctcttcagcctttctcagcagtctcgtctggcaatcttccaacaaatgtggcacctttaatcgtctttgatatttctgaagaaccgaattgtccagaaaaccccagtgctacaagatgtccagtgccaaaaccaagatcaaaaagcaacctcagaccaatacccagagattctcacattaaagagcaaagtcaacagaaaatcagcccagcagccgtaggagaggagtcatccccaggccggccccagtctctgctggacaacgctagcacctcagacagtcaggcagtgatgaacattatgaacacagaacaaagccaaaatagtattgtttccagaattaaagtgtttgagggtcagacaaacatagaaacctcaggactgcccaagaaaccagaaattactccacgttcacttcctccaaagcctactgtttcctcagggaaaccttctgtagctcccaaaccagctgctaacagagcttctggagagtgggactctgggactgagaacagactcaaggtgacctccaaggaaggactcaccccataccctcccctgcaagaagcgggaagcatcccagtaaccaaacctgaattgccaaagaaaccaaaccctggccttatacgaagtgttaatcctgagattccgggaagagggcccctggctgagagctctgatagtgggaagaaagtgccaactcctgccccgcggcctttgctgctgaagaaatctgtttcctcagaaaaccccacctacccttcagctccactgaaacctgtcactgttcctccccgactcgcaggggcatcacaagccaaagcatacaagtcactgggagaagggcccccagccaaccccccagttccagttctgcagagcaagcccttggtggacatcgatctcatcagctttgatgatgatgttttgcccaccccatcggggaacctggctgaagaatctgttggttcagagatggttctaggtttacatgaggatccacaaagtccacctcctctccctgctgaaaaacctattggaaacactttcagtacagtatctggaaagctcagtaatgttgagagaactagaaacttggaatccaaccacccaggtcaaacaggaggttttgtgcgagtacccccaaggttgccaccgagacctgtgaatggaaaaaccattccaactcaacagcctccaaccaaggtgccccctgagagaccacctcccccaaagctttctgcaaccagaagatctaataagaaactgccttttaatcgatcctcttctgacatggatcttcagaaaaaacaaagtaacttggcaactggactctcaaaagccaagagtcaagtttttaaaaatcaagatccggtgctaccccctcgtcccaaaccaggacaccctctctacagtaaatacatgcgtggggatgtacttgtgatgctgaagcagacggaaaataattacttggagtgccaaaagggagaagacactggcagagttcacctgtctcaaatgaagattatcactccacttgatgaacatcttagaagcagaccaaacgatccaagccacgctcagaagcctgttgacagtggtgctcctcatgctgtcgttcttcatgatttcccagcagagcaagttgatgatttgaacctcacttctggagaaattgtttatcttctggagaagatagatacagattggtacagagggaactgtagaaaccagattggcatatttcctgccaactatgtcaaagtgattattgatatcccagaaggaggaaatgggaaaagagaatgtgtttcatctcattgtgttaaaggctcaagatgtgttgctcggtttgaatatattggagagcagaaggatgagttgagtttctcagagggagaaattattattcttaaagagtatgtgaatgaggaatgggccagaggagaagttcgaggcagaactgggattttccccctgaactttgtggagcctgttgaggattatcccacctctggtgcaaatgttttaagcacaaaggtaccactgaaaaccaaaaaagaagattctggctcaaactctcaggttaacagtcttccggcagaatggtgtgaagctcttcacagttttacagcagagaccagtgatgacttatcattcaagaggggagaccggatccagattctggaacgtctggattctgactggtgcaggggcagactgcaggacagggaggggatcttcccagcagtgtttgtgaggccctgcccagctgaggcaaaaagtatgttggccatagtaccgaaggggaggaaggccaaagccttatatgatttccgaggggagaatgaagatgaactttccttcaaggctggagatataataacagagctggaatctgtagatgatgactggatgagtggagaacttatgggaaaatctggaatatttcccaaaaactacatacagtttctacagatcagctagaggagaagcttgtctgtgttccttggcacaagaactcacttgaactatcaccttgactatcagatatgtttttgcactattttttttaactgaaaaagaaatatctaagctgtacatggtacactagaattttctgaaagcagaaaacgttcagattttgtagttaattttcattacaatagaaacatgcacatggaaacccatgagctaggattctaccgaggaaaacatctagtgggattagcaaggtgaagggaaagcatctggtggcatggcagcatggggaggctcacacacagaagttgcacgtggacatctgttttaatcagcacaagtgaattaaccatgcttcttcatttttttactttagttaaaaaagaggacatttaatattctacatgctgtaactatcaggacatggttagcaatctcaatttcatttttgatattcaaattaattcttacagcttgagcatatcagccttattaccagagcaaatccttccttcagatgggatagtttactgactagttggagcatttgtaagcacatggtgaaatcagcccctgcccaccaaaataatctttatgttaccaagtgattcccatttgtctaaggatttgaagggggtctaaattggatgtatcttagtctaaagaaccaaaaccatccctgaaatgccttgctaatacaactaatccttccatatatgtgccatacttatttttttcctcagtgtatactttatgttaacagggttattacaaagcacattttctgaatctgcaatcattcctttgacaattactggacccaaaggaaaattcattttctttgcattattccagtaatatataaaaactgtgtcttgttatagtagtacattatgaatcacatataaaatcttacaatacagaacaactgttaagatggaaaacagtgccaaacctccacagctcatttctttgtaatataatcagaatgaaaaataatttaagaggacagaagactggtacttttttgttttattttttctctagcttatccctgcacaattattagagtgaatgaaaaaccactttcctgctttccattgttataaattctaagcttaagataaaagtggttctttacatgactgaatcaattacaatttatgggctagagccaaataggttgaagacaatcatccaaacagatcaatggaatagaatttcattggaaatgtaaaacactttcccaacaatggtcatgactttcttctgtttttgagaagagtttcatatgctggaccacattttagcttttattgttttttttttcccattgtccaaaaagttaagcaacaagtggccacacttttacgtgactacaacctggagttctgcaaagaaggtaatatttacttggtctttgactaaagttatctccccattctatggttacattttattttggactatggggacttctaatacgttttggtaaagaagagagtataaagaaaattcttgtcaaatttcactcaaaagtaatttcatgagaaatcaatgatttaaagcattatccaaattaaattatcatttgcagcaaactgtacaacagcaggaaggatatggaatggaacatgaggtatatatctttgcctttataattttaacatcttatattgaagattctgaaaacctatctttattagaggaaaatctcaatcttcagttttggccttctgtcaccagaatgataagtgcaatagttgtaaatctacttgacactgtaataaactgaactgaactttcaaagtccctttctcatactagactgagttttttgagaatggaggtggtatcttttttttttttttttttgagacaggatttaattccctttgaccaggctggagtgcaatgcaatgttggctcactgcagcctctgcctcctgggctcaagtgattctcctgccacagcctcctgagtagctgggactacaggcgcacaccaccgtgcccagctaatttctggtatttttttttctttttgtagagacagggtttcgccatgttgcccaggctggtttcaaacacctgggctcaagcagtctgcctgcctcagcctcccaaagtgctggtattactgcacctggcctgtggtaccttatttatctttgtatctctagtcctttgcaccattcagcctcaataaaggttggttggtgggttgggtgagttggttggttggaatggatggatggatggatgaatgactttcacatacagcaataccatcttggattcactcaatatctttcctctttaatttttgacataaatctatacta

SEQ ID NO: 448142 - DNA, 5124 bp, Homo sapiens
  misc_feature (4708)..(4708): n is a, c, g, or t
  misc_feature (4713)..(4713): n is a, c, g, or t
  misc_feature (4733)..(4733): n is a, c, g, or t
  misc_feature (4735)..(4735): n is a, c, g, or t
  misc_feature (4746)..(4746): n is a, c, g, or t
  misc_feature (4749)..(4749): n is a, c, g, or t
  misc_feature (4751)..(4751): n is a, c, g, or t
  misc_feature (4754)..(4754): n is a, c, g, or t
  misc_feature (4756)..(4756): n is a, c, g, or t
  misc_feature (4766)..(4766): n is a, c, g, or t
  misc_feature (4778)..(4778): n is a, c, g, or t
  misc_feature (4784)..(4784): n is a, c, g, or t
  misc_feature (4794)..(4794): n is a, c, g, or t
  misc_feature (4796)..(4796): n is a, c, g, or t
  misc_feature (4799)..(4800): n is a, c, g, or t
  misc_feature (4804)..(4804): n is a, c, g, or t
  misc_feature (4809)..(4809): n is a, c, g, or t
  misc_feature (4812)..(4812): n is a, c, g, or t
  misc_feature (4820)..(4820): n is a, c, g, or t
  misc_feature (4826)..(4826): n is a, c, g, or t
  misc_feature (4829)..(4829): n is a, c, g, or t
  misc_feature (4840)..(4840): n is a, c, g, or t
  misc_feature (4847)..(4847): n is a, c, g, or t
  misc_feature (4853)..(4853): n is a, c, g, or t
  misc_feature (4868)..(4868): n is a, c, g, or t
  misc_feature (4874)..(4874): n is a, c, g, or t
  misc_feature (4890)..(4890): n is a, c, g, or t
  misc_feature (4892)..(4892): n is a, c, g, or t
  misc_feature (4896)..(4896): n is a, c, g, or t
  misc_feature (4898)..(4899): n is a, c, g, or t
  misc_feature (4904)..(4904): n is a, c, g, or t
gaagagagcgggagtgggagtgggaaaggccaggattaagaggccgccgggacgccgcaaggaggcggggaatcggctcggcccgcgccctgccgctgcccggccggctgcaggtggagttcgcggaggtggccatttccacagccgccgccgacgcctcctctccgggagccgccttccccccggcccgagggcggtggcgtggggcgccgggtgcaggcgttctggggcgccggggccgcagctcgctggccatcccgcggctgcgccccgcgcctcgcccatggctgagggccggcggcgggaggacgaggaggaagagctacgcgagcgccgcgaacttggtggccagcgccgcgcccggggccgtgcgctctcgggccactcggccgcagatcgcaacgaacgaaataaaccagaacatcgttcttcaagccaaggacccttgtcatccattagagcggtaatcaagagatcttctcggacttctattcagagtgaacttcatcgagatagaaggcgcccagagatcaccattgtggcagctgagccactgaggccagcctcgtggtttccaggaaccccacccccaggactgggatttcctacatcatctgcagcaggctcttggaggcctaatgagctggttcctgctgagctcccaccatcttatgaacaagttataaaagaaatcaaccaagttcaagttaatactacaaataataataatgctgctgctactccaaggcacactattacttctgcaactcagactgacttttcagaagaaatagacaacgatctgcctcaaagtaatgcaacactacaggcacctctcaagcctcttcagcctttctcagcagtctcgtctggcaatcttccaacaaatgtggcacctttaatcgtctttgatatttctgaagaaccgaattgtccagaaaaccccagtgctacaagatgtccagtgccaaaaccaagatcaaaaagcaacctcagaccaatacccagagattctcacattaaagagcaaagtcaacagaaaatcagcccagcagccgtaggagaggagtcatccccaggccggccccagtctctgctggacaacgctagcacctcagacagtcaggcagtgatgaacattatgaacacagaacaaagccaaaatagtattgtttccagaattaaagtgtttgagggtcagacaaacatagaaacctcaggactgcccaagaaaccagaaattactccacgttcacttcctccaaagcctactgtttcctcagggaaaccttctgtagctcccaaaccagctgctaacagagcttctggagagtgggactctgggactgagaacagactcaaggtgacctccaaggaaggactcaccccataccctcccctgcaagaagcgggaagcatcccagtaaccaaacctgaattgccaaagaaaccaaaccctggccttatacgaagtgttaatcctgagattccgggaagagggcccctggctgagagctctgatagtgggaagaaagtgccaactcctgccccgcggcctttgctgctgaagaaatctgtttcctcagaaaaccccacctacccttcagctccactgaaacctgtcactgttcctccccgactcgcaggggcatcacaagccaaagcatacaagtcactgggagaagggcccccagccaaccccccagttccagttctgcagagcaagcccttggtggacatcgatctcatcagctttgatgatgatgttttgcccaccccatcggggaacctggctgaagaatctgttggttcagagatggttctaggtttacatgaggatccacaaagtccacctcctctccctgctgaaaaacctattggaaacactttcagtacagtatctggaaagctcagtaatgttgagagaactagaaacttggaatccaaccacccaggtcaaacaggaggttttgtgcgagtacccccaaggttgccaccgagacctgtgaatggaaaaaccattccaactcaacagcctccaaccaaggtgccccctgagagaccacctcccccaaagctttctgcaaccagaagatctaataagaaactgccttttaatcgatcctcttctgacatggatcttcagaaaaaacaaagtaacttggcaactggactctcaaaagccaagagtcaagtttttaaaaatcaagatccggtgctaccccctcgtcccaaaccaggacaccctctctacagtaaatacatgcgtggggatgtacttgtgatgctgaagcagacggaaaataattacttggagtgccaaaagggagaagacactggcagagttcacctgtctcaaatgaagattatcactccacttgatgaacatcttagaagcagaccaaacgatccaagccacgctcagaagcctgttgacagtggtgctcctcatgctgtcgttcttcatgatttcccagcagagcaagttgatgatttgaacctcacttctggagaaattgtttatcttctggagaagatagatacagattggtacagagggaactgtagaaaccagattggcatatttcctgccaactatgtcaaagtgattattgatatcccagaaggaggaaatgggaaaagagaatgtgtttcatctcattgtgttaaaggctcaagatgtgttgctcggtttgaatatattggagagcagaaggatgagttgagtttctcagagggagaaattattattcttaaagagtatgtgaatgaggaatgggccagaggagaagttcgaggcagaactgggattttccccctgaactttgtggagcctgttgaggattatcccacctctggtgcaaatgttttaagcacaaaggtaccactgaaaaccaaaaaagaagattctggctcaaactctcaggttaacagtcttccggcagaatggtgtgaagctcttcacagttttacagcagagaccagtgatgacttatcattcaagaggggagaccggatccagattctggaacgtctggattctgactggtgcaggggcagactgcaggacagggaggggatcttcccagcagtgtttgtgaggccctgcccagctgaggcaaaaagtatgttggccatagtaccgaaggggaggaaggccaaagccttatatgatttccgaggggagaatgaagatgaactttccttcaaggctggagatataataacagagctggaatctgtagatgatgactggatgagtggagaacttatgggaaaatctggaatatttcccaaaaactacatacagtttctacagatcagctagaggagaagcttgtctgtgttccttggcacaagaactcacttgaactatcaccttgactatcagatatgtttttgcactattttttttaactgaaaaagaaatatctaagctgtacatggtacactagaattttctgaaagcagaaaacgttcagattttgtagttaattttcattacaatagaaacatgcacatggaaacccatgagctaggattctaccgaggaaaacatctagtgggattagcaaggtgaagggaaagcatctggtggcatggcagcatggggaggctcacacacagaagttgcacgtggacatctgttttaatcagcacaagtgaattaaccatgcttcttcatttttttactttagttaaaaaagaggacatttaatattctacatgctgtaactatcaggacatggttagcaatctcaatttcatttttgatattcaaattaattcttacagcttgagcatatcagccttattaccagagcaaatccttccttcagatgggatagtttactgactagttggagcatttgtaagcacatggtgaaatcagcccctgcccaccaaaataatctttatgttaccaagtgattcccatttgtctaaggatttgaagggggtctaaattggatgtatcttagtctaaagaaccaaaaccatccctgaaatgccttgctaatacaactaatccttccatatatgtgccatacttatttttttcctcagtgtatactttatgttaacagggttattacaaagcacattttctgaatctgcaatcattcctttgacaattactggacccaaaggaaaattcattttctttgcattattccagtaatatataaaaactgtgtcttgttatagtagtacattatgaatcacatataaaatcttacaatacagaacaactgttaagatggaaaacagtgccaaacctccacagctcatttctttgtaatataatcagaatgaaaaataatttaagaggacagaagactggtacttttttgttttattttttctctagcttatccctgcacaattattagagtgaatgaaaaaccactttcctgctttccattgttataaattctaagcttaagataaaagtggttctttacatgactgaatcaattacaatttatgggctagagccaaataggttgaagacaatcatccaaacagatcaatggaatagaatttcattggaaatgtaaaacactttcccaacaatggtcatgactttcttctgtttttgagaagagtttcatatgctggaccacaaaaaaaaaaaaaaaaaaaaaaaaaaaaaaaaaaaaaaaaaaaaaaaaaaaaaaaaaaaaaaaaaaaaaaaaaaaaccttgtngcccncttggcccaagcgattttanantgggcaggttnatncntgngnccgaatttgngctaattggccnaattcnccttatgggngncgnnttanaatcnatngcccgcgntttaanaangtcggactggnaaaaccntggggntacccaattaaatcncttggnagaaaatccccttttncnagtngnngaatnagcaaaaggccccgaccgatcggcctttccaaaaattggccaaccctaatgggcaaaggaaaattgaaggggtaaaaattttgtaaaaatcgcggtaaaattttggttaaacagctcattttttaacccaaaggcccaaattcggaaaaacccttttaattctaaagaatttacccggaaaaggttgagggttgtccatttggaacaagagcccctttta

SEQ ID NO: 448143 - DNA, 4102 bp, Homo sapiens
gaagagagcgggagtgggagtgggaaaggccaggattaagaggccgccgggacgccgcaaggaggcggggaatcggctcggcccgcgccctgccgctgcccggccggctgcaggtggagttcgcggaggtggccatttccacagccgccgccgacgcctcctctccgggagccgccttccccccggcccgagggcggtggcgtggggcgccgggtgcaggcgttctggggcgccggggccgcagctcgctggccatcccgcggctgcgccccgcgcctcgcccatggctgagggccggcggcgggaggacgaggaggaagagctacgcgagcgccgcgaacttggtggccagcgccgcgcccggggccgtgcgctctcgggccactcggccgcagatcgcaacgaacgaaataaaccagaacatcgttcttcaagccaaggacccttgtcatccattagagcggtaatcaagagatcttctcggacttctattcagagtgaacttcatcgagatagaaggcgcccagagatcaccattgtggcagctgagccactgaggccagcctcgtggtttccaggaaccccacccccaggactgggatttcctacatcatctgcagcaggctcttggaggcctaatgagctggttcctgctgagctcccaccatcttatgaacaagttataaaagaaatcaaccaagttcaagttaatactacaaataataataatgctgctgctactccaaggcacactattacttctgcaactcagactgacttttcagaagaaatagacaacgatctgcctcaaagtaatgcaacactacaggcacctctcaagcctcttcagcctttctcagcagtctcgtctggcaatcttccaacaaatgtggcacctttaatcgtctttgatatttctgaagaaccgaattgtccagaaaaccccagtgctacaagatgtccagtgccaaaaccaagatcaaaaagcaacctcagaccaatacccagagattctcacattaaagagcaaagtcaacagaaaatcagcccagcagccgtaggagaggagtcatccccaggccggccccagtctctgctggacaacgctagcacctcagacagtcaggcagtgatgaacattatgaacacagaacaaagccaaaatagtattgtttccagaattaaagtgtttgagggtcagacaaacatagaaacctcaggactgcccaagaaaccagaaattactccacgttcacttcctccaaagcctactgtttcctcagggaaaccttctgtagctcccaaaccagctgctaacagagcttctggagagtgggactctgggactgagaacagactcaaggtgacctccaaggaaggactcaccccataccctcccctgcaagaagcgggaagcatcccagtaaccaaacctgaattgccaaagaaaccaaaccctggccttatacgaagtgttaatcctgagattccgggaagagggcccctggctgagagctctgatagtgggaagaaagtgccaactcctgccccgcggcctttgctgctgaagaaatctgtttcctcagaaaaccccacctacccttcagctccactgaaacctgtcactgttcctccccgactcgcaggggcatcacaagccaaagcatacaagtcactgggagaagggcccccagccaaccccccagttccagttctgcagagcaagcccttggtggacatcgatctcatcagctttgatgatgatgttttgcccaccccatcggggaacctggctgaagaatctgttggttcagagatggttctaggtttacatgaggatccacaaagtccacctcctctccctgctgaaaaacctattggaaacactttcagtacagtatctggaaagctcagtaatgttgagagaactagaaacttggaatccaaccacccaggtcaaacaggaggttttgtgcgagtacccccaaggttgccaccgagacctgtgaatggaaaaaccattccaactcaacagcctccaaccaaggtgccccctgagagaccacctcccccaaagctttctgcaaccagaagatctaataagaaactgccttttaatcgatcctcttctgacatggatcttcagaaaaaacaaagtaacttggcaactggactctcaaaagccaagagtcaagtttttaaaaatcaagatccggtgctaccccctcgtcccaaaccaggacaccctctctacagtaaatacatgcgtggggatgtacttgtgatgctgaagcagacggaaaataattacttggagtgccaaaagggagaagacactggcagagttcacctgtctcaaatgaagattatcactccacttgatgaacatcttagaagcagaccaaacgatccaagccacgctcagaagcctgttgacagtggtgctcctcatgctgtcgttcttcatgatttcccagcagagcaagttgatgatttgaacctcacttctggagaaattgtttatcttctggagaagatagatacagattggtacagagggaactgtagaaaccagattggcatatttcctgccaactatgtcaaagtgattattgatatcccagaaggaggaaatgggaaaagagaatgtgtttcatctcattgtgttaaaggctcaagatgtgttgctcggtttgaatatattggagagcagaaggatgagttgagtttctcagagggagaaattattattcttaaagagtatgtgaatgaggaatgggccagaggagaagttcgaggcagaactgggattttccccctgaactttgtggagcctgttgaggattatcccacctctggtgcaaatgttttaagcacaaaggtaccactgaaaaccaaaaaagaagattctggctcaaactctcaggttaacagtcttccggcagaatggtgtgaagctcttcacagttttacagcagagaccagtgatgacttatcattcaagaggggagaccggatccagattctggaacgtctggattctgactggtgcaggggcagactgcaggacagggaggggatcttcccagcagtgtttgtgaggccctgcccagctgaggcaaaaagtatgttggccatagtaccgaaggggaggaaggccaaagccttatatgatttccgaggggagaatgaagatgaactttccttcaaggctggagatataataacagagctggaatctgtagatgatgactggatgagtggagaacttatgggaaaatctggaatatttcccaaaaactacatacagtttctacagatcagctagaggagaagcttgtctgtgttccttggcacaagaactcacttgaactatcaccttgactatcagatatgtttttgcactattttttttaactgaaaaagaaatatctaagctgtacatggtacactagaattttctgaaagcagaaaacgttcagattttgtagttaattttcattacaatagaaacatgcacatggaaacccatgagctaggattctaccgaggaaaacatctagtgggattagcaaggtgaagggaaagcatctggtggcatggcagcatggggaggctcacacacagaagttgcacgtggacatctgttttaatcagcacaagtgaattaaccatgcttcttcatttttttactttagttaaaaaagaggacatttaatattctacatgctgtaactatcaggacatggttagcaatctcaatttcatttttgatattcaaattaattcttacagcttgagcatatcagccttattaccagagcaaatccttccttcagatgggatagtttactgactagttggagcatttgtaagcacatggtgaaatcagcccctgcccaccaaaataatctttatgttaccaagtgattcccatttgtctaaggatttgaagggggtctaaattggatgtatcttagtctaaagaaccaaaaccatccctgaaatgccattcttgctgggtatcgccatttccatggccctcctccctctccagtgtccccccacatcaataaaagcttccccctgatatgccattctt

SEQ ID NO: 448144 - DNA, 3507 bp, Homo sapiens
gaagagagcgggagtgggagtgggaaaggccaggattaagaggccgccgggacgccgcaaggaggcggggaatcggctcggcccgcgccctgccgctgcccggccggctgcaggtggagttcgcggaggtggccatttccacagccgccgccgacgcctcctctccgggagccgccttccccccggcccgagggcggtggcgtggggcgccgggtgcaggcgttctggggcgccggggccgcagctcgctggccatcccgcggctgcgccccgcgcctcgcccatggctgagggccggcggcgggaggacgaggaggaagagctacgcgagcgccgcgaacttggtggccagcgccgcgcccggggccgtgcgctctcgggccactcggccgcagatcgcaacgaacgaaataaaccagaacatcgttcttcaagccaaggacccttgtcatccattagagcggtaatcaagagatcttctcggacttctattcagagtgaacttcatcgagatagaaggcgcccagagatcaccattgtggcagctgagccactgaggccagcctcgtggtttccaggaaccccacccccaggactgggatttcctacatcatctgcagcaggctcttggaggcctaatgagctggttcctgctgagctcccaccatcttatgaacaagttataaaagaaatcaaccaagttcaagttaatactacaaataataataatgctgctgctactccaaggcacactattacttctgcaactcagactgacttttcagaagaaatagacaacgatctgcctcaaagtaatgcaacactacaggcacctctcaagcctcttcagcctttctcagcagtctcgtctggcaatcttccaacaaatgtggcacctttaatcgtctttgatatttctgaagaaccgaattgtccagaaaaccccagtgctacaagatgtccagtgccaaaaccaagatcaaaaagcaacctcagaccaatacccagagattctcacattaaagagcaaagtcaacagaaaatcagcccagcagccgtaggagaggagtcatccccaggccggccccagtctctgctggacaacgctagcacctcagacagtcaggcagtgatgaacattatgaacacagaacaaagccaaaatagtattgtttccagaattaaagtgtttgagggtcagacaaacatagaaacctcaggactgcccaagaaaccagaaattactccacgttcacttcctccaaagcctactgtttcctcagggaaaccttctgtagctcccaaaccagctgctaacagagcttctggagagtgggactctgggactgagaacagactcaaggtgacctccaaggaaggactcaccccataccctcccctgcaagaagcgggaagcatcccagtaaccaaacctgaattgccaaagaaaccaaaccctggccttatacgaagtgttaatcctgagattccgggaagagggcccctggctgagagctctgatagtgggaagaaagtgccaactcctgccccgcggcctttgctgctgaagaaatctgtttcctcagaaaaccccacctacccttcagctccactgaaacctgtcactgttcctccccgactcgcaggggcatcacaagccaaagcatacaagtcactgggagaagggcccccagccaaccccccagttccagttctgcagagcaagcccttggtggacatcgatctcatcagctttgatgatgatgttttgcccaccccatcggggaacctggctgaagaatctgttggttcagagatggttctaggtttacatgaggatccacaaagtccacctcctctccctgctgaaaaacctattggaaacactttcagtacagtatctggaaagctcagtaatgttgagagaactagaaacttggaatccaaccacccaggtcaaacaggaggttttgtgcgagtacccccaaggttgccaccgagacctgtgaatggaaaaaccattccaactcaacagcctccaaccaaggtgccccctgagagaccacctcccccaaagctttctgcaaccagaagatctaataagaaactgccttttaatcgatcctcttctgacatggatcttcagaaaaaacaaagtaacttggcaactggactctcaaaagccaagagtcaagtttttaaaaatcaagatccggtgctaccccctcgtcccaaaccaggacaccctctctacagtaaatacatgcgtggggatgtacttgtgatgctgaagcagacggaaaataattacttggagtgccaaaagggagaagacactggcagagttcacctgtctcaaatgaagattatcactccacttgatgaacatcttagaagcagaccaaacgatccaagccacgctcagaagcctgttgacagtggtgctcctcatgctgtcgttcttcatgatttcccagcagagcaagttgatgatttgaacctcacttctggagaaattgtttatcttctggagaagatagatacagattggtacagagggaactgtagaaaccagattggcatatttcctgccaactatgtcaaagtgattattgatatcccagaaggaggaaatgggaaaagagaatgtgtttcatctcattgtgttaaaggctcaagatgtgttgctcggtttgaatatattggagagcagaaggatgagttgagtttctcagagggagaaattattattcttaaagagtatgtgaatgaggaatgggccagaggagaagttcgaggcagaactgggattttccccctgaactttgtggagcctgttgaggattatcccacctctggtgcaaatgttttaagcacaaaggtaccactgaaaaccaaaaaagaagattctggctcaaactctcaggttaacagtcttccggcagaatggtgtgaagctcttcacagttttacagcagagaccagtgatgacttatcattcaagaggggagaccggatccagattctggaacgtctggattctgactggtgcaggggcagactgcaggacagggaggggatcttcccagcagtgtttgtgaggccctgcccagctgaggcaaaaagtatgttggccatagtaccgaaggggaggaaggccaaagccttatatgatttccgaggggagaatgaagatgaactttccttcaagatgagaaaaaggccgagcaacagtggctcacacctctaatcccaacacttttgggaagtcaaggcaggaggatcgcttgaggccaggagtttaaaaccagcctggtcaacatggcaagaccccatctcaacaaagaaaaagaggaaaacaaggcaatacctgaatcaggtatgtgcagcctttgtcggggtaaggggggatgccttgactgaaatatgtcaccataaagttgctaacttcctattttgtgatggggttttactttattctgaataataaaatgttatttcatcttt

SEQ ID NO: 448145 - DNA, 3123 bp, Homo sapiens
gaagagagcgggagtgggagtgggaaaggccaggattaagaggccgccgggacgccgcaaggaggcggggaatcggctcggcccgcgccctgccgctgcccggccggctgcaggtggagttcgcggaggtggccatttccacagccgccgccgacgcctcctctccgggagccgccttccccccggcccgagggcggtggcgtggggcgccgggtgcaggcgttctggggcgccggggccgcagctcgctggccatcccgcggctgcgccccgcgcctcgcccatggctgagggccggcggcgggaggacgaggaggaagagctacgcgagcgccgcgaacttggtggccagcgccgcgcccggggccgtgcgctctcgggccactcggccgcagatcgcaacgaacgaaataaaccagaacatcgttcttcaagccaaggacccttgtcatccattagagcggtaatcaagagatcttctcggacttctattcagagtgaacttcatcgagatagaaggcgcccagagatcaccattgtggcagctgagccactgaggccagcctcgtggtttccaggaaccccacccccaggactgggatttcctacatcatctgcagcaggctcttggaggcctaatgagctggttcctgctgagctcccaccatcttatgaacaagttataaaagaaatcaaccaagttcaagttaatactacaaataataataatgctgctgctactccaaggcacactattacttctgcaactcagactgacttttcagaagaaatagacaacgatctgcctcaaagtaatgcaacactacaggcacctctcaagcctcttcagcctttctcagcagtctcgtctggcaatcttccaacaaatgtggcacctttaatcgtctttgatatttctgaagaaccgaattgtccagaaaaccccagtgctacaagatgtccagtgccaaaaccaagatcaaaaagcaacctcagaccaatacccagagattctcacattaaagagcaaagtcaacagaaaatcagcccagcagccgtaggagaggagtcatccccaggccggccccagtctctgctggacaacgctagcacctcagacagtcaggcagtgatgaacattatgaacacagaacaaagccaaaatagtattgtttccagaattaaagtgtttgagggtcagacaaacatagaaacctcaggactgcccaagaaaccagaaattactccacgttcacttcctccaaagcctactgtttcctcagggaaaccttctgtagctcccaaaccagctgctaacagagcttctggagagtgggactctgggactgagaacagactcaaggtgacctccaaggaaggactcaccccataccctcccctgcaagaagcgggaagcatcccagtaaccaaacctgaattgccaaagaaaccaaaccctggccttatacgaagtgttaatcctgagattccgggaagagggcccctggctgagagctctgatagtgggaagaaagtgccaactcctgccccgcggcctttgctgctgaagaaatctgtttcctcagaaaaccccacctacccttcagctccactgaaacctgtcactgttcctccccgactcgcaggggcatcacaagccaaagcatacaagtcactgggagaagggcccccagccaaccccccagttccagttctgcagagcaagcccttggtggacatcgatctcatcagctttgatgatgatgttttgcccaccccatcggggaacctggctgaagaatctgttggttcagagatggttctagatccctttcagctccctgcaaaaacagaaccaataaaagaacgagcagttcaaccagcacccaccaggaagcccactgtaattcgaattccagccaaaccaggaaaatgtttacatgaggatccacaaagtccacctcctctccctgctgaaaaacctattggaaacactttcagtacagtatctggaaagctcagtaatgttgagagaactagaaacttggaatccaaccacccaggtcaaacaggaggttttgtgcgagtacccccaaggttgccaccgagacctgtgaatggaaaaaccattccaactcaacagcctccaaccaaggtgccccctgagagaccacctcccccaaagctttctgcaaccagaagatctaataagaaactgccttttaatcgatcctcttctgacatggatcttcagaaaaaacaaagtaacttggcaactggactctcaaaagccaagagtcaagtttttaaaaatcaagatccggtgctaccccctcgtcccaaaccaggacaccctctctacagtaaatacatgctgtctgtgcctcatggaattgccaatgaagatattgtctctcaaaaccccggagaactctcttgtaagcgtggggatgtacttgtgatgctgaagcagacggaaaataattacttggagtgccaaaagggagaagacactggcagagttcacctgtctcaaatgaagattatcactccacttgatgaacatcttagaagcagaccaaaccccttttctccccctaaggatccaagccacgctcagaagcctgttgacagtggtgctcctcatgctgtcgttcttcatgatttcccagcaggtaaggatgtaaataatgcagtgggagaaccacaggatccaggagtaagtctttttccctgccgggggttagcctctcaaggacatccttcttcatttttctgtgcctatagagtccgagactggagaggtcatcttatccaggactccacttcaagaagggttgattgtaccagccattccagaaagcttagttgtatacccttgcctttgaagctccctgagaaagagaaagagagagagagagactttcccttacaaatgaacattgcaaattgcctaccagtcacaaactttttaactctttcaaaatagtgggtactaggccgggcgcagtggctcacgcctgtaatcccagcactttgggaggccgaggcaggcggatcacgaggtcaggagattgagaccatcctggctaacatggtgaaaccccgtctctactaaaaata

SEQ ID NO: 448146 - DNA, 790 bp, Homo sapiens
ccacgcgtcgcggactgcgtgggtcgacccacgcgtccgggtggcggaactgctgctccggcggctggaggcgtctgatggcggcctggacagcgccgagttggcggctgagctgggcatggagcaccaggcggtggtgggcgccgtgaagagccttcaggcgctgggcgaggtcatcgaggctgaacttcggtccaccaagcactgggagcttactgcggagggcgaggagattgcccgggagggcagccatgaggcccgtgtgtttcgaagcattcccccagagggcctggcccagagcgagcttatgcgactgcccagtggcaaagtgggcttcagcaaggccatgtccaacaagtggattcgggtggacaagagtgcggctgacgggccccgggtgttccgagtggtggacagcatggaggatgaggtgcagcggcggctccagctggtccgggggggacaggctgagaagctgggggagaaggagaggagcgagctgaggaagaggaagctgttggctgaagtgactctgaagacctactgggtgagcaaaggcagtgcctttagtaccagcatctccaagcaagagacagagctgagcccagagatgatctccagtggctcttggcgggaccggcccttcaagccctacaacttcttggcccacggtgtcctccccgacagcggccaccttcacccgctgctcaaggtccgctcccagttccgacagatcttcctggagatggggtgagcacagggctgggggcggtgcctggtgcttctgctg

SEQ ID NO: 448147 - DNA, 1162 bp, Homo sapiens
gcgtggtagcaggtgcctgtaatcccagctacttaggaggctgaggcaggagaatcgtttgaacccaggaggcagaggttgcagtgagccaagatcatgccactgcactctattctagtctagacaacagagtgtgactctgtctcccgtctctactaaaactacaaaaattagccaggcactgttgcgtgcgtctgtagtcctagtcctaggtactcaggaggctgaggtatgagaatcacttgaacctgggaggcggaggttgcagtgagctgagattacgccactgcactccaccctaggttacagagtgagactctgtttcaaaaaaacaaatgcactcagcaaaagaagacagaagtgtgtaccagggcagtaagtggtatagggagggctaaggcaactacgtggtcagtgaaggcatcatggaggaagaagtgccacctaagcaaaatctagaggtagataaagaggtaaaccatgagagtatctggggaagggtgtcccaggtagtggtcacagtcagttcaaaggcccagaggtgggaatgtgctttttgtattaggagaagagtgaggaggctggtgtggctgaaggcggagggtgagaggtgatagagcagttggcgcagggccctgtgggtcatggggagaacttgaacttttcctctgaagaagatgggagccatggaaatctgagcagaagggtgcacgtgctgacctcatgataaactctgttccctcccccacaagcccaacgatgatcaaatatggcatcaacaatatccgggagctggtgggccacaaggtgaacctgcagatggtgtatgacagtcccctgtgccgcctggatgccgagccgaggccccctcccacacaggaggctgcgtgacatgggccactctaggacaggtcatcctccccgagtccctgctgctgcgctcctttgcatccctggccagtgaccttgtatttatgaggcctctgtgaggccagcccccaccttcctctttcccacctgtcccaggaccagaatcccagggacagaggactgggtagcaggttccttctgttgtcctgtgtggtgtgtctactgtgagggtgggccctgaggagacctgtgggccacctattgtctaataaagtgggcagttgcccccaaa

SEQ ID NO: 448148 - DNA, 454 bp, Homo sapiens
ggagctcgctacctgtaacattcgtgtccctctccctgtgagcgcccaacgatgatcaaatatggcatcaacaatatccgggagctggtgggccacaaggtgaacctgcagatggtgtatgacagtcccctgtgccgcctggatgccgagccgaggccccctcccacacaggaggctgcgtgacatgggccactctaggacaggtcatcctccccgagtccctgctgctgcgctcctttgcatccctggccagtgaccttgtatttatgaggcctctgtgaggccagcccccaccttcctctttcccacctgtcccaggaccagaatcccagggacagaggactgggtagcaggttccttctgttgtcctgtgtggtgtgtctactgtgagggtgggccctgaggagacctgtgggccacctattgtctaataaagtgggcagttgcccccaaa

SEQ ID NO: 448149 - DNA, 1813 bp, Homo sapiens
  misc_feature (1405)..(1405): n is a, c, g, or t
  misc_feature (1408)..(1408): n is a, c, g, or t
  misc_feature (1443)..(1443): n is a, c, g, or t
  misc_feature (1447)..(1447): n is a, c, g, or t
  misc_feature (1453)..(1453): n is a, c, g, or t
  misc_feature (1478)..(1478): n is a, c, g, or t
  misc_feature (1481)..(1481): n is a, c, g, or t
  misc_feature (1483)..(1483): n is a, c, g, or t
actgggaaggagtcatggcggatggtcaggtggcggaactgctgctccggcggctggaggcgtctgatggcggcctggacagcgccgagttggcggctgagctgggcatggagcaccaggcggtggtgggcgccgtgaagagccttcaggcgctgggcgaggtcatcgaggctgaacttcggtccaccaagcactgggagcttactgcggagggcgaggagattgcccgggagggcagccatgaggcccgtgtgtttcgaagcattcccccagagggcctggcccagagcgagcttatgcgactgcccagtggcaaagtgggcttcagcaaggccatgtccaacaagtggattcgggtggacaagagtgcggctgacgggccccgggtgttccgagtggtggacagcatggaggatgaggtgcagcggcggctccagctggtccgggggggacaggctgagaagctgggggagaaggagaggagcgagctgaggaagaggaagctgttggctgaagtgactctgaagacctactgggtgagcaaaggcagtgcctttagtaccagcatctccaagcaagagacagagctgagcccagagatgatctccagtggctcttggcgggaccggcccttcaagccctacaacttcttggcccacggtgtcctccccgacagcggccaccttcacccgctgctcaaggtccgctcccagttccgacagatcttcctggagatggggttcaccgagatgccgactgataacttcattgagagctccttctggaactttgacgccctcttccagccccagcagcacccagcccgtgaccagcacgacaccttcttccttcgagatccagcggaggccctgcagctcccaatggactatgtccagcgggtcaagcggacccactctcagggcggctacggctcacaggggtacaagtataactggaagctggacgaggcccggaaaaacctactgcgaacccacaccacatcagccagcgcccgtgcgctctaccgccttgcccagaagaagcccttcactccggtcaagtacttctccatcgaccgcgtattccggaatgagaccctggacgccacgcacctggctgagttccaccagatcgagggcgtggtggcggatcatggtctcaccttgggccacctcatgggcgttctgcgggagttcttcaccaagctgggtatcacgcaactccgcttcaagccagcctacaacccatacacagagcccagcatggaggtgttcagctaccaccaaggcctgaagaagtgggtggaggtcggaaactcgggggtcttccgtccagagatgctgctgcccatggggcttcccgagaacgtgtcggtcattgcctggggcctctccctggagcgttnatnataatattttcattcaatcaattattctctgtgtntttntttttntataattttaaccttcatatttttnttntntttttttttttcttttttttgccgagccgaggccccctcccacacaggaggctgcgtgacatgggccactctaggacaggtcatcctccccgagtccctgctgctgcgctcctttgcatccctggccagtgaccttgtatttatgaggcctctgtgaggccagcccccaccttcctctttcccacctgtcccaggaccagaatcccagggacagaggactgggtagcaggttccttctgttgtcctgtgtggtgtgtctactgtgagggtgggccctgaggagacctgtgggccacctattgtctaataaagtgggcagttgcccccaaa

SEQ ID NO: 448150 - DNA, 1116 bp, Homo sapiens
actgggaaggagtcatggcggatggtcaggtggcggaactgctgctccggcggctggaggcgtctgatggcggcctggacagcgccgagttggcggctgagctgggcatggagcaccaggcggtggtgggcgccgtgaagagccttcaggcgctgggcgaggtcatcgaggctgaacttcggtccaccaagcactgggagcttactgcggagggcgaggagattgcccgggagggcagccatgaggcccgtgtgtttcgaagcattcccccagagggcctggcccagagcgagcttatgcgactgcccagtggcaaagtgggcttcagcaaggccatgtccaacaagtggattcgggtggacaagagtgcggctgacgggccccgggtgttccgagtggtggacagcatggaggatgaggtgcagcggcggctccagctggtccgggggggacaggctgagaagctgggggagaaggagaggagcgagctgaggaagaggaagctgttggctgaagtgactctgaagacctactgggtgagcaaaggcagtgcctttagtaccagcatctccaagcaagagacagagctgagcccagagatgatctccagtggctcttggcgggaccggcccttcaagccctacaacttcttggcccacggtgtcctccccgacagcggccaccttcacccgctgctcaaggtccgctcccagttccgacagatcttcctggagatggggttcaccgagatgccgactgataacttcattgagagctccttctggaactttgacgccctcttccagccccagcagcacccagcccgtgaccagcacgacaccttcttccttcgagatccagcggaggccctgcagctcccaatggactatgtccagcgggtcaagcggacccactctcagggcggctacggctcacaggggtacaagtataactggaagctggacgaggcccggaaaaacctactgcgaacccacaccacatcagccagcgcccgtgcgctctaccgccttgcccagaagacaacatattttgtcaccaagaccctacttctaacctcactgttcttatgaattcgacgataccccccgattccgc

SEQ ID NO: 448151 - DNA, 1287 bp, Homo sapiens
actgggaaggagtcatggcggatggtcaggtggcggaactgctgctccggcggctggaggcgtctgatggcggcctggacagcgccgagttggcggctgagctgggcatggagcaccaggcggtggtgggcgccgtgaagagccttcaggcgctgggcgaggtcatcgaggctgaacttcggtccaccaagcactgggagcttactgcggagggcgaggagattgcccgggagggcagccatgaggcccgtgtgtttcgaagcattcccccagagggcctggcccagagcgagcttatgcgactgcccagtggcaaagtgggcttcagcaaggccatgtccaacaagtggattcgggtggacaagagtgcggctgacgggccccgggtgttccgagtggtggacagcatggaggatgaggtgcagcggcggctccagctggtccgggggggacaggctgagaagctgggggagaaggagaggagcgagctgaggaagaggaagctgttggctgaagtgactctgaagacctactgggtgagcaaaggcagtgcctttagtaccagcatctccaagcaagagacagagctgagcccagagatgatctccagtggctcttggcgggaccggcccttcaagccctacaacttcttggcccacggtgtcctccccgacagcggccaccttcacccgctgctcaaggtccgctcccagttccgacagatcttcctggagatggggttcaccgagatgccgactgataacttcattgagagctccttctggaactttgacgccctcttccagccccagcagcacccagcccgtgaccagcacgacaccttcttccttcgagatccagcggaggccctgcagctcccaacgatgatcaaatatggcatcaacaatatccgggagctggtgggccacaaggtgaacctgcagatggtgtatgacagtcccctgtgccgcctggatgccgagccgaggccccctcccacacaggaggctgcgtgacatgggccactctaggacaggtcatcctccccgagtccctgctgctgcgctcctttgcatccctggccagtgaccttgtatttatgaggcctctgtgaggccagcccccaccttcctctttcccacctgtcccaggaccagaatcccagggacagaggactgggtagcaggttccttctgttgtcctgtgtggtgtgtctactgtgagggtgggccctgaggagacctgtgggccacctattgtctaataaagtgggcagttgcccccaaa

SEQ ID NO: 448152 - DNA, 1623 bp, Homo sapiens
actgggaaggagtcatggcggatggtcaggtggcggaactgctgctccggcggctggaggcgtctgatggcggcctggacagcgccgagttggcggctgagctgggcatggagcaccaggcggtggtgggcgccgtgaagagccttcaggcgctgggcgaggtcatcgaggctgaacttcggtccaccaagcactgggagcttactgcggagggcgaggagattgcccgggagggcagccatgaggcccgtgtgtttcgaagcattcccccagagggcctggcccagagcgagcttatgctgaggaagaggaagctgttggctgaagtgactctgaagacctactgggtgagcaaaggcagtgcctttagtaccagcatctccaagcaagagacagagctgagcccagagatgatctccagtggctcttggcgggaccggcccttcaagccctacaacttcttggcccacggtgtcctccccgacagcggccaccttcacccgctgctcaaggtccgctcccagttccgacagatcttcctggagatggggttcaccgagatgccgactgataacttcattgagagctccttctggaactttgacgccctcttccagccccagcagcacccagcccgtgaccagcacgacaccttcttccttcgagatccagcggaggccctgcagctcccaatggactatgtccagcgggtcaagcggacccactctcagggcggctacggctcacaggggtacaagtataactggaagctggacgaggcccggaaaaacctactgcgaacccacaccacatcagccagcgcccgtgcgctctaccgccttgcccagaagaagcccttcactccggtcaagtacttctccatcgaccgcgtattccggaatgagaccctggacgccacgcacctggctgagttccaccagatcgagggcgtggtggcggatcatggtctcaccttgggccacctcatgggcgttctgcgggagttcttcaccaagctgggtatcacgcaactccgcttcaagccagcctacaacccatacacagagcccagcatggaggtgttcagctaccaccaaggcctgaagaagtgggtggaggtcggaaactcgggggtcttccgtccagagatgctgctgcccatggggcttcccgagaacgtgtcggtcattgcctggggcctctccctggagcgcccaacgatgatcaaatatggcatcaacaatatccgggagctggtgggccacaaggtgaacctgcagatggtgtatgacagtcccctgtgccgcctggatgccgagccgaggccccctcccacacaggaggctgcgtgacatgggccactctaggacaggtcatcctccccgagtccctgctgctgcgctcctttgcatccctggccagtgaccttgtatttatgaggcctctgtgaggccagcccccaccttcctctttcccacctgtcccaggaccagaatcccagggacagaggactgggtagcaggttccttctgttgtcctgtgtggtgtgtctactgtgagggtgggccctgaggagacctgtgggccacctattgtctaataaagtgggcagttgcccccaaa

SEQ ID NO: 448153 - DNA, 1464 bp, Homo sapiens
ccacccatctcccccccccccccccccccccctgcgctagctcgggccgtcggtggtaatcggccgtggcggaactgctgctccggcggctggaggcgtctgatggcggcctggacagcgccgagttggcggctgagctgggcatggagcaccaggcggtggtgggcgccgtgaagagccttcaggcgctgggcgaggtcatcgaggctgaacttcggtccaccaagcaagagacagagctgagcccagagatgatctccagtggctcttggcgggaccggcccttcaagccctacaacttcttggcccacggtgtcctccccgacagcggccaccttcacccgctgctcaaggtccgctcccagttccgacagatcttcctggagatggggttcaccgagatgccgactgataacttcattgagagctccttctggaactttgacgccctcttccagccccagcagcacccagcccgtgaccagcacgacaccttcttccttcgagatccagcggaggccctgcagctcccaatggactatgtccagcgggtcaagcggacccactctcagggcggctacggctcacaggggtacaagtataactggaagctggacgaggcccggaaaaacctactgcgaacccacaccacatcagccagcgcccgtgcgctctaccgccttgcccagaagaagcccttcactccggtcaagtacttctccatcgaccgcgtattccggaatgagaccctggacgccacgcacctggctgagttccaccagatcgagggcgtggtggcggatcatggtctcaccttgggccacctcatgggcgttctgcgggagttcttcaccaagctgggtatcacgcaactccgcttcaagccagcctacaacccatacacagagcccagcatggaggtgttcagctaccaccaaggcctgaagaagtgggtggaggtcggaaactcgggggtcttccgtccagagatgctgctgcccatggggcttcccgagaacgtgtcggtcattgcctggggcctctccctggagcgcccaacgatgatcaaatatggcatcaacaatatccgggagctggtgggccacaaggtgaacctgcagatggtgtatgacagtcccctgtgccgcctggatgccgagccgaggccccctcccacacaggaggctgcgtgacatgggccactctaggacaggtcatcctccccgagtccctgctgctgcgctcctttgcatccctggccagtgaccttgtatttatgaggcctctgtgaggccagcccccaccttcctctttcccacctgtcccaggaccagaatcccagggacagaggactgggtagcaggttccttctgttgtcctgtgtggtgtgtctactgtgagggtgggccctgaggagacctgtgggccacctattgtctaataaagtgggcagttgcccccaaa

SEQ ID NO: 448154 - DNA, 911 bp, Homo sapiens
actgggaaggagtcatggcggatggtcaggtggcggaactgctgctccggcggctggaggcgtctgatggcggcctggacagcgccgagttggcggctgagctgggcatggagcaccaggcggtggtgggcgccgtgaagagccttcaggcgctgggcgaggtcatcgaggctgaacttcggtccaccaagcactgggagcttactgcggagggcgaggagattgcccgggagggcagccatgaggcccgtgtgtttcgaagcattcccccagagggcctggcccagagcgagcttatgcgactgcccagtggcaaagtgggcttcagcaaggccatgtccaacaagtggattcgggtggacaagagtgcggctgacgggccccgggtgttccgagtggtggacagcatggaggatgaggtgcagcggcggctccagctggtccgggggggacaggctgagaagctgggggagaaggagaggagcgagctgaggaagaggaagctgttggctgaagtgactctgaagacctactgggtgagcaaaggcagtgcctttagtaccagcatctccaagcaagagacagagctgagcccagagatgatctccagtggctcttggcgggaccggcccttcaagccctacaacttcttggcccacggtgtcctccccgacagcggccaccttcacccgctttgcatccctggccagtgaccttgtatttatgaggcctctgtgaggccagcccccaccttcctctttcccacctgtcccaggaccagaatcccagggacagaggactgggtagcaggttccttctgttgtcctgtgtggtgtgtctactgtgagggtgggccctgaggagacctgtgggccacctattgtctaataaagtgggcagttgcccccaaa

SEQ ID NO: 448155 - DNA, 1118 bp, Homo sapiens
  misc_feature (921)..(921): n is a, c, g, or t
actgggaaggagtcatggcggatggtcaggtggcggaactgctgctccggcggctggaggcgtctgatggcggcctggacagcgccgagttggcggctgagctgggcatggagcaccaggcggtggtgggcgccgtgaagagccttcaggcgctgggcgaggtcatcgaggctgaacttcggtccaccaagcactgggagcttactgcggagggcgaggagattgcccgggagggcagccatgaggcccgtgtgtttcgaagcattcccccagagggcctggcccagagcgagcttatgcgactgcccagtggcaaagtgggcttcagcaaggccatgtccaacaagtggattcgggtggacaagagtgcggctgacgggccccgggtgttccgagtggtggacagcatggaggatgaggtgcagcggcggctccagctggtccgggggggacaggctgagaagctgggggagaaggagaggagcgagctgaggaagaggaagctgttggctgaagtgactctgaagacctactgggtgagcaaaggcagtgcctttagtaccagcatctccaagcaagagacagagctgagcccagagatgatctccagtggctcttggcgggaccggcccttcaagccctacaacttcttggcccacggtgtcctccccgacagcggccaccttcacccgctttgcatccctggccagtgaccttgtatttatgaggcctctgtgaggccagcccccaccttcctctttcccacctgtcccaggaccagaatcccagggacagaggactgggtagcaggttccttctgttgtcctgtgtggtgtgtctactgtgagggtgggccctgaggagacctgtgggccacctattgtctaataaagtgggcagttgcccccaaaaaaaaaaaanaaaaataaaacaaacccttcgagatttctttctcacctgttgtgttctgtcatcttttctggttctttttttcttcttattttcatcaatatcacctatcttatctggctctctttcatgttctttatatctcgcatctagcgtcacatagcttcaccttccatcacctcctctaccgcccccccatcgactccccc

SEQ ID NO: 448156 - DNA, 711 bp, Homo sapiens
actgggaaggagtcatggcggatggtcaggtggcggaactgctgctccggcggctggaggcgtctgatggcggcctggacagcgccgagttggcggctgagctgggcatggagcaccaggcggtggtgggcgccgtgaagagccttcaggcgctgggcgaggtcatcgaggctgaacttcggtccaccaagcactgggagcttactgcggagggcgaggagattgcccgggagggcagccatgaggcccgtgtgtttcgaagcattcccccagagggcctggcccagagcgagcttatgcgactgcccagtggcaaagtgggcttcagcaaggccatgtccaacaagtggattcgggtggacaagagtgcggctgacgggccccgggtgttccgagtggtggacagcatggaggatgaggtgcagcggcggctccagctggtccgggggggacaggctgagaagctgggggagaaggagaggagcgagctgaggaagaggaagctgttggctgaagtgactctgaagacctactgggtgagcaaaggcagtgcctttagtaccagcatctccaagcaagagacagagctgagcccagagatgatctccagtggctcttggcgggaccggcccttcaagccctacaacttcttggccctgaggagacctgtgggccacctattgtctaataaagtgggcagttgcccccaaa

SEQ ID NO: 448157 - DNA, 947 bp, Homo sapiens
ccacccatctcccccccccccccccccccccctgcgctagctcgggccgtcggtggtaatcggccgtggcggaactgctgctccggcggctggaggcgtctgatggcggcctggacagcgccgagttggcggctgagctgggcatggagcaccaggcggtggtgggcgccgtgaagagccttcaggcgctgggcgaggtcatcgaggctgaacttcggtccaccaagcactgggagcttactgcggagggcgaggagattgcccgggagggcagccatgaggcccgtgtgtttcgaagcattcccccagagggcctggcccagagcgagcttatgcgactgcccagtggcaaagtgggcttcagcaaggccatgtccaacaagtggattcgggtggacaagagtgcggctgacgggccccgggtgttccgagtggtggacagcatggaggatgaggtgcagcggcggctccagctggtccgggggggacaggctgagaagctgggggagaaggagaggagcgagctgaggaagaggaagctgttggctgaagtgactctgaagacctactgggtgagcaaaggcagtgcctttagtaccagcatctccaagcaagagacagagctgagcccagagatgatctccagtggctcttggcgggaccggcccttcaagccctacaacttcttggcccacggtgtcctccccgacagcggccaccttcacccgctttgcatccctggccagtgaccttgtatttatgaggcctctgtgaggccagcccccaccttcctctttcccacctgtcccaggaccagaatcccagggacagaggactgggtagcaggttccttctgttgtcctgtgtggtgtgtctactgtgagggtgggccctgaggagacctgtgggccacctattgtctaataaagtgggcagttgcccccaaa

SEQ ID NO: 448158 - DNA, 133 bp, Homo sapiens
aaaaaaaaaggggtgggaaatgctcgttgactgacctgatgttgctctgtcctgcccagatccagcggaggccctgcagctcccaatggactatgtccagcgggtcaagcggacccactctcagggcggctac

SEQ ID NO: 448159 - DNA, 1812 bp, Homo sapiens
actgggaaggagtcatggcggatggtcaggtggcggaactgctgctccggcggctggaggcgtctgatggcggcctggacagcgccgagttggcggctgagctgggcatggagcaccaggcggtggtgggcgccgtgaagagccttcaggcgctgggcgaggtcatcgaggctgaacttcggtccaccaagcactgggagcttactgcggagggcgaggagattgcccgggagggcagccatgaggcccgtgtgtttcgaagcattcccccagagggcctggcccagagcgagcttatgcgactgcccagtggcaaagtgggcttcagcaaggccatgtccaacaagtggattcgggtggacaagagtgcggctgacgggccccgggtgttccgagtggtggacagcatggaggatgaggtgcagcggcggctccagctggtccgggggggacaggctgagaagctgggggagaaggagaggagcgagctgaggaagaggaagctgttggctgaagtgactctgaagacctactgggtgagcaaaggcagtgcctttagtaccagcatctccaagcaagagacagagctgagcccagagatgatctccagtggctcttggcgggaccggcccttcaagccctacaacttcttggcccacggtgtcctccccgacagcggccaccttcacccgctgctcaaggtccgctcccagttccgacagatcttcctggagatggggttcaccgagatgccgactgataacttcattgagagctccttctggaactttgacgccctcttccagccccagcagcacccagcccgtgaccagcacgacaccttcttccttcgagatccagcggaggccctgcagctcccaatggactatgtccagcgggtcaagcggacccactctcagggcggctacggctcacaggggtacaagtataactggaagctggacgaggcccggaaaaacctactgcgaacccacaccacatcagccagcgcccgtgcgctctaccgccttgcccagaagaagcccttcactccggtcaagtacttctccatcgaccgcgtattccggaatgagaccctggacgccacgcacctggctgagttccaccagatcgagggcgtggtggcggatcatggtctcaccttgggccacctcatgggcgttctgcgggagttcttcaccaagctgggtatcacgcaactccgcttcaagccagcctacaacccatacacagagcccagcatggaggtgttcagctaccaccaaggcctgaagaagtgggtggaggtcggaaactcgggggtcttccgtccagagatgctgctgcccatggggcttcccgagaacgtgtcggtcattgcctggggcctctccctggagcgcccaacgatgatcaaatatggcatcaacaatatccgggagctggtgggccacaaggtgaacctgcagatggtgtatgacagtcccctgtgccgcctggatgccgagccgaggccccctcccacacaggaggctgcgtgacatgggccactctaggacaggtcatcctccccgagtccctgctgctgcgctcctttgcatccctggccagtgaccttgtatttatgaggcctctgtgaggccagcccccaccttcctctttcccacctgtcccaggaccagaatcccagggacagaggactgggtagcaggttccttctgttgtcctgtgtggtgtgtctactgtgagggtgggccctgaggagacctgtgggccacctattgtctaataaagtgggcagttgcccccaaa

SEQ ID NO: 448160 - DNA, 1908 bp, Homo sapiens
actgggaaggagtcatggcggatggtcaggtggcggaactgctgctccggcggctggaggcgtctgatggcggcctggacagcgccgagttggcggctgagctgggcatggagcaccaggcggtggtgggcgccgtgaagagccttcaggcgctgggcgaggtcatcgaggctgaacttcggtccaccaagcactgggagcttactgcggagggcgaggagattgcccgggagggcagccatgaggcccgtgtgtttcgaagcattcccccagagggcctggcccagagcgagcttatgcgactgcccagtggcaaagtgggcttcagcaaggccatgtccaacaagtggattcgggtggacaagagtgcggctgacgggccccgggtgttccgagtggtggacagcatggaggatgaggtgcagcggcggctccagctggtccgggggggacaggctgagaagctgggggagaaggagaggagcgagctgaggaagaggaagctgttggctgaagtgactctgaagacctactgggtgagcaaaggcagtgcctttagtaccagcatctccaagcaagagacagagctgagcccagagatgatctccagtggctcttggcgggaccggcccttcaagccctacaacttcttggcccacggtgtcctccccgacagcggccaccttcacccgctgctcaaggtccgctcccagttccgacagatcttcctggagatggggttcaccgagatgccgactgataacttcattgagagctccttctggaactttgacgccctcttccagccccagcagcacccagcccgtgaccagcacgacaccttcttccttcgagatccagcggaggccctgcagctcccaatggactatgtccagcgggtcaagcggacccactctcagggcggctacggctcacaggggtacaagtataactggaagctggacgaggcccggaaaaacctactgcgaacccacaccacatcagccagcgcccgtgcgctctaccgccttgcccagaaggtgcggttggcccaggcgggggccccagtggggagagggtgctgtcaaagggaccttctgacccatacctgggcctggctcggttgtcacccctagaagcccttcactccggtcaagtacttctccatcgaccgcgtattccggaatgagaccctggacgccacgcacctggctgagttccaccagatcgagggcgtggtggcggatcatggtctcaccttgggccacctcatgggcgttctgcgggagttcttcaccaagctgggtatcacgcaactccgcttcaagccagcctacaacccatacacagagcccagcatggaggtgttcagctaccaccaaggcctgaagaagtgggtggaggtcggaaactcgggggtcttccgtccagagatgctgctgcccatggggcttcccgagaacgtgtcggtcattgcctggggcctctccctggagcgcccaacgatgatcaaatatggcatcaacaatatccgggagctggtgggccacaaggtgaacctgcagatggtgtatgacagtcccctgtgccgcctggatgccgagccgaggccccctcccacacaggaggctgcgtgacatgggccactctaggacaggtcatcctccccgagtccctgctgctgcgctcctttgcatccctggccagtgaccttgtatttatgaggcctctgtgaggccagcccccaccttcctctttcccacctgtcccaggaccagaatcccagggacagaggactgggtagcaggttccttctgttgtcctgtgtggtgtgtctactgtgagggtgggccctgaggagacctgtgggccacctattgtctaataaagtgggcagttgcccccaaa

SEQ ID NO: 448161 - DNA, 1232 bp, Homo sapiens
actgggaaggagtcatggcggatggtcaggtggcggaactgctgctccggcggctggaggcgtctgatggcggcctggacagcgccgagttggcggctgagctgggcatggagcaccaggcggtggtgggcgccgtgaagagccttcaggcgctgggcgaggtcatcgaggctgaacttcggtccaccaagcactgggagcttactgcggagggcgaggagattgcccgggagggcagccatgaggcccgtgtgtttcgaagcattcccccagagggcctggcccagagcgagcttatgcgactgcccagtggcaaagtgggcttcagcaaggccatgtccaacaagtggattcgggtggacaagagtgcggctgacgggccccgggtgttccgagtggtggacagcatggaggatgaggtgcagcggcggctccagctggtccgggggggacaggctgagaagctgggggagaaggagaggagcgagctgaggaagaggaagctgttggctgaagtgactctgaagacctactgggtgagcaaaggcagtgcctttagtaccagcatctccaagcaagagacagagctgagcccagagatgatctccagtggctcttggcgggaccggcccttcaagccctacaacttcttggcccacggtgtcctccccgacagcggccaccttcacccgctgctcaaggtccgctcccagttccgacagatcttcctggagatggggttcaccgagatgccgactgataacttcattgagagctccttctggaactttgacgccctcttccagccccagcagcacccagcccgtgaccagcacgacaccttcttccttcgagatccagcggaggccctgcagctcccaatggactatgtccagcgggtcaagcggacccactctcagggcggctacggctcacaggggtacaagtataactggaagctggacgaggcccggaaaaacctactgcgaacccacaccacatcagccagcgcccgtgcgctctaccgccttgcccagaagagccttcactccggtcaagtacttctccatcgaccggtttcggattggggccttggcgcgcactggttgttcccagatggggggtgtgggactggctcactggcgccttctgggtttgggggtctcccaggggttccgcatccgttagccggtaacttaccggccgttgggtgtcttcccgcttattggtga

SEQ ID NO: 448162 - DNA, 1677 bp, Homo sapiens
agtcccacacctagtcccacacctgcaccggagtcccacacctagtcccacacctgcactgggagcttactgcggagggcgaggagattgcccgggagggcagccatgaggcccgtgtgtttcgaagcattcccccagagggcctggcccagagcgagcttatgcgactgcccagtggcaaagtgggcttcagcaaggccatgtccaacaagtggattcgggtggacaagagtgcggctgacgggccccgggtgttccgagtggtggacagcatggaggatgaggtgcagcggcggctccagctggtccgggggggacaggctgagaagctgggggagaaggagaggagcgagctgaggaagaggaagctgttggctgaagtgactctgaagacctactgggtgagcaaaggcagtgcctttagtaccagcatctccaagcaagagacagagctgagcccagagatgatctccagtggctcttggcgggaccggcccttcaagccctacaacttcttggcccacggtgtcctccccgacagcggccaccttcacccgctgctcaaggtccgctcccagttccgacagatcttcctggagatggggttcaccgagatgccgactgataacttcattgagagctccttctggaactttgacgccctcttccagccccagcagcacccagcccgtgaccagcacgacaccttcttccttcgagatccagcggaggccctgcagctcccaatggactatgtccagcgggtcaagcggacccactctcagggcggctacggctcacaggggtacaagtataactggaagctggacgaggcccggaaaaacctactgcgaacccacaccacatcagccagcgcccgtgcgctctaccgccttgcccagaagaagcccttcactccggtcaagtacttctccatcgaccgcgtattccggaatgagaccctggacgccacgcacctggctgagttccaccagatcgagggcgtggtggcggatcatggtctcaccttgggccacctcatgggcgttctgcgggagttcttcaccaagctgggtatcacgcaactccgcttcaagccagcctacaacccatacacagagcccagcatggaggtgttcagctaccaccaaggcctgaagaagtgggtggaggtcggaaactcgggggtcttccgtccagagatgctgctgcccatggggcttcccgagaacgtgtcggtcattgcctggggcctctccctggagcgcccaacgatgatcaaatatggcatcaacaatatccgggagctggtgggccacaaggtgaacctgcagatggtgtatgacagtcccctgtgccgcctggatgccgagccgaggccccctcccacacaggaggctgcgtgacatgggccactctaggacaggtcatcctccccgagtccctgctgctgcgctcctttgcatccctggccagtgaccttgtatttatgaggcctctgtgaggccagcccccaccttcctctttcccacctgtcccaggaccagaatcccagggacagaggactgggtagcaggttccttctgttgtcctgtgtggtgtgtctactgtgagggtgggccctgaggagacctgtgggccacctattgtctaataaagtgggcagttgcccccaaa

SEQ ID NO: 448163 - DNA, 779 bp, Homo sapiens
actgggaaggagtcatggcggatggtcaggtggcggaactgctgctccggcggctggaggcgtctgatggcggcctggacagcgccgagttggcggctgagctgggcatggagcaccaggcggtggtgggcgccgtgaagagccttcaggcgctgggcgaggtcatcgaggctgaacttcggtccaccaagcactgggagcttactgcggagggcgaggagattgcccgggagggcagccatgaggcccgtgtgtttcgaagcattcccccagagggcctggcccagagcgagcttatgcgactgcccagtggcaaagtgggcttcagcaaggccatgtccaacaagtggattcgggtggacaagagtgcggctgacgggccccgggtgttccgagtggtggacagcatggaggatgaggtgcagcggcggctccagctggtccgggggggacaggctgagaagctgggggagaaggagaggagcgagctgaggaagaggaagctgttggctgaagtgactctgaagacctactgggtgagcaaaggcagtgcctttagtaccagcatctccaagcaagagacagagctgagcccagagatgatctccagtggctcttggcgggaccggcccttcaagccctacaacttcttggcccacggtgtcctccccgacagcggccaccttcacccgctgctcaaggtccgctcccagttccgacagatcttcctggagatggggtgagcacagggctgggggcggtgcctggtgcttctgctg

SEQ ID NO: 448164 - DNA, 849 bp, Homo sapiens
actgggaaggagtcatggcggatggtcaggtggcggaactgctgctccggcggctggaggcgtctgatggcggcctggacagcgccgagttggcggctgagctgggcatggagcaccaggcggtggtgggcgccgtgaagagccttcaggcgctgggcgaggtcatcgaggctgaacttcggtccaccaagcactgggagcttactgcggagggcgaggagattgcccgggagggcagccatgaggcccgtgtgtttcgaagcattcccccagagggcctggcccagagcgagcttatgcgactgcccagtggcaaagtgggcttcagcaaggccatgtccaacaagtggattcgggtggacaagagtgcggctgacgggccccgggtgttccgagtggtggacagcatggaggatgaggtgcagcggcggctccagctggtccgggggggacaggctgagaagctgggggagaaggagaggagcgagctgaggaagaggaagctgttggctgaagtgactctgaagacctactgggtgagcaaaggcagtgcctttagtaccagcatctccaagcaagagacagagctgagcccagagatgatctccagtggctcttggcgggaccggcccttcaagccctacaacttcttggcccacggtgtcctccccgacagcggccaccttcacccgctgctcaaggtccgctcccagttccagaatcccagggacagaggactgggtagcaggttccttctgttgtcctgtgtggtgtgtctactgtgagggtgggccctgaggagacctgtgggccacctattgtctaataaagtgggcagttgcccccaaa

SEQ ID NO: 448165 - DNA, 629 bp, Homo sapiens
actgggaaggagtcatggcggatggtcaggtggcggaactgctgctccggcggctggaggcgtctgatggcggcctggacagcgccgagttggcggctgagctgggcatggagcaccaggcggtggtgggcgccgtgaagagccttcaggcgctgggcgaggtcatcgaggctgaacttcggtccaccaagcactgggagcttactgcggagggcgaggagattgcccgggagggcagccatgaggcccgtgtgtttcgaagcattcccccagagggcctggcccagagcgagcttatgcgactgcccagtggcaaagtgggcttcagcaaggccatgtccaacaagtggattcgggtggacaagagtgcggctgacgggccccgggtgttccgagtggtggacagcatggaggatgaggtgcagcggcggctccagctggtccgggggggacaggctgagaagctgggggagaaggagaggagcgagctgaggaagaggaagctgttggctgaagtgactctgaagacctactgggtgagcaaaggcagtgcctttagtaccagcatctccaacaagaacccacacgccatacaagaaccacaggggacctcgagacagctacacaca

SEQ ID NO: 448166 - DNA, 2198 bp, Homo sapiens
cgcctcagccatggccctgcgcaaggaactgctcaagtccatctggtacgcctttaccgcgctggacgtggagaagagtggcaaagtctccaagtcccagctcaaggtgctgtcccacaacctgtacacggtcctgcacatcccccatgaccccgtggccctggaggaacacttccgagatgatgatgacggccctgtgtccagccagggatacatgccctacctcaacaagtacatcctggacaaggtggaggagggggcttttgttaaagagcactttgatgagctgtgctggacgctgacggccaagaagaactatcgggcagatagcaacgggaacagtatgctctccaatcaggatgccttccgcctctggtgcctcttcaacttcctgtctgaggacaagtaccctctgatcatggttcctgatgaggtggaatacctgctgaaaaaggtactcagcagcatgagcttggaggtgagcttgggtgagctggaggagcttctggcccaggaggcccaggtggcccagaccaccggggggctcagcgtctggcagttcctggagctcttcaattcgggccgctgcctgcggggcgtgggccgggacaccctcagcatggccatccacgaggtctaccaggagctcatccaagatgtcctgaagcagggctacctgtggaagcgagggcacctgagaaggaactgggccgaacgctggttccagctgcagcccagctgcctctgctactttgggagtgaagagtgcaaagagaaaaggggcattatcccgctggatgcacactgctgcgtggaggtgctgccagaccgcgacggaaagcgctgcatgttctgtgtgaagacagccacccgcacgtatgagatgagcgcctcagacacgcgccagcgccaggagtggacagctgccatccagatggcgatccggctgcaggccgaggggaagacgtccctacacaaggacctgaagcagaaacggcgcgagcagcgggagcagcgggagcggcgccgggcggccaaggaagaggagctgctgcggctgcagcagctgcaggaggagaaggagcggaagctgcaggagctggagctctgcagcaggcgctcgagggccaactgcgcgaggcggagcaggcccgggcctccatgcaggctgagatggagctgaaggaggaggaggctgcccggcagcggcagcgcatcaaggagctggaggagatgcagcagcggttgcaggaggccctgcaactagaggtgaaagctcggcgagatgaagaatctgtgcgaatcgctcagaccagactgctggaagaggaggaagagaagctgaagcagttgatgcagctgaaggaggagcaggagcgctacatcgaacgggcgcagcaggagaaggaagagctgcagcaggagatggcacagcagagccgctccctgcagcaggcccagcagcagctggaggaggtgcggcagaaccggcagagggctgacgaggatgtggaggctgcccagagaaaactgcgccaggccagcaccaacgtgaaacactggaatgtccagatgaaccggctgatgcatccaattgagcctggagataagcgtccggtcaccagcagctccttctcaggcttccagccccctctgcttgcccaccgtgactcctccctaaagcgcctgacccgctggggatcccagggcaacaggaccccctcgcccaacagcaatgagcagcagaagtccctcaatggtggggatgaggctcctgccccggcttccacccctcaggaagataaactggatccagcaccagaaaattagcctctcttagccccttgttcttcccaatgtcatatccaccaggacctggccacagctggcctgtgggtgatcccagctcttactaggagagggagctgaggtcctggtgccaggggcccaggccctccaaccataaacagtccaggatggaacctggttcacccttcataccagctccaagccccagaccatgggagctgtctgggatgttgatccttgagaacttggccctgtgctttagacccaaggacccgattcctgggctaggaaagagagaacaagcaagccggggctacctgcccccaggtggccaccaagttgtggaagcacatttctaaataaaaactgctcttagaatgaaaaaatgg

SEQ ID NO: 448167 - DNA, 2163 bp, Homo sapiens
cgcctcagccatggccctgcgcaaggaactgctcaagtccatctggtacgcctttaccgcgctggacgtggagaagagtggcaaagtctccaagtcccagctcaaggtgctgtcccacaacctgtacacggtcctgcacatcccccatgaccccgtggccctggaggaacacttccgagatgatgatgacggccctgtgtccagccagggatacatgccctacctcaacaagtacatcctggacaaggatgccttccgcctctggtgcctcttcaacttcctgtctgaggacaagtaccctctgatcatggttcctgatgaggtggaatacctgctgaaaaaggtactcagcagcatgagcttggaggtgagcttgggtgagctggaggagcttctggcccaggaggcccaggtggcccagaccaccggggggctcagcgtctggcagttcctggagctcttcaattcgggccgctgcctgcggggcgtgggccgggacaccctcagcatggccatccacgaggtctaccaggagctcatccaagatgtcctgaagcagggctacctgtggaagcgagggcacctgagaaggaactgggccgaacgctggttccagctgcagcccagctgcctctgctactttgggagtgaagagtgcaaagagaaaaggggcattatcccgctggatgcacactgctgcgtggaggtgctgccagaccgcgacggaaagcgctgcatgttctgtgtgaagacagccacccgcacgtatgagatgagcgcctcagacacgcgccagcgccaggagtggacagctgccatccagatggcgatccggctgcaggccgaggggaagacgtccctacacaaggacctgaagcagaaacggcgcgagcagcgggagcagcgggagcggcgccgggcggccaaggaagaggagctgctgcggctgcagcagctgcaggaggagaaggagcggaagctgcaggagctggagctgctgcaggaggcgcagcggcaggccgagcggctgctgcaggaggaggaggaacggcgccgcagccagcaccgcgagctgcagcaggcgctcgagggccaactgcgcgaggcggagcaggcccgggcctccatgcaggctgagatggagctgaaggaggaggaggctgcccggcagcggcagcgcatcaaggagctggaggagatgcagcagcggttgcaggaggccctgcaactagaggtgaaagctcggcgagatgaagaatctgtgcgaatcgctcagaccagactgctggaagaggaggaagagaagctgaagcagttgatgcagctgaaggaggagcaggagcgctacatcgaacgggcgcagcaggagaaggaagagctgcagcaggagatggcacagcagagccgctccctgcagcaggcccagcagcagctggaggaggtgcggcagaaccggcagagggctgacgaggatgtggaggctgcccagagaaaactgcgccaggccagcaccaacgtgaaacactggaatgtccagatgaaccggctgatgcatccaattgagcctggagataagcgtccggtcaccagcagctccttctcaggcttccagccccctctgcttgcccaccgtgactcctccctaaagcgcctgacccgctggggatcccagggcaacaggaccccctcgcccaacagcaatgagcagcagaagtccctcaatggtggggatgaggctcctgccccggcttccacccctcaggaagataaactggatccagcaccagaaaattagcctctcttagccccttgttcttcccaatgtcatatccaccaggacctggccacagctggcctgtgggtgatcccagctcttactaggagagggagctgaggtcctggtgccaggggcccaggccctccaaccataaacagtccaggatggaacctggttcacccttcataccagctccaagccccagaccatgggagctgtctgggatgttgatccttgagaacttggccctgtgctttagacccaaggacccgattcctgggctaggaaagagagaacaagcaagccggggctacctgcccccaggtggccaccaagttgtggaagcacatttctaaataaaaactgctcttagaatgaaaaaatgg

SEQ ID NO: 448168 - DNA, 1741 bp, Homo sapiens
agcgtgatctgcataaacactgagtggcgattatgtactgggccccgtggaataatagcaagatggaaacgcacccacctagccttcaaagagcaaaggctacagagttgtggggacttaagtcccccataacttatgatgcaagccatgcaggctcctggcagagtggggtccccagggaagatagccaggagggctaggggcttgagctggagcacccttggggcaggtggggccctgacccagtgaggccagcctggctgcggccacctaccctgtgccaggtgctgccagaccgcgacggaaagcgctgcatgttctgtgtgaagacagccacccgcacgtatgagatgagcgcctcagacacgcgccagcgccaggagtggacagctgccatccagatggcgatccggctgcaggccgaggggaagacgtccctacacaaggacctgaagcagaaacggcgcgagcagcgggagcagcgggagcggcgccgggcggccaaggaagaggagctgctgcggctgcagcagctgcaggaggagaaggagcggaagctgcaggagctggagctgctgcaggaggcgcagcggcaggccgagcggctgctgcaggaggaggaggaacggcgccgcagccagcaccgcgagctgcagcaggcgctcgagggccaactgcgcgaggcggagcaggcccgggcctccatgcaggctgagatggagctgaaggaggaggaggctgcccggcagcggcagcgcatcaaggagctggaggagatgcagcagcggttgcaggaggccctgcaactagaggtgaaagctcggcgagatgaagaatctgtgcgaatcgctcagaccagactgctggaagaggaggaagagaagctgaagcagttgatgcagctgaaggaggagcaggagcgctacatcgaacgggcgcagcaggagaaggaagagctgcagcaggagatggcacagcagagccgctccctgcagcaggcccagcagcagctggaggaggtgcggcagaaccggcagagggctgacgaggatgtggaggctgcccagagaaaactgcgccaggccagcaccaacgtgaaacactggaatgtccagatgaaccggctgatgcatccaattgagcctggagataagcgtccggtcaccagcagctccttctcaggcttccagccccctctgcttgcccaccgtgactcctccctaaagcgcctgacccgctggggatcccagggcaacaggaccccctcgcccaacagcaatgagcagcagaagtccctcaatggtggggatgaggctcctgccccggcttccacccctcaggaagataaactggatccagcaccagaaaattagcctctcttagccccttgttcttcccaatgtcatatccaccaggacctggccacagctggcctgtgggtgatcccagctcttactaggagagggagctgaggtcctggtgccaggggcccaggccctccaaccataaacagtccaggatggaacctggttcacccttcataccagctccaagccccagaccatgggagctgtctgggatgttgatccttgagaacttggccctgtgctttagacccaaggacccgattcctgggctaggaaagagagaacaagcaagccggggctacctgcccccaggtggccaccaagttgtggaagcacatttctaaataaaaactgctcttagaatgaaaaaatgg

SEQ ID NO: 448169 - DNA, 657 bp, Homo sapiens
cgcctcagccatggccctgcgcaaggaactgctcaagtccatctggtacgcctttaccgcgctggacgtggagaagagtggcaaagtctccaagtcccagctcaaggtgctgtcccacaacctgtacacggtcctgcacatcccccatgaccccgtggccctggaggaacacttccgagatgatgatgacggccctgtgtccagccagggatacatgccctacctcaacaagtacatcctggacaaggtggaggagggggcttttgttaaagagcactttgatgagctgtgctggacgctgacggccaagaagaactatcgggcagatagcaacgggaacagtatgctctccaatcaggatgccttccgcctctggtgcctcttcaacttcctgtctgaggacaagtaccctctgatcatggttcctgatgaggtgagggtgatggcagccccagggactgaatcacttgggaccagacctaagcaaaaccatgaatgagaccaaaccacctttggtgccttcccatatcccctttctttctttaccatcttcccatgctggtatctgtcctcacccagctgtctccagatgcctagaactgcctgtgtcagagtaattttgccttcttccaggaaaactgaaattacactttcatg

SEQ ID NO: 448170 - DNA, 2274 bp, Homo sapiens
cgcctcagccatggccctgcgcaaggaactgctcaagtccatctggtacgcctttaccgcgctggacgtggagaagagtggcaaagtctccaagtcccagctcaaggtgctgtcccacaacctgtacacggtcctgcacatcccccatgaccccgtggccctggaggaacacttccgagatgatgatgacggccctgtgtccagccagggatacatgccctacctcaacaagtacatcctggacaaggtggaggagggggcttttgttaaagagcactttgatgagctgtgctggacgctgacggccaagaagaactatcgggcagatagcaacgggaacagtatgctctccaatcaggatgccttccgcctctggtgcctcttcaacttcctgtctgaggacaagtaccctctgatcatggttcctgatgaggtggaatacctgctgaaaaaggtactcagcagcatgagcttggaggtgagcttgggtgagctggaggagcttctggcccaggaggcccaggtggcccagaccaccggggggctcagcgtctggcagttcctggagctcttcaattcgggccgctgcctgcggggcgtgggccgggacaccctcagcatggccatccacgaggtctaccaggagctcatccaagatgtcctgaagcagggctacctgtggaagcgagggcacctgagaaggaactgggccgaacgctggttccagctgcagcccagctgcctctgctactttgggagtgaagagtgcaaagagaaaaggggcattatcccgctggatgcacactgctgcgtggaggtgctgccagaccgcgacggaaagcgctgcatgttctgtgtgaagacagccacccgcacgtatgagatgagcgcctcagacacgcgccagcgccaggagtggacagctgccatccagatggcgatccggctgcaggccgaggggaagacgtccctacacaaggacctgaagcagaaacggcgcgagcagcgggagcagcgggagcggcgccgggcggccaaggaagaggagctgctgcggctgcagcagctgcaggaggagaaggagcggaagctgcaggagctggagctgctgcaggaggcgcagcggcaggccgagcggctgctgcaggaggaggaggaacggcgccgcagccagcaccgcgagctgcagcaggcgctcgagggccaactgcgcgaggcggagcaggcccgggcctccatgcaggctgagatggagctgaaggaggaggaggctgcccggcagcggcagcgcatcaaggagctggaggagatgcagcagcggttgcaggaggccctgcaactagaggtgaaagctcggcgagatgaagaatctgtgcgaatcgctcagaccagactgctggaagaggaggaagagaagctgaagcagttgatgcagctgaaggaggagcaggagcgctacatcgaacgggcgcagcaggagaaggaagagctgcagcaggagatggcacagcagagccgctccctgcagcaggcccagcagcagctggaggaggtgcggcagaaccggcagagggctgacgaggatgtggaggctgcccagagaaaactgcgccaggccagcaccaacgtgaaacactggaatgtccagatgaaccggctgatgcatccaattgagcctggagataagcgtccggtcaccagcagctccttctcaggcttccagccccctctgcttgcccaccgtgactcctccctaaagcgcctgacccgctggggatcccagggcaacaggaccccctcgcccaacagcaatgagcagcagaagtccctcaatggtggggatgaggctcctgccccggcttccacccctcaggaagataaactggatccagcaccagaaaattagcctctcttagccccttgttcttcccaatgtcatatccaccaggacctggccacagctggcctgtgggtgatcccagctcttactaggagagggagctgaggtcctggtgccaggggcccaggccctccaaccataaacagtccaggatggaacctggttcacccttcataccagctccaagccccagaccatgggagctgtctgggatgttgatccttgagaacttggccctgtgctttagacccaaggacccgattcctgggctaggaaagagagaacaagcaagccggggctacctgcccccaggtggccaccaagttgtggaagcacatttctaaataaaaactgctcttagaatgaaaaaatgg

SEQ ID NO: 448171 - DNA, 1103 bp, Homo sapiens
tgattatctacacataggctcttcctctcattgttaagcagaattcaccaagcgttggatggttcacccactaaggagatggagctgaaggaggaggaggctgcccggcagcggcagcgcatcaaggagctggaggagatgcagcagcggttgcaggaggccctgcaactagaggtgaaagctcggcgagatgaagaatctgtgcgaatcgctcagaccagactgctggaagaggaggaagagaagctgaagcagttgatgcagctgaaggaggagcaggagcgctacatcgaacgggcgcagcaggagaaggaagagctgcagcaggagatggcacagcagagccgctccctgcagcaggcccagcagcagctggaggaggtgcggcagaaccggcagagggctgacgaggatgtggaggctgcccagagaaaactgcgccaggccagcaccaacgtgaaacactggaatgtccagatgaaccggctgatgcatccaattgagcctggagataagcgtccggtcaccagcagctccttctcaggcttccagccccctctgcttgcccaccgtgactcctccctaaagcgcctgacccgctggggatcccagggcaacaggaccccctcgcccaacagcaatgagcagcagaagtccctcaatggtggggatgaggctcctgccccggcttccacccctcaggaagataaactggatccagcaccagaaaattagcctctcttagccccttgttcttcccaatgtcatatccaccaggacctggccacagctggcctgtgggtgatcccagctcttactaggagagggagctgaggtcctggtgccaggggcccaggccctccaaccataaacagtccaggatggaacctggttcacccttcataccagctccaagccccagaccatgggagctgtctgggatgttgatccttgagaacttggccctgtgctttagacccaaggacccgattcctgggctaggaaagagagaacaagcaagccggggctacctgcccccaggtggccaccaagttgtggaagcacatttctaaataaaaactgctcttagaatgaaaaaatgg

SEQ ID NO: 448172 - DNA, 1962 bp, Homo sapiens
cgcaggtaggaggaacgtaccaactgcgaggcggggggtgcgcgcgaagacccccgcaggctgcgcttccggaagtaacccctggcgcatcccggaatccagagcgcccactacggcctttggccaggccccctgggcgcgttccgggagctcaggcctgcggcgctgggagaagcacgctggccaacaagttgggtggtgggcacgcggcccaggggtcaggggccgccaggcggcgggcggcggggctgcggctcttacctgccgaggaggcgccggctctgcggtgcggagttgcgccggacttcccagcttggccagtggctccgcaggctgccggctccacccctcagattcatttggattcaaggttggctctcaacagtgccagctgcactgtcatcctaaagtacttctgtggaagagaacatggtggtgtcactgttgtaccagtgatgacacaaaatcccagatctacctgacgggcctgcgagggttgaagattgtgaagcaatagcctaagggactggctggcttcgagcagggcatcggaaccaggcctcctggcactggcctgggtagagccagggcgagcaccagctgacccccagtggaaccctgtgacagtcctgccagggcccaggccatcccaaccgacttccatctcatggaccctccagcggagaagccgggagaggctggcggactgcagatcacaccccagctgctgaagtcacgcacaggcgagttctccctggagtccatcctgctactgaagctgcgtggcttgggactggctgacctgggctgcctgggagagtgcctgggcctggagtggctggacctatcaggcaacgcgctcacccacctgggcccgctggcctccttgcgccagctagctgtgctcaatgtctccaacaatcggctgacgggcctggagccactggccacctgtgagaacttgcagagtctcaatgccgcaggcaacctactggccaccccgggccagctgcagtgtctggctgggctaccgtgcctggagtacctgcggctccgagaccctttggcccggctcagcaacccgctctgtgccaacccctcctactgggctgcagtccgggagctgctgcctggcctgaaagtcatcgacggtgagcgtgtgattgggcgtggtagtgagttctaccagctgtgccgagacctggacagctccttgcgtcccagctccagtccaggccccagagccaccgaggcccagccctgggtggagccaggctactgggagtcctggcccagccggagcagctccatcctggaggaggcctgccggcagttccaggacacactgcaggagtgctgggacctggaccgccaggccagcgacagcctggcccaggcggagcaggtactcagctctgcgggccccacctcttccttcgtcttctgaacgtggcctatggcccaggacagcctggcaggtggcctcgctgcccccagttcccctctctgcccccacactcgtcttagttgcttcacactggtcactggccctgcacactgggctattgctttatccctatcctgagagcagcccctccccaccatccctccacatgctgcaaggacagactgaagggctgtgagcaggtgtaagggctcccacatccgtgagcctgtgtccgcagctgctgccactctgggctgctccagcctgcaacttagtggaaggaattacttcctcctgaggctacaggcgagaaaggtagggatgggccagcctcccgtctcagctgttgggagacagtaggcaggctgagtggcccagagcactcctggaagtgggactcccctgccttgcaaatgtgcctctccagactgctcctgcacttaccccctccccgcagcaccttctctgcccgttcttgtccacacatctattaaatgcttctgttttcatttgca

SEQ ID NO: 448173 - DNA, 1800 bp, Homo sapiens
cgcaggtaggaggaacgtaccaactgcgaggcggggggtgcgcgcgaagacccccgcaggctgcgcttccggaagtaacccctggcgcatcccggaatccagagcgcccactacggcctttggccaggccccctgggcgcgttccgggagctcaggcctgcggcgctgggagaagcacgctggccaacaagttgggtggtgggcacgcggcccaggggtcaggggccgccaggcggcgggcggcggggctgcggctcttacctgccgaggaggcgccggctctgcggtgcggagttgcgccggacttcccagcttggccagtggctccgcaggctgccggctccacccctcagattcatttggattcaaggttggctctcaacagtgccagctgcactgtcatcctaaagtacttctgtggaagagaacatggtggtgtcactgttgtaccagtgatgacacaaaatcccagatctacctgacgggcctgcgagggttgaagattgtgaagcaatagcctaagggactggctggcttcgagcagggcatcggaaccaggcctcctggcactggcctgggtagagccagggcgagcaccagctgacccccagtggaaccctgtgacagtcctgccagggcccaggccatcccaaccgacttccatctcatggaccctccagcggagaagccgggagaggctggcggactgcagatcacaccccagctgctgaagtcacgcacaggcgagttctccctggagtccatcctgctactgaagctgcgtggcttgggactggctgacctgggctgcctgggagagtgcctgggcctggagtggctggacctatcaggcaacgcgctcacccacctgggcccgctggcctccttgcgccagctagctgtgctcaatgtctccaacaatcggctgacgggcctggagccactggccacctgtgagaacttgcagagtctcaatgccgcaggcaacctactggccaccccgggccagctgcagtgtctggctgggctaccgtgcctggagtacctgcggctccgagaccctttggcccggctcagcaacccgctctgtgccaacccctcctactgggctgcagtccgggagctgctgcctggcctgaaagtcatcgacggtgagcgtgtgattgggcgtggtagtgagttctaccagctgtgccgagacctggaccgccaggccagcgacagcctggcccaggcggagcaggtactcagctctgcgggccccacctcttccttcgtcttctgaacgtggcctatggcccaggacagcctggcaggtggcctcgctgcccccagttcccctctctgcccccacactcgtcttagttgcttcacactggtcactggccctgcacactgggctattgctttatccctatcctgagagcagcccctccccaccatccctccacatgctgcaaggacagactgaagggctgtgagcaggtgtaagggctcccacatccgtgagcctgtgtccgcagctgctgccactctgggctgctccagcctgcaacttagtggaaggaattacttcctcctgaggctacaggcgagaaaggtagggatgggccagcctcccgtctcagctgttgggagacagtaggcaggctgagtggcccagagcactcctggaagtgggactcccctgccttgcaaatgtgcctctccagactgctcctgcacttaccccctccccgcagcaccttctctgcccgttcttgtccacacatctattaaatgcttctgttttcatttgca

SEQ ID NO: 448174 - DNA, 1817 bp, Homo sapiens
cgcaggtaggaggaacgtaccaactgcgaggcggggggtgcgcgcgaagacccccgcaggctgcgcttccggaagtaacccctggcgcatcccggaatccagagcgcccactacggcctttggccaggccccctgggcgcgttccgggagctcaggcctgcggcgctgggagaagcacgctggccaacaagttgggtggtgggcacgcggcccaggggtcaggggccgccaggcggcgggcggcggggctgcggctcttacctgccgaggaggcgccggctctgcggtgcggagttgcgccggacttcccagcttggccagtggctccgcaggctgccggctccacccctcagattcatttggattcaaggttggctctcaacagtgccagctgcactgtcatcctaaagtacttctgtggaagagaacatggtggtgtcactgttgtaccagtgatgacacaaaatcccagatctacctgacgggcctgcgagggttgaagattgtgaagcaatagcctaagggactggctggcttcgagcagggcatcggaaccaggcctcctggcactggcctgggtagagccagggcgagcaccagctgacccccagtggaaccctgtgacagtcctgccagggcccaggccatcccaaccgacttccatctcatggaccctccagcggagaagccgggagaggctggcggactgcagatcacaccccagctgctgaagtcacgcacaggcgagttctccctggagtccatcctgctactgaagctgcgtggcttgggactggctgacctgggctgcctgggagagtgcctgggcctggagtggctggacctatcaggcaacgcgctcacccacctgggcccgctggcctccttgcgccagctagctgtgctcaatgtctccaacaatcggctgacgggcctggagccactggccacctgtgagaacttgcagagtctcaatgccgcaggcaacctactggccaccccgggccagctgcagtgtctggctgggctaccgtgcctggagtacctgcggctccgagaccctttggcccggctcagcaacccgctctgtgccaacccctcctactgggctgcagtccgggagctgctgcctggcctgaaagtcatcgacggtgagcgtgtgattgggcgtggtagtgagttctaccagctgtgccgagacctggacagctccttgcgtcccagctccagtccaggccccagagccaccgaggcccagccctgggtggagccaggctactgggagtcctggcccagccggagcagctccatcctggaggaggcctgccggcagttccaggacacactgcaggagtgctgggacctggaccgccaggccagcgacagcctggcccaggcggagcaggtactcagctctgcgggccccacctcttccttcgtcttctgaacgtggcctatggcccaggacagcctggcaggtggcctcgctgcccccagttcccctctctgcgctcccacatccgtgagcctgtgtccgcagctgctgccactctgggctgctccagcctgcaacttagtggaaggaattacttcctcctgaggctacaggcgagaaaggtagggatgggccagcctcccgtctcagctgttgggagacagtaggcaggctgagtggcccagagcactcctggaagtgggactcccctgccttgcaaatgtgcctctccagactgctcctgcacttaccccctccccgcagcaccttctctgcccgttcttgtccacacatctattaaatgcttctgttttcatttgca

SEQ ID NO: 448175 - DNA, 1546 bp, Homo sapiens
  misc_feature (1514)..(1514): n is a, c, g, or t
cgcaggtaggaggaacgtaccaactgcgaggcggggggtgcgcgcgaagacccccgcaggctgcgcttccggaagtaacccctggcgcatcccggaatccagagcgcccactacggcctttggccaggccccctgggcgcgttccgggagctcaggcctgcggcgctgggagaagcacgctggccaacaagttgggtggtgggcacgcggcccaggggtcaggggccgccaggcggcgggcggcggggctgcggctcttacctgccgaggaggcgccggctctgcggtgcggagttgcgccggacttcccagcttggccagtggctccgcaggctgccggctccacccctcagattcatttggattcaaggttggctctcaacagtgccagctgcactgtcatcctaaagtacttctgtggaagagaacatggtggtgtcactgttgtaccagtgatgacacaaaatcccagatctacctgacgggcctgcgagggttgaagattgtgaagcaatagcctaagggactggctggcttcgagcagggcatcggaaccaggcctcctggcactggcctgggtagagccagggcgagcaccagctgacccccagtggaaccctgtgacagtcctgccagggcccaggccatcccaaccgacttccatctcatggaccctccagcggagaagccgggagaggctggcggactgcagatcacaccccagctgctgaagtcacgcacaggcgagttctccctggagtccatcctgctactgaagctgcgtggcttgggactggctgacctgggctgcctgggagagtgcctgggcctggagtggctggacctatcaggcaacgcgctcacccacctgggcccgctggcctccttgcgccagctagctgtgctcaatgtctccaacaatcggctgacgggcctggagccactggccacctgtgagaacttgcagagtctcaatgccgcaggcaacctactggccaccccgggccagctgcagtgtctggctgggctaccgtgcctggagtacctgcggctccgagaccctttggcccggctcagcaacccgctctgtgccaacccctcctactgggctgcagtccgggagctgctgcctggcctgaaagtcatcgacggtgagcgtgtgattgggcgtggtagtgagttctaccagctgtgccgagacctggacagctccttgcgtcccagctccagtccaggccccagagccaccgaggcccagccctgggtggagccaggctactgggagtcctggcccagccggagcagctccatcctggaggaggcctgccggcagttccaggacacactgcaggagtgctgggacctggaccgccaggccagcgacagcctggcccaggcggagcaggtactcagctctgcgggccccacctcttccttcgtcttctgaacgtggcctatggcccaggacagcctggcaggtggcctcgctgcccccagttcccctctctgctatnttgtcctggaatatttttggggttggaactca

SEQ ID NO: 448176 - DNA, 1586 bp, Homo sapiens
cgcaggtaggaggaacgtaccaactgcgaggcggggggtgcgcgcgaagacccccgcaggctgcgcttccggaagtaacccctggcgcatcccggaatccagagcgcccactacggcctttggccaggccccctgggcgcgttccgggagctcaggcctgcggcgctgggagaagcacgctggccaacaagttgggtggtgggcacgcggcccaggggtcaggggccgccaggcggcgggcggcggggctgcggctcttacctgccgaggaggcgccggctctgcggtgcggagttgcgccggacttcccagcttggccagtggctccgcaggctgccggctccacccctcagattcatttggattcaaggttggctctcaacagtgccagctgcactgtcatcctaaagtacttctgtggaagagaacatggtggtgtcactgttgtaccagtgatgacacaaaatcccagatctacctgacgggcctgcgagggttgaagattgtgaagcaatagcctaagggactggctggcttcgagcagggcatcggaaccaggcctcctggcactggcctgggtagagccagggcgagcaccagctgacccccagtggaaccctgtgacagtcctgccagggcccaggccatcccaaccgacttccatctcatggaccctccagcggagaagccgggagaggctggcggactgcagatcacaccccagctgctgaagtcacgcacaggcgagttctccctggagtccatcctgctactgaagctgcgtggcttgggactggctgacctgggctgcctgggagagtgcctgggcctggagtggctggacctatcaggcaacgcgctcacccacctgggcccgctggcctccttgcgccagctagctgtgctcaatgtctccaacaatcggctgacgggcctggagccactggccacctgtgagaacttgcagagtctcaatgccgcaggcaacctactggccaccccgggccagctgcagtgtctggctgggctaccgtgcctggagtacctgcggctccgagaccctttggcccggctcagcaacccgctctgtgccaacccctcctactgggctgcagtccgggagctgctgcctggcctgaaagtcatcgacggtgagcgtgtgattgggcgtggtagtgagttctaccagctgtgccgagacctggacagctccttgcgtcccagctccagtccaggccccagagccaccgaggcccagccctgggtggagccaggctactgggagtcctggcccagccggagcagctccatcctggaggaggcctgccggcagttccaggacacactgcaggagtgctgggacctggaccgccaggccagcgacagcctggcccaggcggagcaggtactcagctctgcgggccccacctcttccttcgtcttctgaacgtggcctatggcccaggacagcccctgccttgcaaatgtgcctctccagactgctcctgcacttaccccctccccgcagcaccttctctgcccgttcttgtccacacatctattaaatgcttctgttttcatttgca

SEQ ID NO: 448177 - DNA, 1792 bp, Homo sapiens
cgcaggtaggaggaacgtaccaactgcgaggcggggggtgcgcgcgaagacccccgcaggctgcgcttccggaagtaacccctggcgcatcccggaatccagagcgcccactacggcctttggccaggccccctgggcgcgttccgggagctcaggcctgcggcgctgggagaagcacgctggccaacaagttgggtggtgggcacgcggcccaggggtcaggggccgccaggcggcgggcggcggggctgcggctcttacctgccgaggaggcgccggctctgcggtgcggagttgcgccggacttcccagcttggccagtggctccgcaggctgccggctccacccctcagggactggctggcttcgagcagggcatcggaaccaggcctcctggcactggcctgggtagagccagggcgagcaccagctgacccccagtggaaccctgtgacagtcctgccagggcccaggccatcccaaccgacttccatctcatggaccctccagcggagaagccgggagaggctggcggactgcagatcacaccccagctgctgaagtcacgcacaggcgagttctccctggagtccatcctgctactgaagctgcgtggcttgggactggctgacctgggctgcctgggagagtgcctgggcctggagtggctggacctatcaggcaacgcgctcacccacctgggcccgctggcctccttgcgccagctagctgtgctcaatgtctccaacaatcggctgacgggcctggagccactggccacctgtgagaacttgcagagtctcaatgccgcaggcaacctactggccaccccgggccagctgcagtgtctggctgggctaccgtgcctggagtacctgcggctccgagaccctttggcccggctcagcaacccgctctgtgccaacccctcctactgggctgcagtccgggagctgctgcctggcctgaaagtcatcgacggtgagcgtgtgattgggcgtggtagtgagttctaccagctgtgccgagacctggacagctccttgcgtcccagctccagtccaggccccagagccaccgaggcccagccctgggtggagccaggctactgggagtcctggcccagccggagcagctccatcctggaggaggcctgccggcagttccaggacacactgcaggagtgctgggacctggaccgccaggccagcgacagcctggcccaggcggagcaggtactcagctctgcgggccccacctcttccttcgtcttctgaacgtggcctatggcccaggacagcctggcaggtggcctcgctgcccccagttcccctctctgcccccacactcgtcttagttgcttcacactggtcactggccctgcacactgggctattgctttatccctatcctgagagcagcccctccccaccatccctccacatgctgcaaggacagactgaagggctgtgagcaggtgtaagggctcccacatccgtgagcctgtgtccgcagctgctgccactctgggctgctccagcctgcaacttagtggaaggaattacttcctcctgaggctacaggcgagaaaggtagggatgggccagcctcccgtctcagctgttgggagacagtaggcaggctgagtggcccagagcactcctggaagtgggactcccctgccttgcaaatgtgcctctccagactgctcctgcacttaccccctccccgcagcaccttctctgcccgttcttgtccacacatctattaaatgcttctgttttcatttgca

SEQ ID NO: 448178 - DNA, 2053 bp, Homo sapiens
cgcaggtaggaggaacgtaccaactgcgaggcggggggtgcgcgcgaagacccccgcaggctgcgcttccggaagtaacccctggcgcatcccggaatccagagcgcccactacggcctttggccaggccccctgggcgcgttccgggagctcaggcctgcggcgctgggagaagcacgctggccaacaagttgggtggtgggcacgcggcccaggggtcaggggccgccaggcggcgggcggcggggctgcggctcttacctgccgaggaggcgccggctctgcggtgcggagttgcgccggacttcccagcttggccagtggctccgcaggctgccggctccacccctcagattcatttggattcaaggttggctctcaacagtgccagctgcactgtcatcctaaagtacttctgtggaagagaacatggtggtgtcactgttgtaccagtgatgacacaaaatcccagatctacctgacgggcctgcgagggttgaagattgtgaagcaatagcctaagggactggctggcttcgagcagggcatcggaaccaggcctcctggcactggcctgggtagagccagggcgagcaccagctgacccccagtggaaccctgtgacagtcctgccagggcccaggccatcccaaccgacttccatctcatggaccctccagcggagaagccgggagaggctggcggactgcagatcacaccccagctgctgaagtcacgcacaggcgagttctccctggagtccatcctgctactgaagctgcgtggcttgggactggctgacctgggctgcctgggagagtgcctgggcctggagtggctggacctatcaggcaacgcgctcacccacctgggcccgctggcctccttgcgccagctagctgtgctcaatgtctccaacaatcggctgacgggcctggagccactggccacctgtgagaacttgcagagtctcaatgccgcaggcaacctactggccaccccgggccagctgcagtgtctggctgggctaccgtgcctggagtacctgcggctccgagaccctttggcccggctcagcaacccgctctgtgccaacccctcctactgggctgcagtccgggagctgctgcctggcctgaaagtcatcgacggtgagcgtgtgattgggcgtggtagtgagttctaccagctgtgccgagacctggacagctccttgcgtcccagctccagtccaggccccagagccaccgaggcccagccctgggtggagccaggctactgggagtcctggcccagccggagcagctccatcctggaggaggcctgccggcagttccaggacacactgcaggagtgctgggacctggaccgccaggccagcgacagcctggcccaggcggagcaggtactcagctctgcgggccccacctcttccttcgtcttctgaacgtggcctatggcccaggacagcctggcaggtggcctcgctgcccccagttcccctctctgcccccacactcgtcttagttgcttcacactggtcactggccctgcacactgggctattgctttatccctatcctgagagcagcccctccccaccatccctccacatgctgcaaggacagactgaagggctgtgagcaggtgtaagggctcccacatccgtgagcctgtgtccgcagctgctgccactctgggctgctccagcctgcaacttagtggaaggaattacttcctcctgaggctacaggcgagaaaggtagggatgggccagcctcccgtctcagctgttgggagacagtaggcaggctgagtggcccagagcactcctggaagtgggactcccctgccttgcaaatgtgcctctccagactgctcctgcacttaccccctccccgcagcaccttctctgcccgttcttgtccacacatctattaaatgcttctgttttcatttgcatccctgcctggcatttcatgggggcacctctggctctggagcacaggaggctctgctcaccctgcccacaggaaggggtcccagaggaagg

SEQ ID NO: 448179 - DNA, 1839 bp, Homo sapiens
cgcaggtaggaggaacgtaccaactgcgaggcggggggtgcgcgcgaagacccccgcaggctgcgcttccggaagtaacccctggcgcatcccggaatccagagcgcccactacggcctttggccaggccccctgggcgcgttccgggagctcaggcctgcggcgctgggagaagcacgctggccaacaagttgggtggtgggcacgcggcccaggggtcaggggccgccaggcggcgggcggcggggctgcggctcttacctgccgaggaggcgccggctctgcggtgcggagttgcgccggacttcccagcttggccagtggctccgcaggctgccggctccacccctcagattcatttggattcaaggttggctctcaacagtgccagctgcactgtcatcctaaagtacttctgtggaagagaacatggtggtgtcactgttgtaccagtgatgacacaaaatcccagatctacctgacgggcctgcgagggttgaagattgtgaagcaatagcctaagggactggctggcttcgagcagggcatcggaaccaggcctcctggcactggcctgggtagagccagggcgagcaccagctgacccccagtggaaccctgtgacagtcctgccagggcccaggccatcccaaccgacttccatctcatggaccctccagcggagaagccgggagaggctggcggactgcagatcacaccccagctgctgaagtcacgcacaggcgagttctccctggagtccatcctgctactgaagctgcgtggcttgggactggctgacctgggctgcctgggagagtgcctgggcctggagtggctggacctatcaggcaacgcgctcacccacctgggcccgctggcctccttgcgccagctagctgtgctcaatgtctccaacaatcggctgacgggcctggagccactggccacctgtgagaacttgcagagtctcaatgccgcaggcaacctactggccaccccgggccagctgcagtgtctggctgggctaccgtgcctggagtacctgcggctccgagaccctttggcccggctcagcaacccgctctgtgccaacccctcctactgggctgcagtccgggagctgctgcctggcctgaaagtcatcgacggtgagcgtgtgattgggcgtggtagtgagttctaccagctgtgccgagacctggacagctccttgcgtcccagctccagtccaggccccagagccaccgaggcccagccctgggtggagccaggctactgggagtcctggcccagccggagcagctccatcctggaggaggcctgccggcagttccaggacacactgcaggagtgctgggacctggaccgccaggccagcgacagcctggcccaggcggagcaggtactcagctctgcgggccccacctcttccttcgtcttctgaacgtggcctatggcccaggacagcctggcaggtggcctcgctgcccccagttcccctctctgcccccacactcgtcttagttgcttcacactggtcactggccctgcacactgggctattgctttatccctatcctgagagcagcccctccccaccatccctccacatgctgcaaggacagactgaagggctgtgagcaggtgtaaggctcccgtctcagctgttgggagacagtaggcaggctgagtggcccagagcactcctggaagtgggactcccctgccttgcaaatgtgcctctccagactgctcctgcacttaccccctccccgcagcaccttctctgcccgttcttgtccacacatctattaaatgcttctgttttcatttgca

SEQ ID NO: 448180 - DNA, 1709 bp, Homo sapiens
cgcaggtaggaggaacgtaccaactgcgaggcggggggtgcgcgcgaagacccccgcaggctgcgcttccggaagtaacccctggcgcatcccggaatccagagcgcccactacggcctttggccaggccccctgggcgcgttccgggagctcaggcctgcggcgctgggagaagcacgctggccaacaagttgggtggtgggcacgcggcccaggggtcaggggccgccaggcggcgggcggcggggctgcggctcttacctgccgaggaggcgccggctctgcggtgcggagttgcgccggacttcccagcttggccagtggctccgcaggctgccggctccacccctcagattcatttggattcaaggttggctctcaacagtgccagctgcactgtcatcctaaagtacttctgtggaagagaacatggtggtgtcactgttgtaccagtgatgacacaaaatcccagatctacctgacgggcctgcgagggttgaagattgtgaagcaatagcctaagggactggctggcttcgagcagggcatcggaaccaggcctcctggcactggcctgggtagagccagggcgagcaccagctgacccccagtggaaccctgtgacagtcctgccagggcccaggccatcccaaccgacttccatctcatggaccctccagcggagaagccgggagaggctggcggactgcagatcacaccccagctgctgaagtcacgcacaggcgagttctccctggagtccatcctgctactgaagctgcgtggcttgggactggctgacctgggctgcctgggagagtgcctgggcctggagtggctggacctatcaggcaacgcgctcacccacctgggcccgctggcctccttgcgccagctagctgtgctcaatgtctccaacaatcggctgacgggcctggagccactggccacctgtgagaacttgcagagtctcaatgccgcaggcaacctactggccaccccgggccagctgcagtgtctggctgggctaccgtgcctggagtacctgcggctccgagaccctttggcccggctcagcaacccgctctgtgccaacccctcctactgggctgcagtccgggagctgctgcctggcctgaaagtcatcgacggtgagcgtgtgattgggcgtggtagtgagttctaccagctgtgccgagacctggacagctccttgcgtcccagctccagtccaggccccagagccaccgaggcccagccctgggtggagccaggctactgggagtcctggcccagccggagcagctccatcctggaggaggcctgccggcagttccaggacacactgcaggagtgctgggacctggaccgccaggccagcgacagcctggcccaggcggagcaggtactcagctctgcgggccccacctcttccttcgtcttctgaacgtggcctatggcccaggacagcctggcaggtggcctcgctgcccccagttcccctctctgcccccacactcgtcttagttgcttcacactggtcactggccctgcacactgggctattgctttatccctatcctgagagcagcccccctgccttgcaaatgtgcctctccagactgctcctgcacttaccccctccccgcagcaccttctctgcccgttcttgtccacacatctattaaatgcttctgttttcatttgca

SEQ ID NO: 448181 - DNA, 1509 bp, Homo sapiens
cgcaggtaggaggaacgtaccaactgcgaggcggggggtgcgcgcgaagacccccgcaggctgcgcttccggaagtaacccctggcgcatcccggaatccagagcgcccactacggcctttggccaggccccctgggcgcgttccgggagctcaggcctgcggcgctgggagaagcacgctggccaacaagttgggtggtgggcacgcggcccaggggtcaggggccgccaggcggcgggcggcggggctgcggctcttacctgccgaggaggcgccggctctgcggtgcggagttgcgccggacttcccagcttggccagtggctccgcaggctgccggctccacccctcagattcatttggattcaaggttggctctcaacagtgccagctgcactgtcatcctaaagtacttctgtggaagagaacatggtggtgtcactgttgtaccagtgatgacacaaaatcccagatctacctgacgggcctgcgagggttgaagattgtgaagcaatagcctaagggactggctggcttcgagcagggcatcggaaccaggcctcctggcactggcctgggtagagccagggcgagcaccagctgacccccagtggaaccctgtgacagtcctgccagggcccaggccatcccaaccgacttccatctcatggaccctccagcggagaagccgggagaggctggcggactgcagatcacaccccagctgctgaagtcacgcacaggcgagttctccctggagtccatcctgctactgaagctgcgtggcttgggactggctgacctgggctgcctgggagagtgcctgggcctggagtggctggacctatcaggcaacgcgctcacccacctgggcccgctggcctccttgcgccagctagctgtgctcaatgtctccaacaatcggctgacgggcctggagccactggccacctgtgagaacttgcagagtctcaatgccgcaggcaacctactggccaccccgggccagctgcagtgtctggctgggctaccgtgcctggagtacctgcggctccgagaccctttggcccggctcagcaacccgctctgtgccaacccctcctactgggctgcagtccgggagctgctgcctggcctgaaagtcatcgacggtgagcgtgtgattgggcgtggtagtgagttctaccagctgtgccgagacctggacagctccttgcgtcccagctccagtccaggccccagagccaccgaggcccagccctgggtggagccaggctactgggagtcctggcccagccaggcgagaaaggtagggatgggccagcctcccgtctcagctgttgggagacagtaggcaggctgagtggcccagagcactcctggaagtgggactcccctgccttgcaaatgtgcctctccagactgctcctgcacttaccccctccccgcagcaccttctctgcccgttcttgtccacacatctattaaatgcttctgttttcatttgca

SEQ ID NO: 448182 - DNA, 260 bp, Homo sapiens
taaaaagaaaaccatgatcaacaagctttgccacgaatttaagagttttatcaagatatatcgaatacagcatgggattgggaaagttaactaaaggtatttgagcttgcactggatcttgaaaggtagaaaaagggagcaggaggaaactcatccaggtaagaaaaatagactgtgcaagatgggcatgagaaacagtgaggtccctggctggaggtgggtgctagtcatgttgagcactgctggcaggagaggttttt

SEQ ID NO: 448183 - DNA, 735 bp, Homo sapiens
agagatgagaagacctaaatgaagcttttttgaaaaaggagagatattatgaacagaggcccattaatgttaaatttgaagtggagtgatgaggaacagcttcttactagaacagtgttttataatccattagccacaatttatacttggatctcaaaggccaggatcagtattattgctacttctgtagcttcttccctatagctcatgggcatttctgggtcagtgaagggggagaagacccaaagaaactgaaatccacctttttgtattcctgcactgcttctaatcatatttgctcagtaaaggggccaaatagattattcgtgcactgagcaacagtagatttcctaggaagaagcttgtgtcagggaaatatgagtgaggaatgggctggttgatagtgtgtggtccctgagggggagatggtattctagcacataggaggctgtttttcctgtttttccccccccccagagcttataatgatacatgaatacgaaaaataattaatagcatgagtggcagaggaatgggaggataagcatgggattgggaaagttaactaaaggtatttgagcttgcactggatcttgaaaggtagaaaaagggagcaggaggaaactcatccaggtaagaaaaatagactgtgcaagatgggcatgagaaacagtgaggtccctggctggaggtgggtgctagtcatgttgagcactgctggcaggagaggttttt

SEQ ID NO: 448184 - DNA, 1072 bp, Homo sapiens
cttccttgataactgcttcaaagagggaaaggaagattttaattgcttcaaagagggaaaggaagaaagcacagaaatctaatgcaagtaaaggcacaatgaatgtggagttgaatggaaccaaacccttccttgataactgctgtttctttctactcttgtttctggcaatttagtgggttccttctctagtggtcttaaatctcattccactggtggcaagatggggcctagccttcttttcacatgtctaatcttttcctttctcatggtgccctccatggaagtcacagtcaacactgaataaatgactagaatgacacgtgtgcgtgcgcacgcgtgtgcgtgtgtgtgttcatctgtctgcatgtggatcaatttcttttagaaaataatttattgtatgatttattttggagttatattctgattacagtgctccctctcccaaatagcattgattttttcccccctctaaaatgtataatctggtctcaggttggattctttggtacatttctctcttctggatgccatgcagcttaattaaaaccttgcttaaaaacaaaaagtgaaaattgtgtactcttgtctggaataccgcctcaggtggtggcacagagaggggagaaaacctttgcctcataatttgggtaagtgtagtggtttgattccaggtcccttgaaaaagtagatctactgaattgggcagactcatctatagctttctgagggtcttctctcctcctctccagctgtattttgaaaattacagttctagttggctgggcgcgatggctcatgtctgtaatcccagcactttgggaggccaaggcgggtggatcatttgaggtcaggagttcgagaccagcttggccaacatggtgaaaccccgtctctactgaaaatacaaaaattaaccggtgtcatggcgcatgcctgtggtcccagctactcgggaggccgaggcaggaaaatcacttgaacccaggaggcggaggttgcactgagctgagatcatgccactgcactaaaaaaaaaaaaaaaaaaaaaaaaaaaaaaaaaaaaaaaa

SEQ ID NO: 448185 - DNA, 5876 bp, Homo sapiens
ggagcagatccatttccgggttggcaaaaggggcggtggcggcggcggcggcggcggcggcggcggcggcggcgacggcgagaaagagcttgccggggggcgagcaggacaggacgaagccggagtgtaggcggcagaggattcgctcccagagcagctgcggccaggtatatgaatgacctaaaggtacaaataaagacggagagagaacagtgccaactgggagcagggcaagaatgccaattcctcctcccccgccacccccacctggtcctcctccacctcccacatttcatcaggcaaacacagagcagcccaagctgagtagagatgagcagcggggtcgaggcgccctcttacaggacatttgcaaagggaccaagctgaagaaggtgaccaacattaatgatcggagtgctcccatcctcgagaagccgaaaggaagcagtggtggctatggctctggaggagctgccctgcagcccaagggaggtctcttccaaggaggagtgctgaagcttcgacctgtgggagccaaggatggttcagagaacctagctggtaagccagccctgcaaatccccagttctcgagctgctgccccaaggcctccagtatctgccgccagcgggcgtcctcaggatgatacagacagcagccgggcctcactcccagaactgccccggatgcagagaccctctttaccggacctctctcggcctaataccaccagcagtacgggcatgaagcacagctcctctgcccctcccccaccacccccagggcggcgtgccaacgcaccccccacacctctgcctatgcacagcagcaaagcccccgcctacaacagagagaaacccttgccaccgacgcctggacaaaggcttcaccctggtcgagagggacctcctgctccacccccagtcaaaccacctccttcccctgtgaatatcagaacaggaccaagtggccagtctctggctcctcctcctccgccttaccgccagcctcctggggtccccaatggaccctctagccccactaatgagtcagcccctgagctgccacagagacacaattctttgcataggaagacaccagggcctgtcagaggcctagcacctcctccacccacctcggcctccccatctttactgagtaataggccacctcccccagcccgagaccctcccagtcggggaggccaccccctcctcctccaccgcccctgaggaatggccacagagattctatcaccactgtccggtctttcttggatgattttgagtcaaagtattccttccatccagtagaagactttcctgctccagaagaatataaacactttcagaggatatatcccagcaaaacaaaccgagctgcccgtggagccccacctctgccacccattctcaggtgaagcctggcttggtcccgttcctcaggaaaaggatggaccttctcttcttctcagatggtcccttccattcccctgaaacctgcatgagagctcctaacatgtttctccaatgcaatcaagccctagactccaaatgtcctcccagctcacctccatctatgcatctcatctctggatttggtgatcagactctatattgacagtaggatctcaaaccctgcatccatccttcctccagcaagccctgctagccacatgaggaacaagtttccgtgtcttctgccttcctcttggggaaaggtgccttgttgtgatgaattaactcactgttagggcagggtggagaatggtactccttccttctcctgtccactgtgggggaagcttggcaggtatattatatttcatcatttaggaggctggcatgaccaggacttatgggtgggaggggagcatttttagtgaagcaagaaaggagtttgccaagaagtgatctgttttaaaggtcatatttggagaaagggcaaggaattgggtctgctttatttttgggggtattttgtttttgttctcacctgctgcccccccaccccaccaccccagggataaattggatataaacactaaatactaatcagttgaacttaacatttaataaaaagaaagggtgaaataaactgaagaccattttagaactagtcagttctctgcagcaaagggaacaggagccatttgaaccctctgggacccctcaccccactgcttcagggtgctaggctgagggatgtttttcctcccccttaccgcccatgcccttgaaagaaaagtcactttttgtggagggcatcattcattcctgattcacaaaccccaaaaacctctggtgggagataggaagatagggcgtgggcctgggccttaacctcaatcttgtgtctgcctcagtcttttctgactggccctgaagttgtcagtggctctttctgtccttcagcccctggaaggtgctccaggataacaaagaagggcaggttgaagcccctcatggaaggagctggctttgtggggctgcaaaggacttttaagtcctgcctgtactgaagttcacagcccacctgactgagcagactcttcctgttcctttctctaccacccttgccttcccaggactgcacggtttaacacagcagagtacagaagggtgaagaagtgagcagaggcttatgaagatattcagatactcttctatgccaggaagcacaaagactttgttgagatttgcctcagttcagtagatcttccttggcagccagccataggttgtttctttgtcttccgggtcctaaagagcacagagaaaatggaggtccccagtctaggtaggaagctgattggatgaggacttctttttttccgacagcaggatggggctcttgggctccacacaccagatgctttggttttctacaactgttgctatgtgtagagggtgctcagagcgtggcatgagagcaaggagaccatggctactctttgaaatggatggggaaaattagcttaaaaatttaatcacgagattgcgccactgcactccagcctgggcgacagagccagactccgtctcaaaaaaaaaaaaaaaaaaaaatttaatcacacacatcacaggcttaaactgtcttagagacctttccagttgattggatcacaggctagggatctgtgcatggtgccaggtgaaacccaagtctccccagtgctaggtgagggagggctcaacgggggtaatgtgtatggggtctgctgtcctttgccatcccctggaccatattaactctgggacagaccatgattaggtctgtcaccaaacttttcctaatcattttttatgtatcattcttctttctaatctgttagcagttatctcccagaagtatccctagcatcctgaagcaaacagaactgccgggcgctgtggcttatgcctgtaatctcagcaatttgggaggccgaggcgggcggatcacctgaggtcagaagttcgagaccagcctgtccaacatggtgaaaccccgtctccactaaaaacacaaaaattatctgggcgtggtggcatgtgcctgtagtcccagctactggggaggctgaggcaggagaatcgcttgaatccaggaggtggaggttgcagtgagtggagatggcgccactgcgctccagcccgggtgacagagtgaaactccatctcagaaaacaaacaaaccaaacaactgagagagggcatgctagtggagggaaaaggagagagtacaagagttgatactgcatcagagttccagggcagatactgacaagtgactgaactttgactgtgaagtcttcccatttatttttgaaatgggagtcgatgccttttgtacgttatcaaagtgtttttttttttttcctcctttactcagacatagagcatcaaaatatcacgagtaaagccaaaccccagcttttcactggggctgatatcttcctccccatggcccactgccccctcatattccccagcacttggactgtgtcacatgggtattgattgtatacttgttgtcttggcctcatgcaaaaaggcctgggtctagatctagtcagatgagttttttttagagcatgttgatgatacaacacctgtttaaatgtctgccttatatgttatttggtcccactgttaataatagatttattactatgtatatttactattgaagatgggaatgtgatctgcatagttatcagtctattttgtatgttgtaaaaagcttctaatttaggtttaaggtgggctggctacaagagcactaaaactcctcaccttttaaactgctctttttatctgcttgtgggaatgtcgtctctttcgtggaagattgggtggtctcatgttgaggctgttgcccagtcccattaactcccttgtccccccacagaaggaagagacattgcccagctaagcatcaggaagctgtgttaaaagcccttctatgggtttggttttgtgatgtttttccctaatgggaaaaacgttatagttgtttcttactgccctgtctgggaagcagggcaaacctccaggtttttaaatgagctagatgcccctcttcctcttctctggtcactgaacctggaccaaagcactttgatattccaggtgtgattttctctgtcatggggatttgctccactgcagagccccatcattttcacagcgtaggccaacagagtgagaacctagggctaccctagctgatggatgtgaggctgctgtctacaggagctcatcccagccctgttaactggcagtggcaaggatactcgtcatcggccattgcactggggaactccctcaccccatggcttcccaacttgaaacccagatttacctccagggagaggtgagaaaaaaattgtaaatagacttgctaaagagcaactcagggttggggtgtgttttaattctcctgatcacttgaaataatctgtaggctgagtgcttatgggggtgggggagaagggtgactccagggtccttccattttgtgaagctctgggggtggagtgtgggcatctgaggccctatgatggcactacattgagctgtctgcccttccggaaacccaacctgcaatcaactgcaaatcaaattcttcacattccagctacagtctttctttccccattgaatctcagtccctggccatgtggtcaaggtggctttctgttaagctaccctaatttcgggaatgggaggggagagaggagggccattacaactctgccttcaagactcatctcttaaaaacaaaacgaaacaaaactacaaccaccatcaaaaccacacgcaaaaaaaaaaaaaaaaaaaaaaaaggataactttaaccgaaggaagggtttggttccattcaactccacattcattgtgcctttacttgcattagatttctgtgctttcttcctttccctctttgaagcaattaaaatcttccttgataactgctgtttctttctactcttgtttctggcaatttagtgggttccttctctagtggtcttaaatctcattccactggtggcaagatggggcctagccttcttttcacatgtctaatcttttcctttctcatggtgccctccatggaagtcacagtcaacactgaataaatgactagaatgacacgtgtgcgtgcgcacgcgtgtgcgtgtgtgtgttcatctgtctgcatgtggatcaatttcttttagaaaataatttattgtatgatttattttggagttatattctgattacagtgctccctctcccaaatagcattgattttttcccccctctaaaatgtataatctggtctcaggttggattctttggtacatttctctcttctggatgccatgcagcttaattaaaaccttgctt

SEQ ID NO: 448186 - DNA, 6388 bp, Homo sapiens
ggagcagatccatttccgggttggcaaaaggggcggtggcggcggcggcggcggcggcggcggcggcggcggcgacggcgagaaagagcttgccggggggcgagcaggacaggacgaagccggagtgtaggcggcagaggattcgctcccagagcagctgcggccaggtatatgaatgacctaaaggtacaaataaagacggagagagaacagtgccaactgggagcagggcaagaatgccaattcctcctcccccgccacccccacctggtcctcctccacctcccacatttcatcaggcaaacacagagcagcccaagctgagtagagatgagcagcggggtcgaggcgccctcttacaggacatttgcaaagggaccaagctgaagaaggtgaccaacattaatgatcggagtgctcccatcctcgagaagccgaaaggaagcagtggtggctatggctctggaggagctgccctgcagcccaagggaggtctcttccaaggaggagtgctgaagcttcgacctgtgggagccaaggatggttcagagaacctagctggtaagccagccctgcaaatccccagttctcgagctgctgccccaaggcctccagtatctgccgccagcgggcgtcctcaggatgatacagacagcagccgggcctcactcccagaactgccccggatgcagagaccctctttaccggacctctctcggcctaataccaccagcagtacgggcatgaagcacagctcctctgcccctcccccaccacccccagggcggcgtgccaacgcaccccccacacctctgcctatgcacagcagcaaagcccccgcctacaacagagagaaacccttgccaccgacgcctggacaaaggcttcaccctggtcgagagggacctcctgctccacccccagtcaaaccacctccttcccctgtgaatatcagaacaggaccaagtggccagtctctggctcctcctcctccgccttaccgccagcctcctggggtccccaatggaccctctagccccactaatgagtcagcccctgagctgccacagagacacaattctttgcataggaagacaccagggcctgtcagaggcctagcacctcctccacccacctcggcctccccatctttactgagtaataggccacctcccccagcccgagaccctcccagtcggggaggccaccccctcctcctccaccgcccctgaggaatggccacagagattctatcaccactgtccggtctttcttggatgattttgagtcaaagtattccttccatccagtagaagactttcctgctccagaagaatataaacactttcagaggatatatcccagcaaaacaaaccgagctgcccgtggagccccacctctgccacccattctcaggtgaagcctggcttggtcccgttcctcaggaaaaggatggaccttctcttcttctcagatggtcccttccattcccctgaaacctgcatgagagctcctaacatgtttctccaatgcaatcaagccctagactccaaatgtcctcccagctcacctccatctatgcatctcatctctggatttggtgatcagactctatattgacagtaggatctcaaaccctgcatccatccttcctccagcaagccctgctagccacatgaggaacaagtttccgtgtcttctgccttcctcttggggaaaggtgccttgttgtgatgaattaactcactgttagggcagggtggagaatggtactccttccttctcctgtccactgtgggggaagcttggcaggtatattatatttcatcatttaggaggctggcatgaccaggacttatgggtgggaggggagcatttttagtgaagcaagaaaggagtttgccaagaagtgatctgttttaaaggtcatatttggagaaagggcaaggaattgggtctgctttatttttgggggtattttgtttttgttctcacctgctgcccccccaccccaccaccccagggataaattggatataaacactaaatactaatcagttgaacttaacatttaataaaaagaaagggtgaaataaactgaagaccattttagaactagtcagttctctgcagcaaagggaacaggagccatttgaaccctctgggacccctcaccccactgcttcagggtgctaggctgagggatgtttttcctcccccttaccgcccatgcccttgaaagaaaagtcactttttgtggagggcatcattcattcctgattcacaaaccccaaaaacctctggtgggagataggaagatagggcgtgggcctgggccttaacctcaatcttgtgtctgcctcagtcttttctgactggccctgaagttgtcagtggctctttctgtccttcagcccctggaaggtgctccaggataacaaagaagggcaggttgaagcccctcatggaaggagctggctttgtggggctgcaaaggacttttaagtcctgcctgtactgaagttcacagcccacctgactgagcagactcttcctgttcctttctctaccacccttgccttcccaggactgcacggtttaacacagcagagtacagaagggtgaagaagtgagcagaggcttatgaagatattcagatactcttctatgccaggaagcacaaagactttgttgagatttgcctcagttcagtagatcttccttggcagccagccataggttgtttctttgtcttccgggtcctaaagagcacagagaaaatggaggtccccagtctaggtaggaagctgattggatgaggacttctttttttccgacagcaggatggggctcttgggctccacacaccagatgctttggttttctacaactgttgctatgtgtagagggtgctcagagcgtggcatgagagcaaggagaccatggctactctttgaaatggatggggaaaattagcttaaaaatttaatcacgagattgcgccactgcactccagcctgggcgacagagccagactccgtctcaaaaaaaaaaaaaaaaaaaaatttaatcacacacatcacaggcttaaactgtcttagagacctttccagttgattggatcacaggctagggatctgtgcatggtgccaggtgaaacccaagtctccccagtgctaggtgagggagggctcaacgggggtaatgtgtatggggtctgctgtcctttgccatcccctggaccatattaactctgggacagaccatgattaggtctgtcaccaaacttttcctaatcattttttatgtatcattcttctttctaatctgttagcagttatctcccagaagtatccctagcatcctgaagcaaacagaactgccgggcgctgtggcttatgcctgtaatctcagcaatttgggaggccgaggcgggcggatcacctgaggtcagaagttcgagaccagcctgtccaacatggtgaaaccccgtctccactaaaaacacaaaaattatctgggcgtggtggcatgtgcctgtagtcccagctactggggaggctgaggcaggagaatcgcttgaatccaggaggtggaggttgcagtgagtggagatggcgccactgcgctccagcccgggtgacagagtgaaactccatctcagaaaacaaacaaaccaaacaactgagagagggcatgctagtggagggaaaaggagagagtacaagagttgatactgcatcagagttccagggcagatactgacaagtgactgaactttgactgtgaagtcttcccatttatttttgaaatgggagtcgatgccttttgtacgttatcaaagtgtttttttttttttcctcctttactcagacatagagcatcaaaatatcacgagtaaagccaaaccccagcttttcactggggctgatatcttcctccccatggcccactgccccctcatattccccagcacttggactgtgtcacatgggtattgattgtatacttgttgtcttggcctcatgcaaaaaggcctgggtctagatctagtcagatgagttttttttagagcatgttgatgatacaacacctgtttaaatgtctgccttatatgttatttggtcccactgttaataatagatttattactatgtatatttactattgaagatgggaatgtgatctgcatagttatcagtctattttgtatgttgtaaaaagcttctaatttaggtttaaggtgggctggctacaagagcactaaaactcctcaccttttaaactgctctttttatctgcttgtgggaatgtcgtctctttcgtggaagattgggtggtctcatgttgaggctgttgcccagtcccattaactcccttgtccccccacagaaggaagagacattgcccagctaagcatcaggaagctgtgttaaaagcccttctatgggtttggttttgtgatgtttttccctaatgggaaaaacgttatagttgtttcttactgccctgtctgggaagcagggcaaacctccaggtttttaaatgagctagatgcccctcttcctcttctctggtcactgaacctggaccaaagcactttgatattccaggtgtgattttctctgtcatggggatttgctccactgcagagccccatcattttcacagcgtaggccaacagagtgagaacctagggctaccctagctgatggatgtgaggctgctgtctacaggagctcatcccagccctgttaactggcagtggcaaggatactcgtcatcggccattgcactggggaactccctcaccccatggcttcccaacttgaaacccagatttacctccagggagaggtgagaaaaaaattgtaaatagacttgctaaagagcaactcagggttggggtgtgttttaattctcctgatcacttgaaataatctgtaggctgagtgcttatgggggtgggggagaagggtgactccagggtccttccattttgtgaagctctgggggtggagtgtgggcatctgaggccctatgatggcactacattgagctgtctgcccttccggaaacccaacctgcaatcaactgcaaatcaaattcttcacattccagctacagtctttctttccccattgaatctcagtccctggccatgtggtcaaggtggctttctgttaagctaccctaatttcgggaatgggaggggagagaggagggccattacaactctgccttcaagactcatctcttaaaaacaaaacgaaacaaaactacaaccaccatcaaaaccacacgcaaaaaaaaaaaaaaaaaaaaaaaaggataactttaaccgaaggaagggtttggttccattcaactccacattcattgtgcctttacttgcattagatttctgtgctttcttcctttccctctttgaagcaattaaaatcttccttgataactgctgtttctttctactcttgtttctggcaatttagtgggttccttctctagtggtcttaaatctcattccactggtggcaagatggggcctagccttcttttcacatgtctaatcttttcctttctcatggtgccctccatggaagtcacagtcaacactgaataaatgactagaatgacacgtgtgcgtgcgcacgcgtgtgcgtgtgtgtgttcatctgtctgcatgtggatcaatttcttttagaaaataatttattgtatgatttattttggagttatattctgattacagtgctccctctcccaaatagcattgattttttcccccctctaaaatgtataatctggtctcaggttggattctttggtacatttctctcttctggatgccatgcagcttaattaaaaccttgcttaaaaacaaaaagtgaaaattgtgtactcttgtctggaataccgcctcaggtggtggcacagagaggggagaaaacctttgcctcataatttgggtaagtgtagtggtttgattccaggtcccttgaaaaagtagatctactgaattgggcagactcatctatagctttctgagggtcttctctcctcctctccagctgtattttgaaaattacagttctagttggctgggcgcgatggctcatgtctgtaatcccagcactttgggaggccaaggcgggtggatcatttgaggtcaggagttcgagaccagcttggccaacatggtgaaaccccgtctctactgaaaatacaaaaattaaccggtgtcatggcgcatgcctgtggtcccagctactcgggaggccgaggcaggaaaatcacttgaacccaggaggcggaggttgcactgagctgagatcatgccactgcactaaaaaaaaaaaaaaaaaaaaaaaaaaaaaaaaaaaaaaaa

SEQ ID NO: 448187 - DNA, 4971 bp, Homo sapiens
atctggaagaatggtgatgctgttcaagtaataaggacaaaggggaaccaggcactgtgagcctctgtggggtgtgttactcttttagctcatgtgtttcaagtcattctaccccttgccgtctccacatccaaacctaactactttggattttaattgcagctcctccacccccaccacctgtgatccgaaatggtgccagggatgctccccctcccccaccaccataccgaatgcatgggtcagaacccccgagccgaggaaagcccccacctccaccctcaaggacgccagctgggccaccccctcctcctccaccgcccctgaggaatggccacagagattctatcaccactgtccggtctttcttggatgattttgagtcaaagtattccttccatccagtagaagactttcctgctccagaagaatataaacactttcagaggatatatcccagcaaaacaaaccgagctgcccgtggagccccacctctgccacccattctcaggtgaagcctggcttggtcccgttcctcaggaaaaggatggaccttctcttcttctcagatggtcccttccattcccctgaaacctgcatgagagctcctaacatgtttctccaatgcaatcaagccctagactccaaatgtcctcccagctcacctccatctatgcatctcatctctggatttggtgatcagactctatattgacagtaggatctcaaaccctgcatccatccttcctccagcaagccctgctagccacatgaggaacaagtttccgtgtcttctgccttcctcttggggaaaggtgccttgttgtgatgaattaactcactgttagggcagggtggagaatggtactccttccttctcctgtccactgtgggggaagcttggcaggtatattatatttcatcatttaggaggctggcatgaccaggacttatgggtgggaggggagcatttttagtgaagcaagaaaggagtttgccaagaagtgatctgttttaaaggtcatatttggagaaagggcaaggaattgggtctgctttatttttgggggtattttgtttttgttctcacctgctgcccccccaccccaccaccccagggataaattggatataaacactaaatactaatcagttgaacttaacatttaataaaaagaaagggtgaaataaactgaagaccattttagaactagtcagttctctgcagcaaagggaacaggagccatttgaaccctctgggacccctcaccccactgcttcagggtgctaggctgagggatgtttttcctcccccttaccgcccatgcccttgaaagaaaagtcactttttgtggagggcatcattcattcctgattcacaaaccccaaaaacctctggtgggagataggaagatagggcgtgggcctgggccttaacctcaatcttgtgtctgcctcagtcttttctgactggccctgaagttgtcagtggctctttctgtccttcagcccctggaaggtgctccaggataacaaagaagggcaggttgaagcccctcatggaaggagctggctttgtggggctgcaaaggacttttaagtcctgcctgtactgaagttcacagcccacctgactgagcagactcttcctgttcctttctctaccacccttgccttcccaggactgcacggtttaacacagcagagtacagaagggtgaagaagtgagcagaggcttatgaagatattcagatactcttctatgccaggaagcacaaagactttgttgagatttgcctcagttcagtagatcttccttggcagccagccataggttgtttctttgtcttccgggtcctaaagagcacagagaaaatggaggtccccagtctaggtaggaagctgattggatgaggacttctttttttccgacagcaggatggggctcttgggctccacacaccagatgctttggttttctacaactgttgctatgtgtagagggtgctcagagcgtggcatgagagcaaggagaccatggctactctttgaaatggatggggaaaattagcttaaaaatttaatcacgagattgcgccactgcactccagcctgggcgacagagccagactccgtctcaaaaaaaaaaaaaaaaaaaaatttaatcacacacatcacaggcttaaactgtcttagagacctttccagttgattggatcacaggctagggatctgtgcatggtgccaggtgaaacccaagtctccccagtgctaggtgagggagggctcaacgggggtaatgtgtatggggtctgctgtcctttgccatcccctggaccatattaactctgggacagaccatgattaggtctgtcaccaaacttttcctaatcattttttatgtatcattcttctttctaatctgttagcagttatctcccagaagtatccctagcatcctgaagcaaacagaactgccgggcgctgtggcttatgcctgtaatctcagcaatttgggaggccgaggcgggcggatcacctgaggtcagaagttcgagaccagcctgtccaacatggtgaaaccccgtctccactaaaaacacaaaaattatctgggcgtggtggcatgtgcctgtagtcccagctactggggaggctgaggcaggagaatcgcttgaatccaggaggtggaggttgcagtgagtggagatggcgccactgcgctccagcccgggtgacagagtgaaactccatctcagaaaacaaacaaaccaaacaactgagagagggcatgctagtggagggaaaaggagagagtacaagagttgatactgcatcagagttccagggcagatactgacaagtgactgaactttgactgtgaagtcttcccatttatttttgaaatgggagtcgatgccttttgtacgttatcaaagtgtttttttttttttcctcctttactcagacatagagcatcaaaatatcacgagtaaagccaaaccccagcttttcactggggctgatatcttcctccccatggcccactgccccctcatattccccagcacttggactgtgtcacatgggtattgattgtatacttgttgtcttggcctcatgcaaaaaggcctgggtctagatctagtcagatgagttttttttagagcatgttgatgatacaacacctgtttaaatgtctgccttatatgttatttggtcccactgttaataatagatttattactatgtatatttactattgaagatgggaatgtgatctgcatagttatcagtctattttgtatgttgtaaaaagcttctaatttaggtttaaggtgggctggctacaagagcactaaaactcctcaccttttaaactgctctttttatctgcttgtgggaatgtcgtctctttcgtggaagattgggtggtctcatgttgaggctgttgcccagtcccattaactcccttgtccccccacagaaggaagagacattgcccagctaagcatcaggaagctgtgttaaaagcccttctatgggtttggttttgtgatgtttttccctaatgggaaaaacgttatagttgtttcttactgccctgtctgggaagcagggcaaacctccaggtttttaaatgagctagatgcccctcttcctcttctctggtcactgaacctggaccaaagcactttgatattccaggtgtgattttctctgtcatggggatttgctccactgcagagccccatcattttcacagcgtaggccaacagagtgagaacctagggctaccctagctgatggatgtgaggctgctgtctacaggagctcatcccagccctgttaactggcagtggcaaggatactcgtcatcggccattgcactggggaactccctcaccccatggcttcccaacttgaaacccagatttacctccagggagaggtgagaaaaaaattgtaaatagacttgctaaagagcaactcagggttggggtgtgttttaattctcctgatcacttgaaataatctgtaggctgagtgcttatgggggtgggggagaagggtgactccagggtccttccattttgtgaagctctgggggtggagtgtgggcatctgaggccctatgatggcactacattgagctgtctgcccttccggaaacccaacctgcaatcaactgcaaatcaaattcttcacattccagctacagtctttctttccccattgaatctcagtccctggccatgtggtcaaggtggctttctgttaagctaccctaatttcgggaatgggaggggagagaggagggccattacaactctgccttcaagactcatctcttaaaaacaaaacgaaacaaaactacaaccaccatcaaaaccacacgcaaaaaaaaaaaaaaaaaaaaaaaaggataactttaaccgaaggaagggtttggttccattcaactccacattcattgtgcctttacttgcattagatttctgtgctttcttcctttccctctttgaagcaattaaaatcttccttgataactgctgtttctttctactcttgtttctggcaatttagtgggttccttctctagtggtcttaaatctcattccactggtggcaagatggggcctagccttcttttcacatgtctaatcttttcctttctcatggtgccctccatggaagtcacagtcaacactgaataaatgactagaatgacacgtgtgcgtgcgcacgcgtgtgcgtgtgtgtgttcatctgtctgcatgtggatcaatttcttttagaaaataatttattgtatgatttattttggagttatattctgattacagtgctccctctcccaaatagcattgattttttcccccctctaaaatgtataatctggtctcaggttggattctttggtacatttctctcttctggatgccatgcagcttaattaaaaccttgctt

SEQ ID NO: 448188 - DNA, 4961 bp, Homo sapiens
ggagcagatccatttccgggttggcaaaaggggcggtggcggcggcggcggcggcggcggcggcggcggcggcgacggcgagaaagagcttgccggggggcgagcaggacaggacgaagccggagtgtaggcggcagaggattcgctcccagagcagctgcggccaggtatatgaatgacctaaaggtacaaataaagacggagagagaacagtgccaactgggagcagggcaagaatgccaattcctcctcccccgccacccccacctggtcctcctccacctcccacatttcatcaggcaaacacagagcagcccaagctgagtagagatgagcagcggggtcgaggcgccctcttacaggacatttgcaaagggaccaagctgaagaaggtgaccaacattaatgatcggagtgctcccatcctcgagaagccgaaaggaagcagtggtggctatggctctggaggagctgccctgcagcccaagggaggtctcttccaaggaggagtgctgaagcttcgacctgtgggagccaaggatggttcagagaacctagctggtaagccagccctgcaaatccccagttctcgagctgctgccccaaggcctccagtatctgccgccagcgggcgtcctcaggatgatacagacagcagccgggcctcactcccagaactgccccggatgcagagaccctctttaccggacctctctcggcctaataccaccagcagtacgggcatgaagcacagctcctctgcccctcccccaccacccccagggcggcgtgccaacgcaccccccacacctctgcctatgcacagcagcaaagcccccgcctacaacagagagaaacccttgccaccgacgcctggacaaaggcttcaccctggtcgagagggacctcctgctccacccccagtcaaaccacctccttcccctgtgaatatcagaacaggaccaagtggccagtctctggctcctcctcctccgccttaccgccagcctcctggggtccccaatggaccctctagccccactaatgagtcagcccctgagctgccacagagacacaattctttgcataggaagacaccagggcctgtcagaggcctagcacctcctccacccacctcggcctccccatctttactgagtaataggccacctcccccagcccgagaccctcccagtcggggaggccaccccctcctcctccaccgcccctgaggaatggccacagagattctatcaccactgtccggtctttcttggatgattttgagtcaaagtattccttccatccagtagaagactttcctgctccagaagaatataaacactttcagaggatatatcccagcaaaacaaaccgagctgcccgtggagccccacctctgccacccattctcaggtgaagcctggcttggtcccgttcctcaggaaaaggatggaccttctcttcttctcagatggtcccttccattcccctgaaacctgcatgagagctcctaacatgtttctccaatgcaatcaagccctagactccaaatgtcctcccagctcacctccatctatgcatctcatctctggatttggtgatcagactctatattgacagtaggatctcaaaccctgcatccatccttcctccagcaagccctgctagccacatgaggaacaagtttccgtgtcttctgccttcctcttggggaaaggtgccttgttgtgatgaattaactcactgttagggcagggtggagaatggtactccttccttctcctgtccactgtgggggaagcttggcaggtatattatatttcatcatttaggaggctggcatgaccaggacttatgggtgggaggggagcatttttagtgaagcaagaaaggagtttgccaagaagtgatctgttttaaaggtcatatttggagaaagggcaaggaattgggtctgctttatttttgggggtattttgtttttgttctcacctgctgcccccccaccccaccaccccagggataaattggatataaacactaaatactaatcagttgaacttaacatttaataaaaagaaagggtgaaataaactgaagaccattttagaactagtcagttctctgcagcaaagggaacaggagccatttgaaccctctgggacccctcaccccactgcttcagggtgctaggctgagggatgtttttcctcccccttaccgcccatgcccttgaaagaaaagtcactttttgtggagggcatcattcattcctgattcacaaaccccaaaaacctctggtgggagataggaagatagggcgtgggcctgggccttaacctcaatcttgtgtctgcctcagtcttttctgactggccctgaagttgtcagtggctctttctgtccttcagcccctggaaggtgctccaggataacaaagaagggcaggttgaagcccctcatggaaggagctggctttgtggggctgcaaaggacttttaagtcctgcctgtactgaagttcacagcccacctgactgagcagactcttcctgttcctttctctaccacccttgccttcccaggactgcacggtttaacacagcagagtacagaagggtgaagaagtgagcagaggcttatgaagatattcagatactcttctatgccaggaagcacaaagactttgttgagatttgcctcagttcagtagatcttccttggcagccagccataggttgtttctttgtcttccgggtcctaaagagcacagagaaaatggaggtccccagtctaggtaggaagctgattggatgaggacttctttttttccgacagcaggatggggctcttgggctccacacaccagatgctttggttttctacaactgttgctatgtgtagagggtgctcagagcgtggcatgagagcaaggagaccatggctactctttgaaatggatggggaaaattagcttaaaaatttaatcacgagattgcgccactgcactccagcctgggcgacagagccagactccgtctcaaaaaaaaaaaaaaaaaaaaatttaatcacacacatcacaggcttaaactgtcttagagacctttccagttgattggatcacaggctagggatctgtgcatggtgccaggtgaaacccaagtctccccagtgctaggtgagggagggctcaacgggggtaatgtgtatggggtctgctgtcctttgccatcccctggaccatattaactctgggacagaccatgattaggtctgtcaccaaacttttcctaatcattttttatgtatcattcttctttctaatctgttagcagttatctcccagaagtatccctagcatcctgaagcaaacagaactgccgggcgctgtggcttatgcctgtaatctcagcaatttgggaggccgaggcgggcggatcacctgaggtcagaagttcgagaccagcctgtccaacatggtgaaaccccgtctccactaaaaacacaaaaattatctgggcgtggtggcatgtgcctgtagtcccagctactggggaggctgaggcaggagaatcgcttgaatccaggaggtggaggttgcagtgagtggagatggcgccactgcgctccagcccgggtgacagagtgaaactccatctcagaaaacaaacaaaccaaacaactgagagagggcatgctagtggagggaaaaggagagagtacaagagttgatactgcatcagagttccagggcagatactgacaagtgactgaactttgactgtgaagtcttcccatttatttttgaaatgggagtcgatgccttttgtacgttatcaaagtgtttttttttttttcctcctttactcagacatagagcatcaaaatatcacgagtaaagccaaaccccagcttttcactggggctgatatcttcctccccatggcccactgccccctcatattccccagcacttggactgtgtcacatgggtattgattgtatacttgttgtcttggcctcatgcaaaaaggcctgggtctagatctagtcagatgagttttttttagagcatgttgatgatacaacacctgtttaaatgtctgccttatatgttatttggtcccactgttaataatagatttattactatgtatatttactattgaagatgggaatgtgatctgcatagttatcagtctattttgtatgttgtaaaaagcttctaatttaggtttaaggtgggctggctacaagagcactaaaactcctcaccttttaaactgctctttttatctgcttgtgggaatgtcgtctctttcgtggaagattgggtggtctcatgttgaggctgttgcccagtcccattaactcccttgtccccccacagaaggaagagacattgcccagctaagcatcaggaagctgtgttaaaagcccttctatgggtttggttttgtgatgtttttccctaatgggaaaaacgttatagttgtttcttactgccctgtctgggaagcagggcaaacctccaggtttttaaatgagctagatgcccctcttcctcttctctggtcactgaacctggaccaaagcactttgatattccaggtgtgattttctctgtcatggggatttgctccactgcagagccccatcattttcacagcgtaggccaacagagtgagaacctagggctaccctagctgatggatgtgaggctgctgtctacaggagctcatcccagccctgttaactggcagtggcaaggatactcgtcatcggccattgcactggggaactccctcaccccatggcttcccaacttgaaacccagatttacctcccaaatagcattgattttttcccccctctaaaatgtataatctggtctcaggttggattctttggtacatttctctcttctggatgccatgcagcttaattaaaaccttgctt

SEQ ID NO: 448189 - DNA, 2291 bp, Homo sapiens
  misc_feature (51)..(51): n is a, c, g, or t
agagggcgtggggaatctggggaggagtggtcgaatattggtatatgaatnacctaaaggtacaaataaagacggagagaaaacaaacaaaccaaacaactgagagagggcatgctagtggagggaaaaggagagagtacaagagttgatactgcatcagagttccagggcagatactgacaagtgactgaactttgactgtgaagtcttcccatttatttttgaaatgggagtcgatgccttttgtacgttatcaaagtgtttttttttttttcctcctttactcagacatagagcatcaaaatatcacgagtaaagccaaaccccagcttttcactggggctgatatcttcctccccatggcccactgccccctcatattccccagcacttggactgtgtcacatgggtattgattgtatacttgttgtcttggcctcatgcaaaaaggcctgggtctagatctagtcagatgagttttttttagagcatgttgatgatacaacacctgtttaaatgtctgccttatatgttatttggtcccactgttaataatagatttattactatgtatatttactattgaagatgggaatgtgatctgcatagttatcagtctattttgtatgttgtaaaaagcttctaatttaggtttaaggtgggctggctacaagagcactaaaactcctcaccttttaaactgctctttttatctgcttgtgggaatgtcgtctctttcgtggaagattgggtggtctcatgttgaggctgttgcccagtcccattaactcccttgtccccccacagaaggaagagacattgcccagctaagcatcaggaagctgtgttaaaagcccttctatgggtttggttttgtgatgtttttccctaatgggaaaaacgttatagttgtttcttactgccctgtctgggaagcagggcaaacctccaggtttttaaatgagctagatgcccctcttcctcttctctggtcactgaacctggaccaaagcactttgatattccaggtgtgattttctctgtcatggggatttgctccactgcagagccccatcattttcacagcgtaggccaacagagtgagaacctagggctaccctagctgatggatgtgaggctgctgtctacaggagctcatcccagccctgttaactggcagtggcaaggatactcgtcatcggccattgcactggggaactccctcaccccatggcttcccaacttgaaacccagatttacctccagggagaggtgagaaaaaaattgtaaatagacttgctaaagagcaactcagggttggggtgtgttttaattctcctgatcacttgaaataatctgtaggctgagtgcttatgggggtgggggagaagggtgactccagggtccttccattttgtgaagctctgggggtggagtgtgggcatctgaggccctatgatggcactacattgagctgtctgcccttccggaaacccaacctgcaatcaactgcaaatcaaattcttcacattccagctacagtctttctttccccattgaatctcagtccctggccatgtggtcaaggtggctttctgttaagctaccctaatttcgggaatgggaggggagagaggagggccattacaactctgccttcaagactcatctcttaaaaacaaaacgaaacaaaactacaaccaccatcaaaaccacacgcaaaaaaaaaaaaaaaaaaaaaaaaggataactttaaccgaaggaagggtttggttccattcaactccacattcattgtgcctttacttgcattagatttctgtgctttcttcctttccctctttgaagcaattaaaatcttccttgataactgctgtttctttctactcttgtttctggcaatttagtgggttccttctctagtggtcttaaatctcattccactggtggcaagatggggcctagccttcttttcacatgtctaatcttttcctttctcatggtgccctccatggaagtcacagtcaacactgaataaatgactagaatgacacgtgtgcgtgcgcacgcgtgtgcgtgtgtgtgttcatctgtctgcatgtggatcaatttcttttagaaaataatttattgtatgatttattttggagttatattctgattacagtgctccctctcccaaatagcattgattttttcccccctctaaaatgtataatctggtctcaggttggattctttggtacatttctctcttctggatgccatgcagcttaattaaaaccttgctt

SEQ ID NO: 448190 - DNA, 714 bp, Homo sapiens
ggagcagatccatttccgggttggcaaaaggggcggtggcggcggcggcggcggcggcggcggcggcggcggcgacggcgagaaagagcttgccggggggcgagcaggacaggacgaagccggagtgtaggcggcagaggattcgctcccagagcagctgcggccaggtatatgaatgacctaaaggtacaaataaagacggagagagaacagtgccaactgggagcagggcaagaatgccaattcctcctcccccgccacccccacctggtcctcctccacctcccacatttcatcaggcaaacacagagcagcccaagctgagtagagatgagcagcggggtcgaggcgccctcttacaggacatttgcaaagggaccaagctgaagaaggtgaccaacattaatgatcggagtgctcccatcctcgagaagccgaaaggaagcagtggtggctatggctctggaggagctgccctgcagcccaagggaggtctcttccaaggaggagtgctgaagcttcgacctgtgggagccaaggatggttcagagaacctagctggtaagccagccctgcaaatccccagttctcgagctgctgccccaaggcctccagtatctgccgccagcgggcgtcctcaggatgatacagacagcagccgggcctcactcccagaactgccccggatcacagcgggatcctctagaacactac

SEQ ID NO: 448191 - DNA, 188 bp, Homo sapiens
tggtttggtggggcagtaggtcctcacagtacctcagaatgcctgagagattagtaagtggggagggtcgaagcgatcagaggcctgtgggagcacaagcaaggatgataggaattaatgttctattcttttcgcagatgattttgagtcaaagtattccttccatccagtagaagactttcctgctc

SEQ ID NO: 448192 - DNA, 218 bp, Homo sapiens
acagagcagcccaagctgagtagagatgagcagcggggtcgaggcgccctcttacaggacatttgcaaagggaccaagctgaagaaggtgaccaacattaatgatcggagtgctcccatcctcgagagtgagtccgagcttcatttcctagtgaactggcaggatcccaggagtgacttggagacttggctgggttcttatttttattgggccttgag

SEQ ID NO: 448193 - DNA, 5822 bp, Homo sapiens
ggagcagatccatttccgggttggcaaaaggggcggtggcggcggcggcggcggcggcggcggcggcggcggcgacggcgagaaagagcttgccggggggcgagcaggacaggacgaagccggagtgtaggcggcagaggattcgctcccagagcagctgcggccaggtatatgaatgacctaaaggtacaaataaagacggagagagaacagtgccaactgggagcagggcaagaatgccaattcctcctcccccgccacccccacctggtcctcctccacctcccacatttcatcaggcaaacacagagcagcccaagctgagtagagatgagcagcggggtcgaggcgccctcttacaggacatttgcaaagggaccaagctgaagaaggtgaccaacattaatgatcggagtgctcccatcctcgagaagccgaaaggaagcagtggtggctatggctctggaggagctgccctgcagcccaagggaggtctcttccaaggaggagtgctgaagcttcgacctgtgggagccaaggatggttcagagaacctagctggtaagccagccctgcaaatccccagttctcgagctgctgccccaaggcctccagtatctgccgccagcgggcgtcctcaggatgatacagacagcagccgggcctcactcccagaactgccccggatgcagagaccctctttaccggacctctctcggcctaataccaccagcagtacgggcatgaagcacagctcctctgcccctcccccaccacccccagggcggcgtgccaacgcaccccccacacctctgcctatgcacagcagcaaagcccccgcctacaacagagagaaacccttgccaccgacgcctggacaaaggcttcaccctggtcgagagggacctcctgctccacccccagtcaaaccacctccttcccctgtgaatatcagaacaggaccaagtggccagtctctggctcctcctcctccgccttaccgccagcctcctggggtccccaatggaccctctagccccactaatgagtcagcccctgagctgccacagagacacaattctttgcataggaagacaccagggcctgtcagaggcctagcacctcctccacccacctcggcctccccatctttactgagtaataggccacctcccccagcccgagaccctcccagtcggggaggccaccccctcctcctccaccgcccctgaggaatggccacagagattctatcaccactgtccggtctttcttggatgattttgagtcaaagtattccttccatccagtagaagactttcctgctccagaagaatataaacactttcagaggatatatcccagcaaaacaaaccgagctgcccgtggagccccacctctgccacccattctcaggtgaagcctggcttggtcccgttcctcaggaaaaggatggaccttctcttcttctcagatggtcccttccattcccctgaaacctgcatgagagctcctaacatgtttctccaatgcaatcaagccctagactccaaatgtcctcccagctcacctccatctatgcatctcatctctggatttggtgatcagactctatattgacagtaggatctcaaaccctgcatccatccttcctccagcaagccctgctagccacatgaggaacaagtttccgtgtcttctgccttcctcttggggaaaggtgccttgttgtgatgaattaactcactgttagggcagggtggagaatggtactccttccttctcctgtccactgtgggggaagcttggcaggtatattatatttcatcatttaggaggctggcatgaccaggacttatgggtgggaggggagcatttttagtgaagcaagaaaggagtttgccaagaagtgatctgttttaaaggtcatatttggagaaagggcaaggaattgggtctgctttatttttgggggtattttgtttttgttctcacctgctgcccccccaccccaccaccccagggataaattggatataaacactaaatactaatcagttgaacttaacatttaataaaaagaaagggtgaaataaactgaagaccattttagaactagtcagttctctgcagcaaagggaacaggagccatttgaaccctctgggacccctcaccccactgcttcagggtgctaggctgagggatgtttttcctcccccttaccgcccatgcccttgaaagaaaagtcactttttgtggagggcatcattcattcctgattcacaaaccccaaaaacctctggtgggagataggaagatagggcgtgggcctgggccttaacctcaatcttgtgtctgcctcagtcttttctgactggccctgaagttgtcagtggctctttctgtccttcagcccctggaaggtgctccaggataacaaagaagggcaggttgaagcccctcatggaaggagctggctttgtggggctgcaaaggacttttaagtcctgcctgtactgaagttcacagcccacctgactgagcagactcttcctgttcctttctctaccacccttgccttcccaggactgcacggtttaacacagcagagtacagaagggtgaagaagtgagcagaggcttatgaagatattcagatactcttctatgccaggaagcacaaagactttgttgagatttgcctcagttcagtagatcttccttggcagccagccataggttgtttctttgtcttccgggtcctaaagagcacagagaaaatggaggtccccagtctaggtaggaagctgattggatgaggacttctttttttccgacagcaggatggggctcttgggctccacacaccagatgctttggttttctacaactgttgctatgtgtagagggtgctcagagcgtggcatgagagcaaggagaccatggctactctttgaaatggatggggaaaattagcttaaaaatttaatcacgagattgcgccactgcactccagcctgggcgacagagccagactccgtctcaaaaaaaaaaaaaaaaaaaaatttaatcacacacatcacaggcttaaactgtcttagagacctttccagttgattggatcacaggctagggatctgtgcatggtgccaggtgaaacccaagtctccccagtgctaggtgagggagggctcaacgggggtaatgtgtatggggtctgctgtcctttgccatcccctggaccatattaactctgggacagaccatgattaggtctgtcaccaaacttttcctaatcattttttatgtatcattcttctttctaatctgttagcagttatctcccagaagtatccctagcatcctgaagcaaacagaactgccgggcgctgtggcttatgcctgtaatctcagcaatttgggaggccgaggcgggcggatcacctgaggtcagaagttcgagaccagcctgtccaacatggtgaaaccccgtctccactaaaaacacaaaaattatctgggcgtggtggcatgtgcctgtagtcccagctactggggaggctgaggcaggagaatcgcttgaatccaggaggtggaggttgcagtgagtggagatggcgccactgcgctccagcccgggtgacagagtgaaactccatctcagaaaacaaacaaaccaaacaactgagagagggcatgctagtggagggaaaaggagagagtacaagagttgatactgcatcagagttccagggcagatactgacaagtgactgaactttgactgtgaagtcttcccatttatttttgaaatgggagtcgatgccttttgtacgttatcaaagtgtttttttttttttcctcctttactcagacatagagcatcaaaatatcacgagtaaagccaaaccccagcttttcactggggctgatatcttcctccccatggcccactgccccctcatattccccagcacttggactgtgtcacatgggtattgattgtatacttgttgtcttggcctcatgcaatacaacacctgtttaaatgtctgccttatatgttatttggtcccactgttaataatagatttattactatgtatatttactattgaagatgggaatgtgatctgcatagttatcagtctattttgtatgttgtaaaaagcttctaatttaggtttaaggtgggctggctacaagagcactaaaactcctcaccttttaaactgctctttttatctgcttgtgggaatgtcgtctctttcgtggaagattgggtggtctcatgttgaggctgttgcccagtcccattaactcccttgtccccccacagaaggaagagacattgcccagctaagcatcaggaagctgtgttaaaagcccttctatgggtttggttttgtgatgtttttccctaatgggaaaaacgttatagttgtttcttactgccctgtctgggaagcagggcaaacctccaggtttttaaatgagctagatgcccctcttcctcttctctggtcactgaacctggaccaaagcactttgatattccaggtgtgattttctctgtcatggggatttgctccactgcagagccccatcattttcacagcgtaggccaacagagtgagaacctagggctaccctagctgatggatgtgaggctgctgtctacaggagctcatcccagccctgttaactggcagtggcaaggatactcgtcatcggccattgcactggggaactccctcaccccatggcttcccaacttgaaacccagatttacctccagggagaggtgagaaaaaaattgtaaatagacttgctaaagagcaactcagggttggggtgtgttttaattctcctgatcacttgaaataatctgtaggctgagtgcttatgggggtgggggagaagggtgactccagggtccttccattttgtgaagctctgggggtggagtgtgggcatctgaggccctatgatggcactacattgagctgtctgcccttccggaaacccaacctgcaatcaactgcaaatcaaattcttcacattccagctacagtctttctttccccattgaatctcagtccctggccatgtggtcaaggtggctttctgttaagctaccctaatttcgggaatgggaggggagagaggagggccattacaactctgccttcaagactcatctcttaaaaacaaaacgaaacaaaactacaaccaccatcaaaaccacacgcaaaaaaaaaaaaaaaaaaaaaaaaggataactttaaccgaaggaagggtttggttccattcaactccacattcattgtgcctttacttgcattagatttctgtgctttcttcctttccctctttgaagcaattaaaatcttccttgataactgctgtttctttctactcttgtttctggcaatttagtgggttccttctctagtggtcttaaatctcattccactggtggcaagatggggcctagccttcttttcacatgtctaatcttttcctttctcatggtgccctccatggaagtcacagtcaacactgaataaatgactagaatgacacgtgtgcgtgcgcacgcgtgtgcgtgtgtgtgttcatctgtctgcatgtggatcaatttcttttagaaaataatttattgtatgatttattttggagttatattctgattacagtgctccctctcccaaatagcattgattttttcccccctctaaaatgtataatctggtctcaggttggattctttggtacatttctctcttctggatgccatgcagcttaattaaaaccttgctt

SEQ ID NO: 448194 - DNA, 2601 bp, Homo sapiens
ggagcagatccatttccgggttggcaaaaggggcggtggcggcggcggcggcggcggcggcggcggcggcggcgacggcgagaaagagcttgccggggggcgagcaggacaggacgaagccggagtgtaggcggcagaggattcgctcccagagcagctgcggccaggtatatgaatgacctaaaggtacaaataaagacggagagagaacagtgccaactgggagcagggcaagaatgccaattcctcctcccccgccacccccacctggtcctcctccacctcccacatttcatcaggcacattctcgccctgttgcccaggttgcagtgagtggagatggcgccactgcgctccagcccgggtgacagagtgaaactccatctcagaaaacaaacaaaccaaacaactgagagagggcatgctagtggagggaaaaggagagagtacaagagttgatactgcatcagagttccagggcagatactgacaagtgactgaactttgactgtgaagtcttcccatttatttttgaaatgggagtcgatgccttttgtacgttatcaaagtgtttttttttttttcctcctttactcagacatagagcatcaaaatatcacgagtaaagccaaaccccagcttttcactggggctgatatcttcctccccatggcccactgccccctcatattccccagcacttggactgtgtcacatgggtattgattgtatacttgttgtcttggcctcatgcaaaaaggcctgggtctagatctagtcagatgagttttttttagagcatgttgatgatacaacacctgtttaaatgtctgccttatatgttatttggtcccactgttaataatagatttattactatgtatatttactattgaagatgggaatgtgatctgcatagttatcagtctattttgtatgttgtaaaaagcttctaatttaggtttaaggtgggctggctacaagagcactaaaactcctcaccttttaaactgctctttttatctgcttgtgggaatgtcgtctctttcgtggaagattgggtggtctcatgttgaggctgttgcccagtcccattaactcccttgtccccccacagaaggaagagacattgcccagctaagcatcaggaagctgtgttaaaagcccttctatgggtttggttttgtgatgtttttccctaatgggaaaaacgttatagttgtttcttactgccctgtctgggaagcagggcaaacctccaggtttttaaatgagctagatgcccctcttcctcttctctggtcactgaacctggaccaaagcactttgatattccaggtgtgattttctctgtcatggggatttgctccactgcagagccccatcattttcacagcgtaggccaacagagtgagaacctagggctaccctagctgatggatgtgaggctgctgtctacaggagctcatcccagccctgttaactggcagtggcaaggatactcgtcatcggccattgcactggggaactccctcaccccatggcttcccaacttgaaacccagatttacctccagggagaggtgagaaaaaaattgtaaatagacttgctaaagagcaactcagggttggggtgtgttttaattctcctgatcacttgaaataatctgtaggctgagtgcttatgggggtgggggagaagggtgactccagggtccttccattttgtgaagctctgggggtggagtgtgggcatctgaggccctatgatggcactacattgagctgtctgcccttccggaaacccaacctgcaatcaactgcaaatcaaattcttcacattccagctacagtctttctttccccattgaatctcagtccctggccatgtggtcaaggtggctttctgttaagctaccctaatttcgggaatgggaggggagagaggagggccattacaactctgccttcaagactcatctcttaaaaacaaaacgaaacaaaactacaaccaccatcaaaaccacacgcaaaaaaaaaaaaaaaaaaaaaaaaggataactttaaccgaaggaagggtttggttccattcaactccacattcattgtgcctttacttgcattagatttctgtgctttcttcctttccctctttgaagcaattaaaatcttccttgataactgctgtttctttctactcttgtttctggcaatttagtgggttccttctctagtggtcttaaatctcattccactggtggcaagatggggcctagccttcttttcacatgtctaatcttttcctttctcatggtgccctccatggaagtcacagtcaacactgaataaatgactagaatgacacgtgtgcgtgcgcacgcgtgtgcgtgtgtgtgttcatctgtctgcatgtggatcaatttcttttagaaaataatttattgtatgatttattttggagttatattctgattacagtgctccctctcccaaatagcattgattttttcccccctctaaaatgtataatctggtctcaggttggattctttggtacatttctctcttctggatgccatgcagcttaattaaaaccttgctt

SEQ ID NO: 448195 - DNA, 661 bp, Homo sapiens
actcccctttataaaaccaccagatctcatgagatttattcactatcacaagcacagcatgggaaagacccgcccccaggattcaattacctcctaccaggtaactcccatgacacgtgggaattatgggagctaaaattcaagatgagatttgggtagggacacagccaaaccatatcatcatctgtccacctatggccttcatcagcccttcaggtaacttagtttttgacacctgtttcctatttcacttaatcaaatctattttgcttttgtatgttttttttccactttttcaaacagaaatgtttgcttgccagtgataagctaagttggtaggtaatgaataacaaaatgacctggatattttctaaggcctttattcccccttggttgtaatcttagtttgagagaagccataaggatacccagttatttgtagaatggatacatacacttgaggtgaccatgaagtcaaagaatgggacatagaggactactctgcttagctagttttttttttttcctattttcccatccttgcagaatcagattcataaaattttagaaagattctcacagttcagccatggttgtgacaaactctgaataccagaggacacaaagggagaggaaaaactgttctattttttttccccag

SEQ ID NO: 448196 - DNA, 8106 bp, Homo sapiens
ccaaaatgcaggccccagcggaacgcacagccctcctgtcctccgccggtgcccctttagccgccccacccccatccctaagggctctcattctccagctgcagccgcagctgggttccgaacacgccgccgggccccgggagggagaggggcaggtgccagggcggcgcgcagcctctgctcccggtgccagcttcagtgcgccgggcacacgcgcgccccgcaacccctccctcaccctttccccgttgctcaatctccgccagccgcggtcgctgcatcgtcagagagctgcaagagggaggcagcaaggtgcggccgccagcagtgacaccatgtgaccggcacggctcactgacacgcagctttggttaaagagcgggcgcacaggaggggaggagaccgcgcgcgggacggggaggaatggcctgtccgcgttaaaccatcacaagccatggttgcggaagggccacgcgtcccccagtaggagaatgactccgattcgtgaccctcagcgccggtgcatgtcgatatatttattgagtgtctactgtgtgccaggcactatatctatgtgcatagaaaaaccctggaaggccatacaacaatatatatagagtgatcgtctctgcttgctgagctaacaggggtgtcaagcttccattttggtatctacttctaaatacactcagaacaggagaaatttggactaattttcaaactacagacactttctaatcatgatgcatttcaaaagtggactcgaattaactgagttgcaaaacatgacagtgcccgaggatgataacattagcaatgactccaatgatttcaccgaagtagaaaatggtcagataaatagcaagtttatttctgatcgtgaaagtagaagaagtctcacaaacagccatttggaaaaaaagaagtgtgatgagtatattccaggtacaacctccttaggcatgtctgtttttaacctaagcaacgccattatgggcagtgggattttgggactcgcctttgccctggcaaacactggaatcctactttttctggtacttttgacttcagtgacattgctgtctatatattcaataaacctcctattgatctgttcaaaagaaacaggctgcatggtgtatgaaaagctgggggaacaagtctttggcaccacagggaagttcgtaatctttggagccacctctctacagaacactggagcaatgctgagctacctcttcatcgtaaaaaatgaactaccctctgccataaagtttctaatgggaaaggaagagacattttcagcctggtacgtggatggccgcgttctggtggtgatagttacctttggcataattctccctctgtgtctcttgaagaacttagggtatcttggctatactagtggattttccttgagctgtatggtttttttcctaattgtggttatttacaagaaatttcaaattccctgcattgttccagagctaaattcaacaataagtgctaattcaacaaatgctgacacgtgtacgccaaaatatgttaccttcaattcaaagaccgtgtatgctttacccaccattgcatttgcatttgtttgccacccgtcagtcctgccaatttacagtgagcttaaagaccgatcacagaaaaaaatgcagatggtttcaaacatctcctttttcgccatgtttgttatgtacttcttgactgccatttttggctacttgacattctatgacaacgtgcagtccgacctccttcacaaatatcagagtaaagatgacattctcatcctgacagtgcggctggctgtcattgttgctgtgatcctcacagtgccggtgttatttttcacggttcgttcatctttatttgaactggctaagaaaacaaagtttaatttatgtcgtcataccgtggttacctgcatactcttggttgttatcaacttgttggtgatcttcataccctccatgaaggatatttttggagtcgtaggagttacatctgctaacatgcttattttcattcttccttcatctctttatttaaaaatcacagaccaggatggagataaaggaactcaaagaatttgggctgcccttttcttgggcctgggggtgttgttctccttggtcagcattcccttggtcatctatgactgggcctgctcatcgagtagtgacgaaggccactgaaacccgccgagaaaaagaaacatccctgttgtctgctcagtcaagtccccacacatcagcaatctctcaccacttcttttgcaagtttacagaagcaaacagaaatgtacaggatacttaaaatggaataactttttggttgcaaaacagagacatggttctataatgcttcatgtccctccaagatttgagatcaatttagggattgtgaaatttttttttcaaatttcatacaatcatatttcccagtacttttcacaatcattttttacccatctaactctatgttttgtggcttcccggtctcttagaactttgaaaacatgatatacaataatgtttatttattatacatccagattctgaaataattttcctactgatgttcagctcacactatctgtacctttttagaagagaaaagaatcttgaattgtatatatttattttgctttacagaaaaaaatggtttcgtaaataatttgcctattttggttaacatagcacatggagataatcatctgaaagttatagggcactgccactgctgaatcagagcatgcccaatatttgaggtggctctgatttcctggcagctgaactcgggtagtccagtggcctagctggtaccacatctattcccatccagagacattctctggcaagtgttctcagctgaaaagtggttggggatgattcttaccttggtaattaaatgaagctacacatttgggtaatctagcaaatgaagtattttttccctcttggcaacttgtgtcagagttactctggtctgagtcaactttcgctggggaaaacctatggaacctactgcaaaaagattgtccaaaatgcctaagaaaatactcctctgatgcatttagccttcaaccctacctgtcttgctgaagggagaaaaatgttttagtacattataggcccagcagcttttattcatgtccaccagctagttgcacagagaatcatgtgtacctaactaaggatgatctaggataagtaactcctgttttatattgagtattttagggaagtctttaaaagacttgttttatatctataaatctaggttattacaaatacaagaattttgtaccttaaataagcctcatttctatttcttcttcattaattctccatctagtcttgtgaaaaaaaaaaaaaaccctcagagatagtctttgtgaagagcttctgacagaatcactgagtaccttccttcccccagatgaggaagacaagggggtctcagtgtctgtgctgtctcctcttctcttccccaaccaaggactgtgccattactgcccgtctcaactgtccatgcaggaggacagagttgcctggtactcttacccttgtccctctcctaaagggagcacaaggaaactgaagagactgaaaaagaagagagtttgtagctgaaaaagaatagggatagcaaggaaacccagaactgcattcccctaagtggggccatcccatgtgattgaattgtccatagcttgcctatggtgagaaatgtgcatgctccgtgagctggtctcttgaaacaggacttatgcttcctctatattctggttaaattttccaaacacataagttcactgagcacagatttcttatccagagacaagtagaatctaaccgcagactgttggcagagtttccaggcacttagccatgttcccttcctgactcaaatccccaaaggccttcactctcactgagaatcacactactgtcccatagataaggcaggcattgaagcacctgtcgtgatcctctaggggggagaatgaaaggttatttcctgcattgcatcatcatagcttttaatataatgctacagaatcatatccacattaggttagagttcagatatttggatatgaatacctaacctagccatatccatggccatctctgttcttttcagcaatgttttccatattatattagcaatgacagaaacagaacaagccaagatccagtcagttcttgggagcttgtctagagcaccaagtaatgaaatagccaggtagtgggatgactgtacctttaaaaatacataatttagtttgcaagctatattatgctactttctattttccttgttactttatagcaattcattttaccctcacaaagtcaatttagaaccttatcattaactgggatgtgtagtgatatttttgggcctctgggtttcatgtgtcaatacaaggaatatttatttaaaatagatttatttagaggaggcacagtgttgttgatctgtgtgacaccacccatatttttaaaaacctttgtatgtttctctaaatttgttgttgactgaatataatagaccctaccataattcgtcaaatatcactgattagttacatcctttgtgtgagattagctgtaaagtatactgctcttattcttattcagaatagttaattggtagccaaaaatacatgtatcacagatgttaggtcgaatttaaacagcacagtcaagtgctatggaagtttttctgctaaattagtagattaaagaatactataccctaggcatggggagcagcacgttttcctttggtaggtaggatctctatactagtgaacagtgccagttccacactttggacttagaactgttctctagttattgtaacacagaatactgtcaatccctaatttacttaatgttacttattggaagtggggctgatgaaatacgcacaggagggaaatctactgtgtttaggcacaggcagccccagtgtataaggagatcatattccaaaaggttgtcagttggttgtttgcaacctggaatgtattttcctttagagaccaggttatccatggtggttaggcccctagagcagctggaaaagatgatcaaaccaataggttagctgacatcgaataatgtaataggtttgctaaagaatctaaccatcaaatataatattgtttccagggagggtgtttgttcagagttgcctgttagtagaatctggactgtccatcccagccacatcccacctactggacagtaggggtagagatgccaccagactacaggtgaccagattggcctgaaacatggtgtccagtaaaaacggggaggaataagtccatgactgccggagagcttggtggtaggaggagggtgaaggagggtgagggggcctctcatgggtcagaaacctccagggacatccctcagctggtaactctgctgttgtccggagggttcaggcttggtgtgccttcttctgtttgtctgacttttggctcctatggttcatctcctgccctgcccaccacagaaaaggatgctgctgcacagcttctccaatgtaccagtcattgaggccagcgcgcagcacttttaatgtttttagtgctagtaactgtgttttaactctccaggaataagctgggaggttagaaaacaagaaaaaagggggaaaaaaaaacctctccacccactttccttttttacagttacagaccctgttgagaaaaagaagcacccagatgggtgatggtgatagggcttgtggtggacacagggttgtggtaagattcctcagtgcttcggcgagcacctaagactattaccctggaactgactgctttctagagcttgattcatgcctctaagccagtggttctcaaagtgtggcccctagaccagtagcatcagcatcatcggggacctcattagaatgcagattctcagccccctcccagacatggtgaagtcagaagctctcagggagggactcagcaaatgattctaaagcgcatcaagtttgagaaccaccctaagccaatgagtctcccttttacttcccattagtcctccctcaccagatgattcctaggactcatggtgcaacatacaggagccaggctttagggaggggaggaaaggagcctggcggcaggggtctctgcaatggcaagaaagtgagtgaatccagcgctgccacctggttatccccttctcgttgaaaatagcagcgcgggtgcaaattcctaaacacaggctgcctgcactcggtgttacctcgggctgaggcatgataatattttattttttaaagctgtgaggaaatgaaagtgaggctttggttggggcgaggcagttgtgaaagaaattaaaataaaagaccctttgtaaatgcagacttagaagaaatactgaatttgtgtcagaagttctccagtgtttgtgttaatcgtgtggtgataatcctgtcctccttttaaagcgaattctctactgaaaggtctgctctgcttaaggagctacaaactgctctcaaaagaatgaaatactgagttccaattcagtgaggcacagtgttggactatggcacatttagttggagtcggggggaggtcaggaatatgatcagataatggattttataccttagagcaaaatctattagtctctctcagtttatcaatttaaatggctttaggcttatagggggtgtaaactttaagaatataattctcccattcaagtttacagcaaacatctagccaccttcaaaacaaagaagatacagaccatcatttagcaatactaatacatgattttccttggggatggcaggtttgagaatcctttagcaacaggacatacttcccctaaattacagtgaattatttataacgagataaagctttcaggtacaagctgaaggtggggtgtctaacaactaaaaactatcactaaatctcaaagagaaagttcttgcaaaatatgtaaagttcacaaggtgcagacattttccttctttaggcttttatctaaggaagggctatgaaactgggcccatctgtatacaggctcaaatttacgtttttaaaggaagaatctatgcagctgaggcttattgcaggaaatacttcatttgtatgtaaatattattgtaaataaataggaggctgtatatttttgaagttgttgatccgcactgaaatagaagtctctaggatctgcatataaacaataaatgtttcctagaaattagtggtttgtttgggaattagaaaaatttacattctctcccaggtaacatagttctctcaatgtaaacttggaacctgaaaccctacttaatttagagaaagaaatgtctgagaaatagttcccttgatttcttatgctggcattaagatcaattatttaacagatagtcctctgagatacaagtaaggaatatttagacacaaatccttgtcctatagaaacagatatacccaaatgacaaattgtttcttcataatgatcttccatttttaacactgataccactacacagtacatatgaaaacagaagctggggagaagaatgtttttttcacaattgaattgctgcatttctcaaactttgggatctatgaaagcggggagagggaacctgaatattaattatgagcacaaatttgaaggaaagaaaacaaagaaccattatctaatcaagctttgaaagtcctgcatgtttgccttttattttagtgttgacgccaacatagactgtctaaggtatttttttccccaaacacttgaatcttggtcgttggtatgtaatccactctctagagtccagtgtactttagacttcatctgagtccaatacatgtaccacactactgttttattaatgtaaaaaccttgtaaatgaatttcagatgggtgatttaagtgagtcacaagtcacaaaactttgctattcatagttaatcaaatagaactgggttttttttttcagagtgtggtgtaaataaagaaatataagaagttctgttctataactgctctgttaacatagtttttaaacattaaaaaatgtgaactaaaagta

SEQ ID NO: 448197 - DNA, 8568 bp, Homo sapiens
ccaaaatgcaggccccagcggaacgcacagccctcctgtcctccgccggtgcccctttagccgccccacccccatccctaagggctctcattctccagctgcagccgcagctgggttccgaacacgccgccgggccccgggagggagaggggcaggtgccagggcggcgcgcagcctctgctcccggtgccagcttcagtgcgccgggcacacgcgcgccccgcaacccctccctcaccctttccccgttgctcaatctccgccagccgcggtcgctgcatcgtcagagagctgcaagagggaggcagcaaggtgcggccgccagcagtgacaccatgtgaccggcacggctcactgacacgcagctttggttaaagagcgggcgcacaggaggggaggagaccgcgcgcgggacggggaggaatggcctgtccgcgttaaaccatcacaagccatggttgcggaagggccacgcgtcccccagtaggagaatgactccgattcgtgaccctcagcgccggtgcatgtcgatgtaagtgcgaggccggcgagcagagtgtgagtgggggttggtggtgaggggagattctgatgcaatcggcccggaaaggaggagagccaggcgagcgcggactggggcggccacgccactccgccagaaggtcgccaggagcctccgcccttcaccttcctccgaaatccgccaggccacgccaagctccctgcccaacccttactgacgggggccacattttcccggcctccgcagccagaccttgacacaaaggacatcaaactgccgagggtaaaaaccccggaagggcggacacctccacatcgccttttgccacctttccctttatttccggagagtcaaggaaacttttgagctatttacagcttgtagcaattatgtaaagtatactcctctgaacaaaatttggagcatgtttgtttctctctacctgatttccccagaatctggaaactatctatatttattgagtgtctactgtgtgccaggcactatatctatgtgcatagaaaaaccctggaaggccatacaacaatatatatagagtgatcgtctctgcttgctgagctaacaggggtgtcaagcttccattttggtatctacttctaaatacactcagaacaggagaaatttggactaattttcaaactacagacactttctaatcatgatgcatttcaaaagtggactcgaattaactgagttgcaaaacatgacagtgcccgaggatgataacattagcaatgactccaatgatttcaccgaagtagaaaatggtcagataaatagcaagtttatttctgatcgtgaaagtagaagaagtctcacaaacagccatttggaaaaaaagaagtgtgatgagtatattccaggtacaacctccttaggcatgtctgtttttaacctaagcaacgccattatgggcagtgggattttgggactcgcctttgccctggcaaacactggaatcctactttttctggtacttttgacttcagtgacattgctgtctatatattcaataaacctcctattgatctgttcaaaagaaacaggctgcatggtgtatgaaaagctgggggaacaagtctttggcaccacagggaagttcgtaatctttggagccacctctctacagaacactggagcaatgctgagctacctcttcatcgtaaaaaatgaactaccctctgccataaagtttctaatgggaaaggaagagacattttcagcctggtacgtggatggccgcgttctggtggtgatagttacctttggcataattctccctctgtgtctcttgaagaacttagggtatcttggctatactagtggattttccttgagctgtatggtttttttcctaattgtggttatttacaagaaatttcaaattccctgcattgttccagagctaaattcaacaataagtgctaattcaacaaatgctgacacgtgtacgccaaaatatgttaccttcaattcaaagaccgtgtatgctttacccaccattgcatttgcatttgtttgccacccgtcagtcctgccaatttacagtgagcttaaagaccgatcacagaaaaaaatgcagatggtttcaaacatctcctttttcgccatgtttgttatgtacttcttgactgccatttttggctacttgacattctatgacaacgtgcagtccgacctccttcacaaatatcagagtaaagatgacattctcatcctgacagtgcggctggctgtcattgttgctgtgatcctcacagtgccggtgttatttttcacggttcgttcatctttatttgaactggctaagaaaacaaagtttaatttatgtcgtcataccgtggttacctgcatactcttggttgttatcaacttgttggtgatcttcataccctccatgaaggatatttttggagtcgtaggagttacatctgctaacatgcttattttcattcttccttcatctctttatttaaaaatcacagaccaggatggagataaaggaactcaaagaatttgggctgcccttttcttgggcctgggggtgttgttctccttggtcagcattcccttggtcatctatgactgggcctgctcatcgagtagtgacgaaggccactgaaacccgccgagaaaaagaaacatccctgttgtctgctcagtcaagtccccacacatcagcaatctctcaccacttcttttgcaagtttacagaagcaaacagaaatgtacaggatacttaaaatggaataactttttggttgcaaaacagagacatggttctataatgcttcatgtccctccaagatttgagatcaatttagggattgtgaaatttttttttcaaatttcatacaatcatatttcccagtacttttcacaatcattttttacccatctaactctatgttttgtggcttcccggtctcttagaactttgaaaacatgatatacaataatgtttatttattatacatccagattctgaaataattttcctactgatgttcagctcacactatctgtacctttttagaagagaaaagaatcttgaattgtatatatttattttgctttacagaaaaaaatggtttcgtaaataatttgcctattttggttaacatagcacatggagataatcatctgaaagttatagggcactgccactgctgaatcagagcatgcccaatatttgaggtggctctgatttcctggcagctgaactcgggtagtccagtggcctagctggtaccacatctattcccatccagagacattctctggcaagtgttctcagctgaaaagtggttggggatgattcttaccttggtaattaaatgaagctacacatttgggtaatctagcaaatgaagtattttttccctcttggcaacttgtgtcagagttactctggtctgagtcaactttcgctggggaaaacctatggaacctactgcaaaaagattgtccaaaatgcctaagaaaatactcctctgatgcatttagccttcaaccctacctgtcttgctgaagggagaaaaatgttttagtacattataggcccagcagcttttattcatgtccaccagctagttgcacagagaatcatgtgtacctaactaaggatgatctaggataagtaactcctgttttatattgagtattttagggaagtctttaaaagacttgttttatatctataaatctaggttattacaaatacaagaattttgtaccttaaataagcctcatttctatttcttcttcattaattctccatctagtcttgtgaaaaaaaaaaaaaaccctcagagatagtctttgtgaagagcttctgacagaatcactgagtaccttccttcccccagatgaggaagacaagggggtctcagtgtctgtgctgtctcctcttctcttccccaaccaaggactgtgccattactgcccgtctcaactgtccatgcaggaggacagagttgcctggtactcttacccttgtccctctcctaaagggagcacaaggaaactgaagagactgaaaaagaagagagtttgtagctgaaaaagaatagggatagcaaggaaacccagaactgcattcccctaagtggggccatcccatgtgattgaattgtccatagcttgcctatggtgagaaatgtgcatgctccgtgagctggtctcttgaaacaggacttatgcttcctctatattctggttaaattttccaaacacataagttcactgagcacagatttcttatccagagacaagtagaatctaaccgcagactgttggcagagtttccaggcacttagccatgttcccttcctgactcaaatccccaaaggccttcactctcactgagaatcacactactgtcccatagataaggcaggcattgaagcacctgtcgtgatcctctaggggggagaatgaaaggttatttcctgcattgcatcatcatagcttttaatataatgctacagaatcatatccacattaggttagagttcagatatttggatatgaatacctaacctagccatatccatggccatctctgttcttttcagcaatgttttccatattatattagcaatgacagaaacagaacaagccaagatccagtcagttcttgggagcttgtctagagcaccaagtaatgaaatagccaggtagtgggatgactgtacctttaaaaatacataatttagtttgcaagctatattatgctactttctattttccttgttactttatagcaattcattttaccctcacaaagtcaatttagaaccttatcattaactgggatgtgtagtgatatttttgggcctctgggtttcatgtgtcaatacaaggaatatttatttaaaatagatttatttagaggaggcacagtgttgttgatctgtgtgacaccacccatatttttaaaaacctttgtatgtttctctaaatttgttgttgactgaatataatagaccctaccataattcgtcaaatatcactgattagttacatcctttgtgtgagattagctgtaaagtatactgctcttattcttattcagaatagttaattggtagccaaaaatacatgtatcacagatgttaggtcgaatttaaacagcacagtcaagtgctatggaagtttttctgctaaattagtagattaaagaatactataccctaggcatggggagcagcacgttttcctttggtaggtaggatctctatactagtgaacagtgccagttccacactttggacttagaactgttctctagttattgtaacacagaatactgtcaatccctaatttacttaatgttacttattggaagtggggctgatgaaatacgcacaggagggaaatctactgtgtttaggcacaggcagccccagtgtataaggagatcatattccaaaaggttgtcagttggttgtttgcaacctggaatgtattttcctttagagaccaggttatccatggtggttaggcccctagagcagctggaaaagatgatcaaaccaataggttagctgacatcgaataatgtaataggtttgctaaagaatctaaccatcaaatataatattgtttccagggagggtgtttgttcagagttgcctgttagtagaatctggactgtccatcccagccacatcccacctactggacagtaggggtagagatgccaccagactacaggtgaccagattggcctgaaacatggtgtccagtaaaaacggggaggaataagtccatgactgccggagagcttggtggtaggaggagggtgaaggagggtgagggggcctctcatgggtcagaaacctccagggacatccctcagctggtaactctgctgttgtccggagggttcaggcttggtgtgccttcttctgtttgtctgacttttggctcctatggttcatctcctgccctgcccaccacagaaaaggatgctgctgcacagcttctccaatgtaccagtcattgaggccagcgcgcagcacttttaatgtttttagtgctagtaactgtgttttaactctccaggaataagctgggaggttagaaaacaagaaaaaagggggaaaaaaaaacctctccacccactttccttttttacagttacagaccctgttgagaaaaagaagcacccagatgggtgatggtgatagggcttgtggtggacacagggttgtggtaagattcctcagtgcttcggcgagcacctaagactattaccctggaactgactgctttctagagcttgattcatgcctctaagccagtggttctcaaagtgtggcccctagaccagtagcatcagcatcatcggggacctcattagaatgcagattctcagccccctcccagacatggtgaagtcagaagctctcagggagggactcagcaaatgattctaaagcgcatcaagtttgagaaccaccctaagccaatgagtctcccttttacttcccattagtcctccctcaccagatgattcctaggactcatggtgcaacatacaggagccaggctttagggaggggaggaaaggagcctggcggcaggggtctctgcaatggcaagaaagtgagtgaatccagcgctgccacctggttatccccttctcgttgaaaatagcagcgcgggtgcaaattcctaaacacaggctgcctgcactcggtgttacctcgggctgaggcatgataatattttattttttaaagctgtgaggaaatgaaagtgaggctttggttggggcgaggcagttgtgaaagaaattaaaataaaagaccctttgtaaatgcagacttagaagaaatactgaatttgtgtcagaagttctccagtgtttgtgttaatcgtgtggtgataatcctgtcctccttttaaagcgaattctctactgaaaggtctgctctgcttaaggagctacaaactgctctcaaaagaatgaaatactgagttccaattcagtgaggcacagtgttggactatggcacatttagttggagtcggggggaggtcaggaatatgatcagataatggattttataccttagagcaaaatctattagtctctctcagtttatcaatttaaatggctttaggcttatagggggtgtaaactttaagaatataattctcccattcaagtttacagcaaacatctagccaccttcaaaacaaagaagatacagaccatcatttagcaatactaatacatgattttccttggggatggcaggtttgagaatcctttagcaacaggacatacttcccctaaattacagtgaattatttataacgagataaagctttcaggtacaagctgaaggtggggtgtctaacaactaaaaactatcactaaatctcaaagagaaagttcttgcaaaatatgtaaagttcacaaggtgcagacattttccttctttaggcttttatctaaggaagggctatgaaactgggcccatctgtatacaggctcaaatttacgtttttaaaggaagaatctatgcagctgaggcttattgcaggaaatacttcatttgtatgtaaatattattgtaaataaataggaggctgtatatttttgaagttgttgatccgcactgaaatagaagtctctaggatctgcatataaacaataaatgtttcctagaaattagtggtttgtttgggaattagaaaaatttacattctctcccaggtaacatagttctctcaatgtaaacttggaacctgaaaccctacttaatttagagaaagaaatgtctgagaaatagttcccttgatttcttatgctggcattaagatcaattatttaacagatagtcctctgagatacaagtaaggaatatttagacacaaatccttgtcctatagaaacagatatacccaaatgacaaattgtttcttcataatgatcttccatttttaacactgataccactacacagtacatatgaaaacagaagctggggagaagaatgtttttttcacaattgaattgctgcatttctcaaactttgggatctatgaaagcggggagagggaacctgaatattaattatgagcacaaatttgaaggaaagaaaacaaagaaccattatctaatcaagctttgaaagtcctgcatgtttgccttttattttagtgttgacgccaacatagactgtctaaggtatttttttccccaaacacttgaatcttggtcgttggtatgtaatccactctctagagtccagtgtactttagacttcatctgagtccaatacatgtaccacactactgttttattaatgtaaaaaccttgtaaatgaatttcagatgggtgatttaagtgagtcacaagtcacaaaactttgctattcatagttaatcaaatagaactgggttttttttttcagagtgtggtgtaaataaagaaatataagaagttctgttctataactgctctgttaacatagtttttaaacattaaaaaatgtgaactaaaagta

SEQ ID NO: 448198 - DNA, 8229 bp, Homo sapiens
ccaaaatgcaggccccagcggaacgcacagccctcctgtcctccgccggtgcccctttagccgccccacccccatccctaagggctctcattctccagctgcagccgcagctgggttccgaacacgccgccgggccccgggagggagaggggcaggtgccagggcggcgcgcagcctctgctcccggtgccagcttcagtgcgccgggcacacgcgcgccccgcaacccctccctcaccctttccccgttgctcaatctccgccagccgcggtcgctgcatcgtcagagagctgcaagagggaggcagcaaggtgcggccgccagcagtgacaccatgtgaccggcacggctcactgacacgcagctttggttaaagagcgggcgcacaggaggggaggagaccgcgcgcgggacggggaggaatggcctgtccgcgttaaaccatcacaagccatggttgcggaagggccacgcgtcccccagtaggagaatgactccgattcgtgaccctcagcgccggtgcatgtcgatagtcaaggaaacttttgagctatttacagcttgtagcaattatgtaaagtatactcctctgaacaaaatttggagcatgtttgtttctctctacctgatttccccagaatctggaaactatctatatttattgagtgtctactgtgtgccaggcactatatctatgtgcatagaaaaaccctggaaggccatacaacaatatatatagagtgatcgtctctgcttgctgagctaacaggggtgtcaagcttccattttggtatctacttctaaatacactcagaacaggagaaatttggactaattttcaaactacagacactttctaatcatgatgcatttcaaaagtggactcgaattaactgagttgcaaaacatgacagtgcccgaggatgataacattagcaatgactccaatgatttcaccgaagtagaaaatggtcagataaatagcaagtttatttctgatcgtgaaagtagaagaagtctcacaaacagccatttggaaaaaaagaagtgtgatgagtatattccaggtacaacctccttaggcatgtctgtttttaacctaagcaacgccattatgggcagtgggattttgggactcgcctttgccctggcaaacactggaatcctactttttctggtacttttgacttcagtgacattgctgtctatatattcaataaacctcctattgatctgttcaaaagaaacaggctgcatggtgtatgaaaagctgggggaacaagtctttggcaccacagggaagttcgtaatctttggagccacctctctacagaacactggagcaatgctgagctacctcttcatcgtaaaaaatgaactaccctctgccataaagtttctaatgggaaaggaagagacattttcagcctggtacgtggatggccgcgttctggtggtgatagttacctttggcataattctccctctgtgtctcttgaagaacttagggtatcttggctatactagtggattttccttgagctgtatggtttttttcctaattgtggttatttacaagaaatttcaaattccctgcattgttccagagctaaattcaacaataagtgctaattcaacaaatgctgacacgtgtacgccaaaatatgttaccttcaattcaaagaccgtgtatgctttacccaccattgcatttgcatttgtttgccacccgtcagtcctgccaatttacagtgagcttaaagaccgatcacagaaaaaaatgcagatggtttcaaacatctcctttttcgccatgtttgttatgtacttcttgactgccatttttggctacttgacattctatgacaacgtgcagtccgacctccttcacaaatatcagagtaaagatgacattctcatcctgacagtgcggctggctgtcattgttgctgtgatcctcacagtgccggtgttatttttcacggttcgttcatctttatttgaactggctaagaaaacaaagtttaatttatgtcgtcataccgtggttacctgcatactcttggttgttatcaacttgttggtgatcttcataccctccatgaaggatatttttggagtcgtaggagttacatctgctaacatgcttattttcattcttccttcatctctttatttaaaaatcacagaccaggatggagataaaggaactcaaagaatttgggctgcccttttcttgggcctgggggtgttgttctccttggtcagcattcccttggtcatctatgactgggcctgctcatcgagtagtgacgaaggccactgaaacccgccgagaaaaagaaacatccctgttgtctgctcagtcaagtccccacacatcagcaatctctcaccacttcttttgcaagtttacagaagcaaacagaaatgtacaggatacttaaaatggaataactttttggttgcaaaacagagacatggttctataatgcttcatgtccctccaagatttgagatcaatttagggattgtgaaatttttttttcaaatttcatacaatcatatttcccagtacttttcacaatcattttttacccatctaactctatgttttgtggcttcccggtctcttagaactttgaaaacatgatatacaataatgtttatttattatacatccagattctgaaataattttcctactgatgttcagctcacactatctgtacctttttagaagagaaaagaatcttgaattgtatatatttattttgctttacagaaaaaaatggtttcgtaaataatttgcctattttggttaacatagcacatggagataatcatctgaaagttatagggcactgccactgctgaatcagagcatgcccaatatttgaggtggctctgatttcctggcagctgaactcgggtagtccagtggcctagctggtaccacatctattcccatccagagacattctctggcaagtgttctcagctgaaaagtggttggggatgattcttaccttggtaattaaatgaagctacacatttgggtaatctagcaaatgaagtattttttccctcttggcaacttgtgtcagagttactctggtctgagtcaactttcgctggggaaaacctatggaacctactgcaaaaagattgtccaaaatgcctaagaaaatactcctctgatgcatttagccttcaaccctacctgtcttgctgaagggagaaaaatgttttagtacattataggcccagcagcttttattcatgtccaccagctagttgcacagagaatcatgtgtacctaactaaggatgatctaggataagtaactcctgttttatattgagtattttagggaagtctttaaaagacttgttttatatctataaatctaggttattacaaatacaagaattttgtaccttaaataagcctcatttctatttcttcttcattaattctccatctagtcttgtgaaaaaaaaaaaaaaccctcagagatagtctttgtgaagagcttctgacagaatcactgagtaccttccttcccccagatgaggaagacaagggggtctcagtgtctgtgctgtctcctcttctcttccccaaccaaggactgtgccattactgcccgtctcaactgtccatgcaggaggacagagttgcctggtactcttacccttgtccctctcctaaagggagcacaaggaaactgaagagactgaaaaagaagagagtttgtagctgaaaaagaatagggatagcaaggaaacccagaactgcattcccctaagtggggccatcccatgtgattgaattgtccatagcttgcctatggtgagaaatgtgcatgctccgtgagctggtctcttgaaacaggacttatgcttcctctatattctggttaaattttccaaacacataagttcactgagcacagatttcttatccagagacaagtagaatctaaccgcagactgttggcagagtttccaggcacttagccatgttcccttcctgactcaaatccccaaaggccttcactctcactgagaatcacactactgtcccatagataaggcaggcattgaagcacctgtcgtgatcctctaggggggagaatgaaaggttatttcctgcattgcatcatcatagcttttaatataatgctacagaatcatatccacattaggttagagttcagatatttggatatgaatacctaacctagccatatccatggccatctctgttcttttcagcaatgttttccatattatattagcaatgacagaaacagaacaagccaagatccagtcagttcttgggagcttgtctagagcaccaagtaatgaaatagccaggtagtgggatgactgtacctttaaaaatacataatttagtttgcaagctatattatgctactttctattttccttgttactttatagcaattcattttaccctcacaaagtcaatttagaaccttatcattaactgggatgtgtagtgatatttttgggcctctgggtttcatgtgtcaatacaaggaatatttatttaaaatagatttatttagaggaggcacagtgttgttgatctgtgtgacaccacccatatttttaaaaacctttgtatgtttctctaaatttgttgttgactgaatataatagaccctaccataattcgtcaaatatcactgattagttacatcctttgtgtgagattagctgtaaagtatactgctcttattcttattcagaatagttaattggtagccaaaaatacatgtatcacagatgttaggtcgaatttaaacagcacagtcaagtgctatggaagtttttctgctaaattagtagattaaagaatactataccctaggcatggggagcagcacgttttcctttggtaggtaggatctctatactagtgaacagtgccagttccacactttggacttagaactgttctctagttattgtaacacagaatactgtcaatccctaatttacttaatgttacttattggaagtggggctgatgaaatacgcacaggagggaaatctactgtgtttaggcacaggcagccccagtgtataaggagatcatattccaaaaggttgtcagttggttgtttgcaacctggaatgtattttcctttagagaccaggttatccatggtggttaggcccctagagcagctggaaaagatgatcaaaccaataggttagctgacatcgaataatgtaataggtttgctaaagaatctaaccatcaaatataatattgtttccagggagggtgtttgttcagagttgcctgttagtagaatctggactgtccatcccagccacatcccacctactggacagtaggggtagagatgccaccagactacaggtgaccagattggcctgaaacatggtgtccagtaaaaacggggaggaataagtccatgactgccggagagcttggtggtaggaggagggtgaaggagggtgagggggcctctcatgggtcagaaacctccagggacatccctcagctggtaactctgctgttgtccggagggttcaggcttggtgtgccttcttctgtttgtctgacttttggctcctatggttcatctcctgccctgcccaccacagaaaaggatgctgctgcacagcttctccaatgtaccagtcattgaggccagcgcgcagcacttttaatgtttttagtgctagtaactgtgttttaactctccaggaataagctgggaggttagaaaacaagaaaaaagggggaaaaaaaaacctctccacccactttccttttttacagttacagaccctgttgagaaaaagaagcacccagatgggtgatggtgatagggcttgtggtggacacagggttgtggtaagattcctcagtgcttcggcgagcacctaagactattaccctggaactgactgctttctagagcttgattcatgcctctaagccagtggttctcaaagtgtggcccctagaccagtagcatcagcatcatcggggacctcattagaatgcagattctcagccccctcccagacatggtgaagtcagaagctctcagggagggactcagcaaatgattctaaagcgcatcaagtttgagaaccaccctaagccaatgagtctcccttttacttcccattagtcctccctcaccagatgattcctaggactcatggtgcaacatacaggagccaggctttagggaggggaggaaaggagcctggcggcaggggtctctgcaatggcaagaaagtgagtgaatccagcgctgccacctggttatccccttctcgttgaaaatagcagcgcgggtgcaaattcctaaacacaggctgcctgcactcggtgttacctcgggctgaggcatgataatattttattttttaaagctgtgaggaaatgaaagtgaggctttggttggggcgaggcagttgtgaaagaaattaaaataaaagaccctttgtaaatgcagacttagaagaaatactgaatttgtgtcagaagttctccagtgtttgtgttaatcgtgtggtgataatcctgtcctccttttaaagcgaattctctactgaaaggtctgctctgcttaaggagctacaaactgctctcaaaagaatgaaatactgagttccaattcagtgaggcacagtgttggactatggcacatttagttggagtcggggggaggtcaggaatatgatcagataatggattttataccttagagcaaaatctattagtctctctcagtttatcaatttaaatggctttaggcttatagggggtgtaaactttaagaatataattctcccattcaagtttacagcaaacatctagccaccttcaaaacaaagaagatacagaccatcatttagcaatactaatacatgattttccttggggatggcaggtttgagaatcctttagcaacaggacatacttcccctaaattacagtgaattatttataacgagataaagctttcaggtacaagctgaaggtggggtgtctaacaactaaaaactatcactaaatctcaaagagaaagttcttgcaaaatatgtaaagttcacaaggtgcagacattttccttctttaggcttttatctaaggaagggctatgaaactgggcccatctgtatacaggctcaaatttacgtttttaaaggaagaatctatgcagctgaggcttattgcaggaaatacttcatttgtatgtaaatattattgtaaataaataggaggctgtatatttttgaagttgttgatccgcactgaaatagaagtctctaggatctgcatataaacaataaatgtttcctagaaattagtggtttgtttgggaattagaaaaatttacattctctcccaggtaacatagttctctcaatgtaaacttggaacctgaaaccctacttaatttagagaaagaaatgtctgagaaatagttcccttgatttcttatgctggcattaagatcaattatttaacagatagtcctctgagatacaagtaaggaatatttagacacaaatccttgtcctatagaaacagatatacccaaatgacaaattgtttcttcataatgatcttccatttttaacactgataccactacacagtacatatgaaaacagaagctggggagaagaatgtttttttcacaattgaattgctgcatttctcaaactttgggatctatgaaagcggggagagggaacctgaatattaattatgagcacaaatttgaaggaaagaaaacaaagaaccattatctaatcaagctttgaaagtcctgcatgtttgccttttattttagtgttgacgccaacatagactgtctaaggtatttttttccccaaacacttgaatcttggtcgttggtatgtaatccactctctagagtccagtgtactttagacttcatctgagtccaatacatgtaccacactactgttttattaatgtaaaaaccttgtaaatgaatttcagatgggtgatttaagtgagtcacaagtcacaaaactttgctattcatagttaatcaaatagaactgggttttttttttcagagtgtggtgtaaataaagaaatataagaagttctgttctataactgctctgttaacatagtttttaaacattaaaaaatgtgaactaaaagta

SEQ ID NO: 448199 - DNA, 7730 bp, Homo sapiens
agtcctttgtcttgctctgcggcgcggacccggggtttgtacaaaccctcgttctctgttagaaacctaactgccgccaggatcacgtactttctcggacgaatccgcggtgatgtgtgtagcaaaagtgaaaaaagacgcctctgctagaaaacgatatttattgagtgtctactgtgtgccaggcactatatctatgtgcatagaaaaaccctggaaggccatacaacaatatatatagagtgatcgtctctgcttgctgagctaacaggggtgtcaagcttccattttggtatctacttctaaatacactcagaacaggagaaatttggactaattttcaaactacagacactttctaatcatgatgcatttcaaaagtggactcgaattaactgagttgcaaaacatgacagtgcccgaggatgataacattagcaatgactccaatgatttcaccgaagtagaaaatggtcagataaatagcaagtttatttctgatcgtgaaagtagaagaagtctcacaaacagccatttggaaaaaaagaagtgtgatgagtatattccaggtacaacctccttaggcatgtctgtttttaacctaagcaacgccattatgggcagtgggattttgggactcgcctttgccctggcaaacactggaatcctactttttctggtacttttgacttcagtgacattgctgtctatatattcaataaacctcctattgatctgttcaaaagaaacaggctgcatggtgtatgaaaagctgggggaacaagtctttggcaccacagggaagttcgtaatctttggagccacctctctacagaacactggagcaatgctgagctacctcttcatcgtaaaaaatgaactaccctctgccataaagtttctaatgggaaaggaagagacattttcagcctggtacgtggatggccgcgttctggtggtgatagttacctttggcataattctccctctgtgtctcttgaagaacttagggtatcttggctatactagtggattttccttgagctgtatggtttttttcctaattgtggttatttacaagaaatttcaaattccctgcattgttccagagctaaattcaacaataagtgctaattcaacaaatgctgacacgtgtacgccaaaatatgttaccttcaattcaaagaccgtgtatgctttacccaccattgcatttgcatttgtttgccacccgtcagtcctgccaatttacagtgagcttaaagaccgatcacagaaaaaaatgcagatggtttcaaacatctcctttttcgccatgtttgttatgtacttcttgactgccatttttggctacttgacattctatgacaacgtgcagtccgacctccttcacaaatatcagagtaaagatgacattctcatcctgacagtgcggctggctgtcattgttgctgtgatcctcacagtgccggtgttatttttcacggttcgttcatctttatttgaactggctaagaaaacaaagtttaatttatgtcgtcataccgtggttacctgcatactcttggttgttatcaacttgttggtgatcttcataccctccatgaaggatatttttggagtcgtaggagttacatctgctaacatgcttattttcattcttccttcatctctttatttaaaaatcacagaccaggatggagataaaggaactcaaagaatttgggctgcccttttcttgggcctgggggtgttgttctccttggtcagcattcccttggtcatctatgactgggcctgctcatcgagtagtgacgaaggccactgaaacccgccgagaaaaagaaacatccctgttgtctgctcagtcaagtccccacacatcagcaatctctcaccacttcttttgcaagtttacagaagcaaacagaaatgtacaggatacttaaaatggaataactttttggttgcaaaacagagacatggttctataatgcttcatgtccctccaagatttgagatcaatttagggattgtgaaatttttttttcaaatttcatacaatcatatttcccagtacttttcacaatcattttttacccatctaactctatgttttgtggcttcccggtctcttagaactttgaaaacatgatatacaataatgtttatttattatacatccagattctgaaataattttcctactgatgttcagctcacactatctgtacctttttagaagagaaaagaatcttgaattgtatatatttattttgctttacagaaaaaaatggtttcgtaaataatttgcctattttggttaacatagcacatggagataatcatctgaaagttatagggcactgccactgctgaatcagagcatgcccaatatttgaggtggctctgatttcctggcagctgaactcgggtagtccagtggcctagctggtaccacatctattcccatccagagacattctctggcaagtgttctcagctgaaaagtggttggggatgattcttaccttggtaattaaatgaagctacacatttgggtaatctagcaaatgaagtattttttccctcttggcaacttgtgtcagagttactctggtctgagtcaactttcgctggggaaaacctatggaacctactgcaaaaagattgtccaaaatgcctaagaaaatactcctctgatgcatttagccttcaaccctacctgtcttgctgaagggagaaaaatgttttagtacattataggcccagcagcttttattcatgtccaccagctagttgcacagagaatcatgtgtacctaactaaggatgatctaggataagtaactcctgttttatattgagtattttagggaagtctttaaaagacttgttttatatctataaatctaggttattacaaatacaagaattttgtaccttaaataagcctcatttctatttcttcttcattaattctccatctagtcttgtgaaaaaaaaaaaaaaccctcagagatagtctttgtgaagagcttctgacagaatcactgagtaccttccttcccccagatgaggaagacaagggggtctcagtgtctgtgctgtctcctcttctcttccccaaccaaggactgtgccattactgcccgtctcaactgtccatgcaggaggacagagttgcctggtactcttacccttgtccctctcctaaagggagcacaaggaaactgaagagactgaaaaagaagagagtttgtagctgaaaaagaatagggatagcaaggaaacccagaactgcattcccctaagtggggccatcccatgtgattgaattgtccatagcttgcctatggtgagaaatgtgcatgctccgtgagctggtctcttgaaacaggacttatgcttcctctatattctggttaaattttccaaacacataagttcactgagcacagatttcttatccagagacaagtagaatctaaccgcagactgttggcagagtttccaggcacttagccatgttcccttcctgactcaaatccccaaaggccttcactctcactgagaatcacactactgtcccatagataaggcaggcattgaagcacctgtcgtgatcctctaggggggagaatgaaaggttatttcctgcattgcatcatcatagcttttaatataatgctacagaatcatatccacattaggttagagttcagatatttggatatgaatacctaacctagccatatccatggccatctctgttcttttcagcaatgttttccatattatattagcaatgacagaaacagaacaagccaagatccagtcagttcttgggagcttgtctagagcaccaagtaatgaaatagccaggtagtgggatgactgtacctttaaaaatacataatttagtttgcaagctatattatgctactttctattttccttgttactttatagcaattcattttaccctcacaaagtcaatttagaaccttatcattaactgggatgtgtagtgatatttttgggcctctgggtttcatgtgtcaatacaaggaatatttatttaaaatagatttatttagaggaggcacagtgttgttgatctgtgtgacaccacccatatttttaaaaacctttgtatgtttctctaaatttgttgttgactgaatataatagaccctaccataattcgtcaaatatcactgattagttacatcctttgtgtgagattagctgtaaagtatactgctcttattcttattcagaatagttaattggtagccaaaaatacatgtatcacagatgttaggtcgaatttaaacagcacagtcaagtgctatggaagtttttctgctaaattagtagattaaagaatactataccctaggcatggggagcagcacgttttcctttggtaggtaggatctctatactagtgaacagtgccagttccacactttggacttagaactgttctctagttattgtaacacagaatactgtcaatccctaatttacttaatgttacttattggaagtggggctgatgaaatacgcacaggagggaaatctactgtgtttaggcacaggcagccccagtgtataaggagatcatattccaaaaggttgtcagttggttgtttgcaacctggaatgtattttcctttagagaccaggttatccatggtggttaggcccctagagcagctggaaaagatgatcaaaccaataggttagctgacatcgaataatgtaataggtttgctaaagaatctaaccatcaaatataatattgtttccagggagggtgtttgttcagagttgcctgttagtagaatctggactgtccatcccagccacatcccacctactggacagtaggggtagagatgccaccagactacaggtgaccagattggcctgaaacatggtgtccagtaaaaacggggaggaataagtccatgactgccggagagcttggtggtaggaggagggtgaaggagggtgagggggcctctcatgggtcagaaacctccagggacatccctcagctggtaactctgctgttgtccggagggttcaggcttggtgtgccttcttctgtttgtctgacttttggctcctatggttcatctcctgccctgcccaccacagaaaaggatgctgctgcacagcttctccaatgtaccagtcattgaggccagcgcgcagcacttttaatgtttttagtgctagtaactgtgttttaactctccaggaataagctgggaggttagaaaacaagaaaaaagggggaaaaaaaaacctctccacccactttccttttttacagttacagaccctgttgagaaaaagaagcacccagatgggtgatggtgatagggcttgtggtggacacagggttgtggtaagattcctcagtgcttcggcgagcacctaagactattaccctggaactgactgctttctagagcttgattcatgcctctaagccagtggttctcaaagtgtggcccctagaccagtagcatcagcatcatcggggacctcattagaatgcagattctcagccccctcccagacatggtgaagtcagaagctctcagggagggactcagcaaatgattctaaagcgcatcaagtttgagaaccaccctaagccaatgagtctcccttttacttcccattagtcctccctcaccagatgattcctaggactcatggtgcaacatacaggagccaggctttagggaggggaggaaaggagcctggcggcaggggtctctgcaatggcaagaaagtgagtgaatccagcgctgccacctggttatccccttctcgttgaaaatagcagcgcgggtgcaaattcctaaacacaggctgcctgcactcggtgttacctcgggctgaggcatgataatattttattttttaaagctgtgaggaaatgaaagtgaggctttggttggggcgaggcagttgtgaaagaaattaaaataaaagaccctttgtaaatgcagacttagaagaaatactgaatttgtgtcagaagttctccagtgtttgtgttaatcgtgtggtgataatcctgtcctccttttaaagcgaattctctactgaaaggtctgctctgcttaaggagctacaaactgctctcaaaagaatgaaatactgagttccaattcagtgaggcacagtgttggactatggcacatttagttggagtcggggggaggtcaggaatatgatcagataatggattttataccttagagcaaaatctattagtctctctcagtttatcaatttaaatggctttaggcttatagggggtgtaaactttaagaatataattctcccattcaagtttacagcaaacatctagccaccttcaaaacaaagaagatacagaccatcatttagcaatactaatacatgattttccttggggatggcaggtttgagaatcctttagcaacaggacatacttcccctaaattacagtgaattatttataacgagataaagctttcaggtacaagctgaaggtggggtgtctaacaactaaaaactatcactaaatctcaaagagaaagttcttgcaaaatatgtaaagttcacaaggtgcagacattttccttctttaggcttttatctaaggaagggctatgaaactgggcccatctgtatacaggctcaaatttacgtttttaaaggaagaatctatgcagctgaggcttattgcaggaaatacttcatttgtatgtaaatattattgtaaataaataggaggctgtatatttttgaagttgttgatccgcactgaaatagaagtctctaggatctgcatataaacaataaatgtttcctagaaattagtggtttgtttgggaattagaaaaatttacattctctcccaggtaacatagttctctcaatgtaaacttggaacctgaaaccctacttaatttagagaaagaaatgtctgagaaatagttcccttgatttcttatgctggcattaagatcaattatttaacagatagtcctctgagatacaagtaaggaatatttagacacaaatccttgtcctatagaaacagatatacccaaatgacaaattgtttcttcataatgatcttccatttttaacactgataccactacacagtacatatgaaaacagaagctggggagaagaatgtttttttcacaattgaattgctgcatttctcaaactttgggatctatgaaagcggggagagggaacctgaatattaattatgagcacaaatttgaaggaaagaaaacaaagaaccattatctaatcaagctttgaaagtcctgcatgtttgccttttattttagtgttgacgccaacatagactgtctaaggtatttttttccccaaacacttgaatcttggtcgttggtatgtaatccactctctagagtccagtgtactttagacttcatctgagtccaatacatgtaccacactactgttttattaatgtaaaaaccttgtaaatgaatttcagatgggtgatttaagtgagtcacaagtcacaaaactttgctattcatagttaatcaaatagaactgggttttttttttcagagtgtggtgtaaataaagaaatataagaagttctgttctataactgctctgttaacatagtttttaaacattaaaaaatgtgaactaaaagta

SEQ ID NO: 448200 - DNA, 7891 bp, Homo sapiens
ccaaaatgcaggccccagcggaacgcacagccctcctgtcctccgccggtgcccctttagccgccccacccccatccctaagggctctcattctccagctgcagccgcagctgggttccgaacacgccgccgggccccgggagggagaggggcaggtgccagggcggcgcgcagcctctgctcccggtgccagcttcagtgcgccgggcacacgcgcgccccgcaacccctccctcaccctttccccgttgctcaatctccgccagccgcggtcgctgcatcgtcagagagctgcaagagggaggcagcaaggtgcggccgccagcagtgacaccatgtgaccggcacggctcactgacacgcagctttggttaaagagcgggcgcacaggaggggaggagaccgcgcgcgggacggggaggaatggcctgtccgcgttaaaccatcacaagccatggttgcggaagggccacgcgtcccccagtaggagaatgactccgattcgtgaccctcagcgccggtgcatgtcgatatatttattgagtgtctactgtgtgccaggcactatatctatgtgcatagaaaaaccctggaaggccatacaacaatatatatagagtgatcgtctctgcttgctgagctaacagcaagtttatttctgatcgtgaaagtagaagaagtctcacaaacagccatttggaaaaaaagaagtgtgatgagtatattccaggtacaacctccttaggcatgtctgtttttaacctaagcaacgccattatgggcagtgggattttgggactcgcctttgccctggcaaacactggaatcctactttttctggtacttttgacttcagtgacattgctgtctatatattcaataaacctcctattgatctgttcaaaagaaacaggctgcatggtgtatgaaaagctgggggaacaagtctttggcaccacagggaagttcgtaatctttggagccacctctctacagaacactggagcaatgctgagctacctcttcatcgtaaaaaatgaactaccctctgccataaagtttctaatgggaaaggaagagacattttcagcctggtacgtggatggccgcgttctggtggtgatagttacctttggcataattctccctctgtgtctcttgaagaacttagggtatcttggctatactagtggattttccttgagctgtatggtttttttcctaattgtggttatttacaagaaatttcaaattccctgcattgttccagagctaaattcaacaataagtgctaattcaacaaatgctgacacgtgtacgccaaaatatgttaccttcaattcaaagaccgtgtatgctttacccaccattgcatttgcatttgtttgccacccgtcagtcctgccaatttacagtgagcttaaagaccgatcacagaaaaaaatgcagatggtttcaaacatctcctttttcgccatgtttgttatgtacttcttgactgccatttttggctacttgacattctatgacaacgtgcagtccgacctccttcacaaatatcagagtaaagatgacattctcatcctgacagtgcggctggctgtcattgttgctgtgatcctcacagtgccggtgttatttttcacggttcgttcatctttatttgaactggctaagaaaacaaagtttaatttatgtcgtcataccgtggttacctgcatactcttggttgttatcaacttgttggtgatcttcataccctccatgaaggatatttttggagtcgtaggagttacatctgctaacatgcttattttcattcttccttcatctctttatttaaaaatcacagaccaggatggagataaaggaactcaaagaatttgggctgcccttttcttgggcctgggggtgttgttctccttggtcagcattcccttggtcatctatgactgggcctgctcatcgagtagtgacgaaggccactgaaacccgccgagaaaaagaaacatccctgttgtctgctcagtcaagtccccacacatcagcaatctctcaccacttcttttgcaagtttacagaagcaaacagaaatgtacaggatacttaaaatggaataactttttggttgcaaaacagagacatggttctataatgcttcatgtccctccaagatttgagatcaatttagggattgtgaaatttttttttcaaatttcatacaatcatatttcccagtacttttcacaatcattttttacccatctaactctatgttttgtggcttcccggtctcttagaactttgaaaacatgatatacaataatgtttatttattatacatccagattctgaaataattttcctactgatgttcagctcacactatctgtacctttttagaagagaaaagaatcttgaattgtatatatttattttgctttacagaaaaaaatggtttcgtaaataatttgcctattttggttaacatagcacatggagataatcatctgaaagttatagggcactgccactgctgaatcagagcatgcccaatatttgaggtggctctgatttcctggcagctgaactcgggtagtccagtggcctagctggtaccacatctattcccatccagagacattctctggcaagtgttctcagctgaaaagtggttggggatgattcttaccttggtaattaaatgaagctacacatttgggtaatctagcaaatgaagtattttttccctcttggcaacttgtgtcagagttactctggtctgagtcaactttcgctggggaaaacctatggaacctactgcaaaaagattgtccaaaatgcctaagaaaatactcctctgatgcatttagccttcaaccctacctgtcttgctgaagggagaaaaatgttttagtacattataggcccagcagcttttattcatgtccaccagctagttgcacagagaatcatgtgtacctaactaaggatgatctaggataagtaactcctgttttatattgagtattttagggaagtctttaaaagacttgttttatatctataaatctaggttattacaaatacaagaattttgtaccttaaataagcctcatttctatttcttcttcattaattctccatctagtcttgtgaaaaaaaaaaaaaaccctcagagatagtctttgtgaagagcttctgacagaatcactgagtaccttccttcccccagatgaggaagacaagggggtctcagtgtctgtgctgtctcctcttctcttccccaaccaaggactgtgccattactgcccgtctcaactgtccatgcaggaggacagagttgcctggtactcttacccttgtccctctcctaaagggagcacaaggaaactgaagagactgaaaaagaagagagtttgtagctgaaaaagaatagggatagcaaggaaacccagaactgcattcccctaagtggggccatcccatgtgattgaattgtccatagcttgcctatggtgagaaatgtgcatgctccgtgagctggtctcttgaaacaggacttatgcttcctctatattctggttaaattttccaaacacataagttcactgagcacagatttcttatccagagacaagtagaatctaaccgcagactgttggcagagtttccaggcacttagccatgttcccttcctgactcaaatccccaaaggccttcactctcactgagaatcacactactgtcccatagataaggcaggcattgaagcacctgtcgtgatcctctaggggggagaatgaaaggttatttcctgcattgcatcatcatagcttttaatataatgctacagaatcatatccacattaggttagagttcagatatttggatatgaatacctaacctagccatatccatggccatctctgttcttttcagcaatgttttccatattatattagcaatgacagaaacagaacaagccaagatccagtcagttcttgggagcttgtctagagcaccaagtaatgaaatagccaggtagtgggatgactgtacctttaaaaatacataatttagtttgcaagctatattatgctactttctattttccttgttactttatagcaattcattttaccctcacaaagtcaatttagaaccttatcattaactgggatgtgtagtgatatttttgggcctctgggtttcatgtgtcaatacaaggaatatttatttaaaatagatttatttagaggaggcacagtgttgttgatctgtgtgacaccacccatatttttaaaaacctttgtatgtttctctaaatttgttgttgactgaatataatagaccctaccataattcgtcaaatatcactgattagttacatcctttgtgtgagattagctgtaaagtatactgctcttattcttattcagaatagttaattggtagccaaaaatacatgtatcacagatgttaggtcgaatttaaacagcacagtcaagtgctatggaagtttttctgctaaattagtagattaaagaatactataccctaggcatggggagcagcacgttttcctttggtaggtaggatctctatactagtgaacagtgccagttccacactttggacttagaactgttctctagttattgtaacacagaatactgtcaatccctaatttacttaatgttacttattggaagtggggctgatgaaatacgcacaggagggaaatctactgtgtttaggcacaggcagccccagtgtataaggagatcatattccaaaaggttgtcagttggttgtttgcaacctggaatgtattttcctttagagaccaggttatccatggtggttaggcccctagagcagctggaaaagatgatcaaaccaataggttagctgacatcgaataatgtaataggtttgctaaagaatctaaccatcaaatataatattgtttccagggagggtgtttgttcagagttgcctgttagtagaatctggactgtccatcccagccacatcccacctactggacagtaggggtagagatgccaccagactacaggtgaccagattggcctgaaacatggtgtccagtaaaaacggggaggaataagtccatgactgccggagagcttggtggtaggaggagggtgaaggagggtgagggggcctctcatgggtcagaaacctccagggacatccctcagctggtaactctgctgttgtccggagggttcaggcttggtgtgccttcttctgtttgtctgacttttggctcctatggttcatctcctgccctgcccaccacagaaaaggatgctgctgcacagcttctccaatgtaccagtcattgaggccagcgcgcagcacttttaatgtttttagtgctagtaactgtgttttaactctccaggaataagctgggaggttagaaaacaagaaaaaagggggaaaaaaaaacctctccacccactttccttttttacagttacagaccctgttgagaaaaagaagcacccagatgggtgatggtgatagggcttgtggtggacacagggttgtggtaagattcctcagtgcttcggcgagcacctaagactattaccctggaactgactgctttctagagcttgattcatgcctctaagccagtggttctcaaagtgtggcccctagaccagtagcatcagcatcatcggggacctcattagaatgcagattctcagccccctcccagacatggtgaagtcagaagctctcagggagggactcagcaaatgattctaaagcgcatcaagtttgagaaccaccctaagccaatgagtctcccttttacttcccattagtcctccctcaccagatgattcctaggactcatggtgcaacatacaggagccaggctttagggaggggaggaaaggagcctggcggcaggggtctctgcaatggcaagaaagtgagtgaatccagcgctgccacctggttatccccttctcgttgaaaatagcagcgcgggtgcaaattcctaaacacaggctgcctgcactcggtgttacctcgggctgaggcatgataatattttattttttaaagctgtgaggaaatgaaagtgaggctttggttggggcgaggcagttgtgaaagaaattaaaataaaagaccctttgtaaatgcagacttagaagaaatactgaatttgtgtcagaagttctccagtgtttgtgttaatcgtgtggtgataatcctgtcctccttttaaagcgaattctctactgaaaggtctgctctgcttaaggagctacaaactgctctcaaaagaatgaaatactgagttccaattcagtgaggcacagtgttggactatggcacatttagttggagtcggggggaggtcaggaatatgatcagataatggattttataccttagagcaaaatctattagtctctctcagtttatcaatttaaatggctttaggcttatagggggtgtaaactttaagaatataattctcccattcaagtttacagcaaacatctagccaccttcaaaacaaagaagatacagaccatcatttagcaatactaatacatgattttccttggggatggcaggtttgagaatcctttagcaacaggacatacttcccctaaattacagtgaattatttataacgagataaagctttcaggtacaagctgaaggtggggtgtctaacaactaaaaactatcactaaatctcaaagagaaagttcttgcaaaatatgtaaagttcacaaggtgcagacattttccttctttaggcttttatctaaggaagggctatgaaactgggcccatctgtatacaggctcaaatttacgtttttaaaggaagaatctatgcagctgaggcttattgcaggaaatacttcatttgtatgtaaatattattgtaaataaataggaggctgtatatttttgaagttgttgatccgcactgaaatagaagtctctaggatctgcatataaacaataaatgtttcctagaaattagtggtttgtttgggaattagaaaaatttacattctctcccaggtaacatagttctctcaatgtaaacttggaacctgaaaccctacttaatttagagaaagaaatgtctgagaaatagttcccttgatttcttatgctggcattaagatcaattatttaacagatagtcctctgagatacaagtaaggaatatttagacacaaatccttgtcctatagaaacagatatacccaaatgacaaattgtttcttcataatgatcttccatttttaacactgataccactacacagtacatatgaaaacagaagctggggagaagaatgtttttttcacaattgaattgctgcatttctcaaactttgggatctatgaaagcggggagagggaacctgaatattaattatgagcacaaatttgaaggaaagaaaacaaagaaccattatctaatcaagctttgaaagtcctgcatgtttgccttttattttagtgttgacgccaacatagactgtctaaggtatttttttccccaaacacttgaatcttggtcgttggtatgtaatccactctctagagtccagtgtactttagacttcatctgagtccaatacatgtaccacactactgttttattaatgtaaaaaccttgtaaatgaatttcagatgggtgatttaagtgagtcacaagtcacaaaactttgctattcatagttaatcaaatagaactgggttttttttttcagagtgtggtgtaaataaagaaatataagaagttctgttctataactgctctgttaacatagtttttaaacattaaaaaatgtgaactaaaagta

SEQ ID NO: 448201 - DNA, 8052 bp, Homo sapiens
ccaaaatgcaggccccagcggaacgcacagccctcctgtcctccgccggtgcccctttagccgccccacccccatccctaagggctctcattctccagctgcagccgcagctgggttccgaacacgccgccgggccccgggagggagaggggcaggtgccagggcggcgcgcagcctctgctcccggtgccagcttcagtgcgccgggcacacgcgcgccccgcaacccctccctcaccctttccccgttgctcaatctccgccagccgcggtcgctgcatcgtcagagagctgcaagagggaggcagcaaggtgcggccgccagcagtgacaccatgtgaccggcacggctcactgacacgcagctttggttaaagagcgggcgcacaggaggggaggagaccgcgcgcgggacggggaggaatggcctgtccgcgttaaaccatcacaagccatggttgcggaagggccacgcgtcccccagtaggagaatgactccgattcgtgaccctcagcgccggtgcatgtcgatatatttattgagtgtctactgtgtgccaggcactatatctatgtgcatagaaaaaccctggaaggccatacaacaatatatatagagtgatcgtctctgcttgctgagctaacaggggtgtcaagcttccattttggtatctacttctaaatacactcagaacaggagaaatttggactaattttcaaactacagacactttctaatcatgatgcatttcaaaagtggactcgaattaactgagttgcaaaacatgacagtgcccgaggatgataacattagcaatgactccaatgatttcaccgaagtagaaaatggtcagataaatagcaagtttatttctgatcgtgaaagtagaagaagtctcacaaacagccatttggaaaaaaagaagtgtgatgagtatattccaggtacaacctccttaggcatgtctgtttttaacctaagcaacgccattatgggcagtgggattttgggactcgcctttgccctggcaaacactggaatcctactttttctggtacttttgacttcagtgacattgctgtctatatattcaataaacctcctattgatctgttcaaaagaaacaggctgcatggtgtatgaaaagctgggggaacaagtctttggcaccacagggaagttcgtaatctttggagccacctctctacagaacactggagcaatgctgagctacctcttcatcgtaaaaaatgaactaccctctgccataaagtttctaatgggaaaggaagagacattttcagcctggtacgtggatggccgcgttctggtggtgatagttacctttggcataattctccctctgtgtctcttgaagaacttagggtatcttggctatactagtggattttccttgagctgtatggtttttttcctaattgtggttatttacaagaaatttcaaattccctgcattgttccagagctaaattcaacaataagtgctaattcaacaaatgctgacacgtgtacgccaaaatatgttaccttcaattcaaagaccgtgtatgctttacccaccattgcatttgcatttgtttgccacccgtcagtcctgccaatttacagtgagcttaaagaccgatcacagaaaaaaatgcagatggtttcaaacatctcctttttcgccatgtttgttatgtacttcttgactgccatttttggctacttgacattctatgacaacgtgcagtccgacctccttcacaaatatcagagtaaagatgacattctcatcctgacagtgcggctggctgtcattgttgctgtgatcctcacagtgccggtgttatttttcacggttcgttcatctttatttgaactggctaagaaaacaaagtttaatttatgtcgtcataccgtggttacctgcatactcttggttgttatcaacttgttggtgatcttcataccctccatgaaggatatttttggagtcgtaggagttacatctgctaacatgcttattttcattcttccttcatctctttatttaaaaatcacagaccaggatggagataaaggaactcaaagaatttgggctgcccttttcttgggcctgggggtgttgttctccttggtcagcattcccttggtcatctatgactgggcctgctcatcgagtagtgacgaaggccactgaaacccgccgagaaaaagaaacatccctgttgtctgctcagtcaagtccccacacatcagcaatctctcaccacttcttttgcaagtttacagaagcaaacagaaatgtacaggatacttaaaatggaataactttttggttgcaaaacagagacatggttctataatgcttcatgtccctccaagatttgagatcaatttagggattgtgaaatttttttttcaaatttcatacaatcatatttcccagtacttttcacaatcattttttacccatctaactctatgttttgtggcttcccggtctcttagaactttgaaaacatgatatacaataatgtttatttattatacatccagattctgaaataattttcctactgatgttcagctcacactatctgtacctttttagaagagaaaagaatcttgaattgtatatatttattttgctttacagaaaaaaatggtttcgtaaataatttgcctattttggttaacatagcacatggagataatcatctgaaagttatagggcactgccactgctgaatcagagcatgcccaatatttgaggtggctctgatttcctggcagctgaactcgggtagtccagtggcctagctggtaccacatctattcccatccagagacattctctggcaagtgttctcagctgaaaagtggttggggatgattcttaccttggtaattaaatgaagctacacatttgggtaatctagcaaatgaagtattttttccctcttggcaacttgtgtcagagttactctggtctgagtcaactttcgctggggaaaacctatggaacctactgcaaaaagattgtccaaaatgcctaagaaaatactcctctgatgcatttagccttcaaccctacctgtcttgctgaagggagaaaaatgttttagtacattataggcccagcagcttttattcatgtccaccagctagttgcacagagaatcatgtgtacctaactaaggatgatctaggataagtaactcctgttttatattgagtattttagggaagtctttaaaagacttgttttatatctataaatctaggttattacaaatacaagaattttgtaccttaaataagcctcatttctatttcttcttcattaattctccatctagtcttgtgaaaaaaaaaaaaaaccctcagagatagtctttgtgaagagcttctgacagaatcactgagtaccttccttcccccagatgaggaagacaagggggtctcagtgtctgtgctgtctcctcttctcttccccaaccaaggactgtgccattactgcccgtctcaactgtccatgcaggaggacagagttgcctggtactcttacccttgtccctctcctaaagggagcacaaggaaactgaagagactgaaaaagaagagagtttgtagctgaaaaagaatagggatagcaaggaaacccagaactgcattcccctaagtggggccatcccatgtgattgaattgtccatagcttgcctatggtgagaaatgtgcatgctccgtgagctggtctcttgaaacaggacttatgcttcctctatattctggttaaattttccaaacacataagttcactgagcacagatttcttatccagagacaagtagaatctaaccgcagactgttggcagagtttccaggcacttagccatgttcccttcctgactcaaatccccaaaggccttcactctcactgagaatcacactactgtcccatagataaggcaggcattgaagcacctgtcgtgatcctctaggggggagaatgaaaggttatttcctgcattgcatcatcatagcttttaatataatgctacagaatcatatccacattaggttagagttcagatatttggatatgaatacctaacctagccatatccatggccatctctgttcttttcagcaatgttttccatattatattagcaatgacagaaacagaacaagccaagatccagtcagttcttgggagcttgtctagagcaccaagtaatgaaatagccaggtagtgggatgactgtacctttaaaaatacataatttagtttgcaagctatattatgctactttctattttccttgttactttatagcaattcattttaccctcacaaagtcaatttagaaccttatcattaactgggatgtgtagtgatatttttgggcctctgggtttcatgtgtcaatacaaggaatatttatttaaaatagatttatttagaggaggcacagtgttgttgatctgtgtgacaccacccatatttttaaaaacctttgtatgtttctctaaatttgttgttgactgaatataatagaccctaccataattcgtcaaatatcactgattagttacatcctttgtgtgagattagctgtaaagtatactgctcttattcttattcagaatagttaattggtagccaaaaatacatgtatcacagatgttaggtcgaatttaaacagcacagtcaagtgctatggaagtttttctgctaaattagtagattaaagaatactataccctaggcatggggagcagcacgttttcctttggtaggtaggatctctatactagtgaacagtgccagttccacactttggacttagaactgttctctagttattgtaacacagaatactgtcaatccctaatttacttaatgttacttattggaagtggggctgatgaaatacgcacaggagggaaatctactgtgtttaggcacaggcagccccagtgtataaggagatcatattccaaaaggttgtcagttggttgtttgcaacctggaatgtattttcctttagagaccaggttatccatggtggttaggcccctagagcagctggaaaagatgatcaaaccaataggttagctgacatcgaataatgtaataggtttgctaaagaatctaaccatcaaatataatattgtttccagggagggtgtttgttcagagttgcctgttagtagaatctggactgtccatcccagccacatcccacctactggacagtaggggtagagatgccaccagactacaggtgaccagattggcctgaaacatggtgtccagtaaaaacggggaggaataagtccatgactgccggagagcttggtggtaggaggagggtgaaggagggtgagggggcctctcatgggtcagaaacctccagggacatccctcagctggtaactctgctgttgtccggagggttcaggcttggtgtgccttcttctgtttgtctgacttttggctcctatggttcatctcctgccctgcccaccacagaaaaggatgctgctgcacagcttctccaatgtaccagtcattgaggccagcgcgcagcacttttaatgtttttagtgctagtaactgtgttttaactctccaggaataagctgggaggttagaaaacaagaaaaaagggggaaaaaaaaacctctccacccactttccttttttacagttacagaccctgttgagaaaaagaagcacccagatgggtgatggtgatagggcttgtggtggacacagggttgtggtaagattcctcagtgcttcggcgagcacctaagactattaccctggaactgactgctttctagagcttgattcatgcctctaagccagtggttctcaaagtgtggcccctagaccagtagcatcagcatcatcggggacctcattagaatgcagattctcagccccctcccagacatggtgaagtcagaagctctcagggagggactcagcaaatgattctaaagcgcatcaagtttgagaaccaccctaagccaatgagtctcccttttacttcccattagtcctccctcaccagatgattcctaggactcatggtgcaacatacaggagccaggctttagggaggggaggaaaggagcctggcggcaggggtctctgcaatggcaagaaagtgagtgaatccagcgctgccacctggttatccccttctcgttgaaaatagcagcgcgggtgcaaattcctaaacacaggctgcctgcactcggtgttacctcgggctgaggcatgataatattttattttttaaagctgtgaggaaatgaaagtgaggctttggttggggcgaggcagttgtgaaagaaattaaaataaaagaccctttgtaaatgcagacttagaagaaatactgaatttgtgtcagaagttctccagtgtttgtgttaatcgtgtggtgataatcctgtcctccttttaaagcgaattctctactgaaaggtctgctctgcttaaggagctacaaactgctctcaaaagaatgaaatactgagttccaattcagtgaggcacagtgttggactatggcacatttagttggagtcggggggaggtcaggaatatgatcagataatggattttataccttagagcaaaatctattagtctctctcagtttatcaatttaaatggctttaggcttatagggggtgtaaactttaagaatataattctcccattcaagtttacagcaaacatctagccaccttcaaaacaaagaagatacagaccatcatttagcaatactaatacatgattttccttggggatggcaggtttgagaatcctttagcaacaggacatacttcccctaaattacagtgaattatttataacgagataaagctttcaggtacaagctgaaggtggggtgtctaacaactaaaaactatcactaaatctcaaagagaaagttcttgcaaaatatgtaaagttcacaaggtgcagacattttccttctttaggcttttatctaaggaagggctatgaaactgggcccatctgtatacaggctcaaatttacgtttttaaaggaagaatctatgcagctgaggcttattgcaggaaatacttcatttgtatgtaaatattattgtaaataaataggaggctgtatatttttgaagttgttgatccgcactgaaatagaagtctctaggatctgcatataaacaataaatgtttcctagaaattagtggtttgtttgggaattagaaaaatttacattctctcccaggtaacatagttctctcaatgtaaacttggaacctgaaaccctacttaatttagagaaagaaatgtctgagaaatagttcccttgatttcttatgctggcattaagatcaattatttaacagatagtcctctgagatacaagtaaggaatatttagacacaaatccttgtcctatagaaacagatatacccaaatgacaaattgtttcttcataatgatcttccatttttaacactgataccactacacagtacatatgtcaaactttgggatctatgaaagcggggagagggaacctgaatattaattatgagcacaaatttgaaggaaagaaaacaaagaaccattatctaatcaagctttgaaagtcctgcatgtttgccttttattttagtgttgacgccaacatagactgtctaaggtatttttttccccaaacacttgaatcttggtcgttggtatgtaatccactctctagagtccagtgtactttagacttcatctgagtccaatacatgtaccacactactgttttattaatgtaaaaaccttgtaaatgaatttcagatgggtgatttaagtgagtcacaagtcacaaaactttgctattcatagttaatcaaatagaactgggttttttttttcagagtgtggtgtaaataaagaaatataagaagttctgttctataactgctctgttaacatagtttttaaacattaaaaaatgtgaactaaaagta

SEQ ID NO: 448202 - DNA, 8052 bp, Homo sapiens
ccaaaatgcaggccccagcggaacgcacagccctcctgtcctccgccggtgcccctttagccgccccacccccatccctaagggctctcattctccagctgcagccgcagctgggttccgaacacgccgccgggccccgggagggagaggggcaggtgccagggcggcgcgcagcctctgctcccggtgccagcttcagtgcgccgggcacacgcgcgccccgcaacccctccctcaccctttccccgttgctcaatctccgccagccgcggtcgctgcatcgtcagagagctgcaagagggaggcagcaaggtgcggccgccagcagtgacaccatgtgaccggcacggctcactgacacgcagctttggttaaagagcgggcgcacaggaggggaggagaccgcgcgcgggacggggaggaatggcctgtccgcgttaaaccatcacaagccatggttgcggaagggccacgcgtcccccagtaggagaatgactccgattcgtgaccctcagcgccggtgcatgtcgatatatttattgagtgtctactgtgtgccaggcactatatctatgtgcatagaaaaaccctggaaggccatacaacaatatatatagagtgatcgtctctgcttgctgagctaacaggggtgtcaagcttccattttggtatctacttctaaatacactcagaacaggagaaatttggactaattttcaaactacagacactttctaatcatgatgcatttcaaaagtggactcgaattaactgagttgcaaaacatgacagtgcccgaggatgataacattagcaatgactccaatgatttcaccgaagtagaaaatggtcagataaatagcaagtttatttctgatcgtgaaagtagaagaagtctcacaaacagccatttggaaaaaaagaagtgtgatgagtatattccaggtacaacctccttaggcatgtctgtttttaacctaagcaacgccattatgggcagtgggattttgggactcgcctttgccctggcaaacactggaatcctactttttctggtacttttgacttcagtgacattgctgtctatatattcaataaacctcctattgatctgttcaaaagaaacaggctgcatggtgtatgaaaagctgggggaacaagtctttggcaccacagggaagttcgtaatctttggagccacctctctacagaacactggagcaatgctgagctacctcttcatcgtaaaaaatgaactaccctctgccataaagtttctaatgggaaaggaagagacattttcagcctggtacgtggatggccgcgttctggtggtgatagttacctttggcataattctccctctgtgtctcttgaagaacttagggtatcttggctatactagtggattttccttgagctgtatggtttttttcctaattgtggttatttacaagaaatttcaaattccctgcattgttccagagctaaattcaacaataagtgctaattcaacaaatgctgacacgtgtacgccaaaatatgttaccttcaattcaaagaccgtgtatgctttacccaccattgcatttgcatttgtttgccacccgtcagtcctgccaatttacagtgagcttaaagaccgatcacagaaaaaaatgcagatggtttcaaacatctcctttttcgccatgtttgttatgtacttcttgactgccatttttggctacttgacattctatgacaacgtgcagtccgacctccttcacaaatatcagagtaaagatgacattctcatcctgacagtgcggctggctgtcattgttgctgtgatcctcacagtgccggtgttatttttcacggttcgttcatctttatttgaactggctaagaaaacaaagtttaatttatgtcgtcataccgtggttacctgcatactcttggttgttatcaacttgttggtgatcttcataccctccatgaaggatatttttggagtcgtaggagttacatctgctaacatgcttattttcattcttccttcatctctttatttaaaaatcacagaccaggatggagataaaggaactcaaagaatttgggctgcccttttcttgggcctgggggtgttgttctccttggtcagcattcccttggtcatctatgactgggcctgctcatcgagtagtgacgaaggccactgaaacccgccgagaaaaagaaacatccctgttgtctgctcagtcaagtccccacacatcagcaatctctcaccacttcttttgcaagtttacagaagcaaacagaaatgtacaggatacttaaaatggaataactttttggttgcaaaacagagacatggttctataatgcttcatgtccctccaagatttgagatcaatttagggattgtgaaatttttttttcaaatttcatacaatcatatttcccagtacttttcacaatcattttttacccatctaactctatgttttgtggcttcccggtctcttagaactttgaaaacatgatatacaataatgtttatttattatacatccagattctgaaataattttcctactgatgttcagctcacactatctgtacctttttagaagagaaaagaatcttgaattgtatatatttattttgctttacagaaaaaaatggtttcgtaaataatttgcctattttggttaacatagcacatggagataatcatctgaaagttatagggcactgccactgctgaatcagagcatgcccaatatttgaggtggctctgatttcctggcagctgaactcgggtagtccagtggcctagctggtaccacatctattcccatccagagacattctctggcaagtgttctcagctgaaaagtggttggggatgattcttaccttggtaattaaatgaagctacacatttgggtaatctagcaaatgaagtattttttccctcttggcaacttgtgtcagagttactctggtctgagtcaactttcgctggggaaaacctatggaacctactgcaaaaagattgtccaaaatgcctaagaaaatactcctctgatgcatttagccttcaaccctacctgtcttgctgaagggagaaaaatgttttagtacattataggcccagcagcttttattcatgtccaccagctagttgcacagagaatcatgtgtacctaactaaggatgatctaggataagtaactcctgttttatattgagtattttagggaagtctttaaaagacttgttttatatctataaatctaggttattacaaatacaagaattttgtaccttaaataagcctcatttctatttcttcttcattaattctccatctagtcttgtgaaaaaaaaaaaaaaccctcagagatagtctttgtgaagagcttctgacagaatcactgagtaccttccttcccccagatgaggaagacaagggggtctcagtgtctgtgctgtctcctcttctcttccccaaccaaggactgtgccattactgcccgtctcaactgtccatgcaggaggacagagttgcctggtactcttacccttgtccctctcctaaagggagcacaaggaaactgaagagactgaaaaagaagagagtttgtagctgaaaaagaatagggatagcaaggaaacccagaactgcattcccctaagtggggccatcccatgtgattgaattgtccatagcttgcctatggtgagaaatgtgcatgctccgtgagctggtctcttgaaacaggacttatgcttcctctatattctggttaaattttccaaacacataagttcactgagcacagatttcttatccagagacaagtagaatctaaccgcagactgttggcagagtttccaggcacttagccatgttcccttcctgactcaaatccccaaaggccttcactctcactgagaatcacactactgtcccatagataaggcaggcattgaagcacctgtcgtgatcctctaggggggagaatgaaaggttatttcctgcattgcatcatcatagcttttaatataatgctacagaatcatatccacattaggttagagttcagatatttggatatgaatacctaacctagccatatccatggccatctctgttcttttcagcaatgttttccatattatattagcaatgacagaaacagaacaagccaagatccagtcagttcttgggagcttgtctagagcaccaagtaatgaaatagccaggtagtgggatgactgtacctttaaaaatacataatttagtttgcaagctatattatgctactttctattttccttgttactttatagcaattcattttaccctcacaaagtcaatttagaaccttatcattaactgggatgtgtagtgatatttttgggcctctgggtttcatgtgtcaatacaaggaatatttatttaaaatagatttatttagaggaggcacagtgttgttgatctgtgtgacaccacccatatttttaaaaacctttgtatgtttctctaaatttgttgttgactgaatataatagaccctaccataattcgtcaaatatcactgattagttacatcctttgtgtgagattagctgtaaagtatactgctcttattcttattcagaatagttaattggtagccaaaaatacatgtatcacagatgttaggtcgaatttaaacagcacagtcaagtgctatggaagtttttctgctaaattagtagattaaagaatactataccctaggcatggggagcagcacgttttcctttggtaggtaggatctctatactagtgaacagtgccagttccacactttggacttagaactgttctctagttattgtaacacagaatactgtcaatccctaatttacttaatgttacttattggaagtggggctgatgaaatacgcacaggagggaaatctactgtgtttaggcacaggcagccccagtgtataaggagatcatattccaaaaggttgtcagttggttgtttgcaacctggaatgtattttcctttagagaccaggttatccatggtggttaggcccctagagcagctggaaaagatgatcaaaccaataggttagctgacatcgaataatgtaataggtttgctaaagaatctaaccatcaaatataatattgtttccagggagggtgtttgttcagagttgcctgttagtagaatctggactgtccatcccagccacatcccacctactggacagtaggggtagagatgccaccagactacaggtgaccagattggcctgaaacatggtgtccagtaaaaacggggaggaataagtccatgactgccggagagcttggtggtaggaggagggtgaaggagggtgagggggcctctcatgggtcagaaacctccagggacatccctcagctggtaactctgctgttgtccggagggttcaggcttggtgtgccttcttctgtttgtctgacttttggctcctatggttcatctcctgccctgcccaccacagaaaaggatgctgctgcacagcttctccaatgtaccagtcattgaggccagcgcgcagcacttttaatgtttttagtgctagtaactgtgttttaactctccaggaataagctgggaggttagaaaacaagaaaaaagggggaaaaaaaaacctctccacccactttccttttttacagttacagaccctgttgagaaaaagaagcacccagatgggtgatggtgatagggcttgtggtggacacagggttgtggtaagattcctcagtgcttcggcgagcacctaagactattaccctggaactgactgctttctagagcttgattcatgcctctaagccagtggttctcaaagtgtggcccctagaccagtagcatcagcatcatcggggacctcattagaatgcagattctcagccccctcccagacatggtgaagtcagaagctctcagggagggactcagcaaatgattctaaagcgcatcaagtttgagaaccaccctaagccaatgagtctcccttttacttcccattagtcctccctcaccagatgattcctaggactcatggtgcaacatacaggagccaggctttagggaggggaggaaaggagcctggcggcaggggtctctgcaatggcaagaaagtgagtgaatccagcgctgccacctggttatccccttctcgttgaaaatagcagcgcgggtgcaaattcctaaacacaggctgcctgcactcggtgttacctcgggctgaggcatgataatattttattttttaaagctgtgaggaaatgaaagtgaggctttggttggggcgaggcagttgtgaaagaaattaaaataaaagaccctttgtaaatgcagacttagaagaaatactgaatttgtgtcagaagttctccagtgtttgtgttaatcgtgtggtgataatcctgtcctccttttaaagcgaattctctactgaaaggtctgctctgcttaaggagctacaaactgctctcaaaagaatgaaatactgagttccaattcagtgaggcacagtgttggactatggcacatttagttggagtcggggggaggtcaggaatatgatcagataatggattttataccttagagcaaaatctattagtctctctcagtttatcaatttaaatggctttaggcttatagggggtgtaaactttaagaatataattctcccattcaagtttacagcaaacatctagccaccttcaaaacaaagaagatacagaccatcatttagcaatactaatacatgattttccttggggatggcaggtttgagaatcctttagcaacaggacatacttcccctaaattacagtgaattatttataacgagataaagctttcaggtacaagctgaaggtggggtgtctaacaactaaaaactatcactaaatctcaaagagaaagttcttgcaaaatatgtaaagttcacaaggtgcagacattttccttctttaggcttttatctaaggaagggctatgaaactgggcccatctgtatacaggctcaaatttacgtttttaaaggaagaatctatgcagctgaggcttattgcaggaaatacttcatttgtatgtaaatattattgtaaataaataggaggctgtatatttttgaagttgttgatccgcactgaaatagaagtctctaggatctgcatataaacaataaatgtttcctagaaattagtggtttgtttgggaattagaaaaatttacattctctcccaggtaacatagttctctcaatgtaaacttggaacctgaaaccctacttaatttagagaaagaaatgtctgagaaatagttcccttgatttcttatgctggcattaagatcaattatttaacagatagtcctctgagatacaagtaaggaatatttagacacaaatccttgtcctatagaaacagatatacccaaatgacaaattgtttcttcataatgatcttccatttttaacactgataccactacacagtacatatgaaaacagaagctggggagaagaatgtttttttcacaattgaattgctgcatttctcaaactttgggatctatgaaagcggggagagggaacctgaatattaattatgagcacaaatttgaaggaaattattttagtgttgacgccaacatagactgtctaaggtatttttttccccaaacacttgaatcttggtcgttggtatgtaatccactctctagagtccagtgtactttagacttcatctgagtccaatacatgtaccacactactgttttattaatgtaaaaaccttgtaaatgaatttcagatgggtgatttaagtgagtcacaagtcacaaaactttgctattcatagttaatcaaatagaactgggttttttttttcagagtgtggtgtaaataaagaaatataagaagttctgttctataactgctctgttaacatagtttttaaacattaaaaaatgtgaactaaaagta

SEQ ID NO: 448203 - DNA, 8022 bp, Homo sapiens
  misc_feature (7785)..(7785): n is a, c, g, or t
ccaaaatgcaggccccagcggaacgcacagccctcctgtcctccgccggtgcccctttagccgccccacccccatccctaagggctctcattctccagctgcagccgcagctgggttccgaacacgccgccgggccccgggagggagaggggcaggtgccagggcggcgcgcagcctctgctcccggtgccagcttcagtgcgccgggcacacgcgcgccccgcaacccctccctcaccctttccccgttgctcaatctccgccagccgcggtcgctgcatcgtcagagagctgcaagagggaggcagcaaggtgcggccgccagcagtgacaccatgtgaccggcacggctcactgacacgcagctttggttaaagagcgggcgcacaggaggggaggagaccgcgcgcgggacggggaggaatggcctgtccgcgttaaaccatcacaagccatggttgcggaagggccacgcgtcccccagtaggagaatgactccgattcgtgaccctcagcgccggtgcatgtcgatatatttattgagtgtctactgtgtgccaggcactatatctatgtgcatagaaaaaccctggaaggccatacaacaatatatatagagtgatcgtctctgcttgctgagctaacaggggtgtcaagcttccattttggtatctacttctaaatacactcagaacaggagaaatttggactaattttcaaactacagacactttctaatcatgatgcatttcaaaagtggactcgaattaactgagttgcaaaacatgacagtgcccgaggatgataacattagcaatgactccaatgatttcaccgaagtagaaaatggtcagataaatagcaagtttatttctgatcgtgaaagtagaagaagtctcacaaacagccatttggaaaaaaagaagtgtgatgagtatattccaggtacaacctccttaggcatgtctgtttttaacctaagcaacgccattatgggcagtgggattttgggactcgcctttgccctggcaaacactggaatcctactttttctggtacttttgacttcagtgacattgctgtctatatattcaataaacctcctattgatctgttcaaaagaaacaggctgcatggtgtatgaaaagctgggggaacaagtctttggcaccacagggaagttcgtaatctttggagccacctctctacagaacactggagcaatgctgagctacctcttcatcgtaaaaaatgaactaccctctgccataaagtttctaatgggaaaggaagagacattttcagcctggtacgtggatggccgcgttctggtggtgatagttacctttggcataattctccctctgtgtctcttgaagaacttagggtatcttggctatactagtggattttccttgagctgtatggtttttttcctaattgtggttatttacaagaaatttcaaattccctgcattgttccagagctaaattcaacaataagtgctaattcaacaaatgctgacacgtgtacgccaaaatatgttaccttcaattcaaagaccgtgtatgctttacccaccattgcatttgcatttgtttgccacccgtcagtcctgccaatttacagtgagcttaaagaccgatcacagaaaaaaatgcagatggtttcaaacatctcctttttcgccatgtttgttatgtacttcttgactgccatttttggctacttgacattctatgacaacgtgcagtccgacctccttcacaaatatcagagtaaagatgacattctcatcctgacagtgcggctggctgtcattgttgctgtgatcctcacagtgccggtgttatttttcacggttcgttcatctttatttgaactggctaagaaaacaaagtttaatttatgtcgtcataccgtggttacctgcatactcttggttgttatcaacttgttggtgatcttcataccctccatgaaggatatttttggagtcgtaggagttacatctgctaacatgcttattttcattcttccttcatctctttatttaaaaatcacagaccaggatggagataaaggaactcaaagaatttgggctgcccttttcttgggcctgggggtgttgttctccttggtcagcattcccttggtcatctatgactgggcctgctcatcgagtagtgacgaaggccactgaaacccgccgagaaaaagaaacatccctgttgtctgctcagtcaagtccccacacatcagcaatctctcaccacttcttttgcaagtttacagaagcaaacagaaatgtacaggatacttaaaatggaataactttttggttgcaaaacagagacatggttctataatgcttcatgtccctccaagatttgagatcaatttagggattgtgaaatttttttttcaaatttcatacaatcatatttcccagtacttttcacaatcattttttacccatctaactctatgttttgtggcttcccggtctcttagaactttgaaaacatgatatacaataatgtttatttattatacatccagattctgaaataattttcctactgatgttcagctcacactatctgtacctttttagaagagaaaagaatcttgaattgtatatatttattttgctttacagaaaaaaatggtttcgtaaataatttgcctattttggttaacatagcacatggagataatcatctgaaagttatagggcactgccactgctgaatcagagcatgcccaatatttgaggtggctctgatttcctggcagctgaactcgggtagtccagtggcctagctggtaccacatctattcccatccagagacattctctggcaagtgttctcagctgaaaagtggttggggatgattcttaccttggtaattaaatgaagctacacatttgggtaatctagcaaatgaagtattttttccctcttggcaacttgtgtcagagttactctggtctgagtcaactttcgctggggaaaacctatggaacctactgcaaaaagattgtccaaaatgcctaagaaaatactcctctgatgcatttagccttcaaccctacctgtcttgctgaagggagaaaaatgttttagtacattataggcccagcagcttttattcatgtccaccagctagttgcacagagaatcatgtgtacctaactaaggatgatctaggataagtaactcctgttttatattgagtattttagggaagtctttaaaagacttgttttatatctataaatctaggttattacaaatacaagaattttgtaccttaaataagcctcatttctatttcttcttcattaattctccatctagtcttgtgaaaaaaaaaaaaaaccctcagagatagtctttgtgaagagcttctgacagaatcactgagtaccttccttcccccagatgaggaagacaagggggtctcagtgtctgtgctgtctcctcttctcttccccaaccaaggactgtgccattactgcccgtctcaactgtccatgcaggaggacagagttgcctggtactcttacccttgtccctctcctaaagggagcacaaggaaactgaagagactgaaaaagaagagagtttgtagctgaaaaagaatagggatagcaaggaaacccagaactgcattcccctaagtggggccatcccatgtgattgaattgtccatagcttgcctatggtgagaaatgtgcatgctccgtgagctggtctcttgaaacaggacttatgcttcctctatattctggttaaattttccaaacacataagttcactgagcacagatttcttatccagagacaagtagaatctaaccgcagactgttggcagagtttccaggcacttagccatgttcccttcctgactcaaatccccaaaggccttcactctcactgagaatcacactactgtcccatagataaggcaggcattgaagcacctgtcgtgatcctctaggggggagaatgaaaggttatttcctgcattgcatcatcatagcttttaatataatgctacagaatcatatccacattaggttagagttcagatatttggatatgaatacctaacctagccatatccatggccatctctgttcttttcagcaatgttttccatattatattagcaatgacagaaacagaacaagccaagatccagtcagttcttgggagcttgtctagagcaccaagtaatgaaatagccaggtagtgggatgactgtacctttaaaaatacataatttagtttgcaagctatattatgctactttctattttccttgttactttatagcaattcattttaccctcacaaagtcaatttagaaccttatcattaactgggatgtgtagtgatatttttgggcctctgggtttcatgtgtcaatacaaggaatatttatttaaaatagatttatttagaggaggcacagtgttgttgatctgtgtgacaccacccatatttttaaaaacctttgtatgtttctctaaatttgttgttgactgaatataatagaccctaccataattcgtcaaatatcactgattagttacatcctttgtgtgagattagctgtaaagtatactgctcttattcttattcagaatagttaattggtagccaaaaatacatgtatcacagatgttaggtcgaatttaaacagcacagtcaagtgctatggaagtttttctgctaaattagtagattaaagaatactataccctaggcatggggagcagcacgttttcctttggtaggtaggatctctatactagtgaacagtgccagttccacactttggacttagaactgttctctagttattgtaacacagaatactgtcaatccctaatttacttaatgttacttattggaagtggggctgatgaaatacgcacaggagggaaatctactgtgtttaggcacaggcagccccagtgtataaggagatcatattccaaaaggttgtcagttggttgtttgcaacctggaatgtattttcctttagagaccaggttatccatggtggttaggcccctagagcagctggaaaagatgatcaaaccaataggttagctgacatcgaataatgtaataggtttgctaaagaatctaaccatcaaatataatattgtttccagggagggtgtttgttcagagttgcctgttagtagaatctggactgtccatcccagccacatcccacctactggacagtaggggtagagatgccaccagactacaggtgaccagattggcctgaaacatggtgtccagtaaaaacggggaggaataagtccatgactgccggagagcttggtggtaggaggagggtgaaggagggtgagggggcctctcatgggtcagaaacctccagggacatccctcagctggtaactctgctgttgtccggagggttcaggcttggtgtgccttcttctgtttgtctgacttttggctcctatggttcatctcctgccctgcccaccacagaaaaggatgctgctgcacagcttctccaatgtaccagtcattgaggccagcgcgcagcacttttaatgtttttagtgctagtaactgtgttttaactctccaggaataagctgggaggttagaaaacaagaaaaaagggggaaaaaaaaacctctccacccactttccttttttacagttacagaccctgttgagaaaaagaagcacccagatgggtgatggtgatagggcttgtggtggacacagggttgtggtaagattcctcagtgcttcggcgagcacctaagactattaccctggaactgactgctttctagagcttgattcatgcctctaagccagtggttctcaaagtgtggcccctagaccagtagcatcagcatcatcggggacctcattagaatgcagattctcagccccctcccagacatggtgaagtcagaagctctcagggagggactcagcaaatgattctaaagcgcatcaagtttgagaaccaccctaagccaatgagtctcccttttacttcccattagtcctccctcaccagatgattcctaggactcatggtgcaacatacaggagccaggctttagggaggggaggaaaggagcctggcggcaggggtctctgcaatggcaagaaagtgagtgaatccagcgctgccacctggttatccccttctcgttgaaaatagcagcgcgggtgcaaattcctaaacacaggctgcctgcactcggtgttacctcgggctgaggcatgataatattttattttttaaagctgtgaggaaatgaaagtgaggctttggttggggcgaggcagttgtgaaagaaattaaaataaaagaccctttgtaaatgcagacttagaagaaatactgaatttgtgtcagaagttctccagtgtttgtgttaatcgtgtggtgataatcctgtcctccttttaaagcgaattctctactgaaaggtctgctctgcttaaggagctacaaactgctctcaaaagaatgaaatactgagttccaattcagtgaggcacagtgttggactatggcacatttagttggagtcggggggaggtcaggaatatgatcagataatggattttataccttagagcaaaatctattagtctctctcagtttatcaatttaaatggctttaggcttatagggggtgtaaactttaagaatataattctcccattcaagtttacagcaaacatctagccaccttcaaaacaaagaagatacagaccatcatttagcaatactaatacatgattttccttggggatggcaggtttgagaatcctttagcaacaggacatacttcccctaaattacagtgaattatttataacgagataaagctttcaggtacaagctgaaggtggggtgtctaacaactaaaaactatcactaaatctcaaagagaaagttcttgcaaaatatgtaaagttcacaaggtgcagacattttccttctttaggcttttatctaaggaagggctatgaaactgggcccatctgtatacaggctcaaatttacgtttttaaaggaagaatctatgcagctgaggcttattgcaggaaatacttcatttgtatgtaaatattattgtaaataaataggaggctgtatatttttgaagttgttgatccgcactgaaatagaagtctctaggatctgcatataaacaataaatgtttcctagaaattagtggtttgtttgggaattagaaaaatttacattctctcccaggtaacatagttctctcaatgtaaacttggaacctgaaaccctacttaatttagagaaagaaatgtctgagaaatagttcccttgatttcttatgctggcattaagatcaattatttaacagatagtcctctgagatacaagtaaggaatatttagacacaaatccttgtcctatagaaacagatatacccaaatgacaaattgtttcttcataatgatcttccatttttaacactgataccactacacagtacatatgaaaacagaagctggggagaagaatgtttttttcacaattgaattgctgcatttctcaaactttgggatctatgaaagcggggagagggaacctgaatattaattatgagcacaaatttgaaggaaaaaaaaaaaaaaactcgagctcgtgccgaattcggcacgaggtgagactctgtctcaaaaaaaaaaaactttattccaagaggctgttngagtgtgtgtctgcctaagcctccttatagcctatttttctacttgctgagagagtaatattaaaggaacagtgagggagttgaaggagagcctagttagagcgttcccattctggccttttgggtttgcactgtgcggaagatgctctttcatcactttgaagcccatcctgtgcagaggtgggactctgtggctgtccactggcaccagggcagactgtacctaacagacttggt

SEQ ID NO: 448204 - DNA, 4635 bp, Homo sapiens
  misc_feature (25)..(26): n is a, c, g, or t
  misc_feature (31)..(32): n is a, c, g, or t
cctgactcttgaggatccccccggnncatgnnaaccaaggactgtgccattactgcccgtctcaactgtccatgcaggaggacagagttgcctggtactcttacccttgtccctctcctaaagggagcacaaggaaactgaagagactgaaaaagaagagagtttgtagctgaaaaagaatagggatagcaaggaaacccagaactgcattcccctaagtggggccatcccatgtgattgaattgtccatagcttgcctatggtgagaaatgtgcatgctccgtgagctggtctcttgaaacaggacttatgcttcctctatattctggttaaattttccaaacacataagttcactgagcacagatttcttatccagagacaagtagaatctaaccgcagactgttggcagagtttccaggcacttagccatgttcccttcctgactcaaatccccaaaggccttcactctcactgagaatcacactactgtcccatagataaggcaggcattgaagcacctgtcgtgatcctctaggggggagaatgaaaggttatttcctgcattgcatcatcatagcttttaatataatgctacagaatcatatccacattaggttagagttcagatatttggatatgaatacctaacctagccatatccatggccatctctgttcttttcagcaatgttttccatattatattagcaatgacagaaacagaacaagccaagatccagtcagttcttgggagcttgtctagagcaccaagtaatgaaatagccaggtagtgggatgactgtacctttaaaaatacataatttagtttgcaagctatattatgctactttctattttccttgttactttatagcaattcattttaccctcacaaagtcaatttagaaccttatcattaactgggatgtgtagtgatatttttgggcctctgggtttcatgtgtcaatacaaggaatatttatttaaaatagatttatttagaggaggcacagtgttgttgatctgtgtgacaccacccatatttttaaaaacctttgtatgtttctctaaatttgttgttgactgaatataatagaccctaccataattcgtcaaatatcactgattagttacatcctttgtgtgagattagctgtaaagtatactgctcttattcttattcagaatagttaattggtagccaaaaatacatgtatcacagatgttaggtcgaatttaaacagcacagtcaagtgctatggaagtttttctgctaaattagtagattaaagaatactataccctaggcatggggagcagcacgttttcctttggtaggtaggatctctatactagtgaacagtgccagttccacactttggacttagaactgttctctagttattgtaacacagaatactgtcaatccctaatttacttaatgttacttattggaagtggggctgatgaaatacgcacaggagggaaatctactgtgtttaggcacaggcagccccagtgtataaggagatcatattccaaaaggttgtcagttggttgtttgcaacctggaatgtattttcctttagagaccaggttatccatggtggttaggcccctagagcagctggaaaagatgatcaaaccaataggttagctgacatcgaataatgtaataggtttgctaaagaatctaaccatcaaatataatattgtttccagggagggtgtttgttcagagttgcctgttagtagaatctggactgtccatcccagccacatcccacctactggacagtaggggtagagatgccaccagactacaggtgaccagattggcctgaaacatggtgtccagtaaaaacggggaggaataagtccatgactgccggagagcttggtggtaggaggagggtgaaggagggtgagggggcctctcatgggtcagaaacctccagggacatccctcagctggtaactctgctgttgtccggagggttcaggcttggtgtgccttcttctgtttgtctgacttttggctcctatggttcatctcctgccctgcccaccacagaaaaggatgctgctgcacagcttctccaatgtaccagtcattgaggccagcgcgcagcacttttaatgtttttagtgctagtaactgtgttttaactctccaggaataagctgggaggttagaaaacaagaaaaaagggggaaaaaaaaacctctccacccactttccttttttacagttacagaccctgttgagaaaaagaagcacccagatgggtgatggtgatagggcttgtggtggacacagggttgtggtaagattcctcagtgcttcggcgagcacctaagactattaccctggaactgactgctttctagagcttgattcatgcctctaagccagtggttctcaaagtgtggcccctagaccagtagcatcagcatcatcggggacctcattagaatgcagattctcagccccctcccagacatggtgaagtcagaagctctcagggagggactcagcaaatgattctaaagcgcatcaagtttgagaaccaccctaagccaatgagtctcccttttacttcccattagtcctccctcaccagatgattcctaggactcatggtgcaacatacaggagccaggctttagggaggggaggaaaggagcctggcggcaggggtctctgcaatggcaagaaagtgagtgaatccagcgctgccacctggttatccccttctcgttgaaaatagcagcgcgggtgcaaattcctaaacacaggctgcctgcactcggtgttacctcgggctgaggcatgataatattttattttttaaagctgtgaggaaatgaaagtgaggctttggttggggcgaggcagttgtgaaagaaattaaaataaaagaccctttgtaaatgcagacttagaagaaatactgaatttgtgtcagaagttctccagtgtttgtgttaatcgtgtggtgataatcctgtcctccttttaaagcgaattctctactgaaaggtctgctctgcttaaggagctacaaactgctctcaaaagaatgaaatactgagttccaattcagtgaggcacagtgttggactatggcacatttagttggagtcggggggaggtcaggaatatgatcagataatggattttataccttagagcaaaatctattagtctctctcagtttatcaatttaaatggctttaggcttatagggggtgtaaactttaagaatataattctcccattcaagtttacagcaaacatctagccaccttcaaaacaaagaagatacagaccatcatttagcaatactaatacatgattttccttggggatggcaggtttgagaatcctttagcaacaggacatacttcccctaaattacagtgaattatttataacgagataaagctttcaggtacaagctgaaggtggggtgtctaacaactaaaaactatcactaaatctcaaagagaaagttcttgcaaaatatgtaaagttcacaaggtgcagacattttccttctttaggcttttatctaaggaagggctatgaaactgggcccatctgtatacaggctcaaatttacgtttttaaaggaagaatctatgcagctgaggcttattgcaggaaatacttcatttgtatgtaaatattattgtaaataaataggaggctgtatatttttgaagttgttgatccgcactgaaatagaagtctctaggatctgcatataaacaataaatgtttcctagaaattagtggtttgtttgggaattagaaaaatttacattctctcccaggtaacatagttctctcaatgtaaacttggaacctgaaaccctacttaatttagagaaagaaatgtctgagaaatagttcccttgatttcttatgctggcattaagatcaattatttaacagatagtcctctgagatacaagtaaggaatatttagacacaaatccttgtcctatagaaacagatatacccaaatgacaaattgtttcttcataatgatcttccatttttaacactgataccactacacagtacatatgaaaacagaagctggggagaagaatgtttttttcacaattgaattgctgcatttctcaaactttgggatctatgaaagcggggagagggaacctgaatattaattatgagcacaaatttgaaggaaagaaaacaaagaaccattatctaatcaagctttgaaagtcctgcatgtttgccttttattttagtgttgacgccaacatagactgtctaaggtatttttttccccaaacacttgaatcttggtcgttggtatgtaatccactctctagagtccagtgtactttagacttcatctgagtccaatacatgtaccacactactgttttattaatgtaaaaaccttgtaaatgaatttcagatgggtgatttaagtgagtcacaagtcacaaaactttgctattcatagttaatcaaatagaactgggttttttttttcagagtgtggtgtaaataaagaaatataagaagttctgttctataactgctctgttaacatagtttttaaacattaaaaaatgtgaactaaaagta

SEQ ID NO: 448205 - DNA, 7714 bp, Homo sapiens
  misc_feature (7339)..(7339): n is a, c, g, or t
  misc_feature (7421)..(7421): n is a, c, g, or t
ccaaaatgcaggccccagcggaacgcacagccctcctgtcctccgccggtgcccctttagccgccccacccccatccctaagggctctcattctccagctgcagccgcagctgggttccgaacacgccgccgggccccgggagggagaggggcaggtgccagggcggcgcgcagcctctgctcccggtgccagcttcagtgcgccgggcacacgcgcgccccgcaacccctccctcaccctttccccgttgctcaatctccgccagccgcggtcgctgcatcgtcagagagctgcaagagggaggcagcaaggtgcggccgccagcagtgacaccatgtgaccggcacggctcactgacacgcagctttggttaaagagcgggcgcacaggaggggaggagaccgcgcgcgggacggggaggaatggcctgtccgcgttaaaccatcacaagccatggttgcggaagggccacgcgtcccccagtaggagaatgactccgattcgtgaccctcagcgccggtgcatgtcgatatatttattgagtgtctactgtgtgccaggcactatatctatgtgcatagaaaaaccctggaaggccatacaacaatatatatagagtgatcgtctctgcttgctgagctaacaggggtgtcaagcttccattttggtatctacttctaaatacactcagaacaggagaaatttggactaattttcaaactacagacactttctaatcatgatgcatttcaaaagtggactcgaattaactgagttgcaaaacatgacagtgcccgaggatgataacattagcaatgactccaatgatttcaccgaagtagaaaatggtcagataaatagcaagtttatttctgatcgtgaaagtagaagaagtctcacaaacagccatttggaaaaaaagaagtgtgatgagtatattccaggtacaacctccttaggcatgtctgtttttaacctaagcaacgccattatgggcagtgggattttgggactcgcctttgccctggcaaacactggaatcctactttttctggtacttttgacttcagtgacattgctgtctatatattcaataaacctcctattgatctgttcaaaagaaacaggctgcatggtgtatgaaaagctgggggaacaagtctttggcaccacagggaagttcgtaatctttggagccacctctctacagaacactggagcaatgctgagctacctcttcatcgtaaaaaatgaactaccctctgccataaagtttctaatgggaaaggaagagacattttcagcctggtacgtggatggccgcgttctggtggtgatagttacctttggcataattctccctctgtgtctcttgaagaacttagggtatcttggctatactagtggattttccttgagctgtatggtttttttcctaattgtggttatttacaagaaatttcaaattccctgcattgttccagagctaaattcaacaataagtgctaattcaacaaatgctgacacgtgtacgccaaaatatgttaccttcaattcaaagaccgtgtatgctttacccaccattgcatttgcatttgtttgccacccgtcagtcctgccaatttacagtgagcttaaagaccgatcacagaaaaaaatgcagatggtttcaaacatctcctttttcgccatgtttgttatgtacttcttgactgccatttttggctacttgacattctatgacaacgtgcagtccgacctccttcacaaatatcagagtaaagatgacattctcatcctgacagtgcggctggctgtcattgttgctgtgatcctcacagtgccggtgttatttttcacggttcgttcatctttatttgaactggctaagaaaacaaagtttaatttatgtcgtcataccgtggttacctgcatactcttggttgttatcaacttgttggtgatcttcataccctccatgaaggatatttttggagtcgtaggagttacatctgctaacatgcttattttcattcttccttcatctctttatttaaaaatcacagaccaggatggagataaaggaactcaaagaatttgggctgcccttttcttgggcctgggggtgttgttctccttggtcagcattcccttggtcatctatgactgggcctgctcatcgagtagtgacgaaggccactgaaacccgccgagaaaaagaaacatccctgttgtctgctcagtcaagtccccacacatcagcaatctctcaccacttcttttgcaagtttacagaagcaaacagaaatgtacaggatacttaaaatggaataactttttggttgcaaaacagagacatggttctataatgcttcatgtccctccaagatttgagatcaatttagggattgtgaaatttttttttcaaatttcatacaatcatatttcccagtacttttcacaatcattttttacccatctaactctatgttttgtggcttcccggtctcttagaactttgaaaacatgatatacaataatgtttatttattatacatccagattctgaaataattttcctactgatgttcagctcacactatctgtacctttttagaagagaaaagaatcttgaattgtatatatttattttgctttacagaaaaaaatggtttcgtaaataatttgcctattttggttaacatagcacatggagataatcatctgaaagttatagggcactgccactgctgaatcagagcatgcccaatatttgaggtggctctgatttcctggcagctgaactcgggtagtccagtggcctagctggtaccacatctattcccatccagagacattctctggcaagtgttctcagctgaaaagtggttggggatgattcttaccttggtaattaaatgaagctacacatttgggtaatctagcaaatgaagtattttttccctcttggcaacttgtgtcagagttactctggtctgagtcaactttcgctggggaaaacctatggaacctactgcaaaaagattgtccaaaatgcctaagaaaatactcctctgatgcatttagccttcaaccctacctgtcttgctgaagggagaaaaatgttttagtacattataggcccagcagcttttattcatgtccaccagctagttgcacagagaatcatgtgtacctaactaaggatgatctaggataagtaactcctgttttatattgagtattttagggaagtctttaaaagacttgttttatatctataaatctaggttattacaaatacaagaattttgtaccttaaataagcctcatttctatttcttcttcattaattctccatctagtcttgtgaaaaaaaaaaaaaaccctcagagatagtctttgtgaagagcttctgacagaatcactgagtaccttccttcccccagatgaggaagacaagggggtctcagtgtctgtgctgtctcctcttctcttccccaaccaaggactgtgccattactgcccgtctcaactgtccatgcaggaggacagagttgcctggtactcttacccttgtccctctcctaaagggagcacaaggaaactgaagagactgaaaaagaagagagtttgtagctgaaaaagaatagggatagcaaggaaacccagaactgcattcccctaagtggggccatcccatgtgattgaattgtccatagcttgcctatggtgagaaatgtgcatgctccgtgagctggtctcttgaaacaggacttatgcttcctctatattctggttaaattttccaaacacataagttcactgagcacagatttcttatccagagacaagtagaatctaaccgcagactgttggcagagtttccaggcacttagccatgttcccttcctgactcaaatccccaaaggccttcactctcactgagaatcacactactgtcccatagataaggcaggcattgaagcacctgtcgtgatcctctaggggggagaatgaaaggttatttcctgcattgcatcatcatagcttttaatataatgctacagaatcatatccacattaggttagagttcagatatttggatatgaatacctaacctagccatatccatggccatctctgttcttttcagcaatgttttccatattatattagcaatgacagaaacagaacaagccaagatccagtcagttcttgggagcttgtctagagcaccaagtaatgaaatagccaggtagtgggatgactgtacctttaaaaatacataatttagtttgcaagctatattatgctactttctattttccttgttactttatagcaattcattttaccctcacaaagtcaatttagaaccttatcattaactgggatgtgtagtgatatttttgggcctctgggtttcatgtgtcaatacaaggaatatttatttaaaatagatttatttagaggaggcacagtgttgttgatctgtgtgacaccacccatatttttaaaaacctttgtatgtttctctaaatttgttgttgactgaatataatagaccctaccataattcgtcaaatatcactgattagttacatcctttgtgtgagattagctgtaaagtatactgctcttattcttattcagaatagttaattggtagccaaaaatacatgtatcacagatgttaggtcgaatttaaacagcacagtcaagtgctatggaagtttttctgctaaattagtagattaaagaatactataccctaggcatggggagcagcacgttttcctttggtaggtaggatctctatactagtgaacagtgccagttccacactttggacttagaactgttctctagttattgtaacacagaatactgtcaatccctaatttacttaatgttacttattggaagtggggctgatgaaatacgcacaggagggaaatctactgtgtttaggcacaggcagccccagtgtataaggagatcatattccaaaaggttgtcagttggttgtttgcaacctggaatgtattttcctttagagaccaggttatccatggtggttaggcccctagagcagctggaaaagatgatcaaaccaataggttagctgacatcgaataatgtaataggtttgctaaagaatctaaccatcaaatataatattgtttccagggagggtgtttgttcagagttgcctgttagtagaatctggactgtccatcccagccacatcccacctactggacagtaggggtagagatgccaccagactacaggtgaccagattggcctgaaacatggtgtccagtaaaaacggggaggaataagtccatgactgccggagagcttggtggtaggaggagggtgaaggagggtgagggggcctctcatgggtcagaaacctccagggacatccctcagctggtaactctgctgttgtccggagggttcaggcttggtgtgccttcttctgtttgtctgacttttggctcctatggttcatctcctgccctgcccaccacagaaaaggatgctgctgcacagcttctccaatgtaccagtcattgaggccagcgcgcagcacttttaatgtttttagtgctagtaactgtgttttaactctccaggaataagctgggaggttagaaaacaagaaaaaagggggaaaaaaaaacctctccacccactttccttttttacagttacagaccctgttgagaaaaagaagcacccagatgggtgatggtgatagggcttgtggtggacacagggttgtggtaagattcctcagtgcttcggcgagcacctaagactattaccctggaactgactgctttctagagcttgattcatgcctctaagccagtggttctcaaagtgtggcccctagaccagtagcatcagcatcatcggggacctcattagaatgcagattctcagccccctcccagacatggtgaagtcagaagctctcagggagggactcagcaaatgattctaaagcgcatcaagtttgagaaccaccctaagccaatgagtctcccttttacttcccattagtcctccctcaccagatgattcctaggactcatggtgcaacatacaggagccaggctttagggaggggaggaaaggagcctggcggcaggggtctctgcaatggcaagaaagtgagtgaatccagcgctgccacctggttatccccttctcgttgaaaatagcagcgcgggtgcaaattcctaaacacaggctgcctgcactcggtgttacctcgggctgaggcatgataatattttattttttaaagctgtgaggaaatgaaagtgaggctttggttggggcgaggcagttgtgaaagaaattaaaataaaagaccctttgtaaatgcagacttagaagaaatactgaatttgtgtcagaagttctccagtgtttgtgttaatcgtgtggtgataatcctgtcctccttttaaagcgaattctctactgaaaggtctgctctgcttaaggagctacaaactgctctcaaaagaatgaaatactgagttccaattcagtgaggcacagtgttggactatggcacatttagttggagtcggggggaggtcaggaatatgatcagataatggattttataccttagagcaaaatctattagtctctctcagtttatcaatttaaatggctttaggcttatagggggtgtaaactttaagaatataattctcccattcaagtttacagcaaacatctagccaccttcaaaacaaagaagatacagaccatcatttagcaatactaatacatgattttccttggggatggcaggtttgagaatcctttagcaacaggacatacttcccctaaattacagtgaattatttataacgagataaagctttcaggtacaagctgaaggtggggtgtctaacaactaaaaactatcactaaatctcaaagagaaagttcttgcaaaatatgtaaagttcacaaggtgcagacattttccttctttaggcttttatctaaggaagggctatgaaactgggcccatctgtatacaggctcaaatttacgtttttaaaggaagaatctatgcagctgaggcttattgcaggaaatacttcatttgtatgtaaatattattgtaaataaataggaggctgtatatttttgaagttgttgatccgcactgaaatagaagtctctaggatctgcatataaacaataaatgtttcctagaaattagtggtttgtttgggaattagaaaaatttacattctctcccaggtaacataggcttcttcctccaaaanttgctttaaaaaaaaccctttttggggggggggaaaaaaaaacccccccctttggggaaaaaaaaaaaaacccaccctttanaaaaacttttttttttcaaaaaaacaacgtttttgcttttttcataaaaaccgggggccaaaaaaggcggcgggcaacaaccaacacaacaaaacagggggggggcaaaaaaacaaaacacacaccaacattttttgttgggggggggggtgttctttaccccccttttttttgggggggcggggcaaacaaacagggggggggaaaaacaacacacacaacactacgacaaacagttttttcttctaacacaaaagagcgagagggggggggaggtcattatattatataac

SEQ ID NO: 448206 - DNA, 7222 bp, Homo sapiens
ccaaaatgcaggccccagcggaacgcacagccctcctgtcctccgccggtgcccctttagccgccccacccccatccctaagggctctcattctccagctgcagccgcagctgggttccgaacacgccgccgggccccgggagggagaggggcaggtgccagggcggcgcgcagcctctgctcccggtgccagcttcagtgcgccgggcacacgcgcgccccgcaacccctccctcaccctttccccgttgctcaatctccgccagccgcggtcgctgcatcgtcagagagctgcaagagggaggcagcaaggtgcggccgccagcagtgacaccatgtgaccggcacggctcactgacacgcagctttggttaaagagcgggcgcacaggaggggaggagaccgcgcgcgggacggggaggaatggcctgtccgcgttaaaccatcacaagccatggttgcggaagggccacgcgtcccccagtaggagaatgactccgattcgtgaccctcagcgccggtgcatgtcgatatatttattgagtgtctactgtgtgccaggcactatatctatgtgcatagaaaaaccctggaaggccatacaacaatatatatagagtgatcgtctctgcttgctgagctaacaggggtgtcaagcttccattttggtatctacttctaaatacactcagaacaggagaaatttggactaattttcaaactacagacactttctaatcatgatgcatttcaaaagtggactcgaattaactgagttgcaaaacatgacagtgcccgaggatgataacattagcaatgactccaatgatttcaccgaagtagaaaatggtcagataaatagcaagtttatttctgatcgtgaaagtagaagaagtctcacaaacagccatttggaaaaaaagaagtgtgatgagtatattccaggtacaacctccttaggcatgtctgtttttaacctaagcaacgccattatgggcagtgggattttgggactcgcctttgccctggcaaacactggaatcctactttttctggtacttttgacttcagtgacattgctgtctatatattcaataaacctcctattgatctgttcaaaagaaacaggctgcatggtgtatgaaaagctgggggaacaagtctttggcaccacagggaagttcgtaatctttggagccacctctctacagaacactggagcaatgctgagctacctcttcatcgtaaaaaatgaactaccctctgccataaagtttctaatgggaaaggaagagacattttcagcctggtacgtggatggccgcgttctggtggtgatagttacctttggcataattctccctctgtgtctcttgaagaacttagggtatcttggctatactagtggattttccttgagctgtatggtttttttcctaattgtggttatttacaagaaatttcaaattccctgcattgttccagagctaaattcaacaataagtgctaattcaacaaatgctgacacgtgtacgccaaaatatgttaccttcaattcaaagaccgtgtatgctttacccaccattgcatttgcatttgtttgccacccgtcagtcctgccaatttacagtgagcttaaagaccgatcacagaaaaaaatgcagatggtttcaaacatctcctttttcgccatgtttgttatgtacttcttgactgccatttttggctacttgacattctatgacaacgtgcagtccgacctccttcacaaatatcagagtaaagatgacattctcatcctgacagtgcggctggctgtcattgttgctgtgatcctcacagtgccggtgttatttttcacggttcgttcatctttatttgaactggctaagaaaacaaagtttaatttatgtcgtcataccgtggttacctgcatactcttggttgttatcaacttgttggtgatcttcataccctccatgaaggatatttttggagtcgtaggagttacatctgctaacatgcttattttcattcttccttcatctctttatttaaaaatcacagaccaggatggagataaaggaactcaaagaatttgggctgcccttttcttgggcctgggggtgttgttctccttggtcagcattcccttggtcatctatgactgggcctgctcatcgagtagtgacgaaggccactgaaacccgccgagaaaaagaaacatccctgttgtctgctcagtcaagtccccacacatcagcaatctctcaccacttcttttgcaagtttacagaagcaaacagaaatgtacaggatacttaaaatggaataactttttggttgcaaaacagagacatggttctataatgcttcatgtccctccaagatttgagatcaatttagggattgtgaaatttttttttcaaatttcatacaatcatatttcccagtacttttcacaatcattttttacccatctaactctatgttttgtggcttcccggtctcttagaactttgaaaacatgatatacaataatgtttatttattatacatccagattctgaaataattttcctactgatgttcagctcacactatctgtacctttttagaagagaaaagaatcttgaattgtatatatttattttgctttacagaaaaaaatggtttcgtaaataatttgcctattttggttaacatagcacatggagataatcatctgaaagttatagggcactgccactgctgaatcagagcatgcccaatatttgaggtggctctgatttcctggcagctgaactcgggtagtccagtggcctagctggtaccacatctattcccatccagagacattctctggcaagtgttctcagctgaaaagtggttggggatgattcttaccttggtaattaaatgaagctacacatttgggtaatctagcaaatgaagtattttttccctcttggcaacttgtgtcagagttactctggtctgagtcaactttcgctggggaaaacctatggaacctactgcaaaaagattgtccaaaatgcctaagaaaatactcctctgatgcatttagccttcaaccctacctgtcttgctgaagggagaaaaatgttttagtacattataggcccagcagcttttattcatgtccaccagctagttgcacagagaatcatgtgtacctaactaaggatgatctaggataagtaactcctgttttatattgagtattttagggaagtctttaaaagacttgttttatatctataaatctaggttattacaaatacaagaattttgtaccttaaataagcctcatttctatttcttcttcattaattctccatctagtcttgtgaaaaaaaaaaaaaaccctcagagatagtctttgtgaagagcttctgacagaatcactgagtaccttccttcccccagatgaggaagacaagggggtctcagtgtctgtgctgtctcctcttctcttccccaaccaaggactgtgccattactgcccgtctcaactgtccatgcaggaggacagagttgcctggtactcttacccttgtccctctcctaaagggagcacaaggaaactgaagagactgaaaaagaagagagtttgtagctgaaaaagaatagggatagcaaggaaacccagaactgcattcccctaagtggggccatcccatgtgattgaattgtccatagcttgcctatggtgagaaatgtgcatgctccgtgagctggtctcttgaaacaggacttatgcttcctctatattctggttaaattttccaaacacataagttcactgagcacagatttcttatccagagacaagtagaatctaaccgcagactgttggcagagtttccaggcacttagccatgttcccttcctgactcaaatccccaaaggccttcactctcactgagaatcacactactgtcccatagataaggcaggcattgaagcacctgtcgtgatcctctaggggggagaatgaaaggttatttcctgcattgcatcatcatagcttttaatataatgctacagaatcatatccacattaggttagagttcagatatttggatatgaatacctaacctagccatatccatggccatctctgttcttttcagcaatgttttccatattatattagcaatgacagaaacagaacaagccaagatccagtcagttcttgggagcttgtctagagcaccaagtaatgaaatagccaggtagtgggatgactgtacctttaaaaatacataatttagtttgcaagctatattatgctactttctattttccttgttactttatagcaattcattttaccctcacaaagtcaatttagaaccttatcattaactgggatgtgtagtgatatttttgggcctctgggtttcatgtgtcaatacaaggaatatttatttaaaatagatttatttagaggaggcacagtgttgttgatctgtgtgacaccacccatatttttaaaaacctttgtatgtttctctaaatttgttgttgactgaatataatagaccctaccataattcgtcaaatatcactgattagttacatcctttgtgtgagattagctgtaaagtatactgctcttattcttattcagaatagttaattggtagccaaaaatacatgtatcacagatgttaggtcgaatttaaacagcacagtcaagtgctatggaagtttttctgctaaattagtagattaaagaatactataccctaggcatggggagcagcacgttttcctttggtaggtaggatctctatactagtgaacagtgccagttccacactttggacttagaactgttctctagttattgtaacacagaatactgtcaatccctaatttacttaatgttacttattggaagtggggctgatgaaatacgcacaggagggaaatctactgtgtttaggcacaggcagccccagtgtataaggagatcatattccaaaaggttgtcagttggttgtttgcaacctggaatgtattttcctttagagaccaggttatccatggtggttaggcccctagagcagctggaaaagatgatcaaaccaataggttagctgacatcgaataatgtaataggtttgctaaagaatctaaccatcaaatataatattgtttccagggagggtgtttgttcagagttgcctgttagtagaatctggactgtccatcccagccacatcccacctactggacagtaggggtagagatgccaccagactacaggtgaccagattggcctgaaacatggtgtccagtaaaaacggggaggaataagtccatgactgccggagagcttggtggtaggaggagggtgaaggagggtgagggggcctctcatgggtcagaaacctccagggacatccctcagctggtaactctgctgttgtccggagggttcaggcttggtgtgccttcttctgtttgtctgacttttggctcctatggttcatctcctgccctgcccaccacagaaaaggatgctgctgcacagcttctccaatgtaccagtcattgaggccagcgcgcagcacttttaatgtttttagtgctagtaactgtgttttaactctccaggaataagctgggaggttagaaaacaagaaaaaagggggaaaaaaaaacctctccacccactttccttttttacagttacagaccctgttgagaaaaagaagcacccagatgggtgatggtgatagggcttgtggtggacacagggttgtggtaagattcctcagtgcttcggcgagcacctaagactattaccctggaactgactgctttctagagcttgattcatgcctctaagccagtggttctcaaagtgtggcccctagaccagtagcatcagcatcatcggggacctcattagaatgcagattctcagccccctcccagacatggtgaagtcagaagctctcagggagggactcagcaaatgattctaaagcgcatcaagtttgagaaccaccctaagccaatgagtctcccttttacttcccattagtcctccctcaccagatgattcctaggactcatggtgcaacatacaggagccaggctttagggaggggaggaaaggagcctggcggcaggggtctctgcaatggcaagaaagtgagtgaatccagcgctgccacctggttatccccttctcgttgaaaatagcagcgcgggtgcaaattcctaaacacaggctgcctgcactcggtgttacctcgggctgaggcatgataatattttattttttaaagctgtgaggaaatgaaagtgaggctttggttggggcgaggcagttgtgaaagaaattaaaataaaagaccctttgtaaatgcagacttagaagaaatactgaatttgtgtcagaagttctccagtgtttgtgttaatcgtgtggtgataatcctgtcctccttttaaagcgaattctctactgaaaggtctgctctgcttaaggagctacaaactgctctcaaaagaatgaaatactgagttccaattcagtgaggcacagtgttggactatggcacatttagttggagtcggggggaggtcaggaatatgatcagataatggattttataccttagagcaaaatctattagtctctctcagtttatcaatttaaatggctttaggcttatagggggtgtaaactttaagaatataattctcccattcaagtttacagcaaacatctagccaccttcaaaacaaagaagatacagaccatcatttagcaatactaatacatgattttccttggggatggcaggtttgagaatcctttagcaacaggacatacttcccctaaattacagtgaattatttataacgagataaagctttcaggtacaagctgaaggtggggtgtctaacaactaaaaactatcactaatgtgctgttcagccatttagtttttaatcatgcattttaatttccttttaatctcttggtcttctataatctctatctgtacagctttgtcaccatttttttttatttcctcactggaagtagtcccagaaaaaaacacaaaacctcaaaacggttaacttgagcttataatttcctttctctttctttcttactttctttgcctttctttcacacaggtaagacctataacaacaaatggacaattt

SEQ ID NO: 448207 - DNA, 2619 bp, Homo sapiens
  misc_feature (178)..(178): n is a, c, g, or t
gtaaataaaataccaaagactaattttatttcaggggtcagaactattcatcctttatctttttatttgaaaccacatttcaccatataaaaattagagcctaggtgtgttgttgcacacctgtggtctcatctactctggaggctgaagcgggaggagtgcttgagcccagcctggnaacatagcaagattccatctcagaaaaaaaaacctctccacccactttccttttttacagttacagaccctgttgagaaaaagaagcacccagatgggtgatggtgatagggcttgtggtggacacagggttgtggtaagattcctcagtgcttcggcgagcacctaagactattaccctggaactgactgctttctagagcttgattcatgcctctaagccagtggttctcaaagtgtggcccctagaccagtagcatcagcatcatcggggacctcattagaatgcagattctcagccccctcccagacatggtgaagtcagaagctctcagggagggactcagcaaatgattctaaagcgcatcaagtttgagaaccaccctaagccaatgagtctcccttttacttcccattagtcctccctcaccagatgattcctaggactcatggtgcaacatacaggagccaggctttagggaggggaggaaaggagcctggcggcaggggtctctgcaatggcaagaaagtgagtgaatccagcgctgccacctggttatccccttctcgttgaaaatagcagcgcgggtgcaaattcctaaacacaggctgcctgcactcggtgttacctcgggctgaggcatgataatattttattttttaaagctgtgaggaaatgaaagtgaggctttggttggggcgaggcagttgtgaaagaaattaaaataaaagaccctttgtaaatgcagacttagaagaaatactgaatttgtgtcagaagttctccagtgtttgtgttaatcgtgtggtgataatcctgtcctccttttaaagcgaattctctactgaaaggtctgctctgcttaaggagctacaaactgctctcaaaagaatgaaatactgagttccaattcagtgaggcacagtgttggactatggcacatttagttggagtcggggggaggtcaggaatatgatcagataatggattttataccttagagcaaaatctattagtctctctcagtttatcaatttaaatggctttaggcttatagggggtgtaaactttaagaatataattctcccattcaagtttacagcaaacatctagccaccttcaaaacaaagaagatacagaccatcatttagcaatactaatacatgattttccttggggatggcaggtttgagaatcctttagcaacaggacatacttcccctaaattacagtgaattatttataacgagataaagctttcaggtacaagctgaaggtggggtgtctaacaactaaaaactatcactaaatctcaaagagaaagttcttgcaaaatatgtaaagttcacaaggtgcagacattttccttctttaggcttttatctaaggaagggctatgaaactgggcccatctgtatacaggctcaaatttacgtttttaaaggaagaatctatgcagctgaggcttattgcaggaaatacttcatttgtatgtaaatattattgtaaataaataggaggctgtatatttttgaagttgttgatccgcactgaaatagaagtctctaggatctgcatataaacaataaatgtttcctagaaattagtggtttgtttgggaattagaaaaatttacattctctcccaggtaacatagttctctcaatgtaaacttggaacctgaaaccctacttaatttagagaaagaaatgtctgagaaatagttcccttgatttcttatgctggcattaagatcaattatttaacagatagtcctctgagatacaagtaaggaatatttagacacaaatccttgtcctatagaaacagatatacccaaatgacaaattgtttcttcataatgatcttccatttttaacactgataccactacacagtacatatgaaaacagaagctggggagaagaatgtttttttcacaattgaattgctgcatttctcaaactttgggatctatgaaagcggggagagggaacctgaatattaattatgagcacaaatttgaaggaaagaaaacaaagaaccattatctaatcaagctttgaaagtcctgcatgtttgccttttattttagtgttgacgccaacatagactgtctaaggtatttttttccccaaacacttgaatcttggtcgttggtatgtaatccactctctagagtccagtgtactttagacttcatctgagtccaatacatgtaccacactactgttttattaatgtaaaaaccttgtaaatgaatttcagatgggtgatttaagtgagtcacaagtcacaaaactttgctattcatagttaatcaaatagaactgggttttttttttcagagtgtggtgtaaataaagaaatataagaagttctgttctataactgctctgttaacatagtttttaaacattaaaaaatgtgaactaaaagta

SEQ ID NO: 448208 - DNA, 1750 bp, Homo sapiens
ggctaccagtattcgatctgatagtgaggcttggttggggcgaggcactgtgagataaattagaagaaatactgaatttgtgtcagaagttctccagtgtttgtgttaatcgtgtggtgataatcctgtcctccttttaaagcgaattctctactgaaaggtctgctctgcttaaggagctacaaactgctctcaaaagaatgaaatactgagttccaattcagtgaggcacagtgttggactatggcacatttagttggagtcggggggaggtcaggaatatgatcagataatggattttataccttagagcaaaatctattagtctctctcagtttatcaatttaaatggctttaggcttatagggggtgtaaactttaagaatataattctcccattcaagtttacagcaaacatctagccaccttcaaaacaaagaagatacagaccatcatttagcaatactaatacatgattttccttggggatggcaggtttgagaatcctttagcaacaggacatacttcccctaaattacagtgaattatttataacgagataaagctttcaggtacaagctgaaggtggggtgtctaacaactaaaaactatcactaaatctcaaagagaaagttcttgcaaaatatgtaaagttcacaaggtgcagacattttccttctttaggcttttatctaaggaagggctatgaaactgggcccatctgtatacaggctcaaatttacgtttttaaaggaagaatctatgcagctgaggcttattgcaggaaatacttcatttgtatgtaaatattattgtaaataaataggaggctgtatatttttgaagttgttgatccgcactgaaatagaagtctctaggatctgcatataaacaataaatgtttcctagaaattagtggtttgtttgggaattagaaaaatttacattctctcccaggtaacatagttctctcaatgtaaacttggaacctgaaaccctacttaatttagagaaagaaatgtctgagaaatagttcccttgatttcttatgctggcattaagatcaattatttaacagatagtcctctgagatacaagtaaggaatatttagacacaaatccttgtcctatagaaacagatatacccaaatgacaaattgtttcttcataatgatcttccatttttaacactgataccactacacagtacatatgaaaacagaagctggggagaagaatgtttttttcacaattgaattgctgcatttctcaaactttgggatctatgaaagcggggagagggaacctgaatattaattatgagcacaaatttgaaggaaagaaaacaaagaaccattatctaatcaagctttgaaagtcctgcatgtttgccttttattttagtgttgacgccaacatagactgtctaaggtatttttttccccaaacacttgaatcttggtcgttggtatgtaatccactctctagagtccagtgtactttagacttcatctgagtccaatacatgtaccacactactgttttattaatgtaaaaaccttgtaaatgaatttcagatgggtgatttaagtgagtcacaagtcacaaaactttgctattcatagttaatcaaatagaactgggttttttttttcagagtgtggtgtaaataaagaaatataagaagttctgttctataactgctctgttaacatagtttttaaacattaaaaaatgtgaactaaaagta

SEQ ID NO: 448209 - DNA, 1535 bp, Homo sapiens
ggtgcgtgcgttcagaggatcccttcagcacgcacatttagttggagtcggggggaggtcaggaatatgatcagataatggattttataccttagagcaaaatctattagtctctctcagtttatcaatttaaatggctttaggcttatagggggtgtaaactttaagaatataattctcccattcaagtttacagcaaacatctagccaccttcaaaacaaagaagatacagaccatcatttagcaatactaatacatgattttccttggggatggcaggtttgagaatcctttagcaacaggacatacttcccctaaattacagtgaattatttataacgagataaagctttcaggtacaagctgaaggtggggtgtctaacaactaaaaactatcactaaatctcaaagagaaagttcttgcaaaatatgtaaagttcacaaggtgcagacattttccttctttaggcttttatctaaggaagggctatgaaactgggcccatctgtatacaggctcaaatttacgtttttaaaggaagaatctatgcagctgaggcttattgcaggaaatacttcatttgtatgtaaatattattgtaaataaataggaggctgtatatttttgaagttgttgatccgcactgaaatagaagtctctaggatctgcatataaacaataaatgtttcctagaaattagtggtttgtttgggaattagaaaaatttacattctctcccaggtaacatagttctctcaatgtaaacttggaacctgaaaccctacttaatttagagaaagaaatgtctgagaaatagttcccttgatttcttatgctggcattaagatcaattatttaacagatagtcctctgagatacaagtaaggaatatttagacacaaatccttgtcctatagaaacagatatacccaaatgacaaattgtttcttcataatgatcttccatttttaacactgataccactacacagtacatatgaaaacagaagctggggagaagaatgtttttttcacaattgaattgctgcatttctcaaactttgggatctatgaaagcggggagagggaacctgaatattaattatgagcacaaatttgaaggaaagaaaacaaagaaccattatctaatcaagctttgaaagtcctgcatgtttgccttttattttagtgttgacgccaacatagactgtctaaggtatttttttccccaaacacttgaatcttggtcgttggtatgtaatccactctctagagtccagtgtactttagacttcatctgagtccaatacatgtaccacactactgttttattaatgtaaaaaccttgtaaatgaatttcagatgggtgatttaagtgagtcacaagtcacaaaactttgctattcatagttaatcaaatagaactgggttttttttttcagagtgtggtgtaaataaagaaatataagaagttctgttctataactgctctgttaacatagtttttaaacattaaaaaatgtgaactaaaagta

SEQ ID NO: 448210 - DNA, 5217 bp, Homo sapiens
ccaaaatgcaggccccagcggaacgcacagccctcctgtcctccgccggtgcccctttagccgccccacccccatccctaagggctctcattctccagctgcagccgcagctgggttccgaacacgccgccgggccccgggagggagaggggcaggtgccagggcggcgcgcagcctctgctcccggtgccagcttcagtgcgccgggcacacgcgcgccccgcaacccctccctcaccctttccccgttgctcaatctccgccagccgcggtcgctgcatcgtcagagagctgcaagagggaggcagcaaggtgcggccgccagcagtgacaccatgtgaccggcacggctcactgacacgcagctttggttaaagagcgggcgcacaggaggggaggagaccgcgcgcgggacggggaggaatggcctgtccgcgttaaaccatcacaagccatggttgcggaagggccacgcgtcccccagtaggagaatgactccgattcgtgaccctcagcgccggtgcatgtcgatatatttattgagtgtctactgtgtgccaggcactatatctatgtgcatagaaaaaccctggaaggccatacaacaatatatatagagtgatcgtctctgcttgctgagctaacaggggtgtcaagcttccattttggtatctacttctaaatacactcagaacaggagaaatttggactaattttcaaactacagacactttctaatcatgatgcatttcaaaagtggactcgaattaactgagttgcaaaacatgacagtgcccgaggatgataacattagcaatgactccaatgatttcaccgaagtagaaaatggtcagataaatagcaagtttatttctgatcgtgaaagtagaagaagtctcacaaacagccatttggaaaaaaagaagtgtgatgagtatattccaggtacaacctccttaggcatgtctgtttttaacctaagcaacgccattatgggcagtgggattttgggactcgcctttgccctggcaaacactggaatcctactttttctggtacttttgacttcagtgacattgctgtctatatattcaataaacctcctattgatctgttcaaaagaaacaggctgcatggtgtatgaaaagctgggggaacaagtctttggcaccacagggaagttcgtaatctttggagccacctctctacagaacactggagcaatgctgagctacctcttcatcgtaaaaaatgaactaccctctgccataaagtttctaatgggaaaggaagagacattttcagcctggtacgtggatggccgcgttctggtggtgatagttacctttggcataattctccctctgtgtctcttgaagaacttagggtatcttggctatactagtggattttccttgagctgtatggtttttttcctaattgtggttatttacaagaaatttcaaattccctgcattgttccagagctaaattcaacaataagtgctaattcaacaaatgctgacacgtgtacgccaaaatatgttaccttcaattcaaagaccgtgtatgctttacccaccattgcatttgcatttgtttgccacccgtcagtcctgccaatttacagtgagcttaaagaccgatcacagaaaaaaatgcagatggtttcaaacatctcctttttcgccatgtttgttatgtacttcttgactgccatttttggctacttgacattctatgacaacgtgcagtccgacctccttcacaaatatcagagtaaagatgacattctcatcctgacagtgcggctggctgtcattgttgctgtgatcctcacagtgccggtgttatttttcacggttcgttcatctttatttgaactggctaagaaaacaaagtttaatttatgtcgtcataccgtggttacctgcatactcttggttgttatcaacttgttggtgatcttcataccctccatgaaggatatttttggagtcgtaggagttacatctgctaacatgcttattttcattcttccttcatctctttatttaaaaatcacagaccaggatggagataaaggaactcaaagaatttgggctgcccttttcttgggcctgggggtgttgttctccttggtcagcattcccttggtcatctatgactgggcctgctcatcgagtagtgacgaaggccactgaaacccgccgagaaaaagaaacatccctgttgtctgctcagtcaagtccccacacatcagcaatctctcaccacttcttttgcaagtttacagaagcaaacagaaatgtacaggatacttaaaatggaataactttttggttgcaaaacagagacatggttctataatgcttcatgtccctccaagatttgagatcaatttagggattgtgaaatttttttttcaaatttcatacaatcatatttcccagtacttttcacaatcattttttacccatctaactctatgttttgtggcttcccggtctcttagaactttgaaaacatgatatacaataatgtttatttattatacatccagattctgaaataattttcctactgatgttcagctcacactatctgtacctttttagaagagaaaagaatcttgaattgtatatatttattttgctttacagaaaaaaatggtttcgtaaataatttgcctattttggttaacatagcacatggagataatcatctgaaagttatagggcactgccactgctgaatcagagcatgcccaatatttgaggtggctctgatttcctggcagctgaactcgggtagtccagtggcctagctggtaccacatctattcccatccagagacattctctggcaagtgttctcagctgaaaagtggttggggatgattcttaccttggtaattaaatgaagctacacatttgggtaatctagcaaatgaagtattttttccctcttggcaacttgtgtcagagttactctggtctgagtcaactttcgctggggaaaacctatggaacctactgcaaaaagattgtccaaaatgcctaagaaaatactcctctgatgcatttagccttcaaccctacctgtcttgctgaagggagaaaaatgttttagtacattataggcccagcagcttttattcatgtccaccagctagttgcacagagaatcatgtgtacctaactaaggatgatctaggataagtaactcctgttttatattgagtattttagggaagtctttaaaagacttgttttatatctataaatctaggttattacaaatacaagaattttgtaccttaaataagcctcatttctatttcttcttcattaattctccatctagtcttgtgaaaaaaaaaaaaaaccctcagagatagtctttgtgaagagcttctgacagaatcactgagtaccttccttcccccagatgaggaagacaagggggtctcagtgtctgtgctgtctcctcttctcttccccaaccaaggactgtgccattactgcccgtctcaactgtccatgcaggaggacagagttgcctggtactcttacccttgtccctctcctaaagggagcacaaggaaactgaagagactgaaaaagaagagagtttgtagctgaaaaagaatagggatagcaaggaaacccagaactgcattcccctaagtggggccatcccatgtgattgaattgtccatagcttgcctatggtgagaaatgtgcatgctccgtgagctggtctcttgaaacaggacttatgcttcctctatattctggttaaattttccaaacacataagttcactgagcacagatttcttatccagagacaagtagaatctaaccgcagactgttggcagagtttccaggcacttagccatgttcccttcctgactcaaatccccaaaggccttcactctcactgagaatcacactactgtcccatagataaggcaggcattgaagcacctgtcgtgatcctctaggggggagaatgaaaggttatttcctgcattgcatcatcatagcttttaatataatgctacagaatcatatccacattaggttagagttcagatatttggatatgaatacctaacctagccatatccatggccatctctgttcttttcagcaatgttttccatattatattagcaatgacagaaacagaacaagccaagatccagtcagttcttgggagcttgtctagagcaccaagtaatgaaatagccaggtagtgggatgactgtacctttaaaaatacataatttagtttgcaagctatattatgctactttctattttccttgttactttatagcaattcattttaccctcacaaagtcaatttagaaccttatcattaactgggatgtgtagtgatatttttgggcctctgggtttcatgtgtcaatacaaggaatatttatttaaaatagatttatttagaggaggcacagtgttgttgatctgtgtgacaccacccatatttttaaaaacctttgtatgtttctctaaatttgttgttgactgaatataatagaccctaccataattcgtcaaatatcactgattagttacatcctttgtgtgagattagctgtaaagtatactgctcttattcttattcagaatagttaattggtagccaaaaatacatgtatcacagatgttaggtcgaatttaaacagcacagtcaagtgctatggaagtttttctgctaaattagtagattaaagaatactataccctaggcatggggagcagcacgttttcctttggtaggtaggatctctatactagtgaacagtgccagttccacactttggacttagaactgttctctagttattgtaacacagaatactgtcaatccctaatttacttaatgttacttattggaagtggggctgatgaaatacgcacaggagggaaatctactgtgtttaggcacaggcagccccagtgtataaggagatcatattccaaaaggttgtcagttggttgtttgcaacctggaatgtattttcctttagagaccaggttatccatggtggttaggcccctagagcagctggaaaagatgatcaaaccaataggttagctgacatcgaataatgtaataggtttgctgtaatagtttatgctgtaatagtttatgctgtaatagtttatgctgtaatagtttatg

SEQ ID NO: 448211 - DNA, 666 bp, Homo sapiens
  misc_feature (23)..(23): n is a, c, g, or t
gactctcaggacccaggattcgnagatgacacaaatccttgtcctatagaaacagatatacccaaatgacaaattgtttcttcataatgatcttccatttttaacactgataccactacacagtacatatgaaaacagaagctggggagaagaatgtttttttcacaattgaattgctgcatttctcaaactttgggatctatgaaagcggggagagggaacctgaatattaattatgagcacaaatttgaaggaaagaaaacaaagaaccattatctaatcaagctttgaaagtcctgcatgtttgccttttattttagtgttgacgccaacatagactgtctaaggtatttttttccccaaacacttgaatcttggtcgttggtatgtaatccactctctagagtccagtgtactttagacttcatctgagtccaatacatgtaccacactactgttttattaatgtaaaaaccttgtaaatgaatttcagatgggtgatttaagtgagtcacaagtcacaaaactttgctattcatagttaatcaaatagaactgggttttttttttcagagtgtggtgtaaataaagaaatataagaagttctgttctataactgctctgttaacatagtttttaaacattaaaaaatgtgaactaaaagta

SEQ ID NO: 448212 - DNA, 1949 bp, Homo sapiens
ccaaaatgcaggccccagcggaacgcacagccctcctgtcctccgccggtgcccctttagccgccccacccccatccctaagggctctcattctccagctgcagccgcagctgggttccgaacacgccgccgggccccgggagggagaggggcaggtgccagggcggcgcgcagcctctgctcccggtgccagcttcagtgcgccgggcacacgcgcgccccgcaacccctccctcaccctttccccgttgctcaatctccgccagccgcggtcgctgcatcgtcagagagctgcaagagggaggcagcaaggtgcggccgccagcagtgacaccatgtgaccggcacggctcactgacacgcagctttggttaaagagcgggcgcacaggaggggaggagaccgcgcgcgggacggggaggaatggcctgtccgcgttaaaccatcacaagccatggttgcggaagggccacgcgtcccccagtaggagaatgactccgattcgtgaccctcagcgccggtgcatgtcgatgtaagtgcgaggccggcgagcagagtgtgagtgggggttggtggtgaggggagattctgatgcaatcggcccggaaaggaggagagccaggcgagcgcggactggggcggccacgccactccgccagaaggtcgccaggagcctccgcccttcaccttcctccgaaatccgccaggccacgccaagctccctgcccaacccttactgacgggggccacattttcccggcctccgcagccagaccttgacacaaaggacatcaaactgccgagggtaaaaaccccggaagggcggacacctccacatcgccttttgccacctttccctttatttccggaggtaaggtgattatccgttcccggggagggctgggcgagcggcaaggggagatttagatgtcggaggaggaggtaacgtagaaatcatctctgcgggcgtgaaagcagagagagctcggctgtgcccgatgctttcggatgttgcttttaggagaggaaaagtccaggtctcctgtgcttcccgaacgcacgcggcagcgggaggaagcgccagggcccccgagttcacctttgcgtgggctgtggcttactttttggtttgttttcctgtgactttggtgtgttttcctgtggctgtggcagagtgtggtaccagatctggttccatttttacgagagccaggaaccacgcacgtctggagggagagcgcagctgacccgagggcgcgaccgtgttctgggagtgtttgaatccccggcctttggtgaaaatttcctgtgtccgcaaggcccagaggagatcgtgtgatgtccggggggtgctgcgtgcggccggctgggtagcggccgcggaccaccactaaaccggggcatgtttgccgtccttcctggtgctctgcccctctgtaacgcggggaagtaggagggcgcggggagaaattactaaaggatgcttgcagtgactcactgtcctttcctgccctgaagaggattttctaaaatgcagagggtggcaggggacagaggtagtgttttttcgagagccgggatgtgctggagccagcgaacaaaaggccacctcttgcgcggtcttgggcgcagactgctctcgcttccagtcccacctcctccccaacccccggcacctagttcgcgtccctaaacgttgccgcagaggcctttaaacgcgtgggtcggtgccgggaggagagcgcatcttcgcccttgtgcgagccccttgccccctaaattatccacctcctggcgcatggggctccccagcacccactgggacccagtaggttacccggctgcctgggcaccgtttgcctgccaaatcgcccgcctgaggtttgtgctgaactgtagttagagaaggcacaagtgcatatggcagcaaaaggaatttcgcggtaccc

SEQ ID NO: 448213 - DNA, 447 bp, Homo sapiens
gtacatgtggaaaaattttgctgcactgaaaataacccttgcctttctcttgctccaggctgcccttttcttgggcctgggggtgttgttctccttggtcagcattcccttggtcatctatgactgggcctgctcatcgagtagtgacgaaggccactgaaacccgccgagaaaaagaaacatccctgttgtctgctcagtcaagtccccacacatcagcaatctctcaccacttcttttgcaagtttacagaagcaaacagaaatgtacaggatacttaaaatggaataactttttggttgcaaaacagagacatggttctataatgcttcatgtccctccaagatttgagatcaatttagggattgtgaaatttttttttcaaatttcatacaatcatatttcccagtacttttcacaatcattttttacccatctaactctatg

SEQ ID NO: 448214 - DNA, 375 bp, Homo sapiens
aatggttggtttggttttgtgatagtacaatggcatgtaataattattcattggctttactaaagtccatattgcttctactatacttcttaataccaggttatttacaagaaatttcaaattccctgcattgttccagagctaaattcaacaataagtgctaattcaacaaatgctgacacgtgtacgccaaaatatgttaccttcaattcaaaggtaagtttcctgatcctttgcagatgaaacaagcatttttattaaggacattctatttctcatgcttgtaattgcactggtttgaatgtattagttctcaaaagaacacatgataccattgcttccagattacacatctatgtagagatccttgagaaa

SEQ ID NO: 448215 - DNA, 424 bp, Homo sapiens
aaaaataagccttatgacctaataggttaattgtaatgctctggtagccaacttgaaaaaggagaaatgatggttgcatctcacattttaaaatgttaagaatttgttttgtaatgaggataccttaacccctgaaggccaaaatgactatttgtgtgagtttgagaaaggcacatagtaacttggggaacagtcaatagaatgacaaaatcttgactattttaactttctgaaccctgtcatttcttgtgttctcaaatttgatttttaaataggctgcatggtgtatgaaaagctgggggaacaagtctttggcaccacagggaagttcgtaatctttggagccacctctctacagaacactggaggtaaaaagaacatgcttttctttacataacttgaaactaattctggtggatgagcg

SEQ ID NO: 448216 - DNA, 7624 bp, Homo sapiens
ataattgagggaagaaggccagcggaaggaacaggaagaaggaacagcaaatatttattgagtgtctactgtgtgccaggcactatatctatgtgcatagaaaaaccctggaaggccatacaacaatatatatagagtgatcgtctctgcttgctgagctaacaggggtgtcaagcttccattttggtatctacttctaaatacactcagaacaggagaaatttggactaattttcaaactacagacactttctaatcatgatgcatttcaaaagtggactcgaattaactgagttgcaaaacatgacagtgcccgaggatgataacattagcaatgactccaatgatttcaccgaagtagaaaatggtcagataaatagcaagtttatttctgatcgtgaaagtagaagaagtctcacaaacagccatttggaaaaaaagaagtgtgatgagtatattccaggtacaacctccttaggcatgtctgtttttaacctaagcaacgccattatgggcagtgggattttgggactcgcctttgccctggcaaacactggaatcctactttttctggtacttttgacttcagtgacattgctgtctatatattcaataaacctcctattgatctgttcaaaagaaacaggctgcatggtgtatgaaaagctgggggaacaagtctttggcaccacagggaagttcgtaatctttggagccacctctctacagaacactggagcaatgctgagctacctcttcatcgtaaaaaatgaactaccctctgccataaagtttctaatgggaaaggaagagacattttcagcctggtacgtggatggccgcgttctggtggtgatagttacctttggcataattctccctctgtgtctcttgaagaacttagggtatcttggctatactagtggattttccttgagctgtatggtttttttcctaattgtggttatttacaagaaatttcaaattccctgcattgttccagagctaaattcaacaataagtgctaattcaacaaatgctgacacgtgtacgccaaaatatgttaccttcaattcaaagaccgtgtatgctttacccaccattgcatttgcatttgtttgccacccgtcagtcctgccaatttacagtgagcttaaagaccgatcacagaaaaaaatgcagatggtttcaaacatctcctttttcgccatgtttgttatgtacttcttgactgccatttttggctacttgacattctatgacaacgtgcagtccgacctccttcacaaatatcagagtaaagatgacattctcatcctgacagtgcggctggctgtcattgttgctgtgatcctcacagtgccggtgttatttttcacggttcgttcatctttatttgaactggctaagaaaacaaagtttaatttatgtcgtcataccgtggttacctgcatactcttggttgttatcaacttgttggtgatcttcataccctccatgaaggatatttttggagtcgtaggagttacatctgctaacatgcttattttcattcttccttcatctctttatttaaaaatcacagaccaggatggagataaaggaactcaaagaatttgggctgcccttttcttgggcctgggggtgttgttctccttggtcagcattcccttggtcatctatgactgggcctgctcatcgagtagtgacgaaggccactgaaacccgccgagaaaaagaaacatccctgttgtctgctcagtcaagtccccacacatcagcaatctctcaccacttcttttgcaagtttacagaagcaaacagaaatgtacaggatacttaaaatggaataactttttggttgcaaaacagagacatggttctataatgcttcatgtccctccaagatttgagatcaatttagggattgtgaaatttttttttcaaatttcatacaatcatatttcccagtacttttcacaatcattttttacccatctaactctatgttttgtggcttcccggtctcttagaactttgaaaacatgatatacaataatgtttatttattatacatccagattctgaaataattttcctactgatgttcagctcacactatctgtacctttttagaagagaaaagaatcttgaattgtatatatttattttgctttacagaaaaaaatggtttcgtaaataatttgcctattttggttaacatagcacatggagataatcatctgaaagttatagggcactgccactgctgaatcagagcatgcccaatatttgaggtggctctgatttcctggcagctgaactcgggtagtccagtggcctagctggtaccacatctattcccatccagagacattctctggcaagtgttctcagctgaaaagtggttggggatgattcttaccttggtaattaaatgaagctacacatttgggtaatctagcaaatgaagtattttttccctcttggcaacttgtgtcagagttactctggtctgagtcaactttcgctggggaaaacctatggaacctactgcaaaaagattgtccaaaatgcctaagaaaatactcctctgatgcatttagccttcaaccctacctgtcttgctgaagggagaaaaatgttttagtacattataggcccagcagcttttattcatgtccaccagctagttgcacagagaatcatgtgtacctaactaaggatgatctaggataagtaactcctgttttatattgagtattttagggaagtctttaaaagacttgttttatatctataaatctaggttattacaaatacaagaattttgtaccttaaataagcctcatttctatttcttcttcattaattctccatctagtcttgtgaaaaaaaaaaaaaaccctcagagatagtctttgtgaagagcttctgacagaatcactgagtaccttccttcccccagatgaggaagacaagggggtctcagtgtctgtgctgtctcctcttctcttccccaaccaaggactgtgccattactgcccgtctcaactgtccatgcaggaggacagagttgcctggtactcttacccttgtccctctcctaaagggagcacaaggaaactgaagagactgaaaaagaagagagtttgtagctgaaaaagaatagggatagcaaggaaacccagaactgcattcccctaagtggggccatcccatgtgattgaattgtccatagcttgcctatggtgagaaatgtgcatgctccgtgagctggtctcttgaaacaggacttatgcttcctctatattctggttaaattttccaaacacataagttcactgagcacagatttcttatccagagacaagtagaatctaaccgcagactgttggcagagtttccaggcacttagccatgttcccttcctgactcaaatccccaaaggccttcactctcactgagaatcacactactgtcccatagataaggcaggcattgaagcacctgtcgtgatcctctaggggggagaatgaaaggttatttcctgcattgcatcatcatagcttttaatataatgctacagaatcatatccacattaggttagagttcagatatttggatatgaatacctaacctagccatatccatggccatctctgttcttttcagcaatgttttccatattatattagcaatgacagaaacagaacaagccaagatccagtcagttcttgggagcttgtctagagcaccaagtaatgaaatagccaggtagtgggatgactgtacctttaaaaatacataatttagtttgcaagctatattatgctactttctattttccttgttactttatagcaattcattttaccctcacaaagtcaatttagaaccttatcattaactgggatgtgtagtgatatttttgggcctctgggtttcatgtgtcaatacaaggaatatttatttaaaatagatttatttagaggaggcacagtgttgttgatctgtgtgacaccacccatatttttaaaaacctttgtatgtttctctaaatttgttgttgactgaatataatagaccctaccataattcgtcaaatatcactgattagttacatcctttgtgtgagattagctgtaaagtatactgctcttattcttattcagaatagttaattggtagccaaaaatacatgtatcacagatgttaggtcgaatttaaacagcacagtcaagtgctatggaagtttttctgctaaattagtagattaaagaatactataccctaggcatggggagcagcacgttttcctttggtaggtaggatctctatactagtgaacagtgccagttccacactttggacttagaactgttctctagttattgtaacacagaatactgtcaatccctaatttacttaatgttacttattggaagtggggctgatgaaatacgcacaggagggaaatctactgtgtttaggcacaggcagccccagtgtataaggagatcatattccaaaaggttgtcagttggttgtttgcaacctggaatgtattttcctttagagaccaggttatccatggtggttaggcccctagagcagctggaaaagatgatcaaaccaataggttagctgacatcgaataatgtaataggtttgctaaagaatctaaccatcaaatataatattgtttccagggagggtgtttgttcagagttgcctgttagtagaatctggactgtccatcccagccacatcccacctactggacagtaggggtagagatgccaccagactacaggtgaccagattggcctgaaacatggtgtccagtaaaaacggggaggaataagtccatgactgccggagagcttggtggtaggaggagggtgaaggagggtgagggggcctctcatgggtcagaaacctccagggacatccctcagctggtaactctgctgttgtccggagggttcaggcttggtgtgccttcttctgtttgtctgacttttggctcctatggttcatctcctgccctgcccaccacagaaaaggatgctgctgcacagcttctccaatgtaccagtcattgaggccagcgcgcagcacttttaatgtttttagtgctagtaactgtgttttaactctccaggaataagctgggaggttagaaaacaagaaaaaagggggaaaaaaaaacctctccacccactttccttttttacagttacagaccctgttgagaaaaagaagcacccagatgggtgatggtgatagggcttgtggtggacacagggttgtggtaagattcctcagtgcttcggcgagcacctaagactattaccctggaactgactgctttctagagcttgattcatgcctctaagccagtggttctcaaagtgtggcccctagaccagtagcatcagcatcatcggggacctcattagaatgcagattctcagccccctcccagacatggtgaagtcagaagctctcagggagggactcagcaaatgattctaaagcgcatcaagtttgagaaccaccctaagccaatgagtctcccttttacttcccattagtcctccctcaccagatgattcctaggactcatggtgcaacatacaggagccaggctttagggaggggaggaaaggagcctggcggcaggggtctctgcaatggcaagaaagtgagtgaatccagcgctgccacctggttatccccttctcgttgaaaatagcagcgcgggtgcaaattcctaaacacaggctgcctgcactcggtgttacctcgggctgaggcatgataatattttattttttaaagctgtgaggaaatgaaagtgaggctttggttggggcgaggcagttgtgaaagaaattaaaataaaagaccctttgtaaatgcagacttagaagaaatactgaatttgtgtcagaagttctccagtgtttgtgttaatcgtgtggtgataatcctgtcctccttttaaagcgaattctctactgaaaggtctgctctgcttaaggagctacaaactgctctcaaaagaatgaaatactgagttccaattcagtgaggcacagtgttggactatggcacatttagttggagtcggggggaggtcaggaatatgatcagataatggattttataccttagagcaaaatctattagtctctctcagtttatcaatttaaatggctttaggcttatagggggtgtaaactttaagaatataattctcccattcaagtttacagcaaacatctagccaccttcaaaacaaagaagatacagaccatcatttagcaatactaatacatgattttccttggggatggcaggtttgagaatcctttagcaacaggacatacttcccctaaattacagtgaattatttataacgagataaagctttcaggtacaagctgaaggtggggtgtctaacaactaaaaactatcactaaatctcaaagagaaagttcttgcaaaatatgtaaagttcacaaggtgcagacattttccttctttaggcttttatctaaggaagggctatgaaactgggcccatctgtatacaggctcaaatttacgtttttaaaggaagaatctatgcagctgaggcttattgcaggaaatacttcatttgtatgtaaatattattgtaaataaataggaggctgtatatttttgaagttgttgatccgcactgaaatagaagtctctaggatctgcatataaacaataaatgtttcctagaaattagtggtttgtttgggaattagaaaaatttacattctctcccaggtaacatagttctctcaatgtaaacttggaacctgaaaccctacttaatttagagaaagaaatgtctgagaaatagttcccttgatttcttatgctggcattaagatcaattatttaacagatagtcctctgagatacaagtaaggaatatttagacacaaatccttgtcctatagaaacagatatacccaaatgacaaattgtttcttcataatgatcttccatttttaacactgataccactacacagtacatatgaaaacagaagctggggagaagaatgtttttttcacaattgaattgctgcatttctcaaactttgggatctatgaaagcggggagagggaacctgaatattaattatgagcacaaatttgaaggaaagaaaacaaagaaccattatctaatcaagctttgaaagtcctgcatgtttgccttttattttagtgttgacgccaacatagactgtctaaggtatttttttccccaaacacttgaatcttggtcgttggtatgtaatccactctctagagtccagtgtactttagacttcatctgagtccaatacatgtaccacactactgttttattaatgtaaaaaccttgtaaatgaatttcagatgggtgatttaagtgagtcacaagtcacaaaactttgctattcatagttaatcaaatagaactgggttttttttttcagagtgtggtgtaaataaagaaatataagaagttctgttctataactgctctgttaacatagtttttaaacattaaaaaatgtgaactaaaagta

SEQ ID NO: 448217 - DNA, 7011 bp, Homo sapiens
  misc_feature (6980)..(6980): n is a, c, g, or t
  misc_feature (6983)..(6983): n is a, c, g, or t
ccaaaatgcaggccccagcggaacgcacagccctcctgtcctccgccggtgcccctttagccgccccacccccatccctaagggctctcattctccagctgcagccgcagctgggttccgaacacgccgccgggccccgggagggagaggggcaggtgccagggcggcgcgcagcctctgctcccggtgccagcttcagtgcgccgggcacacgcgcgccccgcaacccctccctcaccctttccccgttgctcaatctccgccagccgcggtcgctgcatcgtcagagagctgcaagagggaggcagcaaggtgcggccgccagcagtgacaccatgtgaccggcacggctcactgacacgcagctttggttaaagagcgggcgcacaggaggggaggagaccgcgcgcgggacggggaggaatggcctgtccgcgttaaaccatcacaagccatggttgcggaagggccacgcgtcccccagtaggagaatgactccgattcgtgaccctcagcgccggtgcatgtcgatatatttattgagtgtctactgtgtgccaggcactatatctatgtgcatagaaaaaccctggaaggccatacaacaatatatatagagtgatcgtctctgcttgctgagctaacaggggtgtcaagcttccattttggtatctacttctaaatacactcagaacaggagaaatttggactaattttcaaactacagacactttctaatcatgatgcatttcaaaagtggactcgaattaactgagttgcaaaacatgacagtgcccgaggatgataacattagcaatgactccaatgatttcaccgaagtagaaaatggtcagataaatagcaagtttatttctgatcgtgaaagtagaagaagtctcacaaacagccatttggaaaaaaagaagtgtgatgagtatattccaggtacaacctccttaggcatgtctgtttttaacctaagcaacgccattatgggcagtgggattttgggactcgcctttgccctggcaaacactggaatcctactttttctggtacttttgacttcagtgacattgctgtctatatattcaataaacctcctattgatctgttcaaaagaaacaggctgcatggtgtatgaaaagctgggggaacaagtctttggcaccacagggaagttcgtaatctttggagccacctctctacagaacactggagcaatgctgagctacctcttcatcgtaaaaaatgaactaccctctgccataaagtttctaatgggaaaggaagagacattttcagcctggtacgtggatggccgcgttctggtggtgatagttacctttggcataattctccctctgtgtctcttgaagaacttagggtatcttggctatactagtggattttccttgagctgtatggtttttttcctaattgtggttatttacaagaaatttcaaattccctgcattgttccagagctaaattcaacaataagtgctaattcaacaaatgctgacacgtgtacgccaaaatatgttaccttcaattcaaagaccgtgtatgctttacccaccattgcatttgcatttgtttgccacccgtcagtcctgccaatttacagtgagcttaaagaccgatcacagaaaaaaatgcagatggtttcaaacatctcctttttcgccatgtttgttatgtacttcttgactgccatttttggctacttgacattctatgacaacgtgcagtccgacctccttcacaaatatcagagtaaagatgacattctcatcctgacagtgcggctggctgtcattgttgctgtgatcctcacagtgccggtgttatttttcacggttcgttcatctttatttgaactggctaagaaaacaaagtttaatttatgtcgtcataccgtggttacctgcatactcttggttgttatcaacttgttggtgatcttcataccctccatgaaggatatttttggagtcgtaggagttacatctgctaacatgcttattttcattcttccttcatctctttatttaaaaatcacagaccaggatggagataaaggaactcaaagaatttgggctgcccttttcttgggcctgggggtgttgttctccttggtcagcattcccttggtcatctatgactgggcctgctcatcgagtagtgacgaaggccactgaaacccgccgagaaaaagaaacatccctgttgtctgctcagtcaagtccccacacatcagcaatctctcaccacttcttttgcaagtttacagaagcaaacagaaatgtacaggatacttaaaatggaataactttttggttgcaaaacagagacatggttctataatgcttcatgtccctccaagatttgagatcaatttagggattgtgaaatttttttttcaaatttcatacaatcatatttcccagtacttttcacaatcattttttacccatctaactctatgttttgtggcttcccggtctcttagaactttgaaaacatgatatacaataatgtttatttattatacatccagattctgaaataattttcctactgatgttcagctcacactatctgtacctttttagaagagaaaagaatcttgaattgtatatatttattttgctttacagaaaaaaatggtttcgtaaataatttgcctattttggttaacatagcacatggagataatcatctgaaagttatagggcactgccactgctgaatcagagcatgcccaatatttgaggtggctctgatttcctggcagctgaactcgggtagtccagtggcctagctggtaccacatctattcccatccagagacattctctggcaagtgttctcagctgaaaagtggttggggatgattcttaccttggtaattaaatgaagctacacatttgggtaatctagcaaatgaagtattttttccctcttggcaacttgtgtcagagttactctggtctgagtcaactttcgctggggaaaacctatggaacctactgcaaaaagattgtccaaaatgcctaagaaaatactcctctgatgcatttagccttcaaccctacctgtcttgctgaagggagaaaaatgttttagtacattataggcccagcagcttttattcatgtccaccagctagttgcacagagaatcatgtgtacctaactaaggatgatctaggataagtaactcctgttttatattgagtattttagggaagtctttaaaagacttgttttatatctataaatctaggttattacaaatacaagaattttgtaccttaaataagcctcatttctatttcttcttcattaattctccatctagtcttgtgaaaaaaaaaaaaaaccctcagagatagtctttgtgaagagcttctgacagaatcactgagtaccttccttcccccagatgaggaagacaagggggtctcagtgtctgtgctgtctcctcttctcttccccaaccaaggactgtgccattactgcccgtctcaactgtccatgcaggaggacagagttgcctggtactcttacccttgtccctctcctaaagggagcacaaggaaactgaagagactgaaaaagaagagagtttgtagctgaaaaagaatagggatagcaaggaaacccagaactgcattcccctaagtggggccatcccatgtgattgaattgtccatagcttgcctatggtgagaaatgtgcatgctccgtgagctggtctcttgaaacaggacttatgcttcctctatattctggttaaattttccaaacacataagttcactgagcacagatttcttatccagagacaagtagaatctaaccgcagactgttggcagagtttccaggcacttagccatgttcccttcctgactcaaatccccaaaggccttcactctcactgagaatcacactactgtcccatagataaggcaggcattgaagcacctgtcgtgatcctctaggggggagaatgaaaggttatttcctgcattgcatcatcatagcttttaatataatgctacagaatcatatccacattaggttagagttcagatatttggatatgaatacctaacctagccatatccatggccatctctgttcttttcagcaatgttttccatattatattagcaatgacagaaacagaacaagccaagatccagtcagttcttgggagcttgtctagagcaccaagtaatgaaatagccaggtagtgggatgactgtacctttaaaaatacataatttagtttgcaagctatattatgctactttctattttccttgttactttatagcaattcattttaccctcacaaagtcaatttagaaccttatcattaactgggatgtgtagtgatatttttgggcctctgggtttcatgtgtcaatacaaggaatatttatttaaaatagatttatttagaggaggcacagtgttgttgatctgtgtgacaccacccatatttttaaaaacctttgtatgtttctctaaatttgttgttgactgaatataatagaccctaccataattcgtcaaatatcactgattagttacatcctttgtgtgagattagctgtaaagtatactgctcttattcttattcagaatagttaattggtagccaaaaatacatgtatcacagatgttaggtcgaatttaaacagcacagtcaagtgctatggaagtttttctgctaaattagtagattaaagaatactataccctaggcatggggagcagcacgttttcctttggtaggtaggatctctatactagtgaacagtgccagttccacactttggacttagaactgttctctagttattgtaacacagaatactgtcaatccctaatttacttaatgttacttattggaagtggggctgatgaaatacgcacaggagggaaatctactgtgtttaggcacaggcagccccagtgtataaggagatcatattccaaaaggttgtcagttggttgtttgcaacctggaatgtattttcctttagagaccaggttatccatggtggttaggcccctagagcagctggaaaagatgatcaaaccaataggttagctgacatcgaataatgtaataggtttgctaaagaatctaaccatcaaatataatattgtttccagggagggtgtttgttcagagttgcctgttagtagaatctggactgtccatcccagccacatcccacctactggacagtaggggtagagatgccaccagactacaggtgaccagattggcctgaaacatggtgtccagtaaaaacggggaggaataagtccatgactgccggagagcttggtggtaggaggagggtgaaggagggtgagggggcctctcatgggtcagaaacctccagggacatccctcagctggtaactctgctgttgtccggagggttcaggcttggtgtgccttcttctgtttgtctgacttttggctcctatggttcatctcctgccctgcccaccacagaaaaggatgctgctgcacagcttctccaatgtaccagtcattgaggccagcgcgcagcacttttaatgtttttagtgctagtaactgtgttttaactctccaggaataagctgggaggttagaaaacaagaaaaaagggggaaaaaaaaacctctccacccactttccttttttacagttacagaccctgttgagaaaaagaagcacccagatgggtgatggtgatagggcttgtggtggacacagggttgtggtaagattcctcagtgcttcggcgagcacctaagactattaccctggaactgactgctttctagagcttgattcatgcctctaagccagtggttctcaaagtgtggcccctagaccagtagcatcagcatcatcggggacctcattagaatgcagattctcagccccctcccagacatggtgaagtcagaagctctcagggagggactcagcaaatgattctaaagcgcatcaagtttgagaaccaccctaagccaatgagtctcccttttacttcccattagtcctccctcaccagatgattcctaggactcatggtgcaacatacaggagccaggctttagggaggggaggaaaggagcctggcggcaggggtctctgcaatggcaagaaagtgagtgaatccagcgctgccacctggttatccccttctcgttgaaaatagcagcgcgggtgcaaattcctaaacacaggctgcctgcactcggtgttacctcgggctgaggcatgataatattttattttttaaagctgtgaggaaatgaaagtgaggctttggttggggcgaggcagttgtgaaagaaattaaaataaaagaccctttgtaaatgcagacttagaagaaatactgaatttgtgtcagaagttctccagtgtttgtgttaatcgtgtggtgataatcctgtcctccttttaaagcgaattctctactgaaaggtctgctctgcttaaggagctacaaactgctctcaaaagaatgaaatactgagttccaattcagtgaggcacagtgttggactatggcacatttagttggagtcggggggaggtcaggaatatgatcagataatggattttataccttagagcaaaatctattagtctctctcagtttatcaatttaaatggctttaggcttatagggggtgtaaactttaagaatataattctcccattcaagtttacagcaaacatctagccaccttcaaaacaaagaagatacagaccatcatttagcaatactaatacatgattttccttggggatggcaggtttgagaatcctttagcaacaggacatacttcccctaaattacagtgaattatttataacgagataaagctttcaggtacaagctgaaggtggggtgtctaacaactaaaaactatcactaaggtgcngangggatcctctgatcagcagcagccaaca

SEQ ID NO: 448218 - DNA, 8445 bp, Homo sapiens
ccaaaatgcaggccccagcggaacgcacagccctcctgtcctccgccggtgcccctttagccgccccacccccatccctaagggctctcattctccagctgcagccgcagctgggttccgaacacgccgccgggccccgggagggagaggggcaggtgccagggcggcgcgcagcctctgctcccggtgccagcttcagtgcgccgggcacacgcgcgccccgcaacccctccctcaccctttccccgttgctcaatctccgccagccgcggtcgctgcatcgtcagagagctgcaagagggaggcagcaaggtgcggccgccagcagtgacaccatgtgaccggcacggctcactgacacgcagctttggttaaagagcgggcgcacaggaggggaggagaccgcgcgcgggacggggaggaatggcctgtccgcgttaaaccatcacaagccatggttgcggaagggccacgcgtcccccagtaggagaatgactccgattcgtgaccctcagcgccggtgcatgtcgatgtaagtgcgaggccggcgagcagagtgtgagtgggggttggtggtgaggggagattctgatgcaatcggcccggaaaggaggagagccaggcgagcgcggactggggcggccacgccactccgccagaaggtcgccaggagcctccgcccttcaccttcctccgaaatccgccaggccacgccaagctccctgcccaacccttactgacgggggccacattttcccggcctccgcagccagaccttgacacaaaggacatcaaactgccgagggtaaaaaccccggaagggcggacacctccacatcgccttttgccacctttccctttatttccggagatatttattgagtgtctactgtgtgccaggcactatatctatgtgcatagaaaaaccctggaaggccatacaacaatatatatagagtgatcgtctctgcttgctgagctaacaggggtgtcaagcttccattttggtatctacttctaaatacactcagaacaggagaaatttggactaattttcaaactacagacactttctaatcatgatgcatttcaaaagtggactcgaattaactgagttgcaaaacatgacagtgcccgaggatgataacattagcaatgactccaatgatttcaccgaagtagaaaatggtcagataaatagcaagtttatttctgatcgtgaaagtagaagaagtctcacaaacagccatttggaaaaaaagaagtgtgatgagtatattccaggtacaacctccttaggcatgtctgtttttaacctaagcaacgccattatgggcagtgggattttgggactcgcctttgccctggcaaacactggaatcctactttttctggtacttttgacttcagtgacattgctgtctatatattcaataaacctcctattgatctgttcaaaagaaacaggctgcatggtgtatgaaaagctgggggaacaagtctttggcaccacagggaagttcgtaatctttggagccacctctctacagaacactggagcaatgctgagctacctcttcatcgtaaaaaatgaactaccctctgccataaagtttctaatgggaaaggaagagacattttcagcctggtacgtggatggccgcgttctggtggtgatagttacctttggcataattctccctctgtgtctcttgaagaacttagggtatcttggctatactagtggattttccttgagctgtatggtttttttcctaattgtggttatttacaagaaatttcaaattccctgcattgttccagagctaaattcaacaataagtgctaattcaacaaatgctgacacgtgtacgccaaaatatgttaccttcaattcaaagaccgtgtatgctttacccaccattgcatttgcatttgtttgccacccgtcagtcctgccaatttacagtgagcttaaagaccgatcacagaaaaaaatgcagatggtttcaaacatctcctttttcgccatgtttgttatgtacttcttgactgccatttttggctacttgacattctatgacaacgtgcagtccgacctccttcacaaatatcagagtaaagatgacattctcatcctgacagtgcggctggctgtcattgttgctgtgatcctcacagtgccggtgttatttttcacggttcgttcatctttatttgaactggctaagaaaacaaagtttaatttatgtcgtcataccgtggttacctgcatactcttggttgttatcaacttgttggtgatcttcataccctccatgaaggatatttttggagtcgtaggagttacatctgctaacatgcttattttcattcttccttcatctctttatttaaaaatcacagaccaggatggagataaaggaactcaaagaatttgggctgcccttttcttgggcctgggggtgttgttctccttggtcagcattcccttggtcatctatgactgggcctgctcatcgagtagtgacgaaggccactgaaacccgccgagaaaaagaaacatccctgttgtctgctcagtcaagtccccacacatcagcaatctctcaccacttcttttgcaagtttacagaagcaaacagaaatgtacaggatacttaaaatggaataactttttggttgcaaaacagagacatggttctataatgcttcatgtccctccaagatttgagatcaatttagggattgtgaaatttttttttcaaatttcatacaatcatatttcccagtacttttcacaatcattttttacccatctaactctatgttttgtggcttcccggtctcttagaactttgaaaacatgatatacaataatgtttatttattatacatccagattctgaaataattttcctactgatgttcagctcacactatctgtacctttttagaagagaaaagaatcttgaattgtatatatttattttgctttacagaaaaaaatggtttcgtaaataatttgcctattttggttaacatagcacatggagataatcatctgaaagttatagggcactgccactgctgaatcagagcatgcccaatatttgaggtggctctgatttcctggcagctgaactcgggtagtccagtggcctagctggtaccacatctattcccatccagagacattctctggcaagtgttctcagctgaaaagtggttggggatgattcttaccttggtaattaaatgaagctacacatttgggtaatctagcaaatgaagtattttttccctcttggcaacttgtgtcagagttactctggtctgagtcaactttcgctggggaaaacctatggaacctactgcaaaaagattgtccaaaatgcctaagaaaatactcctctgatgcatttagccttcaaccctacctgtcttgctgaagggagaaaaatgttttagtacattataggcccagcagcttttattcatgtccaccagctagttgcacagagaatcatgtgtacctaactaaggatgatctaggataagtaactcctgttttatattgagtattttagggaagtctttaaaagacttgttttatatctataaatctaggttattacaaatacaagaattttgtaccttaaataagcctcatttctatttcttcttcattaattctccatctagtcttgtgaaaaaaaaaaaaaaccctcagagatagtctttgtgaagagcttctgacagaatcactgagtaccttccttcccccagatgaggaagacaagggggtctcagtgtctgtgctgtctcctcttctcttccccaaccaaggactgtgccattactgcccgtctcaactgtccatgcaggaggacagagttgcctggtactcttacccttgtccctctcctaaagggagcacaaggaaactgaagagactgaaaaagaagagagtttgtagctgaaaaagaatagggatagcaaggaaacccagaactgcattcccctaagtggggccatcccatgtgattgaattgtccatagcttgcctatggtgagaaatgtgcatgctccgtgagctggtctcttgaaacaggacttatgcttcctctatattctggttaaattttccaaacacataagttcactgagcacagatttcttatccagagacaagtagaatctaaccgcagactgttggcagagtttccaggcacttagccatgttcccttcctgactcaaatccccaaaggccttcactctcactgagaatcacactactgtcccatagataaggcaggcattgaagcacctgtcgtgatcctctaggggggagaatgaaaggttatttcctgcattgcatcatcatagcttttaatataatgctacagaatcatatccacattaggttagagttcagatatttggatatgaatacctaacctagccatatccatggccatctctgttcttttcagcaatgttttccatattatattagcaatgacagaaacagaacaagccaagatccagtcagttcttgggagcttgtctagagcaccaagtaatgaaatagccaggtagtgggatgactgtacctttaaaaatacataatttagtttgcaagctatattatgctactttctattttccttgttactttatagcaattcattttaccctcacaaagtcaatttagaaccttatcattaactgggatgtgtagtgatatttttgggcctctgggtttcatgtgtcaatacaaggaatatttatttaaaatagatttatttagaggaggcacagtgttgttgatctgtgtgacaccacccatatttttaaaaacctttgtatgtttctctaaatttgttgttgactgaatataatagaccctaccataattcgtcaaatatcactgattagttacatcctttgtgtgagattagctgtaaagtatactgctcttattcttattcagaatagttaattggtagccaaaaatacatgtatcacagatgttaggtcgaatttaaacagcacagtcaagtgctatggaagtttttctgctaaattagtagattaaagaatactataccctaggcatggggagcagcacgttttcctttggtaggtaggatctctatactagtgaacagtgccagttccacactttggacttagaactgttctctagttattgtaacacagaatactgtcaatccctaatttacttaatgttacttattggaagtggggctgatgaaatacgcacaggagggaaatctactgtgtttaggcacaggcagccccagtgtataaggagatcatattccaaaaggttgtcagttggttgtttgcaacctggaatgtattttcctttagagaccaggttatccatggtggttaggcccctagagcagctggaaaagatgatcaaaccaataggttagctgacatcgaataatgtaataggtttgctaaagaatctaaccatcaaatataatattgtttccagggagggtgtttgttcagagttgcctgttagtagaatctggactgtccatcccagccacatcccacctactggacagtaggggtagagatgccaccagactacaggtgaccagattggcctgaaacatggtgtccagtaaaaacggggaggaataagtccatgactgccggagagcttggtggtaggaggagggtgaaggagggtgagggggcctctcatgggtcagaaacctccagggacatccctcagctggtaactctgctgttgtccggagggttcaggcttggtgtgccttcttctgtttgtctgacttttggctcctatggttcatctcctgccctgcccaccacagaaaaggatgctgctgcacagcttctccaatgtaccagtcattgaggccagcgcgcagcacttttaatgtttttagtgctagtaactgtgttttaactctccaggaataagctgggaggttagaaaacaagaaaaaagggggaaaaaaaaacctctccacccactttccttttttacagttacagaccctgttgagaaaaagaagcacccagatgggtgatggtgatagggcttgtggtggacacagggttgtggtaagattcctcagtgcttcggcgagcacctaagactattaccctggaactgactgctttctagagcttgattcatgcctctaagccagtggttctcaaagtgtggcccctagaccagtagcatcagcatcatcggggacctcattagaatgcagattctcagccccctcccagacatggtgaagtcagaagctctcagggagggactcagcaaatgattctaaagcgcatcaagtttgagaaccaccctaagccaatgagtctcccttttacttcccattagtcctccctcaccagatgattcctaggactcatggtgcaacatacaggagccaggctttagggaggggaggaaaggagcctggcggcaggggtctctgcaatggcaagaaagtgagtgaatccagcgctgccacctggttatccccttctcgttgaaaatagcagcgcgggtgcaaattcctaaacacaggctgcctgcactcggtgttacctcgggctgaggcatgataatattttattttttaaagctgtgaggaaatgaaagtgaggctttggttggggcgaggcagttgtgaaagaaattaaaataaaagaccctttgtaaatgcagacttagaagaaatactgaatttgtgtcagaagttctccagtgtttgtgttaatcgtgtggtgataatcctgtcctccttttaaagcgaattctctactgaaaggtctgctctgcttaaggagctacaaactgctctcaaaagaatgaaatactgagttccaattcagtgaggcacagtgttggactatggcacatttagttggagtcggggggaggtcaggaatatgatcagataatggattttataccttagagcaaaatctattagtctctctcagtttatcaatttaaatggctttaggcttatagggggtgtaaactttaagaatataattctcccattcaagtttacagcaaacatctagccaccttcaaaacaaagaagatacagaccatcatttagcaatactaatacatgattttccttggggatggcaggtttgagaatcctttagcaacaggacatacttcccctaaattacagtgaattatttataacgagataaagctttcaggtacaagctgaaggtggggtgtctaacaactaaaaactatcactaaatctcaaagagaaagttcttgcaaaatatgtaaagttcacaaggtgcagacattttccttctttaggcttttatctaaggaagggctatgaaactgggcccatctgtatacaggctcaaatttacgtttttaaaggaagaatctatgcagctgaggcttattgcaggaaatacttcatttgtatgtaaatattattgtaaataaataggaggctgtatatttttgaagttgttgatccgcactgaaatagaagtctctaggatctgcatataaacaataaatgtttcctagaaattagtggtttgtttgggaattagaaaaatttacattctctcccaggtaacatagttctctcaatgtaaacttggaacctgaaaccctacttaatttagagaaagaaatgtctgagaaatagttcccttgatttcttatgctggcattaagatcaattatttaacagatagtcctctgagatacaagtaaggaatatttagacacaaatccttgtcctatagaaacagatatacccaaatgacaaattgtttcttcataatgatcttccatttttaacactgataccactacacagtacatatgaaaacagaagctggggagaagaatgtttttttcacaattgaattgctgcatttctcaaactttgggatctatgaaagcggggagagggaacctgaatattaattatgagcacaaatttgaaggaaagaaaacaaagaaccattatctaatcaagctttgaaagtcctgcatgtttgccttttattttagtgttgacgccaacatagactgtctaaggtatttttttccccaaacacttgaatcttggtcgttggtatgtaatccactctctagagtccagtgtactttagacttcatctgagtccaatacatgtaccacactactgttttattaatgtaaaaaccttgtaaatgaatttcagatgggtgatttaagtgagtcacaagtcacaaaactttgctattcatagttaatcaaatagaactgggttttttttttcagagtgtggtgtaaataaagaaatataagaagttctgttctataactgctctgttaacatagtttttaaacattaaaaaatgtgaactaaaagta

SEQ ID NO: 448219 - DNA, 526 bp, Homo sapiens
  misc_feature (3)..(3): n is a, c, g, or t
ggngatctcttgagacttcacttcagcttcactgacttctggattctcctcttgagtaaaaggactcagccaactatgaagttttttgtttttgctttaatcttggctctcatgctttccatgactggagctgattcacatgcaaagagacatcatgggtataaaagaaaattccatgaaaagcatcattcacatcgaggctatagatcaaattatctgtatgacaattgatatcttcagtaatcatggggcatgattatggaggtttgactggcaaattcgctttggactcgtgtattctcatttgtcataccgcatcacactaccactgctttttgaagaattatcataaggcaatgcagaataaaagaaataccatgatttagtgaattctgtgtttcaggatacttcccttcctaattatcatttgattagatacttgcaatttaaatgttaagctgttttcactgctgtttctgagtaatagaaattcattcctctccaaaagcaataaaattcaagcaca

SEQ ID NO: 448220 - DNA, 488 bp, Homo sapiens
aggacgcctaccaggaggacctgggactcagccaactatgaagttttttgtttttgctttaatcttggctctcatgctttccatgactggagctgattcacatgcaaagagacatcatgggtataaaagaaaattccatgaaaagcatcattcacatcgaggctatagatcaaattatctgtatgacaattgatatcttcagtaatcatggggcatgattatggaggtttgactggcaaattcgctttggactcgtgtattctcatttgtcataccgcatcacactaccactgctttttgaagaattatcataaggcaatgcagaataaaagaaataccatgatttagtgaattctgtgtttcaggatacttcccttcctaattatcatttgattagatacttgcaatttaaatgttaagctgttttcactgctgtttctgagtaatagaaattcattcctctccaaaagcaataaaattcaagcaca

SEQ ID NO: 448221 - DNA, 495 bp, Homo sapiens
tcgtgccgaattcggcacgagctgacttctggattctcctcttgagtaaaaggactcagccaactatgaagttttttgtttttgctttaatcttggctctcatgctttccatgactagacatcatgggtataaaagaaaattccatgaaaagcatcattcacatcgaggctatagatcaaattatctgtatgacaattgatatcttcagtaatcatggggcatgattatggaggtttgactggcaaattcgctttggactcgtgtattctcatttgtcataccgcatcacactaccactgctttttgaagaattatcataaggcaatgcagaataaaagaaataccatgatttagtgaattctgtgtttcaggatacttcccttcctaattatcatttgattagatacttgcaatttaaatgttaagctgttttcactgctgtttctgagtaatagaaattcattcctctccaaaagcaataaaattcaagcaca

SEQ ID NO: 448222 - DNA, 1119 bp, Homo sapiens
  misc_feature (3)..(3): n is a, c, g, or t
ggngatctcttgagacttcacttcagcttcactgacttctggattctcctcttgagtaaaaggactcagccaactatgaagttttttgtttttgctttaatcttggctctcatgctttccatgactggagctgattcacatgcaaagagacatcatgggtataaaagaaaattccatgaaaagcatcattcacatcgaggctatagatcaaattatctgtatgacaattgatatcttcagtaatcatggggcatgattatggaggtttgactggcaaattcgctttggactcgtgtattctcatttgtcataccgcatcacactaccactgctttttgaagaattatcataaggcaatgcagaataaaagaaataccatgatttagtgaattctgtgtttcaggatacttcccttcctaattatcatttgattagatacttgcaatttaaatgttaagctgttttcactgctgtttctgagtaatagaaattcattcctctccaaaagcaataaaattcaagcacaccaaaaacacaatcaccgataacgatcgagacgaacacctttttggcgcgcgcttgggcccctgaaaaagctcctccaaaaacaccgcgagggagcccggcgcacccaagagtgaaggagaacggggcctaaacaaggcccagagaaaacccggaccgaaaaaagtgcggagaatcccccaagtaaaaacacagggagtcccacagggtcggcaacatcacgaaggcggatccggcgaccccacggggctcaccaaccgggggccacgagaacgcggaataaaaccagccgcaccggcgtgcgggaaacacgcgactagcgacccaacagacagccacgccgagcacaccacgcacagccacacagcccgcacaagaaagcagcgcagcagaacgcaccagaacgacctcacgccacccaagacaaaccgctgcaagcaaggacagcaccacgcatgagctagcacgaatcaacaccagccagacagaacgccacgacgacacgaggcgcatccaagtccacaatagcaacaaactcatcaccatagcaagcaacgcacagctagacaacgtacaaatcaggacaagagacaa

SEQ ID NO: 448223 - DNA, 1739 bp, Homo sapiens
attcgtgaacttcccggggggcggcgggagcttccgggagggcggctcgcaggcaccatgactcctgtgaggatgcagcactccctggcaggtcagacctatgccgtgcccctcatccagccagacctgcggcgagaggaggccgtccagcagatggcggatgccctgcagtacctgcagaaggtctctggagacatcttcagcaggtagagcagagccggagccaggtgcaggccattggagagaaggtctccttggcccaggccaagattgagaagatcaagggcagcaagaaggccatcaaggtgttctccagtgccaagtaccctgctccagggcgcctgcaggaatatggctccatcttcacgggcgcccaggaccctggcctgcagagacgcccccgccacaggatccagagcaagcaccgccccctggacgagcgggccctgcaggagaagctgaaggactttcctgtgtgcgtgagcaccaagccggagcccgaggacgatgcagaagagggacttgggggtcttcccagcaacatcagctctgtcagctccttgctgctcttcaacaccaccgagaacctgtagaagaagtatgtcttcctggaccccctggctggtgctgtaacaaagacccatgtgatgctgggggcagagacagaggagaagctgtttgatgcccccttgtccatcagcaagagagagcagctggaacagcaggtcccagagaactacttctatgtgccagacctgggccaggtgcctgagattgatgttccatcctacctgcctgacctgcccggcattgccaacgacctcatgtacattgccgacctgggccccggcattgccccctctgcccctggcaccattccagaactgcccaccttccacactgaggtagccgagcctctcaaggcagacctacaagatggggtactaacaccacccccaccgcccccaccaccacccccagctcctgaggtgctggccagtgcacccccactcccaccctcaaccgcggcccctgtaggccaaggcgccaggcaggacgacagcagcagcagcgcgtctccttcagtccagggagctcccagggaagtggttgacccctccggtggctgggccactctgctagagtccatccgccaagctgggggcatcggcaaggccaagctgcgcagcatgaaggagcgaaagctggagaagaagaagcagaaggagcaggagcaagtgagagccacgagccaaggtgggcacttgatgtcggatctcttcaacaagctggtcatgaggcgcaagggcatctctgggaaaggacctggggctggtgaggggcccggaggagcctttgcccgcgtgtcagactccatccctcctctgccgccaccgcagcagccacaggcagaggaggacgaggacgactgggaatcctagggggctccatgacaccttcccccccagacccagacttgggccgttgctctgacatggacacagccaggacaagctgctcagacctacttccttgggagggggtgacggaaccagcactgtgtggagaccagcttcaaggagcggaaggctggcttgaggccacacagctggggcggggacttctgtctgcctgtgctccatggggggacggctccacccagcctgcgccactgtgttcttctcttaagaggcttccagagaaaacggcacaccaatcaataaagaactgagcagaaa

SEQ ID NO: 448224 - DNA, 4829 bp, Homo sapiens
  misc_feature (812)..(812): n is a, c, g, or t
  misc_feature (969)..(969): n is a, c, g, or t
  misc_feature (1063)..(1063): n is a, c, g, or t
  misc_feature (1234)..(1234): n is a, c, g, or t
  misc_feature (1873)..(1873): n is a, c, g, or t
  misc_feature (2231)..(2231): n is a, c, g, or t
  misc_feature (2786)..(2786): n is a, c, g, or t
  misc_feature (4316)..(4316): n is a, c, g, or t
attcgtgaacttcccggggggcggcgggagcttccgggagggcggctcgcaggcaccatgactcctgtgaggatgcagcactccctggcaggtcagacctatgccgtgcccctcatccagccagacctgcggcgagaggaggccgtccagcagatggcggatgccctgcagtacctgcagaaggtctctggagacatcttcagcaggtgggtgctgccactcacccccacctgatgagagggccatccctgtcctgggcaatcccagcaacacaccctctgggagcagcccccttggggaatcccggtcctggggaacccatctggcttccctgtgtgggaggggctgaagtgagagcccaacttggaagcttttactcctgggagtccgagagctcactcccttccaccccacttagcctcctggtttcctgtggtggctctgctctcacaactcatgcttttcctcccattggagggcctattccttcacgttttcctgcagccaacaaatatttacccagcagtgctcgtgtgcaaggcagtgtgggaatctctatatatccagccacggataaggcaacatacctctccacctggagcgcacattctggcaggagagaaagacctaaataagcaatagatgattagttcttcaataacagttgtgacaaggtctattgataatattttgtaatcactaatattcatataaaccgtgcacaaccattgatttgagtgcattaactcacacttcatgagcaggcactgccgtcatctcattttatagatgaggaaactgaggcacagaanggctgagagacctggcctagtgacagagccaggattcaaagccatagatcatggccccgggttatgtaggttattactgcatctgttcaggggagatggggtactgtgaggctcgtcatgggaagcctggcttggtctcaggtcagggaaggcagangtgaggaaatgacatttatggtaaagtctgagggttgagtgggtaggttgggaagaacattccagaaagaagcacatgaactacagcctggagntggaggacctaaaaggaagccagcatggctggagcacggagtggccattgagggaggcgagctggagggctgcagcttcttgtattggcagtgctgacctcgcacagtccttgggctccagtgacttcactcagtgtttatctaacatgagtgagtgaatggtgtttgctntttttttggtaaaggtcccaggggttgtcgggtacacaggtcctgtctttggccataagcaaactgaaatgaggcttggtctccttcccaggatcccacaccatgcctcacatggtagaccccagtgggaagtatgtgactgcctgactcaggtgcctctcgtggtccaagccatccctgccctgtcccttccctggttgtcgccagacctggagcccctgctccttcactttgcagcctcctcttctgtcaccaactgggaacccacctcttcctgaaagtcctcccccactgactcaccggcttgccccgagtttgtcaagaatgtcccagtaaccaggggacacacagtgaagtgactgaggggttaccttggagttgatgccttggctcagatccagctcccctgttttcttcctctgtaaccttgggcaacccaacccctctaagcctcggtgttctcatttgtgaagttgtggtaataatggtagcttcctggtagaattattttaaatattaaattaatcaaaacatgcaaaggaatggaacagtgcctggcacctaggaagccttcaggaaatgctatctcttccctgttgataatcttgacccgtacactgcctttggttgccattcatnaacctgccaccaatagtaacaaagtgctggatgcaccttttgtgcttatctttgtgctaaatgtgcccgagggacacctagggaagaggatgcaggtctttaagagccatcagctccagattatggccaccccatgtccagcacttagaatggaggccaaaaccattccctcggaaattgtgtttccttgccaagatggggactgcgtggttgcccttctctgagggcagcgctggatttttggcgtctttcctttcctgtcctggtacttggcaccttgtagacagttgcatgtcccctgcccagggatgggatgaggagagggcaggaaggcatttcctgggtagtggagtgctgngttcattgagtgtgggttctccaagctgctggcacagcgcagggagggccagatgcctctcaggagccttgggcctgagtcctggctccctcactcctgggttccaggtcactgcatctgtctctccaccatgtgctccacctcgtgctggaccttaagagataccaattatgtggctgccactgtgtcctagaggctggaatgggaacacatagggcgagattgattgttaattgctagcatgaaccgcgtgggcttctcagggtctagagtggagagaaatcggtaagaattggtggcacgcctgtcagaactccccagaccaagctaagcaaaaattaaccaatcagtagagcagccttcggagtaagggctaaaatgatgtcctcagggcctggttttgctttccttccatgtcagtttgcttctttgggtctggctgcattcccagacaggccatgctctcgtggtagcaaggtgacatgacacagggtcaggtccagcaggaaagaatgctgtcctgtgtccccacttcctccagaagccacactcacncatcccacctggcttggtcctcatgtctatcccagaatccattaatggggccaggggactatgacacaccacttggcttagactgaggagctctgtgggcagccccacctgaagctctgggactaagcctgcgagagagatggattccccaagggaaatggggccattgcttgagtaaaaaggaaatagttgctgaagaggaaaaccacgtgcttactccacatagggcagactcctggaagaggggggcagggtagggaggtggatatgcaggttgccctggcagggtctggaaatgggggctgcaggcttggagggaggcctcagtgtggcttggaacgtggtgtatggtggtctgccgcgaaggccggcctgcacaggggtgggaggggggtgcttctgcatgggaagcacagacagcgctgcctctcccttgcactcagctctcggggcatgagaggctgactttccgtgagcctgtgggccaggcctctttgaatggggctgagggagctttgccctggttcctttgtgtccccacggtgccacgggaggctccctggcagggtgtggggcaaggcagtgagtgaagagttgggatgagtgagttagggcccacggattactcaagacaggacttcaagttgattcaggcgtgttagggagctgtgattggattttgagcagggcagggatgggacagaagagtttggggaaggttcctcaggcatccgtcacggaagggacaagaagggagagagagtggatgccagggacacccagaagctgttattgtagtcaggatacgacaggggtgaggctacagacaggggacttgcaagcagggagggcagggtgagacattcagaggaaacgacgacaggaaatggtgacagatagggaacgaggatgaagggaagggagagccagtgacgactggcagtggagtggggagcaccgccacctctcctcctccacttgcccctcctgtggcactggacaagctagtgggcttttcgttgtccatgggctttttcggtggggatgtgaccagctttgaacccgtccccttaaacatgctcctcctgcacggaagagacaggggcaggggagagactctctccccaccacccagctcaggccccagcacagcccggcctctggcctcactggcgtctgtgcccagtgacgcaggcaggtgagctcctggcaaattagcattgcaggctgtgctctctcctcctgctctgctgcagctgggagtgtgcagagactggaggggatgacagtcaccctctgttttctgtggtggctctgttttctgtggtgctggatgcacctctgttttctgtggtggctccaagagagtgcacggtccctgctgattgaaagaaggatgaagggcagaagaggggcggggagctgtgtgccctaagatctcattgcctttttatgccgattaacatgcttttagcccctactgagcttatagttaacagaagtttccaggtctttcttcacctgaactgngtctaaagcaagttccctccaccttctgtatttatacgcttgatttttaaaacctaaatgttgggcttcacatttgttccttgtaaatttcatcttggtgattgcagtctaccctctggcctttaaaaattgtctgagccttgattcgatcatgaaaccagcttacccttcccctgtgtgctggccccagttttctaaccaggtgttgaatgaactggatggactctgccagatccctccgtgcaaggctggaatcagtccattgttcaactgtgccctttggggctgtggttcatttggctctgatttttcctatatgttctctcctccaacccccatagctccatcttgtctacaagattttgttagaagccgtcaaaatcctgctgactcgagatgcatctgcctgtgctccatggggggacggctccacccagcctgcgccactgtgttcttctcttaagaggcttccagagaaaacggcacaccaatcaataaagaactgagcagaaa

SEQ ID NO: 448225 - DNA, 2229 bp, Homo sapiens
  misc_feature (1226)..(1226): n is a, c, g, or t
ggacgcgtgggtcggagcttccggtgagggcggctcggtagagcagagccggagccaggtgcaggccattggagagaaggtctccttggcccaggccaagattgagaagatcaagggcagcaagaaggccatcaaggtgttctccagtgccaagtaccctgctccagggcgcctgcaggaatatggctccatcttcacgggcgcccaggaccctggcctgcagagacgcccccgccacaggatccagagcaagcaccgccccctggacgagcgggccctgcaggagaagctgaaggactttcctgtgtgcgtgagcaccaagccggagcccgaggacgatgcagaagagggacttgggggtcttcccagcaacatcagctctgtcagctccttgctgctcttcaacaccaccgagaacctgtagaagaagtatgtcttcctggaccccctggctggtgctgtaacaaagacccatgtgatgctgggggcagagacagaggagaagctgtttgatgcccccttgtccatcagcaagagagagcagctggaacagcaggtcccagagaactacttctatgtgccagacctgggccaggtgcctgagattgatgttccatcctacctgcctgacctgcccggcattgccaacgacctcatgtacattgccgacctgggccccggcattgccccctctgcccctggcaccattccagaactgcccaccttccacactgaggtagccgagcctctcaaggcagacctacaagatggggtactaacaccacccccaccgcccccaccaccacccccagctcctgaggtgctggccagtgcacccccactcccaccctcaaccgcggcccctgtaggccaaggcgccaggcaggacgacagcagcagcagcgcgtctccttcaggtgggagcagctctttgaggccacctgatttctggcgtgctcagtgcactcgggtggattttctgtgggtttgttaagtggtcagaaattctcaattttttgaatagtttccatttcaaatatcttgttctacttggttcataaaatagtggttttcaaactgtagagctctggacttctcacttctagggcagagggagcctgaacaagtgaggctctgggttccccattcctaattaaaccaatggaaagaaggggtctaataacaaactacagcaacacatttttcatttcagcttcactgctgtntctcccagtgtaaccctagcatccagaagtggcacaaaacccctctgctggctcgtgtgtgcaactgagactgtcagagcatggctagctcaggggtccagctctgcagggtgggggctagagaggaagcagggagtatctgcacacaggatgcccgcgctcaggtggttgcagaagtcagtgcccaggcccccacacacagtctccaaaggtccggcctccccagcgcagggctcctcgtttgaggggaggtgacttccctcccagcaggctcttggacacagtaagcttccccagccctgcctgagcagcctttcctccttgccctgttccccacctcccggctccagtccagggagctcccagggaagtggttgacccctccggtggctgggccactctgctagagtccatccgccaagctgggggcatcggcaaggccaagctgcgcagcatgaaggagcgaaagctggagaagaagaagcagaaggagcaggagcaagtgagagccacgagccaaggtgggcacttgatgtcggatctcttcaacaagctggtcatgaggcgcaagggcatctctgggaaaggacctggggctggtgaggggcccggaggagcctttgcccgcgtgtcagactccatccctcctctgccgccaccgcagcagccacaggcagaggaggacgaggacgactgggaatcctagggggctccatgacaccttcccccccagacccagacttgggccgttgctctgacatggacacagccaggacaagctgctcagacctacttccttgggagggggtgacggaaccagcactgtgtggagaccagcttcaaggagcggaaggctggcttgaggccacacagctggggcggggacttctgtctgcctgtgctccatggggggacggctccacccagcctgcgccactgtgttcttctcttaagaggcttccagagaaaacggcacaccaatcaataaagaactgagcagaaa

SEQ ID NO: 448226 - DNA, 2569 bp, Homo sapiens
  misc_feature (1566)..(1566): n is a, c, g, or t
attcgtgaacttcccggggggcggcgggagcttccgggagggcggctcgcaggcaccatgactcctgtgaggatgcagcactccctggcaggtcagacctatgccgtgcccctcatccagccagacctgcggcgagaggaggccgtccagcagatggcggatgccctgcagtacctgcagaaggtctctggagacatcttcagcaggtagagcagagccggagccaggtgcaggccattggagagaaggtctccttggcccaggccaagattgagaagatcaagggcagcaagaaggccatcaaggtgttctccagtgccaagtaccctgctccagggcgcctgcaggaatatggctccatcttcacgggcgcccaggaccctggcctgcagagacgcccccgccacaggatccagagcaagcaccgccccctggacgagcgggccctgcaggtctgctggccgcgcatatagcctgtcacacaccaggaggactggatactggggaggagccggggccaccatagggttctgtcccccagaggaggctgactgggatgggatggcagctgattaggcccagcaccaaatattcaccatcccttggccatcctggccctctcagagaagctgaaggactttcctgtgtgcgtgagcaccaagccggagcccgaggacgatgcagaagagggacttgggggtcttcccagcaacatcagctctgtcagctccttgctgctcttcaacaccaccgagaacctgtagaagaagtatgtcttcctggaccccctggctggtgctgtaacaaagacccatgtgatgctgggggcagagacagaggagaagctgtttgatgcccccttgtccatcagcaagagagagcagctggaacagcaggtcccagagaactacttctatgtgccagacctgggccaggtgcctgagattgatgttccatcctacctgcctgacctgcccggcattgccaacgacctcatgtacattgccgacctgggccccggcattgccccctctgcccctggcaccattccagaactgcccaccttccacactgaggtagccgagcctctcaaggcagacctacaagatggggtactaacaccacccccaccgcccccaccaccacccccagctcctgaggtgctggccagtgcacccccactcccaccctcaaccgcggcccctgtaggccaaggcgccaggcaggacgacagcagcagcagcgcgtctccttcaggtgggagcagctctttgaggccacctgatttctggcgtgctcagtgcactcgggtggattttctgtgggtttgttaagtggtcagaaattctcaattttttgaatagtttccatttcaaatatcttgttctacttggttcataaaatagtggttttcaaactgtagagctctggacttctcacttctagggcagagggagcctgaacaagtgaggctctgggttccccattcctaattaaaccaatggaaagaaggggtctaataacaaactacagcaacacatttttcatttcagcttcactgctgtntctcccagtgtaaccctagcatccagaagtggcacaaaacccctctgctggctcgtgtgtgcaactgagactgtcagagcatggctagctcaggggtccagctctgcagggtgggggctagagaggaagcagggagtatctgcacacaggatgcccgcgctcaggtggttgcagaagtcagtgcccaggcccccacacacagtctccaaaggtccggcctccccagcgcagggctcctcgtttgaggggaggtgacttccctcccagcaggctcttggacacagtaagcttccccagccctgcctgagcagcctttcctccttgccctgttccccacctcccggctccagtccagggagctcccagggaagtggttgacccctccggtggctgggccactctgctagagtccatccgccaagctgggggcatcggcaaggccaagctgcgcagcatgaaggagcgaaagctggagaagaagaagcagaaggagcaggagcaagtgagagccacgagccaaggtgggcacttgatgtcggatctcttcaacaagctggtcatgaggcgcaagggcatctctgggaaaggacctggggctggtgaggggcccggaggagcctttgcccgcgtgtcagactccatccctcctctgccgccaccgcagcagccacaggcagaggaggacgaggacgactgggaatcctagggggctccatgacaccttcccccccagacccagacttgggccgttgctctgacatggacacagccaggacaagctgctcagacctacttccttgggagggggtgacggaaccagcactgtgtggagaccagcttcaaggagcggaaggctggcttgaggccacacagctggggcggggacttctgtctgcctgtgctccatggggggacggctccacccagcctgcgccactgtgttcttctcttaagaggcttccagagaaaacggcacaccaatcaataaagaactgagcagaaa

SEQ ID NO: 448227 - DNA, 2808 bp, Homo sapiens
  misc_feature (1805)..(1805): n is a, c, g, or t
attcgtgaacttcccggggggcggcgggagcttccgggagggcggctcgcaggcaccatgactcctgtgaggatgcagcactccctggcaggtcagacctatgccgtgcccctcatccagccagacctgcggcgagaggaggccgtccagcagatggcggatgccctgcagtacctgcagaaggtctctggagacatcttcagcaggtagagcagagccggagccaggtgcaggccattggagagaaggtctccttggcccaggccaagattgagaagatcaagggcagcaagaaggccatcaaggtgttctccagtgccaagtaccctgctccagggcgcctgcaggaatatggctccatcttcacgggcgcccaggaccctggcctgcagagacgcccccgccacaggatccagagcaagcaccgccccctggacgagcgggccctgcaggtctgctggccgcgcatatagcctgtcacacaccaggaggactggatactggggaggagccggggccaccatagggttctgtcccccagaggaggctgactgggatgggatggcagctgattaggcccagcaccaaatattcaccatcccttggccatcctggccctctcagagaagctgaaggactttcctgtgtgcgtgagcaccaagccggagcccgaggacgatgcagaagagggacttgggggtcttcccagcaacatcagctctgtcagctccttgctgctcttcaacaccaccgagaacctgtatggccagagggcagggccgaggggtgtgggcgggaggcccggcctggcttagtggggacccagggcatcagacacaggtacagcacataggccaggagccagggggtgactggggtggctcggctcgggaggcctgggaccccacagtgcacgctgtgcccctgatgatgtgggagaggaacatgggctcaggacagcgggtgtcagcttgcctgacccccatgtcgcctctgtaggtagaagaagtatgtcttcctggaccccctggctggtgctgtaacaaagacccatgtgatgctgggggcagagacagaggagaagctgtttgatgcccccttgtccatcagcaagagagagcagctggaacagcaggtcccagagaactacttctatgtgccagacctgggccaggtgcctgagattgatgttccatcctacctgcctgacctgcccggcattgccaacgacctcatgtacattgccgacctgggccccggcattgccccctctgcccctggcaccattccagaactgcccaccttccacactgaggtagccgagcctctcaaggcagacctacaagatggggtactaacaccacccccaccgcccccaccaccacccccagctcctgaggtgctggccagtgcacccccactcccaccctcaaccgcggcccctgtaggccaaggcgccaggcaggacgacagcagcagcagcgcgtctccttcaggtgggagcagctctttgaggccacctgatttctggcgtgctcagtgcactcgggtggattttctgtgggtttgttaagtggtcagaaattctcaattttttgaatagtttccatttcaaatatcttgttctacttggttcataaaatagtggttttcaaactgtagagctctggacttctcacttctagggcagagggagcctgaacaagtgaggctctgggttccccattcctaattaaaccaatggaaagaaggggtctaataacaaactacagcaacacatttttcatttcagcttcactgctgtntctcccagtgtaaccctagcatccagaagtggcacaaaacccctctgctggctcgtgtgtgcaactgagactgtcagagcatggctagctcaggggtccagctctgcagggtgggggctagagaggaagcagggagtatctgcacacaggatgcccgcgctcaggtggttgcagaagtcagtgcccaggcccccacacacagtctccaaaggtccggcctccccagcgcagggctcctcgtttgaggggaggtgacttccctcccagcaggctcttggacacagtaagcttccccagccctgcctgagcagcctttcctccttgccctgttccccacctcccggctccagtccagggagctcccagggaagtggttgacccctccggtggctgggccactctgctagagtccatccgccaagctgggggcatcggcaaggccaagctgcgcagcatgaaggagcgaaagctggagaagaagaagcagaaggagcaggagcaagtgagagccacgagccaaggtgggcacttgatgtcggatctcttcaacaagctggtcatgaggcgcaagggcatctctgggaaaggacctggggctggtgaggggcccggaggagcctttgcccgcgtgtcagactccatccctcctctgccgccaccgcagcagccacaggcagaggaggacgaggacgactgggaatcctagggggctccatgacaccttcccccccagacccagacttgggccgttgctctgacatggacacagccaggacaagctgctcagacctacttccttgggagggggtgacggaaccagcactgtgtggagaccagcttcaaggagcggaaggctggcttgaggccacacagctggggcggggacttctgtctgcctgtgctccatggggggacggctccacccagcctgcgccactgtgttcttctcttaagaggcttccagagaaaacggcacaccaatcaataaagaactgagcagaaa

SEQ ID NO: 448228 - DNA, 2985 bp, Homo sapiens
  misc_feature (1982)..(1982): n is a, c, g, or t
attcgtgaacttcccggggggcggcgggagcttccgggagggcggctcgcaggcaccatgactcctgtgaggatgcagcactccctggcaggtcagacctatgccgtgcccctcatccagccagacctgcggcgagaggaggccgtccagcagatggcggatgccctgcagtacctgcagaaggtctctggagacatcttcagcaggtagagcagagccggagccaggtgcaggccattggagagaaggtctccttggcccaggccaagattgagaagatcaagggcagcaagaaggccatcaaggtgttctccagtgccaagtaccctgctccagggcgcctgcaggaatatggctccatcttcacgggcgcccaggaccctggcctgcagagacgcccccgccacaggatccagagcaagcaccgccccctggacgagcgggccctgcaggtctgctggccgcgcatatagcctgtcacacaccaggaggactggatactggggaggagccggggccaccatagggttctgtcccccagaggaggctgactgggatgggatggcagctgattaggcccagcaccaaatattcaccatcccttggccatcctggccctctcagagaagctgaaggactttcctgtgtgcgtgagcaccaagccggagcccgaggacgatgcagaagagggacttgggggtcttcccagcaacatcagctctgtcagctccttgctgctcttcaacaccaccgagaacctgtatggccagagggcagggccgaggggtgtgggcgggaggcccggcctggcttagtggggacccagggcatcagacacaggtacagcacataggccaggagccagggggtgactggggtggctcggctcgggaggcctgggaccccacagtgcacgctgtgcccctgatgatgtgggagaggaacatgggctcaggacagcgggtgtcagcttgcctgacccccatgtcgcctctgtaggtagaagaagtatgtcttcctggaccccctggctggtgctgtaacaaagacccatgtgatgctgggggcagagacagaggagaagctgtttgatgcccccttgtccatcagcaagagagagcagctggaacagcaggtgggaggggtgggacagaggtggagacaggtgcagtggcccagggccttgccagagctcctctccagtcaaggctgttgggccccttattccacccatgggaggtgcacacaaggtcttgttggctgcccctgcaggtccctgtcacctctcacatgtccctgcctaatcttgcaggtcccagagaactacttctatgtgccagacctgggccaggtgcctgagattgatgttccatcctacctgcctgacctgcccggcattgccaacgacctcatgtacattgccgacctgggccccggcattgccccctctgcccctggcaccattccagaactgcccaccttccacactgaggtagccgagcctctcaaggcagacctacaagatggggtactaacaccacccccaccgcccccaccaccacccccagctcctgaggtgctggccagtgcacccccactcccaccctcaaccgcggcccctgtaggccaaggcgccaggcaggacgacagcagcagcagcgcgtctccttcaggtgggagcagctctttgaggccacctgatttctggcgtgctcagtgcactcgggtggattttctgtgggtttgttaagtggtcagaaattctcaattttttgaatagtttccatttcaaatatcttgttctacttggttcataaaatagtggttttcaaactgtagagctctggacttctcacttctagggcagagggagcctgaacaagtgaggctctgggttccccattcctaattaaaccaatggaaagaaggggtctaataacaaactacagcaacacatttttcatttcagcttcactgctgtntctcccagtgtaaccctagcatccagaagtggcacaaaacccctctgctggctcgtgtgtgcaactgagactgtcagagcatggctagctcaggggtccagctctgcagggtgggggctagagaggaagcagggagtatctgcacacaggatgcccgcgctcaggtggttgcagaagtcagtgcccaggcccccacacacagtctccaaaggtccggcctccccagcgcagggctcctcgtttgaggggaggtgacttccctcccagcaggctcttggacacagtaagcttccccagccctgcctgagcagcctttcctccttgccctgttccccacctcccggctccagtccagggagctcccagggaagtggttgacccctccggtggctgggccactctgctagagtccatccgccaagctgggggcatcggcaaggccaagctgcgcagcatgaaggagcgaaagctggagaagaagaagcagaaggagcaggagcaagtgagagccacgagccaaggtgggcacttgatgtcggatctcttcaacaagctggtcatgaggcgcaagggcatctctgggaaaggacctggggctggtgaggggcccggaggagcctttgcccgcgtgtcagactccatccctcctctgccgccaccgcagcagccacaggcagaggaggacgaggacgactgggaatcctagggggctccatgacaccttcccccccagacccagacttgggccgttgctctgacatggacacagccaggacaagctgctcagacctacttccttgggagggggtgacggaaccagcactgtgtggagaccagcttcaaggagcggaaggctggcttgaggccacacagctggggcggggacttctgtctgcctgtgctccatggggggacggctccacccagcctgcgccactgtgttcttctcttaagaggcttccagagaaaacggcacaccaatcaataaagaactgagcagaaa

SEQ ID NO: 448229 - DNA, 2987 bp, Homo sapiens
  misc_feature (1226)..(1226): n is a, c, g, or t
ggacgcgtgggtcggagcttccggtgagggcggctcggtagagcagagccggagccaggtgcaggccattggagagaaggtctccttggcccaggccaagattgagaagatcaagggcagcaagaaggccatcaaggtgttctccagtgccaagtaccctgctccagggcgcctgcaggaatatggctccatcttcacgggcgcccaggaccctggcctgcagagacgcccccgccacaggatccagagcaagcaccgccccctggacgagcgggccctgcaggagaagctgaaggactttcctgtgtgcgtgagcaccaagccggagcccgaggacgatgcagaagagggacttgggggtcttcccagcaacatcagctctgtcagctccttgctgctcttcaacaccaccgagaacctgtagaagaagtatgtcttcctggaccccctggctggtgctgtaacaaagacccatgtgatgctgggggcagagacagaggagaagctgtttgatgcccccttgtccatcagcaagagagagcagctggaacagcaggtcccagagaactacttctatgtgccagacctgggccaggtgcctgagattgatgttccatcctacctgcctgacctgcccggcattgccaacgacctcatgtacattgccgacctgggccccggcattgccccctctgcccctggcaccattccagaactgcccaccttccacactgaggtagccgagcctctcaaggcagacctacaagatggggtactaacaccacccccaccgcccccaccaccacccccagctcctgaggtgctggccagtgcacccccactcccaccctcaaccgcggcccctgtaggccaaggcgccaggcaggacgacagcagcagcagcgcgtctccttcaggtgggagcagctctttgaggccacctgatttctggcgtgctcagtgcactcgggtggattttctgtgggtttgttaagtggtcagaaattctcaattttttgaatagtttccatttcaaatatcttgttctacttggttcataaaatagtggttttcaaactgtagagctctggacttctcacttctagggcagagggagcctgaacaagtgaggctctgggttccccattcctaattaaaccaatggaaagaaggggtctaataacaaactacagcaacacatttttcatttcagcttcactgctgtntctcccagtgtaaccctagcatccagaagtggcacaaaacccctctgctggctcgtgtgtgcaactgagactgtcagagcatggctagctcaggggtccagctctgcagggtgggggctagagaggaagcagggagtatctgcacacaggatgcccgcgctcaggtggttgcagaagtcagtgcccaggcccccacacacagtctccaaaggtccggcctccccagcgcagggctcctcgtttgaggggaggtgacttccctcccagcaggctcttggacacagtaagcttccccagccctgcctgagcagcctttcctccttgccctgttccccacctcccggctccagtccagggagctcccagggaagtggttgacccctccggtggctgggccactctgctagagtccatccgccaagctgggggcatcggcaaggccaagctgcgcagcatgaaggagcgaaagctggagaagaagaagcagaaggagcaggagcaaggtgagcgggccctggagcttgcagtcggagggccttgggcaagatcgcctcctcccctccagccctgagtccaccgggtgctttctgcccaccccctgctcttgccagctggcccctgcttcccctagggcacatgctggaagccctgggccgccaccagaggtcctcagccctcctgcctgggctatggctccttcctggtttgggagccatagtggagctttcctctctaagctcacccagctcaaactgacaggagaatcttcttcgactgccaagagcggtccaaggcaatggtcagccactgcagcctcctgagatatttttagagactggacctgaggcctccggaggctactgatgatgcctgctgtgaacgcagacactggtgtgatgcgatgcctgcgcctgcagcggcagtgccctgggcactatggttttgagcttgtacccagcgctgcttttgccttgctctgtgaccccaggcaagctgcctcacctctctgggccagtttccccatagtacagtggtgctgcacaccctggccctggccccgaggtggctgggaggtggctcctcaaacagccgctgtctcatcagtgcccggtgctgggtcagggatcgactgaggctctgagctaactgggaaacacagtggccttggagggctggggagtgtcatgggggtggggacagggagtcaccggtcgcatgtgactgaactcttcaccccagtctgtggctttcccgttgcagttgagagccacgagccaaggtgggcacttgatgtcggatctcttcaacaagctggtcatgaggcgcaagggcatctctgggaaaggacctggggctggtgaggggcccggaggagcctttgcccgcgtgtcagactccatccctcctctgccgccaccgcagcagccacaggcagaggaggacgaggacgactgggaatcctagggggctccatgacaccttcccccccagacccagacttgggccgttgctctgacatggacacagccaggacaagctgctcagacctacttccttgggagggggtgacggaaccagcactgtgtggagaccagcttcaaggagcggaaggctggcttgaggccacacagctggggcggggacttctgtctgcctgtgctccatggggggacggctccacccagcctgcgccactgtgttcttctcttaagaggcttccagagaaaacggcacaccaatcaataaagaactgagcagaaa

SEQ ID NO: 448230 - DNA, 2328 bp, Homo sapiens
ggacgcgtgggtcggagcttccggtgagggcggctcggtagagcagagccggagccaggtgcaggccattggagagaaggtctccttggcccaggccaagattgagaagatcaagggcagcaagaaggccatcaaggtgttctccagtgccaagtaccctgctccagggcgcctgcaggaatatggctccatcttcacgggcgcccaggaccctggcctgcagagacgcccccgccacaggatccagagcaagcaccgccccctggacgagcgggccctgcaggagaagctgaaggactttcctgtgtgcgtgagcaccaagccggagcccgaggacgatgcagaagagggacttgggggtcttcccagcaacatcagctctgtcagctccttgctgctcttcaacaccaccgagaacctgtagaagaagtatgtcttcctggaccccctggctggtgctgtaacaaagacccatgtgatgctgggggcagagacagaggagaagctgtttgatgcccccttgtccatcagcaagagagagcagctggaacagcaggtcccagagaactacttctatgtgccagacctgggccaggtgcctgagattgatgttccatcctacctgcctgacctgcccggcattgccaacgacctcatgtacattgccgacctgggccccggcattgccccctctgcccctggcaccattccagaactgcccaccttccacactgaggtagccgagcctctcaaggcagacctacaagatggggtactaacaccacccccaccgcccccaccaccacccccagctcctgaggtgctggccagtgcacccccactcccaccctcaaccgcggcccctgtaggccaaggcgccaggcaggacgacagcagcagcagcgcgtctccttcagtccagggagctcccagggaagtggttgacccctccggtggctgggccactctgctagagtccatccgccaagctgggggcatcggcaaggccaagctgcgcagcatgaaggagcgaaagctggagaagaagaagcagaaggagcaggagcaaggtgagcgggccctggagcttgcagtcggagggccttgggcaagatcgcctcctcccctccagccctgagtccaccgggtgctttctgcccaccccctgctcttgccagctggcccctgcttcccctagggcacatgctggaagccctgggccgccaccagaggtcctcagccctcctgcctgggctatggctccttcctggtttgggagccatagtggagctttcctctctaagctcacccagctcaaactgacaggagaatcttcttcgactgccaagagcggtccaaggcaatggtcagccactgcagcctcctgagatatttttagagactggacctgaggcctccggaggctactgatgatgcctgctgtgaacgcagacactggtgtgatgcgatgcctgcgcctgcagcggcagtgccctgggcactatggttttgagcttgtacccagcgctgcttttgccttgctctgtgaccccaggcaagctgcctcacctctctgggccagtttccccatagtacagtggtgctgcacaccctggccctggccccgaggtggctgggaggtggctcctcaaacagccgctgtctcatcagtgcccggtgctgggtcagggatcgactgaggctctgagctaactgggaaacacagtggccttggagggctggggagtgtcatgggggtggggacagggagtcaccggtcgcatgtgactgaactcttcaccccagtctgtggctttcccgttgcagttgagagccacgagccaaggtgggcacttgatgtcggatctcttcaacaagctggtcatgaggcgcaagggcatctctgggaaaggacctggggctggtgaggggcccggaggagcctttgcccgcgtgtcagactccatccctcctctgccgccaccgcagcagccacaggcagaggaggacgaggacgactgggaatcctagggggctccatgacaccttcccccccagacccagacttgggccgttgctctgacatggacacagccaggacaagctgctcagacctacttccttgggagggggtgacggaaccagcactgtgtggagaccagcttcaaggagcggaaggctggcttgaggccacacagctggggcggggacttctgtctgcctgtgctccatggggggacggctccacccagcctgcgccactgtgttcttctcttaagaggcttccagagaaaacggcacaccaatcaataaagaactgagcagaaa

SEQ ID NO: 448231 - DNA, 1417 bp, Homo sapiens
ggacgcgtgggtcggagcttccggtgagggcggctcggtagagcagagccggagccaggtgcaggccattggagagaaggtctccttggcccaggccaagattgagaagatcaagggcagcaagaaggccatcaaggtgttctccagtgccaagtaccctgctccagggcgcctgcaggaatatggctccatcttcacgggcgcccaggaccctggcctgcagagacgcccccgccacaggatccagagcaagcaccgccccctggacgagcgggccctgcaggagaagctgaaggactttcctgtgtgcgtgagcaccaagccggagcccgaggacgatgcagaagagggacttgggggtcttcccagcaacatcagctctgtcagctccttgctgctcttcaacaccaccgagaacctgtagaagaagtatgtcttcctggaccccctggctggtgctgtaacaaagacccatgtgatgctgggggcagagacagaggagaagctgtttgatgcccccttgtccatcagcaagagagagcagctggaacagcaggtcccagagaactacttctatgtgccagacctgggccaggtgcctgagattgatgttccatcctacctgcctgacctgcccggcattgccaacgacctcatgtacattgccgacctgggccccggcattgccccctctgcccctggcaccattccagaactgcccaccttccacactgaggtagccgagcctctcaaggcagacctacaagatggggtactaacaccacccccaccgcccccaccaccacccccagctcctgaggtgctggccagtgcacccccactcccaccctcaaccgcggcccctgtaggccaaggcgccaggcaggacgacagcagcagcagcgcgtctccttcagtgagagccacgagccaaggtgggcacttgatgtcggatctcttcaacaagctggtcatgaggcgcaagggcatctctgggaaaggacctggggctggtgaggggcccggaggagcctttgcccgcgtgtcagactccatccctcctctgccgccaccgcagcagccacaggcagaggaggacgaggacgactgggaatcctagggggctccatgacaccttcccccccagacccagacttgggccgttgctctgacatggacacagccaggacaagctgctcagacctacttccttgggagggggtgacggaaccagcactgtgtggagaccagcttcaaggagcggaaggctggcttgaggccacacagctggggcggggacttctgtctgcctgtgctccatggggggacggctccacccagcctgcgccactgtgttcttctcttaagaggcttccagagaaaacggcacaccaatcaataaagaactgagcagaaa

SEQ ID NO: 448232 - DNA, 3127 bp, Homo sapiens
  misc_feature (1226)..(1226): n is a, c, g, or t
ggacgcgtgggtcggagcttccggtgagggcggctcggtagagcagagccggagccaggtgcaggccattggagagaaggtctccttggcccaggccaagattgagaagatcaagggcagcaagaaggccatcaaggtgttctccagtgccaagtaccctgctccagggcgcctgcaggaatatggctccatcttcacgggcgcccaggaccctggcctgcagagacgcccccgccacaggatccagagcaagcaccgccccctggacgagcgggccctgcaggagaagctgaaggactttcctgtgtgcgtgagcaccaagccggagcccgaggacgatgcagaagagggacttgggggtcttcccagcaacatcagctctgtcagctccttgctgctcttcaacaccaccgagaacctgtagaagaagtatgtcttcctggaccccctggctggtgctgtaacaaagacccatgtgatgctgggggcagagacagaggagaagctgtttgatgcccccttgtccatcagcaagagagagcagctggaacagcaggtcccagagaactacttctatgtgccagacctgggccaggtgcctgagattgatgttccatcctacctgcctgacctgcccggcattgccaacgacctcatgtacattgccgacctgggccccggcattgccccctctgcccctggcaccattccagaactgcccaccttccacactgaggtagccgagcctctcaaggcagacctacaagatggggtactaacaccacccccaccgcccccaccaccacccccagctcctgaggtgctggccagtgcacccccactcccaccctcaaccgcggcccctgtaggccaaggcgccaggcaggacgacagcagcagcagcgcgtctccttcaggtgggagcagctctttgaggccacctgatttctggcgtgctcagtgcactcgggtggattttctgtgggtttgttaagtggtcagaaattctcaattttttgaatagtttccatttcaaatatcttgttctacttggttcataaaatagtggttttcaaactgtagagctctggacttctcacttctagggcagagggagcctgaacaagtgaggctctgggttccccattcctaattaaaccaatggaaagaaggggtctaataacaaactacagcaacacatttttcatttcagcttcactgctgtntctcccagtgtaaccctagcatccagaagtggcacaaaacccctctgctggctcgtgtgtgcaactgagactgtcagagcatggctagctcaggggtccagctctgcagggtgggggctagagaggaagcagggagtatctgcacacaggatgcccgcgctcaggtggttgcagaagtcagtgcccaggcccccacacacagtctccaaaggtccggcctccccagcgcagggctcctcgtttgaggggaggtgacttccctcccagcaggctcttggacacagtaagcttccccagccctgcctgagcagcctttcctccttgccctgttccccacctcccggctccagtccagggagctcccagggaagtggttgacccctccggtggctgggccactctgctagagtccatccgccaagctgggggcatcggcaaggccaagctgcgcagcatgaaggagcgaaagctggagaagaagaagcagaaggagcaggagcaaggtgagcgggccctggagcttgcagtcggagggccttgggcaagatcgcctcctcccctccagccctgagtccaccgggtgctttctgcccaccccctgctcttgccagctggcccctgcttcccctagggcacatgctggaagccctgggccgccaccagaggtcctcagccctcctgcctgggctatggctccttcctggtttgggagccatagtggagctttcctctctaagctcacccagctcaaactgacaggagaatcttcttcgactgccaagagcggtccaaggcaatggtcagccactgcagcctcctgagatatttttagagactggacctgaggcctccggaggctactgatgatgcctgctgtgaacgcagacactggtgtgatgcgatgcctgcgcctgcagcggcagtgccctgggcactatggttttgagcttgtacccagcgctgcttttgccttgctctgtgaccccaggcaagctgcctcacctctctgggccagtttccccatagtacagtggtgctgcacaccctggccctggccccgaggtggctgggaggtggctcctcaaacagccgctgtctcatcagtgcccggtgctgggtcagggatcgactgaggctctgagctaactgggaaacacagtggccttggagggctggggagtgtcatgggggtggggacagggagtcaccggtcgcatgtgactgaactcttcaccccagtctgtggctttcccgttgcagttgagagccacgagccaaggtgggcacttgatgtcggatctcttcaacaagctggtcatgaggcgcaagggtaggaggcagggccgctgcccgccctgggccagcaccttgtaattctgtcctgcctttttcttcctgtatttaagtctccgggggctgggggaaccagggtttcccaccaaccaccctcactcagccttttccctccaggcatctctgggaaaggacctggggctggtgaggggcccggaggagcctttgcccgcgtgtcagactccatccctcctctgccgccaccgcagcagccacaggcagaggaggacgaggacgactgggaatcctagggggctccatgacaccttcccccccagacccagacttgggccgttgctctgacatggacacagccaggacaagctgctcagacctacttccttgggagggggtgacggaaccagcactgtgtggagaccagcttcaaggagcggaaggctggcttgaggccacacagctggggcggggacttctgtctgcctgtgctccatggggggacggctccacccagcctgcgccactgtgttcttctcttaagaggcttccagagaaaacggcacaccaatcaataaagaactgagcagaaa

SEQ ID NO: 448233 - DNA, 1501 bp, Homo sapiens
ggacgcgtgggtcggagcttccggtgagggcggctcggtagagcagagccggagccaggtgcaggccattggagagaaggtctccttggcccaggccaagattgagaagatcaagggcagcaagaaggccatcaaggtgttctccagtgccaagtaccctgctccagggcgcctgcaggaatatggctccatcttcacgggcgcccaggaccctggcctgcagagacgcccccgccacaggatccagagcaagcaccgccccctggacgagcgggccctgcaggagaagctgaaggactttcctgtgtgcgtgagcaccaagccggagcccgaggacgatgcagaagagggacttgggggtcttcccagcaacatcagctctgtcagctccttgctgctcttcaacaccaccgagaacctgtagaagaagtatgtcttcctggaccccctggctggtgctgtaacaaagacccatgtgatgctgggggcagagacagaggagaagctgtttgatgcccccttgtccatcagcaagagagagcagctggaacagcaggtcccagagaactacttctatgtgccagacctgggccaggtgcctgagattgatgttccatcctacctgcctgacctgcccggcattgccaacgacctcatgtacattgccgacctgggccccggcattgccccctctgcccctggcaccattccagaactgcccaccttccacactgaggtagccgagcctctcaaggcagacctacaagatggggtactaacaccacccccaccgcccccaccaccacccccagctcctgaggtgctggccagtgcacccccactcccaccctcaaccgcggcccctgtaggccaaggcgccaggcaggacgacagcagcagcagcgcgtctccttcagtccagggagctcccagggaagtggttgacccctccggtggctgggccactctgctagagtccatccgccaagctgggggcatcggcaaggccaagctgcgcagcatgaaggagcgaaagctggagaagaagaagcagaaggagcaggagcaaggcatctctgggaaaggacctggggctggtgaggggcccggaggagcctttgcccgcgtgtcagactccatccctcctctgccgccaccgcagcagccacaggcagaggaggacgaggacgactgggaatcctagggggctccatgacaccttcccccccagacccagacttgggccgttgctctgacatggacacagccaggacaagctgctcagacctacttccttgggagggggtgacggaaccagcactgtgtggagaccagcttcaaggagcggaaggctggcttgaggccacacagctggggcggggacttctgtctgcctgtgctccatggggggacggctccacccagcctgcgccactgtgttcttctcttaagaggcttccagagaaaacggcacaccaatcaataaagaactgagcagaaa

SEQ ID NO: 448234 - DNA, 2099 bp, Homo sapiens
  misc_feature (1226)..(1226): n is a, c, g, or t
ggacgcgtgggtcggagcttccggtgagggcggctcggtagagcagagccggagccaggtgcaggccattggagagaaggtctccttggcccaggccaagattgagaagatcaagggcagcaagaaggccatcaaggtgttctccagtgccaagtaccctgctccagggcgcctgcaggaatatggctccatcttcacgggcgcccaggaccctggcctgcagagacgcccccgccacaggatccagagcaagcaccgccccctggacgagcgggccctgcaggagaagctgaaggactttcctgtgtgcgtgagcaccaagccggagcccgaggacgatgcagaagagggacttgggggtcttcccagcaacatcagctctgtcagctccttgctgctcttcaacaccaccgagaacctgtagaagaagtatgtcttcctggaccccctggctggtgctgtaacaaagacccatgtgatgctgggggcagagacagaggagaagctgtttgatgcccccttgtccatcagcaagagagagcagctggaacagcaggtcccagagaactacttctatgtgccagacctgggccaggtgcctgagattgatgttccatcctacctgcctgacctgcccggcattgccaacgacctcatgtacattgccgacctgggccccggcattgccccctctgcccctggcaccattccagaactgcccaccttccacactgaggtagccgagcctctcaaggcagacctacaagatggggtactaacaccacccccaccgcccccaccaccacccccagctcctgaggtgctggccagtgcacccccactcccaccctcaaccgcggcccctgtaggccaaggcgccaggcaggacgacagcagcagcagcgcgtctccttcaggtgggagcagctctttgaggccacctgatttctggcgtgctcagtgcactcgggtggattttctgtgggtttgttaagtggtcagaaattctcaattttttgaatagtttccatttcaaatatcttgttctacttggttcataaaatagtggttttcaaactgtagagctctggacttctcacttctagggcagagggagcctgaacaagtgaggctctgggttccccattcctaattaaaccaatggaaagaaggggtctaataacaaactacagcaacacatttttcatttcagcttcactgctgtntctcccagtgtaaccctagcatccagaagtggcacaaaacccctctgctggctcgtgtgtgcaactgagactgtcagagcatggctagctcaggggtccagctctgcagggtgggggctagagaggaagcagggagtatctgcacacaggatgcccgcgctcaggtggttgcagaagtcagtgcccaggcccccacacacagtctccaaaggtccggcctccccagcgcagggctcctcgtttgaggggaggtgacttccctcccagcaggctcttggacacagtaagcttccccagccctgcctgagcagcctttcctccttgccctgttccccacctcccggctccagtccagggagctcccagggaagtggttgacccctccggtggctgggccactctgctagagtccatccgccaagctgggggcatcggcaaggccaagctgcgcagcatgaaggagcgaaagctggagaagaagaagcagaaggagcaggagcaagtgagagccacgagccaaggtgggcacttgatgtcggatctcttcaacaagctggtcatgaggcgcaagggcatctctgggaaaggacctggggctggtgaggggcccggaggagcctttgcccgcgtgtcagactccatccctcctctgccgccaccgcagcagccacaggcagaggaggacgaggacgactgggaatcctagggggctccatgacaccttcccccccagacccagacttgggccgttgctctgacatggacacagccaggacaagctgctcagacctacttccttgggagggggtgacggaaccagcactgtgtggagaccagcttcaaggagcgtgagcaattatgtgtacgagctta

SEQ ID NO: 448235 - DNA, 2836 bp, Homo sapiens
  misc_feature (1226)..(1226): n is a, c, g, or t
ggacgcgtgggtcggagcttccggtgagggcggctcggtagagcagagccggagccaggtgcaggccattggagagaaggtctccttggcccaggccaagattgagaagatcaagggcagcaagaaggccatcaaggtgttctccagtgccaagtaccctgctccagggcgcctgcaggaatatggctccatcttcacgggcgcccaggaccctggcctgcagagacgcccccgccacaggatccagagcaagcaccgccccctggacgagcgggccctgcaggagaagctgaaggactttcctgtgtgcgtgagcaccaagccggagcccgaggacgatgcagaagagggacttgggggtcttcccagcaacatcagctctgtcagctccttgctgctcttcaacaccaccgagaacctgtagaagaagtatgtcttcctggaccccctggctggtgctgtaacaaagacccatgtgatgctgggggcagagacagaggagaagctgtttgatgcccccttgtccatcagcaagagagagcagctggaacagcaggtcccagagaactacttctatgtgccagacctgggccaggtgcctgagattgatgttccatcctacctgcctgacctgcccggcattgccaacgacctcatgtacattgccgacctgggccccggcattgccccctctgcccctggcaccattccagaactgcccaccttccacactgaggtagccgagcctctcaaggcagacctacaagatggggtactaacaccacccccaccgcccccaccaccacccccagctcctgaggtgctggccagtgcacccccactcccaccctcaaccgcggcccctgtaggccaaggcgccaggcaggacgacagcagcagcagcgcgtctccttcaggtgggagcagctctttgaggccacctgatttctggcgtgctcagtgcactcgggtggattttctgtgggtttgttaagtggtcagaaattctcaattttttgaatagtttccatttcaaatatcttgttctacttggttcataaaatagtggttttcaaactgtagagctctggacttctcacttctagggcagagggagcctgaacaagtgaggctctgggttccccattcctaattaaaccaatggaaagaaggggtctaataacaaactacagcaacacatttttcatttcagcttcactgctgtntctcccagtgtaaccctagcatccagaagtggcacaaaacccctctgctggctcgtgtgtgcaactgagactgtcagagcatggctagctcaggggtccagctctgcagggtgggggctagagaggaagcagggagtatctgcacacaggatgcccgcgctcaggtggttgcagaagtcagtgcccaggcccccacacacagtctccaaaggtccggcctccccagcgcagggctcctcgtttgaggggaggtgacttccctcccagcaggctcttggacacagtaagcttccccagccctgcctgagcagcctttcctccttgccctgttccccacctcccggctccagtccagggagctcccagggaagtggttgacccctccggtggctgggccactctgctagagtccatccgccaagctgggggcatcggcaaggccaagctgcgcagcatgaaggagcgaaagctggagaagaagaagcagaaggagcaggagcaaggtgagcgggccctggagcttgcagtcggagggccttgggcaagatcgcctcctcccctccagccctgagtccaccgggtgctttctgcccaccccctgctcttgccagctggcccctgcttcccctagggcacatgctggaagccctgggccgccaccagaggtcctcagccctcctgcctgggctatggctccttcctggtttgggagccatagtggagctttcctctctaagctcacccagctcaaactgacaggagaatcttcttcgactgccaagagcggtccaaggcaatggtcagccactgcagcctcctgagatatttttagagactggacctgaggcctccggaggctactgatgatgcctgctgtgaacgcagacactggtgtgatgcgatgcctgcgcctgcagcggcagtgccctgggcactatggttttgagcttgtacccagcgctgcttttgccttgctctgtgaccccaggcaagctgcctcacctctctgggccagtttccccatagtacagtggtgctgcacaccctggccctggccccgaggtggctgggaggtggctcctcaaacagccgctgtctcatcagtgcccggtgctgggtcagggatcgactgaggctctgagctaactgggaaacacagtggccttggagggctggggagtgtcatgggggtggggacagggagtcaccggtcgcatgtgactgaactcttcaccccagtctgtggctttcccgttgcagttgagagccacgagccaaggtgggcacttgatgtcggatctcttcaacaagctggtcatgaggcgcaagggcatctctgggaaaggacctggggctggtgaggggcccggaggagcctttgcccgcgtgtcagactccatccctcctctgccgccaccgcagcagccacaggcagaggaggacgaggacgactgggaatcctagggggctccatgacaccttcccccccagacccagatctgcctgtgctccatggggggacggctccacccagcctgcgccactgtgttcttctcttaagaggcttccagagaaaacggcacaccaatcaataaagaactgagcagaaa

SEQ ID NO: 448236 - DNA, 3561 bp, Homo sapiens
  misc_feature (812)..(812): n is a, c, g, or t
  misc_feature (969)..(969): n is a, c, g, or t
  misc_feature (1063)..(1063): n is a, c, g, or t
  misc_feature (1234)..(1234): n is a, c, g, or t
  misc_feature (1873)..(1873): n is a, c, g, or t
  misc_feature (2231)..(2231): n is a, c, g, or t
  misc_feature (2786)..(2786): n is a, c, g, or t
attcgtgaacttcccggggggcggcgggagcttccgggagggcggctcgcaggcaccatgactcctgtgaggatgcagcactccctggcaggtcagacctatgccgtgcccctcatccagccagacctgcggcgagaggaggccgtccagcagatggcggatgccctgcagtacctgcagaaggtctctggagacatcttcagcaggtgggtgctgccactcacccccacctgatgagagggccatccctgtcctgggcaatcccagcaacacaccctctgggagcagcccccttggggaatcccggtcctggggaacccatctggcttccctgtgtgggaggggctgaagtgagagcccaacttggaagcttttactcctgggagtccgagagctcactcccttccaccccacttagcctcctggtttcctgtggtggctctgctctcacaactcatgcttttcctcccattggagggcctattccttcacgttttcctgcagccaacaaatatttacccagcagtgctcgtgtgcaaggcagtgtgggaatctctatatatccagccacggataaggcaacatacctctccacctggagcgcacattctggcaggagagaaagacctaaataagcaatagatgattagttcttcaataacagttgtgacaaggtctattgataatattttgtaatcactaatattcatataaaccgtgcacaaccattgatttgagtgcattaactcacacttcatgagcaggcactgccgtcatctcattttatagatgaggaaactgaggcacagaanggctgagagacctggcctagtgacagagccaggattcaaagccatagatcatggccccgggttatgtaggttattactgcatctgttcaggggagatggggtactgtgaggctcgtcatgggaagcctggcttggtctcaggtcagggaaggcagangtgaggaaatgacatttatggtaaagtctgagggttgagtgggtaggttgggaagaacattccagaaagaagcacatgaactacagcctggagntggaggacctaaaaggaagccagcatggctggagcacggagtggccattgagggaggcgagctggagggctgcagcttcttgtattggcagtgctgacctcgcacagtccttgggctccagtgacttcactcagtgtttatctaacatgagtgagtgaatggtgtttgctntttttttggtaaaggtcccaggggttgtcgggtacacaggtcctgtctttggccataagcaaactgaaatgaggcttggtctccttcccaggatcccacaccatgcctcacatggtagaccccagtgggaagtatgtgactgcctgactcaggtgcctctcgtggtccaagccatccctgccctgtcccttccctggttgtcgccagacctggagcccctgctccttcactttgcagcctcctcttctgtcaccaactgggaacccacctcttcctgaaagtcctcccccactgactcaccggcttgccccgagtttgtcaagaatgtcccagtaaccaggggacacacagtgaagtgactgaggggttaccttggagttgatgccttggctcagatccagctcccctgttttcttcctctgtaaccttgggcaacccaacccctctaagcctcggtgttctcatttgtgaagttgtggtaataatggtagcttcctggtagaattattttaaatattaaattaatcaaaacatgcaaaggaatggaacagtgcctggcacctaggaagccttcaggaaatgctatctcttccctgttgataatcttgacccgtacactgcctttggttgccattcatnaacctgccaccaatagtaacaaagtgctggatgcaccttttgtgcttatctttgtgctaaatgtgcccgagggacacctagggaagaggatgcaggtctttaagagccatcagctccagattatggccaccccatgtccagcacttagaatggaggccaaaaccattccctcggaaattgtgtttccttgccaagatggggactgcgtggttgcccttctctgagggcagcgctggatttttggcgtctttcctttcctgtcctggtacttggcaccttgtagacagttgcatgtcccctgcccagggatgggatgaggagagggcaggaaggcatttcctgggtagtggagtgctgngttcattgagtgtgggttctccaagctgctggcacagcgcagggagggccagatgcctctcaggagccttgggcctgagtcctggctccctcactcctgggttccaggtcactgcatctgtctctccaccatgtgctccacctcgtgctggaccttaagagataccaattatgtggctgccactgtgtcctagaggctggaatgggaacacatagggcgagattgattgttaattgctagcatgaaccgcgtgggcttctcagggtctagagtggagagaaatcggtaagaattggtggcacgcctgtcagaactccccagaccaagctaagcaaaaattaaccaatcagtagagcagccttcggagtaagggctaaaatgatgtcctcagggcctggttttgctttccttccatgtcagtttgcttctttgggtctggctgcattcccagacaggccatgctctcgtggtagcaaggtgacatgacacagggtcaggtccagcaggaaagaatgctgtcctgtgtccccacttcctccagaagccacactcacncatcccacctggcttggtcctcatgtctatcccagaatccattaatggggccaggggactatgacacaccacttggcttagactgaggagctctgtgggcagccccacctgaagctctgggactaagcctgcgagagagatggattccccaagggaaatggggccattgcttgagtaaaaaggaaatagttgctgaagaggaaaaccacgtgcttactccacatagggcagactcctggaagaggggggcagggtagggaggtggatatgcaggttgccctggcagggtctggaaatgggggctgcaggcttggagggaggcctcagtgtggcttggaacgtggtgtatggtggtctgccgcgaaggccggcctgcacaggggtgggaggggggtgcttctgcatgggaagcacagacagcgctgcctctcccttgcactcagctctcggggcatgagaggctgactttccgtgagcctgtgggccaggcctctttgaatggggctgagggagctttgccctggttcctttgtgtccccacggtgccacgggaggctccctggcagggtgtggggcaaggcagtgagtgaagagttgggatgagtgagttagggcccacggattactcaagacaggacttcaagttgattcaggcgtgttagggagctgtgattggattttgagcagggcagggatgggacagaagagtttggggaaggttcctcaggcatccgtcacggaagggacaagtatcccctctgcaatagtcgccagg

SEQ ID NO: 448237 - DNA, 1356 bp, Homo sapiens
attcgtgaacttcccggggggcggcgggagcttccgggagggcggctcgcaggcaccatgactcctgtgaggatgcagcactccctggcaggtcagacctatgccgtgcccctcatccagccagacctgcggcgagaggaggccgtccagcagatggcggatgccctgcagtacctgcagaaggtctctggagacatcttcagcaggtagagcagagccggagccaggtgcaggccattggagagaaggtctccttggcccaggccaagattgagaagatcaagggcagcaagaaggccatcaaggtgttctccagtgccaagtaccctgctccagggcgcctgcaggaatatggctccatcttcacgggcgcccaggaccctggcctgcagagacgcccccgccacaggatccagagcaagcaccgccccctggacgagcgggccctgcaggtctgctggccgcgcatatagcctgtcacacaccaggaggactggatactggggaggagccggggccaccatagggttctgtcccccagaggaggctgactgggatgggatggcagctgattaggcccagcaccaaatattcaccatcccttggccatcctggccctctcagagaagctgaaggactttcctgtgtgcgtgagcaccaagccggagcccgaggacgatgcagaagagggacttgggggtcttcccagcaacatcagctctgtcagctccttgctgctcttcaacaccaccgagaacctgtatggccagagggcagggccgaggggtgtgggcgggaggcccggcctggcttagtggggacccagggcatcagacacaggtagaagaagtatgtcttcctggaccccctggctggtgctgtaacaaagacccatgtgatgctgggggcagagacagaggagaagctgtttgatgcccccttgtccatcagcaagagagagcagctggaacagcaggtcccagagaactacttctatgtgccagacctgggccaggtgcctgagattgatgttccatcctacctgcctgacctgcccggcattgccaacgacctcatgtacattgccgacctgggccccggcattgccccctctgcccctggcaccattccagaactgcccaccttccacactgaggtagccgagcctctcaaggccttacaagatggggggtacttaaacaggccaacccgggacgcgccaaagagacgcgcgacggcaacacgcgccagcgacgccacggggcgcaccgcacacaaccggccgccacaggacggcccgccgggacaccggcagccaccagaccgtccacaccacacccgcccaccaagcatccc

SEQ ID NO: 448238 - DNA, 4247 bp, Homo sapiens
  misc_feature (572)..(572): n is a, c, g, or t
  misc_feature (2346)..(2346): n is a, c, g, or t
cgtgatcatgaggggttgtgaagtgcttgccccatcagtagccatgtgtgcatgtgtaaataccatcctctgtgtgccctggaggctgtccttcagatagcatgtacaggtggcagcatagggcctgtccctactgagagtgcagggaactcagcaccgtcaactcctcgaccctgcaggtcagattatccttgtagaggccccctggatggcaccaagatcggccctggcaagtaggtgaccctgacttcagagcccttgcctgagggcctggcctggcagctctgctgttagaagcaggaggtgtgcagagggtggggagcagcccagcctctgtgatcttctccatggcaggatctcccagcgtagagcagagccggagccaggtgcaggccattggagagaaggtctccttggcccaggccaagattgagaagatcaagggcagcaagaaggccatcaaggtagtccccatacccctgtgtcctgaggctactgggcagtccctccatttccccgtgcctctgaggctgcccagtctctgccctgctgcccacctgtaccttgagctntcttctcgcccaggcttccaactccaccctctcctgccaagcaatcctagccctctgagcctcttggggccccctcagacttgtccctgtgtccacagtgttctccagtgccaagtaccctgctccagggcgcctgcaggaatatggctccatcttcacgggcgcccaggaccctggcctgcagagacgcccccgccacaggatccagagcaagcaccgccccctggacgagcgggccctgcaggtctgctggccgcgcatatagcctgtcacacaccaggaggactggatactggggaggagccggggccaccatagggttctgtcccccagaggaggctgactgggatgggatggcagctgattaggcccagcaccaaatattcaccatcccttggccatcctggccctctcagagaagctgaaggactttcctgtgtgcgtgagcaccaagccggagcccgaggacgatgcagaagagggacttgggggtcttcccagcaacatcagctctgtcagctccttgctgctcttcaacaccaccgagaacctgtatggccagagggcagggccgaggggtgtgggcgggaggcccggcctggcttagtggggacccagggcatcagacacaggtacagcacataggccaggagccagggggtgactggggtggctcggctcgggaggcctgggaccccacagtgcacgctgtgcccctgatgatgtgggagaggaacatgggctcaggacagcgggtgtcagcttgcctgacccccatgtcgcctctgtaggtagaagaagtatgtcttcctggaccccctggctggtgctgtaacaaagacccatgtgatgctgggggcagagacagaggagaagctgtttgatgcccccttgtccatcagcaagagagagcagctggaacagcaggtgggaggggtgggacagaggtggagacaggtgcagtggcccagggccttgccagagctcctctccagtcaaggctgttgggccccttattccacccatgggaggtgcacacaaggtcttgttggctgcccctgcaggtccctgtcacctctcacatgtccctgcctaatcttgcaggtcccagagaactacttctatgtgccagacctgggccaggtgcctgagattgatgttccatcctacctgcctgacctgcccggcattgccaacgacctcatgtacattgccgacctgggccccggcattgccccctctgcccctggcaccattccagaactgcccaccttccacactgaggtagccgagcctctcaaggcagacctacaagatggggtactaacaccacccccaccgcccccaccaccacccccagctcctgaggtgctggccagtgcacccccactcccaccctcaaccgcggcccctgtaggccaaggcgccaggcaggacgacagcagcagcagcgcgtctccttcaggtgggagcagctctttgaggccacctgatttctggcgtgctcagtgcactcgggtggattttctgtgggtttgttaagtggtcagaaattctcaattttttgaatagtttccatttcaaatatcttgttctacttggttcataaaatagtggttttcaaactgtagagctctggacttctcacttctagggcagagggagcctgaacaagtgaggctctgggttccccattcctaattaaaccaatggaaagaaggggtctaataacaaactacagcaacacatttttcatttcagcttcactgctgtntctcccagtgtaaccctagcatccagaagtggcacaaaacccctctgctggctcgtgtgtgcaactgagactgtcagagcatggctagctcaggggtccagctctgcagggtgggggctagagaggaagcagggagtatctgcacacaggatgcccgcgctcaggtggttgcagaagtcagtgcccaggcccccacacacagtctccaaaggtccggcctccccagcgcagggctcctcgtttgaggggaggtgacttccctcccagcaggctcttggacacagtaagcttccccagccctgcctgagcagcctttcctccttgccctgttccccacctcccggctccagtccagggagctcccagggaagtggttgacccctccggtggctgggccactctgctagagtccatccgccaagctgggggcatcggcaaggccaagctgcgcagcatgaaggagcgaaagctggagaagaagaagcagaaggagcaggagcaaggtgagcgggccctggagcttgcagtcggagggccttgggcaagatcgcctcctcccctccagccctgagtccaccgggtgctttctgcccaccccctgctcttgccagctggcccctgcttcccctagggcacatgctggaagccctgggccgccaccagaggtcctcagccctcctgcctgggctatggctccttcctggtttgggagccatagtggagctttcctctctaagctcacccagctcaaactgacaggagaatcttcttcgactgccaagagcggtccaaggcaatggtcagccactgcagcctcctgagatatttttagagactggacctgaggcctccggaggctactgatgatgcctgctgtgaacgcagacactggtgtgatgcgatgcctgcgcctgcagcggcagtgccctgggcactatggttttgagcttgtacccagcgctgcttttgccttgctctgtgaccccaggcaagctgcctcacctctctgggccagtttccccatagtacagtggtgctgcacaccctggccctggccccgaggtggctgggaggtggctcctcaaacagccgctgtctcatcagtgcccggtgctgggtcagggatcgactgaggctctgagctaactgggaaacacagtggccttggagggctggggagtgtcatgggggtggggacagggagtcaccggtcgcatgtgactgaactcttcaccccagtctgtggctttcccgttgcagttgagagccacgagccaaggtgggcacttgatgtcggatctcttcaacaagctggtcatgaggcgcaagggtaggaggcagggccgctgcccgccctgggccagcaccttgtaattctgtcctgcctttttcttcctgtatttaagtctccgggggctgggggaaccagggtttcccaccaaccaccctcactcagccttttccctccaggcatctctgggaaaggacctggggctggtgaggggcccggaggagcctttgcccgcgtgtcagactccatccctcctctgccgccaccgcagcagccacaggcagaggaggacgaggacgactgggaatcctagggggctccatgacaccttcccccccagacccagacttgggccgttgctctgacatggacacagccaggacaagctgctcagacctacttccttgggagggggtgacggaaccagcactgtgtggagaccagcttcaaggagcggaaggctggcttgaggccacacagctggggcggggacttctgtctgcctgtgctccatggggggacggctccacccagcctgcgccactgtgttcttctcttaagaggcttccagagaaaacggcacaccaatcaataaagaactgagcagaaa

SEQ ID NO: 448239 - DNA, 4943 bp, Homo sapiens
  misc_feature (812)..(812): n is a, c, g, or t
  misc_feature (969)..(969): n is a, c, g, or t
  misc_feature (1063)..(1063): n is a, c, g, or t
  misc_feature (1234)..(1234): n is a, c, g, or t
  misc_feature (1873)..(1873): n is a, c, g, or t
  misc_feature (2231)..(2231): n is a, c, g, or t
  misc_feature (2786)..(2786): n is a, c, g, or t
  misc_feature (4316)..(4316): n is a, c, g, or t
attcgtgaacttcccggggggcggcgggagcttccgggagggcggctcgcaggcaccatgactcctgtgaggatgcagcactccctggcaggtcagacctatgccgtgcccctcatccagccagacctgcggcgagaggaggccgtccagcagatggcggatgccctgcagtacctgcagaaggtctctggagacatcttcagcaggtgggtgctgccactcacccccacctgatgagagggccatccctgtcctgggcaatcccagcaacacaccctctgggagcagcccccttggggaatcccggtcctggggaacccatctggcttccctgtgtgggaggggctgaagtgagagcccaacttggaagcttttactcctgggagtccgagagctcactcccttccaccccacttagcctcctggtttcctgtggtggctctgctctcacaactcatgcttttcctcccattggagggcctattccttcacgttttcctgcagccaacaaatatttacccagcagtgctcgtgtgcaaggcagtgtgggaatctctatatatccagccacggataaggcaacatacctctccacctggagcgcacattctggcaggagagaaagacctaaataagcaatagatgattagttcttcaataacagttgtgacaaggtctattgataatattttgtaatcactaatattcatataaaccgtgcacaaccattgatttgagtgcattaactcacacttcatgagcaggcactgccgtcatctcattttatagatgaggaaactgaggcacagaanggctgagagacctggcctagtgacagagccaggattcaaagccatagatcatggccccgggttatgtaggttattactgcatctgttcaggggagatggggtactgtgaggctcgtcatgggaagcctggcttggtctcaggtcagggaaggcagangtgaggaaatgacatttatggtaaagtctgagggttgagtgggtaggttgggaagaacattccagaaagaagcacatgaactacagcctggagntggaggacctaaaaggaagccagcatggctggagcacggagtggccattgagggaggcgagctggagggctgcagcttcttgtattggcagtgctgacctcgcacagtccttgggctccagtgacttcactcagtgtttatctaacatgagtgagtgaatggtgtttgctntttttttggtaaaggtcccaggggttgtcgggtacacaggtcctgtctttggccataagcaaactgaaatgaggcttggtctccttcccaggatcccacaccatgcctcacatggtagaccccagtgggaagtatgtgactgcctgactcaggtgcctctcgtggtccaagccatccctgccctgtcccttccctggttgtcgccagacctggagcccctgctccttcactttgcagcctcctcttctgtcaccaactgggaacccacctcttcctgaaagtcctcccccactgactcaccggcttgccccgagtttgtcaagaatgtcccagtaaccaggggacacacagtgaagtgactgaggggttaccttggagttgatgccttggctcagatccagctcccctgttttcttcctctgtaaccttgggcaacccaacccctctaagcctcggtgttctcatttgtgaagttgtggtaataatggtagcttcctggtagaattattttaaatattaaattaatcaaaacatgcaaaggaatggaacagtgcctggcacctaggaagccttcaggaaatgctatctcttccctgttgataatcttgacccgtacactgcctttggttgccattcatnaacctgccaccaatagtaacaaagtgctggatgcaccttttgtgcttatctttgtgctaaatgtgcccgagggacacctagggaagaggatgcaggtctttaagagccatcagctccagattatggccaccccatgtccagcacttagaatggaggccaaaaccattccctcggaaattgtgtttccttgccaagatggggactgcgtggttgcccttctctgagggcagcgctggatttttggcgtctttcctttcctgtcctggtacttggcaccttgtagacagttgcatgtcccctgcccagggatgggatgaggagagggcaggaaggcatttcctgggtagtggagtgctgngttcattgagtgtgggttctccaagctgctggcacagcgcagggagggccagatgcctctcaggagccttgggcctgagtcctggctccctcactcctgggttccaggtcactgcatctgtctctccaccatgtgctccacctcgtgctggaccttaagagataccaattatgtggctgccactgtgtcctagaggctggaatgggaacacatagggcgagattgattgttaattgctagcatgaaccgcgtgggcttctcagggtctagagtggagagaaatcggtaagaattggtggcacgcctgtcagaactccccagaccaagctaagcaaaaattaaccaatcagtagagcagccttcggagtaagggctaaaatgatgtcctcagggcctggttttgctttccttccatgtcagtttgcttctttgggtctggctgcattcccagacaggccatgctctcgtggtagcaaggtgacatgacacagggtcaggtccagcaggaaagaatgctgtcctgtgtccccacttcctccagaagccacactcacncatcccacctggcttggtcctcatgtctatcccagaatccattaatggggccaggggactatgacacaccacttggcttagactgaggagctctgtgggcagccccacctgaagctctgggactaagcctgcgagagagatggattccccaagggaaatggggccattgcttgagtaaaaaggaaatagttgctgaagaggaaaaccacgtgcttactccacatagggcagactcctggaagaggggggcagggtagggaggtggatatgcaggttgccctggcagggtctggaaatgggggctgcaggcttggagggaggcctcagtgtggcttggaacgtggtgtatggtggtctgccgcgaaggccggcctgcacaggggtgggaggggggtgcttctgcatgggaagcacagacagcgctgcctctcccttgcactcagctctcggggcatgagaggctgactttccgtgagcctgtgggccaggcctctttgaatggggctgagggagctttgccctggttcctttgtgtccccacggtgccacgggaggctccctggcagggtgtggggcaaggcagtgagtgaagagttgggatgagtgagttagggcccacggattactcaagacaggacttcaagttgattcaggcgtgttagggagctgtgattggattttgagcagggcagggatgggacagaagagtttggggaaggttcctcaggcatccgtcacggaagggacaagaagggagagagagtggatgccagggacacccagaagctgttattgtagtcaggatacgacaggggtgaggctacagacaggggacttgcaagcagggagggcagggtgagacattcagaggaaacgacgacaggaaatggtgacagatagggaacgaggatgaagggaagggagagccagtgacgactggcagtggagtggggagcaccgccacctctcctcctccacttgcccctcctgtggcactggacaagctagtgggcttttcgttgtccatgggctttttcggtggggatgtgaccagctttgaacccgtccccttaaacatgctcctcctgcacggaagagacaggggcaggggagagactctctccccaccacccagctcaggccccagcacagcccggcctctggcctcactggcgtctgtgcccagtgacgcaggcaggtgagctcctggcaaattagcattgcaggctgtgctctctcctcctgctctgctgcagctgggagtgtgcagagactggaggggatgacagtcaccctctgttttctgtggtggctctgttttctgtggtgctggatgcacctctgttttctgtggtggctccaagagagtgcacggtccctgctgattgaaagaaggatgaagggcagaagaggggcggggagctgtgtgccctaagatctcattgcctttttatgccgattaacatgcttttagcccctactgagcttatagttaacagaagtttccaggtctttcttcacctgaactgngtctaaagcaagttccctccaccttctgtatttatacgcttgatttttaaaacctaaatgttgggcttcacatttgttccttgtaaatttcatcttggtgattgcagtctaccctctggcctttaaaaattgtctgagccttgattcgatcatgaaaccagcttacccttcccctgtgtgctggccccagttttctaaccaggtgttgaatgaactggatggactctgccagatccctccgtgcaaggctggaatcagtccattgttcaactgtgccctttggggctgtggttcatttggctctgatttttcctatatgttctctcctccaacccccatagctccatcttgtctacaagattttgttagaagccgtcaaaatcctgctgactcgagatgcactgtgctgcatgttttccccgggcacagcaggctaataatcctgttacaaagagaaatgctgtacatttcgagcagtgctggcccctgggactcaccgcggccttttctaagtgcttacagactctctgtttaataatccattccagaaattttccagggctcattgttgagcttggtgttcgcaactttgagtgatcagcccttctcctttgtgggagcaccagg

SEQ ID NO: 448240 - DNA, 1570 bp, Homo sapiens
ggacgcgtgggtcggagcttccggtgagggcggctcggtagagcagagccggagccaggtgcaggccattggagagaaggtctccttggcccaggccaagattgagaagatcaagggcagcaagaaggccatcaaggtgttctccagtgccaagtaccctgctccagggcgcctgcaggaatatggctccatcttcacgggcgcccaggaccctggcctgcagagacgcccccgccacaggatccagagcaagcaccgccccctggacgagcgggccctgcaggagaagctgaaggactttcctgtgtgcgtgagcaccaagccggagcccgaggacgatgcagaagagggacttgggggtcttcccagcaacatcagctctgtcagctccttgctgctcttcaacaccaccgagaacctgtagaagaagtatgtcttcctggaccccctggctggtgctgtaacaaagacccatgtgatgctgggggcagagacagaggagaagctgtttgatgcccccttgtccatcagcaagagagagcagctggaacagcaggtcccagagaactacttctatgtgccagacctgggccaggtgcctgagattgatgttccatcctacctgcctgacctgcccggcattgccaacgacctcatgtacattgccgacctgggccccggcattgccccctctgcccctggcaccattccagaactgcccaccttccacactgaggtagccgagcctctcaaggcagacctacaagatggggtactaacaccacccccaccgcccccaccaccacccccagctcctgaggtgctggccagtgcacccccactcccaccctcaaccgcggcccctgtaggccaaggcgccaggcaggacgacagcagcagcagcgcgtctccttcagtccagggagctcccagggaagtggttgacccctccggtggctgggccactctgctagagtccatccgccaagctgggggcatcggcaaggccaagctgcgcagcatgaaggagcgaaagctggagaagaagaagcagaaggagcaggagcaagtgagagccacgagccaaggtgggcacttgatgtcggatctcttcaacaagctggtcatgaggcgcaagggcatctctgggaaaggacctggggctggtgaggggcccggaggagcctttgcccgcgtgtcagactccatccctcctctgccgccaccgcagcagccacaggcagaggaggacgaggacgactgggaatcctagggggctccatgacaccttcccccccagacccagacttgggccgttgctctgacatggacacagccaggacaagctgctcagacctacttccttgggagggggtgacggaaccagcactgtgtggagaccagcttcaaggagcggaaggctggcttgaggccacacagctggggcggggacttctgtctgcctgtgctccatggggggacggctccacccagcctgcgccactgtgttcttctcttaagaggcttccagagaaaacggcacaccaatcaataaagaactgagcagaaa

SEQ ID NO: 448241 - DNA, 2842 bp, Homo sapiens
  misc_feature (413)..(413): n is a, c, g, or t
  misc_feature (1839)..(1839): n is a, c, g, or t
attcgtgaacttcccggggggcggcgggagcttccgggagggcggctcgcaggcaccatgactcctgtgaggatgcagcactccctggcaggtcagacctatgccgtgcccctcatccagccagacctgcggcgagaggaggccgtccagcagatggcggatgccctgcagtacctgcagaaggtctctggagacatcttcagcaggtagagcagagccggagccaggtgcaggccattggagagaaggtctccttggcccaggccaagattgagaagatcaagggcagcaagaaggccatcaaggtagtccccatacccctgtgtcctgaggctactgggcagtccctccatttccccgtgcctctgaggctgcccagtctctgccctgctgcccacctgtaccttgagctntcttctcgcccaggcttccaactccaccctctcctgccaagcaatcctagccctctgagcctcttggggccccctcagacttgtccctgtgtccacagtgttctccagtgccaagtaccctgctccagggcgcctgcaggaatatggctccatcttcacgggcgcccaggaccctggcctgcagagacgcccccgccacaggatccagagcaagcaccgccccctggacgagcgggccctgcaggagaagctgaaggactttcctgtgtgcgtgagcaccaagccggagcccgaggacgatgcagaagagggacttgggggtcttcccagcaacatcagctctgtcagctccttgctgctcttcaacaccaccgagaacctgtatggccagagggcagggccgaggggtgtgggcgggaggcccggcctggcttagtggggacccagggcatcagacacaggtacagcacataggccaggagccagggggtgactggggtggctcggctcgggaggcctgggaccccacagtgcacgctgtgcccctgatgatgtgggagaggaacatgggctcaggacagcgggtgtcagcttgcctgacccccatgtcgcctctgtaggtagaagaagtatgtcttcctggaccccctggctggtgctgtaacaaagacccatgtgatgctgggggcagagacagaggagaagctgtttgatgcccccttgtccatcagcaagagagagcagctggaacagcaggtcccagagaactacttctatgtgccagacctgggccaggtgcctgagattgatgttccatcctacctgcctgacctgcccggcattgccaacgacctcatgtacattgccgacctgggccccggcattgccccctctgcccctggcaccattccagaactgcccaccttccacactgaggtagccgagcctctcaaggcagacctacaagatggggtactaacaccacccccaccgcccccaccaccacccccagctcctgaggtgctggccagtgcacccccactcccaccctcaaccgcggcccctgtaggccaaggcgccaggcaggacgacagcagcagcagcgcgtctccttcaggtgggagcagctctttgaggccacctgatttctggcgtgctcagtgcactcgggtggattttctgtgggtttgttaagtggtcagaaattctcaattttttgaatagtttccatttcaaatatcttgttctacttggttcataaaatagtggttttcaaactgtagagctctggacttctcacttctagggcagagggagcctgaacaagtgaggctctgggttccccattcctaattaaaccaatggaaagaaggggtctaataacaaactacagcaacacatttttcatttcagcttcactgctgtntctcccagtgtaaccctagcatccagaagtggcacaaaacccctctgctggctcgtgtgtgcaactgagactgtcagagcatggctagctcaggggtccagctctgcagggtgggggctagagaggaagcagggagtatctgcacacaggatgcccgcgctcaggtggttgcagaagtcagtgcccaggcccccacacacagtctccaaaggtccggcctccccagcgcagggctcctcgtttgaggggaggtgacttccctcccagcaggctcttggacacagtaagcttccccagccctgcctgagcagcctttcctccttgccctgttccccacctcccggctccagtccagggagctcccagggaagtggttgacccctccggtggctgggccactctgctagagtccatccgccaagctgggggcatcggcaaggccaagctgcgcagcatgaaggagcgaaagctggagaagaagaagcagaaggagcaggagcaagtgagagccacgagccaaggtgggcacttgatgtcggatctcttcaacaagctggtcatgaggcgcaagggcatctctgggaaaggacctggggctggtgaggggcccggaggagcctttgcccgcgtgtcagactccatccctcctctgccgccaccgcagcagccacaggcagaggaggacgaggacgactgggaatcctagggggctccatgacaccttcccccccagacccagacttgggccgttgctctgacatggacacagccaggacaagctgctcagacctacttccttgggagggggtgacggaaccagcactgtgtggagaccagcttcaaggagcggaaggctggcttgaggccacacagctggggcggggacttctgtctgcctgtgctccatggggggacggctccacccagcctgcgccactgtgttcttctcttaagaggcttccagagaaaacggcacaccaatcaataaagaactgagcagaaa

SEQ ID NO: 448242 - DNA, 2467 bp, Homo sapiens
  misc_feature (413)..(413): n is a, c, g, or t
  misc_feature (1464)..(1464): n is a, c, g, or t
attcgtgaacttcccggggggcggcgggagcttccgggagggcggctcgcaggcaccatgactcctgtgaggatgcagcactccctggcaggtcagacctatgccgtgcccctcatccagccagacctgcggcgagaggaggccgtccagcagatggcggatgccctgcagtacctgcagaaggtctctggagacatcttcagcaggtagagcagagccggagccaggtgcaggccattggagagaaggtctccttggcccaggccaagattgagaagatcaagggcagcaagaaggccatcaaggtagtccccatacccctgtgtcctgaggctactgggcagtccctccatttccccgtgcctctgaggctgcccagtctctgccctgctgcccacctgtaccttgagctntcttctcgcccaggcttccaactccaccctctcctgccaagcaatcctagccctctgagcctcttggggccccctcagacttgtccctgtgtccacagtgttctccagtgccaagtaccctgctccagggcgcctgcaggaatatggctccatcttcacgggcgcccaggaccctggcctgcagagacgcccccgccacaggatccagagcaagcaccgccccctggacgagcgggccctgcaggagaagctgaaggactttcctgtgtgcgtgagcaccaagccggagcccgaggacgatgcagaagagggacttgggggtcttcccagcaacatcagctctgtcagctccttgctgctcttcaacaccaccgagaacctgtcccagagaactacttctatgtgccagacctgggccaggtgcctgagattgatgttccatcctacctgcctgacctgcccggcattgccaacgacctcatgtacattgccgacctgggccccggcattgccccctctgcccctggcaccattccagaactgcccaccttccacactgaggtagccgagcctctcaaggcagacctacaagatggggtactaacaccacccccaccgcccccaccaccacccccagctcctgaggtgctggccagtgcacccccactcccaccctcaaccgcggcccctgtaggccaaggcgccaggcaggacgacagcagcagcagcgcgtctccttcaggtgggagcagctctttgaggccacctgatttctggcgtgctcagtgcactcgggtggattttctgtgggtttgttaagtggtcagaaattctcaattttttgaatagtttccatttcaaatatcttgttctacttggttcataaaatagtggttttcaaactgtagagctctggacttctcacttctagggcagagggagcctgaacaagtgaggctctgggttccccattcctaattaaaccaatggaaagaaggggtctaataacaaactacagcaacacatttttcatttcagcttcactgctgtntctcccagtgtaaccctagcatccagaagtggcacaaaacccctctgctggctcgtgtgtgcaactgagactgtcagagcatggctagctcaggggtccagctctgcagggtgggggctagagaggaagcagggagtatctgcacacaggatgcccgcgctcaggtggttgcagaagtcagtgcccaggcccccacacacagtctccaaaggtccggcctccccagcgcagggctcctcgtttgaggggaggtgacttccctcccagcaggctcttggacacagtaagcttccccagccctgcctgagcagcctttcctccttgccctgttccccacctcccggctccagtccagggagctcccagggaagtggttgacccctccggtggctgggccactctgctagagtccatccgccaagctgggggcatcggcaaggccaagctgcgcagcatgaaggagcgaaagctggagaagaagaagcagaaggagcaggagcaagtgagagccacgagccaaggtgggcacttgatgtcggatctcttcaacaagctggtcatgaggcgcaagggcatctctgggaaaggacctggggctggtgaggggcccggaggagcctttgcccgcgtgtcagactccatccctcctctgccgccaccgcagcagccacaggcagaggaggacgaggacgactgggaatcctagggggctccatgacaccttcccccccagacccagacttgggccgttgctctgacatggacacagccaggacaagctgctcagacctacttccttgggagggggtgacggaaccagcactgtgtggagaccagcttcaaggagcggaaggctggcttgaggccacacagctggggcggggacttctgtctgcctgtgctccatggggggacggctccacccagcctgcgccactgtgttcttctcttaagaggcttccagagaaaacggcacaccaatcaataaagaactgagcagaaa

SEQ ID NO: 448243 - DNA, 2077 bp, Homo sapiens
  misc_feature (413)..(413): n is a, c, g, or t
  misc_feature (1074)..(1074): n is a, c, g, or t
attcgtgaacttcccggggggcggcgggagcttccgggagggcggctcgcaggcaccatgactcctgtgaggatgcagcactccctggcaggtcagacctatgccgtgcccctcatccagccagacctgcggcgagaggaggccgtccagcagatggcggatgccctgcagtacctgcagaaggtctctggagacatcttcagcaggtagagcagagccggagccaggtgcaggccattggagagaaggtctccttggcccaggccaagattgagaagatcaagggcagcaagaaggccatcaaggtagtccccatacccctgtgtcctgaggctactgggcagtccctccatttccccgtgcctctgaggctgcccagtctctgccctgctgcccacctgtaccttgagctntcttctcgcccaggcttccaactccaccctctcctgccaagcaatcctagccctctgagcctcttggggccccctcagacttgtccctgtgtccacagtgttctccagtgccaagtaccctgctccagggcgcctgcaggaatatggctccatcttcacgggcgcccaggaccctggcctgcagagacgcccccgccacaggatccagagcaagcaccgccccctggacgagcgggccctgcaggagaagctgaaggactttcctgtgtgcgtgagcaccaagccggagcccgaggacgatgcagaagagggacttgggggtcttcccacagcagcagcgcgtctccttcaggtgggagcagctctttgaggccacctgatttctggcgtgctcagtgcactcgggtggattttctgtgggtttgttaagtggtcagaaattctcaattttttgaatagtttccatttcaaatatcttgttctacttggttcataaaatagtggttttcaaactgtagagctctggacttctcacttctagggcagagggagcctgaacaagtgaggctctgggttccccattcctaattaaaccaatggaaagaaggggtctaataacaaactacagcaacacatttttcatttcagcttcactgctgtntctcccagtgtaaccctagcatccagaagtggcacaaaacccctctgctggctcgtgtgtgcaactgagactgtcagagcatggctagctcaggggtccagctctgcagggtgggggctagagaggaagcagggagtatctgcacacaggatgcccgcgctcaggtggttgcagaagtcagtgcccaggcccccacacacagtctccaaaggtccggcctccccagcgcagggctcctcgtttgaggggaggtgacttccctcccagcaggctcttggacacagtaagcttccccagccctgcctgagcagcctttcctccttgccctgttccccacctcccggctccagtccagggagctcccagggaagtggttgacccctccggtggctgggccactctgctagagtccatccgccaagctgggggcatcggcaaggccaagctgcgcagcatgaaggagcgaaagctggagaagaagaagcagaaggagcaggagcaagtgagagccacgagccaaggtgggcacttgatgtcggatctcttcaacaagctggtcatgaggcgcaagggcatctctgggaaaggacctggggctggtgaggggcccggaggagcctttgcccgcgtgtcagactccatccctcctctgccgccaccgcagcagccacaggcagaggaggacgaggacgactgggaatcctagggggctccatgacaccttcccccccagacccagacttgggccgttgctctgacatggacacagccaggacaagctgctcagacctacttccttgggagggggtgacggaaccagcactgtgtggagaccagcttcaaggagcggaaggctggcttgaggccacacagctggggcggggacttctgtctgcctgtgctccatggggggacggctccacccagcctgcgccactgtgttcttctcttaagaggcttccagagaaaacggcacaccaatcaataaagaactgagcagaaa

SEQ ID NO: 448244 - DNA, 2270 bp, Homo sapiens
  misc_feature (1226)..(1226): n is a, c, g, or t
ggacgcgtgggtcggagcttccggtgagggcggctcggtagagcagagccggagccaggtgcaggccattggagagaaggtctccttggcccaggccaagattgagaagatcaagggcagcaagaaggccatcaaggtgttctccagtgccaagtaccctgctccagggcgcctgcaggaatatggctccatcttcacgggcgcccaggaccctggcctgcagagacgcccccgccacaggatccagagcaagcaccgccccctggacgagcgggccctgcaggagaagctgaaggactttcctgtgtgcgtgagcaccaagccggagcccgaggacgatgcagaagagggacttgggggtcttcccagcaacatcagctctgtcagctccttgctgctcttcaacaccaccgagaacctgtagaagaagtatgtcttcctggaccccctggctggtgctgtaacaaagacccatgtgatgctgggggcagagacagaggagaagctgtttgatgcccccttgtccatcagcaagagagagcagctggaacagcaggtcccagagaactacttctatgtgccagacctgggccaggtgcctgagattgatgttccatcctacctgcctgacctgcccggcattgccaacgacctcatgtacattgccgacctgggccccggcattgccccctctgcccctggcaccattccagaactgcccaccttccacactgaggtagccgagcctctcaaggcagacctacaagatggggtactaacaccacccccaccgcccccaccaccacccccagctcctgaggtgctggccagtgcacccccactcccaccctcaaccgcggcccctgtaggccaaggcgccaggcaggacgacagcagcagcagcgcgtctccttcaggtgggagcagctctttgaggccacctgatttctggcgtgctcagtgcactcgggtggattttctgtgggtttgttaagtggtcagaaattctcaattttttgaatagtttccatttcaaatatcttgttctacttggttcataaaatagtggttttcaaactgtagagctctggacttctcacttctagggcagagggagcctgaacaagtgaggctctgggttccccattcctaattaaaccaatggaaagaaggggtctaataacaaactacagcaacacatttttcatttcagcttcactgctgtntctcccagtgtaaccctagcatccagaagtggcacaaaacccctctgctggctcgtgtgtgcaactgagactgtcagagcatggctagctcaggggtccagctctgcagggtgggggctagagaggaagcagggagtatctgcacacaggatgcccgcgctcaggtggttgcagaagtcagtgcccaggcccccacacacagtctccaaaggtccggcctccccagcgcagggctcctcgtttgaggggaggtgacttccctcccagcaggctcttggacacagtaagcttccccagccctgcctgagcagcctttcctccttgccctgttccccacctcccggctccagtccagggagctcccagggaagtggttgacccctccggtggctgggccactctgctagagtccatccgccaagctgggggcatcggcaaggccaagctgcgcagcatgaaggagcgaaagctggagaagaagaagcagaaggagcaggagcaagtgagagccacgagccaaggtgggcacttgatgtcggatctcttcaacaagctggtcatgaggcgcaagggcatctctgggaaaggacctggggctggtgaggggcccggaggagcctttgcccgcgtgtcagactccatccctcctctgccgccaccgcagcagccacaggcagaggaggacgaggacgactgggaatcctagggggctccatgacaccttcccccccagacccagacttgggccgttgctctgacatggacacagccaggacaagctgctcagacctacttccttgggagggggtgacggaaccagcactgtgtggagaccagcttcaaggagcggaaggctggcttgaggccacacagctggggcggggacttctgtctgcctgtgctccatggggggacggctccacccagcctgcgccactgtgttcttctcttaagaggcttccagagaaaacggcacaccaatcaataaagaactgagcagaaaccaacagtgtgcttttaataaaggatctctagctgtgcagg

SEQ ID NO: 448245 - DNA, 3068 bp, Homo sapiens
  misc_feature (1226)..(1226): n is a, c, g, or t
ggacgcgtgggtcggagcttccggtgagggcggctcggtagagcagagccggagccaggtgcaggccattggagagaaggtctccttggcccaggccaagattgagaagatcaagggcagcaagaaggccatcaaggtgttctccagtgccaagtaccctgctccagggcgcctgcaggaatatggctccatcttcacgggcgcccaggaccctggcctgcagagacgcccccgccacaggatccagagcaagcaccgccccctggacgagcgggccctgcaggagaagctgaaggactttcctgtgtgcgtgagcaccaagccggagcccgaggacgatgcagaagagggacttgggggtcttcccagcaacatcagctctgtcagctccttgctgctcttcaacaccaccgagaacctgtagaagaagtatgtcttcctggaccccctggctggtgctgtaacaaagacccatgtgatgctgggggcagagacagaggagaagctgtttgatgcccccttgtccatcagcaagagagagcagctggaacagcaggtcccagagaactacttctatgtgccagacctgggccaggtgcctgagattgatgttccatcctacctgcctgacctgcccggcattgccaacgacctcatgtacattgccgacctgggccccggcattgccccctctgcccctggcaccattccagaactgcccaccttccacactgaggtagccgagcctctcaaggcagacctacaagatggggtactaacaccacccccaccgcccccaccaccacccccagctcctgaggtgctggccagtgcacccccactcccaccctcaaccgcggcccctgtaggccaaggcgccaggcaggacgacagcagcagcagcgcgtctccttcaggtgggagcagctctttgaggccacctgatttctggcgtgctcagtgcactcgggtggattttctgtgggtttgttaagtggtcagaaattctcaattttttgaatagtttccatttcaaatatcttgttctacttggttcataaaatagtggttttcaaactgtagagctctggacttctcacttctagggcagagggagcctgaacaagtgaggctctgggttccccattcctaattaaaccaatggaaagaaggggtctaataacaaactacagcaacacatttttcatttcagcttcactgctgtntctcccagtgtaaccctagcatccagaagtggcacaaaacccctctgctggctcgtgtgtgcaactgagactgtcagagcatggctagctcaggggtccagctctgcagggtgggggctagagaggaagcagggagtatctgcacacaggatgcccgcgctcaggtggttgcagaagtcagtgcccaggcccccacacacagtctccaaaggtccggcctccccagcgcagggctcctcgtttgaggggaggtgacttccctcccagcaggctcttggacacagtaagcttccccagccctgcctgagcagcctttcctccttgccctgttccccacctcccggctccagtccagggagctcccagggaagtggttgacccctccggtggctgggccactctgctagagtccatccgccaagctgggggcatcggcaaggccaagctgcgcagcatgaaggagcgaaagctggagaagaagaagcagaaggagcaggagcaaggtgagcgggccctggagcttgcagtcggagggccttgggcaagatcgcctcctcccctccagccctgagtccaccgggtgctttctgcccaccccctgctcttgccagctggcccctgcttcccctagggcacatgctggaagccctgggccgccaccagaggtcctcagccctcctgcctgggctatggctccttcctggtttgggagccatagtggagctttcctctctaagctcacccagctcaaactgacaggagaatcttcttcgactgccaagagcggtccaaggcaatggtcagccactgcagcctcctgagatatttttagagactggacctgaggcctccggaggctactgatgatgcctgctgtgaacgcagacactggtgtgatgcgatgcctgcgcctgcagcggcagtgccctgggcactatggttttgagcttgtacccagcgctgcttttgccttgctctgtgaccccaggcaagctgcctcacctctctgggccagtttccccatagtacagtggtgctgcacaccctggccctggccccgaggtggctgggaggtggctcctcaaacagccgctgtctcatcagtgcccggtgctgggtcagggatcgactgaggctctgagctaactgggaaacacagtggctgaactcttcaccccagtctgtggctttcccgttgcagttgagagccacgagccaaggtgggcacttgatgtcggatctcttcaacaagctggtcatgaggcgcaagggtaggaggcagggccgctgcccgccctgggccagcaccttgtaattctgtcctgcctttttcttcctgtatttaagtctccgggggctgggggaaccagggtttcccaccaaccaccctcactcagccttttccctccaggcatctctgggaaaggacctggggctggtgaggggcccggaggagcctttgcccgcgtgtcagactccatccctcctctgccgccaccgcagcagccacaggcagaggaggacgaggacgactgggaatcctagggggctccatgacaccttcccccccagacccagacttgggccgttgctctgacatggacacagccaggacaagctgctcagacctacttccttgggagggggtgacggaaccagcactgtgtggagaccagcttcaaggagcggaaggctggcttgaggccacacagctggggcggggacttctgtctgcctgtgctccatggggggacggctccacccagcctgcgccactgtgttcttctcttaagaggcttccagagaaaacggcacaccaatcaataaagaactgagcagaaa

SEQ ID NO: 448246 - DNA, 552 bp, Homo sapiens
tactactactactagggggtttttagaagacgacagaaggggcaggagcaagtgagagccacgagccaaggtgggcacttgatgtcggatctcttcaacaagctggtcatgaggcgcaagggcatctctgggaaaggacctggggctggtgaggggcccggaggagcctttgcccgcgtgtcagactccatccctcctctgccgccaccgcagcagccacaggcagaggaggacgaggacgactgggaatcctagggggctccatgacaccttcccccccagacccagacttgggccgttgctctgacatggacacagccaggacaagctgctcagacctacttccttgggagggggtgacggaaccagcactgtgtggagaccagcttcaaggagcggaaggctggcttgaggccacacagctggggcggggacttctgtctgcctgtgctccatggggggacggctccacccagcctgcgccactgtgttcttctcttaagaggcttccagagaaaacggcacaccaatcaataaagaactgagcagaaa

SEQ ID NO: 448247 - DNA, 3679 bp, Homo sapiens
  misc_feature (812)..(812): n is a, c, g, or t
  misc_feature (969)..(969): n is a, c, g, or t
  misc_feature (1063)..(1063): n is a, c, g, or t
  misc_feature (1234)..(1234): n is a, c, g, or t
  misc_feature (1873)..(1873): n is a, c, g, or t
  misc_feature (2231)..(2231): n is a, c, g, or t
  misc_feature (2786)..(2786): n is a, c, g, or t
attcgtgaacttcccggggggcggcgggagcttccgggagggcggctcgcaggcaccatgactcctgtgaggatgcagcactccctggcaggtcagacctatgccgtgcccctcatccagccagacctgcggcgagaggaggccgtccagcagatggcggatgccctgcagtacctgcagaaggtctctggagacatcttcagcaggtgggtgctgccactcacccccacctgatgagagggccatccctgtcctgggcaatcccagcaacacaccctctgggagcagcccccttggggaatcccggtcctggggaacccatctggcttccctgtgtgggaggggctgaagtgagagcccaacttggaagcttttactcctgggagtccgagagctcactcccttccaccccacttagcctcctggtttcctgtggtggctctgctctcacaactcatgcttttcctcccattggagggcctattccttcacgttttcctgcagccaacaaatatttacccagcagtgctcgtgtgcaaggcagtgtgggaatctctatatatccagccacggataaggcaacatacctctccacctggagcgcacattctggcaggagagaaagacctaaataagcaatagatgattagttcttcaataacagttgtgacaaggtctattgataatattttgtaatcactaatattcatataaaccgtgcacaaccattgatttgagtgcattaactcacacttcatgagcaggcactgccgtcatctcattttatagatgaggaaactgaggcacagaanggctgagagacctggcctagtgacagagccaggattcaaagccatagatcatggccccgggttatgtaggttattactgcatctgttcaggggagatggggtactgtgaggctcgtcatgggaagcctggcttggtctcaggtcagggaaggcagangtgaggaaatgacatttatggtaaagtctgagggttgagtgggtaggttgggaagaacattccagaaagaagcacatgaactacagcctggagntggaggacctaaaaggaagccagcatggctggagcacggagtggccattgagggaggcgagctggagggctgcagcttcttgtattggcagtgctgacctcgcacagtccttgggctccagtgacttcactcagtgtttatctaacatgagtgagtgaatggtgtttgctntttttttggtaaaggtcccaggggttgtcgggtacacaggtcctgtctttggccataagcaaactgaaatgaggcttggtctccttcccaggatcccacaccatgcctcacatggtagaccccagtgggaagtatgtgactgcctgactcaggtgcctctcgtggtccaagccatccctgccctgtcccttccctggttgtcgccagacctggagcccctgctccttcactttgcagcctcctcttctgtcaccaactgggaacccacctcttcctgaaagtcctcccccactgactcaccggcttgccccgagtttgtcaagaatgtcccagtaaccaggggacacacagtgaagtgactgaggggttaccttggagttgatgccttggctcagatccagctcccctgttttcttcctctgtaaccttgggcaacccaacccctctaagcctcggtgttctcatttgtgaagttgtggtaataatggtagcttcctggtagaattattttaaatattaaattaatcaaaacatgcaaaggaatggaacagtgcctggcacctaggaagccttcaggaaatgctatctcttccctgttgataatcttgacccgtacactgcctttggttgccattcatnaacctgccaccaatagtaacaaagtgctggatgcaccttttgtgcttatctttgtgctaaatgtgcccgagggacacctagggaagaggatgcaggtctttaagagccatcagctccagattatggccaccccatgtccagcacttagaatggaggccaaaaccattccctcggaaattgtgtttccttgccaagatggggactgcgtggttgcccttctctgagggcagcgctggatttttggcgtctttcctttcctgtcctggtacttggcaccttgtagacagttgcatgtcccctgcccagggatgggatgaggagagggcaggaaggcatttcctgggtagtggagtgctgngttcattgagtgtgggttctccaagctgctggcacagcgcagggagggccagatgcctctcaggagccttgggcctgagtcctggctccctcactcctgggttccaggtcactgcatctgtctctccaccatgtgctccacctcgtgctggaccttaagagataccaattatgtggctgccactgtgtcctagaggctggaatgggaacacatagggcgagattgattgttaattgctagcatgaaccgcgtgggcttctcagggtctagagtggagagaaatcggtaagaattggtggcacgcctgtcagaactccccagaccaagctaagcaaaaattaaccaatcagtagagcagccttcggagtaagggctaaaatgatgtcctcagggcctggttttgctttccttccatgtcagtttgcttctttgggtctggctgcattcccagacaggccatgctctcgtggtagcaaggtgacatgacacagggtcaggtccagcaggaaagaatgctgtcctgtgtccccacttcctccagaagccacactcacncatcccacctggcttggtcctcatgtctatcccagaatccattaatggggccaggggactatgacacaccacttggcttagactgaggagctctgtgggcagccccacctgaagctctgggactaagcctgcgagagagatggattccccaagggaaatggggccattgcttgagtaaaaaggaaatagttgctgaagaggaaaaccacgtgcttactccacatagggcagactcctggaagaggggggcagggtagggaggtggatatgcaggttgccctggcagggtctggaaatgggggctgcaggcttggagggaggcctcagtgtggcttggaacgtggtgtatggtggtctgccgcgaaggccggcctgcacaggggtgggaggggggtgcttctgcatgggaagcacagacagcgctgcctctcccttgcactcagctctcggggcatgagaggctgactttccgtgagcctgtgggccaggcctctttgaatggggctgagggagctttgccctggttcctttgtgtccccacggtgccacgggaggctccctggcagggtgtggggcaaggcagtgagtgaagagttgggatgagtgagttagggcccacggattactcaagacaggacttcaagttgattcaggcgtgttagggagctgtgattggattttgagcagggcagggatgggacagaagagtttggggaaggttcctcaggcatccgtcacggaagggacaagaagggagagagagtggatgccagggacacccagaagctgttattgtagtcaggatacgacaggggtgaggctacagacaggggacttgcaagcagggagggcaggggtcgatgcggccgcgaatttagtagtagtagtcgacc

SEQ ID NO: 448248 - DNA, 843 bp, Homo sapiens
  misc_feature (790)..(790): n is a, c, g, or t
  misc_feature (792)..(794): n is a, c, g, or t
  misc_feature (796)..(796): n is a, c, g, or t
ggacgcgtgggtcggagcttccggtgagggcggctcggtagagcagagccggagccaggtgcaggccattggagagaaggtctccttggcccaggccaagattgagaagatcaagggcagcaagaaggccatcaaggtgttctccagtgccaagtaccctgctccagggcgcctgcaggaatatggctccatcttcacgggcgcccaggaccctggcctgcagagacgcccccgccacaggatccagagcaagcaccgccccctggacgagcgggccctgcaggagaagctgaaggactttcctgtgtgcgtgagcaccaagccggagcccgaggacgatgcagaagagggacttgggggtcttcccagcaacatcagctctgtcagctccttgctgctcttcaacaccaccgagaacctgtagaagaagtatgtcttcctggaccccctggctggtgctgtaacaaagacccatgtgatgctgggggcagagacagaggagaagctgtttgatgcccccttgtccatcagcaagagagagcagctggaacagcaggtcccagagaactacttctatgtgccagacctgggccaggtgcctgagattgatgttccatcctacctgcctgacctgcccggcattgccaacgacctcatgtacattgccgacctgggccccggcattgccccctctgcccctggcaccattccagaactgcccaccttccacactgaggtagccgagcctctcaaggacctacaagatggggtactaacaccagccgacgcnannncnacgtcatgcgtgtggggagggcgtgcaaccagggaggcgggcccgac

SEQ ID NO: 448249 - DNA, 5502 bp, Homo sapiens
ctcctgcacggcgagtgctggagcacgagctaccgctcgctcggtcagggcgccccctccgcccgcctcctgcttcctcctccgctgcctgccgccgccgcctccaccattgtataatgctcggggcgcgcaggcagagaacggcggagtcttagcttcagcctcgcctgctgcccgctccccggcgccaccctcgggcccctggagcggggcactccgcatggagcgggagtagctgaggagtgggcggaaacccctcctgatgcgttagttcccaggtggagctgcatgtgatatatgttgggtaaaggaggaaaacggaagtttgatgagcatgaagatgggctggaaggcaaaatcgtgtctccctgtgacggtccatccaaggtgtcttacaccttacagcgccagactatcttcaacatttcccttatgaaactctataaccacaggcccctgacagagcccagcttgcaaaagaccgttttaattaacaacatgttgaggcggatccaggaggaactcaaacaggaaggcagcctgaggcccatgttcaccccctcctcccagcccaccaccgagcccagcgacagctaccgagaggccccgccggccttcagccacctggcgtccccgtcctcccacccctgcgacctcggaagcactacgcccctggaggcctgcctcaccccggcctcactgctcgaggacgacgatgacacgttttgcacctcccaggccatgcagcccacggctcccaccaaactgtcacctccagccctcttgccagaaaaggacagtttctcctctgccttggacgagatcgaggagctctgtcccacatctacctccacagaggcggccacggctgcgactgacagtgtgaaagggacctccagcgaggctggcacccagaaactcgacggtcctcaagagagccgcgcagatgactcaaaactgatggactctctgcctgggaattttgaaataacgacgtccacgggtttcctgacagacttgaccctggatgacatcctgtttgctgacattgatacgtccatgtatgattttgacccctgcacttcctcatcagggacagcctcaaaaatggcccctgtgtctgccgacgacctcctcaaaactctggctccttacagcagtcagcctgtcaccccaagtcagcctttcaaaatggacctcacagagctggaccacatcatggaggtgcttgttgggtcctaagacccagggacccagcgactatgcccacccagaccccagagcgttcccataaccctgacagttctccacactgtgcatgcacccttgcttgcctttttcagagaaaaagaaaattttacaacaggatcacactagtttttgctttgagcagagttggagtgccttcatccaagtatgaccacttttaatacacttttttgagtggttcctcagagacctactaccctggtataggaaagaatccatttgaagacaatgttgcaatgttgaatgacaaaaataaacagttcaagtgaagcacaaggattaagttggaaaagctgtaaattgcatgtgcatatttgtctattttttctataagttttattgcaagaggtaaagaagaaaactatatatatatatcttatttagataatctcagtaccttttctggcatttttgccctgtataggttgacttggcaattcggcctttttagaggcattaactactcctcgtaagtgttgcatttacatggctgtttagaaaactgctgcccaaatttattttatatttttgtacagattctgcagtttatgatattgtttttctaaaaacaaatgctgtttatacatatgagatagctattttgataggatttgctcacatagttcctgcaaacttcagatgtacaagttgcacttgtacttttatagagttgtaatgttttatatgtgtatggtgcaagagaaaattggatcaaatcaatctgcagttgatgtccccaaatgcaaacacaggcacacacatgcacacacccataaacacacacacagtgctttaagaaagggccaggtgatatcacacccaaatttcacaagcactgaccccctggcaccaacacccgccagtactgtgacttccaaagccagagccacatgtgctcatcaaacttgcattaagcagttggcgggagatggctgtggagctgggggtttaagtgatggttctcttttgctccctcttttgagggtaaagctactgtctttcttaagagtgtatttatgccaagtttgcgcttttaattgtttttattttgttttttaatgaaaacccagatctttcctttttggcataatttttatgatgacctgaaattttacatccgaacaaaattttacatccgaaaagcaaccaacttcttcatggaactcagccctgttgcaatgcttagggcccttaaagaagaaaatctccccagaaggcatccatcatgttgcttaattgtcttctgcagcttcctttccctagagctttccctgtgttgctaagagctgaaaatggcatcttcgtgatcaccacagtgagcttggctcgcctcggccggcccgggatgcactcttacaacatgtgtgactcttgaacctggagttcatcacattacgtcacagcttcccatctggttgctttcctgagtcagctacttcacacttgtcaaggctgttttaccccaaaactcagacaggactttctatgcatgttttccctcctccccccaattccccccccatcaccttatctcccaggacacacttgagaagtagctttttattcctagtggtgtacatttaattttaaaaaggttgcaatgtatcatgcttgttgccgaaactgtttatggccttcttgtttcagttttttcttttcttccaatggtactttagctgttgagtgcaggttacaacctatattgttatgcagatggcttctttaggaataacttttatatttatttaaaaatttttaaattatgggatgttttgttgttgttgttgtctttgttgttggtcatttgtcaatattcagtcaccaattctgctcacttcttgccatggataaaattgggtctttctggctaattaaaaaagacaactttataaagcaaagacgtttgtgatgaaggaactgctcatctaagcaaaagatttgagtatgatatgataaaggctttctacattctaatttactttttccccccacttgaatgtgttttaaaggctaattatcagctcagtagagcagtgagaaactgatcaaattgcacttgttctcctacaagcaacctccacgcagacacctcgtactgctacaggtgtgtcatttcctttaataggaccagggaccatgtaactgaggtgagggttgtagtagatgcttccagtgtcagtatgcctgttaattttaagagcttccctttcttgcagagaacaagtctgcccagattccatgctttctataactggaggacctggcaaacctgccgcatgctgcacacatctacctacgtacacatatacaatagtattgatgattctgaacaataacagggtaaaacagttggtttgccattgttaaaaactgatttacagtaacttacaacaactgtacttttgttggattagcaaatcatgtgtttaaacaaatcccatatgttgggcaacagttcaaataagcacggagaagtgttgcccaaacttggttctctgactcttatgtatttgtaaggctgggcttcaaaatcaaaacaaaaaccccaaaaacagcaggcaaatgctttttaactctgacaccgttgccataaatccctgatactcaaagtctaacaagaaagacatggaaaattagcagcccattttcagaaagatcaaaatgatctagggttctaattgcttttgcatcctattcttacaaagtgatgtcccaacagggaacagtaggagctggagtgggatctccaagtcccagtttgagtgtgggatgtgcttccagcagtgccttccctttatgaaagacatcacatggcatccagggccaggcaggcagcttgaggtgcctttacgagaaaaccgagctggggctgggagaggacagttattgacactgatgtgcaatgaagtgacaagatgagagcagaatcgtaagagctttgaatttgaagtgagtttttttccccccataagttatttattccttttttctgtgtaaatatatttattttactgtggagcgctaacatctggatcgtaacatgtgcagaatgtatggtaggaatgtattctcttgtaggaatgtaaatctgtattaaaagggggtccaagccaggcccccaggtcttctcattgtatgcacagtccgcattcatttttactcttctctaatatgggtctatttgaaatatgcaaaaggtatgaggaatgttttaatacctccaaatttttaagaaaagcatcaaagggttgatattttttaaagtttttttagtagcactttctctggatgacagaaggggcaaccacatgggcacccttgttcataccaaagggtgagcagtggccagagcctcctctgcacctctcgagtgtctttaccaattgagctttttatcgccatagccccttggagtgccccagctgccctgaggtcaatcaaggaaaatttcttaatgaaataagctccaaagagccaaagtatcaacttacagatcgtttttaaagcttaaatttatgaaccacctttgtggtaaacaatgaattatgaataccgcagggcagccttcttaaatgacaaatgtaaaaaaaaaaaaaaaaggactctacttcgtgcagcaattgctactctatacgaattgtcttaatttgaaaaccttgctgttacaaattggacctttatacattttctgaaaacaatgaaaagagtatatttaaccttttctggctgtaaatggttaccttcctgtaactgccccgcacctggaggcatggagttgtgtgcatcctgcttatgtacaattgttttcagtgtttctaagaatgagtctgaatggttcttgaaaattagccaggatcaaatgctattgcagacaaagccaataaaaagttggacttcttttggggataacaagttttggaagagaaatgcaggccatatgtgcgcatgaccgagattttgaaaaaagatgtacatagtgacatgtttggtgcatggtttttgaggagggcttttgtcaaaaaggaggtataacctttcccccacagacctgagagctgtgccttttctatgcaatattacagacgttacatcggaacccagatggctgtattcacatgtaggtttgggctgtaatctaaacaattggacagattaaatgtacatggaaatgagcagtcttacttttgtagttttatattatacaataaacagttaaaagatgaaaaaaaaatg

SEQ ID NO: 448250 - DNA, 5546 bp, Homo sapiens
  misc_feature (5531)..(5531): n is a, c, g, or t
ctcctgcacggcgagtgctggagcacgagctaccgctcgctcggtcagggcgccccctccgcccgcctcctgcttcctcctccgctgcctgccgccgccgcctccaccattgtataatgctcggggcgcgcaggcagagaacggcggagtcttagcttcagcctcgcctgctgcccgctccccggcgccaccctcgggcccctggagcggggcactccgcatggagcgggagtagctgaggagtgggcggaaacccctcctgatgcgttagttcccaggtggagctgcatgtgatatatgttgggtaaaggaggaaaacggaagtttgatgagcatgaagatgggctggaaggcaaaatcgtgtctccctgtgacggtccatccaaggtgtcttacaccttacagcgccagactatcttcaacatttcccttatgaaactctataaccacaggcccctgacagagcccagcttgcaaaagaccgttttaattaacaacatgttgaggcggatccaggaggaactcaaacaggaaggcagcctgaggcccatgttcaccccctcctcccagcccaccaccgagcccagcgacagctaccgagaggccccgccggccttcagccacctggcgtccccgtcctcccacccctgcgacctcggaagcactacgcccctggaggcctgcctcaccccggcctcactgctcgaggacgacgatgacacgttttgcacctcccaggccatgcagcccacggctcccaccaaactgtcacctccagccctcttgccagaaaaggacagtttctcctctgccttggacgagatcgaggagctctgtcccacatctacctccacagaggcggccacggctgcgactgacagtgtgaaagggacctccagcgaggctggcacccagaaactcgacggtcctcaagagagccgcgcagatgactcaaaactgatggactctctgcctgggaattttgaaataacgacgtccacgggtttcctgacagacttgaccctggatgacatcctgtttgctgacattgatacgtccatgtatgattttgacccctgcacttcctcatcagggacagcctcaaaaatggcccctgtgtctgccgacgacctcctcaaaactctggctccttacagcagtcagcctgtcaccccaagtcagcctttcaaaatggacctcacagagctggaccacatcatggaggtgcttgttgggtcctaagacccagggacccagcgactatgcccacccagaccccagagcgttcccataaccctgacagttctccacactgtgcatgcacccttgcttgcctttttcagagaaaaagaaaattttacaacaggatcacactagtttttgctttgagcagagttggagtgccttcatccaagtatgaccacttttaatacacttttttgagtggttcctcagagacctactaccctggtataggaaagaatccatttgaagacaatgttgcaatgttgaatgacaaaaataaacagttcaagtgaagcacaaggattaagttggaaaagctgtaaattgcatgtgcatatttgtctattttttctataagttttattgcaagaggtaaagaagaaaactatatatatatatcttatttagataatctcagtaccttttctggcatttttgccctgtataggttgacttggcaattcggcctttttagaggcattaactactcctcgtaagtgttgcatttacatggctgtttagaaaactgctgcccaaatttattttatatttttgtacagattctgcagtttatgatattgtttttctaaaaacaaatgctgtttatacatatgagatagctattttgataggatttgctcacatagttcctgcaaacttcagatgtacaagttgcacttgtacttttatagagttgtaatgttttatatgtgtatggtgcaagagaaaattggatcaaatcaatctgcagttgatgtccccaaatgcaaacacaggcacacacatgcacacacccataaacacacacacagtgctttaagaaagggccaggtgatatcacacccaaatttcacaagcactgaccccctggcaccaacacccgccagtactgtgacttccaaagccagagccacatgtgctcatcaaacttgcattaagcagttggcgggagatggctgtggagctgggggtttaagtgatggttctcttttgctccctcttttgagggtaaagctactgtctttcttaagagtgtatttatgccaagtttgcgcttttaattgtttttattttgttttttaatgaaaacccagatctttcctttttggcataatttttatgatgacctgaaattttacatccgaacaaaattttacatccgaaaagcaaccaacttcttcatggaactcagccctgttgcaatgcttagggcccttaaagaagaaaatctccccagaaggcatccatcatgttgcttaattgtcttctgcagcttcctttccctagagctttccctgtgttgctaagagctgaaaatggcatcttcgtgatcaccacagtgagcttggctcgcctcggccggcccgggatgcactcttacaacatgtgtgactcttgaacctggagttcatcacattacgtcacagcttcccatctggttgctttcctgagtcagctacttcacacttgtcaaggctgttttaccccaaaactcagacaggactttctatgcatgttttccctcctccccccaattccccccccatcaccttatctcccaggacacacttgagaagtagctttttattcctagtggtgtacatttaattttaaaaaggttgcaatgtatcatgcttgttgccgaaactgtttatggccttcttgtttcagttttttcttttcttccaatggtactttagctgttgagtgcaggttacaacctatattgttatgcagatggcttctttaggaataacttttatatttatttaaaaatttttaaattatgggatgttttgttgttgttgttgtctttgttgttggtcatttgtcaatattcagtcaccaattctgctcacttcttgccatggataaaattgggtctttctggctaattaaaaaagacaactttataaaatggcactttaagcaagccatagttagttttatttttgtaatgcacatggcaaagcaaagacgtttgtgatgaaggaactgctcatctaagcaaaagatttgagtatgatatgataaaggctttctacattctaatttactttttccccccacttgaatgtgttttaaaggctaattatcagctcagtagagcagtgagaaactgatcaaattgcacttgttctcctacaagcaacctccacgcagacacctcgtactgctacaggtgtgtcatttcctttaataggaccagggaccatgtaactgaggtgagggttgtagtagatgcttccagtgtcagtatgcctgttaattttaagagcttccctttcttgcagagaacaagtctgcccagattccatgctttctataactggaggacctggcaaacctgccgcatgctgcacacatctacctacgtacacatatacaatagtattgatgattctgaacaataacagggtaaaacagttggtttgccattgttaaaaactgatttacagtaacttacaacaactgtacttttgttggattagcaaatcatgtgtttaaacaaatcccatatgttgggcaacagttcaaataagcacggagaagtgttgcccaaacttggttctctgactcttatgtatttgtaaggctgggcttcaaaatcaaaacaaaaaccccaaaaacagcaggcaaatgctttttaactctgacaccgttgccataaatccctgatactcaaagtctaacaagaaagacatggaaaattagcagcccattttcagaaagatcaaaatgatctagggttctaattgcttttgcatcctattcttacaaagtgatgtcccaacagggaacagtaggagctggagtgggatctccaagtcccagtttgagtgtgggatgtgcttccagcagtgccttccctttatgaaagacatcacatggcatccagggccaggcaggcagcttgaggtgcctttacgagaaaaccgagctggggctgggagaggacagttattgacactgatgtgcaatgaagtgacaagatgagagcagaatcgtaagagctttgaatttgaagtgagtttttttccccccataagttatttattccttttttctgtgtaaatatatttattttactgtggagcgctaacatctggatcgtaacatgtgcagaatgtatggtaggaatgtattctcttgtaggaatgtaaatctgtattaaaagggggtccaagccaggcccccaggtcttctcattgtatgcacagtccgcattcatttttactcttctctaatatgggtctatttgaaatatgcaaaaggtatgaggaatgttttaatacctccaaatttttaagaaaagcatcaaagggttgatattttttaaagtttttttagtagcactttctctggatgacagaaggggcaaccacatgggcacccttgttcataccaaagggtgagcagtggccagagcctcctctgcacctctcgagtgtctttaccaattgagctttttatcgccatagccccttggagtgccccagctgccctgaggtcaatcaaggaaaatttcttaatgaaataagctccaaagagccaaagtatcaacttacagatcgtttttaaagcttaaatttatgaaccacctttgtggtaaacaatgaattatgaataccgcagggcagccttcttaaatgacaaatgtaaaaaaaaaaaaaaaaggactctacttcgtgcagcaattgctactctatacgaattgtcttaatttgaaaaccttgctgttacaaattggacctttatacattttctgaaaacaatgaaaagagtatatttaaccttttctggctgtaaatggttaccttcctgtaactgccccgcacctggaggcatggagttgtgtgcatcctgcttatgtacaattgttttcagtgtttctaagaatgagtctgaatggttcttgaaaattagccaggatcaaatgctattgcagacaaagccaataaaaagttggacttcttttggggataacaagttttggaagagaaatgcaggccatatgtgcgcatgaccgagattttgaaaaaagatgtacatagtgacatgtttggtgcatggtttttgaggagggcttttgtcaaaaaggaggtataacctttcccccacagacctgagagctgtgccttttctatgcaatattacagacgttacatcggaacccagatggctgtattcacatgtaggtttgggcgtgattttaaccatttggcccatttaaagggcaagggaaattgccctctttcctttgtgggtttatattttacccattnccctgttaaaatgtg

SEQ ID NO: 448251 - DNA, 981 bp, Homo sapiens
gcggccgcctactactactactgctcgaattcaagcttctaacgatgtacggggacatgggcacccttgttcataccaaagggtgagcagtggccagagcctcctctgcacctctcgagtgtctttaccaattgagctttttatcgccatagccccttggagtgccccagctgccctgaggtcaatcaaggaaaatttcttaatgaaataagctccaaagagccaaagtatcaacttacagatcgtttttaaagcttaaatttatgaaccacctttgtggtaaacaatgaattatgaataccgcagggcagccttcttaaatgacaaatgtaaaaaaaaaaaaaaaaggactctacttcgtgcagcaattgctactctatacgaattgtcttaatttgaaaaccttgctgttacaaattggacctttatacattttctgaaaacaatgaaaagagtatatttaaccttttctggctgtaaatggttaccttcctgtaactgccccgcacctggaggcatggagttgtgtgcatcctgcttatgtacaattgttttcagtgtttctaagaatgagtctgaatggttcttgaaaattagccaggatcaaatgctattgcagacaaagccaataaaaagttggacttcttttggggataacaagttttggaagagaaatgcaggccatatgtgcgcatgaccgagattttgaaaaaagatgtacatagtgacatgtttggtgcatggtttttgaggagggcttttgtcaaaaaggaggtataacctttcccccacagacctgagagctgtgccttttctatgcaatattacagacgttacatcggaacccagatggctgtattcacatgtaggtttgggctgtaatctaaacaattggacagattaaatgtacatggaaatgagcagtcttacttttgtagttttatattatacaataaacagttaaaagatgaaaaaaaaatg

SEQ ID NO: 448252 - DNA, 5556 bp, Homo sapiens
ctcctgcacggcgagtgctggagcacgagctaccgctcgctcggtcagggcgccccctccgcccgcctcctgcttcctcctccgctgcctgccgccgccgcctccaccattgtataatgctcggggcgcgcaggcagagaacggcggagtcttagcttcagcctcgcctgctgcccgctccccggcgccaccctcgggcccctggagcggggcactccgcatggagcgggagtagctgaggagtgggcggaaacccctcctgatgcgttagttcccaggtggagctgcatgtgatatatgttgggtaaaggaggaaaacggaagtttgatgagcatgaagatgggctggaaggcaaaatcgtgtctccctgtgacggtccatccaaggtgtcttacaccttacagcgccagactatcttcaacatttcccttatgaaactctataaccacaggcccctgacagagcccagcttgcaaaagaccgttttaattaacaacatgttgaggcggatccaggaggaactcaaacaggaaggcagcctgaggcccatgttcaccccctcctcccagcccaccaccgagcccagcgacagctaccgagaggccccgccggccttcagccacctggcgtccccgtcctcccacccctgcgacctcggaagcactacgcccctggaggcctgcctcaccccggcctcactgctcgaggacgacgatgacacgttttgcacctcccaggccatgcagcccacggctcccaccaaactgtcacctccagccctcttgccagaaaaggacagtttctcctctgccttggacgagatcgaggagctctgtcccacatctacctccacagaggcggccacggctgcgactgacagtgtgaaagggacctccagcgaggctggcacccagaaactcgacggtcctcaagagagccgcgcagatgactcaaaactgatggactctctgcctgggaattttgaaataacgacgtccacgggtttcctgacagacttgaccctggatgacatcctgtttgctgacattgatacgtccatgtatgattttgacccctgcacttcctcatcagggacagcctcaaaaatggcccctgtgtctgccgacgacctcctcaaaactctggctccttacagcagtcagcctgtcaccccaagtcagcctttcaaaatggacctcacagagctggaccacatcatggaggtgcttgttgggtcctaagacccagggacccagcgactatgcccacccagaccccagagcgttcccataaccctgacagttctccacactgtgcatgcacccttgcttgcctttttcagagaaaaagaaaattttacaacaggatcacactagtttttgctttgagcagagttggagtgccttcatccaagtatgaccacttttaatacacttttttgagtggttcctcagagacctactaccctggtataggaaagaatccatttgaagacaatgttgcaatgttgaatgacaaaaataaacagttcaagtgaagcacaaggattaagttggaaaagctgtaaattgcatgtgcatatttgtctattttttctataagttttattgcaagaggtaaagaagaaaactatatatatatatcttatttagataatctcagtaccttttctggcatttttgccctgtataggttgacttggcaattcggcctttttagaggcattaactactcctcgtaagtgttgcatttacatggctgtttagaaaactgctgcccaaatttattttatatttttgtacagattctgcagtttatgatattgtttttctaaaaacaaatgctgtttatacatatgagatagctattttgataggatttgctcacatagttcctgcaaacttcagatgtacaagttgcacttgtacttttatagagttgtaatgttttatatgtgtatggtgcaagagaaaattggatcaaatcaatctgcagttgatgtccccaaatgcaaacacaggcacacacatgcacacacccataaacacacacacagtgctttaagaaagggccaggtgatatcacacccaaatttcacaagcactgaccccctggcaccaacacccgccagtactgtgacttccaaagccagagccacatgtgctcatcaaacttgcattaagcagttggcgggagatggctgtggagctgggggtttaagtgatggttctcttttgctccctcttttgagggtaaagctactgtctttcttaagagtgtatttatgccaagtttgcgcttttaattgtttttattttgttttttaatgaaaacccagatctttcctttttggcataatttttatgatgacctgaaattttacatccgaacaaaattttacatccgaaaagcaaccaacttcttcatggaactcagccctgttgcaatgcttagggcccttaaagaagaaaatctccccagaaggcatccatcatgttgcttaattgtcttctgcagcttcctttccctagagctttccctgtgttgctaagagctgaaaatggcatcttcgtgatcaccacagtgagcttggctcgcctcggccggcccgggatgcactcttacaacatgtgtgactcttgaacctggagttcatcacattacgtcacagcttcccatctggttgctttcctgagtcagctacttcacacttgtcaaggctgttttaccccaaaactcagacaggactttctatgcatgttttccctcctccccccaattccccccccatcaccttatctcccaggacacacttgagaagtagctttttattcctagtggtgtacatttaattttaaaaaggttgcaatgtatcatgcttgttgccgaaactgtttatggccttcttgtttcagttttttcttttcttccaatggtactttagctgttgagtgcaggttacaacctatattgttatgcagatggcttctttaggaataacttttatatttatttaaaaatttttaaattatgggatgttttgttgttgttgttgtctttgttgttggtcatttgtcaatattcagtcaccaattctgctcacttcttgccatggataaaattgggtctttctggctaattaaaaaagacaactttataaaatggcactttaagcaagccatagttagttttatttttgtaatgcacatggcaaagcaaagacgtttgtgatgaaggaactgctcatctaagcaaaagatttgagtatgatatgataaaggctttctacattctaatttactttttccccccacttgaatgtgttttaaaggctaattatcagctcagtagagcagtgagaaactgatcaaattgcacttgttctcctacaagcaacctccacgcagacacctcgtactgctacaggtgtgtcatttcctttaataggaccagggaccatgtaactgaggtgagggttgtagtagatgcttccagtgtcagtatgcctgttaattttaagagcttccctttcttgcagagaacaagtctgcccagattccatgctttctataactggaggacctggcaaacctgccgcatgctgcacacatctacctacgtacacatatacaatagtattgatgattctgaacaataacagggtaaaacagttggtttgccattgttaaaaactgatttacagtaacttacaacaactgtacttttgttggattagcaaatcatgtgtttaaacaaatcccatatgttgggcaacagttcaaataagcacggagaagtgttgcccaaacttggttctctgactcttatgtatttgtaaggctgggcttcaaaatcaaaacaaaaaccccaaaaacagcaggcaaatgctttttaactctgacaccgttgccataaatccctgatactcaaagtctaacaagaaagacatggaaaattagcagcccattttcagaaagatcaaaatgatctagggttctaattgcttttgcatcctattcttacaaagtgatgtcccaacagggaacagtaggagctggagtgggatctccaagtcccagtttgagtgtgggatgtgcttccagcagtgccttccctttatgaaagacatcacatggcatccagggccaggcaggcagcttgaggtgcctttacgagaaaaccgagctggggctgggagaggacagttattgacactgatgtgcaatgaagtgacaagatgagagcagaatcgtaagagctttgaatttgaagtgagtttttttccccccataagttatttattccttttttctgtgtaaatatatttattttactgtggagcgctaacatctggatcgtaacatgtgcagaatgtatggtaggaatgtattctcttgtaggaatgtaaatctgtattaaaagggggtccaagccaggcccccaggtcttctcattgtatgcacagtccgcattcatttttactcttctctaatatgggtctatttgaaatatgcaaaaggtatgaggaatgttttaatacctccaaatttttaagaaaagcatcaaagggttgatattttttaaagtttttttagtagcactttctctggatgacagaaggggcaaccacatgggcacccttgttcataccaaagggtgagcagtggccagagcctcctctgcacctctcgagtgtctttaccaattgagctttttatcgccatagccccttggagtgccccagctgccctgaggtcaatcaaggaaaatttcttaatgaaataagctccaaagagccaaagtatcaacttacagatcgtttttaaagcttaaatttatgaaccacctttgtggtaaacaatgaattatgaataccgcagggcagccttcttaaatgacaaatgtaaaaaaaaaaaaaaaaggactctacttcgtgcagcaattgctactctatacgaattgtcttaatttgaaaaccttgctgttacaaattggacctttatacattttctgaaaacaatgaaaagagtatatttaaccttttctggctgtaaatggttaccttcctgtaactgccccgcacctggaggcatggagttgtgtgcatcctgcttatgtacaattgttttcagtgtttctaagaatgagtctgaatggttcttgaaaattagccaggatcaaatgctattgcagacaaagccaataaaaagttggacttcttttggggataacaagttttggaagagaaatgcaggccatatgtgcgcatgaccgagattttgaaaaaagatgtacatagtgacatgtttggtgcatggtttttgaggagggcttttgtcaaaaaggaggtataacctttcccccacagacctgagagctgtgccttttctatgcaatattacagacgttacatcggaacccagatggctgtattcacatgtaggtttgggctgtaatctaaacaattggacagattaaatgtacatggaaatgagcagtcttacttttgtagttttatattatacaataaacagttaaaagatgaaaaaaaaatg

SEQ ID NO: 448253 - DNA, 5502 bp, Homo sapiens
ctcctgcacggcgagtgctggagcacgagctaccgctcgctcggtcagggcgccccctccgcccgcctcctgcttcctcctccgctgcctgccgccgccgcctccaccattgtataatgctcggggcgcgcaggcagagaacggcggagtcttagcttcagcctcgcctgctgcccgctccccggcgccaccctcgggcccctggagcggggcactccgcatggagcgggagtagctgaggagtgggcggaaacccctcctgatgcgttagttcccaggtggagctgcatgtgatatatgttgggtaaaggaggaaaacggaagtttgatgagcatgaagatgggctggaaggcaaaatcgtgtctccctgtgacggtccatccaaggtgtcttacaccttacagcgccagactatcttcaacatttcccttatgaaactctataaccacaggcccctgacagagcccagcttgcaaaagaccgttttaattaacaacatgttgaggcggatccaggaggaactcaaacaggaaggcagcctgaggcccatgttcaccccctcctcccagcccaccaccgagcccagcgacagctaccgagaggccccgccggccttcagccacctggcgtccccgtcctcccacccctgcgacctcggaagcactacgcccctggaggcctgcctcaccccggcctcactgctcgaggacgacgatgacacgttttgcacctcccaggccatgcagcccacggctcccaccaaactgtcacctccagccctcttgccagaaaaggacagtttctcctctgccttggacgagatcgaggagctctgtcccacatctacctccacagaggcggccacggctgcgactgacagtgtgaaagggacctccagcgaggctggcacccagaaactcgacggtcctcaagagagccgcgcagatgactcaaaactgatggactctctgcctgggaattttgaaataacgacgtccacgggtttcctgacagacttgaccctggatgacatcctgtttgctgacattgatacgtccatgtatgattttgacccctgcacttcctcatcagggacagcctcaaaaatggcccctgtgtctgccgacgacctcctcaaaactctggctccttacagcagtcagcctgtcaccccaagtcagcctttcaaaatggacctcacagagctggaccacatcatggaggtgcttgttgggtcctaagacccagggacccagcgactatgcccacccagaccccagagcgttcccataaccctgacagttctccacactgtgcatgcacccttgcttgcctttttcagagaaaaagaaaattttacaacaggatcacactagtttttgctttgagcagagttggagtgccttcatccaagtatgaccacttttaatacacttttttgagtggttcctcagagacctactaccctggtataggaaagaatccatttgaagacaatgttgcaatgttgaatgacaaaaataaacagttcaagtgaagcacaaggattaagttggaaaagctgtaaattgcatgtgcatatttgtctattttttctataagttttattgcaagaggtaaagaagaaaactatatatatatatcttatttagataatctcagtaccttttctggcatttttgccctgtataggttgacttggcaattcggcctttttagaggcattaactactcctcgtaagtgttgcatttacatggctgtttagaaaactgctgcccaaatttattttatatttttgtacagattctgcagtttatgatattgtttttctaaaaacaaatgctgtttatacatatgagatagctattttgataggatttgctcacatagttcctgcaaacttcagatgtacaagttgcacttgtacttttatagagttgtaatgttttatatgtgtatggtgcaagagaaaattggatcaaatcaatctgcagttgatgtccccaaatgcaaacacaggcacacacatgcacacacccataaacacacacacagtgctttaagaaagggccaggtgatatcacacccaaatttcacaagcactgaccccctggcaccaacacccgccagtactgtgacttccaaagccagagccacatgtgctcatcaaacttgcattaagcagttggcgggagatggctgtggagctgggggtttaagtgatggttctcttttgctccctcttttgagggtaaagctactgtctttcttaagagtgtatttatgccaagtttgcgcttttaattgtttttattttgttttttaatgaaaacccagatctttcctttttggcataatttttatgatgacctgaaattttacatccgaacaaaattttacatccgaaaagcaaccaacttcttcatggaactcagccctgttgcaatgcttagggcccttaaagaagaaaatctccccagaaggcatccatcatgttgcttaattgtcttctgcagcttcctttccctagagctttccctgtgttgctaagagctgaaaatggcatcttcgtgatcaccacagtgagcttggctcgcctcggccggcccgggatgcactcttacaacatgtgtgactcttgaacctggagttcatcacattacgtcacagcttcccatctggttgctttcctgagtcagctacttcacacttgtcaaggctgttttaccccaaaactcagacaggactttctatgcatgttttccctcctccccccaattccccccccatcaccttatctcccaggacacacttgagaagtagctttttattcctagtggtgtacatttaattttaaaaaggttgcaatgtatcatgcttgttgccgaaactgtttatggccttcttgtttcagttttttcttttcttccaatggtactttagctgttgagtgcaggttacaacctatattgttatgcagatggcttctttaggaataacttttatatttatttaaaaatttttaaattatgggatgttttgttgttgttgttgtctttgttgttggtcatttgtcaatattcagtcaccaattctgctcacttcttgccatggataaaattgggtctttctggctaattaaaaaagacaactttataaaatggcactttaagcaagccatagttagttttatttttgtaatgcacatggcaaagcaaagacgtttgtgatgaaggaactgctcatctaagcaaaagatttgagtatgatatgataaaggctttctacattctaatttactttttccccccacttgaatgtgttttaaaggctaattatcagctcagtagagcagtgagaaactgatcaaattgcacttgttctcctacaagcaacctccacgcagacacctcgtactgctacaggtgtgtcatttcctttaataggaccagggaccatgtaactgaggtgagggttgtagtagatgcttccagtgtcagtatgcctgttaattttaagagcttccctttcttgcagagaacaagtctgcccagattccatgctttctataactggaggacctggcaaacctgccgcatgctgcacacatctacctacgtacacatatacaatagtattgatgattctgaacaataacagggtaaaacagttggtttgccattgttaaaaactgatttacagtaacttacaacaactgtacttttgttggattagcaaatcatgtgtttaaacaaatcccatatgttgggcaacagttcaaataagcacggagaagtgttgcccaaacttggttctctgactcttatgtatttgtaaggctgggcttcaaaatcaaaacaaaaaccccaaaaacagcaggcaaatgctttttaactctgacaccgttgccataaatccctgatactcaaagtctaacaagaaagacatggaaaattagcagcccattttcagaaagatcccaacagggaacagtaggagctggagtgggatctccaagtcccagtttgagtgtgggatgtgcttccagcagtgccttccctttatgaaagacatcacatggcatccagggccaggcaggcagcttgaggtgcctttacgagaaaaccgagctggggctgggagaggacagttattgacactgatgtgcaatgaagtgacaagatgagagcagaatcgtaagagctttgaatttgaagtgagtttttttccccccataagttatttattccttttttctgtgtaaatatatttattttactgtggagcgctaacatctggatcgtaacatgtgcagaatgtatggtaggaatgtattctcttgtaggaatgtaaatctgtattaaaagggggtccaagccaggcccccaggtcttctcattgtatgcacagtccgcattcatttttactcttctctaatatgggtctatttgaaatatgcaaaaggtatgaggaatgttttaatacctccaaatttttaagaaaagcatcaaagggttgatattttttaaagtttttttagtagcactttctctggatgacagaaggggcaaccacatgggcacccttgttcataccaaagggtgagcagtggccagagcctcctctgcacctctcgagtgtctttaccaattgagctttttatcgccatagccccttggagtgccccagctgccctgaggtcaatcaaggaaaatttcttaatgaaataagctccaaagagccaaagtatcaacttacagatcgtttttaaagcttaaatttatgaaccacctttgtggtaaacaatgaattatgaataccgcagggcagccttcttaaatgacaaatgtaaaaaaaaaaaaaaaaggactctacttcgtgcagcaattgctactctatacgaattgtcttaatttgaaaaccttgctgttacaaattggacctttatacattttctgaaaacaatgaaaagagtatatttaaccttttctggctgtaaatggttaccttcctgtaactgccccgcacctggaggcatggagttgtgtgcatcctgcttatgtacaattgttttcagtgtttctaagaatgagtctgaatggttcttgaaaattagccaggatcaaatgctattgcagacaaagccaataaaaagttggacttcttttggggataacaagttttggaagagaaatgcaggccatatgtgcgcatgaccgagattttgaaaaaagatgtacatagtgacatgtttggtgcatggtttttgaggagggcttttgtcaaaaaggaggtataacctttcccccacagacctgagagctgtgccttttctatgcaatattacagacgttacatcggaacccagatggctgtattcacatgtaggtttgggctgtaatctaaacaattggacagattaaatgtacatggaaatgagcagtcttacttttgtagttttatattatacaataaacagttaaaagatgaaaaaaaaatg

SEQ ID NO: 448254 - DNA, 4926 bp, Homo sapiens
atcggtaccatcaatatcacacaatactgagatgatctaagaaggttataacaaaatgctcttcagaaatacctaagtgctgagaatttttagtactaaagagcacagctgctcaaagtaaagcctgagcagtgttctcagtaatgtatttgaaggaaaaataccctgatttgaaaccaacagcagatgttgcaaactttcataccactgctggccatggaagcctcttaacaacacactgtcatttaaggctgtgcttgtgctttatacaaagagaaagaggtggtcttaaggggatgcttccaggggggtgagttcatgcctctcctgtattttccagcaagtggggtattgtggtggtattgttttttagaggggcataataatccaggattctaagcatatgctcagctattttaaagaggaaattaaatattataaaagaaatagtaaagataagttatcctcacttaggcaaaagcacaggtcctttccatatcaagtttagcctaccagggttgttttttgttttaaccctgcttaataatgttggtgttttagaagtagatacaggcactgctctgaaaacctggctagccaaggatattctcagaatgttatcacctgtttgtcaaagcttgtttaaattataaaacacttttaattatatatatgaggcaaaagaactaagacttttttcaaactaaattagaaaggagtgtcattatttgactgttaaaccaaaatatttttggtgggtctttttatggaagtttaaagaaaggacatcatcatagatatgatctaacagtatttctaactatatttgatcattaaaagcctcttggaatttgaagcgtgacgtgtttctaatgccccttgagaggtgaaaaataccacataatgatcagtatgctgtgccagcttcatttggggagaaataactagtagaaagttctgggtgtgaggtgtacagcagtctaggtggcatagtgatgaagaaagggatcagagtctgactgtcactcagaatcctgggctcagttgcttgacaaccttgggaaaattgttttatctttgtgcgtctgtttgctgatcttcagcgtgggaataataacagtacctacttgaaaggatcattgtgcggattaaaagaaataatatatgtaaagcactttaacacagcaccaggcccacggaaagtggctaatgttagctactatgaatggtgccagtgaagacactgaaaaataagtgatttcagtaaccttctggaaagctatcagtttcaaataatattttctctgtagtatgagatgaaattaaaagtggatagctttcaggaaagataaagagaacatgcttagaatgtaagctaaacagattttttctgttgctctttgaaaactatgagccctggccagcttaacctggtctgaggtgagactaaacacaaaaacagtagataaatctctccctaaaagatggattcccccacatacccatgctactagtttctctgtctattcacacatatgtacaaatacatgaacacagcctgtctgtgctcagacatagagaagtactacctgacttgagtcaatgcacccaagaagaaaagcttggagtagagcagaagggagggcttgggactcctgtcctttccagcatgccctggggtgcagtggtcagccacctgaagagagagccaatagcatggggtttacaaggcaaagatagtcattcattcaacacatattcatagagctccttctctgtgccagacactgttctggaagatagctagatgaaaatctttgcactcacagagcttacatgccagtgagtgaagatcgatgataaataaagcaaatgcatcatatgttcacatttgataagtatatgccaaaaaatgaagccgggaaggaggacaaggcccatgggtgggtgttgaggtttttaaagtgtggtcaggaaaggccccactgataaggtaacatttgagcaagtctgaaaaaggcaaggggatctttggggctaacttcgggatccctgcactttatgtaagaatgtaaacctggagtctcatttaagaatgatcagcaatacgtttagaacatatgaactgaatgaaatggacattttttcttaatttacgtataaatccatatgattatacataaagttctgatgcattaataaaagcagccaaatagggccaaagagaaaaataacaggactctgtactggacctaactttatcattaattaggtaatattttcctcatttctttactgctgccattttcctcaccagtattccagagatggtcatagctcattactctaccaccaagaacctaaaaggaattagaatacagcagaattggcctcagtgaagagcttaaaattgttctcctcgtagaactggactattgatcattaccacgtgacgttggctctattactttctgttcccaatgtccttctagtggtttgaaaatgttaaaacatccctaaaatctaaatcatataatcagaattctatagtgtcccactctatctgtaaagatcatttggaagactttagactctattaattttaaaaggaatatttattagccatatgcagaatttctaatgatgatattgtacagcttctaattcacttttcagatcagtgtttgaaatggcaattatcagtgttggatttagttccaactacttgatttacaaaaatgtacatttagagaaggttaaaagaaacagtgagaaatgtaaacattcaaaatgataattgaatctctcagttgtgggaataattatcagagacatgcaactgaaaatgtctcacctttcatctttttttcttaattcataaagttatcttgtagaatttgatgagaccctcctagtcattctcaactggggcggtgctgtcaccgaatggtgtttgagagtgttggggctagggcacatttttggttgtcacagcaactggggtggcatttgctgcccagtgccaggaatagtaacattatgaatgccagggacagtgtgctcagtaaagtcttccatccaaaaggggcagggcacggtggctcacgcctgtaatcccagcactttgggaggccaaggtgggcggatcacctgatgtcaggggttcgagaccagcctggccaacatggtgaaaccctgttgctactaaaaatacaaaaattggctgggtgtggtgtcacatgccagtaaccccagctactagggaggctgaggcaggagaatcacttgaacccgggaggcagaggttgcagtgagctgagattgcaccactacactccagcctggatgacagagtgagacttcatctcaaaaaaaaaaaaaaaaaaccaaaaaaaaacaacccggtagcattgtcccttccccactgacaaacttatcaaatccagaagctttagagtttcgtctctaattatttttctcctgaacaaaattacccaagtcaaaacaaaatgtatttttagaattacggcagcatacgacctgaattttgtgagtttcgtggctttatcttaaatcaccatttccctaaaaatggtttctttctccttagaaatgctggtggcaacttgatgaaacagccaaatgcaccagggcaggtcactttcccattacactgattccacaattaaaaaaaaaaaaagaaaaaaaactcattgagatagctacagttctataggttaatttaaagcctcctttttctactcatttttgaaagcaaaattacattttactattttacataaccagtgaaaagacgttgaaagcctacagctcactgtttttggtgctctggaaatgttgagggtgggtttttaaccagtgatttttaacgtgcagtgaatttgttagacttttaaacaccagctaaggtagtcaaacttgatccccattaaaaatcaaggaattaggggtcgggggagggtttaggagtgatccagaatgacctcccagaattactgtgcgtacaactttatttttcagagttttcattggaatggtaagagttttatgaaagacagttttaaaacttattctgagttaaatattaatactttaaaaaattattgtactagacttatcgcagccttttgaaagtagcagagtttcatcataccacatatataacagagcataaattttctataatcaggcaccttttgctgcttttgagtaagactgttttcctgtttaagtgttaagcatcgccagacataaaaatctattctctcctctcgattgtagcatagcctgacagctctagatacagcatttctatgatgaaaaatgagtatccatcaggaaatctagaagactagccgtgttttctcagactccacctttgtttgcactctgttgcctgtgaggagctttctggcatgtgattatttacttcaaaactagagttccaagcacctacattaattattttatattgtgtgcagaatagtatatcttttaatgtcagatatgatacactgcacatattgcttttgcactcttaaaatttttgtactaaataatagaaaatatttatattctttgagtgtgagctttgaatagatggcattatcactttattgtttttttaacaaaaactttttctcaattattctattgcaatgttattctgagcaagtcctatgccaaatatcttgtataatgtttgtatggaagattaaattttactcttgtgtggtaagactatttcagttactgattttatagttggaatttgatattccagcacaaagtccacagtgtattcagaaatccaagttggtgtcatacatttcattttgatgtgaacttttctttgctttcctttgttctaagactccattttgcaataaacgttttgacagtaaa

SEQ ID NO: 448255 - DNA, 4850 bp, Homo sapiens
atcggtaccatcaatatcacacaatactgagatgatctaagaaggttataacaaaatgctcttcagaaatacctaagtgctgagaatttttagtactaaagagcacagctgctcaaagtaaagcctgagcagtgttctcagtaatgtatttgaaggaaaaataccctgatttgaaaccaacagcagatgttgcaaactttcataccactgctggccatggaagcctcttaacaacacactgtcatttaaggctgtgcttgtgctttatacaaagagaaagaggtggtcttaaggggatgcttccaggggggtgagttcatgcctctcctgtattttccagcaagtggggtattgtggtggtattgttttttagaggggcataataatccaggattctaagcatatgctcagctattttaaagaggaaattaaatattataaaagaaatagtaaagataagttatcctcacttaggcaaaagcacaggtcctttccatatcaagtttagcctaccagggttgttttttgttttaaccctgcttaataatgttggtgttttagaagtagatacaggcactgctctgaaaacctggctagccaaggatattctcagaatgttatcacctgtttgtcaaagcttgtttaaattataaaacacttttaattatatatatgaggcaaaagaactaagacttttttcaaactaaattagaaaggagtgtcattatttgactgttaaaccaaaatatttttggtgggtctttttatggaagtttaaagaaaggacatcatcatagatatgatctaacagtatttctaactatatttgatcattaaaagcctcttggaatttgaagcgtgacgtgtttctaatgccccttgagaggtgaaaaataccacataatgatcagtatgctgtgccagcttcatttggggagaaataactagtagaaagttctgggtgtgaggtgtacagcagtctaggtggcatagtgatgaagaaagggatcagagtctgactgtcactcagaatcctgggctcagttgcttgacaaccttgggaaaattgttttatctttgtgcgtctgtttgctgatcttcagcgtgggaataataacagtacctacttgaaaggatcattgtgcggattaaaagaaataatatatgtaaagcactttaacacagcaccaggcccacggaaagtggctaatgttagctactatgaatggtgccagtgaagacactgaaaaataagtgatttcagtaaccttctggaaagctatcagtttcaaataatattttctctgtagtatgagatgaaattaaaagtggatagctttcaggaaagataaagagaacatgcttagaatgtaagctaaacagattttttctgttgctctttgaaaactatgagccctggccagcttaacctggtctgaggtgagactaaacacaaaaacagtagataaatctctccctaaaagatggattcccccacatacccatgctactagtttctctgtctattcacacatatgtacaaatacatgaacacagcctgtctgtgctcagacatagagaagtactacctgacttgagtcaatgcacccaagaagaaaagcttggagtagagcagaagggagggcttgggactcctgtcctttccagcatgccctggggtgcagtggtcagccacctgaagagagagccaatagcatggggtttacaaggcaaagatagtcattcattcaacacatattcatagagctccttctctgtgccagacactgttctggaagatagctagatgaaaatctttgcactcacagagcttacatgccagtgagtgaagatcgatgataaataaagcaaatgcatcatatgttcacatttgataagtatatgccaaaaaatgaagccgggaaggaggacaaggcccatgggtgggtgttgaggtttttaaagtgtggtcaggaaaggccccactgataaggtaacatttgagcaagtctgaaaaaggcaaggggatctttggggctaacttcgggatccctgcactttatgtaagaatgtaaacctggagtctcatttaagaatgatcagcaatacgtttagaacatatgaactgaatgaaatggacattttttcttaatttacgtataaatccatatgattatacataaagttctgatgcattaataaaagcagccaaatagggccaaagagaaaaataacaggactctgtactggacctaactttatcatttactctaccaccaagaacctaaaaggaattagaatacagcagaattggcctcagtgaagagcttaaaattgttctcctcgtagaactggactattgatcattaccacgtgacgttggctctattactttctgttcccaatgtccttctagtggtttgaaaatgttaaaacatccctaaaatctaaatcatataatcagaattctatagtgtcccactctatctgtaaagatcatttggaagactttagactctattaattttaaaaggaatatttattagccatatgcagaatttctaatgatgatattgtacagcttctaattcacttttcagatcagtgtttgaaatggcaattatcagtgttggatttagttccaactacttgatttacaaaaatgtacatttagagaaggttaaaagaaacagtgagaaatgtaaacattcaaaatgataattgaatctctcagttgtgggaataattatcagagacatgcaactgaaaatgtctcacctttcatctttttttcttaattcataaagttatcttgtagaatttgatgagaccctcctagtcattctcaactggggcggtgctgtcaccgaatggtgtttgagagtgttggggctagggcacatttttggttgtcacagcaactggggtggcatttgctgcccagtgccaggaatagtaacattatgaatgccagggacagtgtgctcagtaaagtcttccatccaaaaggggcagggcacggtggctcacgcctgtaatcccagcactttgggaggccaaggtgggcggatcacctgatgtcaggggttcgagaccagcctggccaacatggtgaaaccctgttgctactaaaaatacaaaaattggctgggtgtggtgtcacatgccagtaaccccagctactagggaggctgaggcaggagaatcacttgaacccgggaggcagaggttgcagtgagctgagattgcaccactacactccagcctggatgacagagtgagacttcatctcaaaaaaaaaaaaaaaaaaccaaaaaaaaacaacccggtagcattgtcccttccccactgacaaacttatcaaatccagaagctttagagtttcgtctctaattatttttctcctgaacaaaattacccaagtcaaaacaaaatgtatttttagaattacggcagcatacgacctgaattttgtgagtttcgtggctttatcttaaatcaccatttccctaaaaatggtttctttctccttagaaatgctggtggcaacttgatgaaacagccaaatgcaccagggcaggtcactttcccattacactgattccacaattaaaaaaaaaaaaagaaaaaaaactcattgagatagctacagttctataggttaatttaaagcctcctttttctactcatttttgaaagcaaaattacattttactattttacataaccagtgaaaagacgttgaaagcctacagctcactgtttttggtgctctggaaatgttgagggtgggtttttaaccagtgatttttaacgtgcagtgaatttgttagacttttaaacaccagctaaggtagtcaaacttgatccccattaaaaatcaaggaattaggggtcgggggagggtttaggagtgatccagaatgacctcccagaattactgtgcgtacaactttatttttcagagttttcattggaatggtaagagttttatgaaagacagttttaaaacttattctgagttaaatattaatactttaaaaaattattgtactagacttatcgcagccttttgaaagtagcagagtttcatcataccacatatataacagagcataaattttctataatcaggcaccttttgctgcttttgagtaagactgttttcctgtttaagtgttaagcatcgccagacataaaaatctattctctcctctcgattgtagcatagcctgacagctctagatacagcatttctatgatgaaaaatgagtatccatcaggaaatctagaagactagccgtgttttctcagactccacctttgtttgcactctgttgcctgtgaggagctttctggcatgtgattatttacttcaaaactagagttccaagcacctacattaattattttatattgtgtgcagaatagtatatcttttaatgtcagatatgatacactgcacatattgcttttgcactcttaaaatttttgtactaaataatagaaaatatttatattctttgagtgtgagctttgaatagatggcattatcactttattgtttttttaacaaaaactttttctcaattattctattgcaatgttattctgagcaagtcctatgccaaatatcttgtataatgtttgtatggaagattaaattttactcttgtgtggtaagactatttcagttactgattttatagttggaatttgatattccagcacaaagtccacagtgtattcagaaatccaagttggtgtcatacatttcattttgatgtgaacttttctttgctttcctttgttctaagactccattttgcaataaacgttttgacagtaaa

SEQ ID NO: 448256 - DNA, 5130 bp, Homo sapiens
atcggtaccatcaatatcacacaatactgagatgatctaagaaggttataacaaaatgctcttcagaaatacctaagtgctgagaatttttagtactaaagagcacagctgctcaaagtaaagcctgagcagtgttctcagtaatgtatttgaaggaaaaataccctgatttgaaaccaacagcagatgttgcaaactttcataccactgctggccatggaagcctcttaacaacacactgtcatttaaggctgtgcttgtgctttatacaaagagaaagaggtggtcttaaggggatgcttccaggggggtgagttcatgcctctcctgtattttccagcaagtggggtattgtggtggtattgttttttagaggggcataataatccaggattctaagcatatgctcagctattttaaagaggaaattaaatattataaaagaaatagtaaagataagttatcctcacttaggcaaaagcacaggtcctttccatatcaagtttagcctaccagggttgttttttgttttaaccctgcttaataatgttggtgttttagaagtagatacaggcactgctctgaaaacctggctagccaaggatattctcagaatgttatcacctgtttgtcaaagcttgtttaaattataaaacacttttaattatatatatgaggcaaaagaactaagacttttttcaaactaaattagaaaggagtgtcattatttgactgttaaaccaaaatatttttggtgggtctttttatggaagtttaaagaaaggacatcatcatagatatgatctaacagtatttctaactatatttgatcattaaaagcctcttggaatttgaagcgtgacgtgtttctaatgccccttgagaggtgaaaaataccacataatgatcagtatgctgtgccagcttcatttggggagaaataactagtagaaagttctgggtgtgaggtgtacagcagtctaggtggcatagtgatgaagaaagggatcagagtctgactgtcactcagaatcctgggctcagttgcttgacaaccttgggaaaattgttttatctttgtgcgtctgtttgctgatcttcagcgtgggaataataacagtacctacttgaaaggatcattgtgcggattaaaagaaataatatatgtaaagcactttaacacagcaccaggcccacggaaagtggctaatgttagctactatgaatggtgccagtgaagacactgaaaaataagtgatttcagtaaccttctggaaagctatcagtttcaaataatattttctctgtagtatgagatgaaattaaaagtggatagctttcaggaaagataaagagaacatgcttagaatgtaagctaaacagattttttctgttgctctttgaaaactatgagccctggccagcttaacctggtctgaggtgagactaaacacaaaaacagtagataaatctctccctaaaagatggattcccccacatacccatgctactagtttctctgtctattcacacatatgtacaaatacatgaacacagcctgtctgtgctcagacatagagaagtactacctgacttgagtcaatgcacccaagaagaaaagcttggagtagagcagaagggagggcttgggactcctgtcctttccagcatgccctggggtgcagtggtcagccacctgaagagagagccaatagcatggggtttacaaggcaaagatagtcattcattcaacacatattcatagagctccttctctgtgccagacactgttctggaagatagctagatgaaaatctttgcactcacagagcttacatgccagtgagtgaagatcgatgataaataaagcaaatgcatcatatgttcacatttgataagtatatgccaaaaaatgaagccgggaaggaggacaaggcccatgggtgggtgttgaggtttttaaagtgtggtcaggaaaggccccactgataaggtaacatttgagcaagtctgaaaaaggcaaggggatctttggggctaacttcgggatccctgcactttatgtaagaatgtaaacctggagtctcatttaagaatgatcagcaatacgtttagaacatatgaactgaatgaaatggacattttttcttaatttacgtataaatccatatgattatacataaagttctgatgcattaataaaagcagccaaatagggccaaagagaaaaataacaggactctgtactggacctaactttatcattaattaggtaatattttcctcatttctttactgctgccattttcctcaccagtattccagagatggtcatagctcattactctaccaccaagaacctaaaaggaattagaatacagcagaattggcctcagtgaagagcttaaaattgttctcctcgtagaactggactattgatcattaccacgtgacgttggctctattactttctgttcccaatgtccttctagtggtttgaaaatgttaaaacatccctaaaatctaaatcatataatcagaattctatagtgtcccactctatctgtaaagatcatttggaagactttagactctattaattttaaaaggaatatttattagccatatgcagaatttctaatgatgatattgtacagcttctaattcacttttcagatcagtgtttgaaatggcaattatcagtgttggatttagttccaactacttgatttacaaaaatgtacatttagagaaggttaaaagaaacagtgagaaatgtaaacattcaaaatgataattgaatctctcagttgtgggaataattatcagagacatgcaactgaaaatgtctcacctttcatctttttttcttaattcataaagttatcttgtagaatttgatgagaccctcctagtcattctcaactggggcggtgctgtcaccgaatggtgtttgagagtgttggggctagggcacatttttggttgtcacagcaactggggtggcatttgctgcccagtgccaggaatagtaacattatgaatgccagggacagtgtgctcagtaaagtcttccatccaaaaggggcagggcacggtggctcacgcctgtaatcccagcactttgggaggccaaggtgggcggatcacctgatgtcaggggttcgagaccagcctggccaacatggtgaaaccctgttgctactaaaaatacaaaaattggctgggtgtggtgtcacatgccagtaaccccagctactagggaggctgaggcaggagaatcacttgaacccgggaggcagaggttgcagtgagctgagattgcaccactacactccagcctggatgacagagtgagacttcatctcaaaaaaaaaaaaaaaaaaccaaaaaaaaacaacccggtagcattgtcccttccccactgacaaacttatcaaatccagaagctttagagtttcgtctctaattatttttctcctgaacaaaattacccaagtcaaaacaaaatgtatttttagaattacggcagcatacgacctgaattttgtgagtttcgtggctttatcttaaatcaccatttccctaaaaatggtttctttctccttagaaatgctggtggcaacttgatgaaacagccaaatgcaccagggcaggtcactttcccattacactgattccacaattaaaaaaaaaaaaagaaaaaaaactcattgagatagctacagttctataggttaatttaaagcctcctttttctactcatttttgaaagcaaaattacattttactattttacataaccagtgaaaagacgttgaaagcctacagctcactgtttttggtgctctggaaatgttgagggtgggtttttaaccagtgatttttaacgtgcagtgaatttgttagacttttaaacaccagctaaggtagtcaaacttgatccccattaaaaatcaaggaattaggggtcgggggagggtttaggagtgatccagaatgacctcccagaattactgtgcgtacaactttatttttcagagttttcattggaatggtaagagttttatgaaagacagttttaaaacttattctgagttaaatattaatactttaaaaaattattgtactagacttatcgcagccttttgaaagtagcagagtttcatcataccacatatataacagagcataaattttctataatcaggcaccttttgctgcttttgagtaagactgttttcctgtttaagtgttaagcatcgccagacataaaaatctattctctcctctcgattgtagcatagcctgacagctctagatacagcatttctatgatgaaaaatgagtatccatcaggaaatctagaagactagccgtgttttctcagactccacctttgtttgcactctgttgcctgtgaggagctttctggcatgtgattatttacttcaaaactagagttccaagcacctacattaattattttatattgtgtgcagaatagtatatcttttaatgtcagatatgatacactgcacatattgcttttgcactcttaaaatttttgtactaaataatagaaaatatttatattctttgagtgtgagctttgaatagatggcattatcactttattgtttttttaacaaaaactttttctcaattattctattgcaatgttattctgagcaagtcctatgccaaatatcttgtataatgtttgtatggaagattaaattttactcttgtgtggtaagactatttcagttactgattttatagttggaatttgatattccagcacaaagtccacagtgtattcagaaatccaagttggtgtcatacatttcattttgatgtgaacttttctttgctttcctttgttctaagactccattttgcaataaacgttttgacagtaaaaaaaaaaaaaaaagaaaaaaaaactcattgagatagctacagttctataggttaatttaaagcctccttattctactcatttttgaaagcaaaattacattgtactattttacataatccagtgaaaagacgttgaagcctacagctcactgttttttgtacaggaaggttgtaggggggatcctgctagagcgacctctagca

SEQ ID NO: 448257 - DNA, 4383 bp, Homo sapiens
atcggtaccatcaatatcacacaatactgagatgatctaagaaggttataacaaaatgctcttcagaaatacctaagtgctgagaatttttagtactaaagagcacagctgctcaaagtaaagcctgagcagtgttctcagtaatgtatttgaaggaaaaataccctgatttgaaaccaacagcagatgttgcaaactttcataccactgctggccatggaagcctcttaacaacacactgtcatttaaggctgtgcttgtgctttatacaaagagaaagaggtggtcttaaggggatgcttccaggggggtgagttcatgcctctcctgtattttccagcaagtggggtattgtggtggtattgttttttagaggggcataataatccaggattctaagcatatgctcagctattttaaagaggaaattaaatattataaaagaaatagtaaagataagttatcctcacttaggcaaaagcacaggtcctttccatatcaagtttagcctaccagggttgttttttgttttaaccctgcttaataatgttggtgttttagaagtagatacaggcactgctctgaaaacctggctagccaaggatattctcagaatgttatcacctgtttgtcaaagcttgtttaaattataaaacacttttaattatatatatgaggcaaaagaactaagacttttttcaaactaaattagaaaggagtgtcattatttgactgttaaaccaaaatatttttggtgggtctttttatggaagtttaaagaaaggacatcatcatagatatgatctaacagtatttctaactatatttgatcattaaaagcctcttggaatttgaagcgtgacgtgtttctaatgccccttgagaggtgaaaaataccacataatgatcagtatgctgtgccagcttcatttggggagaaataactagtagaaagttctgggtgtgaggtgtacagcagtctaggtggcatagtgatgaagaaagggatcagagtctgactgtcactcagaatcctgggctcagttgcttgacaaccttgggaaaattgttttatctttgtgcgtctgtttgctgatcttcagcgtgggaataataacagtacctacttgaaaggatcattgtgcggattaaaagaaataatatatgtaaagcactttaacacagcaccaggcccacggaaagtggctaatgttagctactatgaatggtgccagtgaagacactgaaaaataagtgatttcagtaaccttctggaaagctatcagtttcaaataatattttctctgtagtatgagatgaaattaaaagtggatagctttcaggaaagataaagagaacatgcttagaatgtaagctaaacagattttttctgttgctctttgaaaactatgagccctggccagcttaacctggtctgaggtgagactaaacacaaaaacagtagataaatctctccctaaaagatggattcccccacatacccatgctactagtttctctgtctattcacacatatgtacaaatacatgaacacagcctgtctgtgctcagacatagagaagtactacctgacttgagtcaatgcacccaagaagaaaagcttggagtagagcagaagggagggcttgggactcctgtcctttccagcatgccctggggtgcagtggtcagccacctgaagagagagccaatagcatggggtttacaaggcaaagatagtcattcattcaacacatattcatagagctccttctctgtgccagacactgttctggaagatagctagatgaaaatctttgcactcacagagcttacatgccagtgagtgaagatcgatgataaataaagcaaatgcatcatatgttcacatttgataagtatatgccaaaaaatgaagccgggaaggaggacaaggcccatgggtgggtgttgaggtttttaaagtgtggtcaggaaaggccccactgataaggtaacatttgagcaagtctgaaaaaggcaaggggatctttggggctaacttcgggatccctgcactttatgtaagaatgtaaacctggagtctcatttaagaatgatcagcaatacgtttagaacatatgaactgaatgaaatggacattttttcttaatttacgtataaatccatatgattatacataaagttctgatgcattaataaaagcagccaaatagggccaaagagaaaaataacaggactctgtactggacctaactttatcattaattaggtaatattttcctcatttctttactgctgccattttcctcaccagtattccagagatggtcatagctcattactctaccaccaagaacctaaaaggaattagaatacagcagaattggcctcagtgaagagcttaaaattgttctcctcgtagaactggactattgatcattaccacgtgacgttggctctattactttctgttcccaatgtccttctagtggtttgaaaatgttaaaacatccctaaaatctaaatcatataatcagaattctatagtgtcccactctatctgtaaagatcatttggaagactttagactctattaattttaaaaggaatatttattagccatatgcagaatttctaatgatgatattgtacagcttctaattcacttttcagatcagtgtttgaaatggcaattatcagtgttggatttagttccaactacttgatttacaaaaatgtacatttagagaaggttaaaagaaacatgagctgagattgcaccactacactccagcctggatgacagagtgagacttcatctcaaaaaaaaaaaaaaaaaaccaaaaaaaaacaacccggtagcattgtcccttccccactgacaaacttatcaaatccagaagctttagagtttcgtctctaattatttttctcctgaacaaaattacccaagtcaaaacaaaatgtatttttagaattacggcagcatacgacctgaattttgtgagtttcgtggctttatcttaaatcaccatttccctaaaaatggtttctttctccttagaaatgctggtggcaacttgatgaaacagccaaatgcaccagggcaggtcactttcccattacactgattccacaattaaaaaaaaaaaaagaaaaaaaactcattgagatagctacagttctataggttaatttaaagcctcctttttctactcatttttgaaagcaaaattacattttactattttacataaccagtgaaaagacgttgaaagcctacagctcactgtttttggtgctctggaaatgttgagggtgggtttttaaccagtgatttttaacgtgcagtgaatttgttagacttttaaacaccagctaaggtagtcaaacttgatccccattaaaaatcaaggaattaggggtcgggggagggtttaggagtgatccagaatgacctcccagaattactgtgcgtacaactttatttttcagagttttcattggaatggtaagagttttatgaaagacagttttaaaacttattctgagttaaatattaatactttaaaaaattattgtactagacttatcgcagccttttgaaagtagcagagtttcatcataccacatatataacagagcataaattttctataatcaggcaccttttgctgcttttgagtaagactgttttcctgtttaagtgttaagcatcgccagacataaaaatctattctctcctctcgattgtagcatagcctgacagctctagatacagcatttctatgatgaaaaatgagtatccatcaggaaatctagaagactagccgtgttttctcagactccacctttgtttgcactctgttgcctgtgaggagctttctggcatgtgattatttacttcaaaactagagttccaagcacctacattaattattttatattgtgtgcagaatagtatatcttttaatgtcagatatgatacactgcacatattgcttttgcactcttaaaatttttgtactaaataatagaaaatatttatattctttgagtgtgagctttgaatagatggcattatcactttattgtttttttaacaaaaactttttctcaattattctattgcaatgttattctgagcaagtcctatgccaaatatcttgtataatgtttgtatggaagattaaattttactcttgtgtggtaagactatttcagttactgattttatagttggaatttgatattccagcacaaagtccacagtgtattcagaaatccaagttggtgtcatacatttcattttgatgtgaacttttctttgctttcctttgttctaagactccattttgcaataaacgttttgacagtaaa

SEQ ID NO: 448258 - DNA, 4906 bp, Homo sapiens
tagagtatcccggtcatcttgctacacaagctgagatatctattccaagtggcaatgagaaaataatttttagtactaaagagcacagctgctcaaagtaaagcctgagcagtgttctcagtaatgtatttgaaggaaaaataccctgatttgaaaccaacagcagatgttgcaaactttcataccactgctggccatggaagcctcttaacaacacactgtcatttaaggctgtgcttgtgctttatacaaagagaaagaggtggtcttaaggggatgcttccaggggggtgagttcatgcctctcctgtattttccagcaagtggggtattgtggtggtattgttttttagaggggcataataatccaggattctaagcatatgctcagctattttaaagaggaaattaaatattataaaagaaatagtaaagataagttatcctcacttaggcaaaagcacaggtcctttccatatcaagtttagcctaccagggttgttttttgttttaaccctgcttaataatgttggtgttttagaagtagatacaggcactgctctgaaaacctggctagccaaggatattctcagaatgttatcacctgtttgtcaaagcttgtttaaattataaaacacttttaattatatatatgaggcaaaagaactaagacttttttcaaactaaattagaaaggagtgtcattatttgactgttaaaccaaaatatttttggtgggtctttttatggaagtttaaagaaaggacatcatcatagatatgatctaacagtatttctaactatatttgatcattaaaagcctcttggaatttgaagcgtgacgtgtttctaatgccccttgagaggtgaaaaataccacataatgatcagtatgctgtgccagcttcatttggggagaaataactagtagaaagttctgggtgtgaggtgtacagcagtctaggtggcatagtgatgaagaaagggatcagagtctgactgtcactcagaatcctgggctcagttgcttgacaaccttgggaaaattgttttatctttgtgcgtctgtttgctgatcttcagcgtgggaataataacagtacctacttgaaaggatcattgtgcggattaaaagaaataatatatgtaaagcactttaacacagcaccaggcccacggaaagtggctaatgttagctactatgaatggtgccagtgaagacactgaaaaataagtgatttcagtaaccttctggaaagctatcagtttcaaataatattttctctgtagtatgagatgaaattaaaagtggatagctttcaggaaagataaagagaacatgcttagaatgtaagctaaacagattttttctgttgctctttgaaaactatgagccctggccagcttaacctggtctgaggtgagactaaacacaaaaacagtagataaatctctccctaaaagatggattcccccacatacccatgctactagtttctctgtctattcacacatatgtacaaatacatgaacacagcctgtctgtgctcagacatagagaagtactacctgacttgagtcaatgcacccaagaagaaaagcttggagtagagcagaagggagggcttgggactcctgtcctttccagcatgccctggggtgcagtggtcagccacctgaagagagagccaatagcatggggtttacaaggcaaagatagtcattcattcaacacatattcatagagctccttctctgtgccagacactgttctggaagatagctagatgaaaatctttgcactcacagagcttacatgccagtgagtgaagatcgatgataaataaagcaaatgcatcatatgttcacatttgataagtatatgccaaaaaatgaagccgggaaggaggacaaggcccatgggtgggtgttgaggtttttaaagtgtggtcaggaaaggccccactgataaggtaacatttgagcaagtctgaaaaaggcaaggggatctttggggctaacttcgggatccctgcactttatgtaagaatgtaaacctggagtctcatttaagaatgatcagcaatacgtttagaacatatgaactgaatgaaatggacattttttcttaatttacgtataaatccatatgattatacataaagttctgatgcattaataaaagcagccaaatagggccaaagagaaaaataacaggactctgtactggacctaactttatcattaattaggtaatattttcctcatttctttactgctgccattttcctcaccagtattccagagatggtcatagctcattactctaccaccaagaacctaaaaggaattagaatacagcagaattggcctcagtgaagagcttaaaattgttctcctcgtagaactggactattgatcattaccacgtgacgttggctctattactttctgttcccaatgtccttctagtggtttgaaaatgttaaaacatccctaaaatctaaatcatataatcagaattctatagtgtcccactctatctgtaaagatcatttggaagactttagactctattaattttaaaaggaatatttattagccatatgcagaatttctaatgatgatattgtacagcttctaattcacttttcagatcagtgtttgaaatggcaattatcagtgttggatttagttccaactacttgatttacaaaaatgtacatttagagaaggttaaaagaaacagtgagaaatgtaaacattcaaaatgataattgaatctctcagttgtgggaataattatcagagacatgcaactgaaaatgtctcacctttcatctttttttcttaattcataaagttatcttgtagaatttgatgagaccctcctagtcattctcaactggggcggtgctgtcaccgaatggtgtttgagagtgttggggctagggcacatttttggttgtcacagcaactggggtggcatttgctgcccagtgccaggaatagtaacattatgaatgccagggacagtgtgctcagtaaagtcttccatccaaaaggggcagggcacggtggctcacgcctgtaatcccagcactttgggaggccaaggtgggcggatcacctgatgtcaggggttcgagaccagcctggccaacatggtgaaaccctgttgctactaaaaatacaaaaattggctgggtgtggtgtcacatgccagtaaccccagctactagggaggctgaggcaggagaatcacttgaacccgggaggcagaggttgcagtgagctgagattgcaccactacactccagcctggatgacagagtgagacttcatctcaaaaaaaaaaaaaaaaaaccaaaaaaaaacaacccggtagcattgtcccttccccactgacaaacttatcaaatccagaagctttagagtttcgtctctaattatttttctcctgaacaaaattacccaagtcaaaacaaaatgtatttttagaattacggcagcatacgacctgaattttgtgagtttcgtggctttatcttaaatcaccatttccctaaaaatggtttctttctccttagaaatgctggtggcaacttgatgaaacagccaaatgcaccagggcaggtcactttcccattacactgattccacaattaaaaaaaaaaaaagaaaaaaaactcattgagatagctacagttctataggttaatttaaagcctcctttttctactcatttttgaaagcaaaattacattttactattttacataaccagtgaaaagacgttgaaagcctacagctcactgtttttggtgctctggaaatgttgagggtgggtttttaaccagtgatttttaacgtgcagtgaatttgttagacttttaaacaccagctaaggtagtcaaacttgatccccattaaaaatcaaggaattaggggtcgggggagggtttaggagtgatccagaatgacctcccagaattactgtgcgtacaactttatttttcagagttttcattggaatggtaagagttttatgaaagacagttttaaaacttattctgagttaaatattaatactttaaaaaattattgtactagacttatcgcagccttttgaaagtagcagagtttcatcataccacatatataacagagcataaattttctataatcaggcaccttttgctgcttttgagtaagactgttttcctgtttaagtgttaagcatcgccagacataaaaatctattctctcctctcgattgtagcatagcctgacagctctagatacagcatttctatgatgaaaaatgagtatccatcaggaaatctagaagactagccgtgttttctcagactccacctttgtttgcactctgttgcctgtgaggagctttctggcatgtgattatttacttcaaaactagagttccaagcacctacattaattattttatattgtgtgcagaatagtatatcttttaatgtcagatatgatacactgcacatattgcttttgcactcttaaaatttttgtactaaataatagaaaatatttatattctttgagtgtgagctttgaatagatggcattatcactttattgtttttttaacaaaaactttttctcaattattctattgcaatgttattctgagcaagtcctatgccaaatatcttgtataatgtttgtatggaagattaaattttactcttgtgtggtaagactatttcagttactgattttatagttggaatttgatattccagcacaaagtccacagtgtattcagaaatccaagttggtgtcatacatttcattttgatgtgaacttttctttgctttcctttgttctaagactccattttgcaataaacgttttgacagtaaa

SEQ ID NO: 448259 - DNA, 4051 bp, Homo sapiens
atcggtaccatcaatatcacacaatactgagatgatctaagaaggttataacaaaatgctcttcagaaatacctaagtgctgagaatttttagtactaaagagcacagctgctcaaagtaaagcctgagcagtgttctcagtaatgtatttgaaggaaaaataccctgatttgaaaccaacagcagatgttgcaaactttcataccactgctggccatggaagcctcttaacaacacactgtcatttaaggctgtgcttgtgctttatacaaagagaaagaggtggtcttaaggggatgcttccaggggggtgagttcatgcctctcctgtattttccagcaagtggggtattgtggtggtattgttttttagaggggcataataatccaggattctaagcatatgctcagctattttaaagaggaaattaaatattataaaagaaatagtaaagataagttatcctcacttaggcaaaagcacaggtcctttccatatcaagtttagcctaccagggttgttttttgttttaaccctgcttaataatgttggtgttttagaagtagatacaggcactgctctgaaaacctggctagccaaggatattctcagaatgttatcacctgtttgtcaaagcttgtttaaattataaaacacttttaattatatatatgaggcaaaagaactaagacttttttcaaactaaattagaaaggagtgtcattatttgactgttaaaccaaaatatttttggtgggtctttttatggaagtttaaagaaaggacatcatcatagatatgatctaacagtatttctaactatatttgatcattaaaagcctcttggaatttgaagcgtgacgtgtttctaatgccccttgagaggtgaaaaataccacataatgatcagtatgctgtgccagcttcatttggggagaaataactagtagaaagttctgggtgtgaggtgtacagcagtctaggtggcatagtgatgaagaaagggatcagagtctgactgtcactcagaatcctgggctcagttgcttgacaaccttgggaaaattgttttatctttgtgcgtctgtttgctgatcttcagcgtgggaataataacagtacctacttgaaaggatcattgtgcggattaaaagaaataatatatgtaaagcactttaacacagcaccaggcccacggaaagtggctaatgttagctactatgaatggtgccagtgaagacactgaaaaataagtgatttcagtaaccttctggaaagctatcagtttcaaataatattttctctgtagtatgagatgaaattaaaagtggatagctttcaggaaagataaagagaacatgcttagaatgtaagctaaacagattttttctgttgctctttgaaaactatgagccctggccagcttaacctggtctgaggtgagactaaacacaaaaacagtagataaatctctccctaaaagatggattcccccacatacccatgctactagtttctctgtctattcacacatatgtacaaatacatgaacacagcctgtctgtgctcagacatagagaagtactacctgacttgagtcaatgcacccaagaagaaaagcttggagtagagcagaagggagggcttgggactcctgtcctttccagcatgccctggggtgcagtggtcagccacctgaagagagagccaatagcatggggtttacaaggcaaagatagtcattcattcaacacatattcatagagctccttctctgtgccagacactgttctggaagatagctagatgaaaatctttgcactcacagagcttacatgccagtgagtgaagatcgatgataaataaagcaaatgcatcatatgttcacatttgataagtatatgccaaaaaatgaagccgggaaggaggacaaggcccatgggtgggtgttgaggtttttaaagtgtggtcaggaaaggccccactgataaggtaacatttgagcaagtctgaaaaaggcaaggggatctttggggctaacttcgggatccctgcactttatgtaagaatgtaaacctggagtctcatttaagaatgatcagcaatacgtttagaacatatgaactgaatgaaatggacattttttcttaatttacgtataaatccatatgattatacataaagttctgatgcattaataaaagcagccaaatagggccaaagagaaaaataacaggactctgtactggacctaactttatcattaattaggtaatattttcctcatttctttactgctgccattttcctcaccagtattccagagatggtcatagctcattactctaccaccaagaacctaaaaggaattagaatacagcagaattggcctcagtgaagagcttaaaattgttctcctcgtagaactggactattgatcattaccacgtgacgttggctctattactttctgttcccaatgtccttctagtggtttgaaaatgttaaaacaaaaaaaaaacaacccggtagcattgtcccttccccactgacaaacttatcaaatccagaagctttagagtttcgtctctaattatttttctcctgaacaaaattacccaagtcaaaacaaaatgtatttttagaattacggcagcatacgacctgaattttgtgagtttcgtggctttatcttaaatcaccatttccctaaaaatggtttctttctccttagaaatgctggtggcaacttgatgaaacagccaaatgcaccagggcaggtcactttcccattacactgattccacaattaaaaaaaaaaaaagaaaaaaaactcattgagatagctacagttctataggttaatttaaagcctcctttttctactcatttttgaaagcaaaattacattttactattttacataaccagtgaaaagacgttgaaagcctacagctcactgtttttggtgctctggaaatgttgagggtgggtttttaaccagtgatttttaacgtgcagtgaatttgttagacttttaaacaccagctaaggtagtcaaacttgatccccattaaaaatcaaggaattaggggtcgggggagggtttaggagtgatccagaatgacctcccagaattactgtgcgtacaactttatttttcagagttttcattggaatggtaagagttttatgaaagacagttttaaaacttattctgagttaaatattaatactttaaaaaattattgtactagacttatcgcagccttttgaaagtagcagagtttcatcataccacatatataacagagcataaattttctataatcaggcaccttttgctgcttttgagtaagactgttttcctgtttaagtgttaagcatcgccagacataaaaatctattctctcctctcgattgtagcatagcctgacagctctagatacagcatttctatgatgaaaaatgagtatccatcaggaaatctagaagactagccgtgttttctcagactccacctttgtttgcactctgttgcctgtgaggagctttctggcatgtgattatttacttcaaaactagagttccaagcacctacattaattattttatattgtgtgcagaatagtatatcttttaatgtcagatatgatacactgcacatattgcttttgcactcttaaaatttttgtactaaataatagaaaatatttatattctttgagtgtgagctttgaatagatggcattatcactttattgtttttttaacaaaaactttttctcaattattctattgcaatgttattctgagcaagtcctatgccaaatatcttgtataatgtttgtatggaagattaaattttactcttgtgtggtaagactatttcagttactgattttatagttggaatttgatattccagcacaaagtccacagtgtattcagaaatccaagttggtgtcatacatttcattttgatgtgaacttttctttgctttcctttgttctaagactccattttgcaataaacgttttgacagtaaa

SEQ ID NO: 448260 - DNA, 4854 bp, Homo sapiens
atcggtaccatcaatatcacacaatactgagatgatctaagaaggttataacaaaatgctcttcagaaatacctaagtgctgagaatttttagtactaaagagcacagctgctcaaagtaaagcctgagcagtgttctcagtaatgtatttgaaggaaaaataccctgatttgaaaccaacagcagatgttgcaaactttcataccactgctggccatggaagcctcttaacaacacactgtcatttaaggctgtgcttgtgctttatacaaagagaaagaggtggtcttaaggggatgcttccaggggggtgagttcatgcctctcctgtattttccagcaagtggggtattgtggtggtattgttttttagaggggcataataatccaggattctaagcatatgctcagctattttaaagaggaaattaaatattataaaagaaatagtaaagataagttatcctcacttaggcaaaagcacaggtcctttccatatcaagtttagcctaccagggttgttttttgttttaaccctgcttaataatgttggtgttttagaagtagatacaggcactgctctgaaaacctggctagccaaggatattctcagaatgttatcacctgtttgtcaaagcttgtttaaattataaaacacttttaattatatatatgaggcaaaagaactaagacttttttcaaactaaattagaaaggagtgtcattatttgactgttaaaccaaaatatttttggtgggtctttttatggaagtttaaagaaaggacatcatcatagatatgatctaacagtatttctaactatatttgatcattaaaagcctcttggaatttgaagcgtgacgtgtttctaatgccccttgagaggtgaaaaataccacataatgatcagtatgctgtgccagcttcatttggggagaaataactagtagaaagttctgggtgtgaggtgtacagcagtctaggtggcatagtgatgaagaaagggatcagagtctgactgtcactcagaatcctgggctcagttgcttgacaaccttgggaaaattgttttatctttgtgcgtctgtttgctgatcttcagcgtgggaataataacagtacctacttgaaaggatcattgtgcggattaaaagaaataatatatgtaaagcactttaacacagcaccaggcccacggaaagtggctaatgttagctactatgaatggtgccagtgaagacactgaaaaataagtgatttcagtaaccttctggaaagctatcagtttcaaataatattttctctgtagtatgagatgaaattaaaagtggatagctttcaggaaagataaagagaacatgcttagaatgtaagctaaacagattttttctgttgctctttgaaaactatgagccctggccagcttaacctggtctgaggtgagactaaacacaaaaacagtagataaatctctccctaaaagatggattcccccacatacccatgctactagtttctctgtctattcacacatatgtacaaatacatgaacacagcctgtctgtgctcagacatagagaagtactacctgacttgagtcaatgcacccaagaagaaaagcttggagtagagcagaagggagggcttgggactcctgtcctttccagcatgccctggggtgcagtggtcagccacctgaagagagagccaatagcatggggtttacaaggcaaagatagtcattcattcaacacatattcatagagctccttctctgtgccagacactgttctggaagatagctagatgaaaatctttgcactcacagagcttacatgccagtgagtgaagatcgatgataaataaagcaaatgcatcatatgttcacatttgataagtatatgccaaaaaatgaagccgggaaggaggacaaggcccatgggtgggtgttgaggtttttaaagtgtggtcaggaaaggccccactgataaggtaacatttgagcaagtctgaaaaaggcaaggggatctttggggctaacttcgggatccctgcactttatgtaagaatgtaaacctggagtctcatttaagaatgatcagcaatacgtttagaacatatgaactgaatgaaatggacattttttcttaatttacgtataaatccatatgattatacataaagttctgatgcattaataaaagcagccaaatagggccaaagagaaaaataacaggactctgtactggacctaactttatcattaattaggtaatattttcctcatttctttactgctgccattttcctcaccagtattccagagatggtcatagctcattactctaccaccaagaacctaaaaggaattagaatacagcagaattggcctcagtgaagagcttaaaattgttctcctcgtagaactggactattgatcattaccacgtgacgttggctctattactttctgttcccaatgtccttctagtggtttgaaaatgttaaaacatccctaaaatctaaatcatataatcagaattctatagtgtcccactctatctgtaaagatcatttggaagactttagactctattaattttaaaaggaatatttattagccatatgcagaatttctaatgatgatattgtacagcttctaattcacttttcagatcagtgtttgaaatggcaattatcagtgttggatttagttccaactacttgatttacaaaaatgtacatttagagaaggttaaaagaaacagtgagaaatgtaaacattcaaaatgataattgaatctctcagttgtgggaataattatcagagacatgcaactgaaaatgtctcacctttcatctttttttcttaattcataaagttatcttgtagaatttgatgagaccctcctagtcattctcaactggggcggtgctgtcaccgaatggtgtttgagagtgttggggctagggcacatttttggttgtcacagcaactggggtggcatttgctgcccagtgccaggaatagtaacattatgaatgccagggacagtgtgctcagtaaagtcttccatccaaaaggggcagggcacggtggctcacgcctgtaatcccagcactttgggaggccaaggtgggcggatcacctgatgtcaggggttcgagaccagcctggccaacatggtgaaaccctgttgctactaaaaatacaaaaattggctgggtgtggtgtcacatgccagtaaccccagctactagggaggctgaggcaggagaatcacttgaacccgggaggcagaggttgcagtgagctgagattgcaccactacactccagcctggatgacagagtgagacttcatctcaaaaaaaaaaaaaaaaaaccaaaaaaaaacaacccggtagcattgtcccttccccactgacaaacttatcaaatccagaagctttagagtttcgtctctaattatttttctcctgaacaaaattacccaagtcaaaacaaaatgtatttttagaattacggcagcatacgacctgaattttgtgagtttcgtggctttatcttaaatcaccatttccctaaaaatggtttctttctccttagaaatgctggtggcaacttgatgaaacagccaaatgcaccagggcaggtcactttcccattacactgattccacaattaaaaaaaaaaaaagaaaaaaaactcattgagatagctacagttctataggttaatttaaagcctcctttttctactcatttttgaaagcaaaattacattttactattttacataaccagtgaaaagacgttgaaagcctacagctcactgtttttggtgctctggaaatgttgagggtgggtttttaaccagtgatttttaacgtgcagtgaatttgttagacttttaaacaccagctaaggtagtcaaacttgatccccattaaaaatcaaggaattaggggtcgggggagggtttaggagtgatccagaatgacctcccagaattactgtgcgtacaactttatttttcagagttttcattggaatggtaagagttttatgaaagacagttttaaaacttattctgagttaaatattaatactttaaaaaattattgtactagacttatcgcagccttttgaaagtagcagagtttcatcataccacatatataacagagcataaattttctataatcaggcaccttttgctgcttttgagtaagactgttttcctgtttaagtgttaagcatcgccagacataaaaatctattctctcctctcgattgtagcatagcctgacagctctagatacagcatttctatgatgaaaaatgagtatccatcaggaaatctagaagactagccgtgttttctcagactccacctttgtttgcactctgttgcctgtgaggagctttctggcatgtgattatttacttcaaaactagagttccaagcacctacattaattattttatattgtgtgcagaatagtatatcttttaatgtcagatatgatacactgcacatattgcttttgcactcttaaaatttttgtactaaataatagaaaatatttatattctttgagtgtgagctttgaatagatggcattatcactttattgtttttttaacaaaaactttttctcaattattctattgcaatgttattctgagcaagtcctatgccaaatatcttgtataatgtttgtatggaagattaaattttactcttgtgtggtaagactatttctgaatacactgtggactttgtgctggaatatcaaattccaactataaaatcagtaactgaaatagtcttaccacacaaggtcgagc

SEQ ID NO: 448261 - DNA, 4769 bp, Homo sapiens
  misc_feature (4605)..(4607): n is a, c, g, or t
  misc_feature (4618)..(4619): n is a, c, g, or t
  misc_feature (4622)..(4622): n is a, c, g, or t
  misc_feature (4632)..(4632): n is a, c, g, or t
  misc_feature (4639)..(4639): n is a, c, g, or t
  misc_feature (4641)..(4641): n is a, c, g, or t
  misc_feature (4644)..(4644): n is a, c, g, or t
  misc_feature (4658)..(4658): n is a, c, g, or t
  misc_feature (4661)..(4662): n is a, c, g, or t
  misc_feature (4664)..(4664): n is a, c, g, or t
  misc_feature (4666)..(4666): n is a, c, g, or t
  misc_feature (4672)..(4672): n is a, c, g, or t
  misc_feature (4768)..(4768): n is a, c, g, or t
atcggtaccatcaatatcacacaatactgagatgatctaagaaggttataacaaaatgctcttcagaaatacctaagtgctgagaatttttagtactaaagagcacagctgctcaaagtaaagcctgagcagtgttctcagtaatgtatttgaaggaaaaataccctgatttgaaaccaacagcagatgttgcaaactttcataccactgctggccatggaagcctcttaacaacacactgtcatttaaggctgtgcttgtgctttatacaaagagaaagaggtggtcttaaggggatgcttccaggggggtgagttcatgcctctcctgtattttccagcaagtggggtattgtggtggtattgttttttagaggggcataataatccaggattctaagcatatgctcagctattttaaagaggaaattaaatattataaaagaaatagtaaagataagttatcctcacttaggcaaaagcacaggtcctttccatatcaagtttagcctaccagggttgttttttgttttaaccctgcttaataatgttggtgttttagaagtagatacaggcactgctctgaaaacctggctagccaaggatattctcagaatgttatcacctgtttgtcaaagcttgtttaaattataaaacacttttaattatatatatgaggcaaaagaactaagacttttttcaaactaaattagaaaggagtgtcattatttgactgttaaaccaaaatatttttggtgggtctttttatggaagtttaaagaaaggacatcatcatagatatgatctaacagtatttctaactatatttgatcattaaaagcctcttggaatttgaagcgtgacgtgtttctaatgccccttgagaggtgaaaaataccacataatgatcagtatgctgtgccagcttcatttggggagaaataactagtagaaagttctgggtgtgaggtgtacagcagtctaggtggcatagtgatgaagaaagggatcagagtctgactgtcactcagaatcctgggctcagttgcttgacaaccttgggaaaattgttttatctttgtgcgtctgtttgctgatcttcagcgtgggaataataacagtacctacttgaaaggatcattgtgcggattaaaagaaataatatatgtaaagcactttaacacagcaccaggcccacggaaagtggctaatgttagctactatgaatggtgccagtgaagacactgaaaaataagtgatttcagtaaccttctggaaagctatcagtttcaaataatattttctctgtagtatgagatgaaattaaaagtggatagctttcaggaaagataaagagaacatgcttagaatgtaagctaaacagattttttctgttgctctttgaaaactatgagccctggccagcttaacctggtctgaggtgagactaaacacaaaaacagtagataaatctctccctaaaagatggattcccccacatacccatgctactagtttctctgtctattcacacatatgtacaaatacatgaacacagcctgtctgtgctcagacatagagaagtactacctgacttgagtcaatgcacccaagaagaaaagcttggagtagagcagaagggagggcttgggactcctgtcctttccagcatgccctggggtgcagtggtcagccacctgaagagagagccaatagcatggggtttacaaggcaaagatagtcattcattcaacacatattcatagagctccttctctgtgccagacactgttctggaagatagctagatgaaaatctttgcactcacagagcttacatgccagtgagtgaagatcgatgataaataaagcaaatgcatcatatgttcacatttgataagtatatgccaaaaaatgaagccgggaaggaggacaaggcccatgggtgggtgttgaggtttttaaagtgtggtcaggaaaggccccactgataaggtaacatttgagcaagtctgaaaaaggcaaggggatctttggggctaacttcgggatccctgcactttatgtaagaatgtaaacctggagtctcatttaagaatgatcagcaatacgtttagaacatatgaactgaatgaaatggacattttttcttaatttacgtataaatccatatgattatacataaagttctgatgcattaataaaagcagccaaatagggccaaagagaaaaataacaggactctgtactggacctaactttatcattaattaggtaatattttcctcatttctttactgctgccattttcctcaccagtattccagagatggtcatagctcattactctaccaccaagaacctaaaaggaattagaatacagcagaattggcctcagtgaagagcttaaaattgttctcctcgtagaactggactattgatcattaccacgtgacgttggctctattactttctgttcccaatgtccttctagtggtttgaaaatgttaaaacatccctaaaatctaaatcatataatcagaattctatagtgtcccactctatctgtaaagatcatttggaagactttagactctattaattttaaaaggaatatttattagccatatgcagaatttctaatgatgatattgtacagcttctaattcacttttcagatcagtgtttgaaatggcaattatcagtgttggatttagttccaactacttgatttacaaaaatgtacatttagagaaggttaaaagaaacagtgagaaatgtaaacattcaaaatgataattgaatctctcagttgtgggaataattatcagagacatgcaactgaaaatgtctcacctttcatctttttttcttaattcataaagttatcttgtagaatttgatgagaccctcctagtcattctcaactggggcggtgctgtcaccgaatggtgtttgagagtgttggggctagggcacatttttggttgtcacagcaactggggtggcatttgctgcccagtgccaggaatagtaacattatgaatgccagggacagtgtgctcagtaaagtcttccatccaaaaggggcagggcacggtggctcacgcctgtaatcccagcactttgggaggccaaggtgggcggatcacctgatgtcaggggttcgagaccagcctggccaacatggtgaaaccctgttgctactaaaaatacaaaaattggctgggtgtggtgtcacatgccagtaaccccagctactagggaggctgaggcaggagaatcacttgaacccgggaggcagaggttgcagtgagctgagattgcaccactacactccagcctggatgacagagtgagacttcatctcaaaaaaaaaaaaaaaaaaccaaaaaaaaacaacccggtagcattgtcccttccccactgacaaacttatcaaatccagaagctttagagtttcgtctctaattatttttctcctgaacaaaattacccaagtcaaaacaaaatgtatttttagaattacggcagcatacgacctgaattttgtgagtttcgtggctttatcttaaatcaccatttccctaaaaatggtttctttctccttagaaatgctggtggcaacttgatgaaacagccaaatgcaccagggcaggtcactttcccattacactgattccacaattaaaaaaaaaaaaagaaaaaaaactcattgagatagctacagttctataggttaatttaaagcctcctttttctactcatttttgaaagcaaaattacattttactattttacataaccagtgaaaagacgttgaaagcctacagctcactgtttttggtgctctggaaatgttgagggtgggtttttaaccagtgatttttaacgtgcagtgaatttgttagacttttaaacaccagctaaggtagtcaaacttgatccccattaaaaatcaaggaattaggggtcgggggagggtttaggagtgatccagaatgacctcccagaattactgtgcgtacaactttatttttcagagttttcattggaatggtaagagttttatgaaagacagttttaaaacttattctgagttaaatattaatactttaaaaaattattgtactagacttatcgcagccttttgaaagtagcagagtttcatcataccacatatataacagagcataaattttctataatcaggcaccttttgctgcttttgagtaagactgttttcctgtttaagtgttaagcatcgccagacataaaaatctattctctcctctcgattgtagcatagcctgacagctctagatacagcatttctatgatgaaaaatgagtatccatcaggaaatctagaagactagccgtgttttctcagactccacctttgtttgcactctgttgcctgtgaggagctttctggcatgtgattatttacttcaaaactagagttccaagcacctacattaattattttatattgtgtgcagaatagtatatcttttaatgtcagatatgatacactgcacatattgcttttgcactcttaaaatttttgtactaaataatagaaaatatttatcttgggggggnnngaaaaagggtnnacnttggtttacnaaacttntnccnttctggggtcggcngcnncnantgttgngggggggaaaaacgggggggaaaccggttgtgtttccaccgtaacacgggaattgattgtcccctgaaaaaccacgtggtggtggagaggcatgcna

SEQ ID NO: 448262 - DNA, 4667 bp, Homo sapiens
atcggtaccatcaatatcacacaatactgagatgatctaagaaggttataacaaaatgctcttcagaaatacctaagtgctgagaatttttagtactaaagagcacagctgctcaaagtaaagcctgagcagtgttctcagtaatgtatttgaaggaaaaataccctgatttgaaaccaacagcagatgttgcaaactttcataccactgctggccatggaagcctcttaacaacacactgtcatttaaggctgtgcttgtgctttatacaaagagaaagaggtggtcttaaggggatgcttccaggggggtgagttcatgcctctcctgtattttccagcaagtggggtattgtggtggtattgttttttagaggggcataataatccaggattctaagcatatgctcagctattttaaagaggaaattaaatattataaaagaaatagtaaagataagttatcctcacttaggcaaaagcacaggtcctttccatatcaagtttagcctaccagggttgttttttgttttaaccctgcttaataatgttggtgttttagaagtagatacaggcactgctctgaaaacctggctagccaaggatattctcagaatgttatcacctgtttgtcaaagcttgtttaaattataaaacacttttaattatatatatgaggcaaaagaactaagacttttttcaaactaaattagaaaggagtgtcattatttgactgttaaaccaaaatatttttggtgggtctttttatggaagtttaaagaaaggacatcatcatagatatgatctaacagtatttctaactatatttgatcattaaaagcctcttggaatttgaagcgtgacgtgtttctaatgccccttgagaggtgaaaaataccacataatgatcagtatgctgtgccagcttcatttggggagaaataactagtagaaagttctgggtgtgaggtgtacagcagtctaggtggcatagtgatgaagaaagggatcagagtctgactgtcactcagaatcctgggctcagttgcttgacaaccttgggaaaattgttttatctttgtgcgtctgtttgctgatcttcagcgtgggaataataacagtacctacttgaaaggatcattgtgcggattaaaagaaataatatatgtaaagcactttaacacagcaccaggcccacggaaagtggctaatgttagctactatgaatggtgccagtgaagacactgaaaaataagtgatttcagtaaccttctggaaagctatcagtttcaaataatattttctctgtagtatgagatgaaattaaaagtggatagctttcaggaaagataaagagaacatgcttagaatgtaagctaaacagattttttctgttgctctttgaaaactatgagccctggccagcttaacctggtctgaggtgagactaaacacaaaaacagtagataaatctctccctaaaagatggattcccccacatacccatgctactagtttctctgtctattcacacatatgtacaaatacatgaacacagcctgtctgtgctcagacatagagaagtactacctgacttgagtcaatgcacccaagaagaaaagcttggagtagagcagaagggagggcttgggactcctgtcctttccagcatgccctggggtgcagtggtcagccacctgaagagagagccaatagcatggggtttacaaggcaaagatagtcattcattcaacacatattcatagagctccttctctgtgccagacactgttctggaagatagctagatgaaaatctttgcactcacagagcttacatgccagtgagtgaagatcgatgataaataaagcaaatgcatcatatgttcacatttgataagtatatgccaaaaaatgaagccgggaaggaggacaaggcccatgggtgggtgttgaggtttttaaagtgtggtcaggaaaggccccactgataaggtaacatttgagcaagtctgaaaaaggcaaggggatctttggggctaacttcgggatccctgcactttatgtaagaatgtaaacctggagtctcatttaagaatgatcagcaatacgtttagaacatatgaactgaatgaaatggacattttttcttaatttacgtataaatccatatgattatacataaagttctgatgcattaataaaagcagccaaatagggccaaagagaaaaataacaggactctgtactggacctaactttatcattaattaggtaatattttcctcatttctttactgctgccattttcctcaccagtattccagagatggtcatagctcattactctaccaccaagaacctaaaaggaattagaatacagcagaattggcctcagtgaagagcttaaaattgttctcctcgtagaactggactattgatcattaccacgtgacgttggctctattactttctgttcccaatgtccttctagtggtttgaaaatgttaaaacatccctaaaatctaaatcatataatcagaattctatagtgtcccactctatctgtaaagatcatttggaagactttagactctattaattttaaaaggaatatttattagccatatgcagaatttctaatgatgatattgtacagcttctaattcacttttcagatcagtgtttgaaatggcaattatcagtgttggatttagttccaactacttgatttacaaaaatgtacatttagagaaggttaaaagaaacagtgagaaatgtaaacattcaaaatgataattgaatctctcagttgtgggaataattatcagagacatgcaactgaaaatgtctcacctttcatctttttttcttaattcataaagttatcttgtagaatttgatgagaccctcctagtcattctcaactggggcggtgctgtcaccgaatggtgtttgagagtgttggggctagggcacatttttggttgtcacagcaactggggtggcatttgctgcccagtgccaggaatagtaacattatgaatgccagggacagtgtgctcagtaaagtcttccatccaaaaggggcagggcacggtggctcacgcctgtaatcccagcactttgggaggccaaggtgggcggatcacctgatgtcaggggttcgagaccagcctggccaacatggtgaaaccctgttgctactaaaaatacaaaaattggctgggtgtggtgtcacatgccagtaaccccagctactagggaggctgaggcaggagaatcacttgaacccgggaggcagaggttgcagtgagctgagattgcaccactacactccagcctggatgacagagtgagacttcatctcaaaaaaaaaaaaaaaaaaccaaaaaaaaacaacccggtagcattgtcccttccccactgacaaacttatcaaatccagaagctttagagtttcgtctctaattatttttctcctgaacaaaattacccaagtcaaaacaaaatgtatttttagaattacggcagcatacgacctgaattttgtgagtttcgtggctttatcttaaatcaccatttccctaaaaatggtttctttctccttagaaatgctggtggcaacttgatgaaacagccaaatgcaccagggcaggtcactttcccattacactgattccacaattaaaaaaaaaaaaagaaaaaaaactcattgagatagctacagttctataggttaatttaaagcctcctttttctactcatttttgaaagcaaaattacattttactattttacataaccagtgaaaagacgttgaaagcctacagctcactgtttttggtgctctggaaatgttgagggtgggtttttaaccagtgatttttaacgtgcagtgaatttgttagacttttaaacaccagctaaggtagtcaaacttgatccccattaaaaatcaaggaattaggggtcgggggagggtttaggagtgatccagaatgacctcccagaattactgtgcgtacaactttatttttcagagttttcattggaatggtaagagttttatgaaagacagttttaaaacttattctgagttaaatattaatactttaaaaaattattgtactagacttatcgcagccttttgaaagtagcagagtttcatcataccacatatataacagagcataaattttctataatcaggcaccttttgctgcttttgagtaagactgttttcctgtttaagtgttaagcatcgccagacataaaaatctattctctcctctcgattgtagcatagcctgacagctctagatacagcatttctatgatgaaaaatgagtatccatcaggaaatctagaagactagccgtgttttctcagactccacctttgtttgcactctgttgcctgtgaggagctttctggcatgtgattatttacttcaaaactagagttccaagcacctacattaattattttatgtttggaaaacacaaaagtaacttgtttatctcagtctgtacaaaaacagtaaggaggcagaaagccaagcactgcatttttaggccaatcacatttacatgaccgtaatttcttatcaattctacttttatttttgcttacagaaaaacggggggagaattaagccaaagaagta

SEQ ID NO: 448263 - DNA, 4181 bp, Homo sapiens
atcggtaccatcaatatcacacaatactgagatgatctaagaaggttataacaaaatgctcttcagaaatacctaagtgctgagaatttttagtactaaagagcacagctgctcaaagtaaagcctgagcagtgttctcagtaatgtatttgaaggaaaaataccctgatttgaaaccaacagcagatgttgcaaactttcataccactgctggccatggaagcctcttaacaacacactgtcatttaaggctgtgcttgtgctttatacaaagagaaagaggtggtcttaaggggatgcttccaggggggtgagttcatgcctctcctgtattttccagcaagtggggtattgtggtggtattgttttttagaggggcataataatccaggattctaagcatatgctcagctattttaaagaggaaattaaatattataaaagaaatagtaaagataagttatcctcacttaggcaaaagcacaggtcctttccatatcaagtttagcctaccagggttgttttttgttttaaccctgcttaataatgttggtgttttagaagtagatacaggcactgctctgaaaacctggctagccaaggatattctcagaatgttatcacctgtttgtcaaagcttgtttaaattataaaacacttttaattatatatatgaggcaaaagaactaagacttttttcaaactaaattagaaaggagtgtcattatttgactgttaaaccaaaatatttttggtgggtctttttatggaagtttaaagaaaggacatcatcatagatatgatctaacagtatttctaactatatttgatcattaaaagcctcttggaatttgaagcgtgacgtgtttctaatgccccttgagaggtgaaaaataccacataatgatcagtatgctgtgccagcttcatttggggagaaataactagtagaaagttctgggtgtgaggtgtacagcagtctaggtggcatagtgatgaagaaagggatcagagtctgactgtcactcagaatcctgggctcagttgcttgacaaccttgggaaaattgttttatctttgtgcgtctgtttgctgatcttcagcgtgggaataataacagtacctacttgaaaggatcattgtgcggattaaaagaaataatatatgtaaagcactttaacacagcaccaggcccacggaaagtggctaatgttagctactatgaatggtgccagtgaagacactgaaaaataagtgatttcagtaaccttctggaaagctatcagtttcaaataatattttctctgtagtatgagatgaaattaaaagtggatagctttcaggaaagataaagagaacatgcttagaatgtaagctaaacagattttttctgttgctctttgaaaactatgagccctggccagcttaacctggtctgaggtgagactaaacacaaaaacagtagataaatctctccctaaaagatggattcccccacatacccatgctactagtttctctgtctattcacacatatgtacaaatacatgaacacagcctgtctgtgctcagacatagagaagtactacctgacttgagtcaatgcacccaagaagaaaagcttggagtagagcagaagggagggcttgggactcctgtcctttccagcatgccctggggtgcagtggtcagccacctgaagagagagccaatagcatggggtttacaaggcaaagatagtcattcattcaacacatattcatagagctccttctctgtgccagacactgttctggaagatagctagatgaaaatctttgcactcacagagcttacatgccagtgagtgaagatcgatgataaataaagcaaatgcatcatatgttcacatttgataagtatatgccaaaaaatgaagccgggaaggaggacaaggcccatgggtgggtgttgaggtttttaaagtgtggtcaggaaaggccccactgataaggtaacatttgagcaagtctgaaaaaggcaaggggatctttggggctaacttcgggatccctgcactttatgtaagaatgtaaacctggagtctcatttaagaatgatcagcaatacgtttagaacatatgaactgaatgaaatggacattttttcttaatttacgtataaatccatatgattatacataaagttctgatgcattaataaaagcagccaaatagggccaaagagaaaaataacaggactctgtactggacctaactttatcattaattaggtaatattttcctcatttctttactgctgccattttcctcaccagtattccagagatggtcatagctcattactctaccaccaagaacctaaaaggaattagaatacagcagaattggcctcagtgaagagcttaaaattgttctcctcgtagaactggactattgatcattaccacgtgacgttggctctattactttctgttcccaatgtccttctagtggtttgaaaatgttaaaacatccctaaaatctaaatcatataatcagaattctatagtgtcccactctatctgtaaagatcatttggaagactttagactctattaattttaaaaggaatatttattagccatatgcagaatttctaatgatgatattgtacagcttctaattcacttttcagatcagtgtttgaaatggcaattatcagtgttggatttagttccaactacttgatttacaaaaatgtacatttagagaaggttaaaagaaacagtgagaaatgtaaacattcaaaatgataattgaatctctcagttgtgggaataattatcagagacatgcaactgaaaatgtctcacctttcatctttttttcttaattcataaagttatcttgtagaatttgatgagaccctcctagtcattctcaactggggcggtgctgtcaccgaatggtgtttgagagtgttggggctagggcacatttttggttgtcacagcaactggggtggcatttgctgcccagtgccaggaatagtaacattatgaatgccagggacagtgtgctcagtaaagtcttccatccaaaaggggcagggcacggtggctcacgcctgtaatcccagcactttgggaggccaaggtgggcggatcacctgatgtcaggggttcgagaccagcctggccaacatggtgaaaccctgttgctactaaaaatacaaaaattggctgggtgtggtgtcacatgccagtaaccccagctactagggaggctgaggcaggagaatcacttgaacccgggaggcagaggttgcagtgagctgagattgcaccactacactccagcctggatgacagagtgagacttcatctcaaaaaaaaaaaaaaaaaaccaaaaaaaaacaacccggtagcattgtcccttccccactgacaaacttatcaaatccagaagctttagagtttcgtctctaattatttttctcctgaacaaaattacccaagtcaaaacaaaatgtatttttagaattacggcagcatacgacctgaattttgtgagtttcgtggctttatcttaaatcaccatttccctaaaaatggtttctttctccttagaaatgctggtggcaacttgatgaaacagccaaatgcaccagggcaggtcactttcccattacactgattccacaattaaaaaaaaaaaaagaaaaaaaactcattgagatagctacagttctataggttaatttaaagcctcctttttctactcatttttgaaagcaaaattacattttactattttacataaccagtgaaaagacgttgaaagcctacagctcactgtttttggtgctctggaaatgttgagggtgggtttttaaccagtgatttttaacgtgcagtgaatttgttagacttttaaacaccagctaaggtagtcaaacttgatccccattaaaaatcaaggaattaggggtcgggggagggtttaggagtgatccagaatgacctcccagaattactgtgcgtacaactttatttttcagagttttcattcggatcgagctaactctgtgtaccgaaggtgcaaatacttctagtgggccaatatctatccttgatcgtagtcacgtccgaccaagtatcgcagtcttttgttaagcagcttcgttggaatgcctccgct

SEQ ID NO: 448264 - DNA, 2923 bp, Homo sapiens
gggctccggcctcagaggctgtgacaatggactatgactttaaagtgaagctgagcagcgagcgggagcgggtcgaggacctgtttgaatacgagggctgcaaagttggccgaggcacttatggtcacgtctacaaagccaagaggaaagatgggaaggatgataaagactatgctttaaaacaaatagaaggaactgggatctctatgtcggcatgtagagaaatagcattacttcgagagcttaagcatccaaacgtcatttctcttcaaaaggtgtttctgtctcatgctgataggaaggtgtggcttctgtttgactatgctgaacatgacctctggcatataatcaagtttcacagagcttctaaagcaaacaagaagccagttcagttacctcggggaatggtgaagtcactattatatcagatcctagatggtattcactacctgcatgctaactgggtgttgcacagagatttgaaacctgctaatattttagttatgggtgaaggtcctgagcgaggaagagtaaaaattgctgacatgggctttgcccgattatttaattcacctttgaagcctttagcagatttggatccagtggttgttacattctggtaccgagcccctgaactacttcttggagcaaggcattataccaaagctattgatatttgggctatagggtgtatatttgcagaactactaacgtcagaaccaatatttcactgtcgacaagaggacatcaaaactagtaatccttatcaccatgaccagctggacagaatattcaatgtaatgggatttcctgcagataaagattgggaagatataaaaaagatgcctgaacattcaacattaatgaaagatttcagaagaaatacgtataccaactgcagccttatcaagtatatggaaaaacataaagttaaaccagatagtaaagcattccacttgcttcagaagctgcttaccatggacccaataaagcgaattacctcagaacaggctatgcaggacccctatttcttagaagacccacttcctacatcagacgtttttgccggttgtcaaatcccttacccaaaacgagaatttttaacggaagaagaacctgatgacaaaggagacaaaaagaaccagcagcagcagcagggcaataaccacactaatggaactggccacccagggaatcaagacagcagtcacacacagggacccccgttgaagaaagtgagagttgttcctcctaccactacctcaggtggacttatcatgacctcagactatcagcgttccaatccacatgctgcctatcccaaccctggaccaagcacatcacagccgcagagcagcatgggatactcagctacctcccagcagcctccacagtactcacatcagacacatcggtactgagctgcatcggaatcttgtccatgcactgttgcgaatgctgcagggctgactgtgcagctctctgcgggaacctggtatgggccatgagaatgtactgtacaaccacatcttcaaaatgtccagtagccaagttccaccacttttcacagattggggtagtggcttccaagttgtacctattttggagttagacttgaaaagaaagtgctagcacagtttgtgttgtggatttgctacttccatagtttacttgacatggttcagactgaccaatgcatttttttcagtgacagtctgtagcagttgaagctgtgaatgtgctaggggcaagcatttgtctttgtatgtggtgaattttttcagtgtaacaacattatctgaccaatagtacacacacagacacaaagtttaactggtacttgaaacatacagtatatgttaacgaaataaccaagactcgaaatgagattattttggtacacctttctttttagtgtcttatcagtgggctgattcattttctacattaatcagtgttttctgaccaagaatattgcttggatttttttgaaagtacaaaaagccacatagtttttccagaaaggtttcaaaactcccaaagattaacttccaacttataagtttgtttttattttcaatctatgacttgactggtattaaagctgctatttgatagtaattaaatatgttgtcattgatataaacctgtttggttcagcaaacaaactaaaatgattgtcatagacagtgttttatttttcctgttggtgttgctgatttgtgagcatgctttaagatgaaaaaagcatgaatgataacttccttaaaaaggtgcggcatccaattcaaatattttcgtcctgattttaaagctggttggtgtagtgctattaaaatttcgttcagttaattttccttttgaaaacttgttcgcacgttgtttagggtgcccttacttcagcaaaggagaaggagtaggagagccttagaatttttgaggaaaaaaaaacctataacatacaatgtactgtatcaaactattttacatgaatgacacaagtattctgaataaaaaataattgaacattgttaaaaacaaggtgttatgtaataaatttatttttcataaatcaaaaaaaaaaaaaacaaacacactgtcgttgcgcgctcggggcaccgaaaaggttgtaaaaccactcgcttgcgcgcgggcccagtatgtatggtcaaatgtgcaagcggcccaaaggaaccgggcactacaaggccgtggtctccccaataaaaaccgcggggaccggcgcttgcaaactcaaggacctctgcggcatagggcacaaagggaccaggacataatcaccccccgtgggagaccacaacaccagatcagtacagcagccagcgacaaccagcacaagcagcacagagcaccactgcacgacaacgcactgacacaacagcagcaccaaacaacacacaga

SEQ ID NO: 448265 - DNA, 2520 bp, Homo sapiens
gggctccggcctcagaggctgtgacaatggactatgactttaaagtgaagctgagcagcgagcgggagcgggtcgaggacctgtttgaatacgagggctgcaaagttggccgaggcacttatggtcacgtctacaaagccaagaggaaagatgggaaggatgataaagactatgctttaaaacaaatagaaggaactgggatctctatgtcggcatgtagagaaatagcattacttcgagagcttaagcatccaaacgtcatttctcttcaaaaggtgtttctgtctcatgctgataggaaggtgtggcttctgtttgactatgctgaacatgacctctggcatataatcaagtttcacagagcttctaaagcaaacaagaagccagttcagttacctcggggaatggtgaagtcactattatatcagatcctagatggtattcactacctgcatgctaactgggtgttgcacagagatttgctgacatgggctttgcccgattatttaattcacctttgaagcctttagcagatttggatccagtggttgttacattctggtaccgagcccctgaactacttcttggagcaaggcattataccaaagctattgatatttgggctatagggtgtatatttgcagaactactaacgtcagaaccaatatttcactgtcgacaagaggacatcaaaactagtaatccttatcaccatgaccagctggacagaatattcaatgtaatgggatttcctgcagataaagattgggaagatataaaaaagatgcctgaacattcaacattaatgaaagatttcagaagaaatacgtataccaactgcagccttatcaagtatatggaaaaacataaagttaaaccagatagtaaagcattccacttgcttcagaagctgcttaccatggacccaataaagcgaattacctcagaacaggctatgcaggacccctatttcttagaagacccacttcctacatcagacgtttttgccggttgtcaaatcccttacccaaaacgagaatttttaacggaagaagaacctgatgacaaaggagacaaaaagaaccagcagcagcagcagggcaataaccacactaatggaactggccacccagggaatcaagacagcagtcacacacagggacccccgttgaagaaagtgagagttgttcctcctaccactacctcaggtggacttatcatgacctcagactatcagcgttccaatccacatgctgcctatcccaaccctggaccaagcacatcacagccgcagagcagcatgggatactcagctacctcccagcagcctccacagtactcacatcagacacatcggtactgagctgcatcggaatcttgtccatgcactgttgcgaatgctgcagggctgactgtgcagctctctgcgggaacctggtatgggccatgagaatgtactgtacaaccacatcttcaaaatgtccagtagccaagttccaccacttttcacagattggggtagtggcttccaagttgtacctattttggagttagacttgaaaagaaagtgctagcacagtttgtgttgtggatttgctacttccatagtttacttgacatggttcagactgaccaatgcatttttttcagtgacagtctgtagcagttgaagctgtgaatgtgctaggggcaagcatttgtctttgtatgtggtgaattttttcagtgtaacaacattatctgaccaatagtacacacacagacacaaagtttaactggtacttgaaacatacagtatatgttaacgaaataaccaagactcgaaatgagattattttggtacacctttctttttagtgtcttatcagtgggctgattcattttctacattaatcagtgttttctgaccaagaatattgcttggatttttttgaaagtacaaaaagccacatagtttttccagaaaggtttcaaaactcccaaagattaacttccaacttataagtttgtttttattttcaatctatgacttgactggtattaaagctgctatttgatagtaattaaatatgttgtcattgatataaacctgtttggttcagcaaacaaactaaaatgattgtcatagacagtgttttatttttcctgttggtgttgctgatttgtgagcatgctttaagatgaaaaaagcatgaatgataacttccttaaaaaggtgcggcatccaattcaaatattttcgtcctgattttaaagctggttggtgtagtgctattaaaatttcgttcagttaattttccttttgaaaacttgttcgcacgttgtttagggtgcccttacttcagcaaaggagaaggagtaggagagccttagaatttttgaggaaaaaaaaacctataacatacaatgtactgtatcaaactattttacatgaatgacacaagtattctgaataaaaaataattgaacattgttaaaaacaaggtgttatgtaataaatttatttttcataaatcaaaa

SEQ ID NO: 448266 - DNA, 1118 bp, Homo sapiens
gggctccggcctcagaggctgtgacaatggactatgactttaaagtgaagctgagcagcgagcgggagcgggtcgaggacctgtttgaatacgagggctgcaaagttggccgaggcacttatggtcacgtctacaaagccaagaggaaagatgggaaggatgataaagactatgctttaaaacaaatagaaggaactgggatctctatgtcggcatgtagagaaatagcattacttcgagagcttaagcatccaaacgtcatttctcttcaaaaggtgtttctgtctcatgctgataggaaggtgtggcttctgtttgactatgctgaacatgacctctggcatataatcaagtttcacagagcttctaaagcaaacaagaagccagttcagttacctcggggaatggtgaagtcactattatatcagatcctagatggtattcactacctgcatgctaactgggtgttgcacagagatttgctgacatgggctttgcccgattatttaattcacctttgaagcctttagcagatttggatccagtggttgttacattctggtaccgagcccctgaactacttcttggagcaaggcattataccaaagctattgatatttgggctatagggtgtatatttgcagaactactaacgtcagaaccaatatttcactgtcgacaagaggacatcaaaactagtaatccttatcaccatgaccagctggacagaatattcaatgtaatgggatttcctgcagataaagattgggaagatataaaaaagatgcctgaacattcaacattaatgaaagatttcagaagaaatacgtataccaactgcagccttatcaagtatatggaaaaacataaagttaaaccagatagtaaagcattccacttgcttcagaagctgcttaccatggacccaataaagcgaattacctcagaacaggctatgcaggacccctatttcttagaagacccacttcctacatcagacgtttttgccggttgtcaaatcccttacccaaaacgagaatttttaacggattcagaagattatacccatgcttgccccaaacacttggacaccttattaactcatggacaataccctg

SEQ ID NO: 448267 - DNA, 301 bp, Homo sapiens
cgtttttgccggttgtcaaatcccttacccaaaacgagaatttttaacggaagaagaacctgatgacaaaggagacaaagtaagtattaaagtactgttagcagcttcttgtttcgtgaatgcctccataacattttccattgtgggtatattttgttctccctctgagctgaactttttctgtttaaccaattgagaagaaccagcagcagcagcagggcaataaccacactaatggaactggccacccagggaatcaagacagcagtcacacacagggacccccgttgaagaaagtgag

SEQ ID NO: 448268 - DNA, 2578 bp, Homo sapiens
gggctccggcctcagaggctgtgacaatggactatgactttaaagtgaagctgagcagcgagcgggagcgggtcgaggacctgtttgaatacgagggctgcaaagttggccgaggcacttatggtcacgtctacaaagccaagaggaaagatgggaaggatgataaagactatgctttaaaacaaatagaaggaactgggatctctatgtcggcatgtagagaaatagcattacttcgagagcttaagcatccaaacgtcatttctcttcaaaaggtgtttctgtctcatgctgataggaaggtgtggcttctgtttgactatgctgaacatgacctctggcatataatcaagtttcacagagcttctaaagcaaacaagaagccagttcagttacctcggggaatggtgaagtcactattatatcagatcctagatggtattcactacctgcatgctaactgggtgttgcacagagatttgaaacctgctaatattttagttatgggtgaaggtcctgagcgaggaagagtaaaaattgctgacatgggctttgcccgattatttaattcacctttgaagcctttagcagatttggatccagtggttgttacattctggtaccgagcccctgaactacttcttggagcaaggcattataccaaagctattgatatttgggctatagggtgtatatttgcagaactactaacgtcagaaccaatatttcactgtcgacaagaggacatcaaaactagtaatccttatcaccatgaccagctggacagaatattcaatgtaatgggatttcctgcagataaagattgggaagatataaaaaagatgcctgaacattcaacattaatgaaagatttcagaagaaatacgtataccaactgcagccttatcaagtatatggaaaaacataaagttaaaccagatagtaaagcattccacttgcttcagaagctgcttaccatggacccaataaagcgaattacctcagaacaggctatgcaggacccctatttcttagaagacccacttcctacatcagacgtttttgccggttgtcaaatcccttacccaaaacgagaatttttaacggaagaagaacctgatgacaaaggagacaaaaagaaccagcagcagcagcagggcaataaccacactaatggaactggccacccagggaatcaagacagcagtcacacacagggacccccgttgaagaaagtgagagttgttcctcctaccactacctcaggtggacttatcatgacctcagactatcagcgttccaatccacatgctgcctatcccaaccctggaccaagcacatcacagccgcagagcagcatgggatactcagctacctcccagcagcctccacagtactcacatcagacacatcggtactgagctgcatcggaatcttgtccatgcactgttgcgaatgctgcagggctgactgtgcagctctctgcgggaacctggtatgggccatgagaatgtactgtacaaccacatcttcaaaatgtccagtagccaagttccaccacttttcacagattggggtagtggcttccaagttgtacctattttggagttagacttgaaaagaaagtgctagcacagtttgtgttgtggatttgctacttccatagtttacttgacatggttcagactgaccaatgcatttttttcagtgacagtctgtagcagttgaagctgtgaatgtgctaggggcaagcatttgtctttgtatgtggtgaattttttcagtgtaacaacattatctgaccaatagtacacacacagacacaaagtttaactggtacttgaaacatacagtatatgttaacgaaataaccaagactcgaaatgagattattttggtacacctttctttttagtgtcttatcagtgggctgattcattttctacattaatcagtgttttctgaccaagaatattgcttggatttttttgaaagtacaaaaagccacatagtttttccagaaaggtttcaaaactcccaaagattaacttccaacttataagtttgtttttattttcaatctatgacttgactggtattaaagctgctatttgatagtaattaaatatgttgtcattgatataaacctgtttggttcagcaaacaaactaaaatgattgtcatagacagtgttttatttttcctgttggtgttgctgatttgtgagcatgctttaagatgaaaaaagcatgaatgataacttccttaaaaaggtgcggcatccaattcaaatattttcgtcctgattttaaagctggttggtgtagtgctattaaaatttcgttcagttaattttccttttgaaaacttgttcgcacgttgtttagggtgcccttacttcagcaaaggagaaggagtaggagagccttagaatttttgaggaaaaaaaaacctataacatacaatgtactgtatcaaactattttacatgaatgacacaagtattctgaataaaaaataattgaacattgttaaaaacaaggtgttatgtaataaatttatttttcataaatcaaaa

SEQ ID NO: 448269 - DNA, 2434 bp, Homo sapiens
gggctccggcctcagaggctgtgacaatggactatgactttaaagtgaagctgagcagcgagcgggagcgggtcgaggacctgtttgaatacgagggctgcaaagttggccgaggcacttatggtcacgtctacaaagccaagaggaaagatgggaaggatgataaagactatgctttaaaacaaatagaaggaactgggatctctatgtcggcatgtagagaaatagcattacttcgagagcttaagcatccaaacgtcatttctcttcaaaaggtgtttctgtctcatgctgataggaaggtgtggcttctgtttgactatgctgaacatgacctctggcatataatcaagtttcacagagcttctaaagcaaacaagaagccagttcagttacctcggggaatggtgaagtcactattatatcagatcctagatggtattcactacctgcatgctaactgggtgttgcacagagatttgaaacctgctaatattttagttatgggtgaaggtcctgagcgaggaagagtaaaaattgctgacatgggctttgcccgattatttaattcacctttgaagcctttagcagatttggatccagtggttgttacattctggtaccgagcccctgaactacttcttggagcaaggcattataccaaagctattgataaagattgggaagatataaaaaagatgcctgaacattcaacattaatgaaagatttcagaagaaatacgtataccaactgcagccttatcaagtatatggaaaaacataaagttaaaccagatagtaaagcattccacttgcttcagaagctgcttaccatggacccaataaagcgaattacctcagaacaggctatgcaggacccctatttcttagaagacccacttcctacatcagacgtttttgccggttgtcaaatcccttacccaaaacgagaatttttaacggaagaagaacctgatgacaaaggagacaaaaagaaccagcagcagcagcagggcaataaccacactaatggaactggccacccagggaatcaagacagcagtcacacacagggacccccgttgaagaaagtgagagttgttcctcctaccactacctcaggtggacttatcatgacctcagactatcagcgttccaatccacatgctgcctatcccaaccctggaccaagcacatcacagccgcagagcagcatgggatactcagctacctcccagcagcctccacagtactcacatcagacacatcggtactgagctgcatcggaatcttgtccatgcactgttgcgaatgctgcagggctgactgtgcagctctctgcgggaacctggtatgggccatgagaatgtactgtacaaccacatcttcaaaatgtccagtagccaagttccaccacttttcacagattggggtagtggcttccaagttgtacctattttggagttagacttgaaaagaaagtgctagcacagtttgtgttgtggatttgctacttccatagtttacttgacatggttcagactgaccaatgcatttttttcagtgacagtctgtagcagttgaagctgtgaatgtgctaggggcaagcatttgtctttgtatgtggtgaattttttcagtgtaacaacattatctgaccaatagtacacacacagacacaaagtttaactggtacttgaaacatacagtatatgttaacgaaataaccaagactcgaaatgagattattttggtacacctttctttttagtgtcttatcagtgggctgattcattttctacattaatcagtgttttctgaccaagaatattgcttggatttttttgaaagtacaaaaagccacatagtttttccagaaaggtttcaaaactcccaaagattaacttccaacttataagtttgtttttattttcaatctatgacttgactggtattaaagctgctatttgatagtaattaaatatgttgtcattgatataaacctgtttggttcagcaaacaaactaaaatgattgtcatagacagtgttttatttttcctgttggtgttgctgatttgtgagcatgctttaagatgaaaaaagcatgaatgataacttccttaaaaaggtgcggcatccaattcaaatattttcgtcctgattttaaagctggttggtgtagtgctattaaaatttcgttcagttaattttccttttgaaaacttgttcgcacgttgtttagggtgcccttacttcagcaaaggagaaggagtaggagagccttagaatttttgaggaaaaaaaaacctataacatacaatgtactgtatcaaactattttacatgaatgacacaagtattctgaataaaaaataattgaacattgttaaaaacaaggtgttatgtaataaatttatttttcataaatcaaaa

SEQ ID NO: 448270 - DNA, 2303 bp, Homo sapiens
tacacaactttttttccttagtctgtatactttctgctgtcactagcataacagaaaagacgaatggcttttgttttaaactgagggcacttttacaaaagtcatctttccatttatttttctttcagaaaaaagaatttgggttttgagcttttttaaaaaaaaaagacaaacactttccttgactttgagaaataatttaagtcaaagaatctgctctatgctaaccaagagatagagcacagcaaagatctgccagccccaggcctctacctagtggcctggaaattcaagtattcttattggtggaggccatttgtttctgattagaagctgtctaaacctcctactcctcaactcaaaggaaaacacagagcataccatggccaagaaagttgcagtgattggagctggtgtgagtggcctctcctccatcaaatgctgtgtggatgaggacctggagcccacctgctttgagagaagtgatgacattgggggattatggaagtttactgaatcttccaaagatgggatgaccagggtctataagtcattagtgacaaatgtctgtaaggaaatgtcatgttacagtgacttccctttccacgaagattatcctaatttcatgaaccatgaaaaattttgggactatctccaagaatttgctgagcactttgacctcctgaaatacattcagtttaagaccactgtgtgcagcataacgaagcgtccagacttctccgaaactggtcagtgggatgttgtcacagagacagagggcaagcaaaatagagctgtctttgatgctgttatggtttgcactggacatttcctgaatccccatttacctttggaagcctttcctggaattcataagtttaaaggtcagatcctgcatagtcaagagtacaagatcccagaaggctttcagggcaaacgcgtcttggtgattggtcttgggaacactggaggagacattgctgtggaactcagtcgaacggcagctcaggtacttctcagtactagaactggtacctgggttcttgggcgctcttcagattggggctatccttataatatgatggttacaagaagatgctgtagttttattgcacaagttctgccttcacgttttctaaactggattcaagaaaggaagttgaataagagatttaatcatgaggattatggattaagtattaccaaagggaaaaaagcaaaattcattgtgaatgatgagctgccaaactgtatcctctgtggggcaatcactatgaaaaccagcgtgattgaatttacagaaacctctgctgtctttgaagatgggacagtggaagaaaacattgatgttgtgatcttcactacaggatatacattttcttttccattttttgaagaacctcttaaaagcctctgtacaaagaagatatttctatacaagcaagtctttcccttaaacctagagagagcgacattagccatcatcggccttatcggccttaaaggatccatcttatcaggcacagagctccaagcacgatgggtcacaagagtattcaaaggactctgtaagatacctccatcccaaaaattgatgatggaggctactgaaaaggaacagctcattaaaaggggagtgtttaaagacaccagcaaagacaaatttgactacattgcctacatggatgatatcgctgcctgcataggcacaaagcccagcatcccacttctgttcctcaaggatcccagactagcttgggaagttttctttggaccatgtactccttatcagtaccgcctcatgggccctggaaaatgggatggagccagaaatgccatcctgacccagtgggacagaacattgaaacctttaaaaactcgaattgtccctgattcctccaagcctgcctccatgtcacattatttaaaagcctggggggcacctgtcctacttgcctctcttctacttatctgtaaatcttcacttttcttgaaattggtgagagataaactacaggacagaatgtccccttacctagtaagtctttggcgaggatgaacctgattgttacaagggttacacaaagtcatgctaattctatctccaagtatcttgtgcatccctcctctgctctccatcataactgctattagccaaattcaggcccagtcatctcctatctgaattattgtattatcttcttctttgttttcagtaccctctttcttgccaccctttccaatgcatcttctaccctgctacctcagtgattattctaaaataaatatatatgatatggttt

SEQ ID NO: 448271 - DNA, 1908 bp, Homo sapiens
tacacaactttttttccttagtctgtatactttctgctgtcactagcataacagaaaagacgaatggcttttgttttaaactgagggcacttttacaaaagtcatctttccatttatttttctttcagaaaaaagaatttgggttttgagcttttttaaaaaaaaaagacaaacactttccttgactttgagaaataatttaagtcaaagaatctgctctatgctaaccaagagatagagcacagcaaagatctgccagccccaggcctctacctagtggcctggaaattcaagtattcttattggtggaggccatttgtttctgattagaagctgtctaaacctcctactcctcaactcaaaggaaaacacagagcataccatggccaagaaagttgcagtgattggagctggtgtgagtggcctctcctccatcaaatgctgtgtggatgaggacctggagcccacctgctttgagagaagtgatgacattgggggattatggaagtttactgaatcttccaaagatgggatgaccagggtctataagtcattagtgacaaatgtctgtaaggaaatgtcatgttacagtgacttccctttccacgaagattatcctaatttcatgaaccatgaaaaattttgggactatctccaagaatttgctgagcactttgacctcctgaaatacattcagtttaaggactctgtaagatacctccatcccaaaaattgatgatggaggctactgaaaaggaacagctcattaaaaggggagtgtttaaagacaccagcaaagacaaatttgactacattgcctacatggatgatatcgctgcctgcataggcacaaagcccagcatcccacttctgttcctcaaggatcccagactagcttgggaagttttctttggaccatgtactccttatcagtaccgcctcatgggccctggaaaatgggatggagccagaaatgccatcctgacccagtgggacagaacattgaaacctttaaaaactcgaattgtccctgattcctccaagcctgcctccatgtcacattatttaaaagcctggggggcacctgtcctacttgcctctcttctacttatctgtaaatcttcacttttcttgaaattggtgagagataaactacaggacagaatgtccccttacctagtaagtctttggcgaggatgaacctgattgttacaagggttacacaaagtcatgctaattctatctccaagtatcttgtgcatccctcctctgctctccatcataactgctattagccaaattcaggcccagtcatctcctatctgaattattgtattatcttcttctttgttttcagtaccctctttcttgccaccctttccaatgcatcttctaccctgctacctcagtgattattctaaaataaatatatatgatatggtttagctgtgtccccacccaaatctcatcttgaattgtagctcccataattcccacatgccgtgggaggtaggtaattgaatcatgggggcaggtcttctcccatactgttctcatggtagtgaataagtctcactatatctgatggttttataaatgacagttcccctgcacaagctctctcgtgtctaccaccatgtaagacgtgtctttgctccttcttcaccttccaccatgattgtgaggcctccccagccatgtggaactgtgagtctgttaaacctcccttcctttataaattacccagtcttgggtatgtctttattagcagcaatagaacagactaatacaatatggtttattactctaaagtaaatatatggtttataaatatataggaacctctgattcccaggaaggtctcagtaggaacaaaatggcattcaaattaagttgagaaaatttttt

SEQ ID NO: 448272 - DNA, 533 bp, Homo sapiens
tgaagcaactgctttaaaagggcacattcatatggaattcaagatttcctatgtttttaacaaggcagtttgtactaaatccacatctgggctcacagcatcccagggagagggaggttatatgctttttctacttcctgccacaagcagcataagcaaaggactgccatagttgtgggacttccctttttccacagaccctatccctgcgtagtgagaaattataactttagacatttcagactttctgatccttcactcctctcaggaattcataagtttaaaggtcagatcctgcatagtcaagagtacaagatcccagaaggctttcagggcaaacgcgtcttggtgattggtcttgggaacactggaggagacattgctgtggaactcagtcgaacggcagctcaggtacatcatctctgaattaatgcccctaatcccatcatcagttatgatggctggaaagagatattcaaaactatgaagtacattggccaattgctaaattatgcagacacacagtaagtggg

SEQ ID NO: 448273 - DNA, 2767 bp, Homo sapiens
tacacaactttttttccttagtctgtatactttctgctgtcactagcataacagaaaagacgaatggcttttgttttaaactgagggcacttttacaaaagtcatctttccatttatttttctttcagaaaaaagaatttgggttttgagcttttttaaaaaaaaaagacaaacactttccttgactttgagaaataatttaagtcaaagaatctgctctatgctaaccaagagatagagcacagcaaagatctgccagccccaggcctctacctagtggcctggaaattcaagtattcttattggtggaggccatttgtttctgattagaagctgtctaaacctcctactcctcaactcaaaggaaaacacagagcataccatggccaagaaagttgcagtgattggagctggtgtgagtggcctctcctccatcaaatgctgtgtggatgaggacctggagcccacctgctttgagagaagtgatgacattgggggattatggaagtttactgaatcttccaaagatgggatgaccagggtctataagtcattagtgacaaatgtctgtaaggaaatgtcatgttacagtgacttccctttccacgaagattatcctaatttcatgaaccatgaaaaattttgggactatctccaagaatttgctgagcactttgacctcctgaaatacattcagtttaagaccactgtgtgcagcataacgaagcgtccagacttctccgaaactggtcagtgggatgttgtcacagagacagagggcaagcaaaatagagctgtctttgatgctgttatggtttgcactggacatttcctgaatccccatttacctttggaagcctttcctggaattcataagtttaaaggtcagatcctgcatagtcaagagtacaagatcccagaaggctttcagggcaaacgcgtcttggtgattggtcttgggaacactggaggagacattgctgtggaactcagtcgaacggcagctcaggtacttctcagtactagaactggtacctgggttcttgggcgctcttcagattggggctatccttataatatgatggttacaagaagatgctgtagttttattgcacaagttctgccttcacgttttctaaactggattcaagaaaggaagttgaataagagatttaatcatgaggattatggattaagtattaccaaagggaaaaaagcaaaattcattgtgaatgatgagctgccaaactgtatcctctgtggggcaatcactatgaaaaccagcgtgattgaatttacagaaacctctgctgtctttgaagatgggacagtggaagaaaacattgatgttgtgatcttcactacaggatatacattttcttttccattttttgaagaacctcttaaaagcctctgtacaaagaagatatttctatacaagcaagtctttcccttaaacctagagagagcgacattagccatcatcggccttatcggccttaaaggatccatcttatcaggcacagagctccaagcacgatgggtcacaagagtattcaaaggactctgtaagatacctccatcccaaaaattgatgatggaggctactgaaaaggaacagctcattaaaaggggagtgtttaaagacaccagcaaagacaaatttgactacattgcctacatggatgatatcgctgcctgcataggcacaaagcccagcatcccacttctgttcctcaaggatcccagactagcttgggaagttttctttggaccatgtactccttatcagtaccgcctcatgggccctggaaaatgggatggagccagaaatgccatcctgacccagtgggacagaacattgaaacctttaaaaactcgaattgtccctgattcctccaagcctgcctccatgtcacattatttaaaagcctggggggcacctgtcctacttgcctctcttctacttatctgtaaatcttcacttttcttgaaattggtgagagataaactacaggacagaatgtccccttacctagtaagtctttggcgaggatgaacctgattgttacaagggttacacaaagtcatgctaattctatctccaagtatcttgtgcatccctcctctgctctccatcataactgctattagccaaattcaggcccagtcatctcctatctgaattattgtattatcttcttctttgttttcagtaccctctttcttgccaccctttccaatgcatcttctaccctgctacctcagtgattattctaaaataaatatatatgatatggtttagctgtgtccccacccaaatctcatcttgaattgtagctcccataattcccacatgccgtgggaggtaggtaattgaatcatgggggcaggtcttctcccatactgttctcatggtagtgaataagtctcactatatctgatggttttataaatgacagttcccctgcacaagctctctcgtgtctaccaccatgtaagacgtgtctttgctccttcttcaccttccaccatgattgtgaggcctccccagccatgtggaactgtgagtctgttaaacctcccttcctttataaattacccagtcttgggtatgtctttattagcagcaatagaacagactaatacaatatggtttattactctaaagtaaatatatggtttataaatatataggaacctctgattcccaggaaggtctcagtaggaacaaaatggcattcaaattaagttgagaaaatttttt

SEQ ID NO: 448274 - DNA, 1418 bp, Homo sapiens
tacacaactttttttccttagtctgtatactttctgctgtcactagcataacagaaaagacgaatggcttttgttttaaactgagggcacttttacaaaagtcatctttccatttatttttctttcagaaaaaagaatttgggttttgagcttttttaaaaaaaaaagacaaacactttccttgactttgagaaataatttaagtcaaagaatctgctctatgctaaccaagagatagagcacagcaaagatctgccagccccaggcctctacctagtggcctggaaattcaagtattcttattggtggaggccatttgtttctgattagaagctgtctaaacctcctactcctcaactcaaaggaaaacacagagcataccatggccaagaaagttgcagtgattggagctggtgtgagtggcctctcctccatcaaatgctgtgtggatgaggacctggagcccacctgctttgagagaagtgatgacattgggggattatggaagtttactgaatcttccaaagatgggatgaccagggtctataagtcattagtgacaaatgtctgtaaggaaatgtcatgttacagtgacttccctttccacgaagattatcctaatttcatgaaccatgaaaaattttgggactatctccaagaatttgctgagcactttgacctcctgaaatacattcagtttaagaccactgtgtgcagcataacgaagcgtccagacttctccgaaactggtcagtgggatgttgtcacagagacagagggcaagcaaaatagagctgtctttgatgctgttatggtttgcactggacatttcctgaatccccatttacctttggaagcctttcctggaattcataagtttaaaggtcagatcctgcatagtcaagagtacaagatcccagaaggctttcagggcaaacgcgtcttggtgattggtcttgggaacactggaggagacattgctgtggaactcagtcgaacggcagctcaggtacttctcagtactagaactggtacctgggttcttgggcgctcttcagattggggctatccttataatatgatggttacaagaagatgctgtagttttattgcacaagttctgccttcacgttttctaaactggattcaagaaaggaagttgaataagagatttaatcatgaggattatggattaagtattaccaaagggtacttacattttttatttagtagaaaaaatattaaatcaatatttatcattacattttattcagaattcaaaatgttcaataattgtaatattgcctttgtttattctactctaaatccatttccctaaaacactgttcatcaggtaccacagcagtttttaaaatatatgtattctctttctggtggcaaaagtagtgattcatgag

SEQ ID NO: 448275 - DNA, 2514 bp, Homo sapiens
ggctgagccggaccgagccgagaggacccgagtggggccgaggccagtagccccggggccctgagcagaggccgtagcttgcgccgcacccgcggccaggcggagcaaaagatgccggcctctgctgcgcggccccgcccgggtcccgggcagcctacagcctcgcccttcccgctactgctgctggcggtgctgagcggcccggtatccggccgcgtcccccgctcggtgcccagaacctcgcttccaatctctgaggctgactcctgtctcacccggttcgcagtccctcacacatacaattactctgttctccttgtggatcctgcctcccacacactttatgttggcgcccgggacaccatcttcgctttatccctgcccttctcaggggagagaccccgcaggattgactggatggttcctgaggctcacagacagaactgtaggaagaaaggcaagaaagagggggacctcgggggccggaagaccctccagcagagatggacgacgtttttgaaagctgacctgctctgtccagggcctgagcatggccgggcctccagtgtcctgcaggatgttgctgtgcttcgacctgagcttggggcagggactcccatcttttatggcatcttttcttcccagtgggagggggctactatctctgctgtctgtgccttccgaccacaagacattcggacagtgctgaatggtcccttcagagaactaaaacatgactgcaacagaggactgcctgtcgtggacaatgatgtgccccagcccagacctggagagtgcatcaccaacaacatgaagctccggcactttggctcatctctctccctgcctgaccgcgtactcaccttcatccgggaccacccactcatggacaggccagtgtttccagctgatggccaccccctgctggtcactacagatacagcctatctcagagtcgtggcccacagggtgaccagcctctcagggaaagagtatgatgtgctctacctggggacagaggatggacacctccaccgagcagtgcggatcggagctcagctcagcgttcttgaagatctggccttattcccagagccacagccagttgagaacatgaaattgtaccacagctggctcctggttggctcccgtactgaggtgacacaagtgaatacaaccaactgtggccgtctccagagctgctcagagtgcatcctggcccaggacccagtctgtgcctggagcttccggctggatgagtgtgtggcccatgccggggagcaccgagggttggtccaagacatagagtcagcagatgtctcctctttgtgtcctaaagagcctggagaacgtccagtagtgtttgaagttcccgtggctacagctgcgcatgtggtcttgccatgttctccaagctcagcatgggcatcctgtgtgtggcaccagcccagtggagtgactgcactcaccccccggcgggatggactggaggtggtggtgaccccaggggccatgggcgcttatgcctgtgaatgtcaggagggtggggcagcccatgtggtagcagcttacagcttggtatggggcagccagcgagatgctccgagccgggcccacacagtgggggcgggactggctggcttcttcttggggattctcgcagcatccctgactctcattctgattggtcggcgtcagcagcgacggcgacagagggaacttctggctagagacaaggtgggcctggacctgggggctccaccttctgggaccacaagctacagccaagaccctccctccccctctcctgaagatgagcggttgccgctggccctggccaagaggggcagtggctttggtggattctcaccacccttcctgcttgatccttgcccaagcccagcccacattcggctaactggggctcctctagccacatgtgatgaaacatccatctagagctgggcaaatgaccactagtgtataagtgatcactggaacggagtgaccactgagatgctgggggtcactgggcctggaagaccatcccagcctctgagttctctttgagtatgagtgattacttggattttagtatctgttctctctgagcctggatgggcttggggccagacctttgcctgattcctgattcccatgagaaatcagaactgctttctgcagcaaatcagggcttccccctaacatctgaactcctgtaaaccttcatccctggccccctatcttgggcccattagttttggggatggggcacagggcatagctatgactttgctttctggttggagcctggccggaaggaagagccctggaggtggttgggggcaaatgtgccctgagtccttggggtggttctgcttattcttcaagtttatctgaatctgtggggagtgcatgatccccatgttgcaatatggagtctctgccctgagatcttccccatctcagttttccttccatgaaagagtacgtgtaaatacatagtgttcataa

SEQ ID NO: 448276 - DNA, 4062 bp, Homo sapiens
ggctgagccggaccgagccgagaggacccgagtggggccgaggccagtagccccggggccctgagcagaggccgtagcttgcgccgcacccgcggccaggcggagcaaaagatgccggcctctgctgcgcggccccgcccgggtcccgggcagcctacagcctcgcccttcccgctactgctgctggcggtgctgagcggcccggtatccggccgcgtcccccgctcggtgcccagaacctcgcttccaatctctgaggctgactcctgtctcacccggttcgcagtccctcacacatacaattactctgttctccttgtggatcctgcctcccacacactttatgttggcgcccgggacaccatcttcgctttatccctgcccttctcaggggagagaccccgcaggattgactggatggttcctgaggctcacagacagaactgtaggaagaaaggcaagaaagaggacgaatgtcacaattttgtccagattctcgccattgccaatgcctctcacctcctcacttgtggcaccttcgcttttgatccgaagtgcggggttattgatgtgtccaggttccagcaggttgaaagacttgagagtggccgggggaaatgtccttttgagccagctcagcggtcagcagctgtaatggctgggggggtcctctatgctgccactgtgaaaaactacctggggacggagccaattatcaccagagcagtgggtcgtgccgaggactggattcggacagataccttgccttcctggctgaacgccccagcctttgtcgcagccgtggccttgagcccagccgaatggggggatgaagatggagacgacgaaatctacttcttctttacggagacttcccgagcatttgactcatacgagcgcattaaagtcccacgggtggcccgtgtgtgtgcgggggacctcgggggccggaagaccctccagcagagatggacgacgtttttgaaagctgacctgctctgtccagggcctgagcatggccgggcctccagtgtcctgcaggatgttgctgtgcttcgacctgagcttggggcagggactcccatcttttatggcatcttttcttcccagtgggagggggctactatctctgctgtctgtgccttccgaccacaagacattcggacagtgctgaatggtcccttcagagaactaaaacatgactgcaacagaggactgcctgtcgtggacaatgatgtgccccagcccagacctggagagaggatggacacctccaccgagcagtgcggatcggagctcagctcagcgttcttgaagatctggccttattcccagagccacagccagttgagaacatgaaattgtaccacagctggctcctggttggctcccgtactgaggtgacacaagtgaatacaaccaactgtggccgtctccagagctgctcagagtgcatcctggcccaggacccagtctgtgcctggagcttccggctggatgagtgtgtggcccatgccggggagcaccgagggttggtccaagacatagagtcagcagatgtctcctctttgtgtcctaaagagcctggagaacgtccagtagtgtttgaagttcccgtggctacagctgcgcatgtggtcttgccatgttctccaagctcagcatgggcatcctgtgtgtggcaccagcccagtggagtgactgcactcaccccccggcgggatggactggaggtggtggtgaccccaggggccatgggcgcttatgcctgtgaatgtcaggagggtggggcagcccatgtggtagcagcttacagcttggtatggggcagccagcgagatgctccgagccgggcccacacagtgggggcgggactggctggcttcttcttggggattctcgcagcatccctgactctcattctgattggtcggcgtcagcagcgacggcgacagagggaacttctggctagagacaaggtgggcctggacctgggggctccaccttctgggaccacaagctacagccaagaccctccctccccctctcctgaagatgagcggttgccgctggccctggccaagaggggcagtggctttggtggattctcaccacccttcctgcttgatccttgcccaagcccagcccacattcggctaactggggctcctctagccacatgtgatgaaacatccatctagagctgggcaaatgaccactagtgtataagtgatcactggaacggagtgaccactgagatgctgggggtcactgggcctggaagaccatcccagcctctgagttctctttgagtatgagtgattacttggattttagtatctgttctctctgagcctggatgggcttggggccagacctttgcctgattcctgattcccatgagaaatcagaactgctttctgcagcaaatcagggcttccccctaacatctgaactcctgtaaaccttcatccctggccccctatcttgggcccattagttttggggatggggcacagggcatagctatgactttgctttctggttggagcctggccggaaggaagagccctggaggtggttgggggcaaatgtgccctgagtccttggggtggttctgcttattcttcaagtttatctgaatctgtggggagtgcatgatccccatgttgcaatatggagtctctgccctgagatcttccccatctcagttttccttccatgaaagagtacgtgtaaatacatagtgttcataagagacctggccacatgtgcatgaatgactgggccgatgcttaggaatatttatgagggatggggagggagacaattggaatgggggcgttgcctgcagaactttagaccctgtagccatagagggaatggcgttcctttctaaaaggaactgaaacactgcccctctccccattgccccacaaccttactctaaatttgagtagagaaaagctcctaaagtgaccttccgggtgggaagggcagcagtacacatgaccccatccttttctttgtttttaccccctggctgccaccactgccatgtcacagctgctttctctggctggagtgtaggctgtaccccatttccttggctcccattaaaaatcaacaacattctaatgattagggaacaacagaaggggaacagtcataggatatacgagcagtataaagatacgtttgcaatcagtgactactcagggtgacacccttgccctaaagcaggagtcccccctacctggggtccatggactccctgaaattgtatgcaaaatgttgtttgtacatgtgtgtctgtatgtctctgtggggaggttttatggcttttgtcagattttcaaggccttaacaaagttaaaggaccactgccctgaggttactgcactgaggccaagttaggatggcatcactctgtggcagctctccctggacttgccctgcctggaacagggtgatttgctggaatggagttaccactgagatgccaaaggttgctgggtctggaagactgttgtggcctctcagttctctttgagtctgactgactgtggccagtccctggactggtagctgctggaggccttcttgtttctccagtccctggaagctgagctctatgtgtatttgatgacattgtcagctcttaccaaacgtcaagacctcttcctgcttgaccactcgcacatggctctaggcttctcctgctgagtcctggtcttggcctgtgaatgtgcctcgttcatccctggtgcttgagcccctcaagctccagtcaatgatccagtccttcccctttgaagttttctgctctactttccttggcagcagcctgtgaactactcaaaagagtccccttgggtttggaattatcagtggctttgccactagtaaatgtgtgatcttcggcaagtaacctaacctagggacatcagtttactcatctgcgaagtggggataataaaacctacctcagggttgcttcaaggattaaatgagaaaatatgtcaacaataaagacctgtctgtaccaataaaaaaaaaaat

SEQ ID NO: 448277 - DNA, 4540 bp, Homo sapiens
ggctgagccggaccgagccgagaggacccgagtggggccgaggccagtagccccggggccctgagcagaggccgtagcttgcgccgcacccgcggccaggcggagcaaaagatgccggcctctgctgcgcggccccgcccgggtcccgggcagcctacagcctcgcccttcccgctactgctgctggcggtgctgagcggcccggtatccggccgcgtcccccgctcggtgcccagaacctcgcttccaatctctgaggctgactcctgtctcacccggttcgcagtccctcacacatacaattactctgttctccttgtggatcctgcctcccacacactttatgttggcgcccgggacaccatcttcgctttatccctgcccttctcaggggagagaccccgcaggattgactggatggttcctgaggctcacagacagaactgtaggaagaaaggcaagaaagaggacgaatgtcacaattttgtccagattctcgccattgccaatgcctctcacctcctcacttgtggcaccttcgcttttgatccgaagtgcggggttattgatgtgtccaggttccagcaggttgaaagacttgagagtggccgggggaaatgtccttttgagccagctcagcggtcagcagctgtaatggctgggggggtcctctatgctgccactgtgaaaaactacctggggacggagccaattatcaccagagcagtgggtcgtgccgaggactggattcggacagataccttgccttcctggctgaacgccccagcctttgtcgcagccgtggccttgagcccagccgaatggggggatgaagatggagacgacgaaatctacttcttctttacggagacttcccgagcatttgactcatacgagcgcattaaagtcccacgggtggcccgtgtgtgtgcgggggacctcgggggccggaagaccctccagcagagatggacgacgtttttgaaagctgacctgctctgtccagggcctgagcatggccgggcctccagtgtcctgcaggatgttgctgtgcttcgacctgagcttggggcagggactcccatcttttatggcatcttttcttcccagtgggagggggctactatctctgctgtctgtgccttccgaccacaagacattcggacagtgctgaatggtcccttcagagaactaaaacatgactgcaacagaggactgcctgtcgtggacaatgatgtgccccagcccagacctggagagtgcatcaccaacaacatgaagctccggcactttggctcatctctctccctgcctgaccgcgtactcaccttcatccgggaccacccactcatggacaggccagtgtttccagctgatggccaccccctgctggtcactacagatacagcctatctcagagtcgtggcccacagggtgaccagcctctcagggaaagagtatgatgtgctctacctggggacaggtatatttaatggtcaagcaggctgcctacctagtgcatacacattctcgtcacagagagggtactgtaatacatataggtctgagtcccaggcacaggggcaattatgtaattattcttgttcctttcctgtcccctagaggatggacacctccaccgagcagtgcggatcggagctcagctcagcgttcttgaagatctggccttattcccagagccacagccagttgagaacatgaaattgtaccacgtgagttgtagattttggagagtctattggggagacatctgagtccagagccagtttgtgagccctgaggtctgggagatccagtgtattccccttccccactccgtttttatagagctggctcctggttggctcccgtactgaggtgacacaagtgaatacaaccaactgtggccgtctccagagctgctcagagtgcatcctggcccaggacccagtctgtgcctggagcttccggctggatgagtgtgtggcccatgccggggagcaccgagggttggtccaagacatagagtcagcagatgtctcctctttgtgtcctaaagagcctggagaacgtccagtagtgtttgaagttcccgtggctacagctgcgcatgtggtcttgccatgttctccaagctcagcatgggcatcctgtgtgtggcaccagcccagtggagtgactgcactcaccccccggcgggatggactggaggtggtggtgaccccaggggccatgggcgcttatgcctgtgaatgtcaggagggtggggcagcccatgtggtagcagcttacagcttggtatggggcagccagcgagatgctccgagccgggcccacacagtgggggcgggactggctggcttcttcttggggattctcgcagcatccctgactctcattctgattggtcggcgtcagcagcgacggcgacagagggaacttctggctagagacaaggtgggcctggacctgggggctccaccttctgggaccacaagctacagccaagaccctccctccccctctcctgaagatgagcggttgccgctggccctggccaagaggggcagtggctttggtggattctcaccacccttcctgcttgatccttgcccaagcccagcccacattcggctaactggggctcctctagccacatgtgatgaaacatccatctagagctgggcaaatgaccactagtgtataagtgatcactggaacggagtgaccactgagatgctgggggtcactgggcctggaagaccatcccagcctctgagttctctttgagtatgagtgattacttggattttagtatctgttctctctgagcctggatgggcttggggccagacctttgcctgattcctgattcccatgagaaatcagaactgctttctgcagcaaatcagggcttccccctaacatctgaactcctgtaaaccttcatccctggccccctatcttgggcccattagttttggggatggggcacagggcatagctatgactttgctttctggttggagcctggccggaaggaagagccctggaggtggttgggggcaaatgtgccctgagtccttggggtggttctgcttattcttcaagtttatctgaatctgtggggagtgcatgatccccatgttgcaatatggagtctctgccctgagatcttccccatctcagttttccttccatgaaagagtacgtgtaaatacatagtgttcataagagacctggccacatgtgcatgaatgactgggccgatgcttaggaatatttatgagggatggggagggagacaattggaatgggggcgttgcctgcagaactttagaccctgtagccatagagggaatggcgttcctttctaaaaggaactgaaacactgcccctctccccattgccccacaaccttactctaaatttgagtagagaaaagctcctaaagtgaccttccgggtgggaagggcagcagtacacatgaccccatccttttctttgtttttaccccctggctgccaccactgccatgtcacagctgctttctctggctggagtgtaggctgtaccccatttccttggctcccattaaaaatcaacaacattctaatgattagggaacaacagaaggggaacagtcataggatatacgagcagtataaagatacgtttgcaatcagtgactactcagggtgacacccttgccctaaagcaggagtcccccctacctggggtccatggactccctgaaattgtatgcaaaatgttgtttgtacatgtgtgtctgtatgtctctgtggggaggttttatggcttttgtcagattttcaaggccttaacaaagttaaaggaccactgccctgaggttactgcactgaggccaagttaggatggcatcactctgtggcagctctccctggacttgccctgcctggaacagggtgatttgctggaatggagttaccactgagatgccaaaggttgctgggtctggaagactgttgtggcctctcagttctctttgagtctgactgactgtggccagtccctggactggtagctgctggaggccttcttgtttctccagtccctggaagctgagctctatgtgtatttgatgacattgtcagctcttaccaaacgtcaagacctcttcctgcttgaccactcgcacatggctctaggcttctcctgctgagtcctggtcttggcctgtgaatgtgcctcgttcatccctggtgcttgagcccctcaagctccagtcaatgatccagtccttcccctttgaagttttctgctctactttccttggcagcagcctgtgaactactcaaaagagtccccttgggtttggaattatcagtggctttgccactagtaaatgtgtgatcttcggcaagtaacctaacctagggacatcagtttactcatctgcgaagtggggataataaaacctacctcagggttgcttcaaggattaaatgagaaaatatgtcaacaataaagacctgtctgtaccaataaaaaaaaaaat

SEQ ID NO: 448278 - DNA, 4285 bp, Homo sapiens
ggctgagccggaccgagccgagaggacccgagtggggccgaggccagtagccccggggccctgagcagaggccgtagcttgcgccgcacccgcggccaggcggagcaaaagatgccggcctctgctgcgcggccccgcccgggtcccgggcagcctacagcctcgcccttcccgctactgctgctggcggtgctgagcggcccggtatccggccgcgtcccccgctcggtgcccagaacctcgcttccaatctctgaggctgactcctgtctcacccggttcgcagtccctcacacatacaattactctgttctccttgtggatcctgcctcccacacactttatgttggcgcccgggacaccatcttcgctttatccctgcccttctcaggggagagaccccgcaggattgactggatggttcctgaggctcacagacagaactgtaggaagaaaggcaagaaagaggacgaatgtcacaattttgtccagattctcgccattgccaatgcctctcacctcctcacttgtggcaccttcgcttttgatccgaagtgcggggttattgatgtgtccaggttccagcaggttgaaagacttgagagtggccgggggaaatgtccttttgagccagctcagcggtcagcagctgtaatggctgggggggtcctctatgctgccactgtgaaaaactacctggggacggagccaattatcaccagagcagtgggtcgtgccgaggactggattcggacagataccttgccttcctggctgaacgccccagcctttgtcgcagccgtggccttgagcccagccgaatggggggatgaagatggagacgacgaaatctacttcttctttacggagacttcccgagcatttgactcatacgagcgcattaaagtcccacgggtggcccgtgtgtgtgcgggggacctcgggggccggaagaccctccagcagagatggacgacgtttttgaaagctgacctgctctgtccagggcctgagcatggccgggcctccagtgtcctgcaggatgttgctgtgcttcgacctgagcttggggcagggactcccatcttttatggcatcttttcttcccagtgggagggggctactatctctgctgtctgtgccttccgaccacaagacattcggacagtgctgaatggtcccttcagagaactaaaacatgactgcaacagaggactgcctgtcgtggacaatgatgtgccccagcccagacctggagagtgcatcaccaacaacatgaagctccggcactttggctcatctctctccctgcctgaccgcgtactcaccttcatccgggaccacccactcatggacaggccagtgtttccagctgatggccaccccctgctggtcactacagatacagcctatctcagagtcgtggcccacagggtgaccagcctctcagggaaagagtatgatgtgctctacctggggacagaggatggacacctccaccgagcagtgcggatcggagctcagctcagcgttcttgaagatctggccttattcccagagccacagccagttgagaacatgaaattgtaccacagctggctcctggttggctcccgtactgaggtgacacaagtgaatacaaccaactgtggccgtctccagagctgctcagagtgcatcctggcccaggacccagtctgtgcctggagcttccggctggatgagtgtgtggcccatgccggggagcaccgagggttggtccaagacatagagtcagcagatgtctcctctttgtgtcctaaagagcctggagaacgtccagtagtgtttgaagttcccgtggctacagctgcgcatgtggtcttgccatgttctccaagctcagcatgggcatcctgtgtgtggcaccagcccagtggagtgactgcactcaccccccggcgggatggactggaggtggtggtgaccccaggggccatgggcgcttatgcctgtgaatgtcaggagggtggggcagcccatgtggtagcagcttacagcttggtatggggcagccagcgagatgctccgagccgggcccacacagtgggggcgggactggctggcttcttcttggggattctcgcagcatccctgactctcattctgattggtcggcgtcagcagcgacggcgacagagggaacttctggctagagacaaggtgggcctggacctgggggctccaccttctgggaccacaagctacagccaagaccctccctccccctctcctgaagatgagcggttgccgctggccctggccaagaggggcagtggctttggtggattctcaccacccttcctgcttgatccttgcccaagcccagcccacattcggctaactggggctcctctagccacatgtgatgaaacatccatctagagctgggcaaatgaccactagtgtataagtgatcactggaacggagtgaccactgagatgctgggggtcactgggcctggaagaccatcccagcctctgagttctctttgagtatgagtgattacttggattttagtatctgttctctctgagcctggatgggcttggggccagacctttgcctgattcctgattcccatgagaaatcagaactgctttctgcagcaaatcagggcttccccctaacatctgaactcctgtaaaccttcatccctggccccctatcttgggcccattagttttggggatggggcacagggcatagctatgactttgctttctggttggagcctggccggaaggaagagccctggaggtggttgggggcaaatgtgccctgagtccttggggtggttctgcttattcttcaagtttatctgaatctgtggggagtgcatgatccccatgttgcaatatggagtctctgccctgagatcttccccatctcagttttccttccatgaaagagtacgtgtaaatacatagtgttcataagagacctggccacatgtgcatgaatgactgggccgatgcttaggaatatttatgagggatggggagggagacaattggaatgggggcgttgcctgcagaactttagaccctgtagccatagagggaatggcgttcctttctaaaaggaactgaaacactgcccctctccccattgccccacaaccttactctaaatttgagtagagaaaagctcctaaagtgaccttccgggtgggaagggcagcagtacacatgaccccatccttttctttgtttttaccccctggctgccaccactgccatgtcacagctgctttctctggctggagtgtaggctgtaccccatttccttggctcccattaaaaatcaacaacattctaatgattagggaacaacagaaggggaacagtcataggatatacgagcagtataaagatacgtttgcaatcagtgactactcagggtgacacccttgccctaaagcaggagtcccccctacctggggtccatggactccctgaaattgtatgcaaaatgttgtttgtacatgtgtgtctgtatgtctctgtggggaggttttatggcttttgtcagattttcaaggccttaacaaagttaaaggaccactgccctgaggttactgcactgaggccaagttaggatggcatcactctgtggcagctctccctggacttgccctgcctggaacagggtgatttgctggaatggagttaccactgagatgccaaaggttgctgggtctggaagactgttgtggcctctcagttctctttgagtctgactgactgtggccagtccctggactggtagctgctggaggccttcttgtttctccagtccctggaagctgagctctatgtgtatttgatgacattgtcagctcttaccaaacgtcaagacctcttcctgcttgaccactcgcacatggctctaggcttctcctgctgagtcctggtcttggcctgtgaatgtgcctcgttcatccctggtgcttgagcccctcaagctccagtcaatgatccagtccttcccctttgaagttttctgctctactttccttggcagcagcctgtgaactactcaaaagagtccccttgggtttggaattatcagtggctttgccactagtaaatgtgtgatcttcggcaagtaacctaacctagggacatcagtttactcatctgcgaagtggggataataaaacctacctcagggttgcttcaaggattaaatgagaaaatatgtcaacaataaagacctgtctgtaccaataaaaaaaaaaat

SEQ ID NO: 448279 - DNA, 2786 bp, Homo sapiens
ggctgagccggaccgagccgagaggacccgagtggggccgaggccagtagccccggggccctgagcagaggccgtagcttgcgccgcacccgcggccaggcggagcaaaagatgccggcctctgctgcgcggccccgcccgggtcccgggcagcctacagcctcgcccttcccgctactgctgctggcggtgctgagcggcccggtatccggccgcgtcccccgctcggtgcccagaacctcgcttccaatctctgaggctgactcctgtctcacccggttcgcagtccctcacacatacaattactctgttctccttgtggatcctgcctcccacacactttatgttggcgcccgggacaccatcttcgctttatccctgcccttctcaggggagagaccccgcaggattgactggatggttcctgaggctcacagacagaactgtaggaagaaaggcaagaaagagggggggtcctctatgctgccactgtgaaaaactacctggggacggagccaattatcaccagagcagtgggtcgtgccgaggactggattcggacagataccttgccttcctggctgaacgccccagcctttgtcgcagccgtggccttgagcccagccgaatggggggatgaagatggagacgacgaaatctacttcttctttacggagacttcccgagcatttgactcatacgagcgcattaaagtcccacgggtggcccgtgtgtgtgcgggggacctcgggggccggaagaccctccagcagagatggacgacgtttttgaaagctgacctgctctgtccagggcctgagcatggccgggcctccagtgtcctgcaggatgttgctgtgcttcgacctgagcttggggcagggactcccatcttttatggcatcttttcttcccagtgggagggggctactatctctgctgtctgtgccttccgaccacaagacattcggacagtgctgaatggtcccttcagagaactaaaacatgactgcaacagaggactgcctgtcgtggacaatgatgtgccccagcccagacctggagagtgcatcaccaacaacatgaagctccggcactttggctcatctctctccctgcctgaccgcgtactcaccttcatccgggaccacccactcatggacaggccagtgtttccagctgatggccaccccctgctggtcactacagatacagcctatctcagagtcgtggcccacagggtgaccagcctctcagggaaagagtatgatgtgctctacctggggacagaggatggacacctccaccgagcagtgcggatcggagctcagctcagcgttcttgaagatctggccttattcccagagccacagccagttgagaacatgaaattgtaccacagctggctcctggttggctcccgtactgaggtgacacaagtgaatacaaccaactgtggccgtctccagagctgctcagagtgcatcctggcccaggacccagtctgtgcctggagcttccggctggatgagtgtgtggcccatgccggggagcaccgagggttggtccaagacatagagtcagcagatgtctcctctttgtgtcctaaagagcctggagaacgtccagtagtgtttgaagttcccgtggctacagctgcgcatgtggtcttgccatgttctccaagctcagcatgggcatcctgtgtgtggcaccagcccagtggagtgactgcactcaccccccggcgggatggactggaggtggtggtgaccccaggggccatgggcgcttatgcctgtgaatgtcaggagggtggggcagcccatgtggtagcagcttacagcttggtatggggcagccagcgagatgctccgagccgggcccacacagtgggggcgggactggctggcttcttcttggggattctcgcagcatccctgactctcattctgattggtcggcgtcagcagcgacggcgacagagggaacttctggctagagacaaggtgggcctggacctgggggctccaccttctgggaccacaagctacagccaagaccctccctccccctctcctgaagatgagcggttgccgctggccctggccaagaggggcagtggctttggtggattctcaccacccttcctgcttgatccttgcccaagcccagcccacattcggctaactggggctcctctagccacatgtgatgaaacatccatctagagctgggcaaatgaccactagtgtataagtgatcactggaacggagtgaccactgagatgctgggggtcactgggcctggaagaccatcccagcctctgagttctctttgagtatgagtgattacttggattttagtatctgttctctctgagcctggatgggcttggggccagacctttgcctgattcctgattcccatgagaaatcagaactgctttctgcagcaaatcagggcttccccctaacatctgaactcctgtaaaccttcatccctggccccctatcttgggcccattagttttggggatggggcacagggcatagctatgactttgctttctggttggagcctggccggaaggaagagccctggaggtggttgggggcaaatgtgccctgagtccttggggtggttctgcttattcttcaagtttatctgaatctgtggggagtgcatgatccccatgttgcaatatggagtctctgccctgagatcttccccatctcagttttccttccatgaaagagtacgtgtaaatacatagtgttcataa

SEQ ID NO: 448280 - DNA, 974 bp, Homo sapiens
tggagagcataaatcagatctaaattaagaataacttatttagcaatgctgttgctcaccttggggttgagcagtgcattgtggtgtttcagcagttattaatctagttaaatgtagttttgaaatgttagatggtagctttgcatgaaaggaattctagcaatctatcaagtatatattctgaaaacacaagttgtttaaaatgtaggattatttgtggttgtgaaagatgaaggaagttatagcaagataatgtcagatagcctttagggaaacgcacagttttaataactgattaagaaacagctactacattgattatatcaattatagtcatgtcataaagcttatgttttcagaagaatagaaacttcaagtagaatatcagattttaaaaagcattttattatgtattatgaaatatttcaaacataaaaagatgtaaagactatctaccaatgactccccccttaataaaacaaattaacctgaaggctgttttgtgcccctccttgattgtgcattcacctcccaacccctcgctccttgggcaactgttatctttgttatttgtcattgccttaacattagatttttttattactgcttttgtaattctaatgatatcaaatggaaaaaatattttgaatgcaactcctcttttaatttgctccaattttatctgtattttttagtccatgcctgtattataagtattataaatactatctgtatatacttttgctaaagtcgtgtgtatttgttaaactgatgatacagcttcataagattttaggtcagctaatggattgtcaatattttgtttagaatacttaccaggttataaattacaatttgaaacatagatatcctatagtttgagaatttgaacatagatatggattatgttgaaatcgactgcctttttcttagctatgacagtaataaactatataacaacagcaaaaaaaaaa

SEQ ID NO: 448281 - DNA, 4200 bp, Homo sapiens
gagagatgagaacctcaagtttatgaagaatagagatgtatacagtagtgattatttcagttttgttttgtctttagcttcattgaatgctactaaattaaagcatccatattatccttgcatggcaaaggtgagcttacagcttgctattcaattcctttttcaaacttatctacggacaaagaagaaactcagggttgatactgaagaatggattgctaccattgaagcattgctttcaaaaagttttgatgcttgtcagtggttagttgaatattttattagttctgaaggacgagaattgataaagattttcttactggagtgcaatgtgagagaagtacgagttgctgtggccaccattctggagaaaaccctagacagtgccttgttttatcaggataagttaaaaagccttcatcagttactggaggtactacttgctctgttggacaaagacgtcccagaaaattgtaaaaactgtgctcagtactttttcctgttcaacacttttgtacaaaagcaaggaattagggctggagatcttcttctgaggcattcagctctgcggcacatgatcagcttcctcctaggggccagtcggcaaaacaatcagatacgtcgatggagttcagcacaagcacgagaatttgggaatcttcacaatacagtggcgttacttgttttgcattcagatgtctcatcccaaaggaatgttgctcctggcatatttaagcaacgaccacccattagcattgctccctcaagccctctgttgcccctccatgaggaggtagaagccttgttgttcatgtctgaagggaaaccttacctgttagaggtaatgtttgctttgcgggagctgacaggctcgctcttggcactcattgagatggtagtgtactgctgtttctgtaatgagcatttttccttcacaatgctgcatttcattaagaaccaactaggaaacggctccacctcatgagttaaagaatacgttccaactacttcatgaaatattggttattgaagatcctatacaagtagagcgagtcaaatttgtgtttgagacagaaaatggattactagctttgatgcaccacagtaatcatgtggacagtagtcgctgctaccagtgtgtcaaatttcttgtcactcttgctcaaaagtgtcctgcagctaaggagtacttcaaggagaattcccaccactggagctgggctgtgcagtggctacagaagaagatgtcagaacattactggacaccacagagtaatgtctctaatgaaacatcaactggaaaaacctttcagcgaaccatttcagctcaggacacgttagcgtatgccacagctttgttgaatgaaaaagagcaatcaggaagcagtaatgggtcggagagtagtcctgccaatgagaacggagacaggcatctacagcagggttcagaatctcccatgatgattggtgagttgagaagtgaccttgatgatgttgatccctagaggaacatgcccagcctgagaggagtcaagacacaatactggatgctcagcaccttcttggaatcagaatctcgaaccctttggaagagcctggagattggactgggaaagctgctgtgacttgggcggatcgtgtatttctcaaggaaagcatttttaagccactagaaggtttgggagctgtttggcagtgggagaactccggcatgtggatcagctgtcccgggagcgtggtctatatgtggattcacatttctgtggagattttcggaaatagagccagtggcagacttttttgttacacgaacatacaagagtgagcataaagctgttgctttctctacgatgctacaaaagaaattcctttggtttttatattttaagaaaaagcaagctgcttttagatatgtgggggcaaatttttaatcttgcagtaatattaaacaggaatatccaatttaaaatgatgtaaagatgtaataaaattccttttcattgtaaaatagtaattaagtcaatttacacagacctttgtatttaatatgtctccctatttgtatagaatttcagatgggtctagatgagaaccctatgcataagcttggatcttgatgaaaggttaccaggatcaggatcaaaaattgggaaatactaagctcttgaagatatttttctgatataattagattgaaaagagcaattttgaaaatgctgtgttctccagaagtacagggtgcattatttgacatcaattacttaaagaagttatgagttgttccccaaacagattttaaaaacagcaaaataaaagcactttaagatataattttactgagtttaacttcacagaattatctttttaatgcttggagacatattgaataaactgtagtcttaaatcatgtgatctgcaatcgtttgcttttgcttaaaacataattactgaaacccttggtattggttgtatatgaagttaactatttgagttggtacacactgcttgtgagtttcatagttattgtaatgcagagaaggaatttgagaatttgtttctcctcaacatgactaattaacactgaaaagtcagtcaaggtttaagatttattttcccagaaataaatataaagcaattgaataaccatccatttagtcgtatttccaaagtatagcaccattcactcatttataccagctcccttttatggtgtggggggagaggtttacacccacatatttcatatatattttgtacattttgtattttgaattgctcacattttcggccctgttttgcctttagttacaggtcctgccttattttcatctcaccatgcacagaactagggagccttaggaagtgccaggttttcactgtcagatttgccaagtcacagaggcgcacaggccctgaagtgcctgtctggctgctgtggcattgtgtgggcatgtggccaggcagatggcatctcattactgtgctctcgccatggcccagtcttttcattctctggcagtgagggtttctgtgctgtcagacttcattgttattctgtgacttgctggaggttggcagtggcctttgtcaaacacactgagaagatggaagggccagcacttaagagcagaactgtacccttagagaaacggacagaggcgagtggcaaacttcagacggttccaatggtcttgcagtttgaaatgtgatgttctaccattggttttgagtacgtgaatacttcctgtcctactgtttcccctaccctattctcaccttctctccgcccacatcctcaccaagagattgtgtgggacatgaccttgaaatgctggcgatgatccacactgggatatcatcgctggcgactgcactctcaggagcccaaaatcaggagtgaaattgccacttctagtccccttatttcctatggaaacaacgccttccgcacccctagcacctgccgtcctcactgtaaagcttcatcaggatcgtccaccgtgtatattatacgcttcagatcatgttgcttatattgttgctgcaatgaccatcgttttcactttgctggtaaccacttgattgctgacagctacagtcaatgaacctgctgatgactttttttaatgtagtacaacagtgacagttatgacaggcttaccttggaagagttgtcatttttactgccaattttttggatgaagatgtttttataaacctttcaaaatggtctgcaaacagagcaggaattgcacaattaactcaataatgctgtgtgttctcaagaagctcccttagtgaggccgatcttaagatggccgattctgcccgttgaaggcatcctgggaaagaaaacaagcatcccagcgggcatctcaccacgacttctcctggagtcctcacacggtcactgacaactacagtcagttttaggaactagagtgccgtatcatcagacttaccctgtcctgccccaccttccctgctaacatcgaggtgtgtgcagttaccttctgagcttggaacaagcagactggaattttcctctgctacctcttgtgtataaaatcttgtttataaaatttcaaaaggaagtagatacactagggaagaaccttaattctaaatttggttcatgtgtggcaaagttcttagcttctaagagtataaaataaatttttcaaaaacaaaaaaaaaaaa

SEQ ID NO: 448282 - DNA, 3912 bp, Homo sapiens
tacagttgtgagtcatatatcatgggtagtttaagtgacatgcctagagtcatagagtgaaaacttgaacacaggctgattgactgcaaaatgaaggttcttttttttttaattgtggtgaaatgtacataacataaaatttactatttgaaccatttttaagtgtatagttcagtgactttaagtacattcacactgatgtgcaaccatcaccaccatccatctccagaactcttttcatcttctgaaactgaaactctggacctattgaagactgactccctattcctcccttcccccagcccctgggggaaggcaattgtaatttctgtctccatgaatttgactactctaggaaccccatttaagtagaatcacaaatataaagacaactgaattttaatgaaactagcatttacgtttcaaaatgaagcactaggaacaagcaaagaaagaatttggctaataaaaatctcctcggtcatcaggtgtcctgcagctaaggagtacttcaaggagaattcccaccactggagctgggctgtgcagtggctacagaagaagatgtcagaacattactggacaccacagagtaatgtctctaatgaaacatcaactggaaaaacctttcagcgaaccatttcagctcaggtgagagttgtctcttgtttttgcgtggtctaaatcacttatggaggattttcagtgtgtttctcagaaactgcaacctctgagaagagaggtatgagttgaagatgagaacaagcagaagaaacaattggatttctatgaaaagaaaacagattggtgtacacttacacaaatttgtgcagattatttgtctagaaggaaagtcatacaggttgggcagtctggtcacaaaaagggacaggggttgagggggttctggtgactgtgatgaaggcctcactctcaggcctccggtcccactgaaggtcagatgaaaggtagtcttccctggcggttgctgctgccactgaatgggccctaactttgtcgtcttgtgtttgaatcttctgcaggacacgttagcgtatgccacagctttgttgaatgaaaaagagcaatcaggaagcagtaatgggtcggagagtagtcctgccaatgagaacggagacaggcatctacagcagggttcagaatctcccatgatgattggtgagttgagaagtgaccttgatgatgttgatccctagaggaacatgcccagcctgagaggagtcaagacacaatactggatgctcagcaccttcttggaatcagaatctcgaaccctttggaagagcctggagattggactgggaaagctgctgtgacttgggcggatcgtgtatttctcaaggaaagcatttttaagccactagaaggtttgggagctgtttggcagtgggagaactccggcatgtggatcagctgtcccgggagcgtggtctatatgtggattcacatttctgtggagattttcggaaatagagccagtggcagacttttttgttacacgaacatacaagagtgagcataaagctgttgctttctctacgatgctacaaaagaaattcctttggtttttatattttaagaaaaagcaagctgcttttagatatgtgggggcaaatttttaatcttgcagtaatattaaacaggaatatccaatttaaaatgatgtaaagatgtaataaaattccttttcattgtaaaatagtaattaagtcaatttacacagacctttgtatttaatatgtctccctatttgtatagaatttcagatgggtctagatgagaaccctatgcataagcttggatcttgatgaaaggttaccaggatcaggatcaaaaattgggaaatactaagctcttgaagatatttttctgatataattagattgaaaagagcaattttgaaaatgctgtgttctccagaagtacagggtgcattatttgacatcaattacttaaagaagttatgagttgttccccaaacagattttaaaaacagcaaaataaaagcactttaagatataattttactgagtttaacttcacagaattatctttttaatgcttggagacatattgaataaactgtagtcttaaatcatgtgatctgcaatcgtttgcttttgcttaaaacataattactgaaacccttggtattggttgtatatgaagttaactatttgagttggtacacactgcttgtgagtttcatagttattgtaatgcagagaaggaatttgagaatttgtttctcctcaacatgactaattaacactgaaaagtcagtcaaggtttaagatttattttcccagaaataaatataaagcaattgaataaccatccatttagtcgtatttccaaagtatagcaccattcactcatttataccagctcccttttatggtgtggggggagaggtttacacccacatatttcatatatattttgtacattttgtattttgaattgctcacattttcggccctgttttgcctttagttacaggtcctgccttattttcatctcaccatgcacagaactagggagccttaggaagtgccaggttttcactgtcagatttgccaagtcacagaggcgcacaggccctgaagtgcctgtctggctgctgtggcattgtgtgggcatgtggccaggcagatggcatctcattactgtgctctcgccatggcccagtcttttcattctctggcagtgagggtttctgtgctgtcagacttcattgttattctgtgacttgctggaggttggcagtggcctttgtcaaacacactgagaagatggaagggccagcacttaagagcagaactgtacccttagagaaacggacagaggcgagtggcaaacttcagacggttccaatggtcttgcagtttgaaatgtgatgttctaccattggttttgagtacgtgaatacttcctgtcctactgtttcccctaccctattctcaccttctctccgcccacatcctcaccaagagattgtgtgggacatgaccttgaaatgctggcgatgatccacactgggatatcatcgctggcgactgcactctcaggagcccaaaatcaggagtgaaattgccacttctagtccccttatttcctatggaaacaacgccttccgcacccctagcacctgccgtcctcactgtaaagcttcatcaggatcgtccaccgtgtatattatacgcttcagatcatgttgcttatattgttgctgcaatgaccatcgttttcactttgctggtaaccacttgattgctgacagctacagtcaatgaacctgctgatgactttttttaatgtagtacaacagtgacagttatgacaggcttaccttggaagagttgtcatttttactgccaattttttggatgaagatgtttttataaacctttcaaaatggtctgcaaacagagcaggaattgcacaattaactcaataatgctgtgtgttctcaagaagctcccttagtgaggccgatcttaagatggccgattctgcccgttgaaggcatcctgggaaagaaaacaagcatcccagcgggcatctcaccacgacttctcctggagtcctcacacggtcactgacaactacagtcagttttaggaactagagtgccgtatcatcagacttaccctgtcctgccccaccttccctgctaacatcgaggtgtgtgcagttaccttctgagcttggaacaagcagactggaattttcctctgctacctcttgtgtataaaatcttgtttataaaatttcaaaaggaagtagatacactagggaagaaccttaattctaaatttggttcatgtgtggcaaagttcttagcttctaagagtataaaataaatttttcaaaaacaaaaaaaaaaaa

SEQ ID NO: 448283 - DNA, 2844 bp, Homo sapiens
gacatgtttaaattgcagaacacaagtcagcatagaaaaccttttctctaaccgtatgaactttaacttccttttcttttctgcagggttcagaatctcccatgatgattggtgagttgagaagtgaccttgatgatgttgatccctagaggaacatgcccagcctgagaggagtcaagacacaatactggatgctcagcaccttcttggaatcagaatctcgaaccctttggaagagcctggagattggactgggaaagctgctgtgacttgggcggatcgtgtatttctcaaggaaagcatttttaagccactagaaggtttgggagctgtttggcagtgggagaactccggcatgtggatcagctgtcccgggagcgtggtctatatgtggattcacatttctgtggagattttcggaaatagagccagtggcagacttttttgttacacgaacatacaagagtgagcataaagctgttgctttctctacgatgctacaaaagaaattcctttggtttttatattttaagaaaaagcaagctgcttttagatatgtgggggcaaatttttaatcttgcagtaatattaaacaggaatatccaatttaaaatgatgtaaagatgtaataaaattccttttcattgtaaaatagtaattaagtcaatttacacagacctttgtatttaatatgtctccctatttgtatagaatttcagatgggtctagatgagaaccctatgcataagcttggatcttgatgaaaggttaccaggatcaggatcaaaaattgggaaatactaagctcttgaagatatttttctgatataattagattgaaaagagcaattttgaaaatgctgtgttctccagaagtacagggtgcattatttgacatcaattacttaaagaagttatgagttgttccccaaacagattttaaaaacagcaaaataaaagcactttaagatataattttactgagtttaacttcacagaattatctttttaatgcttggagacatattgaataaactgtagtcttaaatcatgtgatctgcaatcgtttgcttttgcttaaaacataattactgaaacccttggtattggttgtatatgaagttaactatttgagttggtacacactgcttgtgagtttcatagttattgtaatgcagagaaggaatttgagaatttgtttctcctcaacatgactaattaacactgaaaagtcagtcaaggtttaagatttattttcccagaaataaatataaagcaattgaataaccatccatttagtcgtatttccaaagtatagcaccattcactcatttataccagctcccttttatggtgtggggggagaggtttacacccacatatttcatatatattttgtacattttgtattttgaattgctcacattttcggccctgttttgcctttagttacaggtcctgccttattttcatctcaccatgcacagaactagggagccttaggaagtgccaggttttcactgtcagatttgccaagtcacagaggcgcacaggccctgaagtgcctgtctggctgctgtggcattgtgtgggcatgtggccaggcagatggcatctcattactgtgctctcgccatggcccagtcttttcattctctggcagtgagggtttctgtgctgtcagacttcattgttattctgtgacttgctggaggttggcagtggcctttgtcaaacacactgagaagatggaagggccagcacttaagagcagaactgtacccttagagaaacggacagaggcgagtggcaaacttcagacggttccaatggtcttgcagtttgaaatgtgatgttctaccattggttttgagtacgtgaatacttcctgtcctactgtttcccctaccctattctcaccttctctccgcccacatcctcaccaagagattgtgtgggacatgaccttgaaatgctggcgatgatccacactgggatatcatcgctggcgactgcactctcaggagcccaaaatcaggagtgaaattgccacttctagtccccttatttcctatggaaacaacgccttccgcacccctagcacctgccgtcctcactgtaaagcttcatcaggatcgtccaccgtgtatattatacgcttcagatcatgttgcttatattgttgctgcaatgaccatcgttttcactttgctggtaaccacttgattgctgacagctacagtcaatgaacctgctgatgactttttttaatgtagtacaacagtgacagttatgacaggcttaccttggaagagttgtcatttttactgccaattttttggatgaagatgtttttataaacctttcaaaatggtctgcaaacagagcaggaattgcacaattaactcaataatgctgtgtgttctcaagaagctcccttagtgaggccgatcttaagatggccgattctgcccgttgaaggcatcctgggaaagaaaacaagcatcccagcgggcatctcaccacgacttctcctggagtcctcacacggtcactgacaactacagtcagttttaggaactagagtgccgtatcatcagacttaccctgtcctgccccaccttccctgctaacatcgaggtgtgtgcagttaccttctgagcttggaacaagcagactggaattttcctctgctacctcttgtgtataaaatcttgtttataaaatttcaaaaggaagtagatacactagggaagaaccttaattctaaatttggttcatgtgtggcaaagttcttagcttctaagagtataaaataaatttttcaaaaacaaaaaaaaaaaa

SEQ ID NO: 448284 - DNA, 2453 bp, Homo sapiens
caggatccagtgaggtccacacatggcctttgctttctgtgtctcttaaggctcttctgaccatcagtcattcctttgtccccctgccccttgtatgctgtgccatttgtttgaggagtagactgtttgctctgtagagctccccatattctggatctgtttgcatcctctaggtattcccttcaagagaattgcagctgagtctgattgtacctctagagctgaacattatgggagtacttcttatcttttaaactttctcatagttgccacatagagtcttagtgaattttgaacagagccttggctggtatgtggcattacagttagcaggaataagcagaagtgaagtgaccttggaaagctccacttggcccataagcgctaacactgtcaggagactctacttttgtttcttggctattagatgggacctatcatgggaaggttgaggttgtggaaatgtatcttgctttttcacaccacctttctctttctttcaggattttcttactggagtgcaatgtgagagaagtacgagttgctgtggccaccattctggagaaaaccctagacagtgccttgttttatcaggataagttaaaaagccttcatcagttactggaggtactacttgctctgttggacaaagacgtcccagaaaattgtaaaaactgtgctcagtactttttcctgttcaacacttttgtacaaaagcaaggaattagggctggagatcttcttctgaggcattcagctctgcggcacatgatcagcttcctcctaggggccagtcggcaaaacaatcagatacgtcgatggagttcagcacaagcacgagaatttgggaatcttcacaatacagtggcgttacttgttttgcattcagatgtctcatcccaaaggaatgttgctcctggcatatttaagcaacgaccacccattagcattgctccctcaagccctctgttgcccctccatgaggaggtagaagccttgttgttcatgtctgaagggaaaccttacctgttagaggtaatgtttgctttgcgggagctgacaggctcgctcttggcactcattgagatggtagtgtactgctgtttctgtaatgagcatttttccttcacaatgctgcatttcattaagaaccaactaggaaacggctccacctcatgagttaaagaatacgttccaactacttcatgaaatattggttattgaagatcctatacaagtagagcgagtcaaatttgtgtttgagacagaaaatggattactagctttgatgcaccacagtaatcatgtggacagtagtcgctgctaccagtgtgtcaaatttcttgtcactcttgctcaaaagtgtcctgcagctaaggagtacttcaaggagaattcccaccactggagctgggctgtgcagtggctacagaagaagatgtcagaacattactggacaccacagagtaatgtctctaatgaaacatcaactggaaaaacctttcagcgaaccatttcagctcaggtgagagttgtctcttgtttttgcgtggtctaaatcacttatggaggattttcagtgtgtttctcagaaactgcaacctctgagaagagaggtatgagttgaagatgagaacaagcagaagaaacaattggatttctatgaaaagaaaacagattggtgtacacttacacaaatttgtgcagattatttgtctagaaggaaagtcatacaggttgggcagtctggtcacaaaaagggacaggggttgagggggttctggtgactgtgatgaaggcctcactctcaggcctccggtcccactgaaggtcagatgaaaggtagtcttccctggcggttgctgctgccactgaatgggccctaactttgtcgtcttgtgtttgaatcttctgcaggacacgttagcgtatgccacagctttgttgaatgaaaaagagcaatcaggaagcagtaatgggtcggagagtagtcctgccaatgagaacggagacaggcatctacagcaggtgttctcaagaagctcccttagtgaggccgatcttaagatggccgattctgcccgttgaaggcatcctgggaaagaaaacaagcatcccagcgggcatctcaccacgacttctcctggagtcctcacacggtcactgacaactacagtcagttttaggaactagagtgccgtatcatcagacttaccctgtcctgccccaccttccctgctaacatcgaggtgtgtgcagttaccttctgagcttggaacaagcagactggaattttcctctgctacctcttgtgtataaaatcttgtttataaaatttcaaaaggaagtagatacactagggaagaaccttaattctaaatttggttcatgtgtggcaaagttcttagcttctaagagtataaaataaatttttcaaaaacaaaaaaaaaaaa

SEQ ID NO: 448285 - DNA, 1187 bp, Homo sapiens
tacagttgtgagtcatatatcatgggtagtttaagtgacatgcctagagtcatagagtgaaaacttgaacacaggctgattgactgcaaaatgaaggttcttttttttttaattgtggtgaaatgtacataacataaaatttactatttgaaccatttttaagtgtatagttcagtgactttaagtacattcacactgatgtgcaaccatcaccaccatccatctccagaactcttttcatcttctgaaactgaaactctggacctattgaagactgactccctattcctcccttcccccagcccctgggggaaggcaattgtaatttctgtctccatgaatttgactactctaggaaccccatttaagtagaatcacaaatataaagacaactgaattttaatgaaactagcatttacgtttcaaaatgaagcactaggaacaagcaaagaaagaatttggctaataaaaatctcctcggtcatcaggtgtcctgcagctaaggagtacttcaaggagaattcccaccactggagctgggctgtgcagtggctacagaagaagatgtcagaacattactggacaccacagagtaatgtctctaatgaaacatcaactggaaaaacctttcagcgaaccatttcagctcaggacacgttagcgtatgccacagctttgttgaatgaaaaagagcaatcaggaagcagtaatgggtcggagagtagtcctgccaatgagaacggagacaggcatctacagcaggtgttctcaagaagctcccttagtgaggccgatcttaagatggccgattctgcccgttgaaggcatcctgggaaagaaaacaagcatcccagcgggcatctcaccacgacttctcctggagtcctcacacggtcactgacaactacagtcagttttaggaactagagtgccgtatcatcagacttaccctgtcctgccccaccttccctgctaacatcgaggtgtgtgcagttaccttctgagcttggaacaagcagactggaattttcctctgctacctcttgtgtataaaatcttgtttataaaatttcaaaaggaagtagatacactagggaagaaccttaattctaaatttggttcatgtgtggcaaagttcttagcttctaagagtataaaataaatttttcaaaaacaaaaaaaaaaaa

SEQ ID NO: 448286 - DNA, 4394 bp, Homo sapiens
caggatccagtgaggtccacacatggcctttgctttctgtgtctcttaaggctcttctgaccatcagtcattcctttgtccccctgccccttgtatgctgtgccatttgtttgaggagtagactgtttgctctgtagagctccccatattctggatctgtttgcatcctctaggtattcccttcaagagaattgcagctgagtctgattgtacctctagagctgaacattatgggagtacttcttatcttttaaactttctcatagttgccacatagagtcttagtgaattttgaacagagccttggctggtatgtggcattacagttagcaggaataagcagaagtgaagtgaccttggaaagctccacttggcccataagcgctaacactgtcaggagactctacttttgtttcttggctattagatgggacctatcatgggaaggttgaggttgtggaaatgtatcttgctttttcacaccacctttctctttctttcaggattttcttactggagtgcaatgtgagagaagtacgagttgctgtggccaccattctggagaaaaccctagacagtgccttgttttatcaggataagttaaaaagccttcatcagttactggaggtactacttgctctgttggacaaagacgtcccagaaaattgtaaaaactgtgctcagtactttttcctgttcaacacttttgtacaaaagcaaggaattagggctggagatcttcttctgaggcattcagctctgcggcacatgatcagcttcctcctaggggccagtcggcaaaacaatcagatacgtcgatggagttcagcacaagcacgagaatttgggaatcttcacaatacagtggcgttacttgttttgcattcagatgtctcatcccaaaggaatgttgctcctggcatatttaagcaacgaccacccattagcattgctccctcaagccctctgttgcccctccatgaggaggtagaagccttgttgttcatgtctgaagggaaaccttacctgttagaggtaatgtttgctttgcgggagctgacaggctcgctcttggcactcattgagatggtagtgtactgctgtttctgtaatgagcatttttccttcacaatgctgcatttcattaagaaccaactaggaaacggctccacctcatgagttaaagaatacgttccaactacttcatgaaatattggttattgaagatcctatacaagtagagcgagtcaaatttgtgtttgagacagaaaatggattactagctttgatgcaccacagtaatcatgtggacagtagtcgctgctaccagtgtgtcaaatttcttgtcactcttgctcaaaagtgtcctgcagctaaggagtacttcaaggagaattcccaccactggagctgggctgtgcagtggctacagaagaagatgtcagaacattactggacaccacagagtaatgtctctaatgaaacatcaactggaaaaacctttcagcgaaccatttcagctcaggacacgttagcgtatgccacagctttgttgaatgaaaaagagcaatcaggaagcagtaatgggtcggagagtagtcctgccaatgagaacggagacaggcatctacagcagggttcagaatctcccatgatgattggtgagttgagaagtgaccttgatgatgttgatccctagaggaacatgcccagcctgagaggagtcaagacacaatactggatgctcagcaccttcttggaatcagaatctcgaaccctttggaagagcctggagattggactgggaaagctgctgtgacttgggcggatcgtgtatttctcaaggaaagcatttttaagccactagaaggtttgggagctgtttggcagtgggagaactccggcatgtggatcagctgtcccgggagcgtggtctatatgtggattcacatttctgtggagattttcggaaatagagccagtggcagacttttttgttacacgaacatacaagagtgagcataaagctgttgctttctctacgatgctacaaaagaaattcctttggtttttatattttaagaaaaagcaagctgcttttagatatgtgggggcaaatttttaatcttgcagtaatattaaacaggaatatccaatttaaaatgatgtaaagatgtaataaaattccttttcattgtaaaatagtaattaagtcaatttacacagacctttgtatttaatatgtctccctatttgtatagaatttcagatgggtctagatgagaaccctatgcataagcttggatcttgatgaaaggttaccaggatcaggatcaaaaattgggaaatactaagctcttgaagatatttttctgatataattagattgaaaagagcaattttgaaaatgctgtgttctccagaagtacagggtgcattatttgacatcaattacttaaagaagttatgagttgttccccaaacagattttaaaaacagcaaaataaaagcactttaagatataattttactgagtttaacttcacagaattatctttttaatgcttggagacatattgaataaactgtagtcttaaatcatgtgatctgcaatcgtttgcttttgcttaaaacataattactgaaacccttggtattggttgtatatgaagttaactatttgagttggtacacactgcttgtgagtttcatagttattgtaatgcagagaaggaatttgagaatttgtttctcctcaacatgactaattaacactgaaaagtcagtcaaggtttaagatttattttcccagaaataaatataaagcaattgaataaccatccatttagtcgtatttccaaagtatagcaccattcactcatttataccagctcccttttatggtgtggggggagaggtttacacccacatatttcatatatattttgtacattttgtattttgaattgctcacattttcggccctgttttgcctttagttacaggtcctgccttattttcatctcaccatgcacagaactagggagccttaggaagtgccaggttttcactgtcagatttgccaagtcacagaggcgcacaggccctgaagtgcctgtctggctgctgtggcattgtgtgggcatgtggccaggcagatggcatctcattactgtgctctcgccatggcccagtcttttcattctctggcagtgagggtttctgtgctgtcagacttcattgttattctgtgacttgctggaggttggcagtggcctttgtcaaacacactgagaagatggaagggccagcacttaagagcagaactgtacccttagagaaacggacagaggcgagtggcaaacttcagacggttccaatggtcttgcagtttgaaatgtgatgttctaccattggttttgagtacgtgaatacttcctgtcctactgtttcccctaccctattctcaccttctctccgcccacatcctcaccaagagattgtgtgggacatgaccttgaaatgctggcgatgatccacactgggatatcatcgctggcgactgcactctcaggagcccaaaatcaggagtgaaattgccacttctagtccccttatttcctatggaaacaacgccttccgcacccctagcacctgccgtcctcactgtaaagcttcatcaggatcgtccaccgtgtatattatacgcttcagatcatgttgcttatattgttgctgcaatgaccatcgttttcactttgctggtaaccacttgattgctgacagctacagtcaatgaacctgctgatgactttttttaatgtagtacaacagtgacagttatgacaggcttaccttggaagagttgtcatttttactgccaattttttggatgaagatgtttttataaacctttcaaaatggtctgcaaacagagcaggaattgcacaattaactcaataatgctgtgtgttctcaagaagctcccttagtgaggccgatcttaagatggccgattctgcccgttgaaggcatcctgggaaagaaaacaagcatcccagcgggcatctcaccacgacttctcctggagtcctcacacggtcactgacaactacagtcagttttaggaactagagtgccgtatcatcagacttaccctgtcctgccccaccttccctgctaacatcgaggtgtgtgcagttaccttctgagcttggaacaagcagactggaattttcctctgctacctcttgtgtataaaatcttgtttataaaatttcaaaaggaagtagatacactagggaagaaccttaattctaaatttggttcatgtgtggcaaagttcttagcttctaagagtataaaataaatttttcaaaaacaaaaaaaaaaaa

SEQ ID NO: 448287 - DNA, 4786 bp, Homo sapiens
caggatccagtgaggtccacacatggcctttgctttctgtgtctcttaaggctcttctgaccatcagtcattcctttgtccccctgccccttgtatgctgtgccatttgtttgaggagtagactgtttgctctgtagagctccccatattctggatctgtttgcatcctctaggtattcccttcaagagaattgcagctgagtctgattgtacctctagagctgaacattatgggagtacttcttatcttttaaactttctcatagttgccacatagagtcttagtgaattttgaacagagccttggctggtatgtggcattacagttagcaggaataagcagaagtgaagtgaccttggaaagctccacttggcccataagcgctaacactgtcaggagactctacttttgtttcttggctattagatgggacctatcatgggaaggttgaggttgtggaaatgtatcttgctttttcacaccacctttctctttctttcaggattttcttactggagtgcaatgtgagagaagtacgagttgctgtggccaccattctggagaaaaccctagacagtgccttgttttatcaggataagttaaaaagccttcatcagttactggaggtactacttgctctgttggacaaagacgtcccagaaaattgtaaaaactgtgctcagtactttttcctgttcaacacttttgtacaaaagcaaggaattagggctggagatcttcttctgaggcattcagctctgcggcacatgatcagcttcctcctaggggccagtcggcaaaacaatcagatacgtcgatggagttcagcacaagcacgagaatttgggaatcttcacaatacagtggcgttacttgttttgcattcagatgtctcatcccaaaggaatgttgctcctggcatatttaagcaacgaccacccattagcattgctccctcaagccctctgttgcccctccatgaggaggtagaagccttgttgttcatgtctgaagggaaaccttacctgttagaggtaatgtttgctttgcgggagctgacaggctcgctcttggcactcattgagatggtagtgtactgctgtttctgtaatgagcatttttccttcacaatgctgcatttcattaagaaccaactaggaaacggctccacctcatgagttaaagaatacgttccaactacttcatgaaatattggttattgaagatcctatacaagtagagcgagtcaaatttgtgtttgagacagaaaatggattactagctttgatgcaccacagtaatcatgtggacagtagtcgctgctaccagtgtgtcaaatttcttgtcactcttgctcaaaagtgtcctgcagctaaggagtacttcaaggagaattcccaccactggagctgggctgtgcagtggctacagaagaagatgtcagaacattactggacaccacagagtaatgtctctaatgaaacatcaactggaaaaacctttcagcgaaccatttcagctcaggtgagagttgtctcttgtttttgcgtggtctaaatcacttatggaggattttcagtgtgtttctcagaaactgcaacctctgagaagagaggtatgagttgaagatgagaacaagcagaagaaacaattggatttctatgaaaagaaaacagattggtgtacacttacacaaatttgtgcagattatttgtctagaaggaaagtcatacaggttgggcagtctggtcacaaaaagggacaggggttgagggggttctggtgactgtgatgaaggcctcactctcaggcctccggtcccactgaaggtcagatgaaaggtagtcttccctggcggttgctgctgccactgaatgggccctaactttgtcgtcttgtgtttgaatcttctgcaggacacgttagcgtatgccacagctttgttgaatgaaaaagagcaatcaggaagcagtaatgggtcggagagtagtcctgccaatgagaacggagacaggcatctacagcagggttcagaatctcccatgatgattggtgagttgagaagtgaccttgatgatgttgatccctagaggaacatgcccagcctgagaggagtcaagacacaatactggatgctcagcaccttcttggaatcagaatctcgaaccctttggaagagcctggagattggactgggaaagctgctgtgacttgggcggatcgtgtatttctcaaggaaagcatttttaagccactagaaggtttgggagctgtttggcagtgggagaactccggcatgtggatcagctgtcccgggagcgtggtctatatgtggattcacatttctgtggagattttcggaaatagagccagtggcagacttttttgttacacgaacatacaagagtgagcataaagctgttgctttctctacgatgctacaaaagaaattcctttggtttttatattttaagaaaaagcaagctgcttttagatatgtgggggcaaatttttaatcttgcagtaatattaaacaggaatatccaatttaaaatgatgtaaagatgtaataaaattccttttcattgtaaaatagtaattaagtcaatttacacagacctttgtatttaatatgtctccctatttgtatagaatttcagatgggtctagatgagaaccctatgcataagcttggatcttgatgaaaggttaccaggatcaggatcaaaaattgggaaatactaagctcttgaagatatttttctgatataattagattgaaaagagcaattttgaaaatgctgtgttctccagaagtacagggtgcattatttgacatcaattacttaaagaagttatgagttgttccccaaacagattttaaaaacagcaaaataaaagcactttaagatataattttactgagtttaacttcacagaattatctttttaatgcttggagacatattgaataaactgtagtcttaaatcatgtgatctgcaatcgtttgcttttgcttaaaacataattactgaaacccttggtattggttgtatatgaagttaactatttgagttggtacacactgcttgtgagtttcatagttattgtaatgcagagaaggaatttgagaatttgtttctcctcaacatgactaattaacactgaaaagtcagtcaaggtttaagatttattttcccagaaataaatataaagcaattgaataaccatccatttagtcgtatttccaaagtatagcaccattcactcatttataccagctcccttttatggtgtggggggagaggtttacacccacatatttcatatatattttgtacattttgtattttgaattgctcacattttcggccctgttttgcctttagttacaggtcctgccttattttcatctcaccatgcacagaactagggagccttaggaagtgccaggttttcactgtcagatttgccaagtcacagaggcgcacaggccctgaagtgcctgtctggctgctgtggcattgtgtgggcatgtggccaggcagatggcatctcattactgtgctctcgccatggcccagtcttttcattctctggcagtgagggtttctgtgctgtcagacttcattgttattctgtgacttgctggaggttggcagtggcctttgtcaaacacactgagaagatggaagggccagcacttaagagcagaactgtacccttagagaaacggacagaggcgagtggcaaacttcagacggttccaatggtcttgcagtttgaaatgtgatgttctaccattggttttgagtacgtgaatacttcctgtcctactgtttcccctaccctattctcaccttctctccgcccacatcctcaccaagagattgtgtgggacatgaccttgaaatgctggcgatgatccacactgggatatcatcgctggcgactgcactctcaggagcccaaaatcaggagtgaaattgccacttctagtccccttatttcctatggaaacaacgccttccgcacccctagcacctgccgtcctcactgtaaagcttcatcaggatcgtccaccgtgtatattatacgcttcagatcatgttgcttatattgttgctgcaatgaccatcgttttcactttgctggtaaccacttgattgctgacagctacagtcaatgaacctgctgatgactttttttaatgtagtacaacagtgacagttatgacaggcttaccttggaagagttgtcatttttactgccaattttttggatgaagatgtttttataaacctttcaaaatggtctgcaaacagagcaggaattgcacaattaactcaataatgctgtgtgttctcaagaagctcccttagtgaggccgatcttaagatggccgattctgcccgttgaaggcatcctgggaaagaaaacaagcatcccagcgggcatctcaccacgacttctcctggagtcctcacacggtcactgacaactacagtcagttttaggaactagagtgccgtatcatcagacttaccctgtcctgccccaccttccctgctaacatcgaggtgtgtgcagttaccttctgagcttggaacaagcagactggaattttcctctgctacctcttgtgtataaaatcttgtttataaaatttcaaaaggaagtagatacactagggaagaaccttaattctaaatttggttcatgtgtggcaaagttcttagcttctaagagtataaaataaatttttcaaaaacaaaaaaaaaaaa

SEQ ID NO: 448288 - DNA, 2490 bp, Homo sapiens
caggatccagtgaggtccacacatggcctttgctttctgtgtctcttaaggctcttctgaccatcagtcattcctttgtccccctgccccttgtatgctgtgccatttgtttgaggagtagactgtttgctctgtagagctccccatattctggatctgtttgcatcctctaggtattcccttcaagagaattgcagctgagtctgattgtacctctagagctgaacattatgggagtacttcttatcttttaaactttctcatagttgccacatagagtcttagtgaattttgaacagagccttggctggtatgtggcattacagttagcaggaataagcagaagtgaagtgaccttggaaagctccacttggcccataagcgctaacactgtcaggagactctacttttgtttcttggctattagatgggacctatcatgggaaggttgaggttgtggaaatgtatcttgctttttcacaccacctttctctttctttcaggattttcttactggagtgcaatgtgagagaagtacgagttgctgtggccaccattctggagaaaaccctagacagtgccttgttttatcaggataagttaaaaagccttcatcagttactggaggtactacttgctctgttggacaaagacgtcccagaaaattgtaaaaactgtgctcagtactttttcctgttcaacacttttgtacaaaagcaaggaattagggctggagatcttcttctgaggcattcagctctgcggcacatgatcagcttcctcctaggggccagtcggcaaaacaatcagatacgtcgatggagttcagcacaagcacgagaatttgggaatcttcacaatacagtggcgttacttgttttgcattcagatgtctcatcccaaaggaatgttgctcctggcatatttaagcaacgaccacccattagcattgctccctcaagccctctgttgcccctccatgaggaggtagaagccttgttgttcatgtctgaagggaaaccttacctgttagaggtaatgtttgctttgcgggagctgacaggctcgctcttggcactcattgagatggtagtgtactgctgtttctgtaatgagcatttttccttcacaatgctgcatttcattaagaaccaactaggaaacggctccacctcatgagttaaagaatacgttccaactacttcatgaaatattggttattgaagatcctatacaagtagagcgagtcaaatttgtgtttgagacagaaaatggattactagctttgatgcaccacagtaatcatgtggacagtagtcgctgctaccagtgtgtcaaatttcttgtcactcttgctcaaaagtgtcctgcagctaaggagtacttcaaggagaattcccaccactggagctgggctgtgcagtggctacagaagaagatgtcagaacattactggacaccacagagtaatgtctctaatgaaacatcaactggaaaaacctttcagcgaaccatttcagctcaggtgagagttgtctcttgtttttgcgtggtctaaatcacttatggaggattttcagtgtgtttctcagaaactgcaacctctgagaagagaggtatgagttgaagatgagaacaagcagaagaaacaattggatttctatgaaaagaaaacagattggtgtacacttacacaaatttgtgcagattatttgtctagaaggaaagtcatacaggttgggcagtctggtcacaaaaagggacaggggttgagggggttctggtgactgtgatgaaggcctcactctcaggcctccggtcccactgaaggtcagatgaaaggtagtcttccctggcggttgctgctgccactgaatgggccctaactttgtcgtcttgtgtttgaatcttctgcaggacacgttagcgtatgccacagctttgttgaatgaaaaagagcaatcaggaagcagtaatgggtcggagagtagtcctgccaatgagaacggagacaggcatctacagcaggtataacggtcagcatgtccttgtgtgcaaagggcagccttgctcttaagctttccaaaaagaatttccacagctgagggaaaacaagatgcttcctctggaatgtgagtccaaagagttaccagcgctgccctctagtgatctcagctcagcatatgcactaaccgtgtgtttacagggctgagtagtgctgcagtgtgaagtgaatggaaggcctcgaggtgtttgtggctggccaccctgatcagcctgcaggtagtcccgatgaagccagggcacagggggattcgttccagcttgttcactttattctgccttgccaggttactgaaagtccctcgtttgctctcaccagccttcctggaaatgtggactcttgaaagaaaagctcccgtgctcttgaagtatacctgcttgccaggggagtccaagaaaattttgacatgtatttttaaaaaaaaa

SEQ ID NO: 448289 - DNA, 1821 bp, Homo sapiens
  misc_feature (26)..(26): n is a, c, g, or t
cggctaggtagcgaggccgggtgttncagcagcatccacatagtctacacagagctccccttgctgcccagacaagctgaaggaccacaggaaaagccatggagacttcagcatcctcctcccagcctcaggacaacagtcaagtccacagagaaacagaagatgtagactgtcctgggcatggggagcctgacgttttgaaggatgagcttcaactctatggagatgctcctggagaggtggtaccctctggggaatcaggactccgaaggagaggctctgacccagcaagtggagaagtggaggcctctcagttaagaagactgaatataaagaaagatgatgagtttttccatttcgtcctcctgtgctttgccatcggggccttgctggtgtgttatcactattacgcagactggttcatgtctcttggggtcggcctgctcaccttcgcctccctggaaaccgttggcatctacttcggactagtgtaccgtatccacagcgtcctccaaggcttcatccccctcttccagaagtttaggctgacagggttcaggaagactgactgaggccacttccaggtgggcagcagaggcaggccccagtgtgaccaccactgcgacccctgagcccacaagggcagagcagcattctgagagacgcacaggagaccaagccagaccaataaacagaacacttttccttccatgtggtctgaatgttggcaccagcccgggcaggggcatctcatttgggcagtactgctgtgcaacccagctgcaaggatggaaggcagagggtgggtgtggggcctgaggcttcacagtacctggaccagcaggaagattctgggaggtcactgctctcagaggacagcaagggaccctgagctctgcaagctgtgatctgtctgggttcatggtttttctcaaatcccaggctatctgcatgcgctctcaggtgctaccgagccatcctgggagagatggatggtccactgctttgaggcagggagccatcgggctggggccccttggtgaacctgatgcaggtaagatgctgaggactaaaaccattttttttgcacccaaaaaaaaaggcaggaaaatgatcatcagaaactaaatggcagccaggcatgggggctcacaactgtaatcctcgcactttgggaggctcaggctaagggtcgcttgaagctgagagttcaagaccaacctgggcaacatagtgagacccccatctctacaatttttttttaatgaccaaatgtggcggtacatacctgtacatacctgcggttccagctactcaagaggctgaggcaggaggactgcttgagcccaggagttcagggctgcagtgaggtacgatcaagccactgcactccagcctgggcgacagagcaagatcgtttctctaaaattaaaaaaaaaaaaaaaagacaaataaaaattgcatgtatttgtagtgtacaacatgttttgaaatatgtggaatggctaaatcaagctaattaacatatgtatccctcacataccctttttttatgatgagaacagtaaaaacctactgtcagcaatttgcaaagtatacaatacattgttattaactatggtcaccatgctatgtgattgatatcctgaacttgaactgagttcttgatggtcacagacatgctgttctcaaaactcagaagggtaacttctgaggttttgatttcaagtacttgtatgtaacctaatttaacgggagcccagagtgcacagatcagatatttattaaacatataaataaaacacagttttcacgatagaa

SEQ ID NO: 448290 - DNA, 530 bp, Homo sapiens
cctctgacccaggaagatatacccaggatattaattctcaatgaggcagggaaaagaaaatcccacctcccgtcctgcatcaaagttaaatattcatctctctcttgttcttaaggagaagtggaggcctctcagttaagaagactgaatataaagaaagatgatgagtttttccatttcgtcctcctgtgctttgccatcggggccttgctggtgtgttatcactattacgcagactggttcatgtctcttggggtcggcctgctcaccttcgcctccctggaaaccgttggcatctacttcggactagtgtaccgtatccacagcgtcctccaaggcttcatccccctcttccagaagtttaggctgacagggttcaggaagactgactgaggccacttccaggtgggcagcagaggcaggccccagtgtgaccaccactgcgacccctgagcccacaagggcagagcagcattctgagagacgcacaggagaccaagccagaccaataaacagaacacttttccttc

SEQ ID NO: 448291 - DNA, 1324 bp, Homo sapiens
acgtggacgagtcgggtaatagtacggcgcagttgctggaatatggcttagggcaggttcaggaagactgactgaggccacttccaggtgggcagcagaggcaggccccagtgtgaccaccactgcgacccctgagcccacaagggcagagcagcattctgagagacgcacaggagaccaagccagaccaataaacagaacacttttccttccatgtggtctgaatgttggcaccagcccgggcaggggcatctcatttgggcagtactgctgtgcaacccagctgcaaggatggaaggcagagggtgggtgtggggcctgaggcttcacagtacctggaccagcaggaagattctgggaggtcactgctctcagaggacagcaagggaccctgagctctgcaagctgtgatctgtctgggttcatggtttttctcaaatcccaggctatctgcatgcgctctcaggtgctaccgagccatcctgggagagatggatggtccactgctttgaggcagggagccatcgggctggggccccttggtgaacctgatgcaggtaagatgctgaggactaaaaccattttttttgcacccaaaaaaaaaggcaggaaaatgatcatcagaaactaaatggcagccaggcatgggggctcacaactgtaatcctcgcactttgggaggctcaggctaagggtcgcttgaagctgagagttcaagaccaacctgggcaacatagtgagacccccatctctacaatttttttttaatgaccaaatgtggcggtacatacctgtacatacctgcggttccagctactcaagaggctgaggcaggaggactgcttgagcccaggagttcagggctgcagtgaggtacgatcaagccactgcactccagcctgggcgacagagcaagatcgtttctctaaaattaaaaaaaaaaaaaaaagacaaataaaaattgcatgtatttgtagtgtacaacatgttttgaaatatgtggaatggctaaatcaagctaattaacatatgtatccctcacataccctttttttatgatgagaacagtaaaaacctactgtcagcaatttgcaaagtatacaatacattgttattaactatggtcaccatgctatgtgattgatatcctgaacttgaactgagttcttgatggtcacagacatgctgttctcaaaactcagaagggtaacttctgaggttttgatttcaagtacttgtatgtaacctaatttaacgggagcccagagtgcacagatcagatatttattaaacatataaataaaacacagttttcacgatagaa

SEQ ID NO: 448292 - DNA, 821 bp, Homo sapiens
gcagaggacccaggtttgagtcctacctctgccagtttactagctctgtgaccctggatgagccgtgtagcctcggtttcctcaactggaaaataggtgtaatacttttctgctgcacaagtgtgttgtgaagatcaagtgaggaatggatgcaaaggcctgaagtgtgaaacagtagaaaaatggtctggttagtcttcattctcttatagaactttacacttccccaaacgctgtcttctccatggctgtacttgcctaatagcaactggggaggtaggctttagcaatgttacacttgaccaataggaaaatgaggctcagagaggtggagtgactcgcccacagtcacacagctttagtggctgggctgggcgaaagcacatcgtctttcttgactaacagctctgtgaccaccttatgcctcagaatggagaggccaagtggctgtgtggctgtgctggggaaatatctgtctcctttaatccatgtaatgaagaaaaagaaaactagctattatgactgtggttcattgagacccatggcttctggggtgactacatcatgccagctgtgaggggtacttgggcatctgaggtgatggtggggatgaagcctggctgccttcagaatcccatgccatcctgtggtctttgccttccagggttcaggaagactgactgaggccacttccaggtgggcagcagaggcaggccccagtgtgaccaccactgcgacccctgagcccacaagggcagagcagcattctgagagacgcacaggagaccaagccagaccaataaacagaacacttttccttc

SEQ ID NO: 448293 - DNA, 927 bp, Homo sapiens
caagcaatggcattttgattcatggagtacaagagttaccaaacttttttttttgtttgagatggagtatcgctctgtcgccaggccggagtgcagtggtgtgatcttggctcactgcagcctctgtctcctgggtttgagcgattatcctgtctcagcctcccgagtagctgggactacaggtgtgtgctaccatgcccagctaatttttgtatttttagtagagacggggtttcaccatcttagccagaatggtctcagtctcttgacctcgtgatccgcccaccttggcctcccaaagtgctggtattacaggcatgagccaccgcgtgcggcccaaactttttcataatggggaagtttacctgaaaacctggcttctctggggaaattgacagacctgtaagagtgggtaggcgttcctacagcagctttctgtggctggtgggtggtggctgcccctttagttggaacaggaaccctccagccggctccattccccacctggccgactccagattaagtgggaagtctccgagcaggatccaccttccctgaagcatgacttctccccccccagaggatcatgggtatatgatcactgatttcctttctgtgcagatgctcctggagaggtggtaccctctggggaatcaggactccgaaggagaggctctgacccagcaagtggagaagtggaggcctctcagttaagaagactgaatataaagaaagatggtaaggaacttggtgtagcagagctgctttttcctgtctggctagatttctaggggtgaaatgcagctggtggcctagcacagcagtaatcatagcccacctctgtcgtgtgccctgcagtttacacattactcagctcagaatcacctcaacagggtgggacaatggttcccattttgcagatatgaa

SEQ ID NO: 448294 - DNA, 847 bp, Homo sapiens
  misc_feature (26)..(26): n is a, c, g, or t
cggctaggtagcgaggccgggtgttncagcagcatccacatagtctacacagagctccccttgctgcccagacaagctgaaggaccacaggaaaagccatggagacttcagcatcctcctcccagcctcaggacaacagtcaagtccacagagaaacagaagatgtagactatggagagacagatttccacaagcaagatgggaaggctggactcttttcccaagaacaatatgagagaaacaagtcttcttcctcctcctcctcttcctcctcatcctcctcatcttcttcatcctcctcctcctcaggtcctgggcatggggagcctgacgttttgaaggatgagcttcaactctatggagatgctcctggagaggtggtaccctctggggaatcaggactccgaaggagaggctctgacccagcaagtggagaagtggaggcctctcagttaagaagactgaatataaagaaagatgatgagtttttccatttcgtcctcctgtgctttgccatcggggccttgctggtgtgttatcactattacgcagactggttcatgtctcttggggtcggcctgctcaccttcgcctccctggaaaccgttggcatctacttcggactagtgtaccgtatccacagcgtcctccaaggcttcatccccctcttccagaagtttaggctgacagggttcaggaagactgactgaggccacttccaggtgggcagcagaggcaggccccagtgtgaccaccactgcgacccctgagcccacaagggcagagcagcattctgagagacgcacaggagaccaagccagaccaataaacagaacacttttccttc

SEQ ID NO: 448295 - DNA, 937 bp, Homo sapiens
  misc_feature (26)..(26): n is a, c, g, or t
cggctaggtagcgaggccgggtgttncagcagcatccacatagtctacacagagctccccttgctgcccagacaagctgaaggaccacaggaaaagccatggagacttcagcatcctcctcccagcctcaggacaacagtcaagtccacagagaaacagaagatgtagactatggagagacagatttccacaagcaagatgggaaggctggactcttttcccaagaacaatatgagagaaacaagtcttcttcctcctcctcctcttcctcctcatcctcctcatcttcttcatcctcctcctcctcagagagcaatgatgaggaccagcaacccagagcaaccggaaaacatcgacggagcctgggggctggatacccccacgggaacggctcacccggtcctgggcatggggagcctgacgttttgaaggatgagcttcaactctatggagatgctcctggagaggtggtaccctctggggaatcaggactccgaaggagaggctctgacccagcaagtggagaagtggaggcctctcagttaagaagactgaatataaagaaagatgatgagtttttccatttcgtcctcctgtgctttgccatcggggccttgctggtgtgttatcactattacgcagactggttcatgtctcttggggtcggcctgctcaccttcgcctccctggaaaccgttggcatctacttcggactagtgtaccgtatccacagcgtcctccaaggcttcatccccctcttccagaagtttaggctgacagggttcaggaagactgactgaggccacttccaggtgggcagcagaggcaggccccagtgtgaccaccactgcgacccctgagcccacaagggcagagcagcattctgagagacgcacaggagaccaagccagaccaataaacagaacacttttccttc

SEQ ID NO: 448296 - DNA, 730 bp, Homo sapiens
  misc_feature (26)..(26): n is a, c, g, or t
cggctaggtagcgaggccgggtgttncagcagcatccacatagtctacacagagctccccttgctgcccagacaagctgaaggaccacaggaaaagccatggagacttcagcatcctcctcccagcctcaggacaacagtcaagtccacagagaaacagaagatgtagactatggagagacagatttccacaagcaagatgggaaggctggactcttttcccaagaacaatatgagagaaacaagtcttcttcctcctcctcctcttcctcctcatcctcctcatcttcttcatcctcctcctcctcaggtcctgggcatggggagcctgacgttttgaaggatgagcttcaactctatggagatgagtttttccatttcgtcctcctgtgctttgccatcggggccttgctggtgtgttatcactattacgcagactggttcatgtctcttggggtcggcctgctcaccttcgcctccctggaaaccgttggcatctacttcggactagtgtaccgtatccacagcgtcctccaaggcttcatccccctcttccagaagtttaggctgacagggttcaggaagactgactgaggccacttccaggtgggcagcagaggcaggccccagtgtgaccaccactgcgacccctgagcccacaagggcagagcagcattctgagagacgcacaggagaccaagccagaccaataaacagaacacttttccttc

SEQ ID NO: 448297 - DNA, 1933 bp, Homo sapiens
gcagaggacccaggtttgagtcctacctctgccagtttactagctctgtgaccctggatgagccgtgtagcctcggtttcctcaactggaaaataggtgtaatacttttctgctgcacaagtgtgttgtgaagatcaagtgaggaatggatgcaaaggcctgaagtgtgaaacagtagaaaaatggtctggttagtcttcattctcttatagaactttacacttccccaaacgctgtcttctccatggctgtacttgcctaatagcaactggggaggtaggctttagcaatgttacacttgaccaataggaaaatgaggctcagagaggtggagtgactcgcccacagtcacacagctttagtggctgggctgggcgaaagcacatcgtctttcttgactaacagctctgtgaccaccttatgcctcagaatggagaggccaagtggctgtgtggctgtgctggggaaatatctgtctcctttaatccatgtaatgaagaaaaagaaaactagctattatgactgtggttcattgagacccatggcttctggggtgactacatcatgccagctgtgaggggtacttgggcatctgaggtgatggtggggatgaagcctggctgccttcagaatcccatgccatcctgtggtctttgccttccagggttcaggaagactgactgaggccacttccaggtgggcagcagaggcaggccccagtgtgaccaccactgcgacccctgagcccacaagggcagagcagcattctgagagacgcacaggagaccaagccagaccaataaacagaacacttttccttccatgtggtctgaatgttggcaccagcccgggcaggggcatctcatttgggcagtactgctgtgcaacccagctgcaaggatggaaggcagagggtgggtgtggggcctgaggcttcacagtacctggaccagcaggaagattctgggaggtcactgctctcagaggacagcaagggaccctgagctctgcaagctgtgatctgtctgggttcatggtttttctcaaatcccaggctatctgcatgcgctctcaggtgctaccgagccatcctgggagagatggatggtccactgctttgaggcagggagccatcgggctggggccccttggtgaacctgatgcaggtaagatgctgaggactaaaaccattttttttgcacccaaaaaaaaaggcaggaaaatgatcatcagaaactaaatggcagccaggcatgggggctcacaactgtaatcctcgcactttgggaggctcaggctaagggtcgcttgaagctgagagttcaagaccaacctgggcaacatagtgagacccccatctctacaatttttttttaatgaccaaatgtggcggtacatacctgtacatacctgcggttccagctactcaagaggctgaggcaggaggactgcttgagcccaggagttcagggctgcagtgaggtacgatcaagccactgcactccagcctgggcgacagagcaagatcgtttctctaaaattaaaaaaaaaaaaaaaagacaaataaaaattgcatgtatttgtagtgtacaacatgttttgaaatatgtggaatggctaaatcaagctaattaacatatgtatccctcacataccctttttttatgatgagaacagtaaaaacctactgtcagcaatttgcaaagtatacaatacattgttattaactatggtcaccatgctatgtgattgatatcctgaacttgaactgagttcttgatggtcacagacatgctgttctcaaaactcagaagggtaacttctgaggttttgatttcaagtacttgtatgtaacctaatttaacgggagcccagagtgcacagatcagatatttattaaacatataaataaaacacagttttcacgatagaa

SEQ ID NO: 448298 - DNA, 411 bp, Homo sapiens
tcccaaagtgctggtattacaggcatgagccaccgcgtgcggcccaaactttttcataatggggaagtttacctgaaaacctggcttctctggggaaattgacagacctgtaagagtgggtaggcgttcctacagcagctttctgtggctggtgggtggtggctgcccctttagttggaacaggaaccctccagccggctccattccccacctggccgactccagattaagtgggaagtctccgagcaggatccaccttccctgaagcatgacttctccccccccagaggatcatgggtatatgatcactgatttcctttctgtgcagatgctcctggagaggtggtaccctctggggaatcaggtgagtgtccagttagaggagagaggtcgttggtgctggtattgagc

SEQ ID NO: 448299 - DNA, 597 bp, Homo sapiens
gatgattggaagatcatacaagtgcctgtctgcccttgaggggaagaagatgacaggctaggagcaaggtcaccagggaactagaacaggcaccaagaaccacatggtgaatgatgctcctggagaggtggtaccctctggggaatcaggactccgaaggagaggctctgacccagcaagtggagaagtggaggcctctcagttaagaagactgaatataaagaaagatgatgagtttttccatttcgtcctcctgtgctttgccatcggggccttgctggtgtgttatcactattacgcagactggttcatgtctcttggggtcggcctgctcaccttcgcctccctggaaaccgttggcatctacttcggactagtgtaccgtatccacagcgtcctccaaggcttcatccccctcttccagaagtttaggctgacagggttcaggaagactgactgaggccacttccaggtgggcagcagaggcaggccccagtgtgaccaccactgcgacccctgagcccacaagggcagagcagcattctgagagacgcacaggagaccaagccagaccaataaacagaacacttttccttc

SEQ ID NO: 448300 - DNA, 1959 bp, Homo sapiens
  misc_feature (26)..(26): n is a, c, g, or t
cggctaggtagcgaggccgggtgttncagcagcatccacatagtctacacagagctccccttgctgcccagacaagctgaaggaccacaggaaaagccatggagacttcagcatcctcctcccagcctcaggacaacagtcaagtccacagagaaacagaagatgtagactatggagagacagatttccacaagcaagatgggaaggctggactcttttcccaagaacaatatgagagaaacaagtcttcttcctcctcctcctcttcctcctcatcctcctcatcttcttcatcctcctcctcctcaggtcctgggcatggggagcctgacgttttgaaggatgagcttcaactctatggagatgctcctggagaggtggtaccctctggggaatcaggactccgaaggagaggctctgacccagcaagtggagaagtggaggcctctcagttaagaagactgaatataaagaaagatgatgagtttttccatttcgtcctcctgtgctttgccatcggggccttgctggtgtgttatcactattacgcagactggttcatgtctcttggggtcggcctgctcaccttcgcctccctggaaaccgttggcatctacttcggactagtgtaccgtatccacagcgtcctccaaggcttcatccccctcttccagaagtttaggctgacagggttcaggaagactgactgaggccacttccaggtgggcagcagaggcaggccccagtgtgaccaccactgcgacccctgagcccacaagggcagagcagcattctgagagacgcacaggagaccaagccagaccaataaacagaacacttttccttccatgtggtctgaatgttggcaccagcccgggcaggggcatctcatttgggcagtactgctgtgcaacccagctgcaaggatggaaggcagagggtgggtgtggggcctgaggcttcacagtacctggaccagcaggaagattctgggaggtcactgctctcagaggacagcaagggaccctgagctctgcaagctgtgatctgtctgggttcatggtttttctcaaatcccaggctatctgcatgcgctctcaggtgctaccgagccatcctgggagagatggatggtccactgctttgaggcagggagccatcgggctggggccccttggtgaacctgatgcaggtaagatgctgaggactaaaaccattttttttgcacccaaaaaaaaaggcaggaaaatgatcatcagaaactaaatggcagccaggcatgggggctcacaactgtaatcctcgcactttgggaggctcaggctaagggtcgcttgaagctgagagttcaagaccaacctgggcaacatagtgagacccccatctctacaatttttttttaatgaccaaatgtggcggtacatacctgtacatacctgcggttccagctactcaagaggctgaggcaggaggactgcttgagcccaggagttcagggctgcagtgaggtacgatcaagccactgcactccagcctgggcgacagagcaagatcgtttctctaaaattaaaaaaaaaaaaaaaagacaaataaaaattgcatgtatttgtagtgtacaacatgttttgaaatatgtggaatggctaaatcaagctaattaacatatgtatccctcacataccctttttttatgatgagaacagtaaaaacctactgtcagcaatttgcaaagtatacaatacattgttattaactatggtcaccatgctatgtgattgatatcctgaacttgaactgagttcttgatggtcacagacatgctgttctcaaaactcagaagggtaacttctgaggttttgatttcaagtacttgtatgtaacctaatttaacgggagcccagagtgcacagatcagatatttattaaacatataaataaaacacagttttcacgatagaa

SEQ ID NO: 448301 - DNA, 934 bp, Homo sapiens
  misc_feature (26)..(26): n is a, c, g, or t
cggctaggtagcgaggccgggtgttncagcagcatccacatagtctacacagagctccccttgctgcccagacaagctgaaggaccacaggaactcaaatacacaggaaacagttgtttcatgtgtcggactcctttccattgctctttccaatgtggtaatgcagctaaactaagagaaaagccatggagacttcagcatcctcctcccagcctcaggacaacagtcaagtccacagagaaacagaagatgtagactatggagagacagatttccacaagcaagatgggaaggctggactcttttcccaagaacaatatgagagaaacaagtcttcttcctcctcctcctcttcctcctcatcctcctcatcttcttcatcctcctcctcctcaggtcctgggcatggggagcctgacgttttgaaggatgagcttcaactctatggagatgctcctggagaggtggtaccctctggggaatcaggactccgaaggagaggctctgacccagcaagtggagaagtggaggcctctcagttaagaagactgaatataaagaaagatgatgagtttttccatttcgtcctcctgtgctttgccatcggggccttgctggtgtgttatcactattacgcagactggttcatgtctcttggggtcggcctgctcaccttcgcctccctggaaaccgttggcatctacttcggactagtgtaccgtatccacagcgtcctccaaggcttcatccccctcttccagaagtttaggctgacagggttcaggaagactgactgaggccacttccaggtgggcagcagaggcaggccccagtgtgaccaccactgcgacccctgagcccacaagggcagagcagcattctgagagacgcacaggagaccaagccagaccaataaacagaacacttttccttc

SEQ ID NO: 448302 - DNA, 3026 bp, Homo sapiens
cctcctcctcctcacaggtgtgtctctagtcctcgtggttgcctgccccactccctgccgagacgcctgccagaaaggtcacctatcctgaaccccagcaagcctgaaacagctcagccaagcaccctgcgatggaagctgcagatgcctccaggagcaacgggtcgagcccagaagccagggatgcccggagcccgtcgggccccagtggcagcctggagaatggcaccaaggctgacggcaaggatgccaagaccaccaacgggcacggcggggaggcagctgagggcaagagcctgggcagcgccctgaagccaggggaaggtaggagcgccctgttcgcgggcaatgagtggcggcgacccatcatccagtttgtcgagtccggggacgacaagaactccaactacttcagcatggactctatggaaggcaagaggtcgccgtacgcagggctccagctgggggctgccaagaagccacccgttacctttgccgaaaagggcgagctgcgcaagtccattttctcggagtcccggaagcccacggtgtccatcatggagcccggggagacccggcggaacagctacccccgggccgacacgggccttttttcacggtccaagtccggctccgaggaggtgctgtgcgactcctgcatcggcaacaagcagaaggcggtcaagtcctgcctggtgtgccaggcctccttctgcgagctgcatctcaagccccacctggagggcgccgccttccgagaccaccagctgctcgagcccatccgggactttgaggcccgcaagtgtcccgtgcatggcaagacgatggagctcttctgccagaccgaccagacctgcatctgctacctttgcatgttccaggagcacaagaatcatagcaccgtgacagtggaggaggccaaggccgagaaggagacggagctgtcactgcaaaaggagcagctgcagctcaagatcattgagattgaggatgaagctgagaagtggcagaaggagaaggaccgcatcaagagcttcaccaccaatgagaaggccatcctggagcagaacttccgggacctggtgcgggacctggagaagcaaaaggaggaagtgagggctgcgctggagcagcgggagcaggatgctgtggaccaagtgaaggtgatcatggatgctctggatgagagagccaaggtgctgcatgaggacaagcagacccgggagcagctgcatagcatcagcgactctgtgttgtttctgcaggaatttggtgcattgatgagcaattactctctccccccacccctgcccacctatcatgtcctgctggagggggagggcctgggacagtcactaggcaacttcaaggacgacctgctcaatgtatgcatgcgccacgttgagaagatgtgcaaggcggacctgagccgtaacttcattgagaggaaccacatggagaacggtggtgaccatcgctatgtgaacaactacacgaacagcttcgggggtgagtggagtgcaccggacaccatgaagagatactccatgtacctgacacccaaaggtggggtccggacatcataccagccctcgtctcctggccgcttcaccaaggagaccacccagaagaatttcaacaatctctatggcaccaaaggtaactacacctcccgggtctgggagtactcctccagcattcagaactctgacaatgacctgcccgtcgtccaaggcagctcctccttctccctgaaaggctatccctccctcatgcggagccaaagccccaaggcccagccccagacttggaaatctggcaagcagactatgctgtctcactaccggccattctacgtcaacaaaggcaacgggattgggtccaacgaagccccatgagctcctggcggaaggaacgaggcgccacacccctgctcttcctcctgaccctgctgctcttgccttctaagctactgtgcttgtctgggtgggagggagcctggtcctgcacctgccctctgcagccctctgccagcctcttgggggcagttccggcctctccgacttccccactggccacactccattcagactcctttcctgccttgtgacctcagatggtcaccatcattcctgtgctcagaggccaacccatcacaggggtgagataggttggggcctgccctaacccgccagcctcctcctctcgggctggatctgggggctagcagtgagtacccgcatggtatcagcctgcctctcccgcccacgccctgctgtctccaggcctatagacgtttctctccaaggccctatcccccaatgttgtcagcagatgcctggacagcacagccacccatctcccattcacatggcccacctcctgcttcccagaggactggccctacgtgctctctctcgtcctacctatcaatgcccagcatggcagaacctgcagcccttggccactgcagatggaaacctctcagtgtcttgacatcaccctacccaggcggtgggtctccaccacagccactttgagtctgtggtccctggagggtggcttctcctgactggcaggatgaccttagccaagatattcctctgttccctctgctgagataaagaattcccttaacatgatataatccacccatgcaaatagctactggcccagctaccatttaccatttgcctacagaatttcattcagtctacactttggcattctctctggcgatggagtgtggctgggctgaccgcaaaaggtgccttacacactgcccccaccctcagccgttgccccatcagaggctgcctcctccttctgattaccccccatgttgcatatcagggtgctcaaggattggagaggagacaaaaccaggagcagcacagtggggacatctcccgtctcaacagccccaggcctatgggggctctggaaggatgggccagcttgcaggggttggggagggagacatccagcttgggctttcccctttggaataaaccattggtctgtca

SEQ ID NO: 448303 - DNA, 2200 bp, Homo sapiens
cctcctcctcctcacaggtgtgtctctagtcctcgtggttgcctgccccactccctgccgagacgcctgccagaaaggtcacctatcctgaaccccagcaagcctgaaacagctcagccaagcaccctgcgatggaagctgcagatgcctccaggagcaacgggtcgagcccagaagccagggatgcccggagcccgtcgggccccagtggcagcctggagaatggcaccaaggctgacggcaaggatgccaagaccaccaacgggcacggcggggaggcagctgagggcaagagcctgggcagcgccctgaagccaggggaaggtaggagcgccctgttcgcgggcaatgagtggcggcgacccatcatccagtttgtcgagtccggggacgacaagaactccaactacttcagcatggactctatggaaggcaagaggtcgccgtacgcagggctccagctgggggctgccaagaagccacccgttacctttgccgaaaagggcgagctgcgcaagtccattttctcggagtcccggaagcccacggtgtccatcatggagcccggggagacccggcggaacagctacccccgggccgacacgggccttttttcacggtccaagtccggctccgaggaggtgctgtgcgactcctgcatcggcaacaagcagaaggcggtcaagtcctgcctggtgtgccaggcctccttctgcgagctgcatctcaagccccacctggagggcgccgccttccgagaccaccagctgctcgagcccatccgggactttgaggcccgcaagtgtcccgtgcatggcaagacgatggagctcttctgccagaccgaccagacctgcatctgctacctttgcatgttccaggagcacaagaatcatagcaccgtgacagtggaggaggccaaggccgagaaggagacggagctgtcactgcaaaaggagcagctgcagctcaagatcattgagattgaggatgaagctgagaagtggcagaaggagaaggaccgcatcaagagcttcaccaccaatgagaaggccatcctggagcagaacttccgggacctggtgcgggacctggagaagcaaaaggaggaagtgagggctgcgctggagcagcgggagcaggatgctgtggaccaagtgaaggtgatcatggatgctctggatgagagagccaaggtgctgcatgaggacaagcagacccgggagcagctgcatagcatcagcgactctgtgttgtttctgcaggaatttggtgcattgatgagcaattactctctccccccacccctgcccacctatcatgtcctgctggagggggagggcctgggacagtcactaggcaacttcaaggacgacctgctcaatgtatgcatgcgccacgttgagaagatgtgcaaggcggacctgagccgtaacttcattgagaggaaccacatggagaacggtggtgaccatcgctatgtgaacaactacacgaacagcttcgggggtgagtggagtgcaccggacaccatgaagagatactccatgtacctgacacccaaaggtggggtccggacatcataccagccctcgtctcctggccgcttcaccaaggagaccacccagaagaatttcaacaatctctatggcaccaaaggtaactacacctcccgggtctgggagtactcctccagcattcagaactctgacaatgacctgcccgtcgtccaaggcagctcctccttctccctgaaaggctatccctccctcatgcggagccaaagccccaaggcccagccccagacttggaaatctggcaagcagactatgctggtggtttaagcaaggtctgagcatccctcaagtcctgctgtggaccacacaaaggcaaggagctgaccaggaggtgtcagttccctgagagacagggccaaaggcagtgtacccttgagtctcactaccggccattctacgtcaacaaaggcaacgggattgggtccaacgaagccccatgagctcctggcgggtgctcaaggattggagaggagacaaaaccaggagcagcacagtggggacatctcccgtctcaacagccccaggcctatgggggctctggaaggatgggccagcttgcaggggttggggagggagacatccagcttgggctttcccctttggaataaaccattggtctgtca

SEQ ID NO: 448304 - DNA, 745 bp, Homo sapiens
  misc_feature (40)..(40): n is a, c, g, or t
cattaagtccccccccccacaattgatctcgctaccacgncgaggcagttgccctttgcgcacagcacagccacccatctcccattcacatggcccacctcctgcttcccagaggactggccctacgtgctctctctcgtcctacctatcaatgcccagcatggcagaacctgcagcccttggccactgcagatggaaacctctcagtgtcttgacatcaccctacccaggcggtgggtctccaccacagccactttgagtctgtggtccctggagggtggcttctcctgactggcaggatgaccttagccaagatattcctctgttccctctgctgagataaagaattcccttaacatgatataatccacccatgcaaatagctactggcccagctaccatttaccatttgcctacagaatttcattcagtctacactttggcattctctctggcgatggagtgtggctgggctgaccgcaaaaggtgccttacacactgcccccaccctcagccgttgccccatcagaggctgcctcctccttctgattaccccccatgttgcatatcagggtgctcaaggattggagaggagacaaaaccaggagcagcacagtggggacatctcccgtctcaacagccccaggcctatgggggctctggaaggatgggccagcttgcaggggttggggagggagacatccagcttgggctttcccctttggaataaaccattggtctgtca

SEQ ID NO: 448305 - DNA, 420 bp, Homo sapiens
  misc_feature (6)..(6): n is a, c, g, or t
acccanagccacttttgagtctgtggttcccctggagggtgcttctcctgactggcaggagaagccacactccatcgccagagagaatgccaaagtgtagactgaatgaaattctgtaggcaaatggtaaatggtagctgggccagtagctatttgcatgggtgccttacacactgcccccaccctcagccgttgccccatcagaggctgcctcctccttctgattaccccccatgttgcatatcagggtgctcaaggattggagaggagacaaaaccaggagcagcacagtggggacatctcccgtctcaacagccccaggcctatgggggctctggaaggatgggccagcttgcaggggttggggagggagacatccagcttgggctttcccctttggaataaaccattggtctgtca

SEQ ID NO: 448306 - DNA, 2495 bp, Homo sapiens
  misc_feature (14)..(14): n is a, c, g, or t
tcctaggattaacncccccccggggtatgggatatcgcgaaccacgccgtcgccaggtccactgaaaagggcaagcaccctgtaaatgagtttccctcctgctcttgctgggtggaggagataggcagaggtttagcccttaaaaagacatggctaggatatccagccctagtggcctgagaatacagcaagatggtatttaacttactgctagatccttggcgactggcatggtgcctggcatatccgaggtcctgatgaatgtttgctgaatgaagagctgaatagatgagtgatgagccctggctgcgagtgtgccccctgagtggagccgctccctggttctctggttctcttccatctcctccccctgacttctccaatcctggactctttctctgcagacggagctgtcactgcaaaaggagcagctgcagctcaagatcattgagattgaggatgaagctgagaagtggcagaaggagaaggaccgcatcaagagcttcaccaccaatgagaaggccatcctggagcagaacttccgggacctggtgcgggacctggagaagcaaaaggaggaagtgagggctgcgctggagcagcgggagcaggatgctgtggaccaagtgaaggtgatcatggatgctctggatgagagagccaaggtgctgcatgaggacaagcagacccgggagcagctgcatagcatcagcgactctgtgttgtttctgcaggaatttggtgcattgatgagcaattactctctccccccacccctgcccacctatcatgtcctgctggagggggagggcctgggacagtcactaggcaacttcaaggacgacctgctcaatgtatgcatgcgccacgttgagaagatgtgcaaggcggacctgagccgtaacttcattgagaggaaccacatggagaacggtggtgaccatcgctatgtgaacaactacacgaacagcttcgggggtgagtggagtgcaccggacaccatgaagagatactccatgtacctgacacccaaaggtggggtccggacatcataccagccctcgtctcctggccgcttcaccaaggagaccacccagaagaatttcaacaatctctatggcaccaaaggtaactacacctcccgggtctgggagtactcctccagcattcagaactctgacaatgacctgcccgtcgtccaaggcagctcctccttctccctgaaaggctatccctccctcatgcggagccaaagccccaaggcccagccccagacttggaaatctggcaagcagactatgctgtctcactaccggccattctacgtcaacaaaggcaacgggattgggtccaacgaagccccatgagctcctggcggaaggaacgaggcgccacacccctgctcttcctcctgaccctgctgctcttgccttctaagctactgtgcttgtctgggtgggagggagcctggtcctgcacctgccctctgcagccctctgccagcctcttgggggcagttccggcctctccgacttccccactggccacactccattcagactcctttcctgccttgtgacctcagatggtcaccatcattcctgtgctcagaggccaacccatcacaggggtgagataggttggggcctgccctaacccgccagcctcctcctctcgggctggatctgggggctagcagtgagtacccgcatggtatcagcctgcctctcccgcccacgccctgctgtctccaggcctatagacgtttctctccaaggccctatcccccaatgttgtcagcagatgcctggacagcacagccacccatctcccattcacatggcccacctcctgcttcccagaggactggccctacgtgctctctctcgtcctacctatcaatgcccagcatggcagaacctgcagcccttggccactgcagatggaaacctctcagtgtcttgacatcaccctacccaggcggtgggtctccaccacagccactttgagtctgtggtccctggagggtggcttctcctgactggcaggatgaccttagccaagatattcctctgttccctctgctgagataaagaattcccttaacatgatataatccacccatgcaaatagctactggcccagctaccatttaccatttgcctacagaatttcattcagtctacactttggcattctctctggcgatggagtgtggctgggctgaccgcaaaaggtgccttacacactgcccccaccctcagccgttgccccatcagaggctgcctcctccttctgattaccccccatgttgcatatcagggtgctcaaggattggagaggagacaaaaccaggagcagcacagtggggacatctcccgtctcaacagccccaggcctatgggggctctggaaggatgggccagcttgcaggggttggggagggagacatccagcttgggctttcccctttggaataaaccattggtctgtca

SEQ ID NO: 448307 - DNA, 3814 bp, Homo sapiens
cctcctcctcctcacaggtgtgtctctagtcctcgtggttgcctgccccactccctgccgagacgcctgccagaaaggtcacctatcctgaaccccagcaagcctgaaacagctcagccaagcaccctgcgatggaagctgcagatgcctccaggagcaacgggtcgagcccagaagccagggatgcccggagcccgtcgggccccagtggcagcctggagaatggcaccaaggctgacggcaaggatgccaagaccaccaacgggcacggcggggaggcagctgagggcaagagcctgggcagcgccctgaagccaggggaaggtaggagcgccctgttcgcgggcaatgagtggcggcgacccatcatccagtttgtcgagtccggggacgacaagaactccaactacttcagcatggactctatggaaggcaagaggtcgccgtacgcagggctccagctgggggctgccaagaagccacccgttacctttgccgaaaagggcgagctgcgcaagtccattttctcggagtcccggaagcccacggtgtccatcatggagcccggggagacccggcggaacagctacccccgggccgacacgggccttttttcacggtccaagtccggctccgaggaggtgctgtgcgactcctgcatcggcaacaagcagaaggcggtcaagtcctgcctggtgtgccaggcctccttctgcgagctgcatctcaagccccacctggagggcgccgccttccgagaccaccagctgctcgagcccatccgggactttgaggcccgcaagtgtcccgtgcatggcaagacgatggagctcttctgccagaccgaccagacctgcatctgctacctttgcatgttccaggagcacaagaatcatagcaccgtgacagtggaggaggccaaggccgagaaggagacggagctgtcactgcaaaaggagcagctgcagctcaagatcattgagattgaggatgaagctgagaagtggcagaaggagaaggaccgcatcaagagcttcaccaccaatgagaaggccatcctggagcagaacttccgggacctggtgcgggacctggagaagcaaaaggaggaagtgagggctgcgctggagcagcgggagcaggatgctgtggaccaagtgaaggtgatcatggatgctctggatgagagagccaaggtgctgcatgaggacaagcagacccgggagcagctgcatagcatcagcgactctgtgttgtttctgcaggaatttggtgcattgatgagcaattactctctccccccacccctgcccacctatcatgtcctgctggagggggagggcctgggacagtcactaggcaacttcaaggacgacctgctcaatgtatgcatgcgccacgttgagaagatgtgcaaggcggacctgagccgtaacttcattgagaggaaccacatggagaacggtggtgaccatcgctatgtgaacaactacacgaacagcttcgggggtgagtggagtgcaccggacaccatgaagagatactccatgtacctgacacccaaaggtggggtccggacatcataccagccctcgtctcctggccgcttcaccaaggagaccacccagaagaatttcaacaatctctatggcaccaaaggtaactacacctcccgggtctgggagtactcctccagcattcagaactctgacaatgacctgcccgtcgtccaaggcagctcctccttctccctgaaaggctatccctccctcatgcggagccaaagccccaaggcccagccccagacttggaaatctggcaagcagactatgctgtctcactaccggccattctacgtcaacaaaggcaacgggattgggtccaacgaagccccatgagctcctggcggaaggaacgaggcgccacacccctgctcttcctcctgaccctgctgctcttgccttctaagctactgtgcttgtctgggtgggagggagcctggtcctgcacctgccctctgcagccctctgccagcctcttgggggcagttccggcctctccgacttccccactggccacactccattcagactcctttcctgccttgtgacctcagatggtcaccatcattcctgtgctcagaggccaacccatcacaggggtgagataggttggggcctgccctaacccgccagcctcctcctctcgggctggatctgggggctagcagtgagtacccgcatggtatcagcctgcctctcccgcccacgccctgctgtctccaggcctatagacgtttctctccaaggccctatcccccaatgttgtcagcagatgcctggacagcacagccacccatctcccattcacatggcccacctcctgcttcccagaggactggccctacgtgctctctctcgtcctacctatcaatgcccagcatggcagaacctgcagcccttggccactgcagatggaaacctctcagtgtcttgacatcaccctacccaggcggtgggtctccaccacagccactttgagtctgtggtccctggagggtggcttctcctgactggcaggatgaccttagccaagatattcctctgttccctctgctgagataaagaattcccttaacatgatataatccacccatgcaaatagctactggcccagctaccatttaccatttgcctacagaatttcattcagtctacactttggcattctctctggcgatggagtgtggctgggctgaccgcaaaaggtgccttacacactgcccccaccctcagccgttgccccatcagaggctgcctcctccttctgattaccccccatgttgcatatcagggtgctcaaggattggagaggagacaaaaccaggagcagcacagtggggacatctcccgtctcaacagccccaggcctatgggggctctggaaggatgggccagcttgcaggggttggggagggagacatccagcttgggctttcccctttggaataaaccattggtctgtcaaaaaaaaaaaaaaaaaaaaaaaaaaaaaaaaaaaaaaaaaaagcgatgacgaaggaaagaaaaaaatactcacatggaagagaaaacagaaagaaaatgagaatacaggaaggatatagtagcaaaagagggggctcccatgagtggaggctatgataattaataggagagacattgcggcgtggttttaaaagacagttgtagtagggagacaaagttggaactggtggagggtaatgttttgtggaaaaaggggagcgcccatttgactttcgtgggggagtgaggacagaacaaattggggagaagatactatatcctaaaacgagagagagagtttaagacgccttgaagaaggggagaaaatcatataaaacattgttgtaagcagggggtgagaaaaatgggttggtaaaaaacaacagagtggacatatgttgtttagagtgagagatgggcgacgaaaaagcagtggggcgccaacacgaagggacgcaaaagtgagcacgtgcaggaggaaacagatattgtgtacacccccaggggagagcgcattcggctactagacgggggaaagacacaatgcggtatatgatattgagagtaaatatcgcaaagaaatagattaaaataacgatacgagggaggacagacatgataaaaatacaaaataggtaagagaagagaaacataagtgtgcaagaaagaggactaggagcacgaagagtacagggataggagaaaaaaaggagagtaacaacaggtagaaaaaaacaacaaacaaagaa

SEQ ID NO: 448308 - DNA, 3128 bp, Homo sapiens
cctcctcctcctcacaggtgtgtctctagtcctcgtggttgcctgccccactccctgccgagacgcctgccagaaaggtcacctatcctgaaccccagcaagcctgaaacagctcagccaagcaccctgcgatggaagctgcagatgcctccaggagcaacgggtcgagcccagaagccagggatgcccggagcccgtcgggccccagtggcagcctggagaatggcaccaaggctgacggcaaggatgccaagaccaccaacgggcacggcggggaggcagctgagggcaagagcctgggcagcgccctgaagccaggggaaggtaggagcgccctgttcgcgggcaatgagtggcggcgacccatcatccagtttgtcgagtccggggacgacaagaactccaactacttcagcatggactctatggaaggcaagaggtcgccgtacgcagggctccagctgggggctgccaagaagccacccgttacctttgccgaaaagggcgagctgcgcaagtccattttctcggagtcccggaagcccacggtgtccatcatggagcccggggagacccggcggaacagctacccccgggccgacacgggccttttttcacggtccaagtccggctccgaggaggtgctgtgcgactcctgcatcggcaacaagcagaaggcggtcaagtcctgcctggtgtgccaggcctccttctgcgagctgcatctcaagccccacctggagggcgccgccttccgagaccaccagctgctcgagcccatccgggactttgaggcccgcaagtgtcccgtgcatggcaagacgatggagctcttctgccagaccgaccagacctgcatctgctacctttgcatgttccaggagcacaagaatcatagcaccgtgacagtggaggaggccaaggccgagaaggagacggagctgtcactgcaaaaggagcagctgcagctcaagatcattgagattgaggatgaagctgagaagtggcagaaggagaaggaccgcatcaagagcttcaccaccaatgagaaggccatcctggagcagaacttccgggacctggtgcgggacctggagaagcaaaaggaggaagtgagggctgcgctggagcagcgggagcaggatgctgtggaccaagtgaaggtgatcatggatgctctggatgagagagccaaggtgctgcatgaggacaagcagacccgggagcagctgcatagcatcagcgactctgtgttgtttctgcaggaatttggtgcattgatgagcaattactctctccccccacccctgcccacctatcatgtcctgctggagggggagggcctgggacagtcactaggcaacttcaaggacgacctgctcaatgtatgcatgcgccacgttgagaagatgtgcaaggcggacctgagccgtaacttcattgagaggaaccacatggagaacggtggtgaccatcgctatgtgaacaactacacgaacagcttcgggggtgagtggagtgcaccggacaccatgaagagatactccatgtacctgacacccaaaggtggggtccggacatcataccagccctcgtctcctggccgcttcaccaaggagaccacccagaagaatttcaacaatctctatggcaccaaaggtaactacacctcccgggtctgggagtactcctccagcattcagaactctgacaatgacctgcccgtcgtccaaggcagctcctccttctccctgaaagcaggcactgggaaaaccccttatcagttcaccaccttgggacaggccactgcagagttttccaaaccactgggtcgcagtgggctgtctaaaaataatcccggctatccctccctcatgcggagccaaagccccaaggcccagccccagacttggaaatctggcaagcagactatgctgtctcactaccggccattctacgtcaacaaaggcaacgggattgggtccaacgaagccccatgagctcctggcggaaggaacgaggcgccacacccctgctcttcctcctgaccctgctgctcttgccttctaagctactgtgcttgtctgggtgggagggagcctggtcctgcacctgccctctgcagccctctgccagcctcttgggggcagttccggcctctccgacttccccactggccacactccattcagactcctttcctgccttgtgacctcagatggtcaccatcattcctgtgctcagaggccaacccatcacaggggtgagataggttggggcctgccctaacccgccagcctcctcctctcgggctggatctgggggctagcagtgagtacccgcatggtatcagcctgcctctcccgcccacgccctgctgtctccaggcctatagacgtttctctccaaggccctatcccccaatgttgtcagcagatgcctggacagcacagccacccatctcccattcacatggcccacctcctgcttcccagaggactggccctacgtgctctctctcgtcctacctatcaatgcccagcatggcagaacctgcagcccttggccactgcagatggaaacctctcagtgtcttgacatcaccctacccaggcggtgggtctccaccacagccactttgagtctgtggtccctggagggtggcttctcctgactggcaggatgaccttagccaagatattcctctgttccctctgctgagataaagaattcccttaacatgatataatccacccatgcaaatagctactggcccagctaccatttaccatttgcctacagaatttcattcagtctacactttggcattctctctggcgatggagtgtggctgggctgaccgcaaaaggtgccttacacactgcccccaccctcagccgttgccccatcagaggctgcctcctccttctgattaccccccatgttgcatatcagggtgctcaaggattggagaggagacaaaaccaggagcagcacagtggggacatctcccgtctcaacagccccaggcctatgggggctctggaaggatgggccagcttgcaggggttggggagggagacatccagcttgggctttcccctttggaataaaccattggtctgtca

SEQ ID NO: 448309 - DNA, 2184 bp, Homo sapiens
  misc_feature (14)..(14): n is a, c, g, or t
tcctaggattaacncccccccggggtatgggatatcgcgaaccacgccgtcgccaggtccactgaaaagggcaagcaccctgtaaatgagtttccctcctgctcttgctgggtggaggagataggcagaggtttagcccttaaaaagacatggctaggatatccagccctagtggcctgagaatacagcaagatgacggagctgtcactgcaaaaggagcagctgcagctcaagatcattgagattgaggatgaagctgagaagtggcagaaggagaaggaccgcatcaagagcttcaccaccaatgagaaggccatcctggagcagaacttccgggacctggtgcgggacctggagaagcaaaaggaggaagtgagggctgcgctggagcagcgggagcaggatgctgtggaccaagtgaaggaatttggtgcattgatgagcaattactctctccccccacccctgcccacctatcatgtcctgctggagggggagggcctgggacagtcactaggcaacttcaaggacgacctgctcaatgtatgcatgcgccacgttgagaagatgtgcaaggcggacctgagccgtaacttcattgagaggaaccacatggagaacggtggtgaccatcgctatgtgaacaactacacgaacagcttcgggggtgagtggagtgcaccggacaccatgaagagatactccatgtacctgacacccaaaggtggggtccggacatcataccagccctcgtctcctggccgcttcaccaaggagaccacccagaagaatttcaacaatctctatggcaccaaaggtaactacacctcccgggtctgggagtactcctccagcattcagaactctgacaatgacctgcccgtcgtccaaggcagctcctccttctccctgaaaggctatccctccctcatgcggagccaaagccccaaggcccagccccagacttggaaatctggcaagcagactatgctgtctcactaccggccattctacgtcaacaaaggcaacgggattgggtccaacgaagccccatgagctcctggcggaaggaacgaggcgccacacccctgctcttcctcctgaccctgctgctcttgccttctaagctactgtgcttgtctgggtgggagggagcctggtcctgcacctgccctctgcagccctctgccagcctcttgggggcagttccggcctctccgacttccccactggccacactccattcagactcctttcctgccttgtgacctcagatggtcaccatcattcctgtgctcagaggccaacccatcacaggggtgagataggttggggcctgccctaacccgccagcctcctcctctcgggctggatctgggggctagcagtgagtacccgcatggtatcagcctgcctctcccgcccacgccctgctgtctccaggcctatagacgtttctctccaaggccctatcccccaatgttgtcagcagatgcctggacagcacagccacccatctcccattcacatggcccacctcctgcttcccagaggactggccctacgtgctctctctcgtcctacctatcaatgcccagcatggcagaacctgcagcccttggccactgcagatggaaacctctcagtgtcttgacatcaccctacccaggcggtgggtctccaccacagccactttgagtctgtggtccctggagggtggcttctcctgactggcaggatgaccttagccaagatattcctctgttccctctgctgagataaagaattcccttaacatgatataatccacccatgcaaatagctactggcccagctaccatttaccatttgcctacagaatttcattcagtctacactttggcattctctctggcgatggagtgtggctgggctgaccgcaaaaggtgccttacacactgcccccaccctcagccgttgccccatcagaggctgcctcctccttctgattaccccccatgttgcatatcagggtgctcaaggattggagaggagacaaaaccaggagcagcacagtggggacatctcccgtctcaacagccccaggcctatgggggctctggaaggatgggccagcttgcaggggttggggagggagacatccagcttgggctttcccctttggaataaaccattggtctgtca

SEQ ID NO: 448310 - DNA, 1881 bp, Homo sapiens
agtagcccacacctgtgcctggggccgtgggggcggctcctctgcctctgtgttgtttttttgtgtggctgctgggagtgtgtctgctctaggaggtggtggccggtgagtcagacagtggagtgaccatccactcctccccgatgctagcctgcccaccagaccagggactcgtccacaccctcaaaggcccctgcgctaagagacaccaggccacttcatcctggactctgtggggcacagggctgggctaacacctaggagggcatttgtttattctttgagtatctgctgtgcaccaggacactgataggcgcaggtggtgaccatcgctatgtgaacaactacacgaacagcttcgggggtgagtggagtgcaccggacaccatgaagagatactccatgtacctgacacccaaaggtggggtccggacatcataccagccctcgtctcctggccgcttcaccaaggagaccacccagaagaatttcaacaatctctatggcaccaaaggtaactacacctcccgggtctgggagtactcctccagcattcagaactctgacaatgacctgcccgtcgtccaaggcagctcctccttctccctgaaaggctatccctccctcatgcggagccaaagccccaaggcccagccccagacttggaaatctggcaagcagactatgctgtctcactaccggccattctacgtcaacaaaggcaacgggattgggtccaacgaagccccatgagctcctggcggaaggaacgaggcgccacacccctgctcttcctcctgaccctgctgctcttgccttctaagctactgtgcttgtctgggtgggagggagcctggtcctgcacctgccctctgcagccctctgccagcctcttgggggcagttccggcctctccgacttccccactggccacactccattcagactcctttcctgccttgtgacctcagatggtcaccatcattcctgtgctcagaggccaacccatcacaggggtgagataggttggggcctgccctaacccgccagcctcctcctctcgggctggatctgggggctagcagtgagtacccgcatggtatcagcctgcctctcccgcccacgccctgctgtctccaggcctatagacgtttctctccaaggccctatcccccaatgttgtcagcagatgcctggacagcacagccacccatctcccattcacatggcccacctcctgcttcccagaggactggccctacgtgctctctctcgtcctacctatcaatgcccagcatggcagaacctgcagcccttggccactgcagatggaaacctctcagtgtcttgacatcaccctacccaggcggtgggtctccaccacagccactttgagtctgtggtccctggagggtggcttctcctgactggcaggatgaccttagccaagatattcctctgttccctctgctgagataaagaattcccttaacatgatataatccacccatgcaaatagctactggcccagctaccatttaccatttgcctacagaatttcattcagtctacactttggcattctctctggcgatggagtgtggctgggctgaccgcaaaaggtgccttacacactgcccccaccctcagccgttgccccatcagaggctgcctcctccttctgattaccccccatgttgcatatcagggtgctcaaggattggagaggagacaaaaccaggagcagcacagtggggacatctcccgtctcaacagccccaggcctatgggggctctggaaggatgggccagcttgcaggggttggggagggagacatccagcttgggctttcccctttggaataaaccattggtctgtca

SEQ ID NO: 448311 - DNA, 2850 bp, Homo sapiens
cctcctcctcctcacaggtgtgtctctagtcctcgtggttgcctgccccactccctgccgagacgcctgccagaaaggtcacctatcctgaaccccagcaagcctgaaacagctcagccaagcaccctgcgatggaagctgcagatgcctccaggagcaacgggtcgagcccagaagccagggatgcccggagcccgtcgggccccagtggcagcctggagaatggcaccaaggctgacggcaaggatgccaagaccaccaacgggcacggcggggaggcagctgagggcaagagcctgggcagcgccctgaagccaggggaaggtaggagcgccctgttcgcgggcaatgagtggcggcgacccatcatccagtttgtcgagtccggggacgacaagaactccaactacttcagcatggactctatggaaggcaagaggtcgccgtacgcagggctccagctgggggctgccaagaagccacccgttacctttgccgaaaagggcgagctgcgcaagtccattttctcggagtcccggaagcccacggtgtccatcatggagcccggggagacccggcggaacagctacccccgggccgacacgggccttttttcacggtccaagtccggctccgaggaggtgctgtgcgactcctgcatcggcaacaagcagaaggcggtcaagtcctgcctggtgtgccaggcctccttctgcgagctgcatctcaagccccacctggagggcgccgccttccgagaccaccagctgctcgagcccatccgggactttgaggcccgcaagtgtcccgtgcatggcaagacgatggagctcttctgccagaccgaccagacctgcatctgctacctttgcatgttccaggagcacaagaatcatagcaccgtgacagtggaggaggccaaggccgagaaggagacggagctgtcactgcaaaaggagcagctgcagctcaagatcattgagattgaggatgaagctgagaagtggcagaaggagaaggaccgcatcaagagcttcaccaccaatgagaaggccatcctggagcagaacttccgggacctggtgcgggacctggagaagcaaaaggaggaagtgagggctgcgctggagcagcgggagcaggatgctgtggaccaagtgaaggtgatcatggatgctctggatgagagagccaaggtgctgcatgaggacaagcagacccgggagcagctgcatagcatcagcgactctgtgttgtttctgcaggaatttggtgcattgatgagcaattactctctccccccacccctgcccacctatcatgtcctgctggagggggagggcctgggacagtcactaggcaacttcaaggacgacctgctcaatgtatgcatgcgccacgttgagaagatgtgcaaggcggacctgagccgtaacttcattgagaggaaccacatggagaacggtggtgaccatcgctatgtgaacaactacacgaacagcttcgggggtgagtggagtgcaccggacaccatgaagagatactccatgtacctgacacccaaaggtggggtccggacatcataccagccctcgtctcctggccgcttcaccaaggagaccacccagaagaatttcaacaatctctatggcaccaaagtctcactaccggccattctacgtcaacaaaggcaacgggattgggtccaacgaagccccatgagctcctggcggaaggaacgaggcgccacacccctgctcttcctcctgaccctgctgctcttgccttctaagctactgtgcttgtctgggtgggagggagcctggtcctgcacctgccctctgcagccctctgccagcctcttgggggcagttccggcctctccgacttccccactggccacactccattcagactcctttcctgccttgtgacctcagatggtcaccatcattcctgtgctcagaggccaacccatcacaggggtgagataggttggggcctgccctaacccgccagcctcctcctctcgggctggatctgggggctagcagtgagtacccgcatggtatcagcctgcctctcccgcccacgccctgctgtctccaggcctatagacgtttctctccaaggccctatcccccaatgttgtcagcagatgcctggacagcacagccacccatctcccattcacatggcccacctcctgcttcccagaggactggccctacgtgctctctctcgtcctacctatcaatgcccagcatggcagaacctgcagcccttggccactgcagatggaaacctctcagtgtcttgacatcaccctacccaggcggtgggtctccaccacagccactttgagtctgtggtccctggagggtggcttctcctgactggcaggatgaccttagccaagatattcctctgttccctctgctgagataaagaattcccttaacatgatataatccacccatgcaaatagctactggcccagctaccatttaccatttgcctacagaatttcattcagtctacactttggcattctctctggcgatggagtgtggctgggctgaccgcaaaaggtgccttacacactgcccccaccctcagccgttgccccatcagaggctgcctcctccttctgattaccccccatgttgcatatcagggtgctcaaggattggagaggagacaaaaccaggagcagcacagtggggacatctcccgtctcaacagccccaggcctatgggggctctggaaggatgggccagcttgcaggggttggggagggagacatccagcttgggctttcccctttggaataaaccattggtctgtca

SEQ ID NO: 448312 - DNA, 1493 bp, Homo sapiens
agaggggcccaaggagggagaggctgtagtcctgccagaagtggagcctggcctcaccgcccgggagcaggaggccaccccccgaccccacccagaagaatttcaacaatctctatggcaccaaaggtaactacacctcccgggtctgggagtactcctccagcattcagaactctgacaatgacctgcccgtcgtccaaggcagctcctccttctccctgaaaggctatccctccctcatgcggagccaaagccccaaggcccagccccagacttggaaatctggcaagcagactatgctgtctcactaccggccattctacgtcaacaaaggcaacgggattgggtccaacgaagccccatgagctcctggcggaaggaacgaggcgccacacccctgctcttcctcctgaccctgctgctcttgccttctaagctactgtgcttgtctgggtgggagggagcctggtcctgcacctgccctctgcagccctctgccagcctcttgggggcagttccggcctctccgacttccccactggccacactccattcagactcctttcctgccttgtgacctcagatggtcaccatcattcctgtgctcagaggccaacccatcacaggggtgagataggttggggcctgccctaacccgccagcctcctcctctcgggctggatctgggggctagcagtgagtacccgcatggtatcagcctgcctctcccgcccacgccctgctgtctccaggcctatagacgtttctctccaaggccctatcccccaatgttgtcagcagatgcctggacagcacagccacccatctcccattcacatggcccacctcctgcttcccagaggactggccctacgtgctctctctcgtcctacctatcaatgcccagcatggcagaacctgcagcccttggccactgcagatggaaacctctcagtgtcttgacatcaccctacccaggcggtgggtctccaccacagccactttgagtctgtggtccctggagggtggcttctcctgactggcaggatgaccttagccaagatattcctctgttccctctgctgagataaagaattcccttaacatgatataatccacccatgcaaatagctactggcccagctaccatttaccatttgcctacagaatttcattcagtctacactttggcattctctctggcgatggagtgtggctgggctgaccgcaaaaggtgccttacacactgcccccaccctcagccgttgccccatcagaggctgcctcctccttctgattaccccccatgttgcatatcagggtgctcaaggattggagaggagacaaaaccaggagcagcacagtggggacatctcccgtctcaacagccccaggcctatgggggctctggaaggatgggccagcttgcaggggttggggagggagacatccagcttgggctttcccctttggaataaaccattggtctgtca

SEQ ID NO: 448313 - DNA, 1409 bp, Homo sapiens
gggatggagctgaaggcacatgcagacgttgggaggtgccatgtaactacacctcccgggtctgggagtactcctccagcattcagaactctgacaatgacctgcccgtcgtccaaggcagctcctccttctccctgaaaggctatccctccctcatgcggagccaaagccccaaggcccagccccagacttggaaatctggcaagcagactatgctgtctcactaccggccattctacgtcaacaaaggcaacgggattgggtccaacgaagccccatgagctcctggcggaaggaacgaggcgccacacccctgctcttcctcctgaccctgctgctcttgccttctaagctactgtgcttgtctgggtgggagggagcctggtcctgcacctgccctctgcagccctctgccagcctcttgggggcagttccggcctctccgacttccccactggccacactccattcagactcctttcctgccttgtgacctcagatggtcaccatcattcctgtgctcagaggccaacccatcacaggggtgagataggttggggcctgccctaacccgccagcctcctcctctcgggctggatctgggggctagcagtgagtacccgcatggtatcagcctgcctctcccgcccacgccctgctgtctccaggcctatagacgtttctctccaaggccctatcccccaatgttgtcagcagatgcctggacagcacagccacccatctcccattcacatggcccacctcctgcttcccagaggactggccctacgtgctctctctcgtcctacctatcaatgcccagcatggcagaacctgcagcccttggccactgcagatggaaacctctcagtgtcttgacatcaccctacccaggcggtgggtctccaccacagccactttgagtctgtggtccctggagggtggcttctcctgactggcaggatgaccttagccaagatattcctctgttccctctgctgagataaagaattcccttaacatgatataatccacccatgcaaatagctactggcccagctaccatttaccatttgcctacagaatttcattcagtctacactttggcattctctctggcgatggagtgtggctgggctgaccgcaaaaggtgccttacacactgcccccaccctcagccgttgccccatcagaggctgcctcctccttctgattaccccccatgttgcatatcagggtgctcaaggattggagaggagacaaaaccaggagcagcacagtggggacatctcccgtctcaacagccccaggcctatgggggctctggaaggatgggccagcttgcaggggttggggagggagacatccagcttgggctttcccctttggaataaaccattggtctgtca

SEQ ID NO: 448314 - DNA, 1695 bp, Homo sapiens
ggggagtccaagtgagcgcctcctgccgggaaactctggcaggccatgcttatgcgtggcgctcctgggctctgggaaggggagggcccgtggtgtaaacctccggggtgggtgagtggaaatccctgcagagcagtgtgatgctgcgctggatgtgggggcaacactcccctgctgcctggtccagcccacctggccggctcctcctccttctgtctgctttgctgcctcctccctttggccagcctccccaggattttcggttgcggcaccctggctgctgcacgcgtgttcagacggctgcatttggtaatgggctggatgatgcttggtggtcactttggagaaggcagctgtgctgctctgggcccgggcacccctggccaccagcgctgctccctttgacctgaatctcttgtcttcccaggctatccctccctcatgcggagccaaagccccaaggcccagccccagacttggaaatctggcaagcagactatgctgtctcactaccggccattctacgtcaacaaaggcaacgggattgggtccaacgaagccccatgagctcctggcggaaggaacgaggcgccacacccctgctcttcctcctgaccctgctgctcttgccttctaagctactgtgcttgtctgggtgggagggagcctggtcctgcacctgccctctgcagccctctgccagcctcttgggggcagttccggcctctccgacttccccactggccacactccattcagactcctttcctgccttgtgacctcagatggtcaccatcattcctgtgctcagaggccaacccatcacaggggtgagataggttggggcctgccctaacccgccagcctcctcctctcgggctggatctgggggctagcagtgagtacccgcatggtatcagcctgcctctcccgcccacgccctgctgtctccaggcctatagacgtttctctccaaggccctatcccccaatgttgtcagcagatgcctggacagcacagccacccatctcccattcacatggcccacctcctgcttcccagaggactggccctacgtgctctctctcgtcctacctatcaatgcccagcatggcagaacctgcagcccttggccactgcagatggaaacctctcagtgtcttgacatcaccctacccaggcggtgggtctccaccacagccactttgagtctgtggtccctggagggtggcttctcctgactggcaggatgaccttagccaagatattcctctgttccctctgctgagataaagaattcccttaacatgatataatccacccatgcaaatagctactggcccagctaccatttaccatttgcctacagaatttcattcagtctacactttggcattctctctggcgatggagtgtggctgggctgaccgcaaaaggtgccttacacactgcccccaccctcagccgttgccccatcagaggctgcctcctccttctgattaccccccatgttgcatatcagggtgctcaaggattggagaggagacaaaaccaggagcagcacagtggggacatctcccgtctcaacagccccaggcctatgggggctctggaaggatgggccagcttgcaggggttggggagggagacatccagcttgggctttcccctttggaataaaccattggtctgtca

SEQ ID NO: 448315 - DNA, 1324 bp, Homo sapiens
gcgtgacgcgtgggtcgacccacgcgattcgggcagctcctcctgctccctgaaaggctatccctccctcatgcggagccaaagccccaaggcccagccccagacttggaaatctggcaagcagactatgctgtctcactaccggccattctacgtcaacaaaggcaacgggattgggtccaacgaagccccatgagctcctggcggaaggaacgaggcgccacacccctgctcttcctcctgaccctgctgctcttgccttctaagctactgtgcttgtctgggtgggagggagcctggtcctgcacctgccctctgcagccctctgccagcctcttgggggcagttccggcctctccgacttccccactggccacactccattcagactcctttcctgccttgtgacctcagatggtcaccatcattcctgtgctcagaggccaacccatcacaggggtgagataggttggggcctgccctaacccgccagcctcctcctctcgggctggatctgggggctagcagtgagtacccgcatggtatcagcctgcctctcccgcccacgccctgctgtctccaggcctatagacgtttctctccaaggccctatcccccaatgttgtcagcagatgcctggacagcacagccacccatctcccattcacatggcccacctcctgcttcccagaggactggccctacgtgctctctctcgtcctacctatcaatgcccagcatggcagaacctgcagcccttggccactgcagatggaaacctctcagtgtcttgacatcaccctacccaggcggtgggtctccaccacagccactttgagtctgtggtccctggagggtggcttctcctgactggcaggatgaccttagccaagatattcctctgttccctctgctgagataaagaattcccttaacatgatataatccacccatgcaaatagctactggcccagctaccatttaccatttgcctacagaatttcattcagtctacactttggcattctctctggcgatggagtgtggctgggctgaccgcaaaaggtgccttacacactgcccccaccctcagccgttgccccatcagaggctgcctcctccttctgattaccccccatgttgcatatcagggtgctcaaggattggagaggagacaaaaccaggagcagcacagtggggacatctcccgtctcaacagccccaggcctatgggggctctggaaggatgggccagcttgcaggggttggggagggagacatccagcttgggctttcccctttggaataaaccattggtctgtca

SEQ ID NO: 448316 - DNA, 2423 bp, Homo sapiens
cctcctcctcctcacaggtgtgtctctagtcctcgtggttgcctgccccactccctgccgagacgcctgccagaaaggtcacctatcctgaaccccagcaagcctgaaacagctcagccaagcaccctgcgatggaagctgcagatgcctccaggagcaacgggtcgagcccagaagccagggatgcccggagcccgtcgggccccagtggcagcctggagaatggcaccaaggctgacggcaaggatgccaagaccaccaacgggcacggcggggaggcagctgagggcaagagcctgggcagcgccctgaagccaggggaaggtaggagcgccctgttcgcgggcaatgagtggcggcgacccatcatccagtttgtcgagtccggggacgacaagaactccaactacttcagcatggactctatggaaggcaagaggtcgccgtacgcagggctccagctgggggctgccaagaagccacccgttacctttgccgaaaagggcgagctgcgcaagtccattttctcggagtcccggaagcccacggtgtccatcatggagcccggggagacccggcggaacagctacccccgggccgacacgggccttttttcacggtccaagtccggctccgaggaggtgctgtgcgactcctgcatcggcaacaagcagaaggcggtcaagtcctgcctggtgtgccaggcctccttctgcgagctgcatctcaagccccacctggagggcgccgccttccgagaccaccagctgctcgagcccatccgggactttgaggcccgcaagtgtcccgtgcatggcaagacgatggagctcttctgccagaccgaccagacctgcatctgctacctttgcatgttccaggagcacaagaatcatagcaccgtgacagtggaggaggccaaggccgagaaggagacggagctgtcactgcaaaaggagcagctgcagctcaagatcattgagattgaggatgaagctgagaagtggcagaaggagaaggaccgcatcaagagcttcaccaccaatgagaaggccatcctggagcagaacttccgggacctggtgcgggacctggagaagcaaaaggaggaagtgagggctgcgctggagcagcgggagcaggatgctgtggaccaagtgaaggtgatcatggatgctctggatgagagagccaaggtgctgcatgaggacaagcagacccgggagcagctgcatagcatcagcgactctgtgttgtttctgcaggaatttggtgcattgatgagcaattactctctccccccacccctgcccacctatcatgtcctgctggagggggagggcctgggacagtcactaggcaacttcaaggacgacctgctcaatgtatgcatgcgccacgttgagaagatgtgcaaggcggacctgagccgtaacttcattgagaggaaccacatggagaacggtggtgaccatcgctatgtgaacaactacacgaacagcttcgggggtgagtggagtgcaccggacaccatgaagagatactccatgtacctgacacccaaaggtggggtccggacatcataccagccctcgtctcctggccgcttcaccaaggagaccacccagaagaatttcaacaatctctatggcaccaaaggtaactacacctcccgggtctgggagtactcctccagcattcagaactctgacaatgacctgcccgtcgtccaaggcagctcctccttctccctgaaaggctatccctccctcatgcggagccaaagccccaaggcccagccccagacttggaaatctggcaagcagactatgctgtctcactaccggccattctacgtcaacaaaggcaacgggattgggtccaacgaagccccatgagctcctggcggcggtgggtctccaccacagccactttgagtctgtggtccctggagggtggcttctcctgactggcaggatgaccttagccaagatattcctctgttccctctgctgagataaagaattcccttaacatgatataatccacccatgcaaatagctactggcccagctaccatttaccatttgcctacagaatttcattcagtctacactttggcattctctctggcgatggagtgtggctgggctgaccgcaaaaggtgccttacacactgcccccaccctcagccgttgccccatcagaggctgcctcctccttctgattaccccccatgttgcatatcagggtgctcaaggattggagaggagacaaaaccaggagcagcacagtggggacatctcccgtctcaacagccccaggcctatgggggctctggaaggatgggccagcttgcaggggttggggagggagacatccagcttgggctttcccctttggaataaaccattggtctgtca

SEQ ID NO: 448317 - DNA, 2401 bp, Homo sapiens
cctcctcctcctcacaggtgtgtctctagtcctcgtggttgcctgccccactccctgccgagacgcctgccagaaaggtcacctatcctgaaccccagcaagcctgaaacagctcagccaagcaccctgcgatggaagctgcagatgcctccaggagcaacgggtcgagcccagaagccagggatgcccggagcccgtcgggccccagtggcagcctggagaatggcaccaaggctgacggcaaggatgccaagaccaccaacgggcacggcggggaggcagctgagggcaagagcctgggcagcgccctgaagccaggggaaggtaggagcgccctgttcgcgggcaatgagtggcggcgacccatcatccagtttgtcgagtccggggacgacaagaactccaactacttcagcatggactctatggaaggcaagaggtcgccgtacgcagggctccagctgggggctgccaagaagccacccgttacctttgccgaaaagggcgagctgcgcaagtccattttctcggagtcccggaagcccacggtgtccatcatggagcccggggagacccggcggaacagctacccccgggccgacacgggccttttttcacggtccaagtccggctccgaggaggtgctgtgcgactcctgcatcggcaacaagcagaaggcggtcaagtcctgcctggtgtgccaggcctccttctgcgagctgcatctcaagccccacctggagggcgccgccttccgagaccaccagctgctcgagcccatccgggactttgaggcccgcaagtgtcccgtgcatggcaagacgatggagctcttctgccagaccgaccagacctgcatctgctacctttgcatgttccaggagcacaagaatcatagcaccgtgacagtggaggaggccaaggccgagaaggagacggagctgtcactgcaaaaggagcagctgcagctcaagatcattgagattgaggatgaagctgagaagtggcagaaggagaaggaccgcatcaagagcttcaccaccaatgagaaggccatcctggagcagaacttccgggacctggtgcgggacctggagaagcaaaaggaggaagtgagggctgcgctggagcagcgggagcaggatgctgtggaccaagtgaaggtgatcatggatgctctggatgagagagccaaggtgctgcatgaggacaagcagacccgggagcagctgcatagcatcagcgactctgtgttgtttctgcaggaatttggtgcattgatgagcaattactctctccccccacccctgcccacctatcatgtcctgctggagggggagggcctgggacagtcactaggcaacttcaaggacgacctgctcaatgtatgcatgcgccacgttgagaagatgtgcaaggcggacctgagccgtaacttcattgagaggaaccacatggagaacggtggtgaccatcgctatgtgaacaactacacgaacagcttcgggggtgagtggagtgcaccggacaccatgaagagatactccatgtacctgacacccaaaggtggggtccggacatcataccagccctcgtctcctggccgcttcaccaaggagaccacccagaagaatttcaacaatctctatggcaccaaaggtaactacacctcccgggtctgggagtactcctccagcattcagaactctgacaatgacctgcccgtcgtccaaggcagctcctccttctccctgaaaggctatccctccctcatgcggagccaaagccccaaggcccagccccagacttggaaatctggcaagcagactatgctgtctcactaccggccattctacgtcaacaaaggcaacgggattgggtccaacgaagccccatgagctcctggcggaaggaacgaggcgccacacccctgctcttcctcctgaccctgctgctcttgccttctaagctactgtgcttgtctgggtgggagggagcctggtcctgcacctgccctctgcagccctctgccagcctcttgggggcagttccggcctctccgacttccccactggccacactccattcagactcctttcctgccttgtgacctcagatggtcaccatcattcctgtgctcagaggccaacccatcacaggggtgagataggttggggcctgccctaacccgcctcctccttctgattaccccccatgttgcatatcagggtgctcaaggattggagaggagacaaaaccaggagcagcacagtggggacatctcccgtctcaacagccccaggcctatgggggctctggaaggatgggccagcttgcaggggttggggagggagacatccagcttgggctttcccctttggaataaaccattggtctgtca

SEQ ID NO: 448318 - DNA, 1055 bp, Homo sapiens
ctgtcgtattgcccgctcggacgggcggtcgcttgtgcgcgtgtcgctctgcccctctgccagcctcttgggggcagttccggcctctccgacttccccactggccacactccattcagactcctttcctgccttgtgacctcagatggtcaccatcattcctgtgctcagaggccaacccatcacaggggtgagataggttggggcctgccctaacccgccagcctcctcctctcgggctggatctgggggctagcagtgagtacccgcatggtatcagcctgcctctcccgcccacgccctgctgtctccaggcctatagacgtttctctccaaggccctatcccccaatgttgtcagcagatgcctggacagcacagccacccatctcccattcacatggcccacctcctgcttcccagaggactggccctacgtgctctctctcgtcctacctatcaatgcccagcatggcagaacctgcagcccttggccactgcagatggaaacctctcagtgtcttgacatcaccctacccaggcggtgggtctccaccacagccactttgagtctgtggtccctggagggtggcttctcctgactggcaggatgaccttagccaagatattcctctgttccctctgctgagataaagaattcccttaacatgatataatccacccatgcaaatagctactggcccagctaccatttaccatttgcctacagaatttcattcagtctacactttggcattctctctggcgatggagtgtggctgggctgaccgcaaaaggtgccttacacactgcccccaccctcagccgttgccccatcagaggctgcctcctccttctgattaccccccatgttgcatatcagggtgctcaaggattggagaggagacaaaaccaggagcagcacagtggggacatctcccgtctcaacagccccaggcctatgggggctctggaaggatgggccagcttgcaggggttggggagggagacatccagcttgggctttcccctttggaataaaccattggtctgtca

SEQ ID NO: 448319 - DNA, 1828 bp, Homo sapiens
cctcctcctcctcacaggtgtgtctctagtcctcgtggttgcctgccccactccctgccgagacgcctgccagaaaggtcacctatcctgaaccccagcaagcctgaaacagctcagccaagcaccctgcgatggaagctgcagatgcctccaggagcaacgggtcgagcccagaagccagggatgcccggagcccgtcgggccccagtggcagcctggagaatggcaccaaggctgacggcaaggatgccaagaccaccaacgggcacggcggggaggcagctgagggcaagagcctgggcagcgccctgaagccaggggaaggtaggagcgccctgttcgcgggcaatgagtggcggcgacccatcatccagtttgtcgagtccggggacgacaagaactccaactacttcagcatggactctatggaaggcaagaggtcgccgtacgcagggctccagctgggggctgccaagaagccacccgttacctttgccgaaaagggcgagctgcgcaagtccattttctcggagtcccggaagcccacggtgtccatcatggagcccggggagacccggcggaacagctacccccgggccgacacgggccttttttcacggtccaagtccggctccgaggaggtgctgtgcgactcctgcatcggcaacaagcagaaggcggtcaagtcctgcctggtgtgccaggcctccttctgcgagctgcatctcaagccccacctggagggcgccgccttccgagaccaccagctgctcgagcccatccgggactttgaggcccgcaagtgtcccgtgcatggcaagacgatggagctcttctgccagaccgaccagacctgcatctgctacctttgcatgttccaggagcacaagaatcatagcaccgtgacagtggaggaggccaaggccgagaaggagacggagctgtcactgcaaaaggagcagctgcagctcaagatcattgagattgaggatgaagctgagaagtggcagaaggagaaggaccgcatcaagagcttcaccaccaatgagaaggccatcctggagcagaacttccgggacctggtgcgggacctggagaagcaaaaggaggaagtgagggctgcgctggagcagcgggagcaggatgctgtggaccaagtgaaggtgatcatggatgctctggatgagagagccaaggtgctgcatgaggacaagcagacccgggagcagctgcatagcatcagcgactctgtgttgtttctgcaggaatttggtgcattgatgagcaattactctctccccccacccctgcccacctatcatgtcctgctggagggggagggcctgggacagtcactaggcaacttcaaggacgacctgctcaatgtatgcatgcgccacgttgagaagatgtgcaaggcggacctgagccgtaacttcattgagaggaaccacatggagaacggtggtgaccatcgctatgtgaacaactacacgaacagcttcgggggtgagtggagtgcaccggacaccatgaagagatactccatgtacctgacacccaaaggtggggtccggacatcataccagccctcgtctcctggccgcttcaccaaggagaccacccagaagaatttcaacaatctctatggcaccaaaggtaactacacctcccgggtctgggagtactcctccagcattcagaactctgacaatgagagagccaaggtgctgcatgaggacaggcagacccgggagcagctgcatagcatcagcgactctgtgttgtttctgcaggaatttggtgcattgatgagcaattactctct

SEQ ID NO: 448320 - DNA, 2252 bp, Homo sapiens
cctcctcctcctcacaggtgtgtctctagtcctcgtggttgcctgccccactccctgccgagacgcctgccagaaaggtcacctatcctgaaccccagcaagcctgaaacagctcagccaagcaccctgcgatggaagctgcagatgcctccaggagcaacgggtcgagcccagaagccagggatgcccggagcccgtcgggccccagtggcagcctggagaatggcaccaaggctgacggcaaggatgccaagaccaccaacgggcacggcggggaggcagctgagggcaagagcctgggcagcgccctgaagccaggggaaggtaggagcgccctgttcgcgggcaatgagtggcggcgacccatcatccagtttgtcgagtccggggacgacaagaactccaactacttcagcatggactctatggaaggcaagaggtcgccgtacgcagggctccagctgggggctgccaagaagccacccgttacctttgccgaaaagggcgagctgcgcaagtccattttctcggagtcccggaagcccacggtgtccatcatggagcccggggagacccggcggaacagctacccccgggccgacacgggccttttttcacggtccaagtccggctccgaggaggtgctgtgcgactcctgcatcggcaacaagcagaaggcggtcaagtcctgcctggtgtgccaggcctccttctgcgagctgcatctcaagccccacctggagggcgccgccttccgagaccaccagctgctcgagcccatccgggactttgaggcccgcaagtgtcccgtgcatggcaagacgatggagctcttctgccagaccgaccagacctgcatctgctacctttgcatgttccaggagcacaagaatcatagcaccgtgacagtggaggaggccaaggccgagaaggagacggagctgtcactgcaaaaggagcagctgcagctcaagatcattgagattgaggatgaagctgagaagtggcagaaggagaaggaccgcatcaagagcttcaccaccaatgagaaggccatcctggagcagaacttccgggacctggtgcgggacctggagaagcaaaaggaggaagtgagggctgcgctggagcagcgggagcaggatgctgtggaccaagtgaaggtgatcatggatgctctggatgagagagccaaggtgctgcatgaggacaagcagacccgggagcagctgcatagcatcagcgactctgtgttgtttctgcaggaatttggtgcattgatgagcaattactctctccccccacccctgcccacctatcataggagcagcacagtggggacatctcccgtctcaacagccccaggcctatgggggctctggaaggatgggccagcttgcaggggttggggagggagacatccagcttgggctttcccctttggaataaaccattggtctgtcaaaaaaaaaaaaaaaaaaaaaaaaaaaaaaaaaaaaaaaaaaagcgatgacgaaggaaagaaaaaaatactcacatggaagagaaaacagaaagaaaatgagaatacaggaaggatatagtagcaaaagagggggctcccatgagtggaggctatgataattaataggagagacattgcggcgtggttttaaaagacagttgtagtagggagacaaagttggaactggtggagggtaatgttttgtggaaaaaggggagcgcccatttgactttcgtgggggagtgaggacagaacaaattggggagaagatactatatcctaaaacgagagagagagtttaagacgccttgaagaaggggagaaaatcatataaaacattgttgtaagcagggggtgagaaaaatgggttggtaaaaaacaacagagtggacatatgttgtttagagtgagagatgggcgacgaaaaagcagtggggcgccaacacgaagggacgcaaaagtgagcacgtgcaggaggaaacagatattgtgtacacccccaggggagagcgcattcggctactagacgggggaaagacacaatgcggtatatgatattgagagtaaatatcgcaaagaaatagattaaaataacgatacgagggaggacagacatgataaaaatacaaaataggtaagagaagagaaacataagtgtgcaagaaagaggactaggagcacgaagagtacagggataggagaaaaaaaggagagtaacaacaggtagaaaaaaacaacaaacaaagaa

SEQ ID NO: 448321 - DNA, 1157 bp, Homo sapiens
cctcctcctcctcacaggtgtgtctctagtcctcgtggttgcctgccccactccctgccgagacgcctgccagaaaggtcacctatcctgaaccccagcaagcctgaaacagctcagccaagcaccctgcgatggaagctgcagatgcctccaggagcaacgggtcgagcccagaagccagggatgcccggagcccgtcgggccccagtggcagcctggagaatggcaccaaggctgacggcaaggatgccaagaccaccaacgggcacggcggggaggcagctgagggcaagagcctgggcagcgccctgaagccaggggaaggtaggagcgccctgttcgcgggcaatgagtggcggcgacccatcatccagtttgtcgagtccggggacgacaagaactccaactacttcagcatggactctatggaaggcaagaggtcgccgtacgcagggctccagctgggggctgccaagaagccacccgttacctttgccgaaaagggcgagctgcgcaagtccattttctcggagtcccggaagcccacggtgtccatcatggagcccggggagacccggcggaacagctacccccgggccgacacgggccttttttcacggtccaagtccggctccgaggaggtgctgtgcgactcctgcatcggcaacaagcagaaggcggtcaagtcctgcctggtgtgccaggcctccttctgcgagctgcatctcaagccccacctggagggcgccgccttccgagaccaccagctgctcgagcccatccgggactttgaggcccgcaagtgtcccgtgcatggcaagacgatggagctcttctgccagaccgaccagacctgcatctgctacctttgcatgttccaggagcacaagaatcatagcaccgtgacagtggaggaggccaaggccgagaaggagacggagctgtcactgcaaaaggagcagctgcagctcaagatcattgagattgaggatgaagctgagaagtggcagaaggagaaggaccgcatcaagtatgataaatgaagcttctaactataacgtgacttcagattatgcacgtgcatcctacgagccctgtaggcaggacttcacgagcttccataaaagttcataacttttggaaagaggtcaactacg

SEQ ID NO: 448322 - DNA, 1415 bp, Homo sapiens
cctcctcctcctcacaggtgtgtctctagtcctcgtggttgcctgccccactccctgccgagacgcctgccagaaaggtcacctatcctgaaccccagcaagcctgaaacagctcagccaagcaccctgcgatggaagctgcagatgcctccaggagcaacgggtcgagcccagaagccagggatgcccggagcccgtcgggccccagtggcagcctggagaatggcaccaaggctgacggcaaggatgccaagaccaccaacgggcacggcggggaggcagctgagggcaagagcctgggcagcgccctgaagccaggggaaggtaggagcgccctgttcgcgggcaatgagtggcggcgacccatcatccagtttgtcgagtccggggacgacaagaactccaactacttcagcatggactctatggaaggcaagaggtcgccgtacgcagggctccagctgggggctgccaagaagccacccgttacctttgccgaaaagggcgagctgcgcaagtccattttctcggagtcccggaagcccacggtgtccatcatggagcccggggagacccggcggaacagctacccccgggccgacacgggccttttttcacggtccaagtccggctccgaggaggtgctgtgcgactcctgcatcggcaacaagcagaaggcggtcaagtcctgcctggtgtgccaggcctccttctgcgagctgcatctcaagccccacctggagggcgccgccttccgagaccaccagctgctcgagcccatccgggactttgaggcccgcaagtgtcccgtgcatggcaagacgatggagctcttctgccagaccgaccagacctgcatctgctacctttgcatgttccaggagcacaagaatcatagcaccgtgacagtggaggaggccaaggccgagaaggagacggagctgtcactgcaaaaggagcagctgcagctcaagatcattgagattgaggatgaagctgagaagtggcagaaggagaaggaccgcatcaagagcttcaccaccaatgagaaggccatcctggagcagaacttccgggacctggtgcgggacctggagaagcaaaaggaggaagtgagggctgcgctggagcagcgggagcaggatgctgtggaccaagtgaaggtgatcatggatgctctggatgagagagccaaggtgctgcatgaggacaagcagacccgggagcagctgcatagcatcagcgactctgtgttgtttctgcaggtaacaagccactcctctgtcactcaagccctcgatttcacaatccactttttgagacccccctccaacatccatccatccacctatccacttatccacctattcgtctatctgttcatccaccatccagccatccaaccatccatccat

SEQ ID NO: 448323 - DNA, 2156 bp, Homo sapiens
tggaactctgtggtttcgctggatagtaggtagggacagtgggggaggccaaggccgagaaggagacggagctgtcactgcaaaaggagcagctgcagctcaagatcattgagattgaggatgaagctgagaagtggcagaaggagaaggaccgcatcaagagcttcaccaccaatgagaaggccatcctggagcagaacttccgggacctggtgcgggacctggagaagcaaaaggaggaagtgagggctgcgctggagcagcgggagcaggatgctgtggaccaagtgaaggtgatcatggatgctctggatgagagagccaaggtgctgcatgaggacaagcagacccgggagcagctgcatagcatcagcgactctgtgttgtttctgcaggaatttggtgcattgatgagcaattactctctccccccacccctgcccacctatcatgtcctgctggagggggagggcctgggacagtcactaggcaacttcaaggacgacctgctcaatgtatgcatgcgccacgttgagaagatgtgcaaggcggacctgagccgtaacttcattgagaggaaccacatggagaacggtggtgaccatcgctatgtgaacaactacacgaacagcttcgggggtgagtggagtgcaccggacaccatgaagagatactccatgtacctgacacccaaaggtggggtccggacatcataccagccctcgtctcctggccgcttcaccaaggagaccacccagaagaatttcaacaatctctatggcaccaaaggtaactacacctcccgggtctgggagtactcctccagcattcagaactctgacaatgacctgcccgtcgtccaaggcagctcctccttctccctgaaaggctatccctccctcatgcggagccaaagccccaaggcccagccccagacttggaaatctggcaagcagactatgctgtctcactaccggccattctacgtcaacaaaggcaacgggattgggtccaacgaagccccatgagctcctggcggaaggaacgaggcgccacacccctgctcttcctcctgaccctgctgctcttgccttctaagctactgtgcttgtctgggtgggagggagcctggtcctgcacctgccctctgcagccctctgccagcctcttgggggcagttccggcctctccgacttccccactggccacactccattcagactcctttcctgccttgtgacctcagatggtcaccatcattcctgtgctcagaggccaacccatcacaggggtgagataggttggggcctgccctaacccgccagcctcctcctctcgggctggatctgggggctagcagtgagtacccgcatggtatcagcctgcctctcccgcccacgccctgctgtctccaggcctatagacgtttctctccaaggccctatcccccaatgttgtcagcagatgcctggacagcacagccacccatctcccattcacatggcccacctcctgcttcccagaggactggccctacgtgctctctctcgtcctacctatcaatgcccagcatggcagaacctgcagcccttggccactgcagatggaaacctctcagtgtcttgacatcaccctacccaggcggtgggtctccaccacagccactttgagtctgtggtccctggagggtggcttctcctgactggcaggatgaccttagccaagatattcctctgttccctctgctgagataaagaattcccttaacatgatataatccacccatgcaaatagctactggcccagctaccatttaccatttgcctacagaatttcattcagtctacactttggcattctctctggcgatggagtgtggctgggctgaccgcaaaaggtgccttacacactgcccccaccctcagccgttgccccatcagaggctgcctcctccttctgattaccccccatgttgcatatcagggtgctcaaggattggagaggagacaaaaccaggagcagcacagtggggacatctcccgtctcaacagccccaggcctatgggggctctggaaggatgggccagcttgcaggggttggggagggagacatccagcttgggctttcccctttggaataaaccattggtctgtca

SEQ ID NO: 448324 - DNA, 3145 bp, Homo sapiens
cctcctcctcctcacaggtgtgtctctagtcctcgtggttgcctgccccactccctgccgagacgcctgccagaaaggtcacctatcctgaaccccagcaagcctgaaacagctcagccaagcaccctgcgatggaagctgcagatgcctccaggagcaacgggtcgagcccagaagccagggatgcccggagcccgtcgggccccagtggcagcctggagaatggcaccaaggctgacggcaaggatgccaagaccaccaacgggcacggcggggaggcagctgagggcaagagcctgggcagcgccctgaagccaggggaaggtaggagcgccctgttcgcgggcaatgagtggcggcgacccatcatccagtttgtcgagtccggggacgacaagaactccaactacttcagcatggactctatggaaggcaagaggtcgccgtacgcagggctccagctgggggctgccaagaagccacccgttacctttgccgaaaagggcgagctgcgcaagtccattttctcggagtcccggaagcccacggtgtccatcatggagcccggggagacccggcggaacagctacccccgggccgacacgggccttttttcacggtccaagtccggctccgaggaggtgctgtgcgactcctgcatcggcaacaagcagaaggcggtcaagtcctgcctggtgtgccaggcctccttctgcgagctgcatctcaagccccacctggagggcgccgccttccgagaccaccagctgctcgagcccatccgggactttgaggcccgcaagtgtcccgtgcatggcaagacgatggagctcttctgccagaccgaccagacctgcatctgctacctttgcatgttccaggagcacaagaatcatagcaccgtgacagtggaggaggccaaggccgagaaggagacggagctgtcactgcaaaaggagcagctgcagctcaagatcattgagattgaggatgaagctgagaagtggcagaaggagaaggaccgcatcaagagcttcaccaccaatgagaaggccatcctggagcagaacttccgggacctggtgcgggacctggagaagcaaaaggaggaagtgagggctgcgctggagcagcgggagcaggatgctgtggaccaagtgaaggtgatcatggatgctctggatgagagagccaaggtgctgcatgaggacaagcagacccgggagcagctgcatagcatcagcgactctgtgttgtttctgcaggaatttggtgcattgatgagcaattactctctccccccacccctgcccacctatcatgtcctgctggagggggagggcctgggacagtcactaggcaacttcaaggacgacctgctcaatgtatgcatgcgccacgttgagaagatgtgcaaggcggacctgagccgtaacttcattgagaggaaccacatggagaacggtggtgaccatcgctatgtgaacaactacacgaacagcttcgggggtgagtggagtgcaccggacaccatgaagagatactccatgtacctgacacccaaaggtggggtccggacatcataccagccctcgtctcctggccgcttcaccaaggagaccacccagaagaatttcaacaatctctatggcaccaaaggtaactacacctcccgggtctgggagtactcctccagcattcagaactctgacaatgacctgcccgtcgtccaaggcagctcctccttctccctgaaaggctatccctccctcatgcggagccaaagccccaaggcccagccccagacttggaaatctggcaagcagactatgctggtggtttaagcaaggtctgagcatccctcaagtcctgctgtggaccacacaaaggcaaggagctgaccaggaggtgtcagttccctgagagacagggccaaaggcagtgtacccttgagtctcactaccggccattctacgtcaacaaaggcaacgggattgggtccaacgaagccccatgagctcctggcggaaggaacgaggcgccacacccctgctcttcctcctgaccctgctgctcttgccttctaagctactgtgcttgtctgggtgggagggagcctggtcctgcacctgccctctgcagccctctgccagcctcttgggggcagttccggcctctccgacttccccactggccacactccattcagactcctttcctgccttgtgacctcagatggtcaccatcattcctgtgctcagaggccaacccatcacaggggtgagataggttggggcctgccctaacccgccagcctcctcctctcgggctggatctgggggctagcagtgagtacccgcatggtatcagcctgcctctcccgcccacgccctgctgtctccaggcctatagacgtttctctccaaggccctatcccccaatgttgtcagcagatgcctggacagcacagccacccatctcccattcacatggcccacctcctgcttcccagaggactggccctacgtgctctctctcgtcctacctatcaatgcccagcatggcagaacctgcagcccttggccactgcagatggaaacctctcagtgtcttgacatcaccctacccaggcggtgggtctccaccacagccactttgagtctgtggtccctggagggtggcttctcctgactggcaggatgaccttagccaagatattcctctgttccctctgctgagataaagaattcccttaacatgatataatccacccatgcaaatagctactggcccagctaccatttaccatttgcctacagaatttcattcagtctacactttggcattctctctggcgatggagtgtggctgggctgaccgcaaaaggtgccttacacactgcccccaccctcagccgttgccccatcagaggctgcctcctccttctgattaccccccatgttgcatatcagggtgctcaaggattggagaggagacaaaaccaggagcagcacagtggggacatctcccgtctcaacagccccaggcctatgggggctctggaaggatgggccagcttgcaggggttggggagggagacatccagcttgggctttcccctttggaataaaccattggtctgtca

SEQ ID NO: 448325 - DNA, 2824 bp, Homo sapiens
cctcctcctcctcacaggtgtgtctctagtcctcgtggttgcctgccccactccctgccgagacgcctgccagaaaggtcacctatcctgaaccccagcaagcctgaaacagctcagccaagcaccctgcgatggaagctgcagatgcctccaggagcaacgggtcgagcccagaagccagggatgcccggagcccgtcgggccccagtggcagcctggagaatggcaccaaggctgacggcaaggatgccaagaccaccaacgggcacggcggggaggcagctgagggcaagagcctgggcagcgccctgaagccaggggaaggtaggagcgccctgttcgcgggcaatgagtggcggcgacccatcatccagtttgtcgagtccggggacgacaagaactccaactacttcagcatggactctatggaaggcaagaggtcgccgtacgcagggctccagctgggggctgccaagaagccacccgttacctttgccgaaaagggcgagctgcgcaagtccattttctcggagtcccggaagcccacggtgtccatcatggagcccggggagacccggcggaacagctacccccgggccgacacgggccttttttcacggtccaagtccggctccgaggaggtgctgtgcgactcctgcatcggcaacaagcagaaggcggtcaagtcctgcctggtgtgccaggcctccttctgcgagctgcatctcaagccccacctggagggcgccgccttccgagaccaccagctgctcgagcccatccgggactttgaggcccgcaagtgtcccgtgcatggcaagacgatggagctcttctgccagaccgaccagacctgcatctgctacctttgcatgttccaggagcacaagaatcatagcaccgtgacagtggaggaggccaaggccgagaaggagacggagctgtcactgcaaaaggagcagctgcagctcaagatcattgagattgaggatgaagctgagaagtggcagaaggagaaggaccgcatcaagagcttcaccaccaatgagaaggccatcctggagcagaacttccgggacctggtgcgggacctggagaagcaaaaggaggaagtgagggctgcgctggagcagcgggagcaggatgctgtggaccaagtgaaggtgatcatggatgctctggatgagagagccaaggtgctgcatgaggacaagcagacccgggagcagctgcatagcatcagcgactctgtgttgtttctgcaggaatttggtgcattgatgagcaattactctctccccccacccctgcccacctatcatgtcctgctggagggggagggcctgggacagtcactaggcaacttcaaggacgacctgctcaatgtatgcatgcgccacgttgagaagatgtgcaaggcggacctgagccgtaacttcattgagaggaaccacatggagaacggtggtgaccatcgctatgtgaacaactacacgaacagcttcgggggtgagtggagtgcaccggacaccatgaagagatactccatgtacctgacacccaaaggtggggtccggacatcataccagccctcgtctcctggccgcttcaccaaggagaccacccagaagaatttcaacaatctctatggcaccaaaggtaactacacctcccgggtctgggagtactcctccagcattcagaactctgacaatgacctgcccgtcgtccaaggcagctcctccttctccctgaaaggctatccctccctcatgcggagccaaagccccaaggcccagccccagacttggaaatctggcaagcagactatgctgtctcactaccggccattctacgtcaacaaaggcaacgggattgggtccaacgaagccccatgagctcctggcggaaggaacgaggcgccacacccctgctcttcctcctgaccctgctgctcttgccttctaagctactgtgcttgtctgggtgggagggagcctggtcctgcacctgccctctgcagccctctgccagcctcttgggggcagttccggcctctccgacttccccactggccacactccattcagactcctttcctgccttgtgacctcagatggtcaccatcattcctgtgctcagaggccaacccatcacaggggtgagataggttggggcctgccctaacccgccagcctcctcctctcgggctggatctgggggctagcagtgagtacccgcatggtatcagcctgcctctcccgcccacgccctgctgtctccaggcctatagacgtttctctccaaggccctatcccccaatgttgtcagcagatgcctggacagcacagccacccatctcccattcacatggcccacctcctgcttcccagaggactggccctacgtgctctctctcgtcctacctatcaatgcccagcatggcagaacctgcagcccttggccactgcagatggaaacctctcagtgtcttgacatcaccctacccaggcggtgggtctccaccacagccactttgagtctgtggtccctggagggtggcttctcctgactggcaggatgaccttagccaagatattcctctgttccctctgctgagataaagaattcccttaacatgatataatccacccatgcaaatagctactggcccagctaccatttaccatttgcctacagaatttcattcagtctacactttggcattctctctggcgatggagtgtggctgggctgaccgcaaaaggtgccttacacactgcccccaccctctgggtagcagtaccccactaggtaacagacc

SEQ ID NO: 448326 - DNA, 1682 bp, Homo sapiens
attgggcaagctgcttctcttacttcctgagtctcaatttccttatctgtctcagggggatacaaccacaattgatgtatggatcaaataagaaatgggcattaatagcaccttgtaaaggtggtgaccatcgctatgtgaacaactacacgaacagcttcgggggtgagtggagtgcaccggacaccatgaagagatactccatgtacctgacacccaaaggtggggtccggacatcataccagccctcgtctcctggccgcttcaccaaggagaccacccagaagaatttcaacaatctctatggcaccaaaggtaactacacctcccgggtctgggagtactcctccagcattcagaactctgacaatgacctgcccgtcgtccaaggcagctcctccttctccctgaaaggctatccctccctcatgcggagccaaagccccaaggcccagccccagacttggaaatctggcaagcagactatgctgtctcactaccggccattctacgtcaacaaaggcaacgggattgggtccaacgaagccccatgagctcctggcggaaggaacgaggcgccacacccctgctcttcctcctgaccctgctgctcttgccttctaagctactgtgcttgtctgggtgggagggagcctggtcctgcacctgccctctgcagccctctgccagcctcttgggggcagttccggcctctccgacttccccactggccacactccattcagactcctttcctgccttgtgacctcagatggtcaccatcattcctgtgctcagaggccaacccatcacaggggtgagataggttggggcctgccctaacccgccagcctcctcctctcgggctggatctgggggctagcagtgagtacccgcatggtatcagcctgcctctcccgcccacgccctgctgtctccaggcctatagacgtttctctccaaggccctatcccccaatgttgtcagcagatgcctggacagcacagccacccatctcccattcacatggcccacctcctgcttcccagaggactggccctacgtgctctctctcgtcctacctatcaatgcccagcatggcagaacctgcagcccttggccactgcagatggaaacctctcagtgtcttgacatcaccctacccaggcggtgggtctccaccacagccactttgagtctgtggtccctggagggtggcttctcctgactggcaggatgaccttagccaagatattcctctgttccctctgctgagataaagaattcccttaacatgatataatccacccatgcaaatagctactggcccagctaccatttaccatttgcctacagaatttcattcagtctacactttggcattctctctggcgatggagtgtggctgggctgaccgcaaaaggtgccttacacactgcccccaccctcagccgttgccccatcagaggctgcctcctccttctgattaccccccatgttgcatatcagggtgctcaaggattggagaggagacaaaaccaggagcagcacagtggggacatctcccgtctcaacagccccaggcctatgggggctctggaaggatgggccagcttgcaggggttggggagggagacatccagcttgggctttcccctttggaataaaccattggtctgtca

SEQ ID NO: 448327 - DNA, 1516 bp, Homo sapiens
tgattgtagcggacggtgagctgtacgcgatgcgcgagtgtatctgagacccatgagtggggtccggacatcataccagccctcgtctcctggccgcttcaccaaggagaccacccagaagaatttcaacaatctctatggcaccaaaggtaactacacctcccgggtctgggagtactcctccagcattcagaactctgacaatgacctgcccgtcgtccaaggcagctcctccttctccctgaaaggctatccctccctcatgcggagccaaagccccaaggcccagccccagacttggaaatctggcaagcagactatgctgtctcactaccggccattctacgtcaacaaaggcaacgggattgggtccaacgaagccccatgagctcctggcggaaggaacgaggcgccacacccctgctcttcctcctgaccctgctgctcttgccttctaagctactgtgcttgtctgggtgggagggagcctggtcctgcacctgccctctgcagccctctgccagcctcttgggggcagttccggcctctccgacttccccactggccacactccattcagactcctttcctgccttgtgacctcagatggtcaccatcattcctgtgctcagaggccaacccatcacaggggtgagataggttggggcctgccctaacccgccagcctcctcctctcgggctggatctgggggctagcagtgagtacccgcatggtatcagcctgcctctcccgcccacgccctgctgtctccaggcctatagacgtttctctccaaggccctatcccccaatgttgtcagcagatgcctggacagcacagccacccatctcccattcacatggcccacctcctgcttcccagaggactggccctacgtgctctctctcgtcctacctatcaatgcccagcatggcagaacctgcagcccttggccactgcagatggaaacctctcagtgtcttgacatcaccctacccaggcggtgggtctccaccacagccactttgagtctgtggtccctggagggtggcttctcctgactggcaggatgaccttagccaagatattcctctgttccctctgctgagataaagaattcccttaacatgatataatccacccatgcaaatagctactggcccagctaccatttaccatttgcctacagaatttcattcagtctacactttggcattctctctggcgatggagtgtggctgggctgaccgcaaaaggtgccttacacactgcccccaccctcagccgttgccccatcagaggctgcctcctccttctgattaccccccatgttgcatatcagggtgctcaaggattggagaggagacaaaaccaggagcagcacagtggggacatctcccgtctcaacagccccaggcctatgggggctctggaaggatgggccagcttgcaggggttggggagggagacatccagcttgggctttcccctttggaataaaccattggtctgtca

SEQ ID NO: 448328 - DNA, 2377 bp, Homo sapiens
cctcctcctcctcacaggtgtgtctctagtcctcgtggttgcctgccccactccctgccgagacgcctgccagaaaggtcacctatcctgaaccccagcaagcctgaaacagctcagccaagcaccctgcgatggaagctgcagatgcctccaggagcaacgggtcgagcccagaagccagggatgcccggagcccgtcgggccccagtggcagcctggagaatggcaccaaggctgacggcaaggatgccaagaccaccaacgggcacggcggggaggcagctgagggcaagagcctgggcagcgccctgaagccaggggaaggtaggagcgccctgttcgcgggcaatgagtggcggcgacccatcatccagtttgtcgagtccggggacgacaagaactccaactacttcagcatggactctatggaaggcaagaggtcgccgtacgcagggctccagctgggggctgccaagaagccacccgttacctttgccgaaaagggcgagctgcgcaagtccattttctcggagtcccggaagcccacggtgtccatcatggagcccggggagacccggcggaacagctacccccgggccgacacgggccttttttcacggtccaagtccggctccgaggaggtgctgtgcgactcctgcatcggcaacaagcagaaggcggtcaagtcctgcctggtgtgccaggcctccttctgcgagctgcatctcaagccccacctggagggcgccgccttccgagaccaccagctgctcgagcccatccgggactttgaggcccgcaagtgtcccgtgcatggcaagacgatggagctcttctgccagaccgaccagacctgcatctgctacctttgcatgttccaggagcacaagaatcatagcaccgtgacagtggaggaggccaaggccgagaaggagacggagctgtcactgcaaaaggagcagctgcagctcaagatcattgagattgaggatgaagctgagaagtggcagaaggagaaggaccgcatcaagagcttcaccaccaatgagaaggccatcctggagcagaacttccgggacctggtgcgggacctggagaagcaaaaggaggaagtgagggctgcgctggagcagcgggagcaggatgctgtggaccaagtgaaggtgatcatggatgctctggatgagagagccaaggtgctgcatgaggacaagcagacccgggagcagctgcatagcatcagcgactctgtgttgtttctgcaggaatttggtgcattgatgagcaattactctctccccccacccctgcccacctatcatgtcctgctggagggggagggcctgggacagtcactaggcaacttcaaggacgacctgctcaatgtatgcatgcgccacgttgagaagatgtgcaaggcggacctgagccgtaacttcattgagaggaaccacatggagaacggtggtgaccatcgctatgtgaacaactacacgaacagcttcgggggtgagtggagtgcaccggacaccatgaagagatactccatgtacctgacacccaaaggtggggtccggacatcataccagccctcgtctcctggccgcttcaccaaggagaccacccagaagaatttcaacaatctctatggcaccaaaggtaactacacctcccgggtctgggagtactcctccagcattcagaactctgacaatgacctgcccgtcgtccaaggcagctcctccttctccctgaaaggctatccctccctcatgcggagccaaagccccaaggcccagccccagacttggaaatctggcaagcagactatgctgtctcactaccggccattctacgtcaacaaaggcaacgggattgggtccaacgaagccccatgagctcctggcggaaggaacgaggcgccacacccctgctcttcctcctgaccctgctgctcttgccttctaagctactgtgcttgtctgggtgggagggagcctggtcctgcacctgccctctgcagccctctgccagcctcttgggggcagttccggcctctccgacttccccactggccacactccattcagactcctttcctgccttgtgacctcagatggtcaccatcattcctgtgctcagaggccaacccatcacaggggtgagataggttggggcctgccctaacccgccagcctcctcctctcgggctggatctgggggctagcagtgagtacccgcatggtatcagcctgcctctcccgcccacgccctgctgtctccaggcctatagacgtttctctccaagcttgcaggggttggggagggagacatccagcttgggctttcccctttggaataaaccattggtctgtca

SEQ ID NO: 448329 - DNA, 3122 bp, Homo sapiens
cctcctcctcctcacaggtgtgtctctagtcctcgtggttgcctgccccactccctgccgagacgcctgccagaaaggtcacctatcctgaaccccagcaagcctgaaacagctcagccaagcaccctgcgatggaagctgcagatgcctccaggagcaacgggtcgagcccagaagccagggatgcccggagcccgtcgggccccagtggcagcctggagaatggcaccaaggctgacggcaaggatgccaagaccaccaacgggcacggcggggaggcagctgagggcaagagcctgggcagcgccctgaagccaggggaaggtaggagcgccctgttcgcgggcaatgagtggcggcgacccatcatccagtttgtcgagtccggggacgacaagaactccaactacttcagcatggactctatggaaggcaagaggtcgccgtacgcagggctccagctgggggctgccaagaagccacccgttacctttgccgaaaagggcgagctgcgcaagtccattttctcggagtcccggaagcccacggtgtccatcatggagcccggggagacccggcggaacagctacccccgggccgacacgggccttttttcacggtccaagtccggctccgaggaggtgctgtgcgactcctgcatcggcaacaagcagaaggcggtcaagtcctgcctggtgtgccaggcctccttctgcgagctgcatctcaagccccacctggagggcgccgccttccgagaccaccagctgctcgagcccatccgggactttgaggcccgcaagtgtcccgtgcatggcaagacgatggagctcttctgccagaccgaccagacctgcatctgctacctttgcatgttccaggagcacaagaatcatagcaccgtgacagtggaggaggccaaggccgagaaggagacggagctgtcactgcaaaaggagcagctgcagctcaagatcattgagattgaggatgaagctgagaagtggcagaaggagaaggaccgcatcaagagcttcaccaccaatgagaaggccatcctggagcagaacttccgggacctggtgcgggacctggagaagcaaaaggaggaagtgagggctgcgctggagcagcgggagcaggatgctgtggaccaagtgaaggtgatcatggatgctctggatgagagagccaaggtgctgcatgaggacaagcagacccgggagcagctgcatagcatcagcgactctgtgttgtttctgcaggaatttggtgcattgatgagcaattactctctccccccacccctgcccacctatcatgtcctgctggagggggagggcctgggacagtcactaggcaacttcaaggacgacctgctcaatgtatgcatgcgccacgttgagaagatgtgcaaggcggacctgagccgtaacttcattgagaggaaccacatggagaacggtggtgaccatcgctatgtgaacaactacacgaacagcttcgggggtgagtggagtgcaccggacaccatgaagagatactccatgtacctgacacccaaaggtggggtccggacatcataccagccctcgtctcctggccgcttcaccaaggagaccacccagaagaatttcaacaatctctatggcaccaaaggtaactacacctcccgggtctgggagtactcctccagcattcagaactctgacaatgacctgcccgtcgtccaaggcagctcctccttctccctgaaaggctatccctccctcatgcggagccaaagccccaaggcccagccccagacttggaaatctggcaagcagactatgctgtctcactaccggccattctacgtcaacaaaggcaacgggattgggtccaacgaagccccatgagctcctggcggaaggaacgaggcgccacacccctgctcttcctcctgaccctgctgctcttgccttctaagctactgtgcttgtctgggtgggagggagcctggtcctgcacctgccctctgcagccctctgccagcctcttgggggcagttccggcctctccgacttccccactggccacactccattcagactcctttcctgccttgtgacctcagatggtcaccatcattcctgtgctcagaggccaacccatcacagggggtgctcaaggattggagaggagacaaaaccaggagcagcacagtggggacatctcccgtctcaacagccccaggcctatgggggctctggaaggatgggccagcttgcaggggttggggagggagacatccagcttgggctttcccctttggaataaaccattggtctgtcaaaaaaaaaaaaaaaaaaaaaaaaaaaaaaaaaaaaaaaaaaagcgatgacgaaggaaagaaaaaaatactcacatggaagagaaaacagaaagaaaatgagaatacaggaaggatatagtagcaaaagagggggctcccatgagtggaggctatgataattaataggagagacattgcggcgtggttttaaaagacagttgtagtagggagacaaagttggaactggtggagggtaatgttttgtggaaaaaggggagcgcccatttgactttcgtgggggagtgaggacagaacaaattggggagaagatactatatcctaaaacgagagagagagtttaagacgccttgaagaaggggagaaaatcatataaaacattgttgtaagcagggggtgagaaaaatgggttggtaaaaaacaacagagtggacatatgttgtttagagtgagagatgggcgacgaaaaagcagtggggcgccaacacgaagggacgcaaaagtgagcacgtgcaggaggaaacagatattgtgtacacccccaggggagagcgcattcggctactagacgggggaaagacacaatgcggtatatgatattgagagtaaatatcgcaaagaaatagattaaaataacgatacgagggaggacagacatgataaaaatacaaaataggtaagagaagagaaacataagtgtgcaagaaagaggactaggagcacgaagagtacagggataggagaaaaaaaggagagtaacaacaggtagaaaaaaacaacaaacaaagaa

SEQ ID NO: 448330 - DNA, 2263 bp, Homo sapiens
cctcctcctcctcacaggtgtgtctctagtcctcgtggttgcctgccccactccctgccgagacgcctgccagaaaggtcacctatcctgaaccccagcaagcctgaaacagctcagccaagcaccctgcgatggaagctgcagatgcctccaggagcaacgggtcgagcccagaagccagggatgcccggagcccgtcgggccccagtggcagcctggagaatggcaccaaggctgacggcaaggatgccaagaccaccaacgggcacggcggggaggcagctgagggcaagagcctgggcagcgccctgaagccaggggaaggtaggagcgccctgttcgcgggcaatgagtggcggcgacccatcatccagtttgtcgagtccggggacgacaagaactccaactacttcagcatggactctatggaaggcaagaggtcgccgtacgcagggctccagctgggggctgccaagaagccacccgttacctttgccgaaaagggcgagctgcgcaagtccattttctcggagtcccggaagcccacggtgtccatcatggagcccggggagacccggcggaacagctacccccgggccgacacgggccttttttcacggtccaagtccggctccgaggaggtgctgtgcgactcctgcatcggcaacaagcagaaggcggtcaagtcctgcctggtgtgccaggcctccttctgcgagctgcatctcaagccccacctggagggcgccgccttccgagaccaccagctgctcgagcccatccgggactttgaggcccgcaagtgtcccgtgcatggcaagacgatggagctcttctgccagaccgaccagacctgcatctgctacctttgcatgttccaggagcacaagaatcatagcaccgtgacagtggaggaggccaaggccgagaaggagacggagctgtcactgcaaaaggagcagctgcagctcaagatcattgagattgaggatgaagctgagaagtggcagaaggagaaggaccgcatcaagagcttcaccaccaatgagaaggccatcctggagcagaacttccgggacctggtgcgggacctggagaagcaaaaggaggaagtgagggctgcgctggagcagcgggagcaggatgctgtggaccaagtgaaggtgatcatggatgctctggatgagagagccaaggtgctgcatgaggacaagcagacccgggagcagctgcatagcatcagcgactctgtgttgtttctgcaggaatttggtgcattgatgagcaattactctctccccccacccctgcccacctatcatgtcctgctggagggggagggcctgggacagtcactaggcaacttcaaggacgacctgctcaatgtatgcatgcgccacgttgagaagatgtgcaaggcggacctgagccgtaacttcattgagaggaaccacatggagaacggtggtgaccatcgctatgtgaacaactacacgaacagcttcgggggtgagtggagtgcaccggacaccatgaagagatactccatgtacctgacacccaaaggtggggtccggacatcataccagccctcgtctcctggccgcttcaccaaggagaccacccagaagaatttcaacaatctctatggcaccaaaggtaactacacctcccgggtctgggagtactcctccagcattcagaactctgacaatgacctgcccgtcgtccaaggcagctcctccttctccctgaaaggctatccctccctcatgcggagccaaagccccaaggcccagccccagacttggaaatctggcaagcagactatgctgtctcactaccggccattctacgtcaacaaaggcaacgggattgggtccaacgaagccccatgagctcctggcggaaggaacgaggcgccacacccctgctcttcctcctgaccctgctgctcttgccttctaagctactgtgcttgtctgggtgggagggagcctggtcctgcacctgccctctgcagccctctgccagcctcttgggggcagttccggcctctccgacttccccactggccacactccattcagactcctttcctgccttgtgacctcagatggtcaccatcattcctgtgctcagaggccaacccatcacaggggtgagataggttggggcctgccctaacccgctaccatgtcgaagccccatcgctgggtcataaacttgccgcagtactcttgcccagcgatagggtagggct

SEQ ID NO: 448331 - DNA, 1711 bp, Homo sapiens
cctcctcctcctcacaggtgtgtctctagtcctcgtggttgcctgccccactccctgccgagacgcctgccagaaaggtcacctatcctgaaccccagcaagcctgaaacagctcagccaagcaccctgcgatggaagctgcagatgcctccaggagcaacgggtcgagcccagaagccagggatgcccggagcccgtcgggccccagtggcagcctggagaatggcaccaaggctgacggcaaggatgccaagaccaccaacgggcacggcggggaggcagctgagggcaagagcctgggcagcgccctgaagccaggggaaggtaggagcgccctgttcgcgggcaatgagtggcggcgacccatcatccagtttgtcgagtccggggacgacaagaactccaactacttcagcatggactctatggaaggcaagaggtcgccgtacgcagggctccagctgggggctgccaagaagccacccgttacctttgccgaaaagggcgagctgcgcaagtccattttctcggagtcccggaagcccacggtgtccatcatggagcccggggagacccggcggaacagctacccccgggccgacacgggccttttttcacggtccaagtccggctccgaggaggtgctgtgcgactcctgcatcggcaacaagcagaaggcggtcaagtcctgcctggtgtgccaggcctccttctgcgagctgcatctcaagccccacctggagggcgccgccttccgagaccaccagctgctcgagcccatccgggactttgaggcccgcaagtgtcccgtgcatggcaagacgatggagctcttctgccagaccgaccagacctgcatctgctacctttgcatgttccaggagcacaagaatcatagcaccgtgacagtggaggaggccaaggccgagaaggagacggagctgtcactgcaaaaggagcagctgcagctcaagatcattgagattgaggatgaagctgagaagtggcagaaggagaaggaccgcatcaagagcttcaccaccaatgagaaggccatcctggagcagaacttccgggacctggtgcgggacctggagaagcaaaaggaggaagtgagggctgcgctggagcagcgggagcaggatgctgtggaccaagtgaaggtgatcatggatgctctggatgagagagccaaggtgctgcatgaggacaagcagacccgggagcagctgcatagcatcagcgactctgtgttgtttctgcaggaatttggtgcattgatgagcaattactctctccccccacccctgcccacctatcatgtcctgctggagggggagggcctgggacagtcactaggcaacttcaaggacgacctgctcaatgtatgcatgcgccacgttgagaagatgtgcaaggcggacctgagccgtaacttcattgagaggaaccacatggagaacggtggtgaccatcgctatgtgaacaactacacgaacagcttcgggggtgagtggagtgcaccggacaccatgaagagatactccatgtacctgacacccaaaggtggggtccggacatcataccagccctcgtctcctggccgcttcaccaaggagagtaattgctcatcaatgcaccaaattcctgcagaaacaacacagagtcgctgatgctatgcagctgctcccgggtctgcttgtcctcatgc

SEQ ID NO: 448332 - DNA, 1464 bp, Homo sapiens
cctcctcctcctcacaggtgtgtctctagtcctcgtggttgcctgccccactccctgccgagacgcctgccagaaaggtcacctatcctgaaccccagcaagcctgaaacagctcagccaagcaccctgcgatggaagctgcagatgcctccaggagcaacgggtcgagcccagaagccagggatgcccggagcccgtcgggccccagtggcagcctggagaatggcaccaaggctgacggcaaggatgccaagaccaccaacgggcacggcggggaggcagctgagggcaagagcctgggcagcgccctgaagccaggggaaggtaggagcgccctgttcgcgggcaatgagtggcggcgacccatcatccagtttgtcgagtccggggacgacaagaactccaactacttcagcatggactctatggaaggcaagaggtcgccgtacgcagggctccagctgggggctgccaagaagccacccgttacctttgccgaaaagggcgagctgcgcaagtccattttctcggagtcccggaagcccacggtgtccatcatggagcccggggagacccggcggaacagctacccccgggccgacacgggccttttttcacggtccaagtccggctccgaggaggtgctgtgcgactcctgcatcggcaacaagcagaaggcggtcaagtcctgcctggtgtgccaggcctccttctgcgagctgcatctcaagccccacctggagggcgccgccttccgagaccaccagctgctcgagcccatccgggactttgaggcccgcaagtgtcccgtgcatggcaagacgatggagctcttctgccagaccgaccagacctgcatctgctacctttgcatgttccaggagcacaagaatcatagcaccgtgacagtggaggaggccaaggccgagaaggagacggagctgtcactgcaaaaggagcagctgcagctcaagatcattgagattgaggatgaagctgagaagtggcagaaggagaaggaccgcatcaagagcttcaccaccaatgagaaggccatcctggagcagaacttccgggacctggtgcgggacctggagaagcaaaaggaggaagtgagggctgcgctggagcagcgggagcaggatgctgtggaccaagtgaaggtgatcatggatgctctggatgagagagccaaggtgctgcatgaggacaagcagacccgggagcagctgcatagcatcagcgactctgtgttgtttctgcaggaatttggtgcattgatgagcaattactctctccccccacccctgcccacctatcataggagcagcacagtggggacatctcccgtctcaacagccccaggcctatgggggctctggaaggatgggccagcttgcaggggttggggagggagacatccagcttgggctttcccctttggaataaaccattggtctgtca

SEQ ID NO: 448333 - DNA, 7218 bp, Homo sapiens
  misc_feature (37)..(37): n is a, c, g, or t
gcgggagccgcttcgggccttctgggcatgtctgccntatggctccaggtttgtttttctccccggcactctgacggggagggctcccggcatctcctggcgtccgggtagaggacgcggaggatgctgagctgctggcgcactgcagcacaactagagatgtacggatgcccccatcttgatcttacagaatcagaggtacagccgcgagaaaggtctagtcaagaacagacagagtcgcttgaggactcaggagggtgtttgctgcgttgacaacagactacaccctcacagtttgctctgctcttccaacaccagtggaagatgatcacatcccagggatcagtgtcgtttagggatgtgactgtgggcttcactcaagaggagtggcagcatctggaccctgctcagaggaccctgtacagggatgtgatgctggagaactacagccaccttgtctcagtagggtattgcattcctaaaccagaagtgattctcaagttggagaaaggcgaggagccatggatattagaggaaaaatttccaagccagagtcatctggaattaattaataccagtagaaactattcaataatgaagttcaatgagtttaacaaaggtggaaaatgtttctgtgatgaaaagcatgaaataattcattctgaagaggaaccttctgaatataataaaaatgggaacagcttctggctgaatgaagacctcatttggcatcagaaaattaaaaattgggaacaatcttttgaatacaatgaatgtgggaaagctttccctgagaattcactcttccttgtacataagagaggttacacaggacagaaaacctgcaaatatactgaacatgggaaaacctgtgatatgtcatttttcatcactcatcagcaaacacatccaagagaaaaccactatggtaatgaatgtggagaaaatatctttgaggaatccattctccttgaacatcagagtgtttacccattcagccagaagttaaatctcactccaattcagagaacccactcaattaacaatattattgaatataatgagtgtggaacatttttcagtgaaaaattagtccttcatttacaacagagaacacatacaggagaaaaaccttatgaatgtcatgaatgtggaaaaaccttcacccagaagtcagcccacacaagacatcagagaacacacacagggggaaaaccctatgaatgtcatgaatgtgggaagaccttctataagaattcagacctcattaaacatcaaagaattcatacaggggagagaccttatggatgtcatgaatgtgggaaatccttcagtgaaaagtcaacccttactcaacatcaaagaacgcacacaggggagaaaccatatgaatgtcatgaatgtgggaaaaccttctcatttaagtcagtccttactgtgcatcagaaaacacacacaggggagaagccctatgaatgctatgcatgtgggaaagcctttctcagaaaatcagacctcattaaacatcaaagaatacacacaggtgaaaaaccttatgaatgtaatgaatgtgggaagtcattctctgagaagtcaacccttactaaacatctaagaactcacacaggtgagaaaccttatgaatgtattcagtgtggaaaatttttctgctactactccggtttcacagaacatctgagaagacacacaggggagaaaccttttggatgtaatgaatgtgggaaaaccttccgtcagaagtcagccctaattgttcaccagagaactcatataagacagaaaccctatggatgtaatcaatgtggaaaatcattctgtgtgaagtcaaaactcattgcacatcatagaacacacacaggggagaaaccctatgaatgtaatgtttgtggaaaatcattctatgttaagtcaaaactaactgtacatcagagaatacacttggggagaaaccctataaatgtagtaaacgagggaaattactctgggtgaagtcagaactttgtagaacacagaacataaagggtgagagaaatctgttaatataatgataatgagaacacctttgccctgaagtcagttctcacagtatagaagagaacttaaagagggaaaaaacaatatgaagatagggaatgcaggaaaacattattctggaatttggaccatacactatgttacaaaactaaaagtggaaaaaacttattggtgaatgaatataggaaacattttgcccaatgccactcttcattaaacatcagagaattcacacggggtgaaacctgggtcagcatccctaggttgagaagggatgcatttttctgctactactacagtttcacagaatacctgagaagacacacttggagaaaccttttgggtgtaatgaatgtgggaaaacctttcatcagaagtcagctctaattgttcaccacagaactcatataagacagaaaccctatgggtgtaatgaatgtggaaaatcattctgtgtgaagtcaagaggccagagaaaatgcacaaactgtaggaaactataggaaagcatttactatgaggttatattttatggagtatatgtaataagaagtagcttctcagtgaacatcagatagtagagaaagtatttttaactgtatccaatgtgtggatgttttaagttaaaatctaaatttaatatagaacagaggtgttgagttgcaggatatctagcaatttaagaaaatgtggaaaaaatatttttattgagaaatagcattttactttgttaatatctagtttagttcattgtcaagactgctattttctaagagacttctaaagacgccactcaagccaatggctataagtagttcaaaggtttattgcttagccatatgaaaaataagggaagattttttagcaaggggacccacaaacaagagtgctcttgtatgtccagaagaaagagaaagaccatcaatcaggggccatagtacaggagcccaccagcaggatttttgaataatcctagggcagactaaattcagacgacccatctcagaatggtggatcaaagcagcaagtcaatttgccttgtatgcaacttatgaggattagtagaagagagtgggtccagatttctggtggtttctgccctgcagatgtctaacacataagccaggacattctgctgtgagtgacttattgtacccaactctatttctctccatactgaaacatgtctttcataggtgatacaactttttaaaatgtatgtgtagatataacttaaatatggagctttcaaaaagcacaaataggctggacatggtggctcatgcctgtaatcccagtactttgggaggctgaggtgggcaaatcacctgaggtcaggagttccagaccagcctggccaacatgatgaaaccctgtctctactaaaaatacaaaaattagccgggcatggtggtgcacatcggtagtcctggctactagagaggttgaggtgggaggatcacttgaacctgggaggtgggggtttcagtgagctgagatcatgccactgcactccagcctgagtgacagagagagattcaaaaaacaaaaaaaaagcaaaaatatactttgctattgggtaaggtatagtagttggcagcagaatggacccattgaggataactataaaattacagaaaatatttaaatgcaacttattgctatagaagcaaagaggactaaagggcaaaattctagagagtggtaaatctcagaaagcacaagcataaaatgcagctctgggggccctttccacttctggctatagggaagaacctgaatactgaacttgattcaggcagaggaccataacctgggggtcaggggaaggcatgggggggaccagaaaccagaagaacaatcaagactgcaatgaaaaaaatggatacattaggagcttcaaacacatataatttctcaagaaatttccagatgtctcatgctgcatagggcaggagcctgaaaagctaatttgagaagataataagtaggatttttgttttgttttgcattttgcagtacaaaggagaaatgattagaacttaggaagtgccagtgggttggtgaacatgccatcagtaaaagccctggaaacaaggtcatactagagattggttgtgccttgtcacaactgcaaacaatacctgagtggagtattcaaaaacttgcttagaaagaaaactctaggaacagatggcttcactgaagttattccaaatatttaagaaataataccaggcttttataaacttttctagaagaaaaaagatggaacttttccaattcagtttttgaggccagtacaaccttgataacaaaacctaaaaaaaaaacaacaaaaaaacccataaagctatagaccaaagtctcatagatttagatgcaaaatcctaaaattgaaaaaaacatctagccatatccataaactatatcatcaccaagagatgtttattagggcaatcaaaagatttattattttaaaaaaatcagtgtggacttccattcctctttcttttgattcccccctttgacttttcatgtatctctcctgccttccttccccagagtggaggagttagacttgcctcgtgggatgagaggagttgtggctttgtgtctgctggcaccaagagggctgagggtgaggtgtggaagggacagggggaggagatgggcagcattgttgagagattggtaacactgagcaaataaatatgttgagaatgatgacagcaagatttctccattagagaaggtatttataaaaataggaatgaggagagctagaaaacctggagtgtggcattagaatagaactcatatcttttaaatatataggaacaaataaataaattgttgtgtgtgcacatatgcatatattttgtgttcattctactgagaggacctaaacacaatgacacctcagtaacagtaagcacaccaactgccaagttattagttcctaaatactatccacaaaaaaggggaacagggatgattcctagtcagagattgggagaaatacaagatgagcctgaatcatctcatgtacctgacagtaagaaaatactctggctggtctcagtggctcatgtctgtaattctagcatgttagaaggtcaaggtgggtgggttgcttgagctcaggagtttgagaccagcctgggcaacatggcacaattgtctctacaaaaaatacaaaaattagccaggcatggtggcatgcacctgtagtccgaggtactcaggaggcagagacgtgggaggatcgcttgagcctgggagattgaggctgcactgagctgtgatcgtgccactgtactctagcctggaagacagagtgagaccccatctcaggaaaaaagaaaaaaaaaaagatgtcattcagcaggttaatggataaactgtggaacatccagaaaactttaacattcttcaaagaaatagaaaacacaatcctaaaatttatatgggaaccacaaaagacttagaatagtcagctatcctgagcaaaaggaatcaaactggaggaatcatattacctgacttccaattattcaacagagctacagtaaccaaaacagcatgatactggcataacaacagacacataggaacagtatagacaacccagaaacaaattcatacatctatggtgaccacttttgacaaaggaatgaagaacatacactggggaaaagataatgtctttaataaatggtgctgggaaaactggatatccatatgcagaagaatgaaactagacccccatctcttagcatatacaaaaatcaaaattaattaaaaagttaaatctaagacctcaaactatgaaacagctaaaagaaaacatcggggaatctctccaggacattggagtgggcaaagatttcttgtgtaatacctgacaaacaggcaaccaaagcaaaagtggacaaatgggatcacatcaagttaaaaatcttctgcattgcaaaggaaataacaaagtgaagagacaacccatagaatgtgagataatatttgcaaactatccatctgtattaggccatttttgaagtactacaaagaaatacttgagactgagtaatttataaagaagaggtttaattggctcacggttttgcaggctgtacaggaagcatggtgctaacatctgatcagcttgtagggaggcatcaggaagtttccaaccatggtggaaggcaaaaggggaataagtatctcacatggcaggtgcagggcaaagagaggggggaagggaagtgccacacaaccagatcttgtgagtactcagattttgtgaggggtgcttgaggtcatggatacccatttaccctgatgtgtttatacacatttcatacctgtattaaaatatctcatgtaccccataaacatatacacctactttgtacccacaaaaatttaaaaataaagttaatttcaatgtttaaagacttgttattaaaataatagcagtttctataaatttaatatttcaataaaactcccagtatttattgttaacactggaaaaagttttccaaaacgtatatggcagaaatatgggccttgatgtgaggacagcatcaattaatgagggatcctctcccttgatcaaaacaccttccaccaagacccacctttaacgctgagcattacctctcaaagtgagatttgggcagggactaatatccaaactgtatcaacatctgacaaggtgttcacaaccagaatatataaggagctataacaattctatagaaaaaaaaatctgatttaaaactgggcaaaaatctgaatagacgtttctcaaaagaagacatacaaatggcaaacaggcatatgaaaaggtactcaacatcattgatccattagagaaatgcaaatcaaaactacagtaagatatcatctcaccccagttaaaatgtcttctctccaaaagacagataataacaaatgctgaagaggatgtggagaaaagggaaacctcgtgcactgtggaaatgttattagtacaaccactatggacaacaatttggaggtacctcaaaaactaaaaatagagctatcatacaatcccacaattccactggtagttatataccccaaagacagggaatcagtatattgaagatatatctgcaccgtgtttactgtagc

SEQ ID NO: 448334 - DNA, 6543 bp, Homo sapiens
  misc_feature (37)..(37): n is a, c, g, or t
gcgggagccgcttcgggccttctgggcatgtctgccntatggctccaggtttgtttttctccccggcactctgacggggagggctcccggcatctcctggcgtccgggtagaggacgcggaggatgctgagctgctggcgcactgcagcacaactagagatgtacggatgcccccatcttgatcttacagaatcagaggtacagccgcgagaaaggtctagtcaagaacagacagagtcgcttgaggactcaggagggtgtttgctgcgttgacaacagactacaccctcacagtttgctctgctcttccaacaccagtggaagatgatcacatcccagggatcagtgtcgtttagggatgtgactgtgggcttcactcaagaggagtggcagcatctggaccctgctcagaggaccctgtacagggatgtgatgctggagaactacagccaccttgtctcagtagggtattgcattcctaaaccagaagtgattctcaagttggagaaaggcgaggagccatggatattagaggaaaaatttccaagccagagtcatctggaattaattaataccagtagaaactattcaataatgaagttcaatgagtttaacaaaggtggaaaatgtttctgtgatgaaaagcatgaaataattcattctgaagaggaaccttctgaatataataaaaatgggaacagcttctggctgaatgaagacctcatttggcatcagaaaattaaaaattgggaacaatcttttgaatacaatgaatgtgggaaagctttccctgagaattcactcttccttgtacataagagaggttacacaggacagaaaacctgcaaatatactgaacatgggaaaacctgtgatatgtcatttttcatcactcatcagcaaacacatccaagagaaaaccactatggtaatgaatgtggagaaaatatctttgaggaatccattctccttgaacatcagagtgtttacccattcagccagaagttaaatctcactccaattcagagaacccactcaattaacaatattattgaatataatgagtgtggaacatttttcagtgaaaaattagtccttcatttacaacagagaacacatacaggagaaaaaccttatgaatgtcatgaatgtggaaaaaccttcacccagaagtcagcccacacaagacatcagagaacacacacagggggaaaaccctatgaatgtcatgaatgtgggaagaccttctataagaattcagacctcattaaacatcaaagaattcatacaggggagagaccttatggatgtcatgaatgtgggaaatccttcagtgaaaagtcaacccttactcaacatcaaagaacgcacacaggggagaaaccatatgaatgtcatgaatgtgggaaaaccttctcatttaagtcagtccttactgtgcatcagaaaacacacacaggggagaagccctatgaatgctatgcatgtgggaaagcctttctcagaaaatcagacctcattaaacatcaaagaatacacacaggtgaaaaaccttatgaatgtaatgaatgtgggaagtcattctctgagaagtcaacccttactaaacatctaagaactcacacaggtgagaaaccttatgaatgtattcagtgtggaaaatttttctgctactactccggtttcacagaacatctgagaagacacacaggggagaaaccttttggatgtaatgaatgtgggaaaaccttccgtcagaagtcagccctaattgttcaccagagaactcatataagacagaaaccctatggatgtaatcaatgtggaaaatcattctgtgtgaagtcaaaactcattgcacatcatagaacacacacaggggagaaaccctatgaatgtaatgtttgtggaaaatcattctatgttaagtcaaaactaactgtacatcagagaatacacttggggagaaaccctataaatgtagtaaacgagggaaattactctgggtgaagtcagaactttgtagaacacagaacataaagggtgagagaaatctgttaatataatgataatgagaacacctttgccctgaagtcagttctcacagtatagaagagaacttaaagagggaaaaaacaatatgaagatagggaatgcaggaaaacattattctggaatttggaccatacactatgttacaaaactaaaagtggaaaaaacttattggtgaatgaatataggaaacattttgcccaatgccactcttcattaaacatcagagaattcacacggggtgaaacctgggtcagcatccctaggttgagaagggatgcatttttctgctactactacagtttcacagaatacctgagaagacacacttggagaaaccttttgggtgtaatgaatgtgggaaaacctttcatcagaagtcagctctaattgttcaccacagaactcatataagacagaaaccctatgggtgtaatgaatgtggaaaatcattctgtgtgaagtcaagaggccagagaaaatgcacaaactgtaggaaactataggaaagcatttactatgaggttatattttatggagtatatgtaataagaagtagcttctcagtgaacatcagatagtagagaaagtatttttaactgtatccaatgtgtggatgttttaagttaaaatctaaatttaatatagaacagaggtgttgagttgcaggatatctagcaatttaagaaaatgtggaaaaaatatttttattgagaaatagcattttactttgttaatatctagtttagttcattgtcaagactgctattttctaagagacttctaaagacgccactcaagccaatggctataagtagttcaaaggtttattgcttagccatatgaaaaataagggaagattttttagcaaggggacccacaaacaagagtgctcttgtatgtccagaagaaagagaaagaccatcaatcaggggccatagtacaggagcccaccagcaggatttttgaataatcctagggcagactaaattcagacgacccatctcagaatggtggatcaaagcagcaagtcaatttgccttgtatgcaacttatgaggattagtagaagagagtgggtccagatttctggtggtttctgccctgcagatgtctaacacataagccaggacattctgctgtgagtgacttattgtacccaactctatttctctccatactgaaacatgtctttcataggtgatacaactttttaaaatgtatgtgtagatataacttaaatatggagctttcaaaaagcacaaataggctggacatggtggctcatgcctgtaatcccagtactttgggaggctgaggtgggcaaatcacctgaggtcaggagttccagaccagcctggccaacatgatgaaaccctgtctctactaaaaatacaaaaattagccgggcatggtggtgcacatcggtagtcctggctactagagaggttgaggtgggaggatcacttgaacctgggaggtgggggtttcagtgagctgagatcatgccactgcactccagcctgagtgacagagagagattcaaaaaacaaaaaaaaagcaaaaatatactttgctattgggtaaggtatagtagttggcagcagaatggacccattgaggataactataaaattacagaaaatatttaaatgcaacttattgctatagaagcaaagaggactaaagggcaaaattctagagagtggtaaatctcagaaagcacaagcataaaatgcagctctgggggccctttccacttctggctatagggaagaacctgaatactgaacttgattcaggcagaggaccataacctgggggtcaggggaaggcatgggggggaccagaaaccagaagaacaatcaagactgcaatgaaaaaaatggatacattaggagcttcaaacacatataatttctcaagaaatttccagatgtctcatgctgcatagggcaggagcctgaaaagctaatttgagaagataataagtaggatttttgttttgttttgcattttgcagtacaaaggagaaatgattagaacttaggaagtgccagtgggttggtgaacatgccatcagtaaaagccctggaaacaaggtcatactagagattggttgtgccttgtcacaactgcaaacaatacctgagtggagtattcaaaaacttgcttagaaagaaaactctaggaacagatggcttcactgaagttattccaaatatttaagaaataataccaggcttttataaacttttctagaagaaaaaagatggaacttttccaattcagtttttgaggccagtacaaccttgataacaaaacctaaaaaaaaaacaacaaaaaaacccataaagctatagaccaaagtctcatagatttagatgcaaaatcctaaaattgaaaaaaacatctagccatatccataaactatatcatcaccaagagatgtttattagggcaatcaaaagatttattattttaaaaaaatcagtgtggacttccattcctctttcttttgattcccccctttgacttttcatgtatctctcctgccttccttccccagagtggaggagttagacttgcctcgtgggatgagaggagttgtggctttgtgtctgctggcaccaagagggctgagggtgaggtgtggaagggacagggggaggagatgggcagcattgttgagagattggtaacactgagcaaataaatatgttgagaatgatgacagcaagatttctccattagagaaggtatttataaaaataggaatgaggagagctagaaaacctggagtgtggcattagaatagaactcatatcttttaaatatataggaacaaataaataaattgttgtgtgtgcacatatgcatatattttgtgttcattctactgagaggacctaaacacaatgacacctcagtaacagtaagcacaccaactgccaagttattagttcctaaatactatccacaaaaaaggggaacagggatgattcctagtcagagattgggagaaatacaagatgagcctgaatcatctcatgtacctgacagtaagaaaatactctggctggtctcagtggctcatgtctgtaattctagcatgttagaaggtcaaggtgggtgggttgcttgagctcaggagtttgagaccagcctgggcaacatggcacaattgtctctacaaaaaatacaaaaattagccaggcatggtggcatgcacctgtagtccgaggtactcaggaggcagagacgtgggaggatcgcttgagcctgggagattgaggctgcactgagctgtgatcgtgccactgtactctagcctggaagacagagtgagaccccatctcaggaaaaaagaaaaaaaaaaagatgtcattcagcaggttaatggataaactgtggaacatccagaaaactttaacattcttcaaagaaatagaaaacacaatcctaaaatttatatgggaaccacaaaagacttagaatagtcagctatcctgagcaaaaggaatcaaactggaggaatcatattacctgacttccaattattcaacagagctacagtaaccaaaacagcatgatactggcataacaacagacacataggaacagtatagacaacccagaaacaaattcatacatctatggtgaccacttttgacaaaggaatgaagaacatacactggggaaaagataatgtctttaataaatggtgctgggaaaactggatatccatatgcagaagaatgaaactagacccccatctcttagcatatacaaaaatcaaaattaattaaaaagttaaatctaagacctcaaactatgaaacagctaaaagaaaacatcggggaatctctccaggacattggagtgggcaaagatttcttgtgtaatacctgacaaacaggcaaccaaagcaaaagtggacaaatgggatcacatcaagttaaaaatcttctgcattgcaaaggaaataacaaagtgaagagacaacccatagaatgtgagataatatttgcaaactatccatctgtattaggccatttttgaagtactacaaagaaatacttgagactgagtaatttataaagaagaggtttaattggctcacggttttgcaggctgtacaggaagcatggtgctaacatctgatcagcttgtagggaggcatcaggaagtttccaaccatggtggaaggcaaaaggggaataagtatctcacatggcaggtgcagggcaaagagaggggggaagggaagtgccacacaaccagatcttgtgagtactcagattttgtgaggggtgcttgaggtcatggatacccatttaccctgatgtgtttatacacatttcatacctgtattaaaatatctcatgtaccccataaacatatacacctactttgtacccacaaaattcaaataagtacttctgtgtaaacaaaaaaacaaacaacacaaccacaaggacctaaccatgac

SEQ ID NO: 448335 - DNA, 269 bp, Homo sapiens
catgcctggattcgttactcgctcgttctagatgctgagctgctggcgcactgcagcacaactagagatgtacggatgcccccatcttgatcttacagaatcagaggtacagccgcgagaaaggtctgtaagttatctatttacgctttatttaaaagatgggatggggtggggtggacaggaaacgagcttaacgtgttaagttactgatgacattgacacattttgttgtggcagagtcaagaacagacagagtcgcttgaggactc

SEQ ID NO: 448336 - DNA, 937 bp, Homo sapiens
tagcaccagtgggcattttcagagggtccagctcatggctcaagtgacaggaagatgtaggagctttctgtcttgaatgaggattcgaaccaaagggcttaggcccagctgtcttggagcaaagcagctgttgtgggacccccacaggctgggagctttgtgcccattcagatgtgggggcagaagagggcaaggccgaaggagcagacagcaccgcttcttggggagttgtgaaggcatcatgcggagggaagagcttagcagccaagtggaggacagcaccctccatgcctggattcgttactcgctcgttctagatgctgagctgctggcgcactgcagcacaactagagatgtacggatgcccccatcttgatcttacagaatcagaggtacagccgcgagaaaggtctagtcaagaacagacagagtcgcttgaggactcaggagggtgtttgctgcgttgacaacagactacaccctcacagtttgctctgctcttccaacaccagtggaagatgatcacatcccagggatcagtgtcgtttagggatgtgactgtgggcttcactcaagaggagtggcagcatctggaccctgctcagaggaccctgtacagggatgtgatgctggagaactacagccaccttgtctcagtagggtattgcattcctaaaccagaagtgattctcaagttggagaaaggcgaggagccatggatattagaggaaaaatttccaagccagagtcatctgggtgagttagtatgtgccagatggaatttaaaggaaggtagatcacaaagggtaagtttggataataagaccattgaaatgttctttaggaatcatgttttagaggctccagacctttggaagtaacatgttgacgtgacccaaatatgcagtgactctgaatcacccagcatctcccagta

SEQ ID NO: 448337 - DNA, 3492 bp, Homo sapiens
gaaatggaagtaacgagtaagtttggatgcttcgattctaccctagattgagacgggtgagcatagaggcaaaaaaagacattttcttccaaacaagaggtgaccaaacgggcaagggagacctcctcccgggcatgcagagcgcagcgattctgtgcccagggagccggagggctggggctgggagatcccggcggagccccggcagagcagtcgcccgtgagcccccgcaactcagacgcgctcggcctcgcgctccggggctgggaccaccgagggcgagctgcagccttcgccacccggtccgccgccggactccgcctcccacaaacagcccggcaaggcccttttccgccgctccctcatccagcgaagcctccttcccagcttccccggcggcggcgccgtgacgtcacttccgttctccagcgcgcacgtgggaggaagtgctggtgccctctgccgctgctcccgtctctttggttacgctcgtcagccggtcggccgccgcctccagccgtgtgccgctatgggagtcccggcgttcttccgctggctcagccgcaagtacccgtccatcatagtcaactgcgtggaagagaagccaaaagaatgcaatggtgtaaagattccagttgatgccagtaaacctaatccaaatgatgtggagtttgataatctgtatttggatatgaatggaatcatccatccctgtactcatcctgaagacaaaccagcaccaaaaaatgaagatgaaatgatggttgcaatttttgagtacattgacagacttttcagtattgtaagaccaagaagacttctctacatggcaatagatggagtggcaccacgtgctaaaatgaaccagcagcgttcaaggaggttcagggcatcaaaagaaggaatggaagcagcagtcgagaagcagcgagtcagggaagaaatattggcaaaaggtggctttcttcctccagaagaaataaaagaaagatttgacagcaactgtattacaccaggaactgaattcatggacaatcttgctaaatgccttcgctattacatagctgatcgtttaaataatgaccctgggtggaaaaatttgacagttattttatctgatgctagtgctcctggtgaaggagaacataaaatcatggattacattagaaggcaaagagcccagcctaaccatgacccaaatactcatcattgtttatgtggagcagatgctgatctcattatgcttggccttgccacacatgaaccgaactttaccattattagagaagaattcaaaccaaacaagcccaaaccatgtggtctttgtaatcagtttggacatgaggtcaaagattgtgaaggtttgccaagagaaaagaagggaaagcatgatgaacttgccgatagtcttccttgtgcagaaggagagtttatcttccttcggcttaatgttcttcgtgagtatttggaaagagaactcacaatggccagcctaccattcacatttgatgttgagaggagcattgatgactgggttttcatgtgcttctttgtgggaaatgacttcctccctcatttgccatcgttagagattagggaaaatgcaattgaccgtttggttaacatatacaaaaatgtggtacacaaaactgggggttaccttacagaaagtggttatgtcaatctgcaaagagtacagatgatcatgttagcagttggtgaagttgaggatagcatttttaaaaagagaaaggatgatgaggacagttttagaagacgacagaaagaaaaaagaaagagaatgaagagagatcaaccagctttcactcctagtggaatattaactcctcatgccttgggttcaagaaattcaccaggttctcaagtagccagtaatccgagacaagcagcctatgaaatgaggatgcagaataactctagtccttcgatatctcctaatacgagtttcacatctgatggctccccgtctccattaggaggaattaagcgaaaagcagaagacagtgacagtgaacctgagccagaggataatgtcaggttatgggaagctggctggaagcagcggtactacaagaacaaatttgatgtggatgcagctgatgagaaattccgtcggaaagttgtgcagtcgtacgttgaaggactttgctgggttcttagatattattaccagggctgtgcttcctggaagtggtattatccatttcattatgcaccatttgcttcagactttgaaggcattgcagacatgccatctgattttgagaagggtacgaaaccgtttaaaccactagaacaacttatgggggtatttccagctgcaagtggtaattttctacctccatcatggcggaagctcatgagtgatcctgattctagtataattgacttctatcctgaagattttgctattgatttgaatgggaagaaatatgcatggcaaggtgttgctctcttgccattcgtggatgagcgaaggctacgagctgccctagaagaggtatacccagacctcactccagaagagaccagaagaaacagccttggaggtgatgtcttatttgtggggaaacatcacccactccatgacttcattttagagctgtaccagacaggttccacagagccagtggaggtaccccctgaactatgtcatgggattcaaggaaagttttctttggatgaagaagccattcttccagatcaaatagtatgttctcctgttcctatgttaagggatctgacacagaacactgtagtcagtattaattttaaagacccacagtttgctgaagattacatttttaaagctgtaatgcttccaggagcaagaaagccagcagcagtactgaaacctagtgactgggaaaaatccagcaatggacggcagtggaagcctcagcttggctttaaccgtgaccggaggcctgtgcacctggatcaggcagccttcaggactttgggccatgtgatgccaagaggctcaggaactggcatttacagcaatgctgcaccaccacctgtgacttaccagggaaacttatacaggccgcttttgagaggacaagcccagattccaaaacttatgtcaaatatgaggccccaggattcctggcgaggtcctcctccccttttccagcagcaaaggtttgacagaggcgttggggctgaacctctgctcccatggaaccggatgctgcaaacccagaatgcagccttccagccaaaccagtaccagatgctagctgggcctggtgggtatccacccagacgagatgatcgtggagggagacagggatatcccagagaaggaaggaaataccctttgccaccaccctcaggaagatacaattggaattaagcttttgtaaagctttcccaaatcctttcatcattctacagttttatgctatttgtggaaagatttctttctcaagtagtagtttttaataaaactacagtactttgtgt

SEQ ID NO: 448338 - DNA, 1337 bp, Homo sapiens
gaaatggaagtaacgagtaagtttggatgcttcgattctaccctagattgagacgggtgagcatagaggcaaaaaaagacattttcttccaaacaagaggtgaccaaacgggcaagggagacctcctcccgggcatgcagagcgcagcgattctgtgcccagggagccggagggctggggctgggagatcccggcggagccccggcagagcagtcgcccgtgagcccccgcaactcagacgcgctcggcctcgcgctccggggctgggaccaccgagggcgagctgcagccttcgccacccggtccgccgccggactccgcctcccacaaacagcccggcaaggcccttttccgccgctccctcatccagcgaagcctccttcccagcttccccggcggcggcgccgtgacgtcacttccgttctccagcgcgcacgtgggaggaagtgctggtgccctctgccgctgctcccgtctctttggttacgctcgtcagccggtcggccgccgcctccagccgtgtgccgctatgggagtcccggcgttcttccgctggctcagccgcaagtacccgtccatcatagtcaactgcgtggaagagaaggtgaggaggcgccaggcggccgccacactcgagcccgggcccccggcacgtctaggccgcggcccatgggctccgccgcctgcccccggggagccttgccggagctcgcgccctgctgccagcctcgcgagcagtcgcagccccacacgcgatgggacgcgggctgtgggattcagcaccccgggggcgaggaattcaggaccctcggcggggcaagggcctatagggttccgaactcgcaggagggtcgctcctcccctactcgctttttcccggcaccggaaggccccgcccactgctttgtttcctctccagaccgcgcattttgggtctcggaagaggttcagaggctgttgttgagcaatgcatgccaggtcagctgagctagcgggttatggatgcacggattcggaggccagctttttgacaaccttgtaaaggaatccctggcggcgaccttttcgttgtttaccaattgtgccggaaaggttttctcctagtgttcaggaccatttgttgttctggttagattggacgctgaaagcagtatgtcaggtccaggatgagcgctatagaattctgagaagttacccttctctgtgtgccctgactactgaacggggtgggtgcttgttgaaaatttcaagattactggatgtacttgagcagtacaatttttgttgttagttaatacgtaagtagatttttggccattattgagttttgtttttat

SEQ ID NO: 448339 - DNA, 422 bp, Homo sapiens
  misc_feature (42)..(42): n is a, c, g, or t
ttttctctatgattcagtataatgaattatatgtacttcagngactgagttattaagtattataggctattgtttagaaggtataagttaccatcaaatcaaagtgtagacaaccttgtaatattaacgaagatcatttggttttttagtgagttttgtaaagtgcttacagtttggactttattccattgcccttcttttctttctgtcatctaactgtgttgtgatttaattttaatttctacattcattccatttatgttagagagatcaaccagctttcactcctagtggaatattaactcctcatgccttgggttcaagaaattcaccaggttctcaagtagccagtaatccgagacaagcagcctatgaaatgaggatgcagaataactctgtaagtggcttacttttatgtgaca

SEQ ID NO: 448340 - DNA, 220 bp, Homo sapiens
gcacgagatttttaaccattatgaaaaaccagtactcctatcatctaagatccatgctgatttttattgcacaagaattaggtttgaactcttgagctggaacctcagcaaactagagtatatattgttcagtatttctttggaaacatttcattaatgtacttgtcttacagaaatttctgaactttagtaaaaaaaaataaagttaaacttttaaaac

SEQ ID NO: 448341 - DNA, 3977 bp, Homo sapiens
gaaatggaagtaacgagtaagtttggatgcttcgattctaccctagattgagacgggtgagcatagaggcaaaaaaagacattttcttccaaacaagaggtgaccaaacgggcaagggagacctcctcccgggcatgcagagcgcagcgattctgtgcccagggagccggagggctggggctgggagatcccggcggagccccggcagagcagtcgcccgtgagcccccgcaactcagacgcgctcggcctcgcgctccggggctgggaccaccgagggcgagctgcagccttcgccacccggtccgccgccggactccgcctcccacaaacagcccggcaaggcccttttccgccgctccctcatccagcgaagcctccttcccagcttccccggcggcggcgccgtgacgtcacttccgttctccagcgcgcacgtgggaggaagtgctggtgccctctgccgctgctcccgtctctttggttacgctcgtcagccggtcggccgccgcctccagccgtgtgccgctatgggagtcccggcgttcttccgctggctcagccgcaagtacccgtccatcatagtcaactgcgtggaagagaagccaaaagaatgcaatggtgtaaagattccagttgatgccagtaaacctaatccaaatgatgtggagtttgataatctgtatttggatatgaatggaatcatccatccctgtactcatcctgaagacaaaccagcaccaaaaaatgaagatgaaatgatggttgcaatttttgagtacattgacagacttttcagtattgtaagaccaagaagacttctctacatggcaatagatggagtggcaccacgtgctaaaatgaaccagcagcgttcaaggaggttcagggcatcaaaagaaggaatggaagcagcagtcgagaagcagcgagtcagggaagaaatattggcaaaaggtggctttcttcctccagaagaaataaaagaaagatttgacagcaactgtattacaccaggaactgaattcatggacaatcttgctaaatgccttcgctattacatagctgatcgtttaaataatgaccctgggtggaaaaatttgacagttattttatctgatgctagtgctcctggtgaaggagaacataaaatcatggattacattagaaggcaaagagcccagcctaaccatgacccaaatactcatcattgtttatgtggagcagatgctgatctcattatgcttggccttgccacacatgaaccgaactttaccattattagagaagaattcaaaccaaacaagcccaaaccatgtggtctttgtaatcagtttggacatgaggtcaaagattgtgaaggtttgccaagagaaaagaagggaaagcatgatgaacttgccgatagtcttccttgtgcagaaggagagtttatcttccttcggcttaatgttcttcgtgagtatttggaaagagaactcacaatggccagcctaccattcacatttgatgttgagaggagcattgatgactgggttttcatgtgcttctttgtgggaaatgacttcctccctcatttgccatcgttagagattagggaaaatgcaattgaccgtttggttaacatatacaaaaatgtggtacacaaaactgggggttaccttacagaaagtggttatgtcaatctgcaaagagtacagatgatcatgttagcagttggtgaagttgaggatagcatttttaaaaagagaaaggatgatgaggacagttttagaagacgacagaaagaaaaaagaaagagaatgaagagagatcaaccagctttcactcctagtggaatattaactcctcatgccttgggttcaagaaattcaccaggttctcaagtagccagtaatccgagacaagcagcctatgaaatgaggatgcagaataactctagtccttcgatatctcctaatacgagtttcacatctgatggctccccgtctccattaggaggaattaagcgaaaagcagaagacagtgacagtgaacctgagccagaggataatgtcaggttatgggaagctggctggaagcagcggtactacaagaacaaatttgatgtggatgcagctgatgagaaattccgtcggaaagttgtgcagtcgtacgttgaaggactttgctgggttcttagatattattaccagggctgtgcttcctggaagtggtattatccatttcattatgcaccatttgcttcagactttgaaggcattgcagacatgccatctgattttgagaagggtacgaaaccgtttaaaccactagaacaacttatgggggtatttccagctgcaagtggtaattttctacctccatcatggcggaagctcatgagtgatcctgattctagtataattgacttctatcctgaagattttgctattgatttgaatgggaagaaatatgcatggcaaggtgttgctctcttgccattcgtggatgagcgaaggctacgagctgccctagaagaggtatacccagacctcactccagaagagaccagaagaaacagccttggaggtgatgtcttatttgtggggaaacatcacccactccatgacttcattttagagctgtaccagacaggttccacagagccagtggaggtaccccctgaactatgtcatgggattcaaggaaagttttctttggatgaagaagccattcttccagatcaaatagtatgttctcctgttcctatgttaagggatctgacacagaacactgtagtcagtattaattttaaagacccacagtttgctgaagattacatttttaaagctgtaatgcttccaggagcaagaaagccagcagcagtactgaaacctagtgactgggaaaaatccagcaatggacggcagtggaagcctcagcttggctttaaccgtgaccggaggcctgtgcacctggatcaggcagccttcaggactttgggccatgtgatgccaagaggctcaggaactggcatttacagcaatgctgcaccaccacctgtgacttaccagggaaacttatacaggccgcttttgagaggacaagcccagattccaaaacttatgtcaaatatgaggccccaggattcctggcgaggtcctcctccccttttccagcagcaaaggtttgacagaggcgttggggctgaacctctgctcccatggaaccggatgctgcaaacccagaatgcagccttccagccaaaccagtaccagatgctagctgggcctggtgggtatccacccagacgagatgatcgtggagggagacagggatatcccagagaaggaaggaaataccctttgccaccaccctcaggaagatacaattggaattaagcttttgtaaagctttcccaaatcctttcatcattctacagttttatgctatttgtggaaagatttctttctcaagtagtagtttttaataaaactacagtactttgtgtatttcttttaactgtgtatatttctactgatctgatctcactgtttatgttgctttccaaagatgtatgttgcataatacagtggatctgaatttattattgcttataaaacacatttgatggaataggagtactggtttttcataatggttaaaaatgaaaccagctgtggatttcaaaacacagtgtattctagatcatctaagatccatgctgatttttattgcacaagaattaggtttgaactcttgagctggaacctcagcaaactagagtatatattgttcagtatttctttggaaacatttcattaatgtacttgtcttacagaaatttctgaactttagtaaaaaaaaataaagttaaacttttaaaacaaaacaaacggaacccacccacccccgcgccccgacaccgcccccgccgaccccacacccgcccacaccacaacacacacaaggtggggcgccgccggcaaaaaaaac

SEQ ID NO: 448342 - DNA, 3810 bp, Homo sapiens
gaaatggaagtaacgagtaagtttggatgcttcgattctaccctagattgagacgggtgagcatagaggcaaaaaaagacattttcttccaaacaagaggtgaccaaacgggcaagggagacctcctcccgggcatgcagagcgcagcgattctgtgcccagggagccggagggctggggctgggagatcccggcggagccccggcagagcagtcgcccgtgagcccccgcaactcagacgcgctcggcctcgcgctccggggctgggaccaccgagggcgagctgcagccttcgccacccggtccgccgccggactccgcctcccacaaacagcccggcaaggcccttttccgccgctccctcatccagcgaagcctccttcccagcttccccggcggcggcgccgtgacgtcacttccgttctccagcgcgcacgtgggaggaagtgctggtgccctctgccgctgctcccgtctctttggttacgctcgtcagccggtcggccgccgcctccagccgtgtgccgctatgggagtcccggcgttcttccgctggctcagccgcaagtacccgtccatcatagtcaactgcgtggaagagaagccaaaagaatgcaatggtgtaaagattccagttgatgccagtaaacctaatccaaatgatgtggagtttgataatctgtatttggatatgaatggaatcatccatccctgtactcatcctgaagacaaaccagcaccaaaaaatgaagatgaaatgatggttgcaatttttgagtacattgacagacttttcagtattgtaagaccaagaagacttctctacatggcaatagatggagtggcaccacgtgctaaaatgaaccagcagcgttcaaggaggttcagggcatcaaaagaaggaatggaagcagcagtcgagaagcagcgagtcagggaagaaatattggcaaaaggtggctttcttcctccagaagaaataaaagaaagatttgacagcaactgtattacaccaggaactgaattcatggacaatcttgctaaatgccttcgctattacatagctgatcgtttaaataatgaccctgggtggaaaaatttgacagttattttatctgatgctagtgctcctggtgaaggagaacataaaatcatggattacattagaaggcaaagagcccagcctaaccatgacccaaatactcatcattgtttatgtggagcagatgctgatctcattatgcttggccttgccacacatgaaccgaactttaccattattagagaagaattcaaaccaaacaagcccaaaccatgtggtctttgtaatcagtttggacatgaggtcaaagattgtgaaggtttgccaagagaaaagaagggaaagcatgatgaacttgccgatagtcttccttgtgcagaaggagagtttatcttccttcggcttaatgttcttcgtgagtatttggaaagagaactcacaatggccagcctaccattcacatttgatgttgagaggagcattgatgactgggttttcatgtgcttctttgtgggaaatgacttcctccctcatttgccatcgttagagattagggaaaatgcaattgaccgtttggttaacatatacaaaaatgtggtacacaaaactgggggttaccttacagaaagtggttatgtcaatctgcaaagagtacagatgatcatgttagcagttggtgaagttgaggatagcatttttaaaaagagaaaggatgatgaggacagttttagaagacgacagaaagaaaaaagaaagagaatgaagaaattcaccaggttctcaagtagccagtaatccgagacaagcagcctatgaaatgaggatgcagaataactctagtccttcgatatctcctaatacgagtttcacatctgatggctccccgtctccattaggaggaattaagcgaaaagcagaagacagtgacagtgaacctgagccagaggataatgtcaggttatgggaagctggctggaagcagcggtactacaagaacaaatttgatgtggatgcagctgatgagaaattccgtcggaaagttgtgcagtcgtacgttgaaggactttgctgggttcttagatattattaccagggctgtgcttcctggaagtggtattatccatttcattatgcaccatttgcttcagactttgaaggcattgcagacatgccatctgattttgagaagggtacgaaaccgtttaaaccactagaacaacttatgggggtatttccagctgcaagtggtaattttctacctccatcatggcggaagctcatgagtgatcctgattctagtataattgacttctatcctgaagattttgctattgatttgaatgggaagaaatatgcatggcaaggtgttgctctcttgccattcgtggatgagcgaaggctacgagctgccctagaagaggtatacccagacctcactccagaagagaccagaagaaacagccttggaggtgatgtcttatttgtggggaaacatcacccactccatgacttcattttagagctgtaccagacaggttccacagagccagtggaggtaccccctgaactatgtcatgggattcaaggaaagttttctttggatgaagaagccattcttccagatcaaatagtatgttctcctgttcctatgttaagggatctgacacagaacactgtagtcagtattaattttaaagacccacagtttgctgaagattacatttttaaagctgtaatgcttccaggagcaagaaagccagcagcagtactgaaacctagtgactgggaaaaatccagcaatggacggcagtggaagcctcagcttggctttaaccgtgaccggaggcctgtgcacctggatcaggcagccttcaggactttgggccatgtgatgccaagaggctcaggaactggcatttacagcaatgctgcaccaccacctgtgacttaccagggaaacttatacaggccgcttttgagaggacaagcccagattccaaaacttatgtcaaatatgaggccccaggattcctggcgaggtcctcctccccttttccagcagcaaaggtttgacagaggcgttggggctgaacctctgctcccatggaaccggatgctgcaaacccagaatgcagccttccagccaaaccagtaccagatgctagctgggcctggtgggtatccacccagacgagatgatcgtggagggagacagggatatcccagagaaggaaggaaataccctttgccaccaccctcaggaagatacaattggaattaagcttttgtaaagctttcccaaatcctttcatcattctacagttttatgctatttgtggaaagatttctttctcaagtagtagtttttaataaaactacagtactttgtgtatttcttttaactgtgtatatttctactgatctgatctcactgtttatgttgctttccaaagatgtatgttgcataatacagtggatctgaatttattattgcttataaaacacatttgatggaataggagtactggtttttcataatggttaaaaatgaaaccagctgtggatttcaaaacacagtgtattctagatcatctaagatccatgctgatttttattgcacaagaattaggtttgaactcttgagctggaacctcagcaaactagagtatatattgttcagtatttctttggaaacatttcattaatgtacttgtcttacagaaatttctgaactttagtaaaaaaaaataaagttaaacttttaaaac

SEQ ID NO: 448343 - DNA, 3741 bp, Homo sapiens
gaaatggaagtaacgagtaagtttggatgcttcgattctaccctagattgagacgggtgagcatagaggcaaaaaaagacattttcttccaaacaagaggtgaccaaacgggcaagggagacctcctcccgggcatgcagagcgcagcgattctgtgcccagggagccggagggctggggctgggagatcccggcggagccccggcagagcagtcgcccgtgagcccccgcaactcagacgcgctcggcctcgcgctccggggctgggaccaccgagggcgagctgcagccttcgccacccggtccgccgccggactccgcctcccacaaacagcccggcaaggcccttttccgccgctccctcatccagcgaagcctccttcccagcttccccggcggcggcgccgtgacgtcacttccgttctccagcgcgcacgtgggaggaagtgctggtgccctctgccgctgctcccgtctctttggttacgctcgtcagccggtcggccgccgcctccagccgtgtgccgctatgggagtcccggcgttcttccgctggctcagccgcaagtacccgtccatcatagtcaactgcgtggaagagaagaccagcaccaaaaaatgaagatgaaatgatggttgcaatttttgagtacattgacagacttttcagtattgtaagaccaagaagacttctctacatggcaatagatggagtggcaccacgtgctaaaatgaaccagcagcgttcaaggaggttcagggcatcaaaagaaggaatggaagcagcagtcgagaagcagcgagtcagggaagaaatattggcaaaaggtggctttcttcctccagaagaaataaaagaaagatttgacagcaactgtattacaccaggaactgaattcatggacaatcttgctaaatgccttcgctattacatagctgatcgtttaaataatgaccctgggtggaaaaatttgacagttattttatctgatgctagtgctcctggtgaaggagaacataaaatcatggattacattagaaggcaaagagcccagcctaaccatgacccaaatactcatcattgtttatgtggagcagatgctgatctcattatgcttggccttgccacacatgaaccgaactttaccattattagagaagaattcaaaccaaacaagcccaaaccatgtggtctttgtaatcagtttggacatgaggtcaaagattgtgaaggtttgccaagagaaaagaagggaaagcatgatgaacttgccgatagtcttccttgtgcagaaggagagtttatcttccttcggcttaatgttcttcgtgagtatttggaaagagaactcacaatggccagcctaccattcacatttgatgttgagaggagcattgatgactgggttttcatgtgcttctttgtgggaaatgacttcctccctcatttgccatcgttagagattagggaaaatgcaattgaccgtttggttaacatatacaaaaatgtggtacacaaaactgggggttaccttacagaaagtggttatgtcaatctgcaaagagtacagatgatcatgttagcagttggtgaagttgaggatagcatttttaaaaagagaaaggatgatgaggacagttttagaagacgacagaaagaaaaaagaaagagaatgaagagagatcaaccagctttcactcctagtggaatattaactcctcatgccttgggttcaagaaattcaccaggttctcaagtagccagtaatccgagacaagcagcctatgaaatgaggatgcagaataactctagtccttcgatatctcctaatacgagtttcacatctgatggctccccgtctccattaggaggaattaagcgaaaagcagaagacagtgacagtgaacctgagccagaggataatgtcaggttatgggaagctggctggaagcagcggtactacaagaacaaatttgatgtggatgcagctgatgagaaattccgtcggaaagttgtgcagtcgtacgttgaaggactttgctgggttcttagatattattaccagggctgtgcttcctggaagtggtattatccatttcattatgcaccatttgcttcagactttgaaggcattgcagacatgccatctgattttgagaagggtacgaaaccgtttaaaccactagaacaacttatgggggtatttccagctgcaagtggtaattttctacctccatcatggcggaagctcatgagtgatcctgattctagtataattgacttctatcctgaagattttgctattgatttgaatgggaagaaatatgcatggcaaggtgttgctctcttgccattcgtggatgagcgaaggctacgagctgccctagaagaggtatacccagacctcactccagaagagaccagaagaaacagccttggaggtgatgtcttatttgtggggaaacatcacccactccatgacttcattttagagctgtaccagacaggttccacagagccagtggaggtaccccctgaactatgtcatgggattcaaggaaagttttctttggatgaagaagccattcttccagatcaaatagtatgttctcctgttcctatgttaagggatctgacacagaacactgtagtcagtattaattttaaagacccacagtttgctgaagattacatttttaaagctgtaatgcttccaggagcaagaaagccagcagcagtactgaaacctagtgactgggaaaaatccagcaatggacggcagtggaagcctcagcttggctttaaccgtgaccggaggcctgtgcacctggatcaggcagccttcaggactttgggccatgtgatgccaagaggctcaggaactggcatttacagcaatgctgcaccaccacctgtgacttaccagggaaacttatacaggccgcttttgagaggacaagcccagattccaaaacttatgtcaaatatgaggccccaggattcctggcgaggtcctcctccccttttccagcagcaaaggtttgacagaggcgttggggctgaacctctgctcccatggaaccggatgctgcaaacccagaatgcagccttccagccaaaccagtaccagatgctagctgggcctggtgggtatccacccagacgagatgatcgtggagggagacagggatatcccagagaaggaaggaaataccctttgccaccaccctcaggaagatacaattggaattaagcttttgtaaagctttcccaaatcctttcatcattctacagttttatgctatttgtggaaagatttctttctcaagtagtagtttttaataaaactacagtactttgtgtatttcttttaactgtgtatatttctactgatctgatctcactgtttatgttgctttccaaagatgtatgttgcataatacagtggatctgaatttattattgcttataaaacacatttgatggaataggagtactggtttttcataatggttaaaaatgaaaccagctgtggatttcaaaacacagtgtattctagatcatctaagatccatgctgatttttattgcacaagaattaggtttgaactcttgagctggaacctcagcaaactagagtatatattgttcagtatttctttggaaacatttcattaatgtacttgtcttacagaaatttctgaactttagtaaaaaaaaataaagttaaacttttaaaac

SEQ ID NO: 448344 - DNA, 3757 bp, Homo sapiens
gaaatggaagtaacgagtaagtttggatgcttcgattctaccctagattgagacgggtgagcatagaggcaaaaaaagacattttcttccaaacaagaggtgaccaaacgggcaagggagacctcctcccgggcatgcagagcgcagcgattctgtgcccagggagccggagggctggggctgggagatcccggcggagccccggcagagcagtcgcccgtgagcccccgcaactcagacgcgctcggcctcgcgctccggggctgggaccaccgagggcgagctgcagccttcgccacccggtccgccgccggactccgcctcccacaaacagcccggcaaggcccttttccgccgctccctcatccagcgaagcctccttcccagcttccccggcggcggcgccgtgacgtcacttccgttctccagcgcgcacgtgggaggaagtgctggtgccctctgccgctgctcccgtctctttggttacgctcgtcagccggtcggccgccgcctccagccgtgtgccgctatgggagtcccggcgttcttccgctggctcagccgcaagtacccgtccatcatagtcaactgcgtggaagagaagccaaaagaatgcaatggtgtaaagattccagttgatgccagtaaacctaatccaaatgatgtggagtttgataatctgtatttggatatgaatggaatcatccatccctgtactcatcctgaagacaaaccagcaccaaaaaatgaagatgaaatgatggttgcaatttttgagtacattgacagacttttcagtattgtaagaccaagaagacttctctacatggcaatagatggagtggtggctttcttcctccagaagaaataaaagaaagatttgacagcaactgtattacaccaggaactgaattcatggacaatcttgctaaatgccttcgctattacatagctgatcgtttaaataatgaccctgggtggaaaaatttgacagttattttatctgatgctagtgctcctggtgaaggagaacataaaatcatggattacattagaaggcaaagagcccagcctaaccatgacccaaatactcatcattgtttatgtggagcagatgctgatctcattatgcttggccttgccacacatgaaccgaactttaccattattagagaagaattcaaaccaaacaagcccaaaccatgtggtctttgtaatcagtttggacatgaggtcaaagattgtgaaggtttgccaagagaaaagaagggaaagcatgatgaacttgccgatagtcttccttgtgcagaaggagagtttatcttccttcggcttaatgttcttcgtgagtatttggaaagagaactcacaatggccagcctaccattcacatttgatgttgagaggagcattgatgactgggttttcatgtgcttctttgtgggaaatgacttcctccctcatttgccatcgttagagattagggaaaatgcaattgaccgtttggttaacatatacaaaaatgtggtacacaaaactgggggttaccttacagaaagtggttatgtcaatctgcaaagagtacagatgatcatgttagcagttggtgaagttgaggatagcatttttaaaaagagaaaggatgatgaggacagttttagaagacgacagaaagaaaaaagaaagagaatgaagagagatcaaccagctttcactcctagtggaatattaactcctcatgccttgggttcaagaaattcaccaggttctcaagtagccagtaatccgagacaagcagcctatgaaatgaggatgcagaataactctagtccttcgatatctcctaatacgagtttcacatctgatggctccccgtctccattaggaggaattaagcgaaaagcagaagacagtgacagtgaacctgagccagaggataatgtcaggttatgggaagctggctggaagcagcggtactacaagaacaaatttgatgtggatgcagctgatgagaaattccgtcggaaagttgtgcagtcgtacgttgaaggactttgctgggttcttagatattattaccagggctgtgcttcctggaagtggtattatccatttcattatgcaccatttgcttcagactttgaaggcattgcagacatgccatctgattttgagaagggtacgaaaccgtttaaaccactagaacaacttatgggggtatttccagctgcaagtggtaattttctacctccatcatggcggaagctcatgagtgatcctgattctagtataattgacttctatcctgaagattttgctattgatttgaatgggaagaaatatgcatggcaaggtgttgctctcttgccattcgtggatgagcgaaggctacgagctgccctagaagaggtatacccagacctcactccagaagagaccagaagaaacagccttggaggtgatgtcttatttgtggggaaacatcacccactccatgacttcattttagagctgtaccagacaggttccacagagccagtggaggtaccccctgaactatgtcatgggattcaaggaaagttttctttggatgaagaagccattcttccagatcaaatagtatgttctcctgttcctatgttaagggatctgacacagaacactgtagtcagtattaattttaaagacccacagtttgctgaagattacatttttaaagctgtaatgcttccaggagcaagaaagccagcagcagtactgaaacctagtgactgggaaaaatccagcaatggacggcagtggaagcctcagcttggctttaaccgtgaccggaggcctgtgcacctggatcaggcagccttcaggactttgggccatgtgatgccaagaggctcaggaactggcatttacagcaatgctgcaccaccacctgtgacttaccagggaaacttatacaggccgcttttgagaggacaagcccagattccaaaacttatgtcaaatatgaggccccaggattcctggcgaggtcctcctccccttttccagcagcaaaggtttgacagaggcgttggggctgaacctctgctcccatggaaccggatgctgcaaacccagaatgcagccttccagccaaaccagtaccagatgctagctgggcctggtgggtatccacccagacgagatgatcgtggagggagacagggatatcccagagaaggaaggaaataccctttgccaccaccctcaggaagatacaattggaattaagcttttgtaaagctttcccaaatcctttcatcattctacagttttatgctatttgtggaaagatttctttctcaagtagtagtttttaataaaactacagtactttgtgtatttcttttaactgtgtatatttctactgatctgatctcactgtttatgttgctttccaaagatgtatgttgcataatacagtggatctgaatttattattgcttataaaacacatttgatggaataggagtactggtttttcataatggttaaaaatgaaaccagctgtggatttcaaaacacagtgtattctagatcatctaagatccatgctgatttttattgcacaagaattaggtttgaactcttgagctggaacctcagcaaactagagtatatattgttcagtatttctttggaaacatttcattaatgtacttgtcttacagaaatttctgaactttagtaaaaaaaaataaagttaaacttttaaaac

SEQ ID NO: 448345 - DNA, 3517 bp, Homo sapiens
gaaatggaagtaacgagtaagtttggatgcttcgattctaccctagattgagacgggtgagcatagaggcaaaaaaagacattttcttccaaacaagaggtgaccaaacgggcaagggagacctcctcccgggcatgcagagcgcagcgattctgtgcccagggagccggagggctggggctgggagatcccggcggagccccggcagagcagtcgcccgtgagcccccgcaactcagacgcgctcggcctcgcgctccggggctgggaccaccgagggcgagctgcagccttcgccacccggtccgccgccggactccgcctcccacaaacagcccggcaaggcccttttccgccgctccctcatccagcgaagcctccttcccagcttccccggcggcggcgccgtgacgtcacttccgttctccagcgcgcacgtgggaggaagtgctggtgccctctgccgctgctcccgtctctttggttacgctcgtcagccggtcggccgccgcctccagccgtgtgccgctatgggagtcccggcgttcttccgctggctcagccgcaagtacccgtccatcatagtcaactgcgtggaagagaaggtggctttcttcctccagaagaaataaaagaaagatttgacagcaactgtattacaccaggaactgaattcatggacaatcttgctaaatgccttcgctattacatagctgatcgtttaaataatgaccctgggtggaaaaatttgacagttattttatctgatgctagtgctcctggtgaaggagaacataaaatcatggattacattagaaggcaaagagcccagcctaaccatgacccaaatactcatcattgtttatgtggagcagatgctgatctcattatgcttggccttgccacacatgaaccgaactttaccattattagagaagaattcaaaccaaacaagcccaaaccatgtggtctttgtaatcagtttggacatgaggtcaaagattgtgaaggtttgccaagagaaaagaagggaaagcatgatgaacttgccgatagtcttccttgtgcagaaggagagtttatcttccttcggcttaatgttcttcgtgagtatttggaaagagaactcacaatggccagcctaccattcacatttgatgttgagaggagcattgatgactgggttttcatgtgcttctttgtgggaaatgacttcctccctcatttgccatcgttagagattagggaaaatgcaattgaccgtttggttaacatatacaaaaatgtggtacacaaaactgggggttaccttacagaaagtggttatgtcaatctgcaaagagtacagatgatcatgttagcagttggtgaagttgaggatagcatttttaaaaagagaaaggatgatgaggacagttttagaagacgacagaaagaaaaaagaaagagaatgaagagagatcaaccagctttcactcctagtggaatattaactcctcatgccttgggttcaagaaattcaccaggttctcaagtagccagtaatccgagacaagcagcctatgaaatgaggatgcagaataactctagtccttcgatatctcctaatacgagtttcacatctgatggctccccgtctccattaggaggaattaagcgaaaagcagaagacagtgacagtgaacctgagccagaggataatgtcaggttatgggaagctggctggaagcagcggtactacaagaacaaatttgatgtggatgcagctgatgagaaattccgtcggaaagttgtgcagtcgtacgttgaaggactttgctgggttcttagatattattaccagggctgtgcttcctggaagtggtattatccatttcattatgcaccatttgcttcagactttgaaggcattgcagacatgccatctgattttgagaagggtacgaaaccgtttaaaccactagaacaacttatgggggtatttccagctgcaagtggtaattttctacctccatcatggcggaagctcatgagtgatcctgattctagtataattgacttctatcctgaagattttgctattgatttgaatgggaagaaatatgcatggcaaggtgttgctctcttgccattcgtggatgagcgaaggctacgagctgccctagaagaggtatacccagacctcactccagaagagaccagaagaaacagccttggaggtgatgtcttatttgtggggaaacatcacccactccatgacttcattttagagctgtaccagacaggttccacagagccagtggaggtaccccctgaactatgtcatgggattcaaggaaagttttctttggatgaagaagccattcttccagatcaaatagtatgttctcctgttcctatgttaagggatctgacacagaacactgtagtcagtattaattttaaagacccacagtttgctgaagattacatttttaaagctgtaatgcttccaggagcaagaaagccagcagcagtactgaaacctagtgactgggaaaaatccagcaatggacggcagtggaagcctcagcttggctttaaccgtgaccggaggcctgtgcacctggatcaggcagccttcaggactttgggccatgtgatgccaagaggctcaggaactggcatttacagcaatgctgcaccaccacctgtgacttaccagggaaacttatacaggccgcttttgagaggacaagcccagattccaaaacttatgtcaaatatgaggccccaggattcctggcgaggtcctcctccccttttccagcagcaaaggtttgacagaggcgttggggctgaacctctgctcccatggaaccggatgctgcaaacccagaatgcagccttccagccaaaccagtaccagatgctagctgggcctggtgggtatccacccagacgagatgatcgtggagggagacagggatatcccagagaaggaaggaaataccctttgccaccaccctcaggaagatacaattggaattaagcttttgtaaagctttcccaaatcctttcatcattctacagttttatgctatttgtggaaagatttctttctcaagtagtagtttttaataaaactacagtactttgtgtatttcttttaactgtgtatatttctactgatctgatctcactgtttatgttgctttccaaagatgtatgttgcataatacagtggatctgaatttattattgcttataaaacacatttgatggaataggagtactggtttttcataatggttaaaaatgaaaccagctgtggatttcaaaacacagtgtattctagatcatctaagatccatgctgatttttattgcacaagaattaggtttgaactcttgagctggaacctcagcaaactagagtatatattgttcagtatttctttggaaacatttcattaatgtacttgtcttacagaaatttctgaactttagtaaaaaaaaataaagttaaacttttaaaac

SEQ ID NO: 448346 - DNA, 2597 bp, Homo sapiens
ggtgagggataatgtttgcgtagagtcccacttctctcttttctccattgtgccatgcatgctatagaataagagccctttttagataacagagtctaattaaattgtcttgctgatttttttaaaaatggataccttagttattaactaccttcaactaaaccttaagaattgttgagttgtttattttattttattttattttttaacttacttgtatcttctccatattgacagcctgtttgctccaggataaaaccaagggtctttgtaatggctttgcattttcctaaaatgattcaaaagctttctgaacagaattaccaagatcaattgaattgtatctaaattcagtcttccattgttaagttctgataagcagcattttgaacatatagtcttattgcctggtttaatcatgtacctagatttctggggtcgtcatttttgtgtaattatttgacagaatatgtggattttatacttttaggacagttttagaagacgacagaaagaaaaaagaaagagaatgaagagagatcaaccagctttcactcctagtggaatattaactcctcatgccttgggttcaagaaattcaccaggttctcaagtagccagtaatccgagacaagcagcctatgaaatgaggatgcagaataactctagtccttcgatatctcctaatacgagtttcacatctgatggctccccgtctccattaggaggaattaagcgaaaagcagaagacagtgacagtgaacctgagccagaggataatgtcaggttatgggaagctggctggaagcagcggtactacaagaacaaatttgatgtggatgcagctgatgagaaattccgtcggaaagttgtgcagtcgtacgttgaaggactttgctgggttcttagatattattaccagggctgtgcttcctggaagtggtattatccatttcattatgcaccatttgcttcagactttgaaggcattgcagacatgccatctgattttgagaagggtacgaaaccgtttaaaccactagaacaacttatgggggtatttccagctgcaagtggtaattttctacctccatcatggcggaagctcatgagtgatcctgattctagtataattgacttctatcctgaagattttgctattgatttgaatgggaagaaatatgcatggcaaggtgttgctctcttgccattcgtggatgagcgaaggctacgagctgccctagaagaggtatacccagacctcactccagaagagaccagaagaaacagccttggaggtgatgtcttatttgtggggaaacatcacccactccatgacttcattttagagctgtaccagacaggttccacagagccagtggaggtaccccctgaactatgtcatgggattcaaggaaagttttctttggatgaagaagccattcttccagatcaaatagtatgttctcctgttcctatgttaagggatctgacacagaacactgtagtcagtattaattttaaagacccacagtttgctgaagattacatttttaaagctgtaatgcttccaggagcaagaaagccagcagcagtactgaaacctagtgactgggaaaaatccagcaatggacggcagtggaagcctcagcttggctttaaccgtgaccggaggcctgtgcacctggatcaggcagccttcaggactttgggccatgtgatgccaagaggctcaggaactggcatttacagcaatgctgcaccaccacctgtgacttaccagggaaacttatacaggccgcttttgagaggacaagcccagattccaaaacttatgtcaaatatgaggccccaggattcctggcgaggtcctcctccccttttccagcagcaaaggtttgacagaggcgttggggctgaacctctgctcccatggaaccggatgctgcaaacccagaatgcagccttccagccaaaccagtaccagatgctagctgggcctggtgggtatccacccagacgagatgatcgtggagggagacagggatatcccagagaaggaaggaaataccctttgccaccaccctcaggaagatacaattggaattaagcttttgtaaagctttcccaaatcctttcatcattctacagttttatgctatttgtggaaagatttctttctcaagtagtagtttttaataaaactacagtactttgtgtatttcttttaactgtgtatatttctactgatctgatctcactgtttatgttgctttccaaagatgtatgttgcataatacagtggatctgaatttattattgcttataaaacacatttgatggaataggagtactggtttttcataatggttaaaaatgaaaccagctgtggatttcaaaacacagtgtattctagatcatctaagatccatgctgatttttattgcacaagaattaggtttgaactcttgagctggaacctcagcaaactagagtatatattgttcagtatttctttggaaacatttcattaatgtacttgtcttacagaaatttctgaactttagtaaaaaaaaataaagttaaacttttaaaac

SEQ ID NO: 448347 - DNA, 2895 bp, Homo sapiens
  misc_feature (2550)..(2550): n is a, c, g, or t
  misc_feature (2552)..(2552): n is a, c, g, or t
  misc_feature (2559)..(2560): n is a, c, g, or t
  misc_feature (2567)..(2567): n is a, c, g, or t
  misc_feature (2569)..(2569): n is a, c, g, or t
  misc_feature (2576)..(2576): n is a, c, g, or t
  misc_feature (2580)..(2580): n is a, c, g, or t
gaaatggaagtaacgagtaagtttggatgcttcgattctaccctagattgagacgggtgagcatagaggcaaaaaaagacattttcttccaaacaagaggtgaccaaacgggcaagggagacctcctcccgggcatgcagagcgcagcgattctgtgcccagggagccggagggctggggctgggagatcccggcggagccccggcagagcagtcgcccgtgagcccccgcaactcagacgcgctcggcctcgcgctccggggctgggaccaccgagggcgagctgcagccttcgccacccggtccgccgccggactccgcctcccacaaacagcccggcaaggcccttttccgccgctccctcatccagcgaagcctccttcccagcttccccggcggcggcgccgtgacgtcacttccgttctccagcgcgcacgtgggaggaagtgctggtgccctctgccgctgctcccgtctctttggttacgctcgtcagccggtcggccgccgcctccagccgtgtgccgctatgggagtcccggcgttcttccgctggctcagccgcaagtacccgtccatcatagtcaactgcgtggaagagaagccaaaagaatgcaatggtgtaaagattccagttgatgccagtaaacctaatccaaatgatgtggagtttgataatctgtatttggatatgaatggaatcatccatccctgtactcatcctgaagacaaaccagcaccaaaaaatgaagatgaaatgatggttgcaatttttgagtacattgacagacttttcagtattgtaagaccaagaagacttctctacatggcaatagatggagtggcaccacgtgctaaaatgaaccagcagcgttcaaggaggttcagggcatcaaaagaaggaatggaagcagcagtcgagaagcagcgagtcagggaagaaatattggcaaaaggtggctttcttcctccagaagaaataaaagaaagatttgacagcaactgtattacaccaggaactgaattcatggacaatcttgctaaatgccttcgctattacatagctgatcgtttaaataatgaccctgggtggaaaaatttgacagttattttatctgatgctagtgctcctggtgaaggagaacataaaatcatggattacattagaaggcaaagagcccagcctaaccatgacccaaatactcatcattgtttatgtggagcagatgctgatctcattatgcttggccttgccacacatgaaccgaactttaccattattagagaagaattcaaaccaaacaagcccaaaccatgtggtctttgtaatcagtttggacatgaggtcaaagattgtgaaggtttgccaagagaaaagaagggaaagcatgatgaacttgccgatagtcttccttgtgcagaaggagagtttatcttccttcggcttaatgttcttcgtgagtatttggaaagagaactcacaatggccagcctaccattcacatttgatgttgagaggagcattgatgactgggttttcatgtgcttctttgtgggaaatgacttcctccctcatttgccatcgttagagattagggaaaatgcaattgaccgtttggttaacatatacaaaaatgtggtacacaaaactgggggttaccttacagaaagtggttatgtcaatctgcaaagagtacagatgatcatgttagcagttggtgaagttgaggatagcatttttaaaaagagaaaggatgatgaggacagttttagaagacgacagaaagaaaaaagaaagagaatgaagagagatcaaccagctttcactcctagtggaatattaactcctcatgccttgggttcaagaaattcaccaggttctcaagtagccagtaatccgagacaagcagcctatgaaatgaggatgcagaataactctagtccttcgatatctcctaatacgagtttcacatctgatggctccccgtctccattaggaggaattaagcgaaaagcagaagacagtgacagtgaacctgagccagaggataatgtcaggttatgggaagctggctggaagcagcggtactacaagaacaaatttgatgtggatgcagctgatgagaaattccgtcggaaagttgtgcagtcgtacgttgaaggactttgctgggttcttagatattattaccagggctgtgcttcctggaagtggtattatccatttcattatgcaccatttgcttcagactttgaaggcattgcagacatgccatctgattttgagaagggtacgaaaccgtttaaaccactagaacaacttatgggggtatttccagctgcaagtggtaattttctacctccatcatggcggaagctcatgagtgatcctgattctagtataattgacttctatcctgaagattttgctattgatttgaatgggaagaaatatgcatggcaaggtgttgctctcttgccattcgtggatgagcgaaggctacgagctgccctagaagaggtatacccagacctcactccagaagagancngaaaaanngctggangngatgtcntatnggggggaacttcccatccatgagcttattgtagaagcgtacagaaagggtccagagccgtggggtaccccgacatgtggggatcaggaaggttctggcagaaaaccacgtccaacaaagaaagttccggcaagtaagggatgcacaaacggtgcggtattaaaccacgggggcacacactaaggaaggtccagagaaaagcggactgctaggaggaaccgcgggggtatggtaagaggacgaagcaaacactgatgagacagagtgaagaccacgaaggtggcaattagtctctggtgtatagagcgtttcttgt

SEQ ID NO: 448348 - DNA, 1962 bp, Homo sapiens
ttagtagacagcctgttactgaaggtgtgttaattcagcataaatgagctgtgcctggttttaggttatgggaagctggctggaagcagcggtactacaagaacaaatttgatgtggatgcagctgatgagaaattccgtcggaaagttgtgcagtcgtacgttgaaggactttgctgggttcttagatattattaccagggctgtgcttcctggaagtggtattatccatttcattatgcaccatttgcttcagactttgaaggcattgcagacatgccatctgattttgagaagggtacgaaaccggtaagcttaattacttaaagtcataaagtttatagaattctggattagataataatcttgggtctttaatgttttttcttttttcagtttaaaccactagaacaacttatgggggtatttccagctgcaagtggtaattttctacctccatcatggcggaagctcatgagtgatcctgattctagtataattgacttctatcctgaagattttgctattgatttgaatgggaagaaatatgcatggcaaggtgttgctctcttgccattcgtggatgagcgaaggctacgagctgccctagaagaggtatacccagacctcactccagaagagaccagaagaaacagccttggaggtgatgtcttatttgtggggaaacatcacccactccatgacttcattttagagctgtaccagacaggttccacagagccagtggaggtaccccctgaactatgtcatgggattcaaggaaagttttctttggatgaagaagccattcttccagatcaaatagtatgttctcctgttcctatgttaagggatctgacacagaacactgtagtcagtattaattttaaagacccacagtttgctgaagattacatttttaaagctgtaatgcttccaggagcaagaaagccagcagcagtactgaaacctagtgactgggaaaaatccagcaatggacggcagtggaagcctcagcttggctttaaccgtgaccggaggcctgtgcacctggatcaggcagccttcaggactttgggccatgtgatgccaagaggctcaggaactggcatttacagcaatgctgcaccaccacctgtgacttaccagggaaacttatacaggccgcttttgagaggacaagcccagattccaaaacttatgtcaaatatgaggccccaggattcctggcgaggtcctcctccccttttccagcagcaaaggtttgacagaggcgttggggctgaacctctgctcccatggaaccggatgctgcaaacccagaatgcagccttccagccaaaccagtaccagatgctagctgggcctggtgggtatccacccagacgagatgatcgtggagggagacagggatatcccagagaaggaaggaaataccctttgccaccaccctcaggaagatacaattggaattaagcttttgtaaagctttcccaaatcctttcatcattctacagttttatgctatttgtggaaagatttctttctcaagtagtagtttttaataaaactacagtactttgtgtatttcttttaactgtgtatatttctactgatctgatctcactgtttatgttgctttccaaagatgtatgttgcataatacagtggatctgaatttattattgcttataaaacacatttgatggaataggagtactggtttttcataatggttaaaaatgaaaccagctgtggatttcaaaacacagtgtattctagatcatctaagatccatgctgatttttattgcacaagaattaggtttgaactcttgagctggaacctcagcaaactagagtatatattgttcagtatttctttggaaacatttcattaatgtacttgtcttacagaaatttctgaactttagtaaaaaaaaataaagttaaacttttaaaac

SEQ ID NO: 448349 - DNA, 2836 bp, Homo sapiens
  misc_feature (2491)..(2491): n is a, c, g, or t
  misc_feature (2493)..(2493): n is a, c, g, or t
  misc_feature (2500)..(2501): n is a, c, g, or t
  misc_feature (2508)..(2508): n is a, c, g, or t
  misc_feature (2510)..(2510): n is a, c, g, or t
  misc_feature (2517)..(2517): n is a, c, g, or t
  misc_feature (2521)..(2521): n is a, c, g, or t
gaaatggaagtaacgagtaagtttggatgcttcgattctaccctagattgagacgggtgagcatagaggcaaaaaaagacattttcttccaaacaagaggtgaccaaacgggcaagggagacctcctcccgggcatgcagagcgcagcgattctgtgcccagggagccggagggctggggctgggagatcccggcggagccccggcagagcagtcgcccgtgagcccccgcaactcagacgcgctcggcctcgcgctccggggctgggaccaccgagggcgagctgcagccttcgccacccggtccgccgccggactccgcctcccacaaacagcccggcaaggcccttttccgccgctccctcatccagcgaagcctccttcccagcttccccggcggcggcgccgtgacgtcacttccgttctccagcgcgcacgtgggaggaagtgctggtgccctctgccgctgctcccgtctctttggttacgctcgtcagccggtcggccgccgcctccagccgtgtgccgctatgggagtcccggcgttcttccgctggctcagccgcaagtacccgtccatcatagtcaactgcgtggaagagaagccaaaagaatgcaatggtgtaaagattccagttgatgccagtaaacctaatccaaatgatgtggagtttgataatctgtatttggatatgaatggaatcatccatccctgtactcatcctgaagacaaaccagcaccaaaaaatgaagatgaaatgatggttgcaatttttgagtacattgacagacttttcagtattgtaagaccaagaagacttctctacatggcaatagatggagtggcaccacgtgctaaaatgaaccagcagcgttcaaggaggttcagggcatcaaaagaaggaatggaagcagcagtcgagaagcagcgagtcagggaagaaatattggcaaaaggtggctttcttcctccagaagaaataaaagaaagatttgacagcaactgtattacaccaggaactgaattcatggacaatcttgctaaatgccttcgctattacatagctgatcgtttaaataatgaccctgggtggaaaaatttgacagttattttatctgatgctagtgctcctggtgaaggagaacataaaatcatggattacattagaaggcaaagagcccagcctaaccatgacccaaatactcatcattgtttatgtggagcagatgctgatctcattatgcttggccttgccacacatgaaccgaactttaccattattagagaagaattcaaaccaaacaagcccaaaccatgtggtctttgtaatcagtttggacatgaggtcaaagattgtgaaggtttgccaagagaaaagaagggaaagcatgatgaacttgccgatagtcttccttgtgcagaaggagagtttatcttccttcggcttaatgttcttcgtgagtatttggaaagagaactcacaatggccagcctaccattcacatttgatgttgagaggagcattgatgactgggttttcatgtgcttctttgtgggaaatgacttcctccctcatttgccatcgttagagattagggaaaatgcaattgaccgtttggttaacatatacaaaaatgtggtacacaaaactgggggttaccttacagaaagtggttatgtcaatctgcaaagagtacagatgatcatgttagcagttggtgaagttgaggatagcatttttaaaaagagaaaggatgatgaggacagttttagaagacgacagaaagaaaaaagaaagagaatgaagaaattcaccaggttctcaagtagccagtaatccgagacaagcagcctatgaaatgaggatgcagaataactctagtccttcgatatctcctaatacgagtttcacatctgatggctccccgtctccattaggaggaattaagcgaaaagcagaagacagtgacagtgaacctgagccagaggataatgtcaggttatgggaagctggctggaagcagcggtactacaagaacaaatttgatgtggatgcagctgatgagaaattccgtcggaaagttgtgcagtcgtacgttgaaggactttgctgggttcttagatattattaccagggctgtgcttcctggaagtggtattatccatttcattatgcaccatttgcttcagactttgaaggcattgcagacatgccatctgattttgagaagggtacgaaaccgtttaaaccactagaacaacttatgggggtatttccagctgcaagtggtaattttctacctccatcatggcggaagctcatgagtgatcctgattctagtataattgacttctatcctgaagattttgctattgatttgaatgggaagaaatatgcatggcaaggtgttgctctcttgccattcgtggatgagcgaaggctacgagctgccctagaagaggtatacccagacctcactccagaagagancngaaaaanngctggangngatgtcntatnggggggaacttcccatccatgagcttattgtagaagcgtacagaaagggtccagagccgtggggtaccccgacatgtggggatcaggaaggttctggcagaaaaccacgtccaacaaagaaagttccggcaagtaagggatgcacaaacggtgcggtattaaaccacgggggcacacactaaggaaggtccagagaaaagcggactgctaggaggaaccgcgggggtatggtaagaggacgaagcaaacactgatgagacagagtgaagaccacgaaggtggcaattagtctctggtgtatagagcgtttcttgt

SEQ ID NO: 448350 - DNA, 1694 bp, Homo sapiens
gtgtgatacgtgggacagttcacatagacatcagagaatttattccagaaaggagcctcctgaatgtgatgaatacggcaaagctttaatcacatctcagcccttagcatcggaaagcttatactgtaaataaacttgatgaatattatatgtgaggaaaactttcatgtatagcactcattgcttcagacagaaaatgaattccgtcggtatgttccaatcgtgatgaatttgagaaacattgcaagagggagcctggccttgttcttgtttttcaaaaatttctttggtattctcacaagtttattcttccaaattaacttcagaatcagcttaccattttaaataagcaccccccttctaaatctattataacatctcactactttctcttctattcatattagcttaacttaagctaccatcctctcttgagtaagactgttttctaacatacagcaacaagagggttctttttaaaacataaatcagattatgtcatgggattcaaggaaagttttctttggatgaagaagccattcttccagatcaaatagtatgttctcctgttcctatgttaagggatctgacacagaacactgtagtcagtattaattttaaagacccacagtttgctgaagattacatttttaaagctgtaatgcttccaggagcaagaaagccagcagcagtactgaaacctagtgactgggaaaaatccagcaatggacggcagtggaagcctcagcttggctttaaccgtgaccggaggcctgtgcacctggatcaggcagccttcaggactttgggccatgtgatgccaagaggctcaggaactggcatttacagcaatgctgcaccaccacctgtgacttaccagggaaacttatacaggccgcttttgagaggacaagcccagattccaaaacttatgtcaaatatgaggccccaggattcctggcgaggtcctcctccccttttccagcagcaaaggtttgacagaggcgttggggctgaacctctgctcccatggaaccggatgctgcaaacccagaatgcagccttccagccaaaccagtaccagatgctagctgggcctggtgggtatccacccagacgagatgatcgtggagggagacagggatatcccagagaaggaaggaaataccctttgccaccaccctcaggaagatacaattggaattaagcttttgtaaagctttcccaaatcctttcatcattctacagttttatgctatttgtggaaagatttctttctcaagtagtagtttttaataaaactacagtactttgtgtatttcttttaactgtgtatatttctactgatctgatctcactgtttatgttgctttccaaagatgtatgttgcataatacagtggatctgaatttattattgcttataaaacacatttgatggaataggagtactggtttttcataatggttaaaaatgaaaccagctgtggatttcaaaacacagtgtattctagatcatctaagatccatgctgatttttattgcacaagaattaggtttgaactcttgagctggaacctcagcaaactagagtatatattgttcagtatttctttggaaacatttcattaatgtacttgtcttacagaaatttctgaactttagtaaaaaaaaataaagttaaacttttaaaac

SEQ ID NO: 448351 - DNA, 1360 bp, Homo sapiens
gaaatggaagtaacgagtaagtttggatgcttcgattctaccctagattgagacgggtgagcatagaggcaaaaaaagacattttcttccaaacaagaggtgaccaaacgggcaagggagacctcctcccgggcatgcagagcgcagcgattctgtgcccagggagccggagggctggggctgggagatcccggcggagccccggcagagcagtcgcccgtgagcccccgcaactcagacgcgctcggcctcgcgctccggggctgggaccaccgagggcgagctgcagccttcgccacccggtccgccgccggactccgcctcccacaaacagcccggcaaggcccttttccgccgctccctcatccagcgaagcctccttcccagcttccccggcggcggcgccgtgacgtcacttccgttctccagcgcgcacgtgggaggaagtgctggtgccctctgccgctgctcccgtctctttggttacgctcgtcagccggtcggccgccgcctccagccgtgtgccgctatgggagtcccggcgttcttccgctggctcagccgcaagtacccgtccatcatagtcaactgcgtggaagagaagatatgaggccccaggattcctggcgaggtcctcctccccttttccagcagcaaaggtttgacagaggcgttggggctgaacctctgctcccatggaaccggatgctgcaaacccagaatgcagccttccagccaaaccagtaccagatgctagctgggcctggtgggtatccacccagacgagatgatcgtggagggagacagggatatcccagagaaggaaggaaataccctttgccaccaccctcaggaagatacaattggaattaagcttttgtaaagctttcccaaatcctttcatcattctacagttttatgctatttgtggaaagatttctttctcaagtagtagtttttaataaaactacagtactttgtgtatttcttttaactgtgtatatttctactgatctgatctcactgtttatgttgctttccaaagatgtatgttgcataatacagtggatctgaatttattattgcttataaaacacatttgatggaataggagtactggtttttcataatggttaaaaatgaaaccagctgtggatttcaaaacacagtgtattctagatcatctaagatccatgctgatttttattgcacaagaattaggtttgaactcttgagctggaacctcagcaaactagagtatatattgttcagtatttctttggaaacatttcattaatgtacttgtcttacagaaatttctgaactttagtaaaaaaaaataaagttaaacttttaaaac

SEQ ID NO: 448352 - DNA, 1044 bp, Homo sapiens
catttaaagccctactatttgttgctaaataaaaaatccctaaaatcaattgctcatttggccttaactgacttagcaagctcttgccttggttaaagcaaagttactttccttgtgtaataagtctaaattgatgtgggtatcttaccacaaagtgacttgaattactactgctaggacagtgagaaaattgagaaccactgtctgtacatgttgtttacacagaacactttagttatttgtgtgcatttgtgattgttaaggttttttgttttatttttcagtaatagcatttgtgctagcctccaactttgcaacaagtctgtattaaagctctggatcaaagcaccttttatggggcctttccatgtgctgtacctttaacacatactcagtttccttatgatgtgtttttccatagaggtttaaagttaactgacttgcaggagtatcggtccagaaaataaactctttcttttgtttattttcagggatatcccagagaaggaaggaaataccctttgccaccaccctcaggaagatacaattggaattaagcttttgtaaagctttcccaaatcctttcatcattctacagttttatgctatttgtggaaagatttctttctcaagtagtagtttttaataaaactacagtactttgtgtatttcttttaactgtgtatatttctactgatctgatctcactgtttatgttgctttccaaagatgtatgttgcataatacagtggatctgaatttattattgcttataaaacacatttgatggaataggagtactggtttttcataatggttaaaaatgaaaccagctgtggatttcaaaacacagtgtattctagatcatctaagatccatgctgatttttattgcacaagaattaggtttgaactcttgagctggaacctcagcaaactagagtatatattgttcagtatttctttggaaacatttcattaatgtacttgtcttacagaaatttctgaactttagtaaaaaaaaataaagttaaacttttaaaac

SEQ ID NO: 448353 - DNA, 348 bp, Homo sapiens
caaggaggttcagggcatcaaaagaaggaatggaagcagcagtcgagaagcagcgagtcagggaagaaatattggcaaaaggtaaagaatatgcatcttgaagttggattttttcataagatgtatgcagaatgagggggtggtggcaactttttcttacaaagaggcaagcttttaatttaataaggatcccagaatatccagtgttcactgttgaggaaaagtagttcatgaaatctaccaataggcttaataggcttgtttattttcaaactctccagtaagagggagccttgggaatagggaattctggtggagattgcagattgtcaactcctctcagggcca

SEQ ID NO: 448354 - DNA, 3869 bp, Homo sapiens
gaaatggaagtaacgagtaagtttggatgcttcgattctaccctagattgagacgggtgagcatagaggcaaaaaaagacattttcttccaaacaagaggtgaccaaacgggcaagggagacctcctcccgggcatgcagagcgcagcgattctgtgcccagggagccggagggctggggctgggagatcccggcggagccccggcagagcagtcgcccgtgagcccccgcaactcagacgcgctcggcctcgcgctccggggctgggaccaccgagggcgagctgcagccttcgccacccggtccgccgccggactccgcctcccacaaacagcccggcaaggcccttttccgccgctccctcatccagcgaagcctccttcccagcttccccggcggcggcgccgtgacgtcacttccgttctccagcgcgcacgtgggaggaagtgctggtgccctctgccgctgctcccgtctctttggttacgctcgtcagccggtcggccgccgcctccagccgtgtgccgctatgggagtcccggcgttcttccgctggctcagccgcaagtacccgtccatcatagtcaactgcgtggaagagaagccaaaagaatgcaatggtgtaaagattccagttgatgccagtaaacctaatccaaatgatgtggagtttgataatctgtatttggatatgaatggaatcatccatccctgtactcatcctgaagacaaaccagcaccaaaaaatgaagatgaaatgatggttgcaatttttgagtacattgacagacttttcagtattgtaagaccaagaagacttctctacatggcaatagatggagtggcaccacgtgctaaaatgaaccagcagcgttcaaggaggttcagggcatcaaaagaaggaatggaagcagcagtcgagaagcagcgagtcagggaagaaatattggcaaaaggtggctttcttcctccagaagaaataaaagaaagatttgacagcaactgtattacaccaggaactgaattcatggacaatcttgctaaatgccttcgctattacatagctgatcgtttaaataatgaccctgggtggaaaaatttgacagttattttatctgatgctagtgctcctggtgaaggagaacataaaatcatggattacattagaaggcaaagagcccagcctaaccatgacccaaatactcatcattgtttatgtggagcagatgctgatctcattatgcttggccttgccacacatgaaccgaactttaccattattagagaagaattcaaaccaaacaagcccaaaccatgtggtctttgtaatcagtttggacatgaggtcaaagattgtgaaggtttgccaagagaaaagaagggaaagcatgatgaacttgccgatagtcttccttgtgcagaaggagagtttatcttccttcggcttaatgttcttcgtgagtatttggaaagagaactcacaatggccagcctaccattcacatttgatgttgagaggagcattgatgactgggttttcatgtgcttctttgtgggaaatgacttcctccctcatttgccatcgttagagattagggaaaatgcaattgaccgtttggttaacatatacaaaaatgtggtacacaaaactgggggttaccttacagaaagtggttatgtcaatctgcaaagagtacagatgatcatgttagcagttggtgaagttgaggatagcatttttaaaaagagaaaggatgatgaggacagttttagaagacgacagaaagaaaaaagaaagagaatgaagagagatcaaccagctttcactcctagtggaatattaactcctcatgccttgggttcaagaaattcaccaggttctcaagtagccagtaatccgagacaagcagcctatgaaatgaggatgcagaataactctagtccttcgatatctcctaatacgagtttcacatctgatggctccccgtctccattaggaggaattaagcgaaaagcagaagacagtgacagtgaacctgagccagaggataatgtcaggttatgggaagctggctggaagcagcggtactacaagaacaaatttgatgtggatgcagctgatgagaaattccgtcggaaagttgtgcagtcgtacgttgaaggactttgctgggttcttagatattattaccagggctgtgcttcctggaagtggtattatccatttcattatgcaccatttgcttcagactttgaaggcattgcagacatgccatctgattttgagaagggtacgaaaccgtttaaaccactagaacaacttatgggggtatttccagctgcaagtggtaattttctacctccatcatggcggaagctcatgagtgatcctgattctagtataattgacttctatcctgaagattttgctattgatttgaatgggaagaaatatgcatggcaaggtgttgctctcttgccattcgtggatgagcgaaggctacgagctgccctagaagaggtatacccagacctcactccagaagagaccagaagaaacagccttggaggtgatgtcttatttgtggggaaacatcacccactccatgacttcattttagagctgtaccagacaggttccacagagccagtggaggtaccccctgaactatgtcatgggattcaaggaaagttttctttggatgaagaagccattcttccagatcaaatagtatgttctcctgttcctatgttaagggatctgacacagaacactgtagtcagtattaattttaaagacccacagtttgctgaagattacatttttaaagctgtaatgcttccaggagcaagaaagccagcagcagtactgaaacctagtgactgggaaaaatccagcaatggacggcagtggaagcctcagcttggctttaaccgtgaccggaggcctgtgcacctggatcaggcagccttcaggactttgggccatgtgatgccaagaggctcaggaactggcatttacagcaatgctgcaccaccacctgtgacttaccagggaaacttatacaggccgcttttgagaggacaagcccagattccaaaacttatgtcaaatatgaggccccaggattcctggcgaggtcctcctccccttttccagcagcaaaggtttgacagaggcgttggggctgaacctctgctcccatggaaccggatgctgcaaacccagaatgcagccttccagccaaaccagtaccagatgctagctgggcctggtgggtatccacccagacgagatgatcgtggagggagacagggatatcccagagaaggaaggaaataccctttgccaccaccctcaggaagatacaattggaattaagcttttgtaaagctttcccaaatcctttcatcattctacagttttatgctatttgtggaaagatttctttctcaagtagtagtttttaataaaactacagtactttgtgtatttcttttaactgtgtatatttctactgatctgatctcactgtttatgttgctttccaaagatgtatgttgcataatacagtggatctgaatttattattgcttataaaacacatttgatggaataggagtactggtttttcataatggttaaaaatgaaaccagctgtggatttcaaaacacagtgtattctagatcatctaagatccatgctgatttttattgcacaagaattaggtttgaactcttgagctggaacctcagcaaactagagtatatattgttcagtatttctttggaaacatttcattaatgtacttgtcttacagaaatttctgaactttagtaaaaaaaaataaagttaaacttttaaaac

SEQ ID NO: 448355 - DNA, 3895 bp, Homo sapiens
gaaatggaagtaacgagtaagtttggatgcttcgattctaccctagattgagacgggtgagcatagaggcaaaaaaagacattttcttccaaacaagaggtgaccaaacgggcaagggagacctcctcccgggcatgcagagcgcagcgattctgtgcccagggagccggagggctggggctgggagatcccggcggagccccggcagagcagtcgcccgtgagcccccgcaactcagacgcgctcggcctcgcgctccggggctgggaccaccgagggcgagctgcagccttcgccacccggtccgccgccggactccgcctcccacaaacagcccggcaaggcccttttccgccgctccctcatccagcgaagcctccttcccagcttccccggcggcggcgccgtgacgtcacttccgttctccagcgcgcacgtgggaggaagtgctggtgccctctgccgctgctcccgtctctttggttacgctcgtcagccggtcggccgccgcctccagccgtgtgccgctatgggagtcccggcgttcttccgctggctcagccgcaagtacccgtccatcatagtcaactgcgtggaagagaagccaaaagaatgcaatggtgtaaagattccagttgatgccagtaaacctaatccaaatgatgtggagtttgataatctgtatttggatatgaatggaatcatccatccctgtactcatcctgaagacaaaccagcaccaaaaaatgaagatgaaatgatggttgcaatttttgagtacattgacagacttttcagtattgtaagaccaagaagacttctctacatggcaatagatggagtggcaccacgtgctaaaatgaaccagcagcgttcaaggaggttcagggcatcaaaagaaggaatggaagcagcagtcgagaagcagcgagtcagggaagaaatattggcaaaaggtggctttcttcctccagaagaaataaaagaaagatttgacagcaactgtattacaccaggaactgaattcatggacaatcttgctaaatgccttcgctattacatagctgatcgtttaaataatgaccctgggtggaaaaatttgacagttattttatctgatgctagtgctcctggtgaaggagaacataaaatcatggattacattagaaggcaaagagcccagcctaaccatgacccaaatactcatcattgtttatgtggagcagatgctgatctcattatgcttggccttgccacacatgaaccgaactttaccattattagagaagaattcaaaccaaacaagcccaaaccatgtggtctttgtaatcagtttggacatgaggtcaaagattgtgaaggtttgccaagagaaaagaagggaaagcatgatgaacttgccgatagtcttccttgtgcagaaggagagtttatcttccttcggcttaatgttcttcgtgagtatttggaaagagaactcacaatggccagcctaccattcacatttgatgttgagaggagcattgatgactgggttttcatgtgcttctttgtgggaaatgacttcctccctcatttgccatcgttagagattagggaaaatgcaattgaccgtttggttaacatatacaaaaatgtggtacacaaaactgggggttaccttacagaaagtggttatgtcaatctgcaaagagtacagatgatcatgttagcagttggtgaagttgaggatagcatttttaaaaagagaaaggatgatgaggacagttttagaagacgacagaaagaaaaaagaaagagaatgaagagagatcaaccagctttcactcctagtggaatattaactcctcatgccttgggttcaagaaattcaccaggttctcaagtagccagtaatccgagacaagcagcctatgaaatgaggatgcagaataactctagtccttcgatatctcctaatacgagtttcacatctgatggctccccgtctccattaggaggaattaagcgaaaagcagaagacagtgacagtgaacctgagccagaggataatgtcaggttatgggaagctggctggaagcagcggtactacaagaacaaatttgatgtggatgcagctgatgagaaattccgtcggaaagttgtgcagtcgtacgttgaaggactttgctgggttcttagatattattaccagggctgtgcttcctggaagtggtattatccatttcattatgcaccatttgcttcagactttgaaggcattgcagacatgccatctgattttgagaagggtacgaaaccgtttaaaccactagaacaacttatgggggtatttccagctgcaagtggtaattttctacctccatcatggcggaagctcatgagtgatcctgattctagtataattgacttctatcctgaagattttgctattgatttgaatgggaagaaatatgcatggcaaggtgttgctctcttgccattcgtggatgagcgaaggctacgagctgccctagaagaggtatacccagacctcactccagaagagaccagaagaaacagccttggaggtgatgtcttatttgtggggaaacatcacccactccatgacttcattttagagctgtaccagacaggttccacagagccagtggaggtaccccctgaactatgtcatgggattcaaggaaagttttctttggatgaagaagccattcttccagatcaaatagtatgttctcctgttcctatgttaagggatctgacacagaacactgtagtcagtattaattttaaagacccacagtttgctgaagattacatttttaaagctgtaatgcttccaggagcaagaaagccagcagcagtactgaaacctagtgactgggaaaaatccagcaatggacggcagtggaagcctcagcttggctttaaccgtgaccggaggcctgtgcacctggatcaggcagccttcaggactttgggccatgtgatgccaagaggctcaggaactggcatttacagcaatgctgcaccaccacctgtgacttaccagggaaacttatacaggccgcttttgagaggacaagcccagattccaaaacttatgtcaaatatgaggccccaggattcctggcgaggtcctcctccccttttccagcagcaaaggtttgacagaggcgttggggctgaacctctgctcccatggaaccggatgctgcaaacccagaatgcagccttccagccaaaccagtaccagatgctagctgggcctggtgggtatccacccagacgagatgatcgtggagggagacagggatatcccagagaaggaaggaaataccctttgccaccaccctcaggaagatacaattggaattaagcttttgtaaagctttcccaaatcctttcatcattctacagttttatgctatttgtggaaagatttctttctcaagtagtagtttttaataaaactacagtactttgtgtatttcttttaactgtgtatatttctactgatctgatctcactgtttatgttgctttccaaagatgtatgttgcataatacagtggatctgaatttattattgcttataaaacacatttgatggaataggagtactggtttttcataatggttaaaaatgaaaccagctgtggatttcaaaacacagtgtattctagatcatctaagatccatgctgatttttattgcacaagaattaggtttgaactcttgagctggaacctcagcaaactagagtatatattgttcagtatttctttggaaacatttcattaatgtacttgtcttacagaaatttctgaactttagtaaaaaaaaataaagttaaacttttaaaacaaaaaaaaaaaaccagcgcggccgct

SEQ ID NO: 448356 - DNA, 3876 bp, Homo sapiens
gaaatggaagtaacgagtaagtttggatgcttcgattctaccctagattgagacgggtgagcatagaggcaaaaaaagacattttcttccaaacaagaggtgaccaaacgggcaagggagacctcctcccgggcatgcagagcgcagcgattctgtgcccagggagccggagggctggggctgggagatcccggcggagccccggcagagcagtcgcccgtgagcccccgcaactcagacgcgctcggcctcgcgctccggggctgggaccaccgagggcgagctgcagccttcgccacccggtccgccgccggactccgcctcccacaaacagcccggcaaggcccttttccgccgctccctcatccagcgaagcctccttcccagcttccccggcggcggcgccgtgacgtcacttccgttctccagcgcgcacgtgggaggaagtgctggtgccctctgccgctgctcccgtctctttggttacgctcgtcagccggtcggccgccgcctccagccgtgtgccgctatgggagtcccggcgttcttccgctggctcagccgcaagtacccgtccatcatagtcaactgcgtggaagagaagccaaaagaatgcaatggtgtaaagattccagttgatgccagtaaacctaatccaaatgatgtggagtttgataatctgtatttggatatgaatggaatcatccatccctgtactcatcctgaagacaaaccagcaccaaaaaatgaagatgaaatgatggttgcaatttttgagtacattgacagacttttcagtattgtaagaccaagaagacttctctacatggcaatagatggagtggcaccacgtgctaaaatgaaccagcagcgttcaaggaggttcagggcatcaaaagaaggaatggaagcagcagtcgagaagcagcgagtcagggaagaaatattggcaaaaggtggctttcttcctccagaagaaataaaagaaagatttgacagcaactgtattacaccaggaactgaattcatggacaatcttgctaaatgccttcgctattacatagctgatcgtttaaataatgaccctgggtggaaaaatttgacagttattttatctgatgctagtgctcctggtgaaggagaacataaaatcatggattacattagaaggcaaagagcccagcctaaccatgacccaaatactcatcattgtttatgtggagcagatgctgatctcattatgcttggccttgccacacatgaaccgaactttaccattattagagaagaattcaaaccaaacaagcccaaaccatgtggtctttgtaatcagtttggacatgaggtcaaagattgtgaaggtttgccaagagaaaagaagggaaagcacacagcagggacagcatgatgacacttgccgatagtcttcctttcggcttaatgttcttcgtgagatatttgggaaccgctatttggaaagagaactcacaatggccagcctaccattcacatttgatgttgagaggagcattgatgactgggttttcatgtgcttctttgtgggaaatgacttcctccctcatttgccatcgttagagattagggaaaatgcaattgaccgtttggttaacatatacaaaaatgtggtacacaaaactgggggttaccttacagaaagtggttatgtcaatctgcaaagagtacagatgatcatgttagcagttggtgaagttgaggatagcatttttaaaaagagaaaggatgatgaggacagttttagaagacgacagaaagaaaaaagaaagagaatgaagagagatcaaccagctttcactcctagtggaatattaactcctcatgccttgggttcaagaaattcaccaggttctcaagtagccagtaatccgagacaagcagcctatgaaatgaggatgcagaataactctagtccttcgatatctcctaatacgagtttcacatctgatggctccccgtctccattaggaggaattaagcgaaaagcagaagacagtgacagtgaacctgagccagaggataatgtcaggttatgggaagctggctggaagcagcggtactacaagaacaaatttgatgtggatgcagctgatgagaaattccgtcggaaagttgtgcagtcgtacgttgaaggactttgctgggttcttagatattattaccagggctgtgcttcctggaagtggtattatccatttcattatgcaccatttgcttcagactttgaaggcattgcagacatgccatctgattttgagaagggtacgaaaccgtttaaaccactagaacaacttatgggggtatttccagctgcaagtggtaattttctacctccatcatggcggaagctcatgagtgatcctgattctagtataattgacttctatcctgaagattttgctattgatttgaatgggaagaaatatgcatggcaaggtgttgctctcttgccattcgtggatgagcgaaggctacgagctgccctagaagaggtatacccagacctcactccagaagagaccagaagaaacagccttggaggtgatgtcttatttgtggggaaacatcacccactccatgacttcattttagagctgtaccagacaggttccacagagccagtggaggtaccccctgaactatgtcatgggattcaaggaaagttttctttggatgaagaagccattcttccagatcaaatagtatgttctcctgttcctatgttaagggatctgacacagaacactgtagtcagtattaattttaaagacccacagtttgctgaagattacatttttaaagctgtaatgcttccaggagcaagaaagccagcagcagtactgaaacctagtgactgggaaaaatccagcaatggacggcagtggaagcctcagcttggctttaaccgtgaccggaggcctgtgcacctggatcaggcagccttcaggactttgggccatgtgatgccaagaggctcaggaactggcatttacagcaatgctgcaccaccacctgtgacttaccagggaaacttatacaggccgcttttgagaggacaagcccagattccaaaacttatgtcaaatatgaggccccaggattcctggcgaggtcctcctccccttttccagcagcaaaggtttgacagaggcgttggggctgaacctctgctcccatggaaccggatgctgcaaacccagaatgcagccttccagccaaaccagtaccagatgctagctgggcctggtgggtatccacccagacgagatgatcgtggagggagacagggatatcccagagaaggaaggaaataccctttgccaccaccctcaggaagatacaattggaattaagcttttgtaaagctttcccaaatcctttcatcattctacagttttatgctatttgtggaaagatttctttctcaagtagtagtttttaataaaactacagtactttgtgtatttcttttaactgtgtatatttctactgatctgatctcactgtttatgttgctttccaaagatgtatgttgcataatacagtggatctgaatttattattgcttataaaacacatttgatggaataggagtactggtttttcataatggttaaaaatgaaaccagctgtggatttcaaaacacagtgtattctagatcatctaagatccatgctgatttttattgcacaagaattaggtttgaactcttgagctggaacctcagcaaactagagtatatattgttcagtatttctttggaaacatttcattaatgtacttgtcttacagaaatttctgaactttagtaaaaaaaaataaagttaaacttttaaaac

SEQ ID NO: 448357 - DNA, 3951 bp, Homo sapiens
gaaatggaagtaacgagtaagtttggatgcttcgattctaccctagattgagacgggtgagcatagaggcaaaaaaagacattttcttccaaacaagaggtgaccaaacgggcaagggagacctcctcccgggcatgcagagcgcagcgattctgtgcccagggagccggagggctggggctgggagatcccggcggagccccggcagagcagtcgcccgtgagcccccgcaactcagacgcgctcggcctcgcgctccggggctgggaccaccgagggcgagctgcagccttcgccacccggtccgccgccggactccgcctcccacaaacagcccggcaaggcccttttccgccgctccctcatccagcgaagcctccttcccagcttccccggcggcggcgccgtgacgtcacttccgttctccagcgcgcacgtgggaggaagtgctggtgccctctgccgctgctcccgtctctttggttacgctcgtcagccggtcggccgccgcctccagccgtgtgccgctatgggagtcccggcgttcttccgctggctcagccgcaagtacccgtccatcatagtcaactgcgtggaagagaagccaaaagaatgcaatggtgtaaagattccagttgatgccagtaaacctaatccaaatgatgtggagtttgataatctgtatttggatatgaatggaatcatccatccctgtactcatcctgaagacaaaccagcaccaaaaaatgaagatgaaatgatggttgcaatttttgagtacattgacagacttttcagtattgtaagaccaagaagacttctctacatggcaatagatggagtggcaccacgtgctaaaatgaaccagcagcgttcaaggaggttcagggcatcaaaagaaggaatggaagcagcagtcgagaagcagcgagtcagggaagaaatattggcaaaaggtggctttcttcctccagaagaaataaaagaaagatttgacagcaactgtattacaccaggaactgaattcatggacaatcttgctaaatgccttcgctattacatagctgatcgtttaaataatgaccctgggtggaaaaatttgacagttattttatctgatgctagtgctcctggtgaaggagaacataaaatcatggattacattagaaggcaaagagcccagcctaaccatgacccaaatactcatcattgtttatgtggagcagatgctgatctcattatgcttggccttgccacacatgaaccgaactttaccattattagagaagaattcaaaccaaacaagcccaaaccatgtggtctttgtaatcagtttggacatgaggtcaaagattgtgaaggtttgccaagagaaaagaagggaaagcatgatgaacttgccgatagtcttccttgtgcagaaggagagtttatcttccttcggcttaatgttcttcgtgagtatttggaaagagaactcacaatggccagcctaccattcacatttgatgttgagaggagcattgatgactgggttttcatgtgcttctttgtgggaaatgacttcctccctcatttgccatcgttagagattagggaaaatgcaattgaccgtttggttaacatatacaaaaatgtggtacacaaaactggggtaagttcattcttgaatgatttcaaaacagaagtatttgcttttataagaagatcattttacatatattttatcacttacaggttaccttacagaaagtggttatgtcaatctgcaaagagtacagatgatcatgttagcagttggtgaagttgaggatagcatttttaaaaagagaaaggatgatgaggacagttttagaagacgacagaaagaaaaaagaaagagaatgaagagagatcaaccagctttcactcctagtggaatattaactcctcatgccttgggttcaagaaattcaccaggttctcaagtagccagtaatccgagacaagcagcctatgaaatgaggatgcagaataactctagtccttcgatatctcctaatacgagtttcacatctgatggctccccgtctccattaggaggaattaagcgaaaagcagaagacagtgacagtgaacctgagccagaggataatgtcaggttatgggaagctggctggaagcagcggtactacaagaacaaatttgatgtggatgcagctgatgagaaattccgtcggaaagttgtgcagtcgtacgttgaaggactttgctgggttcttagatattattaccagggctgtgcttcctggaagtggtattatccatttcattatgcaccatttgcttcagactttgaaggcattgcagacatgccatctgattttgagaagggtacgaaaccgtttaaaccactagaacaacttatgggggtatttccagctgcaagtggtaattttctacctccatcatggcggaagctcatgagtgatcctgattctagtataattgacttctatcctgaagattttgctattgatttgaatgggaagaaatatgcatggcaaggtgttgctctcttgccattcgtggatgagcgaaggctacgagctgccctagaagaggtatacccagacctcactccagaagagaccagaagaaacagccttggaggtgatgtcttatttgtggggaaacatcacccactccatgacttcattttagagctgtaccagacaggttccacagagccagtggaggtaccccctgaactatgtcatgggattcaaggaaagttttctttggatgaagaagccattcttccagatcaaatagtatgttctcctgttcctatgttaagggatctgacacagaacactgtagtcagtattaattttaaagacccacagtttgctgaagattacatttttaaagctgtaatgcttccaggagcaagaaagccagcagcagtactgaaacctagtgactgggaaaaatccagcaatggacggcagtggaagcctcagcttggctttaaccgtgaccggaggcctgtgcacctggatcaggcagccttcaggactttgggccatgtgatgccaagaggctcaggaactggcatttacagcaatgctgcaccaccacctgtgacttaccagggaaacttatacaggccgcttttgagaggacaagcccagattccaaaacttatgtcaaatatgaggccccaggattcctggcgaggtcctcctccccttttccagcagcaaaggtttgacagaggcgttggggctgaacctctgctcccatggaaccggatgctgcaaacccagaatgcagccttccagccaaaccagtaccagatgctagctgggcctggtgggtatccacccagacgagatgatcgtggagggagacagggatatcccagagaaggaaggaaataccctttgccaccaccctcaggaagatacaattggaattaagcttttgtaaagctttcccaaatcctttcatcattctacagttttatgctatttgtggaaagatttctttctcaagtagtagtttttaataaaactacagtactttgtgtatttcttttaactgtgtatatttctactgatctgatctcactgtttatgttgctttccaaagatgtatgttgcataatacagtggatctgaatttattattgcttataaaacacatttgatggaataggagtactggtttttcataatggttaaaaatgaaaccagctgtggatttcaaaacacagtgtattctagatcatctaagatccatgctgatttttattgcacaagaattaggtttgaactcttgagctggaacctcagcaaactagagtatatattgttcagtatttctttggaaacatttcattaatgtacttgtcttacagaaatttctgaactttagtaaaaaaaaataaagttaaacttttaaaac

SEQ ID NO: 448358 - DNA, 3761 bp, Homo sapiens
gaaatggaagtaacgagtaagtttggatgcttcgattctaccctagattgagacgggtgagcatagaggcaaaaaaagacattttcttccaaacaagaggtgaccaaacgggcaagggagacctcctcccgggcatgcagagcgcagcgattctgtgcccagggagccggagggctggggctgggagatcccggcggagccccggcagagcagtcgcccgtgagcccccgcaactcagacgcgctcggcctcgcgctccggggctgggaccaccgagggcgagctgcagccttcgccacccggtccgccgccggactccgcctcccacaaacagcccggcaaggcccttttccgccgctccctcatccagcgaagcctccttcccagcttccccggcggcggcgccgtgacgtcacttccgttctccagcgcgcacgtgggaggaagtgctggtgccctctgccgctgctcccgtctctttggttacgctcgtcagccggtcggccgccgcctccagccgtgtgccgctatgggagtcccggcgttcttccgctggctcagccgcaagtacccgtccatcatagtcaactgcgtggaagagaagccaaaagaatgcaatggtgtaaagattccagttgatgccagtaaacctaatccaaatgatgtggagtttgataatctgtatttggatatgaatggaatcatccatccctgtactcatcctgaagacaaaccagcaccaaaaaatgaagatgaaatgatggttgcaatttttgagtacattgacagacttttcagtattgtaagaccaagaagacttctctacatggcaatagatggagtggcaccacgtgctaaaatgaaccagcagcgttcaaggaggttcagggcatcaaaagaaggaatggaagcagcagtcgagaagcagcgagtcagggaagaaatattggcaaaaggtggctttcttcctccagaagaaataaaagaaagatttgacagcaactgtattacaccaggaactgaattcatggacaatcttgctaaatgccttcgctattacatagctgatcgtttaaataatgaccctgggtggaaaaatttgacagttattttatctgatgctagtgctcctggtgaaggagaacataaaatcatggattacattagaaggcaaagagcccagcctaaccatgacccaaatactcatcattgtttatgtggagcagatgctgatctcattatgcttggccttgccacacatgaaccgaactttaccattattagagaagaattcaaaccaaacaagcccaaaccatgtggtctttgtaatcagtttggacatgaggtcaaagattgtgaaggtttgccaagagaaaagaagggaaagcatgatgaacttgccgatagtcttccttgtgcagaaggagagtttatcttccttcggcttaatgttcttcgtgagtatttggaaagagaactcacaatggccagcctaccattcacatttgatgttgagaggagcattgatgactgggttttcatgtgcttctttgtgggaaatgacttcctccctcatttgccatcgttagagattagggaaaatgcaattgaccgtttggttaacatatacaaaaatgtggtacacaaaactggggacagttttagaagacgacagaaagaaaaaagaaagagaatgaagagagatcaaccagctttcactcctagtggaatattaactcctcatgccttgggttcaagaaattcaccaggttctcaagtagccagtaatccgagacaagcagcctatgaaatgaggatgcagaataactctagtccttcgatatctcctaatacgagtttcacatctgatggctccccgtctccattaggaggaattaagcgaaaagcagaagacagtgacagtgaacctgagccagaggataatgtcaggttatgggaagctggctggaagcagcggtactacaagaacaaatttgatgtggatgcagctgatgagaaattccgtcggaaagttgtgcagtcgtacgttgaaggactttgctgggttcttagatattattaccagggctgtgcttcctggaagtggtattatccatttcattatgcaccatttgcttcagactttgaaggcattgcagacatgccatctgattttgagaagggtacgaaaccgtttaaaccactagaacaacttatgggggtatttccagctgcaagtggtaattttctacctccatcatggcggaagctcatgagtgatcctgattctagtataattgacttctatcctgaagattttgctattgatttgaatgggaagaaatatgcatggcaaggtgttgctctcttgccattcgtggatgagcgaaggctacgagctgccctagaagaggtatacccagacctcactccagaagagaccagaagaaacagccttggaggtgatgtcttatttgtggggaaacatcacccactccatgacttcattttagagctgtaccagacaggttccacagagccagtggaggtaccccctgaactatgtcatgggattcaaggaaagttttctttggatgaagaagccattcttccagatcaaatagtatgttctcctgttcctatgttaagggatctgacacagaacactgtagtcagtattaattttaaagacccacagtttgctgaagattacatttttaaagctgtaatgcttccaggagcaagaaagccagcagcagtactgaaacctagtgactgggaaaaatccagcaatggacggcagtggaagcctcagcttggctttaaccgtgaccggaggcctgtgcacctggatcaggcagccttcaggactttgggccatgtgatgccaagaggctcaggaactggcatttacagcaatgctgcaccaccacctgtgacttaccagggaaacttatacaggccgcttttgagaggacaagcccagattccaaaacttatgtcaaatatgaggccccaggattcctggcgaggtcctcctccccttttccagcagcaaaggtttgacagaggcgttggggctgaacctctgctcccatggaaccggatgctgcaaacccagaatgcagccttccagccaaaccagtaccagatgctagctgggcctggtgggtatccacccagacgagatgatcgtggagggagacagggatatcccagagaaggaaggaaataccctttgccaccaccctcaggaagatacaattggaattaagcttttgtaaagctttcccaaatcctttcatcattctacagttttatgctatttgtggaaagatttctttctcaagtagtagtttttaataaaactacagtactttgtgtatttcttttaactgtgtatatttctactgatctgatctcactgtttatgttgctttccaaagatgtatgttgcataatacagtggatctgaatttattattgcttataaaacacatttgatggaataggagtactggtttttcataatggttaaaaatgaaaccagctgtggatttcaaaacacagtgtattctagatcatctaagatccatgctgatttttattgcacaagaattaggtttgaactcttgagctggaacctcagcaaactagagtatatattgttcagtatttctttggaaacatttcattaatgtacttgtcttacagaaatttctgaactttagtaaaaaaaaataaagttaaacttttaaaac

SEQ ID NO: 448359 - DNA, 2524 bp, Homo sapiens
gaactccgacactagtgatgggcatgttagccagtcagcagaaccagtcaggcccatcgggtataacctaaaccaaggcaacatgcagagggagcattgatgactgggttttcatgtgcttctttgtgggaaatgacttcctccctcatttgccatcgttagagattagggaaaatgcaattgaccgtttggttaacatatacaaaaatgtggtacacaaaactggggtaagttcattcttgaatgatttcaaaacagaagtatttgcttttataagaagatcattttacatatattttatcacttacaggttaccttacagaaagtggttatgtcaatctgcaaagagtacagatgatcatgttagcagttggtgaagttgaggatagcatttttaaaaagagaaaggatgatgaggacagttttagaagacgacagaaagaaaaaagaaagagaatgaagagagatcaaccagctttcactcctagtggaatattaactcctcatgccttgggttcaagaaattcaccaggttctcaagtagccagtaatccgagacaagcagcctatgaaatgaggatgcagaataactctagtccttcgatatctcctaatacgagtttcacatctgatggctccccgtctccattaggaggaattaagcgaaaagcagaagacagtgacagtgaacctgagccagaggataatgtcaggttatgggaagctggctggaagcagcggtactacaagaacaaatttgatgtggatgcagctgatgagaaattccgtcggaaagttgtgcagtcgtacgttgaaggactttgctgggttcttagatattattaccagggctgtgcttcctggaagtggtattatccatttcattatgcaccatttgcttcagactttgaaggcattgcagacatgccatctgattttgagaagggtacgaaaccgtttaaaccactagaacaacttatgggggtatttccagctgcaagtggtaattttctacctccatcatggcggaagctcatgagtgatcctgattctagtataattgacttctatcctgaagattttgctattgatttgaatgggaagaaatatgcatggcaaggtgttgctctcttgccattcgtggatgagcgaaggctacgagctgccctagaagaggtatacccagacctcactccagaagagaccagaagaaacagccttggaggtgatgtcttatttgtggggaaacatcacccactccatgacttcattttagagctgtaccagacaggttccacagagccagtggaggtaccccctgaactatgtcatgggattcaaggaaagttttctttggatgaagaagccattcttccagatcaaatagtatgttctcctgttcctatgttaagggatctgacacagaacactgtagtcagtattaattttaaagacccacagtttgctgaagattacatttttaaagctgtaatgcttccaggagcaagaaagccagcagcagtactgaaacctagtgactgggaaaaatccagcaatggacggcagtggaagcctcagcttggctttaaccgtgaccggaggcctgtgcacctggatcaggcagccttcaggactttgggccatgtgatgccaagaggctcaggaactggcatttacagcaatgctgcaccaccacctgtgacttaccagggaaacttatacaggccgcttttgagaggacaagcccagattccaaaacttatgtcaaatatgaggccccaggattcctggcgaggtcctcctccccttttccagcagcaaaggtttgacagaggcgttggggctgaacctctgctcccatggaaccggatgctgcaaacccagaatgcagccttccagccaaaccagtaccagatgctagctgggcctggtgggtatccacccagacgagatgatcgtggagggagacagggatatcccagagaaggaaggaaataccctttgccaccaccctcaggaagatacaattggaattaagcttttgtaaagctttcccaaatcctttcatcattctacagttttatgctatttgtggaaagatttctttctcaagtagtagtttttaataaaactacagtactttgtgtatttcttttaactgtgtatatttctactgatctgatctcactgtttatgttgctttccaaagatgtatgttgcataatacagtggatctgaatttattattgcttataaaacacatttgatggaataggagtactggtttttcataatggttaaaaatgaaaccagctgtggatttcaaaacacagtgtattctagatcatctaagatccatgctgatttttattgcacaagaattaggtttgaactcttgagctggaacctcagcaaactagagtatatattgttcagtatttctttggaaacatttcattaatgtacttgtcttacagaaatttctgaactttagtaaaaaaaaataaagttaaacttttaaaac

SEQ ID NO: 448360 - DNA, 2559 bp, Homo sapiens
  misc_feature (2472)..(2473): n is a, c, g, or t
  misc_feature (2494)..(2494): n is a, c, g, or t
  misc_feature (2500)..(2500): n is a, c, g, or t
  misc_feature (2502)..(2502): n is a, c, g, or t
gaaatggaagtaacgagtaagtttggatgcttcgattctaccctagattgagacgggtgagcatagaggcaaaaaaagacattttcttccaaacaagaggtgaccaaacgggcaagggagacctcctcccgggcatgcagagcgcagcgattctgtgcccagggagccggagggctggggctgggagatcccggcggagccccggcagagcagtcgcccgtgagcccccgcaactcagacgcgctcggcctcgcgctccggggctgggaccaccgagggcgagctgcagccttcgccacccggtccgccgccggactccgcctcccacaaacagcccggcaaggcccttttccgccgctccctcatccagcgaagcctccttcccagcttccccggcggcggcgccgtgacgtcacttccgttctccagcgcgcacgtgggaggaagtgctggtgccctctgccgctgctcccgtctctttggttacgctcgtcagccggtcggccgccgcctccagccgtgtgccgctatgggagtcccggcgttcttccgctggctcagccgcaagtacccgtccatcatagtcaactgcgtggaagagaagccaaaagaatgcaatggtgtaaagattccagttgatgccagtaaacctaatccaaatgatgtggagtttgataatctgtatttggatatgaatggaatcatccatccctgtactcatcctgaagacaaaccagcaccaaaaaatgaagatgaaatgatggttgcaatttttgagtacattgacagacttttcagtattgtaagaccaagaagacttctctacatggcaatagatggagtggcaccacgtgctaaaatgaaccagcagcgttcaaggaggttcagggcatcaaaagaaggaatggaagcagcagtcgagaagcagcgagtcagggaagaaatattggcaaaaggtggctttcttcctccagaagaaataaaagaaagatttgacagcaactgtattacaccaggaactgaattcatggacaatcttgctaaatgccttcgctattacatagctgatcgtttaaataatgaccctgggtggaaaaatttgacagttattttatctgatgctagtgctcctggtgaaggagaacataaaatcatggattacattagaaggcaaagagcccagcctaaccatgacccaaatactcatcattgtttatgtggagcagatgctgatctcattatgcttggccttgccacacatgaaccgaactttaccattattagagaagaattcaaaccaaacaagcccaaaccatgtggtctttgtaatcagtttggacatgaggtcaaagattgtgaaggtttgccaagagaaaagaagggaaagcatgatgaacttgccgatagtcttccttgtgcagaaggagagtttatcttccttcggcttaatgttcttcgtgagtatttggaaagagaactcacaatggccagcctaccattcacatttgatgttgagaggagcattgatgactgggttttcatgtgcttctttgtgggaaatgacttcctccctcatttgccatcgttagagattagggaaaatgcaattgaccgtttggttaacatatacaaaaatgtggtacacaaaactgggggttaccttacagaaagtggttatgtcaatctgcaaagagtacagatgatcatgttagcagttggtgaagttgaggatagcatttttaaaaagagaaaggatgatgaggacagttttagaagacgacagaaagaaaaaagaaagagaatgaagagagatcaaccagctttcactcctagtggaatattaactcctcatgccttgggttcaagaaattcaccaggttctcaagtagccagtaatccgagacaagcagcctatgaaatgaggatgcagaataactctagtccttcgatatctcctaatacgagtttcacatctgatggctccccgtctccattaggaggaattaagcgaaaagcagaagacagtgacagtgaacctgagccagaggataatgtcaggttatgggaagctggctggaagcagcggtactacaagaacaaatttgatgtggatgcagctgatgagaaattccgtcggaaagttgtgcagtcgtacgttgaaggactttgctgggttcttagatattattaccagggctgtgcttcctggaagtggtattatccatttcattatgcaccatttgcttcagactttgaaggcattgcagacatgccatctgattttgagaagggtacgaaaccgtttaaaccactagaacaacttatgggggtatttccagctgcaagtggtaattttctacctccatcatggcggaagctcatgagtgatcctgattctagtataattgacttctatcctgaagattttgctattgatttgaatgggaagaaatatgcatggcaagggtgccnntgccatcggggatgacgaagntagagngnctaaaaggttaccggactcaatcagaaaaccaaaacgcctgggagactttggggaaa

SEQ ID NO: 448361 - DNA, 2692 bp, Homo sapiens
gaaatggaagtaacgagtaagtttggatgcttcgattctaccctagattgagacgggtgagcatagaggcaaaaaaagacattttcttccaaacaagaggtgaccaaacgggcaagggagacctcctcccgggcatgcagagcgcagcgattctgtgcccagggagccggagggctggggctgggagatcccggcggagccccggcagagcagtcgcccgtgagcccccgcaactcagacgcgctcggcctcgcgctccggggctgggaccaccgagggcgagctgcagccttcgccacccggtccgccgccggactccgcctcccacaaacagcccggcaaggcccttttccgccgctccctcatccagcgaagcctccttcccagcttccccggcggcggcgccgtgacgtcacttccgttctccagcgcgcacgtgggaggaagtgctggtgccctctgccgctgctcccgtctctttggttacgctcgtcagccggtcggccgccgcctccagccgtgtgccgctatgggagtcccggcgttcttccgctggctcagccgcaagtacccgtccatcatagtcaactgcgtggaagagaagccaaaagaatgcaatggtgtaaagattccagttgatgccagtaaacctaatccaaatgatgtggagtttgataatctgtatttggatatgaatggaatcatccatccctgtactcatcctgaagacaaaccagcaccaaaaaatgaagatgaaatgatggttgcaatttttgagtacattgacagacttttcagtattgtaagaccaagaagacttctctacatggcaatagatggagtggcaccacgtgctaaaatgaaccagcagcgttcaaggaggttcagggcatcaaaagaaggaatggaagcagcagtcgagaagcagcgagtcagggaagaaatattggcaaaaggtggctttcttcctccagaagaaataaaagaaagatttgacagcaactgtattacaccaggaactgaattcatggacaatcttgctaaatgccttcgctattacatagctgatcgtttaaataatgaccctgggtggaaaaatttgacagttattttatctgatgctagtgctcctggtgaaggagaacataaaatcatggattacattagaaggcaaagagcccagcctaaccatgacccaaatactcatcattgtttatgtggagcagatgctgatctcattatgcttggccttgccacacatgaaccgaactttaccattattagagaagaattcaaaccaaacaagcccaaaccatgtggtctttgtaatcagtttggacatgaggtcaaagattgtgaaggtttgccaagagaaaagaagggaaagcatgatgaacttgccgatagtcttccttgtgcagaaggagagtttatcttccttcggcttaatgttcttcgtgagtatttggaaagagaactcacaatggccagcctaccattcacatttgatgttgagaggagcattgatgactgggttttcatgtgcttctttgtgggaaatgacttcctccctcatttgccatcgttagagattagggaaaatgcaattgaccgtttggttaacatatacaaaaatgtggtacacaaaactgggggttaccttacagaaagtggttatgtcaatctgcaaagagtacagatgatcatgttagcagttggtgaagttgaggatagcatttttaaaaagagaaaggatgatgaggacagttttagaagacgacagaaagaaaaaagaaagagaatgaagagagatcaaccagctttcactcctagtggaatattaactcctcatgccttgggttcaagaaattcaccaggttctcaagtagccagtaatccgagacaagcagcctatgaaatgaggatgcagaataactctagtccttcgatatctcctaatacgagtttcacatctgatggctccccgtctccattaggaggaattaagcgaaaagcagaagacagtgacagtgaacctgagccagaggataatgtcaggtgaagccattttttggtagcactttgttagcaaattgctgaaatagatgcagtctaattaatgctatttagcttagagcagcagtgccttcagatgcttgcctgtgatctttttatccatcagtaattaatgtggagggttagaatagtcagtaaattccagtgagatgtgtaagctgtagctgttaaacctaagtgtctagattagtatgcgtgcaggctttcgtcctccaatccacttttccctctgagaccaggcacaagatcggctagatatcatatctaggtgtttagctctgactatgtgatctgaatgttgctgtttggagactgattaaattttcaagctgcttaacctagaaagttcagttatacttagacacttaatatagtttgccttaatcttctctattgaaagagttcttcctcaaaatgaaatatgcagaaatcattctgttaagagatcaatatgtatgttttttaaaaaccacagacttgcatatgcgcaattatatttcatgacagaggagtttccctttaactgtatacttcaaatttaaaataggaagctgattctttaattcatcctgaagtttgagatcattatataataagattaacaacctctcatgta

SEQ ID NO: 448362 - DNA, 2245 bp, Homo sapiens
gaaatggaagtaacgagtaagtttggatgcttcgattctaccctagattgagacgggtgagcatagaggcaaaaaaagacattttcttccaaacaagaggtgaccaaacgggcaagggagacctcctcccgggcatgcagagcgcagcgattctgtgcccagggagccggagggctggggctgggagatcccggcggagccccggcagagcagtcgcccgtgagcccccgcaactcagacgcgctcggcctcgcgctccggggctgggaccaccgagggcgagctgcagccttcgccacccggtccgccgccggactccgcctcccacaaacagcccggcaaggcccttttccgccgctccctcatccagcgaagcctccttcccagcttccccggcggcggcgccgtgacgtcacttccgttctccagcgcgcacgtgggaggaagtgctggtgccctctgccgctgctcccgtctctttggttacgctcgtcagccggtcggccgccgcctccagccgtgtgccgctatgggagtcccggcgttcttccgctggctcagccgcaagtacccgtccatcatagtcaactgcgtggaagagaagccaaaagaatgcaatggtgtaaagattccagttgatgccagtaaacctaatccaaatgatgtggagtttgataatctgtatttggatatgaatggaatcatccatccctgtactcatcctgaagacaaaccagcaccaaaaaatgaagatgaaatgatggttgcaatttttgagtacattgacagacttttcagtattgtaagaccaagaagacttctctacatggcaatagatggagtggcaccacgtgctaaaatgaaccagcagcgttcaaggaggttcagggcatcaaaagaaggaatggaagcagcagtcgagaagcagcgagtcagggaagaaatattggcaaaaggtggctttcttcctccagaagaaataaaagaaagatttgacagcaactgtattacaccaggaactgaattcatggacaatcttgctaaatgccttcgctattacatagctgatcgtttaaataatgaccctgggtggaaaaatttgacagttattttatctgatgctagtgctcctggtgaaggagaacataaaatcatggattacattagaaggcaaagagcccagcctaaccatgacccaaatactcatcattgtttatgtggagcagatgctgatctcattatgcttggccttgccacacatgaaccgaactttaccattattagagaagaattcaaaccaaacaagcccaaaccatgtggtctttgtaatcagtttggacatgaggtcaaagattgtgaaggtttgccaagagaaaagaagggaaagcatgatgaacttgccgatagtcttccttgtgcagaaggagagtttatcttccttcggcttaatgttcttcgtgagtatttggaaagagaactcacaatggccagcctaccattcacatttgatgttgagaggagcattgatgactgggttttcatgtgcttctttgtgggaaatgacttcctccctcatttgccatcgttagagattagggaaaatgcaattgaccgtttggttaacatatacaaaaatgtggtacacaaaactgggggttaccttacagaaagtggttatgtcaatctgcaaagagtacagatgatcatgttagcagttggtgaagttgaggatagcatttttaaaaagagaaaggatgatgaggacagttttagaagacgacagaaagaaaaaagaaagagaatgaaggtgagttttaattaatttcatgagattggcaatagcgtaattttacaatttatgaggaagatgttcattacagtagctttattccttgtccagtaggacttagtcagggacgtaagtgtccacccagttacctttttacctgtagaaagaacactggtgtcgatttaaagaaggtcctctaggctctgatgtctgaagggatacacttgggaggtgagaggtgggtggcagttagctatttgaatggtttacagcaatcaagtattgttttttaagtaaaaatggtcaatattttgtatccccttgaaagttactgtactcttatttctacctctttgtcagattaatctttctagaacacaacactctaaacttgtttctctgctctaaaagcaccactgactccttaatcccctcagaatccaattctgtcttagt

SEQ ID NO: 448363 - DNA, 1300 bp, Homo sapiens
gaaatggaagtaacgagtaagtttggatgcttcgattctaccctagattgagacgggtgagcatagaggcaaaaaaagacattttcttccaaacaagaggtgaccaaacgggcaagggagacctcctcccgggcatgcagagcgcagcgattctgtgcccagggagccggagggctggggctgggagatcccggcggagccccggcagagcagtcgcccgtgagcccccgcaactcagacgcgctcggcctcgcgctccggggctgggaccaccgagggcgagctgcagccttcgccacccggtccgccgccggactccgcctcccacaaacagcccggcaaggcccttttccgccgctccctcatccagcgaagcctccttcccagcttccccggcggcggcgccgtgacgtcacttccgttctccagcgcgcacgtgggaggaagtgctggtgccctctgccgctgctcccgtctctttggttacgctcgtcagccggtcggccgccgcctccagccgtgtgccgctatgggagtcccggcgttcttccgctggctcagccgcaagtacccgtccatcatagtcaactgcgtggaagagaagccaaaagaatgcaatggtgtaaagattccagttgatgccagtaaacctaatccaaatgatgtggagtttgataatctgtatttggatatgaatggaatcatccatccctgtactcatcctgaagacaaaccagcaccaaaaaatgaagatgaaatgatggttgcaatttttgagtacattgacagacttttcagtattgtaagaccaagaagacttctctacatggcaatagatggagtggcaccacgtgctaaaatgaaccagcagcgttcaaggaggttcagggcatcaaaagaaggaatggaagcagcagtcgagaagcagcgagtcagggaagaaatattggcaaaaggtggctttcttcctccagaagaaataaaagaaagatttgacagcaactgtattacaccaggaactgaattcatggacaatcttgctaaatgccttcgctattacatagctgatcgtttaaataatgaccctgggtggaaaaatttgacagttattttatctgatgctagtgctcctggtgaaggagaacataaaatcatggattacattagaaggcaaagagcccaggagacagggcattgtgacatcgtgcggtggtacccccaccagtctctctgctcccatggagccgtgcaggtcccatcagcagtgccactgagctggcccccagtgttgatgccctgg

SEQ ID NO: 448364 - DNA, 422 bp, Homo sapiens
tttcctcctaatacagtgactggcagtgaaagagttcagatcactgcaattggagatgttcttggtccttccatcaatggcttagcctcattgattcggatgccttatggctgtggtgaacagaacatgataaattttgctccaaatatttacattttggattatctgactaaaaagaaacaactgacagataatttgaaagaaaaagctctttcatttatgaggcaaggttaccagagagaacttctctatcagagggaagatggctctttcagtgcttttgggaattatgacccttctgggagcacttgcagggggctctgcagctgccaacgtgtccacgtctccaaaaggaggctccaggtttgccacagcccggaaagaggaggctggagtctatagcactggcaattagagacttc

SEQ ID NO: 448365 - DNA, 821 bp, Homo sapiens
tttcctcctaatacagtgactggcagtgaaagagttcagatcactgcaattggagatgttcttggtccttccatcaatggcttagcctcattgattcggatgccttatggctgtggtgaacagaacatgataaattttgctccaaatatttacattttggattatctgactaaaaagaaacaactgacagataatttgaaagaaaaagctctttcatttatgaggcaaggttaccagagagaacttctctatcagagggaagatggctctttcagtgcttttgggaattatgacccttctgggagcacttggttgtcagcttttgttttaagatgtttccttgaagccgatccttacatagatattgatcagaatgtgttacacagaacatacacttggcttaaaggacatcagaaatccaacggtgaattttgggatccaggaagagtgattcatagtgagcttcaaggtggcaataaaagtccagtaacacttacagcctatattgtaacttctctcctgggatatagaaagtatcagcctaacattgatgtgcaagagtctatccattttttggagtctgaattcagtagaggaatttcagacaattatactctagcccttataacttatgcattgtcatcagtggggagtcctaaagcgaaggaagctttgaatatgctgacttggagagcagaacaagaaggtggcatgcaattctgggtgtcatcagagtccaaactttctgactcctggcagccacgctccctggatattgaagttgcagcctatgcactgctctcacacttcttacaatttca

SEQ ID NO: 448366 - DNA, 1152 bp, Homo sapiens
gacaagcacctgtaccctaatcttcctaagccccaaaattgacattgcccctggaaaccaaaccttaccagtccctgtcagagcccaagtccatcagcatagggctgtgcagataatacccttgcttataggactaggagttaccaatgccacaggaactggaatagcaggtttgtccccttccctgtcctactatcatacactcttaaaggatctctcagacagcctacaagacatagcaaaatccacccttactctccaatcccaaatagactccttagcagcagtaactctgcagaaccaccgtggcttagacctcctaaccgtcgaaaaaggtgggctatgcacctttttaggggaagattgtttttccaccaaccagtctggactagtacgagatgctgcctcgcagttaaatgaaaaggcttctaaaatcagacaatgtctttcagacttttaacaccaatctttggagctgggcgttgtggcttctccctatagctgggcccctcatttccatcattctccttctcctatttggaccctgcctcttccgtctagcctctcagttcctacaaaatctcattcaagctattaccaatcaatctatgcgacaaatgctactcctaactgcccctcaatgtcaccccaccccaagatctctctcccaattaggagtccatgccgccccaagtcccgctcgaagaatccctgagaaacatcaccccgtccacttcttttcttattaaaacaaaaagacaggaatgtcatatcccacaaatatggctgcattattgccagcaggccattattgacggtgggccattaagaactctgtgaccggcacatatgcctccagacttcctggaaccagaaaacctgcaacaaccaaaaaccacaaaagaagaacaacgggtttctgttccaactggttgatcaacttcttgagtcaacaagtcccaaaaccatgttgtaattttccacccgccactttgccctgtaaagactgctctccctcacacctccgggctgactcccttttccgattcagcccactaacacccaagtgaataaacggccttgttgctcacacaaagtctgcttgggtcttcaatccagaccacgctgtaacacacacttacaaaattctgc

SEQ ID NO: 448367 - DNA, 5677 bp, Homo sapiens
  misc_feature (1663)..(1663): n is a, c, g, or t
  misc_feature (2211)..(2211): n is a, c, g, or t
  misc_feature (4655)..(4655): n is a, c, g, or t
  misc_feature (5274)..(5274): n is a, c, g, or t
  misc_feature (5310)..(5310): n is a, c, g, or t
  misc_feature (5352)..(5352): n is a, c, g, or t
  misc_feature (5482)..(5482): n is a, c, g, or t
  misc_feature (5527)..(5527): n is a, c, g, or t
  misc_feature (5645)..(5645): n is a, c, g, or t
ggacttgcgactgtgtcaggatccaggcaatgagcaaggagattggcctgcagatgcacgaggagctcctgaaggtgaccaatgagctctacacagtcatgaaaacctaccacatgtaccatgcagagagcatcagtgcggaaagcaagctgaaggaggctgagaagcaggaggagaagcagttcaataagtcaggagacctcagcatgaacctgctccggcacgaggaccggccccagcgccgcagctctgtgaagaagattgagaagatgaaggagaagaggcaggccaagtactctgagaacaagctgaaatgcacaaaggcccggaatgactacttgctcaatctggcagccaccaacgcagctataagcaaatactacatccatgatgtctctgatctgatcgattgctgtgatttgggcttccatgccagcctggcccgcaccttccggacctatctctcagctgaatacaacctggagacctctcgccacgaagggctggatgtcattgagaatgcagtggacaacctggattcccgaagtgacaagcacacagtcatggacatgtgcaatcaagtcttctgccctccactcaagttcgagttccagccccacatgggggatgaggtctgccaggtcagcgctcagcagcccgtccagacagaactgctcatgcgttatcaccagctgcagtccagactggccaccctcaagatagagaatgaggaggttaggaaaaccctggatgccaccatgcagacattacaggacatgctgactgtggaggactttgatgtctccgatgccttccaacacagtcgatcgacagagtccgtcaagtcggctgcctctgagacctacatgagcaagatcaacattgccaagaggagagccaaccagcaggaaacagaaatgttttattttacaaaatttaaagagtatgtgaatggcagtaacctcatcaccaagctgcaggccaagcacgatttactcaagcagaccctgggcgaaggggaaagagcagaatgcggcaccaccaggtgagagtgggagagttgtgttttctttcatctgctgcccgaggtgggagtgggatggggctggggaggcactgccaggagctggagaagcagggatggcttcttcaccaatgtccccaagggccggtgtgggtgtgcccaggtgaggcacagttgctgctttgcttgttctagcattagactgacaaagccacgcccctccaggctggcgatggaaggggcgcttttggggctgctgtgtggcagtggggcaccctccctttgcgctggccatcgggtgagacagtattgtctactcagagtggctgagggcagcctgtaggggccagaggctgtggggtggctgttgacctctcttcccacctgctacaccatgctgagcaaactgcccagccatgctgcgaggcccagcctgaggtccccatgtaccaaggctttgggccaggctcagattgcgcgcagctgggcacacgcatgtgcataggcgtgcacagactctcctgccgtccacaccctagcttggacctcacgggcacttggatgagctgacggaaagtaacacacgggcaacttctgctttctcttcagcttgttcaacattcccttttgcgctttttnctgagcagaccagagccagtgaacactttccactcagcagctgatagcccaggggctgactttacttccctttcagagagcttagatccataagtggctctgtcactggccaggttgtttgcttagagcctatttcatttctatgttcctattaagagatattgcactgcctagctggaattcagccagtggcccagaggcctgcacttttccatcacacggcagtagagcgctactttttgcctcactttctgggcccagggacctgagggcattctttcttttcccacaaatgctttccagtggccccaaatcctgggaagccctcatgtttggcaagagcaaagatgaactcccaactctctcctgctccttgggaagggagttgggcaaagtcttggcaacctctggggttttcagtttcctgggctcaggatggggagacggagggcttggcagaagttcagcccgtacagctgttcctctgggctctggcaatttggaaacatcaggatgattcacaccaggcaaggcccttccagcacacngggcggcagatgtgcagggtcactttcgaagaaccttttagaaacgaacccattataatttttttttcttttctggcgagagaatgttgtcatagtctcaaaacaacagaagctgtattttacaccaaattctgcaaatagtgaaacagatgggggatgaattgagctgtccctcacttcctcctaattcctagaactcacgcagagaagtttgttccagcagagtgtgggagaggagatctgtaatcaaacacttggccaggtctcagggtcttccctcaggggaaagttgagggtttgtgtgttttgttttgttttgttttgttttgttttgtgttttaaataaagccctctgaagtgttgtcttccacaccctccttgacctagggcctgggaaatccaagctgagtttatcagacctcccacttagacaccctgcattcaactgcagctaccctgcgttcaattgcagacatagccctgtgtactctggttcctggtcaaggtcaaagacaactttgttagtaaactaaaagtctccccttacctccaaaatcatgatttaacttgtggaaattgttgctaacaatgtctctgtcctatggctctctctgtatcttccatggactcccacacgaggtggatatcatttctggatggttatttgagcaggatcccctcagctaagttgctgttgaccttgtatagaggaactggtgttgcatatgggctgcagcatgttatatttttctcacacttcagaaccttatcttagaatagaccaaattcataataaccctgtaattcaggatggccagatgtgataatgcacttaagtttaaaagcgtattgcaaatgtcaaagcaagatgcaaatataaggtttgattattgtgattcaaatgaatgtctggctccccttacccaggttgacatgccctcgtggtctggattagaggtgaaatcacttgagatcttgttcaggcagatgcaacacagtacacagcccatgaatagcctccaagggcccgactggcattgccctacagcattgccaccatttgggatgttgacctccaagtctattaggttatctaggggaatttttcatcacatccctttagttgcaggataattttgaggctatttcctgtgttgccaacgtgtgttaattttcatcttgattaaaaggcagaaaggggacattggtctctggtttctctttcttcctctctgtggctttctctgttcctgttttccctgcctctctttctttctttctttcctttttgctctgcatctgagcagcagaagagatggaaggcttaggctgccccactttccttggccgagctgcccccctgctccccactttgtgccccacccagcacttcagtaagtcgatatagatttgatattgtgcaaagttgggatagctacgtttccttgtcagagattccagacagtgcacagagcaccacacaaagaaagaaatcctcgtgtgattcacacagtcctttgctttctggattgggcaggaaaaatgggaaaacatatgctatttccccttttttccactttgtagaatttaagaaaaaacaaaaaacacttaggactttcttttaaggaaaccctccagttgggcaccgtaggttttttgatattgagtgtccaacacctgcttttagagtctccgctcttcctggccatgagaatttaacagataatttaatgttacttctggatgttctatgataaaatcactttcatactcacactagatccttgagagtaggaagagctgaattttaccaccagcctcaatcacattttatttgtgtgaccttaggcaagtttcttcatcttttgtgggctcactggccttgtatgtaaagtgaattgaatattctttcccagcctcacagggttgttgtgaggttgtcatgcaatgtgataaggaaatgatctgggaatgttcaaaaacaagccaaacactatgaaaacagggtgacaatgttgctatcatcaagttatttctaatccccaaacttaaaacctttggccttgtgtcacatttttgacactctcttttgcctttggtatttgaaaatttaagagcagctcttgtaagaaatcccaccccacatacatacatcctcaaaaaaaaataagtaatttttgaaaaataaatgacatggacttagctaaccaaattgacatagatccaagatgggcttgaaagaatcttgcctgttgtttcttttcaaaattttgatctgtgctgttattttgtttccattgtttgggtggcatgatatttggattcacctggtttttgcccatgcatgtactggagctagcagcatttgctcaatactcaaacacctaggagaagttggttagaggtccctggggatggctggcttaccgaaggagacaggtacnacaagcccagtcagcagaggcagcatgaatctcattaatcctgattggctgcatagtctggaagatttcttgcccgctcacagaaatcaatcaagacttgggggaccaggtctttgcttgtcatgtgtggacattatctgtgcctggctgagtccccacttgttgctacccaaattttgaaccaagccatttgaaaatgaactgcctctcttggttaggggccctcttcttaaccttcaaaaggcctttgccccagaaggctggcaccattgagtcaggccaacttgtgtggtgaaatgagcaaataagccaacacaggtatatgcatggtgagcaattctggaaacgggtccagtgtttgtggctgtttctctggtgaactgtggtgtggttacccctccctgtggccaagagtggagcacactttaggaatggaaatcctaaagtaaagcaagacactttcaacctgatcccatggcaaaggttactggggtagatgagtccttggctggaaataaaaaagtgccctaaggctccatgatggtggcctggtaggaaaagccctgaacttggagccaaagagtcctgggtttgggctccagctctgtcagttctcctncacaggaggcttcagtctctgcctctgtaaaatggngccacatgcacagggttgagatggtattaagtataataatgnatttgaaagtgctttaattgaaaatgtacttgaggctgggtaaggaggctcatgcctgtaatctcagcactttgggaggccaaggcgggcagatcacgacgtcaggagttcaagaccagcctggccaacntggtgaaaccctgtctctactaaagatacaaaaaattagctgggngtcgtggtacatgcctgtaatcccagctactcgggaggctgaggcaggagaatcgcttgaacctgggaggcagaggttgcggtcagctgagatcatgccattgcaccccagcctgggngacagggcaagactccgtctcaaagaaaaagg

SEQ ID NO: 448368 - DNA, 4277 bp, Homo sapiens
  misc_feature (1)..(2): n is a, c, g, or t
  misc_feature (435)..(435): n is a, c, g, or t
  misc_feature (447)..(447): n is a, c, g, or t
  misc_feature (503)..(503): n is a, c, g, or t
  misc_feature (1150)..(1150): n is a, c, g, or t
  misc_feature (1330)..(1330): n is a, c, g, or t
  misc_feature (2785)..(2785): n is a, c, g, or t
  misc_feature (3024)..(3024): n is a, c, g, or t
  misc_feature (3318)..(3318): n is a, c, g, or t
  misc_feature (3832)..(3832): n is a, c, g, or t
  misc_feature (4018)..(4018): n is a, c, g, or t
  misc_feature (4044)..(4044): n is a, c, g, or t
  misc_feature (4063)..(4063): n is a, c, g, or t
  misc_feature (4189)..(4189): n is a, c, g, or t
  misc_feature (4196)..(4197): n is a, c, g, or t
  misc_feature (4219)..(4219): n is a, c, g, or t
nnctgcccatttatttcctgcataacactacataacataacttgcaactgtcttatttaatggcctatttacttcggttttttttcttgtccctctccctacaatgtaagcaacatgaagccaggaaccttgtccgccttatctatcattgcatccctcctaccagcacactgcctggcatattagaactcactcaatggctctataaaaaaaaactggctgattatgtgaattaacccttgcctcaagaagcttataatctagtgagggggtagtagctggtgaaattataccagcacattaacaattaaatctgatggactggattactcagccactatgcccatcatggttgccagtctactctcagtgcctgcatcagtcggggcttttgcatgcagaaagacagggcagcccttgttagcttcatcttanctcctgggatangtcacctcagctataagacaagagagtcaggccagatgaaataactcatggtactncaaagggttctttttgttctggcctgtggtccttctgattataaatgctggggttttaccactgccctctggatcttacagaacacgtaagcattgacagacttcaccaagaagacagctcagcaaattccagggctaggagggcactgggggagatatttgggaagcttcgcaaggaggaggctgggagtagttttctgattaggaaggtccccggagtggtcacatggaaaagataggatggtataggcctgcatctgagctgcgggagggcccagaggccaactggactggcatgagaggctgaaggtgctgtgagggtagataaccccccgcagtgagtcccattcccgtgtttccttcagtgacagcccacacagcgagccaggggccatcgatgaagttgaccatgacaatggcactgagcctcataccagcgatgaaggtgagtgagggggatcctggggacaagggattcttcctggggcctctcacactgacttttgtcagcccaaccacagggctggcccacatagacctcttcagctttccaagtcagccatctgtccttcagaatagacgaagaccccgaaaaaccttcatggcatgccccaagtcctggcatgggcctgacacagagcagatcntcataggctcacgctgtgttcacgacaccccacacctagcccacttcattccttaatgtgtcctgcctggcccaggtacaaatcctaagagacatgagttccctaagtagaaagcaagctctgttcctccatccttcccctttgagggtctgctctgtgccaagcctgtgctgggacttnggcacagggatgaacaagacgtcggtccttgaggaactcccagtctgtcaccagatcttgacaggttggaagtagcttctcatggtgcaaagcgataatgccagattacaggtgtgtctggtgcattgggcaccctggagatgaaatcaaagggtgatgatcctgggaaatgtgtggtgagagagagagagagaaaggccagtcaagacctttctccagattcctccaccccttccagacaaggagaagagagtcggactagtctctagggaaactggactgtgtagacaagcaatctgaaccatatgccaacttatccgtcaggcagagtaggcatagtgccaagggcccatggtacttgtagaggtccactaaaatgttttaatttcttttaaaatcagaaaaaaaatgaacacaatatccagtctggattatatttgtctttatactaatgcagttgtaaaatataatttttaactttttttttgaatggaggaagggacccatgcaggcaaaagggcctaggacccttgaaagttagaatacggcccaggatgcaccaagcacctgggatagttttcctttttaaacatcatggcttagcagttctcttacttgtcctttgtgtttcttttgtgggaccaggacacgttggccaccacatttgtcaggagagcagggcaggcattcaggtgacagttctgggaactggtaaaagagacaagactgacagatgggttttcacattctagtaggactatttcagttgctaatgacagaacccccaactcaaatcaacttaagcttaagagagagtaagttcctatacctgaaaagtcccagggttgggatggcttcaggcacagctggatccaggagcaagggtgatttttgtcagcactttgtctctgtcttcttgttctgcttccctctgtgctggtttcattctcatgtaggatcttccggtgcagtggtctctggcaattccaggctttcaccatcatcttacccaaactctcagtggaaaagggcttcctttctataatggttccaagagaggtcctggggtggagtctcattggactgccttgagtcatgcacccagtcatgatccagtccccatggcctgagagggagctaatgggtcagacccgggtcacaggaacagaaaagcaaatccagatgtcacgttcagcttgatcagactcctgagaggctaaagtcatcctgaactgaggaatgtgtcctgcagaggctttgtttggagatgtgaaggccgccaccttctgcttattcctggtgatttgcttttctctttcctcctttttttcttctgccgaccacctccagttctcccctccctctatcccttttaacagccctcaccctgtcctctccatctgttgctctttttatttctggatctccttctgtccatctctttatctctccctntagcttgctctctctctctctctctctcctactcctgtcatttcctctcctttgtcttgaccgaagcacctgccttcctgggggctgaggtccctgtcagtccctttgctggtttttccacagctcctcgggctgatgggcagaaggcttctctggacaccaggactgaagatgaggagggacagagagaatagggcttgctgggtcagcgaagaagcagccatgggactcacccagtngggcttcctccccataagaaccaccccccagaaagtgctgcctcccacttctcagggtaaaggttcacagtggcccccagaatgcatgagtcagagctttgggtccccctccgagatgatccttcttctttttgttctttgtaaggctgctggtttctgggaatgacaaaggcaggaaaaatcattctgggaaggaagaagccacagtctgggagagccagtttcatgttccctgaaggctctcaaagtatcctgtgtgtattagtggggggtattgaatcaggggcactcttnggtggaaaatcaattgcattttctaaatgttacattcttgccatccctggccaaacagtggcagaatagtgagctgcagagacagtcaaggggtcactgtgctcagaaaaaagagacctggagttgaagcacagagggagtccttatggtcatgtaatctgaggcaagccacatcacctctggcctctatttccttatctataaaatgggaatgacagcaccaagcaaattatggcatgggttaaaatgaggtgacatatgtgaaggagcctagcacagtgcctgggacagggaggtggataagaaacatcaatggactctgtatcaaacagacatccttcctaatcctgatagaaaaactgagtcctggagaattttcttgacctaactggcattggcagttactggtcattggcaaccagaacctcctgatttgtttacctgtttcctcttagacatttcatttaggggatcatcaatatctgtcttctttgctcttgacagcacccggtangaatggaatccagcaggcctcaaaggtcaaatcaggcagagaaccatgagtccaggtctttgccatgcatgaatcagccaatgaatgccaaattgcaggaacaatttagttgtttgtgtatctgttgcctttcttgtctcaaagattctgtaccaactgggcgtggtggctcacacctgtaacccnaacactttgggaagttgaggtgggcngatcacttgagcccagganttcgagaccagcctgggcaacatggtgaaactccgtctctacaaaaaaaaccaaaatacaaaaattagccaggcatggtggcatatgcctgtggtcccagcaactcaggaggctgaagtgggaganttacttnngcccagggaggttgaggctgcngtgagccatgattgtgccactgtactccagcctgagtgacagaacaaggtcctgtctc

SEQ ID NO: 448369 - DNA, 369 bp, Homo sapiens
ttgtaagcgaagggtgatgggcgttcattattttatttttacaacttttctatagatttaaacattttcaaataagttgcagggagaactttaaacttgctgaagtggggggcctcatatgtgggggagacttttcccatctgcctttcctgtggttcaggctggaccaggtcatctcttcggccatctgcacgttctctgactccttcccaagctgaaatatcatctcgtctcttgtttccactcaggtgaattcataaaagggaatgcactgttcgggaacctggaaaacttaggtccagctggactcagaccttcacacggcatcagcagatatatgccccgtccggctctatgccagcttcactc

SEQ ID NO: 448370 - DNA, 4077 bp, Homo sapiens
  misc_feature (2196)..(2196): n is a, c, g, or t
tatgctcatagctgactctagaggataaaatgaggtcgagtgaagagacagtcattagtgagaacctaagccccatcgtagcacagtattacatgtggttgggaaaaataaaaatacagtggtgtggaatactccaaaacctagaaatgctgtaggaataaatctgtggtaactatagaggtttaacttatatcattttcaaactatttaattttttcttttcctggttctactaattatactgtgtcagatttggaactaaacaggcaaggaggctttgagtcacatcgttttcattttaaatcaggctgtgatgcactgtggctggtgccgtcttgcatgaaacgcatgagccgtgagcgcccagttcagactggggccagggaggggcagtccttggcactttctgtcctagaggacactgtcagttgagttaatacaagtgacatagcttcccttccctcccccttcacccactccctccagaacatttagtgtagatgaaaatgtggtgatagaaatgggtgcatgatcttcacgtgtgacagccaggcctttgcctcttggccaagtaaagcccttccgggtcgctctccttcgattccattttacctcctcttctgatcacttccagagatgagctgtttctggataatggcacacgggcaaatctgtgtgccctgtgggccgctgttacttaccctctcctgcgagacccaggggcttttccctactgttcccacgcttcctctctctcgaggccactgaagtttggagtcaaaaggcccagagtctgagtcccagccctgagcacttaggagccttctgacttagggtttgtcactccacctcattgagcctgactgttctgctccataaaatagggtaataaaggtcaaacatcagtgagcaagctgtgtacactggaaaacactgaatcaatacaatgcgtttgtgattatcattagtaaggtaagtcttagatcagagccctccagcccttctttttgaaacctcccaatggcatttcagaagtgagcagtggaattttcctgccatcctaataagagccctggattccatcattaacatttcagcccattggatgaagtggtgccctctcctctggtcccccgcgaaaaggtaaatacacccaaagggagggacctagttaagtcactggcacctagataagttaggagggtaaagccactacctcgtctgaaggactggacttgacaccccacagtggaagggagcatcaggagaggaacaaaaaaagggatctcagggagaggccagtgtcaaacttgacctcccttgtttggcctagaatgaacccttctctttagctcctggatatgaaaggccatctgcttggagcacagaaagatattgccattttacagcttaagagagtaaggccttgggctgtgctgtgacctgcccaagatttgacactggctaggagcagaggctgcgtcaggctcttaaagtcatgtgtttgcatgctggatgctatactgtccagccaggacacaagacttctgatttctaccctcaagatactcccagatcctaaatccagtagcctcccaggcaaaatatagcaatctgccacaactgccagatgaaaagcaacaatcagagtagaaaaatctgttgcctgatatacataacaccaatcagaccgtgtggatttttctctgaattgactgattttgtttttttcttactgaaaatggacctgcctttcactgaattttctgagggcagagtcttagctgttttctttaagcaccttttttttttttttccattgggaaatggctgatgagttcacatttagggatgtacacacacagatggcagacgtctccccactcatccagccccagatctgagccttgacgcaggccaagtggaaaaatactttcccgcccccctcccctgttcccacttcctcatctggcactatgcatgtctcactcaccctccacagcactcagtcccatcgacgttcactgaacattggctttctctttctgactcctgcctgttttagtccactatatattgctgtatttgcttaaatgctggaaagtaactgttaaaatgtgaaattgtaatttttaaaaaggctacaattaaattttagccaatgccactcaccaaatctttgcacctagtagatanatcaatgtaaaaacaaatacctaactgtacagtgagtgtgggggaaatgtagtaacctagttagtagtcttcaatataaccaattgtacaaggggaagtggtgtttacctacttgttcatcaccattactgaaagccgtactgatcagttagttgacaacgggcatttttttttctttgcttcatggaatgatttcttttcttaaccttcgacttatcctgaggtcaagccttttgtctttatgtgtaaccgacgttcagtctattctaggaatgaaccagcaagttgttcatttaaaactgaccaaagacaattaattcctggtctagtttcctgggccttgtggctcagctgccactaaagagctttttggataaaattgagaacaagctgtgcttcctaccccactctccccgtccccttttattcccttttcctcttaaagagctgctctgagctgtgggattctatgaaaaattcttgcctttccttgtttcagtgctaacgatttctcacctcgaagcgccttttgaaccccggacagagtgcacaatcggagggaattgcgagcttgggaattagactttggagtcttttctctgaagtcaccaggccaggggtcaggagagagatggattcccaagggatgaaaggtttctattcaatgaagaaatcggagtgggaagagacacagggaaattgagccatattttggctatcggctggaaccagcagttcagagatctgccttataaacatttaaaaccggtttgtggtacacaaagaggaaccagtgtggggaaggggcctttatgtggggctttcttctctgttggagtcccttggagtgccttgttgggtatatttctctgtcattcaggaggcacgaatgtggaggacttctcgtgacctggtcgtgatgtggcattcagtgcatgtccacagctaatggaaaaacacgaggactcgggtaatggttcttcctctcagtctttctattcctaacttttcacacatccagatggttccacactagtgcaaatgcctcactctcctgagaaacccagaaagaagagtggctggctcacaaccatggggttagcccctgctgggctgggagtcggggtggcggccaggaggaaaggcagaaaggggtgagccgaggtgttgcctagctgattttctgctgtgcagagctaatgctgacatttcatgtcaacttccccggttctctggggtctcctctcctctgagcagccacatagaacattccccacatatccaaagctgcccaggggagccgagagaagggactttgctgtcaggtccaagccctcctgacctccctgagattgatctgccagtgtcctgctgtccctctgggactggccacatggccatcgctgccccttgttgacacctcctttctgtgtgagttgtccccggccaataacaaagctgttccttgaaccagaacaaccagagtgcacttttccttccttagacggaagtagatcctggctagggtttctgcccaggcccttgttcccggcagtgtgactgtttacatggtttggcaataggtttgattctgattgcttcagagtggctggtctattttgtttcctttggtttccttcctccccaaattgtgacaggaaaaacagaccaaaaccaccctaggaaattgctggttgcctgtccccacgtgatgataaatgttgccctcttctggatatcgtttctctaccttacgaccaaacgcccgtcctatagagtgtctgattggatcctctgtcgcgtattctgatggtgcctgctggtttgacgtggagctatcctgtgaaataaaacagcttaacttttctcaaaaatgctcca

SEQ ID NO: 448371 - DNA, 4115 bp, Homo sapiens
  misc_feature (2234)..(2234): n is a, c, g, or t
aacttccctctggaggttgcacactgtactaggaaggccactgattctgttagacagagggagtcgggtttgtaagtgtgtagagacgggggatagtgagaacctaagccccatcgtagcacagtattacatgtggttgggaaaaataaaaatacagtggtgtggaatactccaaaacctagaaatgctgtaggaataaatctgtggtaactatagaggtttaacttatatcattttcaaactatttaattttttcttttcctggttctactaattatactgtgtcagatttggaactaaacaggcaaggaggctttgagtcacatcgttttcattttaaatcaggctgtgatgcactgtggctggtgccgtcttgcatgaaacgcatgagccgtgagcgcccagttcagactggggccagggaggggcagtccttggcactttctgtcctagaggacactgtcagttgagttaatacaagtgacatagcttcccttccctcccccttcacccactccctccagaacatttagtgtagatgaaaatgtggtgatagaaatgggtgcatgatcttcacgtgtgacagccaggcctttgcctcttggccaagtaaagcccttccgggtcgctctccttcgattccattttacctcctcttctgatcacttccagagatgagctgtttctggataatggcacacgggcaaatctgtgtgccctgtgggccgctgttacttaccctctcctgcgagacccaggggcttttccctactgttcccacgcttcctctctctcgaggccactgaagtttggagtcaaaaggcccagagtctgagtcccagccctgagcacttaggagccttctgacttagggtttgtcactccacctcattgagcctgactgttctgctccataaaatagggtaataaaggtcaaacatcagtgagcaagctgtgtacactggaaaacactgaatcaatacaatgcgtttgtgattatcattagtaaggtaagtcttagatcagagccctccagcccttctttttgaaacctcccaatggcatttcagaagtgagcagtggaattttcctgccatcctaataagagccctggattccatcattaacatttcagcccattggatgaagtggtgccctctcctctggtcccccgcgaaaaggtaaatacacccaaagggagggacctagttaagtcactggcacctagataagttaggagggtaaagccactacctcgtctgaaggactggacttgacaccccacagtggaagggagcatcaggagaggaacaaaaaaagggatctcagggagaggccagtgtcaaacttgacctcccttgtttggcctagaatgaacccttctctttagctcctggatatgaaaggccatctgcttggagcacagaaagatattgccattttacagcttaagagagtaaggccttgggctgtgctgtgacctgcccaagatttgacactggctaggagcagaggctgcgtcaggctcttaaagtcatgtgtttgcatgctggatgctatactgtccagccaggacacaagacttctgatttctaccctcaagatactcccagatcctaaatccagtagcctcccaggcaaaatatagcaatctgccacaactgccagatgaaaagcaacaatcagagtagaaaaatctgttgcctgatatacataacaccaatcagaccgtgtggatttttctctgaattgactgattttgtttttttcttactgaaaatggacctgcctttcactgaattttctgagggcagagtcttagctgttttctttaagcaccttttttttttttttccattgggaaatggctgatgagttcacatttagggatgtacacacacagatggcagacgtctccccactcatccagccccagatctgagccttgacgcaggccaagtggaaaaatactttcccgcccccctcccctgttcccacttcctcatctggcactatgcatgtctcactcaccctccacagcactcagtcccatcgacgttcactgaacattggctttctctttctgactcctgcctgttttagtccactatatattgctgtatttgcttaaatgctggaaagtaactgttaaaatgtgaaattgtaatttttaaaaaggctacaattaaattttagccaatgccactcaccaaatctttgcacctagtagatanatcaatgtaaaaacaaatacctaactgtacagtgagtgtgggggaaatgtagtaacctagttagtagtcttcaatataaccaattgtacaaggggaagtggtgtttacctacttgttcatcaccattactgaaagccgtactgatcagttagttgacaacgggcatttttttttctttgcttcatggaatgatttcttttcttaaccttcgacttatcctgaggtcaagccttttgtctttatgtgtaaccgacgttcagtctattctaggaatgaaccagcaagttgttcatttaaaactgaccaaagacaattaattcctggtctagtttcctgggccttgtggctcagctgccactaaagagctttttggataaaattgagaacaagctgtgcttcctaccccactctccccgtccccttttattcccttttcctcttaaagagctgctctgagctgtgggattctatgaaaaattcttgcctttccttgtttcagtgctaacgatttctcacctcgaagcgccttttgaaccccggacagagtgcacaatcggagggaattgcgagcttgggaattagactttggagtcttttctctgaagtcaccaggccaggggtcaggagagagatggattcccaagggatgaaaggtttctattcaatgaagaaatcggagtgggaagagacacagggaaattgagccatattttggctatcggctggaaccagcagttcagagatctgccttataaacatttaaaaccggtttgtggtacacaaagaggaaccagtgtggggaaggggcctttatgtggggctttcttctctgttggagtcccttggagtgccttgttgggtatatttctctgtcattcaggaggcacgaatgtggaggacttctcgtgacctggtcgtgatgtggcattcagtgcatgtccacagctaatggaaaaacacgaggactcgggtaatggttcttcctctcagtctttctattcctaacttttcacacatccagatggttccacactagtgcaaatgcctcactctcctgagaaacccagaaagaagagtggctggctcacaaccatggggttagcccctgctgggctgggagtcggggtggcggccaggaggaaaggcagaaaggggtgagccgaggtgttgcctagctgattttctgctgtgcagagctaatgctgacatttcatgtcaacttccccggttctctggggtctcctctcctctgagcagccacatagaacattccccacatatccaaagctgcccaggggagccgagagaagggactttgctgtcaggtccaagccctcctgacctccctgagattgatctgccagtgtcctgctgtccctctgggactggccacatggccatcgctgccccttgttgacacctcctttctgtgtgagttgtccccggccaataacaaagctgttccttgaaccagaacaaccagagtgcacttttccttccttagacggaagtagatcctggctagggtttctgcccaggcccttgttcccggcagtgtgactgtttacatggtttggcaataggtttgattctgattgcttcagagtggctggtctattttgtttcctttggtttccttcctccccaaattgtgacaggaaaaacagaccaaaaccaccctaggaaattgctggttgcctgtccccacgtgatgataaatgttgccctcttctggatatcgtttctctaccttacgaccaaacgcccgtcctatagagtgtctgattggatcctctgtcgcgtattctgatggtgcctgctggtttgacgtggagctatcctgtgaaataaaacagcttaacttttctcaaaaatgctcca

SEQ ID NO: 448372 - DNA, 410 bp, Homo sapiens
cagcctgagccagaaggctgacagcgaggccagcagtgggccattgctggatgacaaggcctcttccaaaaacgacctccagtcccccacggagcacatctcggattacggctttgggggggtgatgggccggtaggatatgcggattcattttttccctgctggtgtcaatcctgttcatgtctgatttgggagaagcacaagggcagagaggagagaaggagcctactgcagccccttgttccccacaaaatgaaatgggcacactgggcgggctggctggcattggcccaagaaggccaggtatagaaccatccagcctgtgttgcagggaggaggaggaggaaagacatgtgttgggaacccagtgcttttttatttaaaataataataatgtgtgagagagatac

SEQ ID NO: 448373 - DNA, 547 bp, Homo sapiens
actaatttgtgttttccacattaatacagtgagaaggattatttttgttctgcctatatcctagggacttcatatggaagaagtaaagtgacagctgggaaagggactttaggtgtcaacggcagtatgagaatacaggatttttgtcaatctgctgtgtttccccaggttaggaaaaccctggatgccaccatgcagacattacaggacatgctgactgtggaggactttgatgtctccgatgccttccaacacagtcgatcgacagagtccgtcaagtcggctgcctctgagacctacatgagcaagatcaacattgccaagaggagagccaaccagcaggaaacagaaatgttttattttacagtaagtggcatcctgggcccagaaccacactgtcggccaagccactggcagtgacttttcaggagcaacccaagctactgagaaccagagaaaccacatgggtcaattggatctaagactccatcaccatgcttttaaaattaagttgcctggcttggttttctgaaatgcagaaagtgaa

SEQ ID NO: 448374 - DNA, 8239 bp, Homo sapiens
  misc_feature (6358)..(6358): n is a, c, g, or t
acttgggtggcttccgtggtgtggctcatgtgctgcggtcttgtcagtttttagccatggctcgggaaagtgacttggcccctcagtacctccgtttcctcatccattacatcggagcctgtcctctacgtgggactgaaagatccgcacgcagctggtggagcagttcaaatgtctggagcagcaatcagagtcgcgactgcagctgcttcaagacctccaggagtttttccgccggaaagctgagattgagctcgagtactcccgcagcctggagaagctggctgagcgcttctcctccaaaatccgcagctcccgggagcaccagttcaagaaggaccagtacctcctctcgcctgtgaactgttggtatctggttctgcatcagacccggcgggagagccgagaccatgccaccctcaatgacatcttcatgaacaatgtcatcgtccgcctctcccagatcagtgaggatgtcatcagactcttcaaaaagagcaaggagattggcctgcagatgcacgaggagctcctgaaggtgaccaatgagctctacacagtcatgaaaacctaccacatgtaccatgcagagagcatcagtgcggaaagcaagctgaaggaggctgagaagcaggaggagaagcagttcaataagtcaggagacctcagcatgaacctgctccggcacgaggaccggccccagcgccgcagctctgtgaagaagattgagaagatgaaggagaagaggcaggccaagtactctgagaacaagctgaaatgcacaaaggcccggaatgactacttgctcaatctggcagccaccaacgcagctataagcaaatactacatccatgatgtctctgatctgatcgattgctgtgatttgggcttccatgccagcctggcccgcaccttccggacctatctctcagctgaatacaacctggagacctctcgccacgaagggctggatgtcattgagaatgcagtggacaacctggattcccgaagtgacaagcacacagtcatggacatgtgcaatcaagtcttctgccctccactcaagttcgagttccagccccacatgggggatgaggtctgccaggtcagcgctcagcagcccgtccagacagaactgctcatgcgttatcaccagctgcagtccagactggccaccctcaagatagagaatgaggaggttaggaaaaccctggatgccaccatgcagacattacaggacatgctgactgtggaggactttgatgtctccgatgccttccaacacagtcgatcgacagagtccgtcaagtcggctgcctctgagacctacatgagcaagatcaacattgccaagaggagagccaaccagcaggaaacagaaatgttttattttacaaaatttaaagagtatgtgaatggcagtaacctcatcaccaagctgcaggccaagcacgatttactcaagcagaccctgggcgaaggggaaagagcagaatgcggcaccaccagaggaagaagaaatgctcgaaccaggaaccaggattcaggacaagctataccgcttgtagtcgagagctgcatccgttacatcaatttatatggactccagcagcaggggatcttcagagtgccaggatctcaggtggaagtcaatgacatcaaaaattcctttgagagaggtgaagacccccttgtggacgatcaaaatgaacgagatatcaattcagtcgctggtgttttaaaactgtatttccgaggactggaaaacccactctttcctaaggaaaggtttcaagatttgatatctactattaaactggagaacccagccgagagggtgcaccagatccaacaaatcctcgtcacccttccccgcgtggtcattgtggtcatgagatacctcttcgctttcctcaaccacctctcccagtatagcgacgagaacatgatggatccctacaacctggccatctgcttcgggcctaccctcatgcacatccctgatgggcaggaccctgtgtcctgccaggcacacatcaatgaagtcatcaaaaccatcatcatccatcatgaagccatcttccccagcccccgggagctagagggacctgtgtatgaaaaatgcatggctggaggggaagaatattgtgacagcccacacagcgagccaggggccatcgatgaagttgaccatgacaatggcactgagcctcataccagcgatgaagaagtggagcagatcgaggctattgccaagtttgactacatggggcggtccccgcgtgagctatccttcaagaagggggcctcgctgctcctgtaccaccgcgcctcggaggactggtgggagggccggcacaacggcgtggatggactcatcccccatcagtacatagttgtacaggacatggatgatgccttctccgacagcctgagccagaaggctgacagcgaggccagcagtgggccattgctggatgacaaggcctcttccaaaaacgacctccagtcccccacggagcacatctcggattacggctttgggggggtgatgggccgagtgcggttacgatctgatggagcagccatccccagacgccgaagcgggggcgacacacacagcccgccccggggcctgggccccagcatagacacaccaccccgggctgctgcctgccccagcagcccccacaaaatccccctcacccgggggaggatcgagagccctgagaagcggaggatggcgacgttcgggagcgctggcagcatcaactaccctgacaagaaggcgctctccgaagggcactcgatgaggtcgacctgcggttccaccaggcacagcagcctaggggaccacaagtccctggaggccgaggccctggcagaagacatcgagaagaccatgagcacggctctgcacgagttgcgggaactcgagaggcagaacacggtcaagcaggcgccagatgtggtgctggacaccctggagcccctgaagaacccgccaggccccgtcagctcggagcccgccagtccccttcacaccatcgtcatccgcgaccccgatgccgccatgcgccgcagcagcagctcctccaccgagatgatgaccaccttcaagccagccctgtccgcccgcctggctggcgcccagctccgcccgccccccatgcggcccgtgcggccggtggtccagcaccggtccagcagcagcagcagctcgggcgtgggcagcccggccgtgacgcccaccgagaagatgttccccaacagctcagcggacaagtcgggcaccatgtgacctgcaggatgggccgcgccgccgtggcccgctgtggctcaccacggcccagggtggccttggtggcttccacgtgcttcccagtgaccctggccttggagggcagaggtccgtctgggagggtgtgtctgtgcagagctgaggcccgggcgctggctgcagctcacgtccagccatgggaatcccacggacctctcgcgtgtcaacagacgaccagaggagtgctggagctccagcagccccaaccacagcattccctaacatggaggcaaaataccacatggcttctcccgcatatcgtcactggaaacttcctctctcgacattctctctacatacgtatatgtgtgtgtatatcgatgtgtgcatatatacacatgtatacgtatgtacgtgtctgtaggtgtgtgtatatatatatatatttatgcatctatatacatatactagatctggacacacgcatactaagtgtatatagtatctcctttttctttttatgaaacttagatttacctcagatccatgccaccaaacatctcccaccgagttatttggtgggatttgcagggacttttctgggagaacttaaaggcccatagtaactgcgaatgaagcaatataccactaacctgcagaaaaacacaaacaaaaacagactcccactgtctccagaagtcgtggccttccagaacagtctgcccctcaaggaagggtggggcaggcagtacccccaagcaggctgctcccagaggtggggaacccttcataggaaatccccacccccgtccaccccagagaccctgcccttccacccggaggccaaaggccaactgtactcccaaaggcatgggagaaggttggcgagaagacccctgactaccacatccttgtgtttgtgtgtagagacgggggatagtgagaacctaagccccatcgtagcacagtattacatgtggttgggaaaaataaaaatacagtggtgtggaatactccaaaacctagaaatgctgtaggaataaatctgtggtaactatagaggtttaacttatatcattttcaaactatttaattttttcttttcctggttctactaattatactgtgtcagatttggaactaaacaggcaaggaggctttgagtcacatcgttttcattttaaatcaggctgtgatgcactgtggctggtgccgtcttgcatgaaacgcatgagccgtgagcgcccagttcagactggggccagggaggggcagtccttggcactttctgtcctagaggacactgtcagttgagttaatacaagtgacatagcttcccttccctcccccttcacccactccctccagaacatttagtgtagatgaaaatgtggtgatagaaatgggtgcatgatcttcacgtgtgacagccaggcctttgcctcttggccaagtaaagcccttccgggtcgctctccttcgattccattttacctcctcttctgatcacttccagagatgagctgtttctggataatggcacacgggcaaatctgtgtgccctgtgggccgctgttacttaccctctcctgcgagacccaggggcttttccctactgttcccacgcttcctctctctcgaggccactgaagtttggagtcaaaaggcccagagtctgagtcccagccctgagcacttaggagccttctgacttagggtttgtcactccacctcattgagcctgactgttctgctccataaaatagggtaataaaggtcaaacatcagtgagcaagctgtgtacactggaaaacactgaatcaatacaatgcgtttgtgattatcattagtaaggtaagtcttagatcagagccctccagcccttctttttgaaacctcccaatggcatttcagaagtgagcagtggaattttcctgccatcctaataagagccctggattccatcattaacatttcagcccattggatgaagtggtgccctctcctctggtcccccgcgaaaaggtaaatacacccaaagggagggacctagttaagtcactggcacctagataagttaggagggtaaagccactacctcgtctgaaggactggacttgacaccccacagtggaagggagcatcaggagaggaacaaaaaaagggatctcagggagaggccagtgtcaaacttgacctcccttgtttggcctagaatgaacccttctctttagctcctggatatgaaaggccatctgcttggagcacagaaagatattgccattttacagcttaagagagtaaggccttgggctgtgctgtgacctgcccaagatttgacactggctaggagcagaggctgcgtcaggctcttaaagtcatgtgtttgcatgctggatgctatactgtccagccaggacacaagacttctgatttctaccctcaagatactcccagatcctaaatccagtagcctcccaggcaaaatatagcaatctgccacaactgccagatgaaaagcaacaatcagagtagaaaaatctgttgcctgatatacataacaccaatcagaccgtgtggatttttctctgaattgactgattttgtttttttcttactgaaaatggacctgcctttcactgaattttctgagggcagagtcttagctgttttctttaagcaccttttttttttttttccattgggaaatggctgatgagttcacatttagggatgtacacacacagatggcagacgtctccccactcatccagccccagatctgagccttgacgcaggccaagtggaaaaatactttcccgcccccctcccctgttcccacttcctcatctggcactatgcatgtctcactcaccctccacagcactcagtcccatcgacgttcactgaacattggctttctctttctgactcctgcctgttttagtccactatatattgctgtatttgcttaaatgctggaaagtaactgttaaaatgtgaaattgtaatttttaaaaaggctacaattaaattttagccaatgccactcaccaaatctttgcacctagtagatanatcaatgtaaaaacaaatacctaactgtacagtgagtgtgggggaaatgtagtaacctagttagtagtcttcaatataaccaattgtacaaggggaagtggtgtttacctacttgttcatcaccattactgaaagccgtactgatcagttagttgacaacgggcatttttttttctttgcttcatggaatgatttcttttcttaaccttcgacttatcctgaggtcaagccttttgtctttatgtgtaaccgacgttcagtctattctaggaatgaaccagcaagttgttcatttaaaactgaccaaagacaattaattcctggtctagtttcctgggccttgtggctcagctgccactaaagagctttttggataaaattgagaacaagctgtgcttcctaccccactctccccgtccccttttattcccttttcctcttaaagagctgctctgagctgtgggattctatgaaaaattcttgcctttccttgtttcagtgctaacgatttctcacctcgaagcgccttttgaaccccggacagagtgcacaatcggagggaattgcgagcttgggaattagactttggagtcttttctctgaagtcaccaggccaggggtcaggagagagatggattcccaagggatgaaaggtttctattcaatgaagaaatcggagtgggaagagacacagggaaattgagccatattttggctatcggctggaaccagcagttcagagatctgccttataaacatttaaaaccggtttgtggtacacaaagaggaaccagtgtggggaaggggcctttatgtggggctttcttctctgttggagtcccttggagtgccttgttgggtatatttctctgtcattcaggaggcacgaatgtggaggacttctcgtgacctggtcgtgatgtggcattcagtgcatgtccacagctaatggaaaaacacgaggactcgggtaatggttcttcctctcagtctttctattcctaacttttcacacatccagatggttccacactagtgcaaatgcctcactctcctgagaaacccagaaagaagagtggctggctcacaaccatggggttagcccctgctgggctgggagtcggggtggcggccaggaggaaaggcagaaaggggtgagccgaggtgttgcctagctgattttctgctgtgcagagctaatgctgacatttcatgtcaacttccccggttctctggggtctcctctcctctgagcagccacatagaacattccccacatatccaaagctgcccaggggagccgagagaagggactttgctgtcaggtccaagccctcctgacctccctgagattgatctgccagtgtcctgctgtccctctgggactggccacatggccatcgctgccccttgttgacacctcctttctgtgtgagttgtccccggccaataacaaagctgttccttgaaccagaacaaccagagtgcacttttccttccttagacggaagtagatcctggctagggtttctgcccaggcccttgttcccggcagtgtgactgtttacatggtttggcaataggtttgattctgattgcttcagagtggctggtctattttgtttcctttggtttccttcctccccaaattgtgacaggaaaaacagaccaaaaccaccctaggaaattgctggttgcctgtccccacgtgatgataaatgttgccctcttctggatatcgtttctctaccttacgaccaaacgcccgtcctatagagtgtctgattggatcctctgtcgcgtattctgatggtgcctgctggtttgacgtggagctatcctgtgaaataaaacagcttaacttttctcaaaaatgctcca

SEQ ID NO: 448375 - DNA, 2221 bp, Homo sapiens
aaaaaaaaaaaaaaaaaaaaaattggtcttaaaggcatccatttctgggaatgaagccatgttcgctgctaacacttttggatgttgtgaggccacgtggagtgtgtgagagactaggttttatggatggtctggttcaggtaccaggtctgctggaaggttcctgttcggataagctggtagctacctagctctgagcctgccttcaagaacacctgtgttcatcctctgattctctgtgtgtacctcttgtggcgtttcctctcccgggtgtgaacatcctaaccgttattgtgcaaacccaagaacgtcagatcccaaagcacaacaacctggatggactttgggaacatctaagcaatgtaagagagaggtgcactgagagtacgtcttggtcccctccaccctgagagcatctgacggtcctcagtactgaactcccggaagctgctctgagcccggtgacctcatctgggccaggtgtggtgcctgagctgaatgctcaggtgcttacagtgttgcaatccctaagagagtagagtctggaggagaaaccgtgaaaaagaccttacacaccaccaagaacttccgaatgggcgtgaatccaccgtttcttctctttgcaaaaagaaccaccacagctgctcaaagaacacagtgaactcatcactttggttcatcaaaaaatcatcgcccatgcgttattcctgagtgcattttcttacaactttttgactgcttccttttcttcttctcttaagagttgtgggcttaagaatgggatagagtcataatggcaacctccaagccctctcaattcttgattaagaacacaggtagacatgaatcccaattgtctattgctatcttatttatatgattcgggaaaatacagcatgtaaaaatattgctgaggagcctcagtgattgggtacaagaagcaagagtacagaaattatttttgccaaatttattttgtaaatatgagggtctgtacctaaatttaaaaaaaaaaacacgtagaactaggtattttgttctcttcttagtaaatttgtagtggttgtatactacactagctgcaattttcacatttttctaattcagaaaggtttttcttatattaggggaaaaagtatttattttaatatataaaatcactctgaaaatcactctcataaaaaatggagcgcatgtaaatttttatcaaagaaaaataaacaggtgaatggggatagtgattttcttttttcagcacagtctacctcagtgtattgttaagatgtgattcaatcatggacatctttgagatttcagaattctacctggaaccggtctgaatcagggaacgtgtgtatcagctgattcgaatgccagggaccagtaagaattttgagggagggagttgggatggagaaggtatggcctttatgcgagcatagatccttttcttcctggctggtaatattcttctctgaatttaatcttcctttaaaaaaaaatcctccatctattgtcactatgttccccaaacataaactaagttccaggctgtcatgatgtatctgatatatggggtaacccagcaaggtgtaccttcctttggtgagagatggctgccggggcaaagacgggctttgattcagagcaagcattcccacctgttccatggaatccccctgaagtgagcacaaaggtgccctgggctccctgatggtttatgcccactcctttcaggctggtgatgcaccttacacacaaacacctaatgcaatgtctttttaaattctccaagtgggatgggagcatgtgagggaaattccaatccaaaacccattaatgtgctgaacgctttttttttttttttttttttttgcaacaacaccttggacctctgtgttggggtttgactgacctcaagctgatattattggaccttgtgcagctttgataacccatgtgagagtctaggcaggaccagtggggcccaaatcttgctgctcttgtacttttaggcactgcccttgcagactcacctttctccacctgccctggagaaaggtagggtgtgctgggcctgccccttgcaaatgggattcaccagtttcatttatttgactctactgccacagtgaaaagagcaaacagctattgggttgcaaacctcctttgacattaggaaatgttgactttgtaacaataaaactttggtcctagaaag

SEQ ID NO: 448376 - DNA, 724 bp, Homo sapiens
ccaccagctttctttgcacactgtttctcatgatggacccatttcctttctccctgacagacccctctgtgcccctggatccaatctcagtgtctaactcatcatcccagattattctgaagtggaaaccaccctccgaccccaatggcaacatcacccactacctggttttctgggagaggcaggcggaagacagtgagctgttcgagctggattattgcctcaaaggtgagtgcaggcagctgtgctaggatcggtggggtttgcacacgtgtgtctgatgcactttgcttcacctctagggaagcagctatctcttcctgtgtctcagtgtcggaaggcacacacacacacactccattctatctcatatgaaaacacacatacatgtttttatctatttatttatttattttattttttatttatttacttttttgagatggagtttcactcttgttgcccaggctggagtgcaatgacgcgaccttggctcatcgcaacctccacctctcgggttcaagtgattctcctgcatcagcctcccgagtagctgggattacaggcacgcgccaccacgcccggctaatttggtatttttagtagggacggggtttctccatgttggtcagcctggtctcaaactcccgacctcaggtgacctcaggtgatccacccaccttggcctcccaaagtgctgggattacaggcatgagccaccaca

SEQ ID NO: 448377 - DNA, 326 bp, Homo sapiens
ggagaacccaggggtttctctggctttttgcatgcggcgggcagctgtgctggagagcagatgcttcaccaattcagaaatccaatgccttcactctgaaatgaaatctgggcatgaatgtggggagaaaccttcactaacacactcttgctaaaacatagaatcatgggagtgcttcctgggtaccccctccctgccttctgtttgcagccactgtttgctcactaaacatctctgcacctcccgcgtgcatttgcagaggtgggtgggggtccccggagtctgagctccccgcggctgggtgccccgacccagcagctcctaca

SEQ ID NO: 448378 - DNA, 276 bp, Homo sapiens
tttgctcgactctgaggatcccgtaagatctgtgggcaggatgcgtgtggttccaacagttggacggtggtagacattgacccacccctgaggtccaacgaccccaaatcacagaaccacccagggtggctgatgcggggtctcaagccctggacccagtatgccatctttgtgaagaccctggtcaccttttcggatgaacgccggacctatggggccaagagtgacatcatttatgtccagacagatgccaccagtgagtgtgtcttgggaatg

SEQ ID NO: 448379 - DNA, 9032 bp, Homo sapiens
  misc_feature (1047)..(1047): n is a, c, g, or t
  misc_feature (1776)..(1776): n is a, c, g, or t
ggggggctgcgcggccgggtcggtgcgcacacgagaaggacgcgcggcccccagcgctcttgggggccgcctcggagcatgacccccgcgggccagcgccgcgcgcctgatccgaggagaccccgcgctcccgcagccatgggcaccgggggccggcggggggcggcggccgcgccgctgctggtggcggtggccgcgctgctactgggcgccgcgggccacctgtaccccggagaggtgtgtcccggcatggatatccggaacaacctcactaggttgcatgagctggagaattgctctgtcatcgaaggacacttgcagatactcttgatgttcaaaacgaggcccgaagatttccgagacctcagtttccccaaactcatcatgatcactgattacttgctgctcttccgggtctatgggctcgagagcctgaaggacctgttccccaacctcacggtcatccggggatcacgactgttctttaactacgcgctggtcatcttcgagatggttcacctcaaggaactcggcctctacaacctgatgaacatcacccggggttctgtccgcatcgagaagaacaatgagctctgttacttggccactatcgactggtcccgtatcctggattccgtggaggataattacatcgtgttgaacaaagatgacaacgaggagtgtggagacatctgtccgggtaccgcgaagggcaagaccaactgccccgccaccgtcatcaacgggcagtttgtcgaacgatgttggactcatagtcactgccagaaagtttgcccgaccatctgtaagtcacacggctgcaccgccgaaggcctctgttgccacagcgagtgcctgggcaactgttctcagcccgacgaccccaccaagtgcgtggcctgccgcaacttctacctggacggcaggtgtgtggagacctgcccgcccccgtactaccacttccaggactggcgctgtgtgaacttcagcttctgccaggacctgcaccacaaatgcaagaactcgcggaggcagggctgccaccantacgtcattcacaacaacaagtgcatccctgagtgtccctccgggtacacgatgaattccagcaacttgctgtgcaccccatgcctgggtccctgtcccaaggtgtgccacctcctagaaggcgagaagaccatcgactcggtgacgtctgcccaggagctccgaggatgcaccgtcatcaacgggagtctgatcatcaacattcgaggaggcaacaatctggcagctgagctagaagccaacctcggcctcattgaagaaatttcagggtatctaaaaatccgccgatcctacgctctggtgtcactttccttcttccggaagttacgtctgattcgaggagagaccttggaaattgggaactactccttctatgccttggacaaccagaacctaaggcagctctgggactggagcaaacacaacctcaccatcactcaggggaaactcttcttccactataaccccaaactctgcttgtcagaaatccacaagatggaagaagtttcaggaaccaaggggcgccaggagagaaacgacattgccctgaagaccaatggggaccaggcatcctgtgaaaatgagttacttaaattttcttacattcggacatcttttgacaagatcttgctgagatgggagccgtactggccccccgacttccgagacctcttggggttcatgctgttctacaaagaggccccttatcagaatgtgacggagttcgangggcaggatgcgtgtggttccaacagttggacggtggtagacattgacccacccctgaggtccaacgaccccaaatcacagaaccacccagggtggctgatgcggggtctcaagccctggacccagtatgccatctttgtgaagaccctggtcaccttttcggatgaacgccggacctatggggccaagagtgacatcatttatgtccagacagatgccaccaacccctctgtgcccctggatccaatctcagtgtctaactcatcatcccagattattctgaagtggaaaccaccctccgaccccaatggcaacatcacccactacctggttttctgggagaggcaggcggaagacagtgagctgttcgagctggattattgcctcaaagggctgaagctgccctcgaggacctggtctccaccattcgagtctgaagattctcagaagcacaaccagagtgagtatgaggattcggccggcgaatgctgctcctgtccaaagacagactctcagatcctgaaggagctggaggagtcctcgtttaggaagacgtttgaggattacctgcacaacgtggttttcgtccccagaaaaacctcttcaggcactggtgccgaggaccctaggccatctcggaaacgcaggtcccttggcgatgttgggaatgtgacggtggccgtgcccacggtggcagctttccccaacacttcctcgaccagcgtgcccacgagtccggaggagcacaggccttttgagaaggtggtgaacaaggagtcgctggtcatctccggcttgcgacacttcacgggctatcgcatcgagctgcaggcttgcaaccaggacacccctgaggaacggtgcagtgtggcagcctacgtcagtgcgaggaccatgcctgaagccaaggctgatgacattgttggccctgtgacgcatgaaatctttgagaacaacgtcgtccacttgatgtggcaggagccgaaggagcccaatggtctgatcgtgctgtatgaagtgagttatcggcgatatggtgatgaggagctgcatctctgcgtctcccgcaagcacttcgctctggaacggggctgcaggctgcgtgggctgtcaccggggaactacagcgtgcgaatccgggccacctcccttgcgggcaacggctcttggacggaacccacctatttctacgtgacagactatttagacgtcccgtcaaatattgcaaaaattatcatcggccccctcatctttgtctttctcttcagtgttgtgattggaagtatttatctattcctgagaaagaggcagccagatgggccgctgggaccgctttacgcttcttcaaaccctgagtatctcagtgccagtgatgtgtttccatgctctgtgtacgtgccggacgagtgggaggtgtctcgagagaagatcaccctccttcgagagctggggcagggctccttcggcatggtgtatgagggcaatgccagggacatcatcaagggtgaggcagagacccgcgtggcggtgaagacggtcaacgagtcagccagtctccgagagcggattgagttcctcaatgaggcctcggtcatgaagggcttcacctgccatcacgtggtgcgcctcctgggagtggtgtccaagggccagcccacgctggtggtgatggagctgatggctcacggagacctgaagagctacctccgttctctgcggccagaggctgagaataatcctggccgccctccccctacccttcaagagatgattcagatggcggcagagattgctgacgggatggcctacctgaacgccaagaagtttgtgcatcgggacctggcagcgagaaactgcatggtcgcccatgattttactgtcaaaattggagactttggaatgaccagagacatctatgaaacggattactaccggaaagggggcaagggtctgctccctgtacggtggatggcaccggagtccctgaaggatggggtcttcaccacttcttctgacatgtggtcctttggcgtggtcctttgggaaatcaccagcttggcagaacagccttaccaaggcctgtctaatgaacaggtgttgaaatttgtcatggatggagggtatctggatcaacccgacaactgtccagagagagtcactgacctcatgcgcatgtgctggcaattcaaccccaagatgaggccaaccttcctggagattgtcaacctgctcaaggacgacctgcaccccagctttccagaggtgtcgttcttccacagcgaggagaacaaggctcccgagagtgaggagctggagatggagtttgaggacatggagaatgtgcccctggaccgttcctcgcactgtcagagggaggaggcggggggccgggatggagggtcctcgctgggtttcaagcggagctacgaggaacacatcccttacacacacatgaacggaggcaagaaaaacgggcggattctgaccttgcctcggtccaatccttcctaacagtgcctaccgtggcgggggcgggcaggggttcccattttcgctttcctctggtttgaaagcctctggaaaactcaggattctcacgactctaccatgtccaatggagttcagagatcgttcctatacatttctgttcatcttaaggtggactcgtttggttaccaatttaactagtcctgcagaggatttaactgtgaacctggagggcaaggggtttccacagttgctgctcctttggggcaacgacggtttcaaaccaggattttgtgttttttcgttccccccacccgcccccagcagatggaaagaaagcacctgtttttacaaattctttttttttttttttttttttgctggtgtctgagcttcagtataaaagacaaaacttcctgtttgtggaacaaaagttcgaaagaaaaaacaaaacaaaaacacccagccctgttccaggagaatttcaagttttacaggttgagcttcaagatggtttttttggttttttttttttctctcatccaggctgaaggattttttttttctttacaaaatgagttcctcaaattgaccaatagctgctgctttcatattttggataagggtctgtggtcccggcgtgtgctcacgtgtgtatgcacgtgtgtgtgtccattagacacggctgatgtgtgtgcaaagtatccatgcggagttgatgctttgggaattggctcatgaaggttcttctcaagggtgcgagctcatccccctctctccttccttcttattgactgggagactgtgctctcgacagattcttcttgtgtcagaagtctagcctcaggtttctaccctcccttcacattggtggccaagggaggagcatttcatttggagtgattatgaatcttttcaagaccaaaccaagctaggacattaaaaaaaaaaaaagaaaaagaaagaaaaaacaaaatggaaaaaggaaaaaaaaaaagaactgagatgacagagttttgagaatatatttgtaccatatttaatttttaaagtctctggtattagcctcataagttattgactattccccggggttggcggggagtggggacatgagttggtctgcctgttgtggggccgggaaggggagggagtcaggcacaagtggcctctttgtttggtcttaaaggcatccatttctgggaatgaagccatgttcgctgctaacacttttggatgttgtgaggccacgtggagtgtgtgagagactaggttttatggatggtctggttcaggtaccaggtctgctggaaggttcctgttcggataagctggtagctacctagctctgagcctgccttcaagaacacctgtgttcatcctctgattctctgtgtgtacctcttgtggcgtttcctctcccgggtgtgaacatcctaaccgttattgtgcaaacccaagaacgtcagatcccaaagcacaacaacctggatggactttgggaacatctaagcaatgtaagagagaggtgcactgagagtacgtcttggtcccctccaccctgagagcatctgacggtcctcagtactgaactcccggaagctgctctgagcccggtgacctcatctgggccaggtgtggtgcctgagctgaatgctcaggtgcttacagtgttgcaatccctaagagagtagagtctggaggagaaaccgtgaaaaagaccttacacaccaccaagaacttccgaatgggcgtgaatccaccgtttcttctctttgcaaaaagaaccaccacagctgctcaaagaacacagtgaactcatcactttggttcatcaaaaaatcatcgcccatgcgttattcctgagtgcattttcttacaactttttgactgcttccttttcttcttctcttaagagttgtgggcttaagaatgggatagagtcataatggcaacctccaagccctctcaattcttgattaagaacacaggtagacatgaatcccaattgtctattgctatcttatttatatgattcgggaaaatacagcatgtaaaaatattgctgaggagcctcagtgattgggtacaagaagcaagagtacagaaattatttttgccaaatttattttgtaaatatgagggtctgtacctaaatttaaaaaaaaaaacacgtagaactaggtattttgttctcttcttagtaaatttgtagtggttgtatactacactagctgcaattttcacatttttctaattcagaaaggtttttcttatattaggggaaaaagtatttattttaatatataaaatcactctgaaaatcactctcataaaaaatggagcgcatgtaaatttttatcaaagaaaaataaacaggtgaatggggatagtgattttcttttttcagcacagtctacctcagtgtattgttaagatgtgattcaatcatggacatctttgagatttcagaattctacctggaaccggtctgaatcagggaacgtgtgtatcagctgattcgaatgccagggaccagtaagaattttgagggagggagttgggatggagaaggtatggcctttatgcgagcatagatccttttcttcctggctggtaatattcttctctgaatttaatcttcctttaaaaaaaaatcctccatctattgtcactatgttccccaaacataaactaagttccaggctgtcatgatgtatctgatatatggggtaacccagcaaggtgtaccttcctttggtgagagatggctgccggggcaaagacgggctttgattcagagcaagcattcccacctgttccatggaatccccctgaagtgagcacaaaggtgccctgggctccctgatggtttatgcccactcctttcaggctggtgatgcaccttacacacaaacacctaatgcaatgtctttttaaattctccaagtgggatgggagcatgtgagggaaattccaatccaaaacccattaatgtgctgaacgctttttttttttttttttttttttgcaacaacaccttggacctctgtgttggggtttgactgacctcaagctgatattattggaccttgtgcagctttgataacccatgtgagagtctaggcaggaccagtggggcccaaatcttgctgctcttgtacttttaggcactgcccttgcagactcacctttctccacctgccctggagaaaggtagggtgtgctgggcctgccccttgcaaatgggattcaccagtttcatttatttgactctactgccacagtgaaaagagcaaacagctattgggttgcaaacctcctttgacattaggaaatgttgactttgtaacaataaaactttggtcctagaaagacacggttgtcctgggagtttgtagtgttaagttgcaacaacaacaacaaaaagcaacaaaaccagcttaggataacactttttgttgcttgttcttaaagatgtctcactatgattaaaacccttttcattaatgtagtgaaagccacacaggagttccttcttccaggaggagaataccaagcacatcactttctctctgcatcagtgatgtcaaatacgcatcagtgagaaagagaagcactgctgcttgtctggatataggctgaggatgattgagagaagctgtgggaactgacacaagggtctgcataggtcatcctgtgaccctggggactatgttaccaactgacagacagatctttcactgtatcctagcagggcaggtagtccaccaagaaatgtgcttattggattgggaggtgtttatttgtagtctgctgtaacacgtgtgaaagagcaggagcgtcatcagcatatgacttgcgctggtcatccggtaaatggatgtgctgtagtcccagtgctaatcatttctctccttcacagtgggtggaagtttagggttaaatgtcctttgaatgtcacctggtgagtccttgacaccttaggctcttcagaaacaatggttttgttgaggatggggaacagggaatgccgattttatatacatggtacacagagaggggtgtcacttcagaaaatcttccagcatgttcttcagaatattaatttatatgcgaggtgaggttgggaatgaaaagaacaggtcagcacttttttttttcctagaacatacaaaagaacatggtggactttcagggagtgcaatggaaggtgaatatttccttaagggtccccgagaaatgggagtgaggggaggggacacaatggctttttgagcttacttttaccttctgatactagtcaaggtccagaaccagccaccagccaaatttctatctgggtgcgggccactgaaaatccttgttaaaaaccagatcacaaatctggggctcttggtcccattggagaaggaaggaagagcctcaaaataagtgtgcacccatgcacatattcaggaacagcttgtttagtctttacactttgcctgaaagttgcttctcctcgtccctttgtgtgcctgggtggcctcggccctgtgcgttggcaacgcaggatcaaatgtgctgcagcttttgcagaaaacaactcagaaacacaaaaccccccaacagctcaattattattttttcaatgttttcctacaagagccaagtagcaccatgtacagaagacgcctttttttttggaatattgaaatcgttctgcatgtaaaatatgggataatgacctgtttatattaaaattctgattaaattatctgagaata

SEQ ID NO: 448380 - DNA, 9050 bp, Homo sapiens
  misc_feature (1047)..(1047): n is a, c, g, or t
  misc_feature (1776)..(1776): n is a, c, g, or t
ggggggctgcgcggccgggtcggtgcgcacacgagaaggacgcgcggcccccagcgctcttgggggccgcctcggagcatgacccccgcgggccagcgccgcgcgcctgatccgaggagaccccgcgctcccgcagccatgggcaccgggggccggcggggggcggcggccgcgccgctgctggtggcggtggccgcgctgctactgggcgccgcgggccacctgtaccccggagaggtgtgtcccggcatggatatccggaacaacctcactaggttgcatgagctggagaattgctctgtcatcgaaggacacttgcagatactcttgatgttcaaaacgaggcccgaagatttccgagacctcagtttccccaaactcatcatgatcactgattacttgctgctcttccgggtctatgggctcgagagcctgaaggacctgttccccaacctcacggtcatccggggatcacgactgttctttaactacgcgctggtcatcttcgagatggttcacctcaaggaactcggcctctacaacctgatgaacatcacccggggttctgtccgcatcgagaagaacaatgagctctgttacttggccactatcgactggtcccgtatcctggattccgtggaggataattacatcgtgttgaacaaagatgacaacgaggagtgtggagacatctgtccgggtaccgcgaagggcaagaccaactgccccgccaccgtcatcaacgggcagtttgtcgaacgatgttggactcatagtcactgccagaaagtttgcccgaccatctgtaagtcacacggctgcaccgccgaaggcctctgttgccacagcgagtgcctgggcaactgttctcagcccgacgaccccaccaagtgcgtggcctgccgcaacttctacctggacggcaggtgtgtggagacctgcccgcccccgtactaccacttccaggactggcgctgtgtgaacttcagcttctgccaggacctgcaccacaaatgcaagaactcgcggaggcagggctgccaccantacgtcattcacaacaacaagtgcatccctgagtgtccctccgggtacacgatgaattccagcaacttgctgtgcaccccatgcctgggtccctgtcccaaggtgtgccacctcctagaaggcgagaagaccatcgactcggtgacgtctgcccaggagctccgaggatgcaccgtcatcaacgggagtctgatcatcaacattcgaggaggcaacaatctggcagctgagctagaagccaacctcggcctcattgaagaaatttcagggtatctaaaaatccgccgatcctacgctctggtgtcactttccttcttccggaagttacgtctgattcgaggagagaccttggaaattgggaactactccttctatgccttggacaaccagaacctaaggcagctctgggactggagcaaacacaacctcaccatcactcaggggaaactcttcttccactataaccccaaactctgcttgtcagaaatccacaagatggaagaagtttcaggaaccaaggggcgccaggagagaaacgacattgccctgaagaccaatggggaccaggcatcctgtgaaaatgagttacttaaattttcttacattcggacatcttttgacaagatcttgctgagatgggagccgtactggccccccgacttccgagacctcttggggttcatgctgttctacaaagaggccccttatcagaatgtgacggagttcgangggcaggatgcgtgtggttccaacagttggacggtggtagacattgacccacccctgaggtccaacgaccccaaatcacagaaccacccagggtggctgatgcggggtctcaagccctggacccagtatgccatctttgtgaagaccctggtcaccttttcggatgaacgccggacctatggggccaagagtgacatcatttatgtccagacagatgccaccaacccctctgtgcccctggatccaatctcagtgtctaactcatcatcccagattattctgaagtggaaaccaccctccgaccccaatggcaacatcacccactacctggttttctgggagaggcaggcggaagacagtgagctgttcgagctggattattgcctcaaagggctgaagctgccctcgaggacctggtctccaccattcgagtctgaagattctcagaagcacaaccagagtgagtatgaggattcggccggcgaatgctgctcctgtccaaagacagactctcagatcctgaaggagctggaggagtcctcgtttaggaagacgtttgaggattacctgcacaacgtggttttcgtccccaggccatctcggaaacgcaggtcccttggcgatgttgggaatgtgacggtggccgtgcccacggtggcagctttccccaacacttcctcgaccagcgtgcccacgagtccggaggagcacaggccttttgagaaggtggtgaacaaggagtcgctggtcatctccggcttgcgacacttcacgggctatcgcatcgagctgcaggcttgcaaccaggacacccctgaggaacggtgcagtgtggcagcctacgtcagtgcgaggaccatgcctgaagccaaggctgatgacattgttggccctgtgacgcatgaaatctttgagaacaacgtcgtccacttgatgtggcaggagccgaaggagcccaatggtctgatcgtgctgtatgaagtgagttatcggcgatatggtgatgaggagctgcatctctgcgtctcccgcaagcacttcgctctggaacggggctgcaggctgcgtgggctgtcaccggggaactacagcgtgcgaatccgggccacctcccttgcgggcaacggctcttggacggaacccacctatttctacgtgacagactatttagacgtcccgtcaaatattgcaaaaattatcatcggccccctcatctttgtctttctcttcagtgttgtgattggaagtatttatctattcctgagaaagaggcagccagatgggccgctgggaccgctttacgcttcttcaaaccctgagtatctcagtgccagtgatgtgtttccatgctctgtgtacgtgccggacgagtgggaggtgtctcgagagaagatcaccctccttcgagagctggggcagggctccttcggcatggtgtatgagggcaatgccagggacatcatcaagggtgaggcagagacccgcgtggcggtgaagacggtcaacgagtcagccagtctccgagagcggattgagttcctcaatgaggcctcggtcatgaagggcttcacctgccatcacgtggtgcgcctcctgggagtggtgtccaagggccagcccacgctggtggtgatggagctgatggctcacggagacctgaagagctacctccgttctctgcggccagaggctgagaataatcctggccgccctccccctacccttcaagagatgattcagatggcggcagagattgctgacgggatggcctacctgaacgccaagaagtttgtgcatcgggacctggcagcgagaaactgcatggtcgcccatgattttactgtcaaaattggagactttggaatgaccagagacatctatgaaacggattactaccggaaagggggcaagggtctgctccctgtacggtggatggcaccggagtccctgaaggatggggtcttcaccacttcttctgacatgtggtcctttggcgtggtcctttgggaaatcaccagcttggcagaacagccttaccaaggcctgtctaatgaacaggtgttgaaatttgtcatggatggagggtatctggatcaacccgacaactgtccagagagagtcactgacctcatgcgcatgtgctggcaattcaaccccaagatgaggccaaccttcctggagattgtcaacctgctcaaggacgacctgcaccccagctttccagaggtgtcgttcttccacagcgaggagaacaaggctcccgagagtgaggagctggagatggagtttgaggacatggagaatgtgcccctggaccgttcctcgcactgtcagagggaggaggcggggggccgggatggagggtcctcgctgggtttcaagcggagctacgaggaacacatcccttacacacacatgaacggaggcaagaaaaacgggcggattctgaccttgcctcggtccaatccttcctaacagtgcctaccgtggcgggggcgggcaggggttcccattttcgctttcctctggtttgaaagcctctggaaaactcaggattctcacgactctaccatgtccaatggagttcagagatcgttcctatacatttctgttcatcttaaggtggactcgtttggttaccaatttaactagtcctgcagaggatttaactgtgaacctggagggcaaggggtttccacagttgctgctcctttggggcaacgacggtttcaaaccaggattttgtgttttttcgttccccccacccgcccccagcagatggaaagaaagcacctgtttttacaaattctttttttttttttttttttttgctggtgtctgagcttcagtataaaagacaaaacttcctgtttgtggaacaaaagttcgaaagaaaaaacaaaacaaaaacacccagccctgttccaggagaatttcaagttttacaggttgagcttcaagatggtttttttggttttttttttttctctcatccaggctgaaggattttttttttctttacaaaatgagttcctcaaattgaccaatagctgctgctttcatattttggataagggtctgtggtcccggcgtgtgctcacgtgtgtatgcacgtgtgtgtgtccattagacacggctgatgtgtgtgcaaagtatccatgcggagttgatgctttgggaattggctcatgaaggttcttctcaagggtgcgagctcatccccctctctccttccttcttattgactgggagactgtgctctcgacagattcttcttgtgtcagaagtctagcctcaggtttctaccctcccttcacattggtggccaagggaggagcatttcatttggagtgattatgaatcttttcaagaccaaaccaagctaggacattaaaaaaaaaaaaagaaaaagaaagaaaaaacaaaatggaaaaaggaaaaaaaaaaagaactgagatgacagagttttgagaatatatttgtaccatatttaatttttaaagtctctggtattagcctcataagttattgactattccccggggttggcggggagtggggacatgagttggtctgcctgttgtggggccgggaaggggagggagtcaggcacaagtggcctctttgtttggtcttaaaggcatccatttctgggaatgaagccatgttcgctgctaacacttttggatgttgtgaggccacgtggagtgtgtgagagactaggttttatggatggtctggttcaggtaccaggtctgctggaaggttcctgttcggataagctggtagctacctagctctgagcctgccttcaagaacacctgtgttcatcctctgattctctgtgtgtacctcttgtggcgtttcctctcccgggtgtgaacatcctaaccgttattgtgcaaacccaagaacgtcagatcccaaagcacaacaacctggatggactttgggaacatctaagcaatgtaagagagaggtgcactgagagtacgtcttggtcccctccaccctgagagcatctgacggtcctcagtactgaactcccggaagctgctctgagcccggtgacctcatctgggccaggtgtggtgcctgagctgaatgctcaggtgcttacagtgttgcaatccctaagagagtagagtctggaggagaaaccgtgaaaaagaccttacacaccaccaagaacttccgaatgggcgtgaatccaccgtttcttctctttgcaaaaagaaccaccacagctgctcaaagaacacagtgaactcatcactttggttcatcaaaaaatcatcgcccatgcgttattcctgagtgcattttcttacaactttttgactgcttccttttcttcttctcttaagagttgtgggcttaagaatgggatagagtcataatggcaacctccaagccctctcaattcttgattaagaacacaggtagacatgaatcccaattgtctattgctatcttatttatatgattcgggaaaatacagcatgtaaaaatattgctgaggagcctcagtgattgggtacaagaagcaagagtacagaaattatttttgccaaatttattttgtaaatatgagggtctgtacctaaatttaaaaaaaaaaacacgtagaactaggtattttgttctcttcttagtaaatttgtagtggttgtatactacactagctgcaattttcacatttttctaattcagaaaggtttttcttatattaggggaaaaagtatttattttaatatataaaatcactctgaaaatcactctcataaaaaatggagcgcatgtaaatttttatcaaagaaaaataaacaggtgaatggggatagtgattttcttttttcagcacagtctacctcagtgtattgttaagatgtgattcaatcatggacatctttgagatttcagaattctacctggaaccggtctgaatcagggaacgtgtgtatcagctgattcgaatgccagggaccagtaagaattttgagggagggagttgggatggagaaggtatggcctttatgcgagcatagatccttttcttcctggctggtaatattcttctctgaatttaatcttcctttaaaaaaaaatcctccatctattgtcactatgttccccaaacataaactaagttccaggctgtcatgatgtatctgatatatggggtaacccagcaaggtgtaccttcctttggtgagagatggctgccggggcaaagacgggctttgattcagagcaagcattcccacctgttccatggaatccccctgaagtgagcacaaaggtgccctgggctccctgatggtttatgcccactcctttcaggctggtgatgcaccttacacacaaacacctaatgcaatgtctttttaaattctccaagtgggatgggagcatgtgagggaaattccaatccaaaacccattaatgtgctgaacgctttttttttttttttttttttttgcaacaacaccttggacctctgtgttggggtttgactgacctcaagctgatattattggaccttgtgcagctttgataacccatgtgagagtctaggcaggaccagtggggcccaaatcttgctgctcttgtacttttaggcactgcccttgcagactcacctttctccacctgccctggagaaaggtagggtgtgctgggcctgccccttgcaaatgggattcaccagtttcatttatttgactctactgccacagtgaaaagagcaaacagctattgggttgcaaacctcctttgacattaggaaatgttgactttgtaacaataaaactttggtcctagaaagacacggttgtcctgggagtttgtagtgttaagttgcaacaacaacaacaaaaagcaacaaaaccagcttaggataacactttttgttgcttgttcttaaagatgtctcactatgattaaaacccttttcattaatgtagtgaaagccacacaggagttccttcttccaggaggagaataccaagcacatcactttctctctgcatcagtgatgtcaaatacgcatcagaaaatgttcaggttttaggagctgtcctaggtgctgtttcatcattggaagcagtgagaaagagaagcactgctgcttgtctggatataggctgaggatgattgagagaagctgtgggaactgacacaagggtctgcataggtcatcctgtgaccctggggactatgttaccaactgacagacagatctttcactgtatcctagcagggcaggtagtccaccaagaaatgtgcttattggattgggaggtgtttatttgtagtctgctgtaacacgtgtgaaagagcaggagcgtcatcagcatatgacttgcgctggtcatccggtaaatggatgtgctgtagtcccagtgctaatcatttctctccttcacagtgggtggaagtttagggttaaatgtcctttgaatgtcacctggtgagtccttgacaccttaggctcttcagaaacaatggttttgttgaggatggggaacagggaatgccgattttatatacatggtacacagagaggggtgtcacttcagaaaatcttccagcatgttcttcagaatattaatttatatgcgaggtgaggttgggaatgaaaagaacaggtcagcacttttttttttcctagaacatacaaaagaacatggtggactttcagggagtgcaatggaaggtgaatatttccttaagggtccccgagaaatgggagtgaggggaggggacacaatggctttttgagcttacttttaccttctgatactagtcaaggtccagaaccagccaccagccaaatttctatctgggtgcgggccactgaaaatccttgttaaaaaccagatcacaaatctggggctcttggtcccattggagaaggaaggaagagcctcaaaataagtgtgcacccatgcacatattcaggaacagcttgtttagtctttacactttgcctgaaagttgcttctcctcgtccctttgtgtgcctgggtggcctcggccctgtgcgttggcaacgcaggatcaaatgtgctgcagcttttgcagaaaacaactcagaaacacaaaaccccccaacagctcaattattattttttcaatgttttcctacaagagccaagtagcaccatgtacagaagacgcctttttttttggaatattgaaatcgttctgcatgtaaaatatgggataatgacctgtttatattaaaattctgattaaattatctgagaata

SEQ ID NO: 448381 - DNA, 8607 bp, Homo sapiens
  misc_feature (1047)..(1047): n is a, c, g, or t
  misc_feature (1776)..(1776): n is a, c, g, or t
ggggggctgcgcggccgggtcggtgcgcacacgagaaggacgcgcggcccccagcgctcttgggggccgcctcggagcatgacccccgcgggccagcgccgcgcgcctgatccgaggagaccccgcgctcccgcagccatgggcaccgggggccggcggggggcggcggccgcgccgctgctggtggcggtggccgcgctgctactgggcgccgcgggccacctgtaccccggagaggtgtgtcccggcatggatatccggaacaacctcactaggttgcatgagctggagaattgctctgtcatcgaaggacacttgcagatactcttgatgttcaaaacgaggcccgaagatttccgagacctcagtttccccaaactcatcatgatcactgattacttgctgctcttccgggtctatgggctcgagagcctgaaggacctgttccccaacctcacggtcatccggggatcacgactgttctttaactacgcgctggtcatcttcgagatggttcacctcaaggaactcggcctctacaacctgatgaacatcacccggggttctgtccgcatcgagaagaacaatgagctctgttacttggccactatcgactggtcccgtatcctggattccgtggaggataattacatcgtgttgaacaaagatgacaacgaggagtgtggagacatctgtccgggtaccgcgaagggcaagaccaactgccccgccaccgtcatcaacgggcagtttgtcgaacgatgttggactcatagtcactgccagaaagtttgcccgaccatctgtaagtcacacggctgcaccgccgaaggcctctgttgccacagcgagtgcctgggcaactgttctcagcccgacgaccccaccaagtgcgtggcctgccgcaacttctacctggacggcaggtgtgtggagacctgcccgcccccgtactaccacttccaggactggcgctgtgtgaacttcagcttctgccaggacctgcaccacaaatgcaagaactcgcggaggcagggctgccaccantacgtcattcacaacaacaagtgcatccctgagtgtccctccgggtacacgatgaattccagcaacttgctgtgcaccccatgcctgggtccctgtcccaaggtgtgccacctcctagaaggcgagaagaccatcgactcggtgacgtctgcccaggagctccgaggatgcaccgtcatcaacgggagtctgatcatcaacattcgaggaggcaacaatctggcagctgagctagaagccaacctcggcctcattgaagaaatttcagggtatctaaaaatccgccgatcctacgctctggtgtcactttccttcttccggaagttacgtctgattcgaggagagaccttggaaattgggaactactccttctatgccttggacaaccagaacctaaggcagctctgggactggagcaaacacaacctcaccatcactcaggggaaactcttcttccactataaccccaaactctgcttgtcagaaatccacaagatggaagaagtttcaggaaccaaggggcgccaggagagaaacgacattgccctgaagaccaatggggaccaggcatcctgtgaaaatgagttacttaaattttcttacattcggacatcttttgacaagatcttgctgagatgggagccgtactggccccccgacttccgagacctcttggggttcatgctgttctacaaagaggccccttatcagaatgtgacggagttcgangggcaggatgcgtgtggttccaacagttggacggtggtagacattgacccacccctgaggtccaacgaccccaaatcacagaaccacccagggtggctgatgcggggtctcaagccctggacccagtatgccatctttgtgaagaccctggtcaccttttcggatgaacgccggacctatggggccaagagtgacatcatttatgtccagacagatgccaccaacccctctgtgcccctggatccaatctcagtgtctaactcatcatcccagattattctgaagtggaaaccaccctccgaccccaatggcaacatcacccactacctggttttctgggagaggcaggcggaagacagtgagctgttcgagctggattattgcctcaaagggctgaagctgccctcgaggacctggtctccaccattcgagtctgaagattctcagaagcacaaccagagtgagtatgaggattcggccggcgaatgctgctcctgtccaaagacagactctcagatcctgaaggagctggaggagtcctcgtttaggaagacgtttgaggattacctgcacaacgtggttttcgtccccagaaaaacctcttcaggcactggtgccgaggaccctaggccatctcggaaacgcaggtcccttggcgatgttgggaatgtgacggtggccgtgcccacggtggcagctttccccaacacttcctcgaccagcgtgcccacgagtccggaggagcacaggccttttgagaaggtggtgaacaaggagtcgctggtcatctccggcttgcgacacttcacgggctatcgcatcgagctgcaggcttgcaaccaggacacccctgaggaacggtgcagtgtggcagcctacgtcagtgcgaggaccatgcctgaagccaaggctgatgacattgttggccctgtgacgcatgaaatctttgagaacaacgtcgtccacttgatgtggcaggagccgaaggagcccaatggtctgatcgtgctgtatgaagtgagttatcggcgatatggtgatgaggagctgcatctctgcgtctcccgcaagcacttcgctctggaacggggctgcaggctgcgtgggctgtcaccggggaactacagcgtgcgaatccgggccacctcccttgcgggcaacggctcttggacggaacccacctatttctacgtgacagactatttagacgtcccgtcaaatattgcaaaaattatcatcggccccctcatctttgtctttctcttcagtgttgtgattggaagtatttatctattcctgagaaagaggcagccagatgggccgctgggaccgctttacgcttcttcaaaccctgagtatctcagtgccagtgatgtgtttccatgctctgtgtacgtgccggacgagtgggaggtgtctcgagagaagatcaccctccttcgagagctggggcagggctccttcggcatggtgtatgagggcaatgccagggacatcatcaagggtgaggcagagacccgcgtggcggtgaagacggtcaacgagtcagccagtctccgagagcggattgagttcctcaatgaggcctcggtcatgaagggcttcacctgccatcacgtggtgcgcctcctgggagtggtgtccaagggccagcccacgctggtggtgatggagctgatggctcacggagacctgaagagctacctccgttctctgcggccagaggctgagaataatcctggccgccctccccctacccttcaagagatgattcagatggcggcagagattgctgacgggatggcctacctgaacgccaagaagtttgtgcatcgggacctggcagcgagaaactgcatggtcgcccatgattttactgtcaaaattggagactttggaatgaccagagacatctatgaaacggattactaccggaaagggggcaagggtctgctccctgtacggtggatggcaccggagtccctgaaggatggggtcttcaccacttcttctgacatgtggtcctttggcgtggtcctttgggaaatcaccagcttggcagaacagccttaccaaggcctgtctaatgaacaggtgttgaaatttgtcatggatggagggtatctggatcaacccgacaactgtccagagagagtcactgacctcatgcgcatgtgctggcaattcaaccccaagatgaggccaaccttcctggagattgtcaacctgctcaaggacgacctgcaccccagctttccagaggtgtcgttcttccacagcgaggagaacaaggctcccgagagtgaggagctggagatggagtttgaggacatggagaatgtgcccctggaccgttcctcgcactgtcagagggaggaggcggggggccgggatggagggtcctcgctgggtttcaagcggagctacgaggaacacatcccttacacacacatgaacggaggcaagaaaaacgggcggattctgaccttgcctcggtccaatccttcctaacagtgcctaccgtggcgggggcgggcaggggttcccattttcgctttcctctggtttgaaagcctctggaaaactcaggattctcacgactctaccatgtccaatggagttcagagatcgttcctatacatttctgttcatcttaaggtggactcgtttggttaccaatttaactagtcctgcagaggatttaactgtgaacctggagggcaaggggtttccacagttgctgctcctttggggcaacgacggtttcaaaccaggattttgtgttttttcgttccccccacccgcccccagcagatggaaagaaagcacctgtttttacaaattctttttttttttttttttttttgctggtgtctgagcttcagtataaaagacaaaacttcctgtttgtggaacaaaagttcgaaagaaaaaacaaaacaaaaacacccagccctgttccaggagaatttcaagttttacaggttgagcttcaagatggtttttttggttttttttttttctctcatccaggctgaaggattttttttttctttacaaaatgagttcctcaaattgaccaatagctgctgctttcatattttggataagggtctgtggtcccggcgtgtgctcacgtgtgtatgcacgtgtgtgtgtccattagacacggctgatgtgtgtgcaaagtatccatgcggagttgatgctttgggaattggctcatgaaggttcttctcaagggtgcgagctcatccccctctctccttccttcttattgactgggagactgtgctctcgacagattcttcttgtgtcagaagtctagcctcaggtttctaccctcccttcacattggtggccaagggaggagcatttcatttggagtgattatgaatcttttcaagaccaaaccaagctaggacattaaaaaaaaaaaaagaaaaagaaagaaaaaacaaaatggaaaaaggaaaaaaaaaaagaactgagatgacagagttttgagaatatatttgtaccatatttaatttttaaagtctctggtattagcctcataagttattgactattccccggggttggcggggagtggggacatgagttggtctgcctgttgtggggccgggaaggggagggagtcaggcacaagtggcctctttgtttggtcttaaaggcatccatttctgggaatgaagccatgttcgctgctaacacttttggatgttgtgaggccacgtggagtgtgtgagagactaggttttatggatggtctggttcaggtaccaggtctgctggaaggttcctgttcggataagctggtagctacctagctctgagcctgccttcaagaacacctgtgttcatcctctgattctctgtgtgtacctcttgtggcgtttcctctcccgggtgtgaacatcctaaccgttattgtgcaaacccaagaacgtcagatcccaaagcacaacaacctggatggactttgggaacatctaagcaatgtaagagagaggtgcactgagagtacgtcttggtcccctccaccctgagagcatctgacggtcctcagtactgaactcccggaagctgctctgagcccggtgacctcatctgggccaggtgtggtgcctgagctgaatgctcaggtgcttacagtgttgcaatccctaagagagtagagtctggaggagaaaccgtgaaaaagaccttacacaccaccaagaacttccgaatgggcgtgaatccaccgtttcttctctttgcaaaaagaaccaccacagctgctcaaagaacacagtgaactcatcactttggttcatcaaaaaatcatcgcccatgcgttattcctgagtgcattttcttacaactttttgactgcttccttttcttcttctcttaagagttgtgggcttaagaatgggatagagtcataatggcaacctccaagccctctcaattcttgattaagaacacaggtagacatgaatcccaattgtctattgctatcttatttatatgattcgggaaaatacagcatgtaaaaatattgctgaggagcctcagtgattgggtacaagaagcaagagtacagaaattatttttgccaaatttattttgtaaatatgagggtctgtacctaaatttaaaaaaaaaaacacgtagaactaggtattttgttctcttcttagtaaatttgtagtggttgtatactacactagctgcaattttcacatttttctaattcagaaaggtttttcttatattaggggaaaaagtatttattttaatatataaaatcactctgaaaatcactctcataaaaaatggagcgcatgtaaatttttatcaaagaaaaataaacaggtgaatggggatagtgattttcttttttcagcacagtctacctcagtgtattgttaagatgtgattcaatcatggacatctttgagatttcagaattctacctggaaccggtctgaatcagggaacgtgtgtatcagctgattcgaatgccagggaccagtaagaattttgagggagggagttgggatggagaaggtatggcctttatgcgagcatagatccttttcttcctggctggtaatattcttctctgaatttaatcttcctttaaaaaaaaatcctccatctattgtcactatgttccccaaacataaactaagttccaggctgtcatgatgtatctgatatatggggtaacccagcaaggtgtaccttcctttggtgagagatggctgccggggcaaagacgggctttgattcagagcaagcattcccacctgttccatggaatccccctgaagtgagcacaaaggtgccctgggctccctgatggtttatgcccactcctttcaggctggtgatgcaccttacacacaaacacctaatgcaatgtctttttaaattctccaagtgggatgggagcatgtgagggaaattccaatccaaaacccattaatgtgctgaacgctttttttttttttttttttttttgcaacaacaccttggacctctgtgttggggtttgactgacctcaagctgatattattggaccttgtgcagctttgataacccatgtgagagtctaggcaggaccagtggggcccaaatcttgctgctcttgtacttttaggcactgcccttgcagactcacctttctccacctgccctggagaaaggtagggtgtgctgggcctgccccttgcaaatgggattcaccagtttcatttatttgactctactgccacagtgaaaagagcaaacagctattgggttgcaaacctcctttgacattaggaaatgttgactttgtaacaataaaactttggtcctagaaagacacggttgtcctgggagtttgtagtgttaagttgcaacaacaacaacaaaaagcaacaaaaccagcttaggataacactttttgttgcttgttcttaaagatgtctcactatgattaaaacccttttcattaatgtagtgaaagccacacaggagttccttcttccaggaggagaataccaagcacatcactttctctctgcatcagtgatgtcaaatacgcatcagaaaatgttcaggttttaggagctgtcctaggtgctgtttcatcattggaagcagtgagaaagagaagcactgctgcttgtctggatataggctgaggatgattgagagaagctgtgggaactgacacaagggtctgcataggtcatcctgtgaccctggggactatgttaccaactgacagacagatctttcactgtatcctagcagggcaggtagtccaccaagaaatgtgcttattggattgggaggtgtttatttgtagtctgctgtaacacgtgtgaaagagcaggagcgtcatcagcatatgacttgcgctggtcatccggtaaatggatgtgctgtagtcccagtgctaatcatttctctccttcacagtgggtggaagtttagggttaaatgtcctttgaatgtcacctggtgagtccttgacaccttaggctcttcagaaacaatggttttgttgaggatggggaacagggaatgccgattttatatacatggtacacagagaggggtgtcacttcagaaaatcttccagcatgttcttcagaatattaatttatatgcgaggtgaggttgggaatgaaaagaacaggtcagcacttttttttttcctagaacatacaaaagaacatggtggactttcagggagtgcaatggaaggtgaatatttccttaagggtccccgagaaatgggagtggaatgcatgttcctttactgtcttctttgcaacatactt

SEQ ID NO: 448382 - DNA, 9130 bp, Homo sapiens
  misc_feature (1047)..(1047): n is a, c, g, or t
  misc_feature (1776)..(1776): n is a, c, g, or t
ggggggctgcgcggccgggtcggtgcgcacacgagaaggacgcgcggcccccagcgctcttgggggccgcctcggagcatgacccccgcgggccagcgccgcgcgcctgatccgaggagaccccgcgctcccgcagccatgggcaccgggggccggcggggggcggcggccgcgccgctgctggtggcggtggccgcgctgctactgggcgccgcgggccacctgtaccccggagaggtgtgtcccggcatggatatccggaacaacctcactaggttgcatgagctggagaattgctctgtcatcgaaggacacttgcagatactcttgatgttcaaaacgaggcccgaagatttccgagacctcagtttccccaaactcatcatgatcactgattacttgctgctcttccgggtctatgggctcgagagcctgaaggacctgttccccaacctcacggtcatccggggatcacgactgttctttaactacgcgctggtcatcttcgagatggttcacctcaaggaactcggcctctacaacctgatgaacatcacccggggttctgtccgcatcgagaagaacaatgagctctgttacttggccactatcgactggtcccgtatcctggattccgtggaggataattacatcgtgttgaacaaagatgacaacgaggagtgtggagacatctgtccgggtaccgcgaagggcaagaccaactgccccgccaccgtcatcaacgggcagtttgtcgaacgatgttggactcatagtcactgccagaaagtttgcccgaccatctgtaagtcacacggctgcaccgccgaaggcctctgttgccacagcgagtgcctgggcaactgttctcagcccgacgaccccaccaagtgcgtggcctgccgcaacttctacctggacggcaggtgtgtggagacctgcccgcccccgtactaccacttccaggactggcgctgtgtgaacttcagcttctgccaggacctgcaccacaaatgcaagaactcgcggaggcagggctgccaccantacgtcattcacaacaacaagtgcatccctgagtgtccctccgggtacacgatgaattccagcaacttgctgtgcaccccatgcctgggtccctgtcccaaggtgtgccacctcctagaaggcgagaagaccatcgactcggtgacgtctgcccaggagctccgaggatgcaccgtcatcaacgggagtctgatcatcaacattcgaggaggcaacaatctggcagctgagctagaagccaacctcggcctcattgaagaaatttcagggtatctaaaaatccgccgatcctacgctctggtgtcactttccttcttccggaagttacgtctgattcgaggagagaccttggaaattgggaactactccttctatgccttggacaaccagaacctaaggcagctctgggactggagcaaacacaacctcaccatcactcaggggaaactcttcttccactataaccccaaactctgcttgtcagaaatccacaagatggaagaagtttcaggaaccaaggggcgccaggagagaaacgacattgccctgaagaccaatggggaccaggcatcctgtgaaaatgagttacttaaattttcttacattcggacatcttttgacaagatcttgctgagatgggagccgtactggccccccgacttccgagacctcttggggttcatgctgttctacaaagaggccccttatcagaatgtgacggagttcgangggcaggatgcgtgtggttccaacagttggacggtggtagacattgacccacccctgaggtccaacgaccccaaatcacagaaccacccagggtggctgatgcggggtctcaagccctggacccagtatgccatctttgtgaagaccctggtcaccttttcggatgaacgccggacctatggggccaagagtgacatcatttatgtccagacagatgccaccaacccctctgtgcccctggatccaatctcagtgtctaactcatcatcccagattattctgaagtggaaaccaccctccgaccccaatggcaacatcacccactacctggttttctgggagaggcaggcggaagacagtgagctgttcgagctggattattgcctcaaagggctgaagctgccctcgaggacctggtctccaccattcgagtctgaagattctcagaagcacaaccagagtgagtatgaggattcggccggcgaatgctgctcctgtccaaagacagactctcagatcctgaaggagctggaggagtcctcgtttaggaagacgtttgaggattacctgcacaacgtggttttcgtccccagaaaaacctcttcaggcactggtgccgaggaccctaggccatctcggaaacgcaggtcccttggcgatgttgggaatgtgacggtggccgtgcccacggtggcagctttccccaacacttcctcgaccagcgtgcccacgagtccggaggagcacaggccttttgagaaggtggtgaacaaggagtcgctggtcatctccggcttgcgacacttcacgggctatcgcatcgagctgcaggcttgcaaccaggacacccctgaggaacggtgcagtgtggcagcctacgtcagtgcgaggaccatgcctgaagccaaggctgatgacattgttggccctgtgacgcatgaaatctttgagaacaacgtcgtccacttgatgtggcaggagccgaaggagcccaatggtctgatcgtgctgtatgaagtgagttatcggcgatatggtgatgaggagctgcatctctgcgtctcccgcaagcacttcgctctggaacggggctgcaggctgcgtgggctgtcaccggggaactacagcgtgcgaatccgggccacctcccttgcgggcaacggctcttggacggaacccacctatttctacgtgacagactatttagacgtcccgtcaaatattgcaaaaattatcatcggccccctcatctttgtctttctcttcagtgttgtgattggaagtatttatctattcctgagaaagaggcagccagatgggccgctgggaccgctttacgcttcttcaaaccctgagtatctcagtgccagtgatgtgtttccatgctctgtgtacgtgccggacgagtgggaggtgtctcgagagaagatcaccctccttcgagagctggggcagggctccttcggcatggtgtatgagggcaatgccagggacatcatcaagggtgaggcagagacccgcgtggcggtgaagacggtcaacgagtcagccagtctccgagagcggattgagttcctcaatgaggcctcggtcatgaagggcttcacctgccatcacgtggtgcgcctcctgggagtggtgtccaagggccagcccacgctggtggtgatggagctgatggctcacggagacctgaagagctacctccgttctctgcggccagaggctgagaataatcctggccgccctccccctacccttcaagagatgattcagatggcggcagagattgctgacgggatggcctacctgaacgccaagaagtttgtgcatcgggacctggcagcgagaaactgcatggtcgcccatgattttactgtcaaaattggaggttcgtctggctttctgctttgaaaacataacgacccaggccagactttggaatgaccagagacatctatgaaacggattactaccggaaagggggcaagggtctgctccctgtacggtggatggcaccggagtccctgaaggatggggtcttcaccacttcttctgacatgtggtcctttggcgtggtcctttgggaaatcaccagcttggcagaacagccttaccaaggcctgtctaatgaacaggtgttgaaatttgtcatggatggagggtatctggatcaacccgacaactgtccagagagagtcactgacctcatgcgcatgtgctggcaattcaaccccaagatgaggccaaccttcctggagattgtcaacctgctcaaggacgacctgcaccccagctttccagaggtgtcgttcttccacagcgaggagaacaaggctcccgagagtgaggagctggagatggagtttgaggacatggagaatgtgcccctggaccgttcctcgcactgtcagagggaggaggcggggggccgggatggagggtcctcgctgggtttcaagcggagctacgaggaacacatcccttacacacacatgaacggaggcaagaaaaacgggcggattctgaccttgcctcggtccaatccttcctaacagtgcctaccgtggcgggggcgggcaggggttcccattttcgctttcctctggtttgaaagcctctggaaaactcaggattctcacgactctaccatgtccaatggagttcagagatcgttcctatacatttctgttcatcttaaggtggactcgtttggttaccaatttaactagtcctgcagaggatttaactgtgaacctggagggcaaggggtttccacagttgctgctcctttggggcaacgacggtttcaaaccaggattttgtgttttttcgttccccccacccgcccccagcagatggaaagaaagcacctgtttttacaaattctttttttttttttttttttttgctggtgtctgagcttcagtataaaagacaaaacttcctgtttgtggaacaaaagttcgaaagaaaaaacaaaacaaaaacacccagccctgttccaggagaatttcaagttttacaggttgagcttcaagatggtttttttggttttttttttttctctcatccaggctgaaggattttttttttctttacaaaatgagttcctcaaattgaccaatagctgctgctttcatattttggataagggtctgtggtcccggcgtgtgctcacgtgtgtatgcacgtgtgtgtgtccattagacacggctgatgtgtgtgcaaagtatccatgcggagttgatgctttgggaattggctcatgaaggttcttctcaagggtgcgagctcatccccctctctccttccttcttattgactgggagactgtgctctcgacagattcttcttgtgtcagaagtctagcctcaggtttctaccctcccttcacattggtggccaagggaggagcatttcatttggagtgattatgaatcttttcaagaccaaaccaagctaggacattaaaaaaaaaaaaagaaaaagaaagaaaaaacaaaatggaaaaaggaaaaaaaaaaagaactgagatgacagagttttgagaatatatttgtaccatatttaatttttaaagtctctggtattagcctcataagttattgactattccccggggttggcggggagtggggacatgagttggtctgcctgttgtggggccgggaaggggagggagtcaggcacaagtggcctctttgtttggtcttaaaggcatccatttctgggaatgaagccatgttcgctgctaacacttttggatgttgtgaggccacgtggagtgtgtgagagactaggttttatggatggtctggttcaggtaccaggtctgctggaaggttcctgttcggataagctggtagctacctagctctgagcctgccttcaagaacacctgtgttcatcctctgattctctgtgtgtacctcttgtggcgtttcctctcccgggtgtgaacatcctaaccgttattgtgcaaacccaagaacgtcagatcccaaagcacaacaacctggatggactttgggaacatctaagcaatgtaagagagaggtgcactgagagtacgtcttggtcccctccaccctgagagcatctgacggtcctcagtactgaactcccggaagctgctctgagcccggtgacctcatctgggccaggtgtggtgcctgagctgaatgctcaggtgcttacagtgttgcaatccctaagagagtagagtctggaggagaaaccgtgaaaaagaccttacacaccaccaagaacttccgaatgggcgtgaatccaccgtttcttctctttgcaaaaagaaccaccacagctgctcaaagaacacagtgaactcatcactttggttcatcaaaaaatcatcgcccatgcgttattcctgagtgcattttcttacaactttttgactgcttccttttcttcttctcttaagagttgtgggcttaagaatgggatagagtcataatggcaacctccaagccctctcaattcttgattaagaacacaggtagacatgaatcccaattgtctattgctatcttatttatatgattcgggaaaatacagcatgtaaaaatattgctgaggagcctcagtgattgggtacaagaagcaagagtacagaaattatttttgccaaatttattttgtaaatatgagggtctgtacctaaatttaaaaaaaaaaacacgtagaactaggtattttgttctcttcttagtaaatttgtagtggttgtatactacactagctgcaattttcacatttttctaattcagaaaggtttttcttatattaggggaaaaagtatttattttaatatataaaatcactctgaaaatcactctcataaaaaatggagcgcatgtaaatttttatcaaagaaaaataaacaggtgaatggggatagtgattttcttttttcagcacagtctacctcagtgtattgttaagatgtgattcaatcatggacatctttgagatttcagaattctacctggaaccggtctgaatcagggaacgtgtgtatcagctgattcgaatgccagggaccagtaagaattttgagggagggagttgggatggagaaggtatggcctttatgcgagcatagatccttttcttcctggctggtaatattcttctctgaatttaatcttcctttaaaaaaaaatcctccatctattgtcactatgttccccaaacataaactaagttccaggctgtcatgatgtatctgatatatggggtaacccagcaaggtgtaccttcctttggtgagagatggctgccggggcaaagacgggctttgattcagagcaagcattcccacctgttccatggaatccccctgaagtgagcacaaaggtgccctgggctccctgatggtttatgcccactcctttcaggctggtgatgcaccttacacacaaacacctaatgcaatgtctttttaaattctccaagtgggatgggagcatgtgagggaaattccaatccaaaacccattaatgtgctgaacgctttttttttttttttttttttttgcaacaacaccttggacctctgtgttggggtttgactgacctcaagctgatattattggaccttgtgcagctttgataacccatgtgagagtctaggcaggaccagtggggcccaaatcttgctgctcttgtacttttaggcactgcccttgcagactcacctttctccacctgccctggagaaaggtagggtgtgctgggcctgccccttgcaaatgggattcaccagtttcatttatttgactctactgccacagtgaaaagagcaaacagctattgggttgcaaacctcctttgacattaggaaatgttgactttgtaacaataaaactttggtcctagaaagacacggttgtcctgggagtttgtagtgttaagttgcaacaacaacaacaaaaagcaacaaaaccagcttaggataacactttttgttgcttgttcttaaagatgtctcactatgattaaaacccttttcattaatgtagtgaaagccacacaggagttccttcttccaggaggagaataccaagcacatcactttctctctgcatcagtgatgtcaaatacgcatcagaaaatgttcaggttttaggagctgtcctaggtgctgtttcatcattggaagcagtgagaaagagaagcactgctgcttgtctggatataggctgaggatgattgagagaagctgtgggaactgacacaagggtctgcataggtcatcctgtgaccctggggactatgttaccaactgacagacagatctttcactgtatcctagcagggcaggtagtccaccaagaaatgtgcttattggattgggaggtgtttatttgtagtctgctgtaacacgtgtgaaagagcaggagcgtcatcagcatatgacttgcgctggtcatccggtaaatggatgtgctgtagtcccagtgctaatcatttctctccttcacagtgggtggaagtttagggttaaatgtcctttgaatgtcacctggtgagtccttgacaccttaggctcttcagaaacaatggttttgttgaggatggggaacagggaatgccgattttatatacatggtacacagagaggggtgtcacttcagaaaatcttccagcatgttcttcagaatattaatttatatgcgaggtgaggttgggaatgaaaagaacaggtcagcacttttttttttcctagaacatacaaaagaacatggtggactttcagggagtgcaatggaaggtgaatatttccttaagggtccccgagaaatgggagtgaggggaggggacacaatggctttttgagcttacttttaccttctgatactagtcaaggtccagaaccagccaccagccaaatttctatctgggtgcgggccactgaaaatccttgttaaaaaccagatcacaaatctggggctcttggtcccattggagaaggaaggaagagcctcaaaataagtgtgcacccatgcacatattcaggaacagcttgtttagtctttacactttgcctgaaagttgcttctcctcgtccctttgtgtgcctgggtggcctcggccctgtgcgttggcaacgcaggatcaaatgtgctgcagcttttgcagaaaacaactcagaaacacaaaaccccccaacagctcaattattattttttcaatgttttcctacaagagccaagtagcaccatgtacagaagacgcctttttttttggaatattgaaatcgttctgcatgtaaaatatgggataatgacctgtttatattaaaattctgattaaattatctgagaata

SEQ ID NO: 448383 - DNA, 6329 bp, Homo sapiens
gggtggacactcccagatgtgcaaagctcagccaccctccttctcctcctctcttcctcccaggagctgcatctctgcgtctcccgcaagcacttcgctctggaacggggctgcaggctgcgtgggctgtcaccggggaactacagcgtgcgaatccgggccacctcccttgcgggcaacggctcttggacggaacccacctatttctacgtgacagactatttagacgtcccgtcaaatattgcaaaaattatcatcggccccctcatctttgtctttctcttcagtgttgtgattggaagtatttatctattcctgagaaagaggcagccagatgggccgctgggaccgctttacgcttcttcaaaccctgagtatctcagtgccagtgatgtgtttccatgctctgtgtacgtgccggacgagtgggaggtgtctcgagagaagatcaccctccttcgagagctggggcagggctccttcggcatggtgtatgagggcaatgccagggacatcatcaagggtgaggcagagacccgcgtggcggtgaagacggtcaacgagtcagccagtctccgagagcggattgagttcctcaatgaggcctcggtcatgaagggcttcacctgccatcacgtggtgcgcctcctgggagtggtgtccaagggccagcccacgctggtggtgatggagctgatggctcacggagacctgaagagctacctccgttctctgcggccagaggctgagaataatcctggccgccctccccctacccttcaagagatgattcagatggcggcagagattgctgacgggatggcctacctgaacgccaagaagtttgtgcatcgggacctggcagcgagaaactgcatggtcgcccatgattttactgtcaaaattggagactttggaatgaccagagacatctatgaaacggattactaccggaaagggggcaagggtctgctccctgtacggtggatggcaccggagtccctgaaggatggggtcttcaccacttcttctgacatgtggtcctttggcgtggtcctttgggaaatcaccagcttggcagaacagccttaccaaggcctgtctaatgaacaggtgttgaaatttgtcatggatggagggtatctggatcaacccgacaactgtccagagagagtcactgacctcatgcgcatgtgctggcaattcaaccccaagatgaggccaaccttcctggagattgtcaacctgctcaaggacgacctgcaccccagctttccagaggtgtcgttcttccacagcgaggagaacaaggctcccgagagtgaggagctggagatggagtttgaggacatggagaatgtgcccctggaccgttcctcgcactgtcagagggaggaggcggggggccgggatggagggtcctcgctgggtttcaagcggagctacgaggaacacatcccttacacacacatgaacggaggcaagaaaaacgggcggattctgaccttgcctcggtccaatccttcctaacagtgcctaccgtggcgggggcgggcaggggttcccattttcgctttcctctggtttgaaagcctctggaaaactcaggattctcacgactctaccatgtccaatggagttcagagatcgttcctatacatttctgttcatcttaaggtggactcgtttggttaccaatttaactagtcctgcagaggatttaactgtgaacctggagggcaaggggtttccacagttgctgctcctttggggcaacgacggtttcaaaccaggattttgtgttttttcgttccccccacccgcccccagcagatggaaagaaagcacctgtttttacaaattctttttttttttttttttttttgctggtgtctgagcttcagtataaaagacaaaacttcctgtttgtggaacaaaagttcgaaagaaaaaacaaaacaaaaacacccagccctgttccaggagaatttcaagttttacaggttgagcttcaagatggtttttttggttttttttttttctctcatccaggctgaaggattttttttttctttacaaaatgagttcctcaaattgaccaatagctgctgctttcatattttggataagggtctgtggtcccggcgtgtgctcacgtgtgtatgcacgtgtgtgtgtccattagacacggctgatgtgtgtgcaaagtatccatgcggagttgatgctttgggaattggctcatgaaggttcttctcaagggtgcgagctcatccccctctctccttccttcttattgactgggagactgtgctctcgacagattcttcttgtgtcagaagtctagcctcaggtttctaccctcccttcacattggtggccaagggaggagcatttcatttggagtgattatgaatcttttcaagaccaaaccaagctaggacattaaaaaaaaaaaaagaaaaagaaagaaaaaacaaaatggaaaaaggaaaaaaaaaaagaactgagatgacagagttttgagaatatatttgtaccatatttaatttttaaagtctctggtattagcctcataagttattgactattccccggggttggcggggagtggggacatgagttggtctgcctgttgtggggccgggaaggggagggagtcaggcacaagtggcctctttgtttggtcttaaaggcatccatttctgggaatgaagccatgttcgctgctaacacttttggatgttgtgaggccacgtggagtgtgtgagagactaggttttatggatggtctggttcaggtaccaggtctgctggaaggttcctgttcggataagctggtagctacctagctctgagcctgccttcaagaacacctgtgttcatcctctgattctctgtgtgtacctcttgtggcgtttcctctcccgggtgtgaacatcctaaccgttattgtgcaaacccaagaacgtcagatcccaaagcacaacaacctggatggactttgggaacatctaagcaatgtaagagagaggtgcactgagagtacgtcttggtcccctccaccctgagagcatctgacggtcctcagtactgaactcccggaagctgctctgagcccggtgacctcatctgggccaggtgtggtgcctgagctgaatgctcaggtgcttacagtgttgcaatccctaagagagtagagtctggaggagaaaccgtgaaaaagaccttacacaccaccaagaacttccgaatgggcgtgaatccaccgtttcttctctttgcaaaaagaaccaccacagctgctcaaagaacacagtgaactcatcactttggttcatcaaaaaatcatcgcccatgcgttattcctgagtgcattttcttacaactttttgactgcttccttttcttcttctcttaagagttgtgggcttaagaatgggatagagtcataatggcaacctccaagccctctcaattcttgattaagaacacaggtagacatgaatcccaattgtctattgctatcttatttatatgattcgggaaaatacagcatgtaaaaatattgctgaggagcctcagtgattgggtacaagaagcaagagtacagaaattatttttgccaaatttattttgtaaatatgagggtctgtacctaaatttaaaaaaaaaaacacgtagaactaggtattttgttctcttcttagtaaatttgtagtggttgtatactacactagctgcaattttcacatttttctaattcagaaaggtttttcttatattaggggaaaaagtatttattttaatatataaaatcactctgaaaatcactctcataaaaaatggagcgcatgtaaatttttatcaaagaaaaataaacaggtgaatggggatagtgattttcttttttcagcacagtctacctcagtgtattgttaagatgtgattcaatcatggacatctttgagatttcagaattctacctggaaccggtctgaatcagggaacgtgtgtatcagctgattcgaatgccagggaccagtaagaattttgagggagggagttgggatggagaaggtatggcctttatgcgagcatagatccttttcttcctggctggtaatattcttctctgaatttaatcttcctttaaaaaaaaatcctccatctattgtcactatgttccccaaacataaactaagttccaggctgtcatgatgtatctgatatatggggtaacccagcaaggtgtaccttcctttggtgagagatggctgccggggcaaagacgggctttgattcagagcaagcattcccacctgttccatggaatccccctgaagtgagcacaaaggtgccctgggctccctgatggtttatgcccactcctttcaggctggtgatgcaccttacacacaaacacctaatgcaatgtctttttaaattctccaagtgggatgggagcatgtgagggaaattccaatccaaaacccattaatgtgctgaacgctttttttttttttttttttttttgcaacaacaccttggacctctgtgttggggtttgactgacctcaagctgatattattggaccttgtgcagctttgataacccatgtgagagtctaggcaggaccagtggggcccaaatcttgctgctcttgtacttttaggcactgcccttgcagactcacctttctccacctgccctggagaaaggtagggtgtgctgggcctgccccttgcaaatgggattcaccagtttcatttatttgactctactgccacagtgaaaagagcaaacagctattgggttgcaaacctcctttgacattaggaaatgttgactttgtaacaataaaactttggtcctagaaagacacggttgtcctgggagtttgtagtgttaagttgcaacaacaacaacaaaaagcaacaaaaccagcttaggataacactttttgttgcttgttcttaaagatgtctcactatgattaaaacccttttcattaatgtagtgaaagccacacaggagttccttcttccaggaggagaataccaagcacatcactttctctctgcatcagtgatgtcaaatacgcatcagaaaatgttcaggttttaggagctgtcctaggtgctgtttcatcattggaagcagtgagaaagagaagcactgctgcttgtctggatataggctgaggatgattgagagaagctgtgggaactgacacaagggtctgcataggtcatcctgtgaccctggggactatgttaccaactgacagacagatctttcactgtatcctagcagggcaggtagtccaccaagaaatgtgcttattggattgggaggtgtttatttgtagtctgctgtaacacgtgtgaaagagcaggagcgtcatcagcatatgacttgcgctggtcatccggtaaatggatgtgctgtagtcccagtgctaatcatttctctccttcacagtgggtggaagtttagggttaaatgtcctttgaatgtcacctggtgagtccttgacaccttaggctcttcagaaacaatggttttgttgaggatggggaacagggaatgccgattttatatacatggtacacagagaggggtgtcacttcagaaaatcttccagcatgttcttcagaatattaatttatatgcgaggtgaggttgggaatgaaaagaacaggtcagcacttttttttttcctagaacatacaaaagaacatggtggactttcagggagtgcaatggaaggtgaatatttccttaagggtccccgagaaatgggagtgaggggaggggacacaatggctttttgagcttacttttaccttctgatactagtcaaggtccagaaccagccaccagccaaatttctatctgggtgcgggccactgaaaatccttgttaaaaaccagatcacaaatctggggctcttggtcccattggagaaggaaggaagagcctcaaaataagtgtgcacccatgcacatattcaggaacagcttgtttagtctttacactttgcctgaaagttgcttctcctcgtccctttgtgtgcctgggtggcctcggccctgtgcgttggcaacgcaggatcaaatgtgctgcagcttttgcagaaaacaactcagaaacacaaaaccccccaacagctcaattattattttttcaatgttttcctacaagagccaagtagcaccatgtacagaagacgcctttttttttggaatattgaaatcgttctgcatgtaaaatatgggataatgacctgtttatattaaaattctgattaaattatctgagaata

SEQ ID NO: 448384 - DNA, 5496 bp, Homo sapiens
  misc_feature (1047)..(1047): n is a, c, g, or t
  misc_feature (1776)..(1776): n is a, c, g, or t
ggggggctgcgcggccgggtcggtgcgcacacgagaaggacgcgcggcccccagcgctcttgggggccgcctcggagcatgacccccgcgggccagcgccgcgcgcctgatccgaggagaccccgcgctcccgcagccatgggcaccgggggccggcggggggcggcggccgcgccgctgctggtggcggtggccgcgctgctactgggcgccgcgggccacctgtaccccggagaggtgtgtcccggcatggatatccggaacaacctcactaggttgcatgagctggagaattgctctgtcatcgaaggacacttgcagatactcttgatgttcaaaacgaggcccgaagatttccgagacctcagtttccccaaactcatcatgatcactgattacttgctgctcttccgggtctatgggctcgagagcctgaaggacctgttccccaacctcacggtcatccggggatcacgactgttctttaactacgcgctggtcatcttcgagatggttcacctcaaggaactcggcctctacaacctgatgaacatcacccggggttctgtccgcatcgagaagaacaatgagctctgttacttggccactatcgactggtcccgtatcctggattccgtggaggataattacatcgtgttgaacaaagatgacaacgaggagtgtggagacatctgtccgggtaccgcgaagggcaagaccaactgccccgccaccgtcatcaacgggcagtttgtcgaacgatgttggactcatagtcactgccagaaagtttgcccgaccatctgtaagtcacacggctgcaccgccgaaggcctctgttgccacagcgagtgcctgggcaactgttctcagcccgacgaccccaccaagtgcgtggcctgccgcaacttctacctggacggcaggtgtgtggagacctgcccgcccccgtactaccacttccaggactggcgctgtgtgaacttcagcttctgccaggacctgcaccacaaatgcaagaactcgcggaggcagggctgccaccantacgtcattcacaacaacaagtgcatccctgagtgtccctccgggtacacgatgaattccagcaacttgctgtgcaccccatgcctgggtccctgtcccaaggtgtgccacctcctagaaggcgagaagaccatcgactcggtgacgtctgcccaggagctccgaggatgcaccgtcatcaacgggagtctgatcatcaacattcgaggaggcaacaatctggcagctgagctagaagccaacctcggcctcattgaagaaatttcagggtatctaaaaatccgccgatcctacgctctggtgtcactttccttcttccggaagttacgtctgattcgaggagagaccttggaaattgggaactactccttctatgccttggacaaccagaacctaaggcagctctgggactggagcaaacacaacctcaccatcactcaggggaaactcttcttccactataaccccaaactctgcttgtcagaaatccacaagatggaagaagtttcaggaaccaaggggcgccaggagagaaacgacattgccctgaagaccaatggggaccaggcatcctgtgaaaatgagttacttaaattttcttacattcggacatcttttgacaagatcttgctgagatgggagccgtactggccccccgacttccgagacctcttggggttcatgctgttctacaaagaggccccttatcagaatgtgacggagttcgangggcaggatgcgtgtggttccaacagttggacggtggtagacattgacccacccctgaggtccaacgaccccaaatcacagaaccacccagggtggctgatgcggggtctcaagccctggacccagtatgccatctttgtgaagaccctggtcaccttttcggatgaacgccggacctatggggccaagagtgacatcatttatgtccagacagatgccaccaacccctctgtgcccctggatccaatctcagtgtctaactcatcatcccagattattctgaagtggaaaccaccctccgaccccaatggcaacatcacccactacctggttttctgggagaggcaggcggaagacagtgagctgttcgagctggattattgcctcaaagggctgaagctgccctcgaggacctggtctccaccattcgagtctgaagattctcagaagcacaaccagagtgagtatgaggattcggccggcgaatgctgctcctgtccaaagacagactctcagatcctgaaggagctggaggagtcctcgtttaggaagacgtttgaggattacctgcacaacgtggttttcgtccccagaaaaacctcttcaggcactggtgccgaggaccctaggccatctcggaaacgcaggtcccttggcgatgttgggaatgtgacggtggccgtgcccacggtggcagctttccccaacacttcctcgaccagcgtgcccacgagtccggaggagcacaggccttttgagaaggtggtgaacaaggagtcgctggtcatctccggcttgcgacacttcacgggctatcgcatcgagctgcaggcttgcaaccaggacacccctgaggaacggtgcagtgtggcagcctacgtcagtgcgaggaccatgcctgaagccaaggctgatgacattgttggccctgtgacgcatgaaatctttgagaacaacgtcgtccacttgatgtggcaggagccgaaggagcccaatggtctgatcgtgctgtatgaagtgagttatcggcgatatggtgatgaggagctgcatctctgcgtctcccgcaagcacttcgctctggaacggggctgcaggctgcgtgggctgtcaccggggaactacagcgtgcgaatccgggccacctcccttgcgggcaacggctcttggacggaacccacctatttctacgtgacagactatttagacgtcccgtcaaatattgcaaaaattatcatcggccccctcatctttgtctttctcttcagtgttgtgattggaagtatttatctattcctgagaaagaggcagccagatgggccgctgggaccgctttacgcttcttcaaaccctgagtatctcagtgccagtgatgtgtttccatgctctgtgtacgtgccggacgagtgggaggtgtctcgagagaagatcaccctccttcgagagctggggcagggctccttcggcatggtgtatgagggcaatgccagggacatcatcaagggtgaggcagagacccgcgtggcggtgaagacggtcaacgagtcagccagtctccgagagcggattgagttcctcaatgaggcctcggtcatgaagggcttcacctgccatcacgtggtgcgcctcctgggagtggtgtccaagggccagcccacgctggtggtgatggagctgatggctcacggagacctgaagagctacctccgttctctgcggccagaggctgagaataatcctggccgccctccccctacccttcaagagatgattcagatggcggcagagattgctgacgggatggcctacctgaacgccaagaagtttgtgcatcgggacctggcagcgagaaactgcatggtcgcccatgattttactgtcaaaattggagactttggaatgaccagagacatctatgaaacggattactaccggaaagggggcaagggtctgctccctgtacggtggatggcaccggagtccctgaaggatggggtcttcaccacttcttctgacatgtggtcctttggcgtggtcctttgggaaatcaccagcttggcagaacagccttaccaaggcctgtctaatgaacaggtgttgaaatttgtcatggatggagggtatctggatcaacccgacaactgtccagagagagtcactgacctcatgcgcatgtgctggcaattcaaccccaagatgaggccaaccttcctggagattgtcaacctgctcaaggacgacctgcaccccagctttccagaggtgtcgttcttccacagcgaggagaacaaggctcccgagagtgaggagctggagatggagtttgaggacatggagaatgtgcccctggaccgttcctcgcactgtcagagggaggaggcggggggccgggatggagggtcctcgctgggtttcaagcggagctacgaggaacacatcccttacacacacatgaacggaggcaagaaaaacgggcggattctgaccttgcctcggtccaatccttcctaacagtgcctaccgtggcgggggcgggcaggggttcccattttcgctttcctctggtttgaaagcctctggaaaactcaggattctcacgactctaccatgtccaatggagttcagagatcgttcctatacatttctgttcatcttaaggtggactcgtttggttaccaatttaactagtcctgcagaggatttaactgtgaacctggagggcaaggggtttccacagttgctgctcctttggggcaacgacggtttcaaaccaggattttgtgttttttcgttccccccacccgcccccagcagatggaaagaaagcacctgtttttacaaattctttttttttttttttttttttgctggtgtctgagcttcagtataaaagacaaaacttcctgtttgtggaacaaaagttcgaaagaaaaaacaaaacaaaaacacccagccctgttccaggagaatttcaagttttacaggttgagcttcaagatggtttttttggttttttttttttctctcatccaggctgaaggattttttttttctttacaaaatgagttcctcaaattgaccaatagctgctgctttcatattttggataagggtctgtggtcccggcgtgtgctcacgtgtgtatgcacgtgtgtgtgtccattagacacggctgatgtgtgtgcaaagtatccatgcggagttgatgctttgggaattggctcatgaaggttcttctcaagggtgcgagctcatccccctctctccttccttcttattgactgggagactgtgctctcgacagattcttcttgtgtcagaagtctagcctcaggtttctaccctcccttcacattggtggccaagggaggagcatttcatttggagtgattatgaatcttttcaagaccaaaccaagctaggacattaaaaaaaaaaaaaacaggaaaacggaaggaaaaaccaaatgtgggaaaagggagaaacacaaaaaggacttgtgaaatgtgacaggatgtttggagaaatttttggggcccaattttaacttttaaaggtcccgggatatttagcctcaataggtaatggactttcccccggggattaggggggaattgggggccattgagttggggcctgccgtgttgttgggcccggaaaggggacgggacgtcagggaccaatgtggccttatggagggccttaagggatcaattacgg

SEQ ID NO: 448385 - DNA, 8184 bp, Homo sapiens
  misc_feature (1047)..(1047): n is a, c, g, or t
  misc_feature (1776)..(1776): n is a, c, g, or t
ggggggctgcgcggccgggtcggtgcgcacacgagaaggacgcgcggcccccagcgctcttgggggccgcctcggagcatgacccccgcgggccagcgccgcgcgcctgatccgaggagaccccgcgctcccgcagccatgggcaccgggggccggcggggggcggcggccgcgccgctgctggtggcggtggccgcgctgctactgggcgccgcgggccacctgtaccccggagaggtgtgtcccggcatggatatccggaacaacctcactaggttgcatgagctggagaattgctctgtcatcgaaggacacttgcagatactcttgatgttcaaaacgaggcccgaagatttccgagacctcagtttccccaaactcatcatgatcactgattacttgctgctcttccgggtctatgggctcgagagcctgaaggacctgttccccaacctcacggtcatccggggatcacgactgttctttaactacgcgctggtcatcttcgagatggttcacctcaaggaactcggcctctacaacctgatgaacatcacccggggttctgtccgcatcgagaagaacaatgagctctgttacttggccactatcgactggtcccgtatcctggattccgtggaggataattacatcgtgttgaacaaagatgacaacgaggagtgtggagacatctgtccgggtaccgcgaagggcaagaccaactgccccgccaccgtcatcaacgggcagtttgtcgaacgatgttggactcatagtcactgccagaaagtttgcccgaccatctgtaagtcacacggctgcaccgccgaaggcctctgttgccacagcgagtgcctgggcaactgttctcagcccgacgaccccaccaagtgcgtggcctgccgcaacttctacctggacggcaggtgtgtggagacctgcccgcccccgtactaccacttccaggactggcgctgtgtgaacttcagcttctgccaggacctgcaccacaaatgcaagaactcgcggaggcagggctgccaccantacgtcattcacaacaacaagtgcatccctgagtgtccctccgggtacacgatgaattccagcaacttgctgtgcaccccatgcctgggtccctgtcccaaggtgtgccacctcctagaaggcgagaagaccatcgactcggtgacgtctgcccaggagctccgaggatgcaccgtcatcaacgggagtctgatcatcaacattcgaggaggcaacaatctggcagctgagctagaagccaacctcggcctcattgaagaaatttcagggtatctaaaaatccgccgatcctacgctctggtgtcactttccttcttccggaagttacgtctgattcgaggagagaccttggaaattgggaactactccttctatgccttggacaaccagaacctaaggcagctctgggactggagcaaacacaacctcaccatcactcaggggaaactcttcttccactataaccccaaactctgcttgtcagaaatccacaagatggaagaagtttcaggaaccaaggggcgccaggagagaaacgacattgccctgaagaccaatggggaccaggcatcctgtgaaaatgagttacttaaattttcttacattcggacatcttttgacaagatcttgctgagatgggagccgtactggccccccgacttccgagacctcttggggttcatgctgttctacaaagaggccccttatcagaatgtgacggagttcgangggcaggatgcgtgtggttccaacagttggacggtggtagacattgacccacccctgaggtccaacgaccccaaatcacagaaccacccagggtggctgatgcggggtctcaagccctggacccagtatgccatctttgtgaagaccctggtcaccttttcggatgaacgccggacctatggggccaagagtgacatcatttatgtccagacagatgccaccaacccctctgtgcccctggatccaatctcagtgtctaactcatcatcccagattattctgaagtggaaaccaccctccgaccccaatggcaacatcacccactacctggttttctgggagaggcaggcggaagacagtgagctgttcgagctggattattgcctcaaagggctgaagctgccctcgaggacctggtctccaccattcgagtctgaagattctcagaagcacaaccagagtgagtatgaggattcggccggcgaatgctgctcctgtccaaagacagactctcagatcctgaaggagctggaggagtcctcgtttaggaagacgtttgaggattacctgcacaacgtggttttcgtccccagaaaaacctcttcaggcactggtgccgaggaccctaggccatctcggaaacgcaggtcccttggcgatgttgggaatgtgacggtggccgtgcccacggtggcagctttccccaacacttcctcgaccagcgtgcccacgagtccggaggagcacaggccttttgagaaggtggtgaacaaggagtcgctggtcatctccggcttgcgacacttcacgggctatcgcatcgagctgcaggcttgcaaccaggacacccctgaggaacggtgcagtgtggcagcctacgtcagtgcgaggaccatgcctgaagccaaggctgatgacattgttggccctgtgacgcatgaaatctttgagaacaacgtcgtccacttgatgtggcaggagccgaaggagcccaatggtctgatcgtgctgtatgaagtgagttatcggcgatatggtgatgaggagctgcatctctgcgtctcccgcaagcacttcgctctggaacggggctgcaggctgcgtgggctgtcaccggggaactacagcgtgcgaatccgggccacctcccttgcgggcaacggctcttggacggaacccacctatttctacgtgacagactatttagacgtcccgtcaaatattgcaaaaattatcatcggccccctcatctttgtctttctcttcagtgttgtgattggaagtatttatctattcctgagaaagaggcagccagatgggccgctgggaccgctttacgcttcttcaaaccctgagtatctcagtgccagtgatgtgtttccatgctctgtgtacgtgccggacgagtgggaggtgtctcgagagaagatcaccctccttcgagagctggggcagggctccttcggcatggtgtatgagggcaatgccagggacatcatcaagggtgaggcagagacccgcgtggcggtgaagacggtcaacgagtcagccagtctccgagagcggattgagttcctcaatgaggcctcggtcatgaagggcttcacctgccatcacgtggtgcgcctcctgggagtggtgtccaagggccagcccacgctggtggtgatggagctgatggctcacggagacctgaagagctacctccgttctctgcggccagaggctgagaataatcctggccgccctccccctacccttcaagagatgattcagatggcggcagagattgctgacgggatggcctacctgaacgccaagaagtttgtgcatcgggacctggcagcgagaaactgcatggtcgcccatgattttactgtcaaaattggagactttggaatgaccagagacatctatgaaacggattactaccggaaagggggcaagggtctgctccctgtacggtggatggcaccggagtccctgaaggatggggtcttcaccacttcttctgacatgtggtcctttggcgtggtcctttgggaaatcaccagcttggcagaacagccttaccaaggcctgtctaatgaacaggtgttgaaatttgtcatggatggagggtatctggatcaacccgacaactgtccagagagagtcactgacctcatgcgcatgtgctggcaattcaaccccaagatgaggccaaccttcctggagattgtcaacctgctcaaggacgacctgcaccccagctttccagaggtgtcgttcttccacagcgaggagaacaaggctcccgagagtgaggagctggagatggagtttgaggacatggagaatgtgcccctggaccgttcctctctccttccttcttattgactgggagactgtgctctcgacagattcttcttgtgtcagaagtctagcctcaggtttctaccctcccttcacattggtggccaagggaggagcatttcatttggagtgattatgaatcttttcaagaccaaaccaagctaggacattaaaaaaaaaaaaagaaaaagaaagaaaaaacaaaatggaaaaaggaaaaaaaaaaagaactgagatgacagagttttgagaatatatttgtaccatatttaatttttaaagtctctggtattagcctcataagttattgactattccccggggttggcggggagtggggacatgagttggtctgcctgttgtggggccgggaaggggagggagtcaggcacaagtggcctctttgtttggtcttaaaggcatccatttctgggaatgaagccatgttcgctgctaacacttttggatgttgtgaggccacgtggagtgtgtgagagactaggttttatggatggtctggttcaggtaccaggtctgctggaaggttcctgttcggataagctggtagctacctagctctgagcctgccttcaagaacacctgtgttcatcctctgattctctgtgtgtacctcttgtggcgtttcctctcccgggtgtgaacatcctaaccgttattgtgcaaacccaagaacgtcagatcccaaagcacaacaacctggatggactttgggaacatctaagcaatgtaagagagaggtgcactgagagtacgtcttggtcccctccaccctgagagcatctgacggtcctcagtactgaactcccggaagctgctctgagcccggtgacctcatctgggccaggtgtggtgcctgagctgaatgctcaggtgcttacagtgttgcaatccctaagagagtagagtctggaggagaaaccgtgaaaaagaccttacacaccaccaagaacttccgaatgggcgtgaatccaccgtttcttctctttgcaaaaagaaccaccacagctgctcaaagaacacagtgaactcatcactttggttcatcaaaaaatcatcgcccatgcgttattcctgagtgcattttcttacaactttttgactgcttccttttcttcttctcttaagagttgtgggcttaagaatgggatagagtcataatggcaacctccaagccctctcaattcttgattaagaacacaggtagacatgaatcccaattgtctattgctatcttatttatatgattcgggaaaatacagcatgtaaaaatattgctgaggagcctcagtgattgggtacaagaagcaagagtacagaaattatttttgccaaatttattttgtaaatatgagggtctgtacctaaatttaaaaaaaaaaacacgtagaactaggtattttgttctcttcttagtaaatttgtagtggttgtatactacactagctgcaattttcacatttttctaattcagaaaggtttttcttatattaggggaaaaagtatttattttaatatataaaatcactctgaaaatcactctcataaaaaatggagcgcatgtaaatttttatcaaagaaaaataaacaggtgaatggggatagtgattttcttttttcagcacagtctacctcagtgtattgttaagatgtgattcaatcatggacatctttgagatttcagaattctacctggaaccggtctgaatcagggaacgtgtgtatcagctgattcgaatgccagggaccagtaagaattttgagggagggagttgggatggagaaggtatggcctttatgcgagcatagatccttttcttcctggctggtaatattcttctctgaatttaatcttcctttaaaaaaaaatcctccatctattgtcactatgttccccaaacataaactaagttccaggctgtcatgatgtatctgatatatggggtaacccagcaaggtgtaccttcctttggtgagagatggctgccggggcaaagacgggctttgattcagagcaagcattcccacctgttccatggaatccccctgaagtgagcacaaaggtgccctgggctccctgatggtttatgcccactcctttcaggctggtgatgcaccttacacacaaacacctaatgcaatgtctttttaaattctccaagtgggatgggagcatgtgagggaaattccaatccaaaacccattaatgtgctgaacgctttttttttttttttttttttttgcaacaacaccttggacctctgtgttggggtttgactgacctcaagctgatattattggaccttgtgcagctttgataacccatgtgagagtctaggcaggaccagtggggcccaaatcttgctgctcttgtacttttaggcactgcccttgcagactcacctttctccacctgccctggagaaaggtagggtgtgctgggcctgccccttgcaaatgggattcaccagtttcatttatttgactctactgccacagtgaaaagagcaaacagctattgggttgcaaacctcctttgacattaggaaatgttgactttgtaacaataaaactttggtcctagaaagacacggttgtcctgggagtttgtagtgttaagttgcaacaacaacaacaaaaagcaacaaaaccagcttaggataacactttttgttgcttgttcttaaagatgtctcactatgattaaaacccttttcattaatgtagtgaaagccacacaggagttccttcttccaggaggagaataccaagcacatcactttctctctgcatcagtgatgtcaaatacgcatcagaaaatgttcaggttttaggagctgtcctaggtgctgtttcatcattggaagcagtgagaaagagaagcactgctgcttgtctggatataggctgaggatgattgagagaagctgtgggaactgacacaagggtctgcataggtcatcctgtgaccctggggactatgttaccaactgacagacagatctttcactgtatcctagcagggcaggtagtccaccaagaaatgtgcttattggattgggaggtgtttatttgtagtctgctgtaacacgtgtgaaagagcaggagcgtcatcagcatatgacttgcgctggtcatccggtaaatggatgtgctgtagtcccagtgctaatcatttctctccttcacagtgggtggaagtttagggttaaatgtcctttgaatgtcacctggtgagtccttgacaccttaggctcttcagaaacaatggttttgttgaggatggggaacagggaatgccgattttatatacatggtacacagagaggggtgtcacttcagaaaatcttccagcatgttcttcagaatattaatttatatgcgaggtgaggttgggaatgaaaagaacaggtcagcacttttttttttcctagaacatacaaaagaacatggtggactttcagggagtgcaatggaaggtgaatatttccttaagggtccccgagaaatgggagtgaggggaggggacacaatggctttttgagcttacttttaccttctgatactagtcaaggtccagaaccagccaccagccaaatttctatctgggtgcgggccactgaaaatccttgttaaaaaccagatcacaaatctggggctcttggtcccattggagaaggaaggaagagcctcaaaataagtgtgcacccatgcacatattcaggaacagcttgtttagtctttacactttgcctgaaagttgcttctcctcgtccctttgtgtgcctgggtggcctcggccctgtgcgttggcaacgcaggatcaaatgtgctgcagcttttgcagaaaacaactcagaaacacaaaaccccccaacagctcaattattattttttcaatgttttcctacaagagccaagtagcaccatgtacagaagacgcctttttttttggaatattgaaatcgttctgcatgtaaaatatgggataatgacctgtttatattaaaattctgattaaattatctgagaata

SEQ ID NO: 448386 - DNA, 3885 bp, Homo sapiens
ggtcctgtaacctgtggacactgtcagctcaccatcagctgggagaggtggggccctggaggctaagcttagttgctgtaaacattagtgtagcaaggcaggaggcagcaagctccctctctccaaccccgaacacggatatatccgtgttcggggttggcggggagtggggacatgagttggtctgcctgttgtggggccgggaaggggagggagtcaggcacaagtggcctctttgtttggtcttaaaggcatccatttctgggaatgaagccatgttcgctgctaacacttttggatgttgtgaggccacgtggagtgtgtgagagactaggttttatggatggtctggttcaggtaccaggtctgctggaaggttcctgttcggataagctggtagctacctagctctgagcctgccttcaagaacacctgtgttcatcctctgattctctgtgtgtacctcttgtggcgtttcctctcccgggtgtgaacatcctaaccgttattgtgcaaacccaagaacgtcagatcccaaagcacaacaacctggatggactttgggaacatctaagcaatgtaagagagaggtgcactgagagtacgtcttggtcccctccaccctgagagcatctgacggtcctcagtactgaactcccggaagctgctctgagcccggtgacctcatctgggccaggtgtggtgcctgagctgaatgctcaggtgcttacagtgttgcaatccctaagagagtagagtctggaggagaaaccgtgaaaaagaccttacacaccaccaagaacttccgaatgggcgtgaatccaccgtttcttctctttgcaaaaagaaccaccacagctgctcaaagaacacagtgaactcatcactttggttcatcaaaaaatcatcgcccatgcgttattcctgagtgcattttcttacaactttttgactgcttccttttcttcttctcttaagagttgtgggcttaagaatgggatagagtcataatggcaacctccaagccctctcaattcttgattaagaacacaggtagacatgaatcccaattgtctattgctatcttatttatatgattcgggaaaatacagcatgtaaaaatattgctgaggagcctcagtgattgggtacaagaagcaagagtacagaaattatttttgccaaatttattttgtaaatatgagggtctgtacctaaatttaaaaaaaaaaacacgtagaactaggtattttgttctcttcttagtaaatttgtagtggttgtatactacactagctgcaattttcacatttttctaattcagaaaggtttttcttatattaggggaaaaagtatttattttaatatataaaatcactctgaaaatcactctcataaaaaatggagcgcatgtaaatttttatcaaagaaaaataaacaggtgaatggggatagtgattttcttttttcagcacagtctacctcagtgtattgttaagatgtgattcaatcatggacatctttgagatttcagaattctacctggaaccggtctgaatcagggaacgtgtgtatcagctgattcgaatgccagggaccagtaagaattttgagggagggagttgggatggagaaggtatggcctttatgcgagcatagatccttttcttcctggctggtaatattcttctctgaatttaatcttcctttaaaaaaaaatcctccatctattgtcactatgttccccaaacataaactaagttccaggctgtcatgatgtatctgatatatggggtaacccagcaaggtgtaccttcctttggtgagagatggctgccggggcaaagacgggctttgattcagagcaagcattcccacctgttccatggaatccccctgaagtgagcacaaaggtgccctgggctccctgatggtttatgcccactcctttcaggctggtgatgcaccttacacacaaacacctaatgcaatgtctttttaaattctccaagtgggatgggagcatgtgagggaaattccaatccaaaacccattaatgtgctgaacgctttttttttttttttttttttttgcaacaacaccttggacctctgtgttggggtttgactgacctcaagctgatattattggaccttgtgcagctttgataacccatgtgagagtctaggcaggaccagtggggcccaaatcttgctgctcttgtacttttaggcactgcccttgcagactcacctttctccacctgccctggagaaaggtagggtgtgctgggcctgccccttgcaaatgggattcaccagtttcatttatttgactctactgccacagtgaaaagagcaaacagctattgggttgcaaacctcctttgacattaggaaatgttgactttgtaacaataaaactttggtcctagaaagacacggttgtcctgggagtttgtagtgttaagttgcaacaacaacaacaaaaagcaacaaaaccagcttaggataacactttttgttgcttgttcttaaagatgtctcactatgattaaaacccttttcattaatgtagtgaaagccacacaggagttccttcttccaggaggagaataccaagcacatcactttctctctgcatcagtgatgtcaaatacgcatcagaaaatgttcaggttttaggagctgtcctaggtgctgtttcatcattggaagcagtgagaaagagaagcactgctgcttgtctggatataggctgaggatgattgagagaagctgtgggaactgacacaagggtctgcataggtcatcctgtgaccctggggactatgttaccaactgacagacagatctttcactgtatcctagcagggcaggtagtccaccaagaaatgtgcttattggattgggaggtgtttatttgtagtctgctgtaacacgtgtgaaagagcaggagcgtcatcagcatatgacttgcgctggtcatccggtaaatggatgtgctgtagtcccagtgctaatcatttctctccttcacagtgggtggaagtttagggttaaatgtcctttgaatgtcacctggtgagtccttgacaccttaggctcttcagaaacaatggttttgttgaggatggggaacagggaatgccgattttatatacatggtacacagagaggggtgtcacttcagaaaatcttccagcatgttcttcagaatattaatttatatgcgaggtgaggttgggaatgaaaagaacaggtcagcacttttttttttcctagaacatacaaaagaacatggtggactttcagggagtgcaatggaaggtgaatatttccttaagggtccccgagaaatgggagtgaggggaggggacacaatggctttttgagcttacttttaccttctgatactagtcaaggtccagaaccagccaccagccaaatttctatctgggtgcgggccactgaaaatccttgttaaaaaccagatcacaaatctggggctcttggtcccattggagaaggaaggaagagcctcaaaataagtgtgcacccatgcacatattcaggaacagcttgtttagtctttacactttgcctgaaagttgcttctcctcgtccctttgtgtgcctgggtggcctcggccctgtgcgttggcaacgcaggatcaaatgtgctgcagcttttgcagaaaacaactcagaaacacaaaaccccccaacagctcaattattattttttcaatgttttcctacaagagccaagtagcaccatgtacagaagacgcctttttttttggaatattgaaatcgttctgcatgtaaaatatgggataatgacctgtttatattaaaattctgattaaattatctgagaata

SEQ ID NO: 448387 - DNA, 2254 bp, Homo sapiens
  misc_feature (1047)..(1047): n is a, c, g, or t
  misc_feature (1776)..(1776): n is a, c, g, or t
ggggggctgcgcggccgggtcggtgcgcacacgagaaggacgcgcggcccccagcgctcttgggggccgcctcggagcatgacccccgcgggccagcgccgcgcgcctgatccgaggagaccccgcgctcccgcagccatgggcaccgggggccggcggggggcggcggccgcgccgctgctggtggcggtggccgcgctgctactgggcgccgcgggccacctgtaccccggagaggtgtgtcccggcatggatatccggaacaacctcactaggttgcatgagctggagaattgctctgtcatcgaaggacacttgcagatactcttgatgttcaaaacgaggcccgaagatttccgagacctcagtttccccaaactcatcatgatcactgattacttgctgctcttccgggtctatgggctcgagagcctgaaggacctgttccccaacctcacggtcatccggggatcacgactgttctttaactacgcgctggtcatcttcgagatggttcacctcaaggaactcggcctctacaacctgatgaacatcacccggggttctgtccgcatcgagaagaacaatgagctctgttacttggccactatcgactggtcccgtatcctggattccgtggaggataattacatcgtgttgaacaaagatgacaacgaggagtgtggagacatctgtccgggtaccgcgaagggcaagaccaactgccccgccaccgtcatcaacgggcagtttgtcgaacgatgttggactcatagtcactgccagaaagtttgcccgaccatctgtaagtcacacggctgcaccgccgaaggcctctgttgccacagcgagtgcctgggcaactgttctcagcccgacgaccccaccaagtgcgtggcctgccgcaacttctacctggacggcaggtgtgtggagacctgcccgcccccgtactaccacttccaggactggcgctgtgtgaacttcagcttctgccaggacctgcaccacaaatgcaagaactcgcggaggcagggctgccaccantacgtcattcacaacaacaagtgcatccctgagtgtccctccgggtacacgatgaattccagcaacttgctgtgcaccccatgcctgggtccctgtcccaaggtgtgccacctcctagaaggcgagaagaccatcgactcggtgacgtctgcccaggagctccgaggatgcaccgtcatcaacgggagtctgatcatcaacattcgaggaggcaacaatctggcagctgagctagaagccaacctcggcctcattgaagaaatttcagggtatctaaaaatccgccgatcctacgctctggtgtcactttccttcttccggaagttacgtctgattcgaggagagaccttggaaattgggaactactccttctatgccttggacaaccagaacctaaggcagctctgggactggagcaaacacaacctcaccatcactcaggggaaactcttcttccactataaccccaaactctgcttgtcagaaatccacaagatggaagaagtttcaggaaccaaggggcgccaggagagaaacgacattgccctgaagaccaatggggaccaggcatcctgtgaaaatgagttacttaaattttcttacattcggacatcttttgacaagatcttgctgagatgggagccgtactggccccccgacttccgagacctcttggggttcatgctgttctacaaagaggccccttatcagaatgtgacggagttcgangggcaggatgcgtgtggttccaacagttggacggtggtagacattgacccacccctgaggtccaacgaccccaaatcacagaaccacccagggtggctgatgcggggtctcaagccctggacccagtatgccatctttgtgaagaccctggtcaccttttcggatgaacgccggacctatggggccaagagtgacatcatttatgtccagacagatgccaccaacccctctgtgcccctggatccaatctcagtgtctaactcatcatcccagattattctgaagtggaaaccaccctccgaccccaatggcaacatcacccactacctggttttctgggagaggcaggcggaagacagtgagctgttcgagctggattattgcctcaaaggcagaagcaggaagcagggcagaagcaggaagcggcagaagcaggaagcagcagaagcaggaagcggcagaagcaggaagcgggtac

SEQ ID NO: 448388 - DNA, 1060 bp, Homo sapiens
ggggggctgcgcggccgggtcggtgcgcacacgagaaggacgcgcggcccccagcgctcttgggggccgcctcggagcatgacccccgcgggccagcgccgcgcgcctgatccgaggagaccccgcgctcccgcagccatgggcaccgggggccggcggggggcggcggccgcgccgctgctggtggcggtggccgcgctgctactgggcgccgcgggccacctgtaccccggagaggtgtgtcccggcatggatatccggaacaacctcactaggttgcatgagctggagaattgctctgtcatcgaaggacacttgcagatactcttgatgttcaaaacgaggcccgaagatttccgagacctcagtttccccaaactcatcatgatcactgattacttgctgctcttccgggtctatgggctcgagagcctgaaggacctgttccccaacctcacggtcatccggggatcacgactgttctttaactacgcgctggtcatcttcgagatggttcacctcaaggaactcggcctctacaacctgatgaacatcacccggggttctgtccgcatcgagaagaacaatgagctctgttacttggccactatcgactggtcccgtatcctggattccgtggaggataattacatcgtgttgaacaaagatgacaacgaggagtgtggagacatctgtccgggtaccgcgaagggcaagaccaactgccccgccaccgtcatcaacgggcagtttgtcgaacgatgttggactcatagtcactgccagaaaggtacgccggggatacagggttctaagcagtgtctcgtgccttgttctagaaagcttaaaatgttttatggcttaaaaatgttaaatggtcattaggtagggccggggaatagtgggtggtggcattcactagcccagggagtggcagacattttctgtaaagactcagatagtagatacttcagattttgcaggccatatggtctctgatgcaacgactcaattctgccactgtattggacaagcagccacaggcatgcataaatgtatg

SEQ ID NO: 448389 - DNA, 233 bp, Homo sapiens
cggacacatgtggcctccaagtgtcagagcccagtggtctgtctaatgaagttccctctgtcctcaaaggcgttggttttgtttccacagaaaaacctcttcaggcactggtgccgaggaccctaggtatgactcacctgtgcgacccctggtgcctgctccgcgcagggccggcggcgtgccaggcagatgcctcggagaacccaggggtttctctggctttttgcatgcgg

SEQ ID NO: 448390 - DNA, 305 bp, Homo sapiens
cgtgagtgtgagtggccaagttgcaaaactggctcttacctttgaatcttcccccattcatactcagccaggcacatggggaggagacccttaagggaatagcagcgtcacctctgccttctcacggtccctccaggaagtgtgggggtcccaggctttggtctgaaactacactgaaatagctcatttttgccttttgttttaacttttccaggtgaaaatgagttacttaaattttcttacattcggacatcttttgacaagatcttgctgagatgggagccgtactggccccccgacttccg

SEQ ID NO: 448391 - DNA, 202 bp, Homo sapiens
aaatgagttacttaaattttcttacattcggacatcttttgacaagatcttgctgagatgggagccgtactggccccccgacttccgagacctcttggggttcatgctgttctacaaagaggcgtaagtagaagagttagagagacgctgaggaggcgagggctggctggctctgtgcttgctacgtttgtgctccaatctg

SEQ ID NO: 448392 - DNA, 9086 bp, Homo sapiens
  misc_feature (1047)..(1047): n is a, c, g, or t
  misc_feature (1776)..(1776): n is a, c, g, or t
ggggggctgcgcggccgggtcggtgcgcacacgagaaggacgcgcggcccccagcgctcttgggggccgcctcggagcatgacccccgcgggccagcgccgcgcgcctgatccgaggagaccccgcgctcccgcagccatgggcaccgggggccggcggggggcggcggccgcgccgctgctggtggcggtggccgcgctgctactgggcgccgcgggccacctgtaccccggagaggtgtgtcccggcatggatatccggaacaacctcactaggttgcatgagctggagaattgctctgtcatcgaaggacacttgcagatactcttgatgttcaaaacgaggcccgaagatttccgagacctcagtttccccaaactcatcatgatcactgattacttgctgctcttccgggtctatgggctcgagagcctgaaggacctgttccccaacctcacggtcatccggggatcacgactgttctttaactacgcgctggtcatcttcgagatggttcacctcaaggaactcggcctctacaacctgatgaacatcacccggggttctgtccgcatcgagaagaacaatgagctctgttacttggccactatcgactggtcccgtatcctggattccgtggaggataattacatcgtgttgaacaaagatgacaacgaggagtgtggagacatctgtccgggtaccgcgaagggcaagaccaactgccccgccaccgtcatcaacgggcagtttgtcgaacgatgttggactcatagtcactgccagaaagtttgcccgaccatctgtaagtcacacggctgcaccgccgaaggcctctgttgccacagcgagtgcctgggcaactgttctcagcccgacgaccccaccaagtgcgtggcctgccgcaacttctacctggacggcaggtgtgtggagacctgcccgcccccgtactaccacttccaggactggcgctgtgtgaacttcagcttctgccaggacctgcaccacaaatgcaagaactcgcggaggcagggctgccaccantacgtcattcacaacaacaagtgcatccctgagtgtccctccgggtacacgatgaattccagcaacttgctgtgcaccccatgcctgggtccctgtcccaaggtgtgccacctcctagaaggcgagaagaccatcgactcggtgacgtctgcccaggagctccgaggatgcaccgtcatcaacgggagtctgatcatcaacattcgaggaggcaacaatctggcagctgagctagaagccaacctcggcctcattgaagaaatttcagggtatctaaaaatccgccgatcctacgctctggtgtcactttccttcttccggaagttacgtctgattcgaggagagaccttggaaattgggaactactccttctatgccttggacaaccagaacctaaggcagctctgggactggagcaaacacaacctcaccatcactcaggggaaactcttcttccactataaccccaaactctgcttgtcagaaatccacaagatggaagaagtttcaggaaccaaggggcgccaggagagaaacgacattgccctgaagaccaatggggaccaggcatcctgtgaaaatgagttacttaaattttcttacattcggacatcttttgacaagatcttgctgagatgggagccgtactggccccccgacttccgagacctcttggggttcatgctgttctacaaagaggccccttatcagaatgtgacggagttcgangggcaggatgcgtgtggttccaacagttggacggtggtagacattgacccacccctgaggtccaacgaccccaaatcacagaaccacccagggtggctgatgcggggtctcaagccctggacccagtatgccatctttgtgaagaccctggtcaccttttcggatgaacgccggacctatggggccaagagtgacatcatttatgtccagacagatgccaccaacccctctgtgcccctggatccaatctcagtgtctaactcatcatcccagattattctgaagtggaaaccaccctccgaccccaatggcaacatcacccactacctggttttctgggagaggcaggcggaagacagtgagctgttcgagctggattattgcctcaaagggctgaagctgccctcgaggacctggtctccaccattcgagtctgaagattctcagaagcacaaccagagtgagtatgaggattcggccggcgaatgctgctcctgtccaaagacagactctcagatcctgaaggagctggaggagtcctcgtttaggaagacgtttgaggattacctgcacaacgtggttttcgtccccagaaaaacctcttcaggcactggtgccgaggaccctaggccatctcggaaacgcaggtcccttggcgatgttgggaatgtgacggtggccgtgcccacggtggcagctttccccaacacttcctcgaccagcgtgcccacgagtccggaggagcacaggccttttgagaaggtggtgaacaaggagtcgctggtcatctccggcttgcgacacttcacgggctatcgcatcgagctgcaggcttgcaaccaggacacccctgaggaacggtgcagtgtggcagcctacgtcagtgcgaggaccatgcctgaagccaaggctgatgacattgttggccctgtgacgcatgaaatctttgagaacaacgtcgtccacttgatgtggcaggagccgaaggagcccaatggtctgatcgtgctgtatgaagtgagttatcggcgatatggtgatgaggagctgcatctctgcgtctcccgcaagcacttcgctctggaacggggctgcaggctgcgtgggctgtcaccggggaactacagcgtgcgaatccgggccacctcccttgcgggcaacggctcttggacggaacccacctatttctacgtgacagactatttagacgtcccgtcaaatattgcaaaaattatcatcggccccctcatctttgtctttctcttcagtgttgtgattggaagtatttatctattcctgagaaagaggcagccagatgggccgctgggaccgctttacgcttcttcaaaccctgagtatctcagtgccagtgatgtgtttccatgctctgtgtacgtgccggacgagtgggaggtgtctcgagagaagatcaccctccttcgagagctggggcagggctccttcggcatggtgtatgagggcaatgccagggacatcatcaagggtgaggcagagacccgcgtggcggtgaagacggtcaacgagtcagccagtctccgagagcggattgagttcctcaatgaggcctcggtcatgaagggcttcacctgccatcacgtggtgcgcctcctgggagtggtgtccaagggccagcccacgctggtggtgatggagctgatggctcacggagacctgaagagctacctccgttctctgcggccagaggctgagaataatcctggccgccctccccctacccttcaagagatgattcagatggcggcagagattgctgacgggatggcctacctgaacgccaagaagtttgtgcatcgggacctggcagcgagaaactgcatggtcgcccatgattttactgtcaaaattggagactttggaatgaccagagacatctatgaaacggattactaccggaaagggggcaagggtctgctccctgtacggtggatggcaccggagtccctgaaggatggggtcttcaccacttcttctgacatgtggtcctttggcgtggtcctttgggaaatcaccagcttggcagaacagccttaccaaggcctgtctaatgaacaggtgttgaaatttgtcatggatggagggtatctggatcaacccgacaactgtccagagagagtcactgacctcatgcgcatgtgctggcaattcaaccccaagatgaggccaaccttcctggagattgtcaacctgctcaaggacgacctgcaccccagctttccagaggtgtcgttcttccacagcgaggagaacaaggctcccgagagtgaggagctggagatggagtttgaggacatggagaatgtgcccctggaccgttcctcgcactgtcagagggaggaggcggggggccgggatggagggtcctcgctgggtttcaagcggagctacgaggaacacatcccttacacacacatgaacggaggcaagaaaaacgggcggattctgaccttgcctcggtccaatccttcctaacagtgcctaccgtggcgggggcgggcaggggttcccattttcgctttcctctggtttgaaagcctctggaaaactcaggattctcacgactctaccatgtccaatggagttcagagatcgttcctatacatttctgttcatcttaaggtggactcgtttggttaccaatttaactagtcctgcagaggatttaactgtgaacctggagggcaaggggtttccacagttgctgctcctttggggcaacgacggtttcaaaccaggattttgtgttttttcgttccccccacccgcccccagcagatggaaagaaagcacctgtttttacaaattctttttttttttttttttttttgctggtgtctgagcttcagtataaaagacaaaacttcctgtttgtggaacaaaagttcgaaagaaaaaacaaaacaaaaacacccagccctgttccaggagaatttcaagttttacaggttgagcttcaagatggtttttttggttttttttttttctctcatccaggctgaaggattttttttttctttacaaaatgagttcctcaaattgaccaatagctgctgctttcatattttggataagggtctgtggtcccggcgtgtgctcacgtgtgtatgcacgtgtgtgtgtccattagacacggctgatgtgtgtgcaaagtatccatgcggagttgatgctttgggaattggctcatgaaggttcttctcaagggtgcgagctcatccccctctctccttccttcttattgactgggagactgtgctctcgacagattcttcttgtgtcagaagtctagcctcaggtttctaccctcccttcacattggtggccaagggaggagcatttcatttggagtgattatgaatcttttcaagaccaaaccaagctaggacattaaaaaaaaaaaaagaaaaagaaagaaaaaacaaaatggaaaaaggaaaaaaaaaaagaactgagatgacagagttttgagaatatatttgtaccatatttaatttttaaagtctctggtattagcctcataagttattgactattccccggggttggcggggagtggggacatgagttggtctgcctgttgtggggccgggaaggggagggagtcaggcacaagtggcctctttgtttggtcttaaaggcatccatttctgggaatgaagccatgttcgctgctaacacttttggatgttgtgaggccacgtggagtgtgtgagagactaggttttatggatggtctggttcaggtaccaggtctgctggaaggttcctgttcggataagctggtagctacctagctctgagcctgccttcaagaacacctgtgttcatcctctgattctctgtgtgtacctcttgtggcgtttcctctcccgggtgtgaacatcctaaccgttattgtgcaaacccaagaacgtcagatcccaaagcacaacaacctggatggactttgggaacatctaagcaatgtaagagagaggtgcactgagagtacgtcttggtcccctccaccctgagagcatctgacggtcctcagtactgaactcccggaagctgctctgagcccggtgacctcatctgggccaggtgtggtgcctgagctgaatgctcaggtgcttacagtgttgcaatccctaagagagtagagtctggaggagaaaccgtgaaaaagaccttacacaccaccaagaacttccgaatgggcgtgaatccaccgtttcttctctttgcaaaaagaaccaccacagctgctcaaagaacacagtgaactcatcactttggttcatcaaaaaatcatcgcccatgcgttattcctgagtgcattttcttacaactttttgactgcttccttttcttcttctcttaagagttgtgggcttaagaatgggatagagtcataatggcaacctccaagccctctcaattcttgattaagaacacaggtagacatgaatcccaattgtctattgctatcttatttatatgattcgggaaaatacagcatgtaaaaatattgctgaggagcctcagtgattgggtacaagaagcaagagtacagaaattatttttgccaaatttattttgtaaatatgagggtctgtacctaaatttaaaaaaaaaaacacgtagaactaggtattttgttctcttcttagtaaatttgtagtggttgtatactacactagctgcaattttcacatttttctaattcagaaaggtttttcttatattaggggaaaaagtatttattttaatatataaaatcactctgaaaatcactctcataaaaaatggagcgcatgtaaatttttatcaaagaaaaataaacaggtgaatggggatagtgattttcttttttcagcacagtctacctcagtgtattgttaagatgtgattcaatcatggacatctttgagatttcagaattctacctggaaccggtctgaatcagggaacgtgtgtatcagctgattcgaatgccagggaccagtaagaattttgagggagggagttgggatggagaaggtatggcctttatgcgagcatagatccttttcttcctggctggtaatattcttctctgaatttaatcttcctttaaaaaaaaatcctccatctattgtcactatgttccccaaacataaactaagttccaggctgtcatgatgtatctgatatatggggtaacccagcaaggtgtaccttcctttggtgagagatggctgccggggcaaagacgggctttgattcagagcaagcattcccacctgttccatggaatccccctgaagtgagcacaaaggtgccctgggctccctgatggtttatgcccactcctttcaggctggtgatgcaccttacacacaaacacctaatgcaatgtctttttaaattctccaagtgggatgggagcatgtgagggaaattccaatccaaaacccattaatgtgctgaacgctttttttttttttttttttttttgcaacaacaccttggacctctgtgttggggtttgactgacctcaagctgatattattggaccttgtgcagctttgataacccatgtgagagtctaggcaggaccagtggggcccaaatcttgctgctcttgtacttttaggcactgcccttgcagactcacctttctccacctgccctggagaaaggtagggtgtgctgggcctgccccttgcaaatgggattcaccagtttcatttatttgactctactgccacagtgaaaagagcaaacagctattgggttgcaaacctcctttgacattaggaaatgttgactttgtaacaataaaactttggtcctagaaagacacggttgtcctgggagtttgtagtgttaagttgcaacaacaacaacaaaaagcaacaaaaccagcttaggataacactttttgttgcttgttcttaaagatgtctcactatgattaaaacccttttcattaatgtagtgaaagccacacaggagttccttcttccaggaggagaataccaagcacatcactttctctctgcatcagtgatgtcaaatacgcatcagaaaatgttcaggttttaggagctgtcctaggtgctgtttcatcattggaagcagtgagaaagagaagcactgctgcttgtctggatataggctgaggatgattgagagaagctgtgggaactgacacaagggtctgcataggtcatcctgtgaccctggggactatgttaccaactgacagacagatctttcactgtatcctagcagggcaggtagtccaccaagaaatgtgcttattggattgggaggtgtttatttgtagtctgctgtaacacgtgtgaaagagcaggagcgtcatcagcatatgacttgcgctggtcatccggtaaatggatgtgctgtagtcccagtgctaatcatttctctccttcacagtgggtggaagtttagggttaaatgtcctttgaatgtcacctggtgagtccttgacaccttaggctcttcagaaacaatggttttgttgaggatggggaacagggaatgccgattttatatacatggtacacagagaggggtgtcacttcagaaaatcttccagcatgttcttcagaatattaatttatatgcgaggtgaggttgggaatgaaaagaacaggtcagcacttttttttttcctagaacatacaaaagaacatggtggactttcagggagtgcaatggaaggtgaatatttccttaagggtccccgagaaatgggagtgaggggaggggacacaatggctttttgagcttacttttaccttctgatactagtcaaggtccagaaccagccaccagccaaatttctatctgggtgcgggccactgaaaatccttgttaaaaaccagatcacaaatctggggctcttggtcccattggagaaggaaggaagagcctcaaaataagtgtgcacccatgcacatattcaggaacagcttgtttagtctttacactttgcctgaaagttgcttctcctcgtccctttgtgtgcctgggtggcctcggccctgtgcgttggcaacgcaggatcaaatgtgctgcagcttttgcagaaaacaactcagaaacacaaaaccccccaacagctcaattattattttttcaatgttttcctacaagagccaagtagcaccatgtacagaagacgcctttttttttggaatattgaaatcgttctgcatgtaaaatatgggataatgacctgtttatattaaaattctgattaaattatctgagaata

SEQ ID NO: 448393 - DNA, 9032 bp, Homo sapiens
  misc_feature (1047)..(1047): n is a, c, g, or t
  misc_feature (1776)..(1776): n is a, c, g, or t
ggggggctgcgcggccgggtcggtgcgcacacgagaaggacgcgcggcccccagcgctcttgggggccgcctcggagcatgacccccgcgggccagcgccgcgcgcctgatccgaggagaccccgcgctcccgcagccatgggcaccgggggccggcggggggcggcggccgcgccgctgctggtggcggtggccgcgctgctactgggcgccgcgggccacctgtaccccggagaggtgtgtcccggcatggatatccggaacaacctcactaggttgcatgagctggagaattgctctgtcatcgaaggacacttgcagatactcttgatgttcaaaacgaggcccgaagatttccgagacctcagtttccccaaactcatcatgatcactgattacttgctgctcttccgggtctatgggctcgagagcctgaaggacctgttccccaacctcacggtcatccggggatcacgactgttctttaactacgcgctggtcatcttcgagatggttcacctcaaggaactcggcctctacaacctgatgaacatcacccggggttctgtccgcatcgagaagaacaatgagctctgttacttggccactatcgactggtcccgtatcctggattccgtggaggataattacatcgtgttgaacaaagatgacaacgaggagtgtggagacatctgtccgggtaccgcgaagggcaagaccaactgccccgccaccgtcatcaacgggcagtttgtcgaacgatgttggactcatagtcactgccagaaagtttgcccgaccatctgtaagtcacacggctgcaccgccgaaggcctctgttgccacagcgagtgcctgggcaactgttctcagcccgacgaccccaccaagtgcgtggcctgccgcaacttctacctggacggcaggtgtgtggagacctgcccgcccccgtactaccacttccaggactggcgctgtgtgaacttcagcttctgccaggacctgcaccacaaatgcaagaactcgcggaggcagggctgccaccantacgtcattcacaacaacaagtgcatccctgagtgtccctccgggtacacgatgaattccagcaacttgctgtgcaccccatgcctgggtccctgtcccaaggtgtgccacctcctagaaggcgagaagaccatcgactcggtgacgtctgcccaggagctccgaggatgcaccgtcatcaacgggagtctgatcatcaacattcgaggaggcaacaatctggcagctgagctagaagccaacctcggcctcattgaagaaatttcagggtatctaaaaatccgccgatcctacgctctggtgtcactttccttcttccggaagttacgtctgattcgaggagagaccttggaaattgggaactactccttctatgccttggacaaccagaacctaaggcagctctgggactggagcaaacacaacctcaccatcactcaggggaaactcttcttccactataaccccaaactctgcttgtcagaaatccacaagatggaagaagtttcaggaaccaaggggcgccaggagagaaacgacattgccctgaagaccaatggggaccaggcatcctgtgaaaatgagttacttaaattttcttacattcggacatcttttgacaagatcttgctgagatgggagccgtactggccccccgacttccgagacctcttggggttcatgctgttctacaaagaggccccttatcagaatgtgacggagttcgangggcaggatgcgtgtggttccaacagttggacggtggtagacattgacccacccctgaggtccaacgaccccaaatcacagaaccacccagggtggctgatgcggggtctcaagccctggacccagtatgccatctttgtgaagaccctggtcaccttttcggatgaacgccggacctatggggccaagagtgacatcatttatgtccagacagatgccaccaacccctctgtgcccctggatccaatctcagtgtctaactcatcatcccagattattctgaagtggaaaccaccctccgaccccaatggcaacatcacccactacctggttttctgggagaggcaggcggaagacagtgagctgttcgagctggattattgcctcaaagggctgaagctgccctcgaggacctggtctccaccattcgagtctgaagattctcagaagcacaaccagagtgagtatgaggattcggccggcgaatgctgctcctgtccaaagacagactctcagatcctgaaggagctggaggagtcctcgtttaggaagacgtttgaggattacctgcacaacgtggttttcgtccccagaaaaacctcttcaggcactggtgccgaggaccctaggccatctcggaaacgcaggtcccttggcgatgttgggaatgtgacggtggccgtgcccacggtggcagctttccccaacacttcctcgaccagcgtgcccacgagtccggaggagcacaggccttttgagaaggtggtgaacaaggagtcgctggtcatctccggcttgcgacacttcacgggctatcgcatcgagctgcaggcttgcaaccaggacacccctgaggaacggtgcagtgtggcagcctacgtcagtgcgaggaccatgcctgaagccaaggctgatgacattgttggccctgtgacgcatgaaatctttgagaacaacgtcgtccacttgatgtggcaggagccgaaggagcccaatggtctgatcgtgctgtatgaagtgagttatcggcgatatggtgatgaggagctgcatctctgcgtctcccgcaagcacttcgctctggaacggggctgcaggctgcgtgggctgtcaccggggaactacagcgtgcgaatccgggccacctcccttgcgggcaacggctcttggacggaacccacctatttctacgtgacagactatttagacgtcccgtcaaatattgcaaaaattatcatcggccccctcatctttgtctttctcttcagtgttgtgattggaagtatttatctattcctgagaaagaggcagccagatgggccgctgggaccgctttacgcttcttcaaaccctgagtatctcagtgccagtgatgtgtttccatgctctgtgtacgtgccggacgagtgggaggtgtctcgagagaagatcaccctccttcgagagctggggcagggctccttcggcatggtgtatgagggcaatgccagggacatcatcaagggtgaggcagagacccgcgtggcggtgaagacggtcaacgagtcagccagtctccgagagcggattgagttcctcaatgaggcctcggtcatgaagggcttcacctgccatcacgtggtgcgcctcctgggagtggtgtccaagggccagcccacgctggtggtgatggagctgatggctcacggagacctgaagagctacctccgttctctgcggccagaggctgagaataatcctggccgccctccccctacccttcaagagatgattcagatggcggcagagattgctgacgggatggcctacctgaacgccaagaagtttgtgcatcgggacctggcagcgagaaactgcatggtcgcccatgattttactgtcaaaattggagactttggaatgaccagagacatctatgaaacggattactaccggaaagggggcaagggtctgctccctgtacggtggatggcaccggagtccctgaaggatggggtcttcaccacttcttctgacatgtggtcctttggcgtggtcctttgggaaatcaccagcttggcagaacagccttaccaaggcctgtctaatgaacaggtgttgaaatttgtcatggatggagggtatctggatcaacccgacaactgtccagagagagtcactgacctcatgcgcatgtgctggcaattcaaccccaagatgaggccaaccttcctggagattgtcaacctgctcaaggacgacctgcaccccagctttccagaggtgtcgttcttccacagcgaggagaacaaggctcccgagagtgaggagctggagatggagtttgaggacatggagaatgtgcccctggaccgttcctcgcactgtcagagggaggaggcggggggccgggatggagggtcctcgctgggtttcaagcggagctacgaggaacacatcccttacacacacatgaacggaggcaagaaaaacgggcggattctgaccttgcctcggtccaatccttcctaacagtgcctaccgtggcgggggcgggcaggggttcccattttcgctttcctctggtttgaaagcctctggaaaactcaggattctcacgactctaccatgtccaatggagttcagagatcgttcctatacatttctgttcatcttaaggtggactcgtttggttaccaatttaactagtcctgcagaggatttaactgtgaacctggagggcaaggggtttccacagttgctgctcctttggggcaacgacggtttcaaaccaggattttgtgttttttcgttccccccacccgcccccagcagatggaaagaaagcacctgtttttacaaattctttttttttttttttttttttgctggtgtctgagcttcagtataaaagacaaaacttcctgtttgtggaacaaaagttcgaaagaaaaaacaaaacaaaaacacccagccctgttccaggagaatttcaagttttacaggttgagcttcaagatggtttttttggttttttttttttctctcatccaggctgaaggattttttttttctttacaaaatgagttcctcaaattgaccaatagctgctgctttcatattttggataagggtctgtggtcccggcgtgtgctcacgtgtgtatgcacgtgtgtgtgtccattagacacggctgatgtgtgtgcaaagtatccatgcggagttgatgctttgggaattggctcatgaaggttcttctcaagggtgcgagctcatccccctctctccttccttcttattgactgggagactgtgctctcgacagattcttcttgtgtcagaagtctagcctcaggtttctaccctcccttcacattggtggccaagggaggagcatttcatttggagtgattatgaatcttttcaagaccaaaccaagctaggacattaaaaaaaaaaaaagaaaaagaaagaaaaaacaaaatggaaaaaggaaaaaaaaaaagaactgagatgacagagttttgagaatatatttgtaccatatttaatttttaaagtctctggtattagcctcataagttattgactattccccggggttggcggggagtggggacatgagttggtctgcctgttgtggggccgggaaggggagggagtcaggcacaagtggcctctttgtttggtcttaaaggcatccatttctgggaatgaagccatgttcgctgctaacacttttggatgttgtgaggccacgtggagtgtgtgagagactaggttttatggatggtctggttcaggtaccaggtctgctggaaggttcctgttcggataagctggtagctacctagctctgagcctgccttcaagaacacctgtgttcatcctctgattctctgtgtgtacctcttgtggcgtttcctctcccgggtgtgaacatcctaaccgttattgtgcaaacccaagaacgtcagatcccaaagcacaacaacctggatggactttgggaacatctaagcaatgtaagagagaggtgcactgagagtacgtcttggtcccctccaccctgagagcatctgacggtcctcagtactgaactcccggaagctgctctgagcccggtgacctcatctgggccaggtgtggtgcctgagctgaatgctcaggtgcttacagtgttgcaatccctaagagagtagagtctggaggagaaaccgtgaaaaagaccttacacaccaccaagaacttccgaatgggcgtgaatccaccgtttcttctctttgcaaaaagaaccaccacagctgctcaaagaacacagtgaactcatcactttggttcatcaaaaaatcatcgcccatgcgttattcctgagtgcattttcttacaactttttgactgcttccttttcttcttctcttaagagttgtgggcttaagaatgggatagagtcataatggcaacctccaagccctctcaattcttgattaagaacacaggtagacatgaatcccaattgtctattgctatcttatttatatgattcgggaaaatacagcatgtaaaaatattgctgaggagcctcagtgattgggtacaagaagcaagagtacagaaattatttttgccaaatttattttgtaaatatgagggtctgtacctaaatttaaaaaaaaaaacacgtagaactaggtattttgttctcttcttagtaaatttgtagtggttgtatactacactagctgcaattttcacatttttctaattcagaaaggtttttcttatattaggggaaaaagtatttattttaatatataaaatcactctgaaaatcactctcataaaaaatggagcgcatgtaaatttttatcaaagaaaaataaacaggtgaatggggatagtgattttcttttttcagcacagtctacctcagtgtattgttaagatgtgattcaatcatggacatctttgagatttcagaattctacctggaaccggtctgaatcagggaacgtgtgtatcagctgattcgaatgccagggaccagtaagaattttgagggagggagttgggatggagaaggtatggcctttatgcgagcatagatccttttcttcctggctggtaatattcttctctgaatttaatcttcctttaaaaaaaaatcctccatctattgtcactatgttccccaaacataaactaagttccaggctgtcatgatgtatctgatatatggggtaacccagcaaggtgtaccttcctttggtgagagatggctgccggggcaaagacgggctttgattcagagcaagcattcccacctgttccatggaatccccctgaagtgagcacaaaggtgccctgggctccctgatggtttatgcccactcctttcaggctggtgatgcaccttacacacaaacacctaatgcaatgtctttttaaattctccaagtgggatgggagcatgtgagggaaattccaatccaaaacccattaatgtgctgaacgctttttttttttttttttttttttgcaacaacaccttggacctctgtgttggggtttgactgacctcaagctgatattattggaccttgtgcagctttgataacccatgtgagagtctaggcaggaccagtggggcccaaatcttgctgctcttgtacttttaggcactgcccttgcagactcacctttctccacctgccctggagaaaggtagggtgtgctgggcctgccccttgcaaatgggattcaccagtttcatttatttgactctactgccacagtgaaaagagcaaacagctattgggttgcaaacctcctttgacattaggaaatgttgactttgtaacaataaaactttggtcctagaaagacacggttgtcctgggagtttgtagtgttaagttgcaacaacaacaacaaaaagcaacaaaaccagcttaggataacactttttgttgcttgttcttaaagatgtctcactatgattaaaacccttttcattaatgtagtgaaagccacacaggagttccttcttccaggaggagaataccaagcacatcactttctctctgcatcagtgatgtcaaatacgcatcagaaaatgttcaggttttaggagctgtcctaggtgctgtttcatcattggaagcagtgagaaagagaagcactgctgcttgtctggatataggctgaggatgattgagagaagctgtgggaactgacacaagggtctgcataggtcatcctgtgaccctggggactatgttaccaactgacagacagatctttcactgtatcctagcagggcaggtagtccaccaagaaatgtgcttattggattgggaggtgtttatttgtagtctgctgtaacacgtgtgaaagagcaggagcgtcatcagcatatgacttgcgctggtcatccggtaaatggatgtgctgtagtcccagtgctaatcatttctctccttcacagtgggtggaagtttagggttaaatgtcctttgaatgtcacctggtgagtccttgacaccttaggctcttcagaaacaatggttttgttgaggatggggaacagggaatgccgattttatatacatggtacacagagaggggtgtcacttcagaaaatcttccagcatgttcttcagaatattaatttatatgcgaggtgaggttgggaatgaaaagaacaggtcagcacttttttttttcctagaacatacaggtccccgagaaatgggagtgaggggaggggacacaatggctttttgagcttacttttaccttctgatactagtcaaggtccagaaccagccaccagccaaatttctatctgggtgcgggccactgaaaatccttgttaaaaaccagatcacaaatctggggctcttggtcccattggagaaggaaggaagagcctcaaaataagtgtgcacccatgcacatattcaggaacagcttgtttagtctttacactttgcctgaaagttgcttctcctcgtccctttgtgtgcctgggtggcctcggccctgtgcgttggcaacgcaggatcaaatgtgctgcagcttttgcagaaaacaactcagaaacacaaaaccccccaacagctcaattattattttttcaatgttttcctacaagagccaagtagcaccatgtacagaagacgcctttttttttggaatattgaaatcgttctgcatgtaaaatatgggataatgacctgtttatattaaaattctgattaaattatctgagaata

SEQ ID NO: 448394 - DNA, 6653 bp, Homo sapiens
  misc_feature (1047)..(1047): n is a, c, g, or t
  misc_feature (1776)..(1776): n is a, c, g, or t
ggggggctgcgcggccgggtcggtgcgcacacgagaaggacgcgcggcccccagcgctcttgggggccgcctcggagcatgacccccgcgggccagcgccgcgcgcctgatccgaggagaccccgcgctcccgcagccatgggcaccgggggccggcggggggcggcggccgcgccgctgctggtggcggtggccgcgctgctactgggcgccgcgggccacctgtaccccggagaggtgtgtcccggcatggatatccggaacaacctcactaggttgcatgagctggagaattgctctgtcatcgaaggacacttgcagatactcttgatgttcaaaacgaggcccgaagatttccgagacctcagtttccccaaactcatcatgatcactgattacttgctgctcttccgggtctatgggctcgagagcctgaaggacctgttccccaacctcacggtcatccggggatcacgactgttctttaactacgcgctggtcatcttcgagatggttcacctcaaggaactcggcctctacaacctgatgaacatcacccggggttctgtccgcatcgagaagaacaatgagctctgttacttggccactatcgactggtcccgtatcctggattccgtggaggataattacatcgtgttgaacaaagatgacaacgaggagtgtggagacatctgtccgggtaccgcgaagggcaagaccaactgccccgccaccgtcatcaacgggcagtttgtcgaacgatgttggactcatagtcactgccagaaagtttgcccgaccatctgtaagtcacacggctgcaccgccgaaggcctctgttgccacagcgagtgcctgggcaactgttctcagcccgacgaccccaccaagtgcgtggcctgccgcaacttctacctggacggcaggtgtgtggagacctgcccgcccccgtactaccacttccaggactggcgctgtgtgaacttcagcttctgccaggacctgcaccacaaatgcaagaactcgcggaggcagggctgccaccantacgtcattcacaacaacaagtgcatccctgagtgtccctccgggtacacgatgaattccagcaacttgctgtgcaccccatgcctgggtccctgtcccaaggtgtgccacctcctagaaggcgagaagaccatcgactcggtgacgtctgcccaggagctccgaggatgcaccgtcatcaacgggagtctgatcatcaacattcgaggaggcaacaatctggcagctgagctagaagccaacctcggcctcattgaagaaatttcagggtatctaaaaatccgccgatcctacgctctggtgtcactttccttcttccggaagttacgtctgattcgaggagagaccttggaaattgggaactactccttctatgccttggacaaccagaacctaaggcagctctgggactggagcaaacacaacctcaccatcactcaggggaaactcttcttccactataaccccaaactctgcttgtcagaaatccacaagatggaagaagtttcaggaaccaaggggcgccaggagagaaacgacattgccctgaagaccaatggggaccaggcatcctgtgaaaatgagttacttaaattttcttacattcggacatcttttgacaagatcttgctgagatgggagccgtactggccccccgacttccgagacctcttggggttcatgctgttctacaaagaggccccttatcagaatgtgacggagttcgangggcaggatgcgtgtggttccaacagttggacggtggtagacattgacccacccctgaggtccaacgaccccaaatcacagaaccacccagggtggctgatgcggggtctcaagccctggacccagtatgccatctttgtgaagaccctggtcaccttttcggatgaacgccggacctatggggccaagagtgacatcatttatgtccagacagatgccaccaacccctctgtgcccctggatccaatctcagtgtctaactcatcatcccagattattctgaagtggaaaccaccctccgaccccaatggcaacatcacccactacctggttttctgggagaggcaggcggaagacagtgagctgttcgagctggattattgcctcaaagggctgaagctgccctcgaggacctggtctccaccattcgagtctgaagattctcagaagcacaaccagagtgagtatgaggattcggccggcgaatgctgctcctgtccaaagacagactctcagatcctgaaggagctggaggagtcctcgtttaggaagacgtttgaggattacctgcacaacgtggttttcgtccccagaaaaacctcttcaggcactggtgccgaggaccctaggccatctcggaaacgcaggtcccttggcgatgttgggaatgtgacggtggccgtgcccacggtggcagctttccccaacacttcctcgaccagcgtgcccacgagtccggaggagcacaggccttttgagaaggtggtgaacaaggagtcgctggtcatctccggcttgcgacacttcacgggctatcgcatcgagctgcaggcttgcaaccaggacacccctgaggaacggtgcagtgtggcagcctacgtcagtgcgaggaccatgcctgaagccaaggctgatgacattgttggccctgtgacgcatgaaatctttgagaacaacgtcgtccacttgatgtggcaggagccgaaggagcccaatggtctgatcgtgctgtatgaagtgagttatcggcgatatggtgatgaggagctgcatctctgcgtctcccgcaagcacttcgctctggaacggggctgcaggctgcgtgggctgtcaccggggaactacagcgtgcgaatccgggccacctcccttgcgggcaacggctcttggacggaacccacctatttctacgtgacagactatttagacgtcccgtcaaatattgcaaaaattatcatcggccccctcatctttgtctttctcttcagtgttgtgattggaagtatttatctattcctgagaaagaggcagccagatgggccgctgggaccgctttacgcttcttcaaaccctgagtatctcagtgccagtgatgtgtttccatgctctgtgtacgtgccggacgagtgggaggtgtctcgagagaagatcaccctccttcgagagctggggcagggctccttcggcatggtgtatgagggcaatgccagggacatcatcaagggtgaggcagagacccgcgtggcggtgaagacggtcaacgagtcagccagtctccgagagcggattgagttcctcaatgaggcctcggtcatgaagggcttcacctgccatcacgtggtgcgcctcctgggagtggtgtccaagggccagcccacgctggtggtgatggagctgatggctcacggagacctgaagagctacctccgttctctgcggccagaggctgagaataatcctggccgccctccccctacccttcaagagatgattcagatggcggcagagattgctgacgggatggcctacctgaacgccaagaagtttgtgcatcgggacctggcagcgagaaactgcatggtcgcccatgattttactgtcaaaattggagactttggaatgaccagagacatctatgaaacggattactaccggaaagggggcaagggtctgctccctgtacggtggatggcaccggagtccctgaaggatggggtcttcaccacttcttctgacatgtggtcctttggcgtggtcctttgggaaatcaccagcttggcagaacagccttaccaaggcctgtctaatgaacaggtgttgaaatttgtcatggatggagggtatctggatcaacccgacaactgtccagagagagtcactgacctcatgcgcatgtgctggcaattcaaccccaagatgaggccaaccttcctggagattgtcaacctgctcaaggacgacctgcaccccagctttccagaggtgtcgttcttccacagcgaggagaacaaggctcccgagagtgaggagctggagatggagtttgaggacatggagaatgtgcccctggaccgttcctcgcactgtcagagggaggaggcggggggccgggatggagggtcctcgctgggtttcaagcggagctacgaggaacacatcccttacacacacatgaacggaggcaagaaaaacgggcggattctgaccttgcctcggtccaatccttcctaacagtgcctaccgtggcgggggcgggcaggggttcccattttcgctttcctctggtttgaaagcctctggaaaactcaggattctcacgactctaccatgtccaatggagttcagagatcgttcctatacatttctgttcatcttaaggtggactcgtttggttaccaatttaactagtcctgcagaggatttaactgtgaacctggagggcaaggggtttccacagttgctgctcctttggggcaacgacggtttcaaaccaggattttgtgttttttcgttccccccacccgcccccagcagatggaaagaaagcacctgtttttacaaattctttttttttttttttttttttgctggtgtctgagcttcagtataaaagacaaaacttcctgtttgtggaacaaaagttcgaaagaaaaaacaaaacaaaaacacccagccctgttccaggagaatttcaagttttacaggttgagcttcaagatggtttttttggttttttttttttctctcatccaggctgaaggattttttttttctttacaaaatgagttcctcaaattgaccaatagctgctgctttcatattttggataagggtctgtggtcccggcgtgtgctcacgtgtgtatgcacgtgtgtgtgtccattagacacggctgatgtgtgtgcaaagtatccatgcggagttgatgctttgggaattggctcatgaaggttcttctcaagggtgcgagctcatccccctctctccttccttcttattgactgggagactgtgctctcgacagattcttcttgtgtcagaagtctagcctcaggtttctaccctcccttcacattggtggccaagggaggagcatttcatttggagtgattatgaatcttttcaagaccaaaccaagctaggacattaaaaaaaaaaaaagaaaaagaaagaaaaaacaaaatggaaaaaggaaaaaaaaaaagaactgagatgacagagttttgagaatatatttgtaccatatttaatttttaaagtctctggtattagcctcataagttattgactattccccggggttggcggggagtggggacatgagttggtctgcctgttgtggggccgggaaggggagggagtcaggcacaagtggcctctttgtttggtcttaaaggcatccatttctgggaatgaagccatgttcgctgctaacacttttggatgttgtgaggccacgtggagtgtgtgagagactaggttttatggatggtctggttcaggtaccaggtctgctggaaggttcctgttcggataagctggtagctacctagctctgagcctgccttcaagaacacctgtgttcatcctctgattctctgtgtgtacctcttgtggcgtttcctctcccgggtgtgaacatcctaaccgttattgtgcaaacccaagaacgtcagatcccaaagcacaacaacctggatggactttgggaacatctaagcaatgtaagagagaggtgcactgagagtacgtcttggtcccctccaccctgagagcatctgacggtcctcagtactgaactcccggaagctgctctgagcccggtgacctcatctgggccaggtgtggtgcctgagctgaatgctcaggtgcttacagtgttgcaatccctaagagagtagagtctggaggagaaaccgtgaaaaagaccttacacaccaccaagaacttccgaatgggcgtgaatccaccgtttcttctctttgcaaaaagaaccaccacagctgctcaaagaacacagtgaactcatcactttggttcatcaaaaaatcatcgcccatgcgttattcctgagtgcattttcttacaactttttgactgcttccttttcttcttctcttaagagttgtgggcttaagaatgggatagagtcataatggcaacctccaagccctctcaattcttgattaagaacacaggtagacatgaatcccaattgtctattgctatcttatttatatgattcgggaaaatacagcatgtaaaaatattgctgaggagcctcagtgattgggtacaagaagcaagagtacagaaattatttttgccaaatttattttgtaaatatgagggtctgtacctaaatttaaaaaaaaaaacacgtagaactaggtattttgttctcttcttagtaaatttgtagtggttgtatactacactagctgcaattttcacatttttctaattcagaaaggtttttcttatattaggggaaaaagtatttattttaatatataaaatcactctgaaaatcactctcataaaaaatggagcgcatgtaaatttttatcaaagaaaaataaacaggtgaatgggga

SEQ ID NO: 448395 - DNA, 8437 bp, Homo sapiens
  misc_feature (1127)..(1127): n is a, c, g, or t
caggcccatcatctcaaggtaacggcacattcttattaccacatgcattagtccatttctgcactgctataaagaatacatggaactgggtaatttataaagaaaagaggtttaattggctgacagttctgcaggctgtacgggaagcatagcagcttctgcttctggggagacctcaggaaacttacaatcgtggcggaaagcaaaggggaggtaggcacatcttacatgagctgaggcaggagaatctcttgaacccagaaggcagaggttgcagtgagctgagatcgcaccactgcactccagcctgggcaacagagcgagactctgtcacacaaacacacacacacacacaaagaaataccatatcaggcagaaagatgcctgagatgtctgaaggaccttggataccgtgacacccccctcccctttctctttctctctctctctgctccgtccttagcttgctgtgcaccccatgcctgggtccctgtcccaaggtgtgccacctcctagaaggcgagaagaccatcgactcggtgacgtctgcccaggagctccgaggatgcaccgtcatcaacgggagtctgatcatcaacattcgaggaggcaacaatctggcagctgagctagaagccaacctcggcctcattgaagaaatttcagggtatctaaaaatccgccgatcctacgctctggtgtcactttccttcttccggaagttacgtctgattcgaggagagaccttggaaattgggaactactccttctatgccttggacaaccagaacctaaggcagctctgggactggagcaaacacaacctcaccatcactcaggggaaactcttcttccactataaccccaaactctgcttgtcagaaatccacaagatggaagaagtttcaggaaccaaggggcgccaggagagaaacgacattgccctgaagaccaatggggaccaggcatcctgtgaaaatgagttacttaaattttcttacattcggacatcttttgacaagatcttgctgagatgggagccgtactggccccccgacttccgagacctcttggggttcatgctgttctacaaagaggccccttatcagaatgtgacggagttcgangggcaggatgcgtgtggttccaacagttggacggtggtagacattgacccacccctgaggtccaacgaccccaaatcacagaaccacccagggtggctgatgcggggtctcaagccctggacccagtatgccatctttgtgaagaccctggtcaccttttcggatgaacgccggacctatggggccaagagtgacatcatttatgtccagacagatgccaccaacccctctgtgcccctggatccaatctcagtgtctaactcatcatcccagattattctgaagtggaaaccaccctccgaccccaatggcaacatcacccactacctggttttctgggagaggcaggcggaagacagtgagctgttcgagctggattattgcctcaaagggctgaagctgccctcgaggacctggtctccaccattcgagtctgaagattctcagaagcacaaccagagtgagtatgaggattcggccggcgaatgctgctcctgtccaaagacagactctcagatcctgaaggagctggaggagtcctcgtttaggaagacgtttgaggattacctgcacaacgtggttttcgtccccagaaaaacctcttcaggcactggtgccgaggaccctaggccatctcggaaacgcaggtcccttggcgatgttgggaatgtgacggtggccgtgcccacggtggcagctttccccaacacttcctcgaccagcgtgcccacgagtccggaggagcacaggccttttgagaaggtggtgaacaaggagtcgctggtcatctccggcttgcgacacttcacgggctatcgcatcgagctgcaggcttgcaaccaggacacccctgaggaacggtgcagtgtggcagcctacgtcagtgcgaggaccatgcctgaagccaaggctgatgacattgttggccctgtgacgcatgaaatctttgagaacaacgtcgtccacttgatgtggcaggagccgaaggagcccaatggtctgatcgtgctgtatgaagtgagttatcggcgatatggtgatgaggagctgcatctctgcgtctcccgcaagcacttcgctctggaacggggctgcaggctgcgtgggctgtcaccggggaactacagcgtgcgaatccgggccacctcccttgcgggcaacggctcttggacggaacccacctatttctacgtgacagactatttagacgtcccgtcaaatattgcaaaaattatcatcggccccctcatctttgtctttctcttcagtgttgtgattggaagtatttatctattcctgagaaagaggcagccagatgggccgctgggaccgctttacgcttcttcaaaccctgagtatctcagtgccagtgatgtgtttccatgctctgtgtacgtgccggacgagtgggaggtgtctcgagagaagatcaccctccttcgagagctggggcagggctccttcggcatggtgtatgagggcaatgccagggacatcatcaagggtgaggcagagacccgcgtggcggtgaagacggtcaacgagtcagccagtctccgagagcggattgagttcctcaatgaggcctcggtcatgaagggcttcacctgccatcacgtggtgcgcctcctgggagtggtgtccaagggccagcccacgctggtggtgatggagctgatggctcacggagacctgaagagctacctccgttctctgcggccagaggctgagaataatcctggccgccctccccctacccttcaagagatgattcagatggcggcagagattgctgacgggatggcctacctgaacgccaagaagtttgtgcatcgggacctggcagcgagaaactgcatggtcgcccatgattttactgtcaaaattggagactttggaatgaccagagacatctatgaaacggattactaccggaaagggggcaagggtctgctccctgtacggtggatggcaccggagtccctgaaggatggggtcttcaccacttcttctgacatgtggtcctttggcgtggtcctttgggaaatcaccagcttggcagaacagccttaccaaggcctgtctaatgaacaggtgttgaaatttgtcatggatggagggtatctggatcaacccgacaactgtccagagagagtcactgacctcatgcgcatgtgctggcaattcaaccccaagatgaggccaaccttcctggagattgtcaacctgctcaaggacgacctgcaccccagctttccagaggtgtcgttcttccacagcgaggagaacaaggctcccgagagtgaggagctggagatggagtttgaggacatggagaatgtgcccctggaccgttcctcgcactgtcagagggaggaggcggggggccgggatggagggtcctcgctgggtttcaagcggagctacgaggaacacatcccttacacacacatgaacggaggcaagaaaaacgggcggattctgaccttgcctcggtccaatccttcctaacagtgcctaccgtggcgggggcgggcaggggttcccattttcgctttcctctggtttgaaagcctctggaaaactcaggattctcacgactctaccatgtccaatggagttcagagatcgttcctatacatttctgttcatcttaaggtggactcgtttggttaccaatttaactagtcctgcagaggatttaactgtgaacctggagggcaaggggtttccacagttgctgctcctttggggcaacgacggtttcaaaccaggattttgtgttttttcgttccccccacccgcccccagcagatggaaagaaagcacctgtttttacaaattctttttttttttttttttttttgctggtgtctgagcttcagtataaaagacaaaacttcctgtttgtggaacaaaagttcgaaagaaaaaacaaaacaaaaacacccagccctgttccaggagaatttcaagttttacaggttgagcttcaagatggtttttttggttttttttttttctctcatccaggctgaaggattttttttttctttacaaaatgagttcctcaaattgaccaatagctgctgctttcatattttggataagggtctgtggtcccggcgtgtgctcacgtgtgtatgcacgtgtgtgtgtccattagacacggctgatgtgtgtgcaaagtatccatgcggagttgatgctttgggaattggctcatgaaggttcttctcaagggtgcgagctcatccccctctctccttccttcttattgactgggagactgtgctctcgacagattcttcttgtgtcagaagtctagcctcaggtttctaccctcccttcacattggtggccaagggaggagcatttcatttggagtgattatgaatcttttcaagaccaaaccaagctaggacattaaaaaaaaaaaaagaaaaagaaagaaaaaacaaaatggaaaaaggaaaaaaaaaaagaactgagatgacagagttttgagaatatatttgtaccatatttaatttttaaagtctctggtattagcctcataagttattgactattccccggggttggcggggagtggggacatgagttggtctgcctgttgtggggccgggaaggggagggagtcaggcacaagtggcctctttgtttggtcttaaaggcatccatttctgggaatgaagccatgttcgctgctaacacttttggatgttgtgaggccacgtggagtgtgtgagagactaggttttatggatggtctggttcaggtaccaggtctgctggaaggttcctgttcggataagctggtagctacctagctctgagcctgccttcaagaacacctgtgttcatcctctgattctctgtgtgtacctcttgtggcgtttcctctcccgggtgtgaacatcctaaccgttattgtgcaaacccaagaacgtcagatcccaaagcacaacaacctggatggactttgggaacatctaagcaatgtaagagagaggtgcactgagagtacgtcttggtcccctccaccctgagagcatctgacggtcctcagtactgaactcccggaagctgctctgagcccggtgacctcatctgggccaggtgtggtgcctgagctgaatgctcaggtgcttacagtgttgcaatccctaagagagtagagtctggaggagaaaccgtgaaaaagaccttacacaccaccaagaacttccgaatgggcgtgaatccaccgtttcttctctttgcaaaaagaaccaccacagctgctcaaagaacacagtgaactcatcactttggttcatcaaaaaatcatcgcccatgcgttattcctgagtgcattttcttacaactttttgactgcttccttttcttcttctcttaagagttgtgggcttaagaatgggatagagtcataatggcaacctccaagccctctcaattcttgattaagaacacaggtagacatgaatcccaattgtctattgctatcttatttatatgattcgggaaaatacagcatgtaaaaatattgctgaggagcctcagtgattgggtacaagaagcaagagtacagaaattatttttgccaaatttattttgtaaatatgagggtctgtacctaaatttaaaaaaaaaaacacgtagaactaggtattttgttctcttcttagtaaatttgtagtggttgtatactacactagctgcaattttcacatttttctaattcagaaaggtttttcttatattaggggaaaaagtatttattttaatatataaaatcactctgaaaatcactctcataaaaaatggagcgcatgtaaatttttatcaaagaaaaataaacaggtgaatggggatagtgattttcttttttcagcacagtctacctcagtgtattgttaagatgtgattcaatcatggacatctttgagatttcagaattctacctggaaccggtctgaatcagggaacgtgtgtatcagctgattcgaatgccagggaccagtaagaattttgagggagggagttgggatggagaaggtatggcctttatgcgagcatagatccttttcttcctggctggtaatattcttctctgaatttaatcttcctttaaaaaaaaatcctccatctattgtcactatgttccccaaacataaactaagttccaggctgtcatgatgtatctgatatatggggtaacccagcaaggtgtaccttcctttggtgagagatggctgccggggcaaagacgggctttgattcagagcaagcattcccacctgttccatggaatccccctgaagtgagcacaaaggtgccctgggctccctgatggtttatgcccactcctttcaggctggtgatgcaccttacacacaaacacctaatgcaatgtctttttaaattctccaagtgggatgggagcatgtgagggaaattccaatccaaaacccattaatgtgctgaacgctttttttttttttttttttttttgcaacaacaccttggacctctgtgttggggtttgactgacctcaagctgatattattggaccttgtgcagctttgataacccatgtgagagtctaggcaggaccagtggggcccaaatcttgctgctcttgtacttttaggcactgcccttgcagactcacctttctccacctgccctggagaaaggtagggtgtgctgggcctgccccttgcaaatgggattcaccagtttcatttatttgactctactgccacagtgaaaagagcaaacagctattgggttgcaaacctcctttgacattaggaaatgttgactttgtaacaataaaactttggtcctagaaagacacggttgtcctgggagtttgtagtgttaagttgcaacaacaacaacaaaaagcaacaaaaccagcttaggataacactttttgttgcttgttcttaaagatgtctcactatgattaaaacccttttcattaatgtagtgaaagccacacaggagttccttcttccaggaggagaataccaagcacatcactttctctctgcatcagtgatgtcaaatacgcatcagaaaatgttcaggttttaggagctgtcctaggtgctgtttcatcattggaagcagtgagaaagagaagcactgctgcttgtctggatataggctgaggatgattgagagaagctgtgggaactgacacaagggtctgcataggtcatcctgtgaccctggggactatgttaccaactgacagacagatctttcactgtatcctagcagggcaggtagtccaccaagaaatgtgcttattggattgggaggtgtttatttgtagtctgctgtaacacgtgtgaaagagcaggagcgtcatcagcatatgacttgcgctggtcatccggtaaatggatgtgctgtagtcccagtgctaatcatttctctccttcacagtgggtggaagtttagggttaaatgtcctttgaatgtcacctggtgagtccttgacaccttaggctcttcagaaacaatggttttgttgaggatggggaacagggaatgccgattttatatacatggtacacagagaggggtgtcacttcagaaaatcttccagcatgttcttcagaatattaatttatatgcgaggtgaggttgggaatgaaaagaacaggtcagcacttttttttttcctagaacatacaaaagaacatggtggactttcagggagtgcaatggaaggtgaatatttccttaagggtccccgagaaatgggagtgaggggaggggacacaatggctttttgagcttacttttaccttctgatactagtcaaggtccagaaccagccaccagccaaatttctatctgggtgcgggccactgaaaatccttgttaaaaaccagatcacaaatctggggctcttggtcccattggagaaggaaggaagagcctcaaaataagtgtgcacccatgcacatattcaggaacagcttgtttagtctttacactttgcctgaaagttgcttctcctcgtccctttgtgtgcctgggtggcctcggccctgtgcgttggcaacgcaggatcaaatgtgctgcagcttttgcagaaaacaactcagaaacacaaaaccccccaacagctcaattattattttttcaatgttttcctacaagagccaagtagcaccatgtacagaagacgcctttttttttggaatattgaaatcgttctgcatgtaaaatatgggataatgacctgtttatattaaaattctgattaaattatctgagaata

SEQ ID NO: 448396 - DNA, 5859 bp, Homo sapiens
tatctgtctgctgtccgggcaggtatgtctgctctcctagaccagggctgagcacgctgcatccaggccacagggtgctgtgtgtgacatagacaccagggagggaggagaaccctggtgagtcgaatcacggaccctcctccaagaaccctggttgcttgctctgcaggtgcgcctcctgggagtggtgtccaagggccagcccacgctggtggtgatggagctgatggctcacggagacctgaagagctacctccgttctctgcggccagaggctgagaataatcctggccgccctccccctacccttcaagagatgattcagatggcggcagagattgctgacgggatggcctacctgaacgccaagaagtttgtgcatcgggacctggcagcgagaaactgcatggtcgcccatgattttactgtcaaaattggagactttggaatgaccagagacatctatgaaacggattactaccggaaagggggcaagggtctgctccctgtacggtggatggcaccggagtccctgaaggatggggtcttcaccacttcttctgacatgtggtcctttggcgtggtcctttgggaaatcaccagcttggcagaacagccttaccaaggcctgtctaatgaacaggtgttgaaatttgtcatggatggagggtatctggatcaacccgacaactgtccagagagagtcactgacctcatgcgcatgtgctggcaattcaaccccaagatgaggccaaccttcctggagattgtcaacctgctcaaggacgacctgcaccccagctttccagaggtgtcgttcttccacagcgaggagaacaaggctcccgagagtgaggagctggagatggagtttgaggacatggagaatgtgcccctggaccgttcctcgcactgtcagagggaggaggcggggggccgggatggagggtcctcgctgggtttcaagcggagctacgaggaacacatcccttacacacacatgaacggaggcaagaaaaacgggcggattctgaccttgcctcggtccaatccttcctaacagtgcctaccgtggcgggggcgggcaggggttcccattttcgctttcctctggtttgaaagcctctggaaaactcaggattctcacgactctaccatgtccaatggagttcagagatcgttcctatacatttctgttcatcttaaggtggactcgtttggttaccaatttaactagtcctgcagaggatttaactgtgaacctggagggcaaggggtttccacagttgctgctcctttggggcaacgacggtttcaaaccaggattttgtgttttttcgttccccccacccgcccccagcagatggaaagaaagcacctgtttttacaaattctttttttttttttttttttttgctggtgtctgagcttcagtataaaagacaaaacttcctgtttgtggaacaaaagttcgaaagaaaaaacaaaacaaaaacacccagccctgttccaggagaatttcaagttttacaggttgagcttcaagatggtttttttggttttttttttttctctcatccaggctgaaggattttttttttctttacaaaatgagttcctcaaattgaccaatagctgctgctttcatattttggataagggtctgtggtcccggcgtgtgctcacgtgtgtatgcacgtgtgtgtgtccattagacacggctgatgtgtgtgcaaagtatccatgcggagttgatgctttgggaattggctcatgaaggttcttctcaagggtgcgagctcatccccctctctccttccttcttattgactgggagactgtgctctcgacagattcttcttgtgtcagaagtctagcctcaggtttctaccctcccttcacattggtggccaagggaggagcatttcatttggagtgattatgaatcttttcaagaccaaaccaagctaggacattaaaaaaaaaaaaagaaaaagaaagaaaaaacaaaatggaaaaaggaaaaaaaaaaagaactgagatgacagagttttgagaatatatttgtaccatatttaatttttaaagtctctggtattagcctcataagttattgactattccccggggttggcggggagtggggacatgagttggtctgcctgttgtggggccgggaaggggagggagtcaggcacaagtggcctctttgtttggtcttaaaggcatccatttctgggaatgaagccatgttcgctgctaacacttttggatgttgtgaggccacgtggagtgtgtgagagactaggttttatggatggtctggttcaggtaccaggtctgctggaaggttcctgttcggataagctggtagctacctagctctgagcctgccttcaagaacacctgtgttcatcctctgattctctgtgtgtacctcttgtggcgtttcctctcccgggtgtgaacatcctaaccgttattgtgcaaacccaagaacgtcagatcccaaagcacaacaacctggatggactttgggaacatctaagcaatgtaagagagaggtgcactgagagtacgtcttggtcccctccaccctgagagcatctgacggtcctcagtactgaactcccggaagctgctctgagcccggtgacctcatctgggccaggtgtggtgcctgagctgaatgctcaggtgcttacagtgttgcaatccctaagagagtagagtctggaggagaaaccgtgaaaaagaccttacacaccaccaagaacttccgaatgggcgtgaatccaccgtttcttctctttgcaaaaagaaccaccacagctgctcaaagaacacagtgaactcatcactttggttcatcaaaaaatcatcgcccatgcgttattcctgagtgcattttcttacaactttttgactgcttccttttcttcttctcttaagagttgtgggcttaagaatgggatagagtcataatggcaacctccaagccctctcaattcttgattaagaacacaggtagacatgaatcccaattgtctattgctatcttatttatatgattcgggaaaatacagcatgtaaaaatattgctgaggagcctcagtgattgggtacaagaagcaagagtacagaaattatttttgccaaatttattttgtaaatatgagggtctgtacctaaatttaaaaaaaaaaacacgtagaactaggtattttgttctcttcttagtaaatttgtagtggttgtatactacactagctgcaattttcacatttttctaattcagaaaggtttttcttatattaggggaaaaagtatttattttaatatataaaatcactctgaaaatcactctcataaaaaatggagcgcatgtaaatttttatcaaagaaaaataaacaggtgaatggggatagtgattttcttttttcagcacagtctacctcagtgtattgttaagatgtgattcaatcatggacatctttgagatttcagaattctacctggaaccggtctgaatcagggaacgtgtgtatcagctgattcgaatgccagggaccagtaagaattttgagggagggagttgggatggagaaggtatggcctttatgcgagcatagatccttttcttcctggctggtaatattcttctctgaatttaatcttcctttaaaaaaaaatcctccatctattgtcactatgttccccaaacataaactaagttccaggctgtcatgatgtatctgatatatggggtaacccagcaaggtgtaccttcctttggtgagagatggctgccggggcaaagacgggctttgattcagagcaagcattcccacctgttccatggaatccccctgaagtgagcacaaaggtgccctgggctccctgatggtttatgcccactcctttcaggctggtgatgcaccttacacacaaacacctaatgcaatgtctttttaaattctccaagtgggatgggagcatgtgagggaaattccaatccaaaacccattaatgtgctgaacgctttttttttttttttttttttttgcaacaacaccttggacctctgtgttggggtttgactgacctcaagctgatattattggaccttgtgcagctttgataacccatgtgagagtctaggcaggaccagtggggcccaaatcttgctgctcttgtacttttaggcactgcccttgcagactcacctttctccacctgccctggagaaaggtagggtgtgctgggcctgccccttgcaaatgggattcaccagtttcatttatttgactctactgccacagtgaaaagagcaaacagctattgggttgcaaacctcctttgacattaggaaatgttgactttgtaacaataaaactttggtcctagaaagacacggttgtcctgggagtttgtagtgttaagttgcaacaacaacaacaaaaagcaacaaaaccagcttaggataacactttttgttgcttgttcttaaagatgtctcactatgattaaaacccttttcattaatgtagtgaaagccacacaggagttccttcttccaggaggagaataccaagcacatcactttctctctgcatcagtgatgtcaaatacgcatcagaaaatgttcaggttttaggagctgtcctaggtgctgtttcatcattggaagcagtgagaaagagaagcactgctgcttgtctggatataggctgaggatgattgagagaagctgtgggaactgacacaagggtctgcataggtcatcctgtgaccctggggactatgttaccaactgacagacagatctttcactgtatcctagcagggcaggtagtccaccaagaaatgtgcttattggattgggaggtgtttatttgtagtctgctgtaacacgtgtgaaagagcaggagcgtcatcagcatatgacttgcgctggtcatccggtaaatggatgtgctgtagtcccagtgctaatcatttctctccttcacagtgggtggaagtttagggttaaatgtcctttgaatgtcacctggtgagtccttgacaccttaggctcttcagaaacaatggttttgttgaggatggggaacagggaatgccgattttatatacatggtacacagagaggggtgtcacttcagaaaatcttccagcatgttcttcagaatattaatttatatgcgaggtgaggttgggaatgaaaagaacaggtcagcacttttttttttcctagaacatacaaaagaacatggtggactttcagggagtgcaatggaaggtgaatatttccttaagggtccccgagaaatgggagtgaggggaggggacacaatggctttttgagcttacttttaccttctgatactagtcaaggtccagaaccagccaccagccaaatttctatctgggtgcgggccactgaaaatccttgttaaaaaccagatcacaaatctggggctcttggtcccattggagaaggaaggaagagcctcaaaataagtgtgcacccatgcacatattcaggaacagcttgtttagtctttacactttgcctgaaagttgcttctcctcgtccctttgtgtgcctgggtggcctcggccctgtgcgttggcaacgcaggatcaaatgtgctgcagcttttgcagaaaacaactcagaaacacaaaaccccccaacagctcaattattattttttcaatgttttcctacaagagccaagtagcaccatgtacagaagacgcctttttttttggaatattgaaatcgttctgcatgtaaaatatgggataatgacctgtttatattaaaattctgattaaattatctgagaata

SEQ ID NO: 448397 - DNA, 4422 bp, Homo sapiens
tattatagccgcacttcccgtttgtgggccaaaggtcggaagggtaaccccacccgcacccccccccctgttccaggagaatttcaagttttacaggttgagcttcaagatggtttttttggttttttttttttctctcatccaggctgaaggattttttttttctttacaaaatgagttcctcaaattgaccaatagctgctgctttcatattttggataagggtctgtggtcccggcgtgtgctcacgtgtgtatgcacgtgtgtgtgtccattagacacggctgatgtgtgtgcaaagtatccatgcggagttgatgctttgggaattggctcatgaaggttcttctcaagggtgcgagctcatccccctctctccttccttcttattgactgggagactgtgctctcgacagattcttcttgtgtcagaagtctagcctcaggtttctaccctcccttcacattggtggccaagggaggagcatttcatttggagtgattatgaatcttttcaagaccaaaccaagctaggacattaaaaaaaaaaaaagaaaaagaaagaaaaaacaaaatggaaaaaggaaaaaaaaaaagaactgagatgacagagttttgagaatatatttgtaccatatttaatttttaaagtctctggtattagcctcataagttattgactattccccggggttggcggggagtggggacatgagttggtctgcctgttgtggggccgggaaggggagggagtcaggcacaagtggcctctttgtttggtcttaaaggcatccatttctgggaatgaagccatgttcgctgctaacacttttggatgttgtgaggccacgtggagtgtgtgagagactaggttttatggatggtctggttcaggtaccaggtctgctggaaggttcctgttcggataagctggtagctacctagctctgagcctgccttcaagaacacctgtgttcatcctctgattctctgtgtgtacctcttgtggcgtttcctctcccgggtgtgaacatcctaaccgttattgtgcaaacccaagaacgtcagatcccaaagcacaacaacctggatggactttgggaacatctaagcaatgtaagagagaggtgcactgagagtacgtcttggtcccctccaccctgagagcatctgacggtcctcagtactgaactcccggaagctgctctgagcccggtgacctcatctgggccaggtgtggtgcctgagctgaatgctcaggtgcttacagtgttgcaatccctaagagagtagagtctggaggagaaaccgtgaaaaagaccttacacaccaccaagaacttccgaatgggcgtgaatccaccgtttcttctctttgcaaaaagaaccaccacagctgctcaaagaacacagtgaactcatcactttggttcatcaaaaaatcatcgcccatgcgttattcctgagtgcattttcttacaactttttgactgcttccttttcttcttctcttaagagttgtgggcttaagaatgggatagagtcataatggcaacctccaagccctctcaattcttgattaagaacacaggtagacatgaatcccaattgtctattgctatcttatttatatgattcgggaaaatacagcatgtaaaaatattgctgaggagcctcagtgattgggtacaagaagcaagagtacagaaattatttttgccaaatttattttgtaaatatgagggtctgtacctaaatttaaaaaaaaaaacacgtagaactaggtattttgttctcttcttagtaaatttgtagtggttgtatactacactagctgcaattttcacatttttctaattcagaaaggtttttcttatattaggggaaaaagtatttattttaatatataaaatcactctgaaaatcactctcataaaaaatggagcgcatgtaaatttttatcaaagaaaaataaacaggtgaatggggatagtgattttcttttttcagcacagtctacctcagtgtattgttaagatgtgattcaatcatggacatctttgagatttcagaattctacctggaaccggtctgaatcagggaacgtgtgtatcagctgattcgaatgccagggaccagtaagaattttgagggagggagttgggatggagaaggtatggcctttatgcgagcatagatccttttcttcctggctggtaatattcttctctgaatttaatcttcctttaaaaaaaaatcctccatctattgtcactatgttccccaaacataaactaagttccaggctgtcatgatgtatctgatatatggggtaacccagcaaggtgtaccttcctttggtgagagatggctgccggggcaaagacgggctttgattcagagcaagcattcccacctgttccatggaatccccctgaagtgagcacaaaggtgccctgggctccctgatggtttatgcccactcctttcaggctggtgatgcaccttacacacaaacacctaatgcaatgtctttttaaattctccaagtgggatgggagcatgtgagggaaattccaatccaaaacccattaatgtgctgaacgctttttttttttttttttttttttgcaacaacaccttggacctctgtgttggggtttgactgacctcaagctgatattattggaccttgtgcagctttgataacccatgtgagagtctaggcaggaccagtggggcccaaatcttgctgctcttgtacttttaggcactgcccttgcagactcacctttctccacctgccctggagaaaggtagggtgtgctgggcctgccccttgcaaatgggattcaccagtttcatttatttgactctactgccacagtgaaaagagcaaacagctattgggttgcaaacctcctttgacattaggaaatgttgactttgtaacaataaaactttggtcctagaaagacacggttgtcctgggagtttgtagtgttaagttgcaacaacaacaacaaaaagcaacaaaaccagcttaggataacactttttgttgcttgttcttaaagatgtctcactatgattaaaacccttttcattaatgtagtgaaagccacacaggagttccttcttccaggaggagaataccaagcacatcactttctctctgcatcagtgatgtcaaatacgcatcagaaaatgttcaggttttaggagctgtcctaggtgctgtttcatcattggaagcagtgagaaagagaagcactgctgcttgtctggatataggctgaggatgattgagagaagctgtgggaactgacacaagggtctgcataggtcatcctgtgaccctggggactatgttaccaactgacagacagatctttcactgtatcctagcagggcaggtagtccaccaagaaatgtgcttattggattgggaggtgtttatttgtagtctgctgtaacacgtgtgaaagagcaggagcgtcatcagcatatgacttgcgctggtcatccggtaaatggatgtgctgtagtcccagtgctaatcatttctctccttcacagtgggtggaagtttagggttaaatgtcctttgaatgtcacctggtgagtccttgacaccttaggctcttcagaaacaatggttttgttgaggatggggaacagggaatgccgattttatatacatggtacacagagaggggtgtcacttcagaaaatcttccagcatgttcttcagaatattaatttatatgcgaggtgaggttgggaatgaaaagaacaggtcagcacttttttttttcctagaacatacaaaagaacatggtggactttcagggagtgcaatggaaggtgaatatttccttaagggtccccgagaaatgggagtgaggggaggggacacaatggctttttgagcttacttttaccttctgatactagtcaaggtccagaaccagccaccagccaaatttctatctgggtgcgggccactgaaaatccttgttaaaaaccagatcacaaatctggggctcttggtcccattggagaaggaaggaagagcctcaaaataagtgtgcacccatgcacatattcaggaacagcttgtttagtctttacactttgcctgaaagttgcttctcctcgtccctttgtgtgcctgggtggcctcggccctgtgcgttggcaacgcaggatcaaatgtgctgcagcttttgcagaaaacaactcagaaacacaaaaccccccaacagctcaattattattttttcaatgttttcctacaagagccaagtagcaccatgtacagaagacgcctttttttttggaatattgaaatcgttctgcatgtaaaatatgggataatgacctgtttatattaaaattctgattaaattatctgagaata

SEQ ID NO: 448398 - DNA, 3937 bp, Homo sapiens
  misc_feature (1047)..(1047): n is a, c, g, or t
  misc_feature (1776)..(1776): n is a, c, g, or t
ggggggctgcgcggccgggtcggtgcgcacacgagaaggacgcgcggcccccagcgctcttgggggccgcctcggagcatgacccccgcgggccagcgccgcgcgcctgatccgaggagaccccgcgctcccgcagccatgggcaccgggggccggcggggggcggcggccgcgccgctgctggtggcggtggccgcgctgctactgggcgccgcgggccacctgtaccccggagaggtgtgtcccggcatggatatccggaacaacctcactaggttgcatgagctggagaattgctctgtcatcgaaggacacttgcagatactcttgatgttcaaaacgaggcccgaagatttccgagacctcagtttccccaaactcatcatgatcactgattacttgctgctcttccgggtctatgggctcgagagcctgaaggacctgttccccaacctcacggtcatccggggatcacgactgttctttaactacgcgctggtcatcttcgagatggttcacctcaaggaactcggcctctacaacctgatgaacatcacccggggttctgtccgcatcgagaagaacaatgagctctgttacttggccactatcgactggtcccgtatcctggattccgtggaggataattacatcgtgttgaacaaagatgacaacgaggagtgtggagacatctgtccgggtaccgcgaagggcaagaccaactgccccgccaccgtcatcaacgggcagtttgtcgaacgatgttggactcatagtcactgccagaaagtttgcccgaccatctgtaagtcacacggctgcaccgccgaaggcctctgttgccacagcgagtgcctgggcaactgttctcagcccgacgaccccaccaagtgcgtggcctgccgcaacttctacctggacggcaggtgtgtggagacctgcccgcccccgtactaccacttccaggactggcgctgtgtgaacttcagcttctgccaggacctgcaccacaaatgcaagaactcgcggaggcagggctgccaccantacgtcattcacaacaacaagtgcatccctgagtgtccctccgggtacacgatgaattccagcaacttgctgtgcaccccatgcctgggtccctgtcccaaggtgtgccacctcctagaaggcgagaagaccatcgactcggtgacgtctgcccaggagctccgaggatgcaccgtcatcaacgggagtctgatcatcaacattcgaggaggcaacaatctggcagctgagctagaagccaacctcggcctcattgaagaaatttcagggtatctaaaaatccgccgatcctacgctctggtgtcactttccttcttccggaagttacgtctgattcgaggagagaccttggaaattgggaactactccttctatgccttggacaaccagaacctaaggcagctctgggactggagcaaacacaacctcaccatcactcaggggaaactcttcttccactataaccccaaactctgcttgtcagaaatccacaagatggaagaagtttcaggaaccaaggggcgccaggagagaaacgacattgccctgaagaccaatggggaccaggcatcctgtgaaaatgagttacttaaattttcttacattcggacatcttttgacaagatcttgctgagatgggagccgtactggccccccgacttccgagacctcttggggttcatgctgttctacaaagaggccccttatcagaatgtgacggagttcgangggcaggatgcgtgtggttccaacagttggacggtggtagacattgacccacccctgaggtccaacgaccccaaatcacagaaccacccagggtggctgatgcggggtctcaagccctggacccagtatgccatctttgtgaagaccctggtcaccttttcggatgaacgccggacctatggggccaagagtgacatcatttatgtccagacagatgccaccaacccctctgtgcccctggatccaatctcagtgtctaactcatcatcccagattattctgaagtggaaaccaccctccgaccccaatggcaacatcacccactacctggttttctgggagaggcaggcggaagacagtgagctgttcgagctggattattgcctcaaagggctgaagctgccctcgaggacctggtctccaccattcgagtctgaagattctcagaagcacaaccagagtgagtatgaggattcggccggcgaatgctgctcctgtccaaagacagactctcagatcctgaaggagctggaggagtcctcgtttaggaagacgtttgaggattacctgcacaacgtggttttcgtccccagaaaaacctcttcaggcactggtgccgaggaccctaggccatctcggaaacgcaggtcccttggcgatgttgggaatgtgacggtggccgtgcccacggtggcagctttccccaacacttcctcgaccagcgtgcccacgagtccggaggagcacaggccttttgagaaggtggtgaacaaggagtcgctggtcatctccggcttgcgacacttcacgggctatcgcatcgagctgcaggcttgcaaccaggacacccctgaggaacggtgcagtgtggcagcctacgtcagtgcgaggaccatgcctgaagccaaggctgatgacattgttggccctgtgacgcatgaaatctttgagaacaacgtcgtccacttgatgtggcaggagccgaaggagcccaatggtctgatcgtgctgtatgaagtgagttatcggcgatatggtgatgaggagctgcatctctgcgtctcccgcaagcacttcgctctggaacggggctgcaggctgcgtgggctgtcaccggggaactacagcgtgcgaatccgggccacctcccttgcgggcaacggctcttggacggaacccacctatttctacgtgacagactatttagacgtcccgtcaaatattgcaaaaattatcatcggccccctcatctttgtctttctcttcagtgttgtgattggaagtatttatctattcctgagaaagaggcagccagatgggccgctgggaccgctttacgcttcttcaaaccctgagtatctcagtgccagtgatgtgtttccatgctctgtgtacgtgccggacgagtgggaggtgtctcgagagaagatcaccctccttcgagagctggggcagggctccttcggcatggtgtatgagggcaatgccagggacatcatcaagggtgaggcagagacccgcgtggcggtgaagacggtcaacgagtcagccagtctccgagagcggattgagttcctcaatgaggcctcggtcatgaagggcttcacctgccatcacgtggtgcgcctcctgggagtggtgtccaagggccagcccacgctggtggtgatggagctgatggctcacggagacctgaagagctacctccgttctctgcggccagaggctgagaataatcctggccgccctccccctacccttcaagagatgattcagatggcggcagagattgctgacgggatggcctacctgaacgccaagaagtttgtgcatcgggacctggcagcgagaaactgcatggtcgcccatgattttactgtcaaaattggaggttcgtctggctttctgctttgaaaacataacgacccaggccagactttggaatgaccagagacatctatgaaacggattactaccggaaagggggcaagggtctgctccctgtacggtggatggcaccggagtccctgaaggatggggtcttcaccacttcttctgacatgtggtcctttggcgtggtcctttgggaaatcacctgcttggttgacagtcacatccagtgaatggtggaacccatttcctgctaatgtgtgaaattgaa

SEQ ID NO: 448399 - DNA, 2292 bp, Homo sapiens
  misc_feature (1047)..(1047): n is a, c, g, or t
  misc_feature (1776)..(1776): n is a, c, g, or t
ggggggctgcgcggccgggtcggtgcgcacacgagaaggacgcgcggcccccagcgctcttgggggccgcctcggagcatgacccccgcgggccagcgccgcgcgcctgatccgaggagaccccgcgctcccgcagccatgggcaccgggggccggcggggggcggcggccgcgccgctgctggtggcggtggccgcgctgctactgggcgccgcgggccacctgtaccccggagaggtgtgtcccggcatggatatccggaacaacctcactaggttgcatgagctggagaattgctctgtcatcgaaggacacttgcagatactcttgatgttcaaaacgaggcccgaagatttccgagacctcagtttccccaaactcatcatgatcactgattacttgctgctcttccgggtctatgggctcgagagcctgaaggacctgttccccaacctcacggtcatccggggatcacgactgttctttaactacgcgctggtcatcttcgagatggttcacctcaaggaactcggcctctacaacctgatgaacatcacccggggttctgtccgcatcgagaagaacaatgagctctgttacttggccactatcgactggtcccgtatcctggattccgtggaggataattacatcgtgttgaacaaagatgacaacgaggagtgtggagacatctgtccgggtaccgcgaagggcaagaccaactgccccgccaccgtcatcaacgggcagtttgtcgaacgatgttggactcatagtcactgccagaaagtttgcccgaccatctgtaagtcacacggctgcaccgccgaaggcctctgttgccacagcgagtgcctgggcaactgttctcagcccgacgaccccaccaagtgcgtggcctgccgcaacttctacctggacggcaggtgtgtggagacctgcccgcccccgtactaccacttccaggactggcgctgtgtgaacttcagcttctgccaggacctgcaccacaaatgcaagaactcgcggaggcagggctgccaccantacgtcattcacaacaacaagtgcatccctgagtgtccctccgggtacacgatgaattccagcaacttgctgtgcaccccatgcctgggtccctgtcccaaggtgtgccacctcctagaaggcgagaagaccatcgactcggtgacgtctgcccaggagctccgaggatgcaccgtcatcaacgggagtctgatcatcaacattcgaggaggcaacaatctggcagctgagctagaagccaacctcggcctcattgaagaaatttcagggtatctaaaaatccgccgatcctacgctctggtgtcactttccttcttccggaagttacgtctgattcgaggagagaccttggaaattgggaactactccttctatgccttggacaaccagaacctaaggcagctctgggactggagcaaacacaacctcaccatcactcaggggaaactcttcttccactataaccccaaactctgcttgtcagaaatccacaagatggaagaagtttcaggaaccaaggggcgccaggagagaaacgacattgccctgaagaccaatggggaccaggcatcctgtgaaaatgagttacttaaattttcttacattcggacatcttttgacaagatcttgctgagatgggagccgtactggccccccgacttccgagacctcttggggttcatgctgttctacaaagaggccccttatcagaatgtgacggagttcgangggcaggatgcgtgtggttccaacagttggacggtggtagacattgacccacccctgaggtccaacgaccccaaatcacagaaccacccagggtggctgatgcggggtctcaagccctggacccagtatgccatctttgtgaagaccctggtcaccttttcggatgaacgccggacctatggggccaagagtgacatcatttatgtccagacagatgccaccaacccctctgtgcccctggatccaatctcagtgtctaactcatcatcccagattattctgaagtggaaaccaccctccgaccccaatggcaacatcacccactacctggttttctgggagaggcaggcggaagacagtgagctgttcgagctggattattgcctcaaagggcgagtccagtcatcagctccgctgtaagctgttggccctgcattcaagtaaccagaaccacccgtgagagctgccaccagtaatgtcactcgaagcttccttttttttttttttaattccgaa

SEQ ID NO: 448400 - DNA, 637 bp, Homo sapiens
catttagctttccttgccccatttctgaccgcgggcacctttatccccgtaaattatctcctgaagatcttctatgttgacgcactggagacagttcccctttctccttctgcacctgccgcgttactcaatcccctgtaatcccattgtcccgactgcatcatttcagaggtggtgattttaaggattttaacagggcttgccaaaagaattattttcttggcgttttgaaagtaattacttaggcatgggtactttacagagaaagctactcatcccggctggctgcagagtttacagggcccgggatgaaaacacagggcccaggtttcctgtccatgaagccggctctgcccctgatccttctgatgcatccaccgtgcgtctgctcacctgtcttgctttctgttcattttctcttgtagtgtgtcccggcatggatatccggaacaacctcactaggttgcatgagctggagaattgctctgtcatcgaaggacacttgcagatactcttgatgttcaaaacgaggcccgaagatttccgagacctcagtttccccaaactcatcatgatcactgattacttgctgctcttccgggtctatgggctcgagagcctgaaggacctgttcccc

SEQ ID NO: 448401 - DNA, 817 bp, Homo sapiens
cggacgcgtgggtcgacccacgcgtccggtggggcgcccacaatttgcgcgctctctttctgctgctccccagctctcggatacagccgacaccatgggtttcggagacctgaaaagccctgccggcctccaggtgctcaacgattacctggcggacaagagctacatcgaggggtatgtgccatcacaagcagatgtggcagtatttgaagccgtgtccagcccaccgcctgccgacttgtgtcatgccctacgttggtataatcacatcaagtcttacgaaaaggaaaaggccagcctgccaggagtgaagaaagctttgggcaaatatggtcctgccgatgtggaagacactacaggaagtggagctacagatagtaaagatgatgatgacattgacctctttggatctgatgatgaggaggaaagtgaagaagcaaagaggctaagggaagaacgtcttgcacaatatgaatcaaagaaagccaaaaaacctgcacttgttgccaagtcttccatcttactagatgtgaaaccttgggatgatgagacagatatggcgaaattagaggagtgcgtcagaagcattcaagcagacggcttagtctggggctcatctaaactagttccagtgggatacggaattaagaaacttcaaatacagtgtgtagttgaagatgataaagttggaacagatatgctggaggagcagatcactgcttttgaggactatgtgcagtccatggatgtggctgctttcaacaagatctaaaatccatcctggatcatggcatttaaataaaagattgaaagatta

SEQ ID NO: 448402 - DNA, 1040 bp, Homo sapiens
  misc_feature (911)..(911): n is a, c, g, or t
  misc_feature (927)..(927): n is a, c, g, or t
  misc_feature (936)..(936): n is a, c, g, or t
  misc_feature (959)..(959): n is a, c, g, or t
  misc_feature (966)..(966): n is a, c, g, or t
  misc_feature (981)..(981): n is a, c, g, or t
cgcagttccgccggaagtggccccagcctcgaggccgggcgtcttcggtcatctccggcgcttctagggctggttcccgtcatcttcgggagccgtggaggtggggcgcccacaatttgcgcgctctctttctgctgctccccagctctcggatacagccgacaccatgggtttcggagacctgaaaagccctgccggcctccaggtgctcaacgattacctggcggacaagagctacatcgaggggtatgtgccatcacaagcagatgtggcagtatttgaagccgtgtccagcccaccgcctgccgacttgtgtcatgccctacgttggtataatcacatcaagtcttacgaaaaggaaaaggccagcctgccaggagtgaagaaagctttgggcaaatatggtcctgccgatgtggaagacactacaggaagtggagctacagatagtaaagatgatgatgacattgacctctttggatctgatgatgaggaggaaagtgaagaagcaaagaggctaagggaagaacgtcttgcacaatatgaatcaaagaaagccaaaaaacctgcacttgttgccaagtcttccatcttactagatgtgaaaccttgggatgatgagacagatatggcgaaattagaggagtgcgtcagaagcattcaagcagacggcttagtctggggctcatctaaactagttccagtgggatacggaattaagaaacttcaaatacagtgtgtagttgaagatgataaagttggaacagatatgctggaggagcagatcactgcttttgaggactatgtgcagtccatggatgtggctgctttcaacaagatctaaaatccatcctggatcatggcatttaaataaaagattgaaagattaggagattaaaaaaaaaaaactngggtttttgggggggnaaagggttnaaagggctggttatgtctcgccnttttgtnaagggaatggggccnaaaggggtaatgaacggggttgtagagaggtagaaaaagagagataaaaagggagataa

SEQ ID NO: 448403 - DNA, 501 bp, Homo sapiens
gactctagacgatcccttaacaccgcaatctcagacactacaggaagtggagctacagatagtaaagatgatgatgacattgacctctttggatctgatgatgaggaggaaagtgaagaagcaaagaggctaagggaagaacgtcttgcacaatatgaatcaaagaaagccaaaaaacctgcacttgttgccaagtcttccatcttactagatgtgaaaccttgggatgatgagacagatatggcgaaattagaggagtgcgtcagaagcattcaagcagacggcttagtctggggctcatctaaactagttccagtgggatacggaattaagaaacttcaaatacagtgtgtagttgaagatgataaagttggaacagatatgctggaggagcagatcactgcttttgaggactatgtgcagtccatggatgtggctgctttcaacaagatctaaaatccatcctggatcatggcatttaaataaaagattgaaagatta

SEQ ID NO: 448404 - DNA, 590 bp, Homo sapiens
ttcttccacagctactggtctgcagctgttcttatggtagcagttgtggcattcctctgtgggaaagaaactgttaacacaaacacctctttcttagcaaaacagaaagtgggtatatatgtgtgacagacacaagatgtatctgtagttttgtttggctaaggagatagtctcaaaacaaattgagatggatttgtttgtgtcttggagtagggtgaaaaaaatacaattcattatttgaataatgctgtttattgtttttagaacctgcacttgttgccaagtcttccatcttactagatgtgaaaccttgggatgatgagacagatatggcgaaattagaggagtgcgtcagaagcattcaagcagacggcttagtctggggctcatctaaactagttccagtgggatacggaattaagaaacttcaaatacagtgtgtagttgaagatgataaagttggaacagatatgctggaggagcagatcactgcttttgaggactatgtgcagtccatggatgtggctgctttcaacaagatctaaaatccatcctggatcatggcatttaaataaaagattgaaagatta

SEQ ID NO: 448405 - DNA, 758 bp, Homo sapiens
cgcagttccgccggaagtggccccagcctcgaggccgggcgtcttcggtcatctccggcgcttctagggctggttcccgtcatcttcgggagccgtggagctctcggatacagccgacaccatgggtttcggagacctgaaaagccctgccggcctccaggtgctcaacgattacctggcggacaagagctacatcgaggggtatgtgccatcacaagcagatgtggcagtatttgaagccgtgtccagcccaccgcctgccgacttgtgtcatgccctacgttggtataatcacatcaagtcttacgaaaaggaaaaggccagcctgccaggagtgaagaaagctttgggcaaatatggtcctgccgatgtggaagacactacaggaagtggagctacagatagtaaagatgatgatgacattgacctctttggatctgatgatgaggaggtatggcgtcttctataaagaacatatcggccaggcgcagtggctcatgcctgtaatcccagcatgttgggaggctgaggcgggtggatcacgaggtcaggagttgaagaccagcctggccaagatggtgaaaccctgtctgtactaaaaatacaaaaaaatgtggcaggcatctgtaatcccagctactcaggcggctaaggcagagaattgcttgaacctaggaagcggaggttgcagtgagccaagatcgtgccactgcatccagcctgggcgacagagcgagactccgtcccaaaaaaaaaaa

SEQ ID NO: 448406 - DNA, 474 bp, Homo sapiens
  misc_feature (45)..(45): n is a, c, g, or t
tcatacgctgctctagaggatacaacttatgttctgacccacctnttgcaatgccctacgttggtataatcacatcaagtcttacgaaaaggaaaaggccagcctgccaggagtgaagaaagctttgggcaaatatggtcctgccgatgtggaagacactacaggaagtggagctacagatagtaaagatgatgatgacattgacctctttggatctgatgatgaggaggaaagtgaagaagcaaagaggctaagggaagaacgtcttgcacaatatgaatcaaagaaagccaaaaaacctgcacttgttgccaagtcttccatcttactagatgtgaaaccttgggatgatgagacagatatggcgaaattagaggagtgcgtcagaagcattcaagcagacggcttagtctggggctcatctaaactagttccggtgggtcagagccgaagttgtaccctcaagagtcagct

SEQ ID NO: 448407 - DNA, 316 bp, Homo sapiens
tcagatgatcatgatcatcgacctcttggtcttgtctttgatgacgcctgtgatgaatcatgacgcctaagaaagtgaagaagcaaagaggctaagggaagaacgtcttgcacaatatgaatcaaagaaagccaaaaaacctgcacttgttgccaagtcttccatcttactagatgtgaaaccttgggatgatgagacagatatggcgaaattagaggagtgcgtcagaagcattcaagcagacggcttagtctggggctcatctaaactagttccagtgggacacgaaaggacacgaatgggacacgaatgttca

SEQ ID NO: 448408 - DNA, 301 bp, Homo sapiens
ctggatttgaatcctggctttaatttatatgcctttttcaaattctgactggttgcatgatgaataaaatcaaatcaccatctttcggctgagttcgtgatggatttgcttttttctgattaagccagtcttttttgtgatgaccccactagctttaagcagaggaacaaccagctttctgaagtggattaattttttttctttacaggaaagtgaagaagcaaagaggctaagggaagaacgtcttgcacaatatgaatcaaagaaagccaaaaagttaggtcatttgtattttaacttc

SEQ ID NO: 448409 - DNA, 1390 bp, Homo sapiens
  misc_feature (1147)..(1147): n is a, c, g, or t
cgcagttccgccggaagtggccccagcctcgaggccgggcgtcttcggtcatctccggcgcttctagggctggttcccgtcatcttcgggagccgtggaggtacgaacttaagacatgcctattttattaatttacttccaaacgcaacgaaaggtccatggacaatttgtgggccatttaattcagggcccccaattcgtacgtggagaagtgggaatgcaaaagtactttgacctttaaccttcggtccggcgcggtggagggaaacgcctccgtctctatataaggaattttccggtctcttcgggtcctttttcctctcttcagcgtggggcgcccacaatttgcgcgctctctttctgctgctccccagctctcggatacagccgacaccatgggtttcggagacctgaaaagccctgccggcctccaggtgctcaacgattacctggcggacaagagctacatcgaggggtatgtgccatcacaagcagatgtggcagtatttgaagccgtgtccagcccaccgcctgccgacttgtgtcatgccctacgttggtataatcacatcaagtcttacgaaaaggaaaaggccagcctgccaggagtgaagaaagctttgggcaaatatggtcctgccgatgtggaagacactacaggaagtggagctacagatagtaaagatgatgatgacattgacctctttggatctgatgatgaggaggaaagtgaagaagcaaagaggctaagggaagaacgtcttgcacaatatgaatcaaagaaagccaaaaaacctgcacttgttgccaagtcttccatcttactagatgtgaaaccttgggatgatgagacagatatggcgaaattagaggagtgcgtcagaagcattcaagcagacggcttagtctggggctcatctaaactagttccagtgggatacggaattaagaaacttcaaatacagtgtgtagttgaagatgataaagttggaacagatatgctggaggagcagatcactgcttttgaggactatgtgcagtccatggatgtggctgctttcaacaagatctaaaatccatcctggatcatggcatttaaataaaagattgaaagattaaaaaaaaaaaaaaaaaaaaaaacaaaaanaacaaaaaaaaaaaaaaaacaaaaaaaaacaaaaaaaacacacacaacacacaaaaaaaaaaaaaccaccaaaaaaaaaaacaaaaaacaacaacaatcaacaccaagccacccacagagacaaaaacgacacaagaaagccaacgagagagaaagagaaaagcgcgatacggacagcaagcaagcaaagacgaaagaaaaaaaaagaaaagcgggaacagatcaagaaagaagacaagaccg

SEQ ID NO: 448410 - DNA, 1419 bp, Homo sapiens
  misc_feature (1147)..(1147): n is a, c, g, or t
  misc_feature (1183)..(1183): n is a, c, g, or t
cgcagttccgccggaagtggccccagcctcgaggccgggcgtcttcggtcatctccggcgcttctagggctggttcccgtcatcttcgggagccgtggaggtacgaacttaagacatgcctattttattaatttacttccaaacgcaacgaaaggtccatggacaatttgtgggccatttaattcagggcccccaattcgtacgtggagaagtgggaatgcaaaagtactttgacctttaaccttcggtccggcgcggtggagggaaacgcctccgtctctatataaggaattttccggtctcttcgggtcctttttcctctcttcagcgtggggcgcccacaatttgcgcgctctctttctgctgctccccagctctcggatacagccgacaccatgggtttcggagacctgaaaagccctgccggcctccaggtgctcaacgattacctggcggacaagagctacatcgaggggtatgtgccatcacaagcagatgtggcagtatttgaagccgtgtccagcccaccgcctgccgacttgtgtcatgccctacgttggtataatcacatcaagtcttacgaaaaggaaaaggccagcctgccaggagtgaagaaagctttgggcaaatatggtcctgccgatgtggaagacactacaggaagtggagctacagatagtaaagatgatgatgacattgacctctttggatctgatgatgaggaggaaagtgaagaagcaaagaggctaagggaagaacgtcttgcacaatatgaatcaaagaaagccaaaaaacctgcacttgttgccaagtcttccatcttactagatgtgaaaccttgggatgatgagacagatatggcgaaattagaggagtgcgtcagaagcattcaagcagacggcttagtctggggctcatctaaactagttccagtgggatacggaattaagaaacttcaaatacagtgtgtagttgaagatgataaagttggaacagatatgctggaggagcagatcactgcttttgaggactatgtgcagtccatggatgtggctgctttcaacaagatctaaaatccatcctggatcatggcatttaaataaaagattgaaagattaaaaaaaaaaaaaaaaaaaaaaacaaaaanaacaaaaaaaaaaaaaaaacaaaaaaaaacaaaaancccttggggcccgcttggcccaagggaattttagattgggcaaggttattcctggggcccgaatttggggctaattggccaatttccccttatgggggggcggattaacattcaagggccggtgttttaacacggtggggctgggaaaacccttggcttacccaatttaaatggcttgggagttcccaacaagttggccaccctgaatgggcaatggaaattggagcggtattttt

SEQ ID NO: 448411 - DNA, 1263 bp, Homo sapiens
cgcagttccgccggaagtggccccagcctcgaggccgggcgtcttcggtcatctccggcgcttctagggctggttcccgtcatcttcgggagccgtggaggtacgaacttaagacatgcctattttattaatttacttccaaacgcaacgaaaggtccatggacaatttgtgggccatttaattcagggcccccaattcgtacgtggagaagtgggaatgcaaaagtactttgacctttaaccttcggtccggcgcggtggagggaaacgcctccgtctctatataaggaattttccggtctcttcgggtcctttttcctctcttcagcgtggggcgcccacaatttgcgcgctctctttctgctgctccccagctctcggatacagccgacaccatgggtttcggagacctgaaaagccctgccggcctccaggtgctcaacgattacctggcggacaagagctacatcgaggggtatgtgccatcacaagcagatgtggcagtatttgaagccgtgtccagcccaccgcctgccgacttgtgtcatgccctacgttggtataatcacatcaagtcttacgaaaaggaaaaggccagcctgccaggagtgaagaaagctttgggcaaatatggtcctgccgatgtggaagacactacaggaagtggagctacagatagtaaagatgatgatgacattgacctctttggatctgatgatgaggaggaaagtgaagaagcaaagaggctaagggaagaacgtcttgcacaatatgaatcaaagaaagccaaaaaacctgcacttgttgccaagtcttccatcttactagatgtgaaaccttgggatgatgagacagatatggcgaaattagaggagtgcgtcagaagcattcaagcagacggcttagtctggggctcatctaaactagttccagtgggatacggaattaagaaacttcaaatacagtgtgtagttgaagatgataaagttggaacagatatgctggaggagcagatcactgcttttgaggactatgtgcagtccatggatgtggctgctttcaacaagatctaaaatccatcctggatcatggcatttaaataaaagattgaaagattaccgggccggttaaataagtctggggtccacaaaaaaaaagtgtggcccgcccaagaaataaccctgggcggggccagaagcagtgaggtccaagctgacggagggtcccaaaaggcgggggaaacagtgtgttcagcaccaccgg

SEQ ID NO: 448412 - DNA, 1181 bp, Homo sapiens
  misc_feature (1158)..(1158): n is a, c, g, or t
cgcagttccgccggaagtggccccagcctcgaggccgggcgtcttcggtcatctccggcgcttctagggctggttcccgtcatcttcgggagccgtggaggtacgaacttaagacatgcctattttattaatttacttccaaacgcaacgaaaggtccatggacaatttgtgggccatttaattcagggcccccaattcgtacgtggagaagtgggaatgcaaaagtactttgacctttaaccttcggtccggcgcggtggagggaaacgcctccgtctctatataaggaattttccggtctcttcgggtcctttttcctctcttcagcgtggggcgcccacaatttgcgcgctctctttctgctgctccccagctctcggatacagccgacaccatgggtttcggagacctgaaaagccctgccggcctccaggtgctcaacgattacctggcggacaagagctacatcgaggggtatgtgccatcacaagcagatgtggcagtatttgaagccgtgtccagcccaccgcctgccgacttgtgtcatgccctacgttggtataatcacatcaagtcttacgaaaaggaaaaggccagcctgccaggagtgaagaaagctttgggcaaatatggtcctgccgatgtggaagacactacaggaagtggagctacagatagtaaagatgatgatgacattgacctctttggatctgatgatgaggaggaaagtgaagaagcaaagaggctaagggaagaacgtcttgcacaatatgaatcaaagaaagccaaaaaacctgcacttgttgccaagtcttccatcttactagatgtgaaaccttgggatgatgagacagatatggcgaaattagaggagtgcgtcagaagcattcaagcagacggcttagtctggggctcatctaaactagttccagtgggatacggaattaagaaacttcaaatacagtgtgtagttgaagatgataaagttggaacagatatgctggaggagcagatcactgcttttgaggactatgtgcagtccatggatgtggctgctttcaacaagatctaaaatccatcctggatcatggcatttaaataaaagattgaaagattataaaaaaaaaaaacaaccctccaagaaaatattaaacccncctttttgaaatccattcgcgcg

SEQ ID NO: 448413 - DNA, 1491 bp, Homo sapiens
cgcagttccgccggaagtggccccagcctcgaggccgggcgtcttcggtcatctccggcgcttctagggctggttcccgtcatcttcgggagccgtggaggtacgaacttaagacatgcctattttattaatttacttccaaacgcaacgaaaggtccatggacaatttgtgggccatttaattcagggcccccaattcgtacgtggagaagtgggaatgcaaaagtactttgacctttaaccttcggtccggcgcggtggagggaaacgcctccgtctctatataaggaattttccggtctcttcgggtcctttttcctctcttcagcgtggggcgcccacaatttgcgcgctctctttctgctgctccccagctctcggatacagccgacaccatgggtttcggagacctgaaaagccctgccggcctccaggtgctcaacgattacctggcggacaagagctacatcgaggggtatgtgccatcacaagcagatgtggcagtatttgaagccgtgtccagcccaccgcctgccgacttgtgtcatgccctacgttggtataatcacatcaagtcttacgaaaaggaaaaggccagcctgccaggagtgaagaaagctttgggcaaatatggtcctgccgatgtggaagacactacaggaagtggagctacagatagtaaagatgatgatgacattgacctctttggatctgatgatgaggaggaaagtgaagaagcaaagaggctaagggaagaacgtcttgcacaatatgaatcaaagaaagccaaaaaacctgcacttgttgccaagtcttccatcttactagatgtgaaaccttgggatgatgagacagatatggcgaaattagaggagtgcgtcagaagcattcaagcagacggcttagtctggggctcatctaaactagttccagtgggatacggaattaagaaacttcaaatacagtgtgtagttgaagatgataaagttggaacagatatgctggaggagcagatcactgcttttgaggactatgtgcagtccatggatgtggctgctttcaacaagatctaaaatccatcctggatcatggcatttaaataaaagattgaaagattaaaaacatcaaaacacacaatcaaaaacaaaataaaaaaaaaaataaaaacacaaaagcacccacatcactcatacatatgcccgcctaccatactactcacacgcaactgacctctccaacccgtatcacatccccatccgcgccactcgcgaatgtcactaccatcctactacatcaccaaatattcgcacctagctaatacacacctactctactctaacactaaaagactaccctaaaaatactacatacagccacttccaactttatgctcactacaaacacaacaacaccacaacctctcactctaacacaactcttatcaaataccaacactaaacgaccacctgctctctacctctactctcacta

SEQ ID NO: 448414 - DNA, 1354 bp, Homo sapiens
cgcagttccgccggaagtggccccagcctcgaggccgggcgtcttcggtcatctccggcgcttctagggctggttcccgtcatcttcgggagccgtggaggtacgaacttaagacatgcctattttattaatttacttccaaacgcaacgaaaggtccatggacaatttgtgggccatttaattcagggcccccaattcgtacgtggagaagtgggaatgcaaaagtactttgacctttaaccttcggtccggcgcggtggagggaaacgcctccgtctctatataaggaattttccggtctcttcgggtcctttttcctctcttcagcgtggggcgcccacaatttgcgcgctctctttctgctgctccccagctctcggatacagccgacaccatgggtttcggagacctgaaaagccctgccggcctccaggtgctcaacgattacctggcggacaagagctacatcgaggggtatgtgccatcacaagcagatgtggcagtatttgaagccgtgtccagcccaccgcctgccgacttgtgtcatgccctacgttggtataatcacatcaagtcttacgaaaaggaaaaggccagcctgccaggagtgaagaaagctttgggcaaatatggtcctgccgatgtggaagacactacaggaagtggagctacagatagtaaagatgatgatgacattgacctctttggatctgatgatgaggaggaaagtgaagaagcaaagaggctaagggaagaacgtcttgcacaatatgaatcaaagaaagccaaaaaacctgcacttgttgccaagtcttccatcttactagatgtgaaaccttgggatgatgagacagatatggcgaaattagaggagtgcgtcagaagcattcaagcagacggcttagtctggggctcatctaaactagttccagtgggatacggaattaagaaacttcaaatacagtgtgtagttgaagatgataaagttggaacagatatgctggaggagcagatcactgcttttgaggactatgtgcagtccatggatgtggctgctttcaacaagatctaaaatccatcctggatcatggcatttaaataaaagattgaaagattaaaaaaaaaaaaacaaaaaaaaacaaaaaaaacacacacaacacacaaaaaaaaaaaaaccaccaaaaaaaaaaacaaaaaacaacaacaatcaacaccaagccacccacagagacaaaaacgacacaagaaagccaacgagagagaaagagaaaagcgcgatacggacagcaagcaagcaaagacgaaagaaaaaaaaagaaaagcgggaacagatcaagaaagaagacaagaccg

SEQ ID NO: 448415 - DNA, 889 bp, Homo sapiens
cgcagttccgccggaagtggccccagcctcgaggccgggcgtcttcggtcatctccggcgcttctagggctggttcccgtcatcttcgggagccgtggaggtggggcgcccacaatttgcgcgctctctttctgctgctccccagctctcggatacagccgacaccatgggtttcggagacctgaaaagccctgccggcctccaggtgctcaacgattacctggcggacaagagctacatcgaggggtatgtgccatcacaagcagatgtggcagtatttgaagccgtgtccagcccaccgcctgccgacttgtgtcatgccctacgttggtataatcacatcaagtcttacgaaaaggaaaaggccagcctgccaggagtgaagaaagctttgggcaaatatggtcctgccgatgtggaagacactacaggaagtggagctacagatagtaaagatgatgatgacattgacctctttggatctgatgatgaggaggaaagtgaagaagcaaagaggctaagggaagaacgtcttgcacaatatgaatcaaagaaagccaaaaaacctgcacttgttgccaagtcttccatcttactagatgtgaaaccttgggatgatgagacagatatggcgaaattagaggagtgcgtcagaagcattcaagcagacggcttagtctggggctcatctaaactagttccagtgggatacggaattaagaaacttcaaatacagtgtgtagttgaagatgataaagttggaacagatatgctggaggagcagatcactgcttttgaggactatgtgcagtccatggatgtggctgctttcaacaagatctaaaatccatcctggatcatggcatttaaataaaagattgaaagatta

SEQ ID NO: 448416 - DNA, 924 bp, Homo sapiens
  misc_feature (45)..(45): n is a, c, g, or t
tcatacgctgctctagaggatacaacttatgttctgacccacctnttgcagtttattttactgtgtggtagtgcattcttatgttctgacccactcttatgttctgacccacccttatgttctgacccacctcaggtggggcgcccacaatttgcgcgctctctttctgctgctccccagctctcggatacagccgacaccatgggtttcggagacctgaaaagccctgccggcctccaggtgctcaacgattacctggcggacaagagctacatcgaggggtatgtgccatcacaagcagatgtggcagtatttgaagccgtgtccagcccaccgcctgccgacttgtgtcatgccctacgttggtataatcacatcaagtcttacgaaaaggaaaaggccagcctgccaggagtgaagaaagctttgggcaaatatggtcctgccgatgtggaagacactacaggaagtggagctacagatagtaaagatgatgatgacattgacctctttggatctgatgatgaggaggaaagtgaagaagcaaagaggctaagggaagaacgtcttgcacaatatgaatcaaagaaagccaaaaaacctgcacttgttgccaagtcttccatcttactagatgtgaaaccttgggatgatgagacagatatggcgaaattagaggagtgcgtcagaagcattcaagcagacggcttagtctggggctcatctaaactagttccagtgggatacggaattaagaaacttcaaatacagtgtgtagttgaagatgataaagttggaacagatatgctggaggagcagatcactgcttttgaggactatgtgcagtccatggatgtggctgctttcaacaagatctaaaatccatcctggatcatggcatttaaataaaagattgaaagatta

SEQ ID NO: 448417 - DNA, 898 bp, Homo sapiens
ctagacctgccatttctcacacacagatttaggaatgaccaacttgtaccctcccagcgtttagcacaacacaatgacacccttaatttgacaatctgcttcctctaatatatccccagtctaaggcatttaaaattaaacagctcttcaaaccctctcggatacagccgacaccatgggtttcggagacctgaaaagccctgccggcctccaggtgctcaacgattacctggcggacaagagctacatcgaggggtatgtgccatcacaagcagatgtggcagtatttgaagccgtgtccagcccaccgcctgccgacttgtgtcatgccctacgttggtataatcacatcaagtcttacgaaaaggaaaaggccagcctgccaggagtgaagaaagctttgggcaaatatggtcctgccgatgtggaagacactacaggaagtggagctacagatagtaaagatgatgatgacattgacctctttggatctgatgatgaggaggaaagtgaagaagcaaagaggctaagggaagaacgtcttgcacaatatgaatcaaagaaagccaaaaaacctgcacttgttgccaagtcttccatcttactagatgtgaaaccttgggatgatgagacagatatggcgaaattagaggagtgcgtcagaagcattcaagcagacggcttagtctggggctcatctaaactagttccagtgggatacggaattaagaaacttcaaatacagtgtgtagttgaagatgataaagttggaacagatatgctggaggagcagatcactgcttttgaggactatgtgcagtccatggatgtggctgctttcaacaagatctaaaatccatcctggatcatggcatttaaataaaagattgaaagatta

SEQ ID NO: 448418 - DNA, 963 bp, Homo sapiens
cgcagttccgccggaagtggccccagcctcgaggccgggcgtcttcggtcatctccggcgcttctagggctggttcccgtcatcttcgggagccgtggaggtacgaacttaagacatgcctattttattaatttacttccaaacgcaacgaaaggtccatggacaatttgtgggccatttaattcagggcccccaattcgtacgtggagaagtgggaatgcaaaagtactttgacctttaaccttcggtccggcgcggtggagggaaacgcctccgtctctatataaggaattttccggtctcttcgggtcctttttcctctcttcagcgtggggcgcccacaatttgcgcgctctctttctgctgctccccagctctcggatacagccgacaccatgggtttcggagacctgaaaagccctgccggcctccaggtgctcaacgattacctggcggacaagagctacatcgaggggtatgtgccatcacaagcagatgtggcagtatttgaagccgtgtccagcccaccgcctgccgacttgtgtcatgccctacgttggtataatcacatcaagtcttacgaaaaggaaaaggccagcctgccaggagtgaagaaagctttgggcaaatatggtcctgccgatgtggaagacactacaggaagtggagctacagatagtaaagatgatgatgacattgacctctttggatctgatgatgaggaggaaagtgaagaagcaaagaggctaagggaagaacgtcttgcacaatatgaatcaaagaaagccaaaaaacctgcacttgttgccaagtcttccatcttactagatgtgaaaccttgggatgatgagacagatatggcgaaattagaggagtgcgtcagaagcattcaagcagacggcttagtctggggctcatctaaactagttccagtgggacacgaatgttcaggtaccgagctcc

SEQ ID NO: 448419 - DNA, 953 bp, Homo sapiens
cgcagttccgccggaagtggccccagcctcgaggccgggcgtcttcggtcatctccggcgcttctagggctggttcccgtcatcttcgggagccgtggaggtacgaacttaagacatgcctattttattaatttacttccaaacgcaacgaaaggtccatggacaatttgtgggccatttaattcagggcccccaattcgtacgtggagaagtgggaatgcaaaagtactttgacctttaaccttcggtccggcgcggtggagggaaacgcctccgtctctatataaggaattttccggtctcttcgggtcctttttcctctcttcagcgtggggcgcccacaatttgcgcgctctctttctgctgctccccagctctcggatacagccgacaccatgggtttcggagacctgaaaagccctgccggcctccaggtgctcaacgattacctggcggacaagagctacatcgaggggtatgtgccatcacaagcagatgtggcagtatttgaagccgtgtccagcccaccgcctgccgacttgtgtcatgccctacgttggtataatcacatcaagtcttacgaaaaggaaaaggccagcctgccaggagtgaagaaagctttgggcaaatatggtcctgccgatgtggaagacactacaggaagtggagctacagatagtaaagatgatgatgacattgacctctttggatctgatgatgaggaggaaagtgaagaagcaaagaggctaagggaagaacgtcttgcacaatatgaatcaaagaaagccaaaaaacctgcacttgttgccaagtcttccatcttactagatgtgaaaccttgggatgatgagacagatatggcgaaattagaggagtgcgtcagaagcattcaagcagacggcttagtctggggctcatctaaactagttccagtggtagtaagactcaatacg

SEQ ID NO: 448420 - DNA, 970 bp, Homo sapiens
cgcagttccgccggaagtggccccagcctcgaggccgggcgtcttcggtcatctccggcgcttctagggctggttcccgtcatcttcgggagccgtggaggtacgaacttaagacatgcctattttattaatttacttccaaacgcaacgaaaggtccatggacaatttgtgggccatttaattcagggcccccaattcgtacgtggagaagtgggaatgcaaaagtactttgacctttaaccttcggtccggcgcggtggagggaaacgcctccgtctctatataaggaattttccggtctcttcgggtcctttttcctctcttcagcgtggggcgcccacaatttgcgcgctctctttctgctgctccccagctctcggatacagccgacaccatgggtttcggagacctgaaaagccctgccggcctccaggtgctcaacgattacctggcggacaagagctacatcgaggggtatgtgccatcacaagcagatgtggcagtatttgaagccgtgtccagcccaccgcctgccgacttgtgtcatgccctacgttggtataatcacatcaagtcttacgaaaaggaaaaggccagcctgccaggagtgaagaaagctttgggcaaatatggtcctgccgatgtggaagacactacaggaagtggagctacagatagtaaagatgatgatgacattgacctctttggatctgatgatgaggaggaaagtgaagaagcaaagaggctaagggaagaacgtcttgcacaatatgaatcaaagaaagccaaaaaacctgcacttgttgccaagtcttccatcttactagatgtgaaaccttgggatgatgagacagatatggcgaaattagaggagtgcgtcagaagcattcaagcagacggcttagtctggggctcatctaaactagttccggtgggtcagagccgaagttgtaccctcaagagtcagct

SEQ ID NO: 448421 - DNA, 837 bp, Homo sapiens
agcgggctagatgttttctgtcagggtatggtgcgaacgatgaggccccgcacaaggtgctggctcgtgaggttccggaatacatccgggacggcacgcggtcccggaaaccctggaagagaccggttgcggtccttgaggtggctcaacgaattaccgttctcggacgagtcatcttagatcgatgcggtatgctgctactacagaattgagcatgtggcagtatttgaagccgtgtccagcccaccgcctgccgacttgtgtcatgccctacgttggtataatcacatcaagtcttacgaaaaggaaaaggccagcctgccaggagtgaagaaagctttgggcaaatatggtcctgccgatgtggaagacactacaggaagtggagctacagatagtaaagatgatgatgacattgacctctttggatctgatgatgaggaggaaagtgaagaagcaaagaggctaagggaagaacgtcttgcacaatatgaatcaaagaaagccaaaaaacctgcacttgttgccaagtcttccatcttactagatgtgaaaccttgggatgatgagacagatatggcgaaattagaggagtgcgtcagaagcattcaagcagacggcttagtctggggctcatctaaactagttccagtgggatacggaattaagaaacttcaaatacagtgtgtagttgaagatgataaagttggaacagatatgctggaggagcagatcactgcttttgaggactatgtgcagtccatggatgtggctgctttcaacaagatctaaaatccatcctggatcatggcatttaaataaaagattgaaagatta

SEQ ID NO: 448422 - DNA, 831 bp, Homo sapiens
gatcagtgtagcgcgggcagctgcgtatagcggtgcccagcacgaagtccttgtagataagcacggcccagcacgaccgatcgggctgttcgtgaattaactcatacacgccccggcgagtcatgccgcgattgttgcaccagcgaatcggctcgcagtcaccatacactccaagataagaatgatatagtcgacgtcgcgagccaagatgtggcagtatttgaagccgtgtccagcccaccgcctgccgacttgtgtcatgccctacgttggtataatcacatcaagtcttacgaaaaggaaaaggccagcctgccaggagtgaagaaagctttgggcaaatatggtcctgccgatgtggaagacactacaggaagtggagctacagatagtaaagatgatgatgacattgacctctttggatctgatgatgaggaggaaagtgaagaagcaaagaggctaagggaagaacgtcttgcacaatatgaatcaaagaaagccaaaaaacctgcacttgttgccaagtcttccatcttactagatgtgaaaccttgggatgatgagacagatatggcgaaattagaggagtgcgtcagaagcattcaagcagacggcttagtctggggctcatctaaactagttccagtgggatacggaattaagaaacttcaaatacagtgtgtagttgaagatgataaagttggaacagatatgctggaggagcagatcactgcttttgaggactatgtgcagtccatggatgtggctgctttcaacaagatctaaaatccatcctggatcatggcatttaaataaaagattgaaagatta

SEQ ID NO: 448423 - DNA, 894 bp, Homo sapiens
tgaagattcgtgtcctctcatcatcgtcatcctcatcctcatccagacttgcccttttgtcatcagatgtgctggtctcagactcctcctcctcccgagccaggagcttcttaaaaacttgaaactcctcaacagaagtacaggctgtcctggccaaaaactcagcttctgaaactctgagaatgtccttgagcaatgggttagggatctgtgtctgccccttcttatcaggggtttggtaccgtcccaggcgctccaggtaaatgtgtctctggacacgaatgttcatgaacattcagcccaccgcctgccgacttgtgtcatgccctacgttggtataatcacatcaagtcttacgaaaaggaaaaggccagcctgccaggagtgaagaaagctttgggcaaatatggtcctgccgatgtggaagacactacaggaagtggagctacagatagtaaagatgatgatgacattgacctctttggatctgatgatgaggaggaaagtgaagaagcaaagaggctaagggaagaacgtcttgcacaatatgaatcaaagaaagccaaaaaacctgcacttgttgccaagtcttccatcttactagatgtgaaaccttgggatgatgagacagatatggcgaaattagaggagtgcgtcagaagcattcaagcagacggcttagtctggggctcatctaaactagttccagtgggatacggaattaagaaacttcaaatacagtgtgtagttgaagatgataaagttggaacagatatgctggaggagcagatcactgcttttgaggactatgtgcagtccatggatgtggctgctttcaacaagatctaaaatccatcctggatcatggcatttaaataaaagattgaaagatta

SEQ ID NO: 448424 - DNA, 819 bp, Homo sapiens
tttctacatctcttgcgcgtggcgcgccacaatatgtcgctgatctgctgctgcctgctcagctactgcggatctgctgatgactaggtgtttgggattatcatgcaaatgccctgcgggcgctcgaggtgcgcacggtatgaactggagtgacaatgagctcctcaaggcgtatgtgccattcatcagcagaagtgcgagcgattcgcaatcttgtataacagcccaccgcctgccgacttgtgtcatgccctacgttggtataatcacatcaagtcttacgaaaaggaaaaggccagcctgccaggagtgaagaaagctttgggcaaatatggtcctgccgatgtggaagacactacaggaagtggagctacagatagtaaagatgatgatgacattgacctctttggatctgatgatgaggaggaaagtgaagaagcaaagaggctaagggaagaacgtcttgcacaatatgaatcaaagaaagccaaaaaacctgcacttgttgccaagtcttccatcttactagatgtgaaaccttgggatgatgagacagatatggcgaaattagaggagtgcgtcagaagcattcaagcagacggcttagtctggggctcatctaaactagttccagtgggatacggaattaagaaacttcaaatacagtgtgtagttgaagatgataaagttggaacagatatgctggaggagcagatcactgcttttgaggactatgtgcagtccatggatgtggctgctttcaacaagatctaaaatccatcctggatcatggcatttaaataaaagattgaaagatta

SEQ ID NO: 448425 - DNA, 1092 bp, Homo sapiens
cgcagttccgccggaagtggccccagcctcgaggccgggcgtcttcggtcatctccggcgcttctagggctggttcccgtcatcttcgggagccgtggaggtacgaacttaagacatgcctattttattaatttacttccaaacgcaacgaaaggtccatggacaatttgtgggccatttaattcagggcccccaattcgtacgtggagaagtgggaatgcaaaagtactttgacctttaaccttcggtccggcgcggtggagggaaacgcctccgtctctatataaggaattttccggtctcttcgggtcctttttcctctcttcagcgtggggcgcccacaatttgcgcgctctctttctgctgctccccagctctcggatacagccgacaccatgggtttcggagacctgaaaagccctgccggcctccaggtgctcaacgattacctggcggacaagagctacatcgaggggtatgtgccatcacaagcagatgtggcagtatttgaagccgtgtcatgccctacgttggtataatcacatcaagtcttacgaaaaggaaaaggccagcctgccaggagtgaagaaagctttgggcaaatatggtcctgccgatgtggaagacactacaggaagtggagctacagatagtaaagatgatgatgacattgacctctttggatctgatgatgaggaggaaagtgaagaagcaaagaggctaagggaagaacgtcttgcacaatatgaatcaaagaaagccaaaaaacctgcacttgttgccaagtcttccatcttactagatgtgaaaccttgggatgatgagacagatatggcgaaattagaggagtgcgtcagaagcattcaagcagacggcttagtctggggctcatctaaactagttccagtgggatacggaattaagaaacttcaaatacagtgtgtagttgaagatgataaagttggaacagatatgctggaggagcagatcactgcttttgaggactatgtgcagtccatggatgtggctgctttcaacaagatctaaaatccatcctggatcatggcatttaaataaaagattgaaagatta

SEQ ID NO: 448426 - DNA, 1018 bp, Homo sapiens
cgcagttccgccggaagtggccccagcctcgaggccgggcgtcttcggtcatctccggcgcttctagggctggttcccgtcatcttcgggagccgtggaggtacgaacttaagacatgcctattttattaatttacttccaaacgcaacgaaaggtccatggacaatttgtgggccatttaattcagggcccccaattcgtacgtggagaagtgggaatgcaaaagtactttgacctttaaccttcggtccggcgcggtggagggaaacgcctccgtctctatataaggaattttccggtctcttcgggtcctttttcctctcttcagcgtggggcgcccacaatttgcgcgctctctttctgctgctccccagctctcggatacagccgacaccatgggtttcggagacctgaaaagccctgccggcctccaggtgctcaacgattacctggcggacaagagctacatcgaggggtatgtgccatcacaagcagatgtggcagtatttgaagccgtgtccagcccaccgcctgccgacttgtgtcatgccctacgttggtataatcacatcaagtcttacgaaaaggaaaaggccagcctgccaggagtgaagaaagctttgggcaaatatggtcctgccgatgtggaagacactacaggaagtggagctacagatagtaaagatgatgatgacattgacctctttggatctgatgatgaggaggaaagtgaagaagcaaagaggctaagggaagaacgtcttgcacaatatgaatcaaagaaagccaaaaatgatgagacagatatggcgaaattagaggagtgcgtcagaagcattcaagcagacggcttagtctggggctcatctaaactagttccagtgggatacggaattaagaaacttcaaatacagtgcctcttgacttcacatcctgaactgccaccatatgttcgtaacaaccaattccttctgtttacatcgatgtccatcgctccgctttccctgctcataccaca

SEQ ID NO: 448427 - DNA, 1364 bp, Homo sapiens
cgcagttccgccggaagtggccccagcctcgaggccgggcgtcttcggtcatctccggcgcttctagggctggttcccgtcatcttcgggagccgtggaggtacgaacttaagacatgcctattttattaatttacttccaaacgcaacgaaaggtccatggacaatttgtgggccatttaattcagggcccccaattcgtacgtggagaagtgggaatgcaaaagtactttgacctttaaccttcggtccggcgcggtggagggaaacgcctccgtctctatataaggaattttccggtctcttcgggtcctttttcctctcttcagcgtggggcgcccacaatttgcgcgctctctttctgctgctccccagctctcggatacagccgacaccatgggtttcggagacctgaaaagccctgccggcctccaggtgctcaacgattacctggcggacaagagctacatcgaggggtatgtgccatcacaagcagatgtggcagtatttgaagccgtgtccagcccaccgcctgccgacttgtgtcatgccctacgttggtataatcacatcaagtcttacgaaaaggaaaaggccaggtagaacatggacagcagcaattcaacttttccccacactgccctgccaatgtgcctcgaccttgacctggggggcccacctctggggtgagagggtggctcattcattcagtccttggccattcttctgaaactgccaacaagggtggaagtttggggaagtggactccagttcactaagaatggaactgagcatacttaatgaaatctcaaacagaaatgttcatactgaaagagtaaatcatacctgccaggagtgaagaaagctttgggcaaatatggtcctgccgatgtggaagacactacaggaagtggagctacagatagtaaagatgatgatgacattgacctctttggatctgatgatgaggaggaaagtgaagaagcaaagaggctaagggaagaacgtcttgcacaatatgaatcaaagaaagccaaaaaacctgcacttgttgccaagtcttccatcttactagatgtgaaaccttgggatgatgagacagatatggcgaaattagaggagtgcgtcagaagcattcaagcagacggcttagtctggggctcatctaaactagttccagtgggatacggaattaagaaacttcaaatacagtgtgtagttgaagatgataaagttggaacagatatgctggaggagcagatcactgcttttgaggactatgtgcagtccatggatgtggctgctttcaacaagatctaaaatccatcctggatcatggcatttaaataaaagattgaaagatta

SEQ ID NO: 448428 - DNA, 1090 bp, Homo sapiens
cgcagttccgccggaagtggccccagcctcgaggccgggcgtcttcggtcatctccggcgcttctagggctggttcccgtcatcttcgggagccgtggagctctcggatacagccgacaccatgggtttcggagacctgaaaagccctgccggcctccaggtgctcaacgattacctggcggacaagagctacatcgaggggtatgtgccatcacaagcagatgtggcagtatttgaagccgtgtccagcccaccgcctgccgacttgtgtcatgccctacgttggtataatcacatcaagtcttacgaaaaggaaaaggccaggtagaacatggacagcagcaattcaacttttccccacactgccctgccaatgtgcctcgaccttgacctggggggcccacctctggggtgagagggtggctcattcattcagtccttggccattcttctgaaactgccaacaagggtggaagtttggggaagtggactccagttcactaagaatggaactgagcatacttaatgaaatctcaaacagaaatgttcatactgaaagagtaaatcatacctgccaggagtgaagaaagctttgggcaaatatggtcctgccgatgtggaagacactacaggaagtggagctacagatagtaaagatgatgatgacattgacctctttggatctgatgatgaggaggaaagtgaagaagcaaagaggctaagggaagaacgtcttgcacaatatgaatcaaagaaagccaaaaaacctgcacttgttgccaagtcttccatcttactagatgtgaaaccttgggatgatgagacagatatggcgaaattagaggagtgcgtcagaagcattcaagcagacggcttagtctggggctcatctaaactagttccagtgggatacggaattaagaaacttcaaatacagtgtgtagttgaagatgataaagttggaacagatatgctggaggagcagatcactgcttttgaggactatgtgcagtccatggatgtggctgctttcaacaagatctaaaatccatcctggatcatggcatttaaataaaagattgaaagatta

SEQ ID NO: 448429 - DNA, 577 bp, Homo sapiens
gcctttttcctctcttcagcgtggggcgccccacgctgaagagaggaaaaaggccagcctgccaggagtgaagaaagctttgggcaaatatggtcctgccgatgtggaagacactacaggaagtggagctacagatagtaaagatgatgatgacattgacctctttggatctgatgatgaggaggaaagtgaagaagcaaagaggctaagggaagaacgtcttgcacaatatgaatcaaagaaagccaaaaaacctgcacttgttgccaagtcttccatcttactagatgtgaaaccttgggatgatgagacagatatggcgaaattagaggagtgcgtcagaagcattcaagcagacggcttagtctggggctcatctaaactagttccagtgggatacggaattaagaaacttcaaatacagtgtgtagttgaagatgataaagttggaacagatatgctggaggagcagatcactgcttttgaggactatgtgcagtccatggatgtggctgctttcaacaagatctaaaatccatcctggatcatggcatttaaataaaagattgaaagatta

SEQ ID NO: 448430 - DNA, 551 bp, Homo sapiens
caatagtggttgaatttaaatgtttttcaagcctgccaggagtgaagaaagctttgggcaaatatggtcctgccgatgtggaagacactacaggaagtggagctacagatagtaaagatgatgatgacattgacctctttggatctgatgatgaggaggaaagtgaagaagcaaagaggctaagggaagaacgtcttgcacaatatgaatcaaagaaagccaaaaaacctgcacttgttgccaagtcttccatcttactagatgtgaaaccttgggatgatgagacagatatggcgaaattagaggagtgcgtcagaagcattcaagcagacggcttagtctggggctcatctaaactagttccagtgggatacggaattaagaaacttcaaatacagtgtgtagttgaagatgataaagttggaacagatatgctggaggagcagatcactgcttttgaggactatgtgcagtccatggatgtggctgctttcaacaagatctaaaatccatcctggatcatggcatttaaataaaagattgaaagatta

SEQ ID NO: 448431 - DNA, 631 bp, Homo sapiens
ctagccaggaacagccaggttcttaaaacacgagagttctagggaggacagcaaatggagccattctgattctgacaaaaagtccagacccaggctggctagacccctgggcctgccaggagtgaagaaagctttgggcaaatatggtcctgccgatgtggaagacactacaggaagtggagctacagatagtaaagatgatgatgacattgacctctttggatctgatgatgaggaggaaagtgaagaagcaaagaggctaagggaagaacgtcttgcacaatatgaatcaaagaaagccaaaaaacctgcacttgttgccaagtcttccatcttactagatgtgaaaccttgggatgatgagacagatatggcgaaattagaggagtgcgtcagaagcattcaagcagacggcttagtctggggctcatctaaactagttccagtgggatacggaattaagaaacttcaaatacagtgtgtagttgaagatgataaagttggaacagatatgctggaggagcagatcactgcttttgaggactatgtgcagtccatggatgtggctgctttcaacaagatctaaaatccatcctggatcatggcatttaaataaaagattgaaagatta

SEQ ID NO: 448432 - DNA, 793 bp, Homo sapiens
cgcagttccgccggaagtggccccagcctcgaggccgggcgtcttcggtcatctccggcgcttctagggctggttcccgtcatcttcgggagccgtggagctctcggatacagccgacaccatgggtttcggagacctgaaaagccctgccggcctccaggtgctcaacgattacctggcggacaagagctacatcgaggggtatgtgccatcacaagcagatgtggcagtatttgaagccgtgtccagcccaccgcctgccgacttgtgtcatgccctacgttggtataatcacatcaagtcttacgaaaaggaaaaggccagagacactacaggaagtggagctacagatagtaaagatgatgatgacattgacctctttggatctgatgatgaggaggaaagtgaagaagcaaagaggctaagggaagaacgtcttgcacaatatgaatcaaagaaagccaaaaaacctgcacttgttgccaagtcttccatcttactagatgtgaaaccttgggatgatgagacagatatggcgaaattagaggagtgcgtcagaagcattcaagcagacggcttagtctggggctcatctaaactagttccagtgggatacggaattaagaaacttcaaatacagtgtgtagttgaagatgataaagttggaacagatatgctggaggagcagatcactgcttttgaggactatgtgcagtccatggatgtggctgctttcaacaagatctaaaatccatcctggatcatggcatttaaataaaagattgaaagatta

SEQ ID NO: 448433 - DNA, 793 bp, Homo sapiens
cgcagttccgccggaagtggccccagcctcgaggccgggcgtcttcggtcatctccggcgcttctagggctggttcccgtcatcttcgggagccgtggagctctcggatacagccgacaccatgggtttcggagacctgaaaagccctgccggcctccaggtgctcaacgattacctggcggacaagagctacatcgaggggtatgtgccatcacaagcagatgtggcagtatttgaagccgtgtccagcccaccgcctgccgacttgtgtcatgccctacgttggtataatcacatcaagtcttacgaaaaggaaaaggccagcctgccaggagtgaagaaagctttgggcaaatatggtcctgccgatgtggaagacactacaggaagtggagctacagatagtaaagatgatgatgacattgacctctttggatctgatgatgaggaggaaagtgaagaagcaaagaggctaagggaagaacgtcttgcacaatatgaatcaaagaaagccaaaaatgatgagacagatatggcgaaattagaggagtgcgtcagaagcattcaagcagacggcttagtctggggctcatctaaactagttccagtgggatacggaattaagaaacttcaaatacagtgtgtagttgaagatgataaagttggaacagatatgctggaggagcagatcactgcttttgaggactatgtgcagtccatggatgtggctgctttcaacaagatctaaaatccatcctggatcatggcatttaaataaaagattgaaagatta

SEQ ID NO: 448434 - DNA, 572 bp, Homo sapiens
gcgacgtgcagatcctaatgacatctgccgggtacacaggctacatctttaaacaggacccaaagtttgggagaaagggtcaattcactcctcataagaccccacaggctttcagatgccaaggtgcatggtgttctcatatggaaaacctgccacctactcccatacccctaattcctgaccccctgaatccctgctcaccatttataccacgtcttgcacaatatgaatcaaagaaagccaaaaaacctgcacttgttgccaagtcttccatcttactagatgtgaaaccttgggatgatgagacagatatggcgaaattagaggagtgcgtcagaagcattcaagcagacggcttagtctggggctcatctaaactagttccagtgggatacggaattaagaaacttcaaatacagtgtgtagttgaagatgataaagttggaacagatatgctggaggagcagatcactgcttttgaggactatgtgcagtccatggatgtggctgctttcaacaagatctaaaatccatcctggatcatggcatttaaataaaagattgaaagatta

SEQ ID NO: 448435 - DNA, 489 bp, Homo sapiens
gaggaaaagcccggggagacgttctatccctaaccctcttgcttcttcacttggcctcctacactcatcgagatccaaagaggtcaacgtcatcatcatctttactatctgtagctccacttcctgtagtgtctaccacaatatgaatcaaagaaagccaaaaaacctgcacttgttgccaagtcttccatcttactagatgtgaaaccttgggatgatgagacagatatggcgaaattagaggagtgcgtcagaagcattcaagcagacggcttagtctggggctcatctaaactagttccagtgggatacggaattaagaaacttcaaatacagtgtgtagttgaagatgataaagttggaacagatatgctggaggagcagatcactgcttttgaggactatgtgcagtccatggatgtggctgctttcaacaagatctaaaatccatcctggatcatggcatttaaataaaagattgaaagatta

SEQ ID NO: 448436 - DNA, 657 bp, Homo sapiens
cggacgcgtgggtcgacccacgcgtccggaaagtgaagaagcaaagaggctaagggaagaacgtcttgcacaatatgaatcaaagaaagccaaaaaacctgcacttgttgccaagtcttccatcttactagatgtgaaaccttgggatgatgagacagatatggcgaaattagaggagtgcgtcagaagcattcaagcagacggcttagtctggggctcatctaaactagttccagtgggatacggaattaagaaacttcaaatacagtgtgtagttgaagatgataaagttggaacagatatgctggaggagcagatcactgcttttgaggactatgtgcagtccatggatgtggctgctttcaacaagatctaaaatccatcctggatcatggcatttaaataaaagattgaaagattaaaaaaaaaaaaacaaaaaaaaacaaaaaaaacacacacaacacacaaaaaaaaaaaaaccaccaaaaaaaaaaacaaaaaacaacaacaatcaacaccaagccacccacagagacaaaaacgacacaagaaagccaacgagagagaaagagaaaagcgcgatacggacagcaagcaagcaaagacgaaagaaaaaaaaagaaaagcgggaacagatcaagaaagaagacaagaccg

SEQ ID NO: 448437 - DNA, 521 bp, Homo sapiens
acaaagctccagtttccctgaaggctctggcattatctgcctgggtcactgctgtatccccagcatctagtccagggcctagcacacagtagatgctcagtaaacatggatgagcccctgaaaggcaagagtgttttgaaagctcccaagaactttccacaactgtctctggagcccagctctctgctgcacttagtctaaacctgtctctaaggtgcagacagatgcatcatctgctagtgtcttccacactcatctgttgtcccctaagtaggaagtatgaggtgggagggcagaggtttccaaatatttattgctcatctaaactagttccagtgggatacggaattaagaaacttcaaatacagtgtgtagttgaagatgataaagttggaacagatatgctggaggagcagatcactgcttttgaggactatgtgcagtccatggatgtggctgctttcaacaagatctaaaatccatcctggatcatggcatttaaataaaagattgaaagatta

SEQ ID NO: 448438 - DNA, 140 bp, Homo sapiens
agatatggcgaaattagaggagtgcgtcagaagcattcaagcagacggcttagtctggggctcatgtgagtttaggctttgcctttttttttttgaaactaacatctggaatttgcctacagtttcaacctttcctacaa

SEQ ID NO: 448439 - DNA, 844 bp, Homo sapiens
cgcagttccgccggaagtggccccagcctcgaggccgggcgtcttcggtcatctccggcgcttctagggctggttcccgtcatcttcgggagccgtggagctctcggatacagccgacaccatgggtttcggagacctgaaaagccctgccggcctccaggtgctcaacgattacctggcggacaagagctacatcgaggggtatgtgccatcacaagcagatgtggcagtatttgaagccgtgtccagcccaccgcctgccgacttgtgtcatgccctacgttggtataatcacatcaagtcttacgaaaaggaaaaggccagcctgccaggagtgaagaaagctttgggcaaatatggtcctgccgatgtggaagacactacaggaagtggagctacagatagtaaagatgatgatgacattgacctctttggatctgatgatgaggaggaaagtgaagaagcaaagaggctaagggaagaacgtcttgcacaatatgaatcaaagaaagccaaaaaacctgcacttgttgccaagtcttccatcttactagatgtgaaaccttgggatgatgagacagatatggcgaaattagaggagtgcgtcagaagcattcaagcagacggcttagtctggggctcatctaaactagttccagtgggatacggaattaagaaacttcaaatacagtgtgtagttgaagatgataaagttggaacagatatgctggaggagcagatcactgcttttgaggactatgtgcagtccatggatgtggctgctttcaacaagatctaaaatccatcctggatcatggcatttaaataaaagattgaaagatta

SEQ ID NO: 448440 - DNA, 720 bp, Homo sapiens
cgcagttccgccggaagtggccccagcctcgaggccgggcgtcttcggtcatctccggcgcttctagggctggttcccgtcatcttcgggagccgtggagctctcggatacagccgacaccatgggtttcggagacctgaaaagccctgccggcctccaggtgctcaacgattacctggcggacaagagctacatcgaggggtatgtgccatcacaagcagatgtggcagtatttgaagccgtgtccagcccaccgcctgccgacttgtgtcatgccctacgttggtataatcacatcaagtcttacgaaaaggaaaaggccagcctgccaggagtgaagaaagctttgggcaaatatggtcctgccgatgtggaagacactacaggaagtggagctacagatagtaaagatgatgatgacattgacctctttggatctgatgatgaggaggaaagtgaagaagcaaagaggctaagggaagaacgtcttgcacaatatgaatcaaagaaagccaaaaaacctgcacttgttgccaagtcttccatcttactagatgtgaaaccttgggatgatgagacagatatggcgaaattagaggagtgcgtcagaagcattcaagcagacggcttagtctggggctcattctaaactagtttccagtggggatccggaatttaagaaactttcaaaatcacgtggggtagtctgaaagaatgata

SEQ ID NO: 448441 - DNA, 465 bp, Homo sapiens
  misc_feature (21)..(21): n is a, c, g, or t
  misc_feature (437)..(437): n is a, c, g, or t
tcatcactgttctccacaccnccaccagaggatctctgaaaaatgcaaatctgatgccctacgttggtataatcacatcaagtcttacgaaaaggaaaaggccagcctgccaggagtgaagaaagctttgggcaaatatggtcctgccgatgtggaagacactacaggaagtggagctacagatagtaaagatgatgatgacattgacctctttggatctgatgatgaggaggaaagtgaagaagcaaagaggctaagggaagaacgtcttgcacaatatgaatcaaagaaagccaaaaaacctgcacttgttgccaagtcttccatcttactagatgtgaaaccttgggatgatgagacagatatggcgaaattagaggagtgcgtcagaagcattcaagcagacggcttagtctggggctcatctaaactagttncagtggactcaaatggtgccgagctcga

SEQ ID NO: 448442 - DNA, 1118 bp, Homo sapiens
cgcagttccgccggaagtggccccagcctcgaggccgggcgtcttcggtcatctccggcgcttctagggctggttcccgtcatcttcgggagccgtggaggtacgaacttaagacatgcctattttattaatttacttccaaacgcaacgaaaggtccatggacaatttgtgggccatttaattcagggcccccaattcgtacgtggagaagtgggaatgcaaaagtactttgacctttaaccttcggtccggcgcggtggagggaaacgcctccgtctctatataaggaattttccggtctcttcgggtcctttttcctctcttcagcgtggggcgcccacaatttgcgcgctctctttctgctgctccccagctctcggatacagccgacaccatgggtttcggagacctgaaaagccctgccggcctccaggtgctcaacgattacctggcggacaagagctacatcgaggggtatgtgccatcacaagcagatgtggcagtatttgaagccgtgtccagcccaccgcctgccgacttgtgtcatgccctacgttggtataatcacatcaagtcttacgaaaaggaaaaggccagcctgccaggagtgaagaaagctttgggcaaatatggtcctgccgatgtggaagacactacaggaagtggagctacagatagtaaagatgatgatgacattgacctctttggatctgatgatgaggaggaaagtgaagaagcaaagaggctaagggaagaacgtcttgcacaatatgaatcaaagaaagccaaaaaacctgcacttgttgccaagtcttccatcttactagatgtgaaaccttgggatgatgagacagatatggcgaaattagaggagtgcgtcagaagcattcaagcagacggcttagtctggggctcatctaaactagttccagtgggatacggaattaagaaacttcaaatacagtgtgtagttgaagatgataaagttggaacagatatgctggaggagcagatcactgcttttgaggactatgtgcagtccatggatgtggctgctttcaacaagatctaaaatccatcctggatcatggcatttaaataaaagattgaaagatta

SEQ ID NO: 448443 - DNA, 1269 bp, Homo sapiens
  misc_feature (1140)..(1140): n is a, c, g, or t
  misc_feature (1156)..(1156): n is a, c, g, or t
  misc_feature (1165)..(1165): n is a, c, g, or t
  misc_feature (1188)..(1188): n is a, c, g, or t
  misc_feature (1195)..(1195): n is a, c, g, or t
  misc_feature (1210)..(1210): n is a, c, g, or t
cgcagttccgccggaagtggccccagcctcgaggccgggcgtcttcggtcatctccggcgcttctagggctggttcccgtcatcttcgggagccgtggaggtacgaacttaagacatgcctattttattaatttacttccaaacgcaacgaaaggtccatggacaatttgtgggccatttaattcagggcccccaattcgtacgtggagaagtgggaatgcaaaagtactttgacctttaaccttcggtccggcgcggtggagggaaacgcctccgtctctatataaggaattttccggtctcttcgggtcctttttcctctcttcagcgtggggcgcccacaatttgcgcgctctctttctgctgctccccagctctcggatacagccgacaccatgggtttcggagacctgaaaagccctgccggcctccaggtgctcaacgattacctggcggacaagagctacatcgaggggtatgtgccatcacaagcagatgtggcagtatttgaagccgtgtccagcccaccgcctgccgacttgtgtcatgccctacgttggtataatcacatcaagtcttacgaaaaggaaaaggccagcctgccaggagtgaagaaagctttgggcaaatatggtcctgccgatgtggaagacactacaggaagtggagctacagatagtaaagatgatgatgacattgacctctttggatctgatgatgaggaggaaagtgaagaagcaaagaggctaagggaagaacgtcttgcacaatatgaatcaaagaaagccaaaaaacctgcacttgttgccaagtcttccatcttactagatgtgaaaccttgggatgatgagacagatatggcgaaattagaggagtgcgtcagaagcattcaagcagacggcttagtctggggctcatctaaactagttccagtgggatacggaattaagaaacttcaaatacagtgtgtagttgaagatgataaagttggaacagatatgctggaggagcagatcactgcttttgaggactatgtgcagtccatggatgtggctgctttcaacaagatctaaaatccatcctggatcatggcatttaaataaaagattgaaagattaggagattaaaaaaaaaaaactngggtttttgggggggnaaagggttnaaagggctggttatgtctcgccnttttgtnaagggaatggggccnaaaggggtaatgaacggggttgtagagaggtagaaaaagagagataaaaagggagataa

SEQ ID NO: 448444 - DNA, 1244 bp, Homo sapiens
cgcagttccgccggaagtggccccagcctcgaggccgggcgtcttcggtcatctccggcgcttctagggctggttcccgtcatcttcgggagccgtggaggtacgaacttaagacatgcctattttattaatttacttccaaacgcaacgaaaggtccatggacaatttgtgggccatttaattcagggcccccaattcgtacgtggagaagtgggaatgcaaaagtactttgacctttaaccttcggtccggcgcggtggagggaaacgcctccgtctctatataaggaattttccggtctcttcgggtcctttttcctctcttcagcgtggggcgcccacaatttgcgcgctctctttctgctgctccccagctctcggatacagccgacaccatgggtttcggagacctgaaaagccctgccggcctccaggtgctcaacgattacctggcggacaagagctacatcgaggggtatgtgccatcacaagcagatgtggcagtatttgaagccgtgtccagcccaccgcctgccgacttgtgtcatgccctacgttggtataatcacatcaagtcttacgaaaaggaaaaggccagcctgccaggagtgaagaaagctttgggcaaatatggtcctgccgatgtggaagacactacaggaagtggagctacagatagtaaagatgatgatgacattgacctctttggatctgatgatgaggaggaaagtgaagaagcaaagaggctaagggaagaacgtcttgcacaatatgaatcaaagaaagccaaaaaacctgcacttgttgccaagtcttccatcttactagatgtgaaaccttgggatgatgagacagatatggcgaaattagaggagtgcgtcagaagcattcaagcagacggcttagtctggggctcatctaaactagttccagtgggatacggaattaagaaacttcaaatacagtgtgtagttgaagatgataaagttggaacagatatgctggaggagcagatcactgcttttgaggactatgtgcagtccatggatgtggctgctttcaacaagatctaaaatccatcctggatcatggcatttaaataaaagattgaaagattaaaaaaaaaaaaaaaaaaagcggcgcagattcgatatcagcttatcgatccgtgacctcgaggggccgtaccatcgcctatagtagtcgatactcactgcgtcgttacactcgtgactggaacctgc

SEQ ID NO: 448445 - DNA, 1293 bp, Homo sapiens
cgcagttccgccggaagtggccccagcctcgaggccgggcgtcttcggtcatctccggcgcttctagggctggttcccgtcatcttcgggagccgtggaggtacgaacttaagacatgcctattttattaatttacttccaaacgcaacgaaaggtccatggacaatttgtgggccatttaattcagggcccccaattcgtacgtggagaagtgggaatgcaaaagtactttgacctttaaccttcggtccggcgcggtggagggaaacgcctccgtctctatataaggaattttccggtctcttcgggtcctttttcctctcttcagcgtggggcgcccacaatttgcgcgctctctttctgctgctccccagctctcggatacagccgacaccatgggtttcggagacctgaaaagccctgccggcctccaggtgctcaacgattacctggcggacaagagctacatcgaggggtatgtgccatcacaagcagatgtggcagtatttgaagccgtgtccagcccaccgcctgccgacttgtgtcatgccctacgttggtataatcacatcaagtcttacgaaaaggaaaaggccagcctgccaggagtgaagaaagctttgggcaaatatggtcctgccgatgtggaagacactacaggaagtggagctacagatagtaaagatgatgatgacattgacctctttggatctgatgatgaggaggaaagtgaagaagcaaagaggctaagggaagaacgtcttgcacaatatgaatcaaagaaagccaaaaaacctgcacttgttgccaagtcttccatcttactagatgtgaaaccttgggatgatgagacagatatggcgaaattagaggagtgcgtcagaagcattcaagcagacggcttagtctggggctcatctaaactagttccagtgggatacggaattaagaaacttcaaatacagtgtgtagttgaagatgataaagttggaacagatatgctggaggagcagatcactgcttttgaggactatgtgcagtccatggatgtggctgctttcaacaagatctaaaatccatcctggatcatggcatttaaataaaagattgaaagattatggttatgctttaataagatgccggtccgggaaaaacaaaaaaaaaaagggggggcaaaacccggggggcgatggccgtttgaagggccatggggagaaaaagggggggtaaagggggaaaagggggtggggacctggggggaggcacaaagcggaaaggtgggttcggtggaaa

SEQ ID NO: 448446 - DNA, 1169 bp, Homo sapiens
cgcagttccgccggaagtggccccagcctcgaggccgggcgtcttcggtcatctccggcgcttctagggctggttcccgtcatcttcgggagccgtggaggtacgaacttaagacatgcctattttattaatttacttccaaacgcaacgaaaggtccatggacaatttgtgggccatttaattcagggcccccaattcgtacgtggagaagtgggaatgcaaaagtactttgacctttaaccttcggtccggcgcggtggagggaaacgcctccgtctctatataaggaattttccggtctcttcgggtcctttttcctctcttcagcgtggggcgcccacaatttgcgcgctctctttctgctgctccccagctctcggatacagccgacaccatgggtttcggagacctgaaaagccctgccggcctccaggtgctcaacgattacctggcggacaagagctacatcgaggggtatgtgccatcacaagcagatgtggcagtatttgaagccgtgtccagcccaccgcctgccgacttgtgtcatgccctacgttggtataatcacatcaagtcttacgaaaaggaaaaggccagcctgccaggagtgaagaaagctttgggcaaatatggtcctgccgatgtggaagacactacaggaagtggagctacagatagtaaagatgatgatgacattgacctctttggatctgatgatgaggaggaaagtgaagaagcaaagaggctaagggaagaacgtcttgcacaatatgaatcaaagaaagccaaaaaacctgcacttgttgccaagtcttccatcttactagatgtgaaaccttgggatgatgagacagatatggcgaaattagaggagtgcgtcagaagcattcaagcagacggcttagtctggggctcatctaaactagttccagtgggatacggaattaagaaacttcaaatacagtgtgtagttgaagatgataaagttggaacagatatgctggaggagcagatcactgcttttgaggactatgtgcagtccatggatgtggctgctttcaacaagatctaaaatccatcctggatcatggcatttaaataaaagattgaaagattaattaaaaaatcaccttttaaacaagaaacggaaggcatttgatgcaaactt

SEQ ID NO: 448447 - DNA, 839 bp, Homo sapiens
  misc_feature (45)..(45): n is a, c, g, or t
tcatacgctgctctagaggatacaacttatgttctgacccacctnttgcagtggggcgcccacaatttgcgcgctctctttctgctgctccccagctctcggatacagccgacaccatgggtttcggagacctgaaaagccctgccggcctccaggtgctcaacgattacctggcggacaagagctacatcgaggggtatgtgccatcacaagcagatgtggcagtatttgaagccgtgtccagcccaccgcctgccgacttgtgtcatgccctacgttggtataatcacatcaagtcttacgaaaaggaaaaggccagcctgccaggagtgaagaaagctttgggcaaatatggtcctgccgatgtggaagacactacaggaagtggagctacagatagtaaagatgatgatgacattgacctctttggatctgatgatgaggaggaaagtgaagaagcaaagaggctaagggaagaacgtcttgcacaatatgaatcaaagaaagccaaaaaacctgcacttgttgccaagtcttccatcttactagatgtgaaaccttgggatgatgagacagatatggcgaaattagaggagtgcgtcagaagcattcaagcagacggcttagtctggggctcatctaaactagttccagtgggatacggaattaagaaacttcaaatacagtgtgtagttgaagatgataaagttggaacagatatgctggaggagcagatcactgcttttgaggactatgtgcagtccatggatgtggctgctttcaacaagatctaaaatccatcctggatcatggcatttaaataaaagattgaaagatta

SEQ ID NO: 448448 - DNA, 1065 bp, Homo sapiens
cgcagttccgccggaagtggccccagcctcgaggccgggcgtcttcggtcatctccggcgcttctagggctggttcccgtcatcttcgggagccgtggaggtacgaacttaagacatgcctattttattaatttacttccaaacgcaacgaaaggtccatggacaatttgtgggccatttaattcagggcccccaattcgtacgtggagaagtgggaatgcaaaagtactttgacctttaaccttcggtccggcgcggtggagggaaacgcctccgtctctatataaggaattttccggtctcttcgggtcctttttcctctcttcagcgtggggcgcccacaatttgcgcgctctctttctgctgctccccagctctcggatacagccgacaccatgggtttcggagacctgaaaagccctgccggcctccaggtgctcaacgattacctggcggacaagagctacatcgaggggtatgtgccatcacaagcagatgtggcagtatttgaagccgtgtccagcccaccgcctgccgacttgtgtcatgccctacgttggtataatcacatcaagtcttacgaaaaggaaaaggccagcctgccaggagtgaagaaagctttgggcaaatatggtcctgccgatgtggaagacactacaggaagtggagctacagatagtaaagatgatgatgacattgacctctttggatctgatgatgaggaggaaagtgaagaagcaaagaggctaagggaagaacgtcttgcacaatatgaatcaaagaaagccaaaaaacctgcacttgttgccaagtcttccatcttactagatgtgaaaccttgggatgatgagacagatatggcgaaattagaggagtgcgtcagaagcattcaagcagacggcttagtctggggctcatctaaactagttccagtgggatacggaattaagaaacttcaaatacagtgcttttgaggactatgtgcagtccatggatgtggctgctttcaacaagatctaaaatccatcctggatcatggcatttaaataaaagattgaaagatta

SEQ ID NO: 448449 - DNA, 958 bp, Homo sapiens
  misc_feature (930)..(930): n is a, c, g, or t
cgcagttccgccggaagtggccccagcctcgaggccgggcgtcttcggtcatctccggcgcttctagggctggttcccgtcatcttcgggagccgtggaggtacgaacttaagacatgcctattttattaatttacttccaaacgcaacgaaaggtccatggacaatttgtgggccatttaattcagggcccccaattcgtacgtggagaagtgggaatgcaaaagtactttgacctttaaccttcggtccggcgcggtggagggaaacgcctccgtctctatataaggaattttccggtctcttcgggtcctttttcctctcttcagcgtggggcgcccacaatttgcgcgctctctttctgctgctccccagctctcggatacagccgacaccatgggtttcggagacctgaaaagccctgccggcctccaggtgctcaacgattacctggcggacaagagctacatcgaggggtatgtgccatcacaagcagatgtggcagtatttgaagccgtgtccagcccaccgcctgccgacttgtgtcatgccctacgttggtataatcacatcaagtcttacgaaaaggaaaaggccagcctgccaggagtgaagaaagctttgggcaaatatggtcctgccgatgtggaagacactacaggaagtggagctacagatagtaaagatgatgatgacattgacctctttggatctgatgatgaggaggaaagtgaagaagcaaagaggctaagggaagaacgtcttgcacaatatgaatcaaagaaagccaaaaaacctgcacttgttgccaagtcttccatcttactagatgtgaaaccttgggatgatgagacagatatggcgaaattagaggagtgcgtcagaagcattcaagcagacggcttagtctggggctcatctaaactagttncagtggactcaaatggtgccgagctcga

SEQ ID NO: 448450 - DNA, 950 bp, Homo sapiens
  misc_feature (928)..(928): n is a, c, g, or t
  misc_feature (934)..(934): n is a, c, g, or t
cgcagttccgccggaagtggccccagcctcgaggccgggcgtcttcggtcatctccggcgcttctagggctggttcccgtcatcttcgggagccgtggaggtacgaacttaagacatgcctattttattaatttacttccaaacgcaacgaaaggtccatggacaatttgtgggccatttaattcagggcccccaattcgtacgtggagaagtgggaatgcaaaagtactttgacctttaaccttcggtccggcgcggtggagggaaacgcctccgtctctatataaggaattttccggtctcttcgggtcctttttcctctcttcagcgtggggcgcccacaatttgcgcgctctctttctgctgctccccagctctcggatacagccgacaccatgggtttcggagacctgaaaagccctgccggcctccaggtgctcaacgattacctggcggacaagagctacatcgaggggtatgtgccatcacaagcagatgtggcagtatttgaagccgtgtccagcccaccgcctgccgacttgtgtcatgccctacgttggtataatcacatcaagtcttacgaaaaggaaaaggccagcctgccaggagtgaagaaagctttgggcaaatatggtcctgccgatgtggaagacactacaggaagtggagctacagatagtaaagatgatgatgacattgacctctttggatctgatgatgaggaggaaagtgaagaagcaaagaggctaagggaagaacgtcttgcacaatatgaatcaaagaaagccaaaaaacctgcacttgttgccaagtcttccatcttactagatgtgaaaccttgggatgatgagacagatatggcgaaattagaggagtgcgtcagaagcattcaagcagacggcttagtctggggctcatctaactagtnccagtnggatacagtagggaga

SEQ ID NO: 448451 - DNA, 1167 bp, Homo sapiens
cgcagttccgccggaagtggccccagcctcgaggccgggcgtcttcggtcatctccggcgcttctagggctggttcccgtcatcttcgggagccgtggaggtacgaacttaagacatgcctattttattaatttacttccaaacgcaacgaaaggtccatggacaatttgtgggccatttaattcagggcccccaattcgtacgtggagaagtgggaatgcaaaagtactttgacctttaaccttcggtccggcgcggtggagggaaacgcctccgtctctatataaggaattttccggtctcttcgggtcctttttcctctcttcagcgtggggcgcccacaatttgcgcgctctctttctgctgctccccagctctcggatacagccgacaccatgggtttcggagacctgaaaagccctgccggcctccaggtgctcaacgattacctggcggacaagagctacatcgaggggtatgtgccatcacaagcagatgtggcagtatttgaagccgtgtccagcccaccgcctgccgacttgtgtcatgccctacgttggtataatcacatcaagtcttacgaaaaggaaaaggccagcctgccaggagtgaagaaagctttgggcaaatatggtcctgccgatgtggaagacactacaggaagtggagctacagatagtaaagatgatgatgacattgacctctttggatctgatgatgaggaggaaagtgaagaagcaaagaggctaagggaagaacgtcttgcacaatatgaatcaaagaaagccaaaaaacctgcacttgttgccaagtcttccatcttactagatgtgaaaccttgggatgatgagacagatatggcgaaattagaggagtgcgtccgaggctcagctgactgctaagacctgggccacatctaactagttcccggggatcggaatcagaactcaaatacaggggtagtcgacgaggtaagttggaccgaccgctggcggagcatcagctagagaccagcacgacaggcagggccgacacacaccaacccccgaaaggtacgacgacgcacggcacaacaaacaacacaaactgacgccggccgcacaccaacacggagccccaaaacacactaccgaacagcaagcataccaacggcaccacacccaccaa

SEQ ID NO: 448452 - DNA, 755 bp, Homo sapiens
cagcccccgcaagacgaccgactgcatttcctggggtggggccagctgagagtccctgagattacatggtctgtcttgccattctcaattcatgccctgccataaacccctcccgcgctgccacgtcttgcgggggctgccggcagcccccgcaagacagcccaccgcctgccgacttgtgtcatgccctacgttggtataatcacatcaagtcttacgaaaaggaaaaggccagcctgccaggagtgaagaaagctttgggcaaatatggtcctgccgatgtggaagacactacaggaagtggagctacagatagtaaagatgatgatgacattgacctctttggatctgatgatgaggaggaaagtgaagaagcaaagaggctaagggaagaacgtcttgcacaatatgaatcaaagaaagccaaaaaacctgcacttgttgccaagtcttccatcttactagatgtgaaaccttgggatgatgagacagatatggcgaaattagaggagtgcgtcagaagcattcaagcagacggcttagtctggggctcatctaaactagttccagtgggatacggaattaagaaacttcaaatacagtgtgtagttgaagatgataaagttggaacagatatgctggaggagcagatcactgcttttgaggactatgtgcagtccatggatgtggctgctttcaacaagatctaaaatccatcctggatcatggcatttaaataaaagattgaaagatta

SEQ ID NO: 448453 - DNA, 716 bp, Homo sapiens
cacgagggccacatccatggactgcacatagtcctcaaaagcagtgatctgctcctccagcatatctgttccaactttatcatcttcaactacacactgtatttgaagtttcttaattcagcccaccgcctgccgacttgtgtcatgccctacgttggtataatcacatcaagtcttacgaaaaggaaaaggccagcctgccaggagtgaagaaagctttgggcaaatatggtcctgccgatgtggaagacactacaggaagtggagctacagatagtaaagatgatgatgacattgacctctttggatctgatgatgaggaggaaagtgaagaagcaaagaggctaagggaagaacgtcttgcacaatatgaatcaaagaaagccaaaaaacctgcacttgttgccaagtcttccatcttactagatgtgaaaccttgggatgatgagacagatatggcgaaattagaggagtgcgtcagaagcattcaagcagacggcttagtctggggctcatctaaactagttccagtgggatacggaattaagaaacttcaaatacagtgtgtagttgaagatgataaagttggaacagatatgctggaggagcagatcactgcttttgaggactatgtgcagtccatggatgtggctgctttcaacaagatctaaaatccatcctggatcatggcatttaaataaaagattgaaagatta

SEQ ID NO: 448454 - DNA, 1067 bp, Homo sapiens
cgcagttccgccggaagtggccccagcctcgaggccgggcgtcttcggtcatctccggcgcttctagggctggttcccgtcatcttcgggagccgtggaggtacgaacttaagacatgcctattttattaatttacttccaaacgcaacgaaaggtccatggacaatttgtgggccatttaattcagggcccccaattcgtacgtggagaagtgggaatgcaaaagtactttgacctttaaccttcggtccggcgcggtggagggaaacgcctccgtctctatataaggaattttccggtctcttcgggtcctttttcctctcttcagcgtggggcgcccacaatttgcgcgctctctttctgctgctccccagctctcggatacagccgacaccatgggtttcggagacctgaaaagccctgccggcctccaggtgctcaacgattacctggcggacaagagctacatcgaggggtatgtgccatcacaagcagatgtggcagtatttgaagccgtgtccagcccaccgcctgccgacttgtgtcatgccctacgttggtataatcacatcaagtcttacgaaaaggaaaaggccagcctgccaggagtgaagaaagctttgggcaaatatggtcctgccgatgtggaagacactacaggaagtggagctacagatagtaaagatgatgatgacattgacctctttggatctgatgatgaggaggaaagtgaagaagcaaagaggctaagggaagaacgtcttgcacaatatgaatcaaagaaagccaaaaatgatgagacagatatggcgaaattagaggagtgcgtcagaagcattcaagcagacggcttagtctggggctcatctaaactagttccagtgggatacggaattaagaaacttcaaatacagtgtgtagttgaagatgataaagttggaacagatatgctggaggagcagatcactgcttttgaggactatgtgcagtccatggatgtggctgctttcaacaagatctaaaatccatcctggatcatggcatttaaataaaagattgaaagatta

SEQ ID NO: 448455 - DNA, 818 bp, Homo sapiens
cgcagttccgccggaagtggccccagcctcgaggccgggcgtcttcggtcatctccggcgcttctagggctggttcccgtcatcttcgggagccgtggaggtacgaacttaagacatgcctattttattaatttacttccaaacgcaacgaaaggtccatggacaatttgtgggccatttaattcagggcccccaattcgtacgtggagaagtgggaatgcaaaagtactttgacctttaaccttcggtccggcgcggtggagggaaacgcctccgtctctatataaggaattttccggtctcttcgggtcctttttcctctcttcagcgtggggcgcccacaatttgcgcgctctctttctgctgctccccagctctcggatacagccgacaccatgggtttcggagacctgaaaagccctgccggcctccaggtgctcaacgattacctggcggacaagagctacatcgaggggtatgtgccatcacaagcagatgtggcagtatttgaagccgtgtccagcccaccgcctgccgacttgtgtcatgccctacgttggtataatcacatcaagtcttacgaaaaggaaaaggccagcctgccaggagtgaagaaagctttgggcaaatatggtcctgccgatgtggaagacactacaggaagtggagctacagatagtaaagatgatgatgacattgacctctttggatctgatgatgaggaggaaagtgaagaagcaaagaggctaagggaagaacgtcttgcacaatatgaatcaaagaaagccaaaaagttaggtcatttgtattttaacttc

SEQ ID NO: 448456 - DNA, 1067 bp, Homo sapiens
cgcagttccgccggaagtggccccagcctcgaggccgggcgtcttcggtcatctccggcgcttctagggctggttcccgtcatcttcgggagccgtggaggtacgaacttaagacatgcctattttattaatttacttccaaacgcaacgaaaggtccatggacaatttgtgggccatttaattcagggcccccaattcgtacgtggagaagtgggaatgcaaaagtactttgacctttaaccttcggtccggcgcggtggagggaaacgcctccgtctctatataaggaattttccggtctcttcgggtcctttttcctctcttcagcgtggggcgcccacaatttgcgcgctctctttctgctgctccccagctctcggatacagccgacaccatgggtttcggagacctgaaaagccctgccggcctccaggtgctcaacgattacctggcggacaagagctacatcgaggggtatgtgccatcacaagcagatgtggcagtatttgaagccgtgtccagcccaccgcctgccgacttgtgtcatgccctacgttggtataatcacatcaagtcttacgaaaaggaaaaggccagagacactacaggaagtggagctacagatagtaaagatgatgatgacattgacctctttggatctgatgatgaggaggaaagtgaagaagcaaagaggctaagggaagaacgtcttgcacaatatgaatcaaagaaagccaaaaaacctgcacttgttgccaagtcttccatcttactagatgtgaaaccttgggatgatgagacagatatggcgaaattagaggagtgcgtcagaagcattcaagcagacggcttagtctggggctcatctaaactagttccagtgggatacggaattaagaaacttcaaatacagtgtgtagttgaagatgataaagttggaacagatatgctggaggagcagatcactgcttttgaggactatgtgcagtccatggatgtggctgctttcaacaagatctaaaatccatcctggatcatggcatttaaataaaagattgaaagatta

SEQ ID NO: 448457 - DNA, 1032 bp, Homo sapiens
cgcagttccgccggaagtggccccagcctcgaggccgggcgtcttcggtcatctccggcgcttctagggctggttcccgtcatcttcgggagccgtggaggtacgaacttaagacatgcctattttattaatttacttccaaacgcaacgaaaggtccatggacaatttgtgggccatttaattcagggcccccaattcgtacgtggagaagtgggaatgcaaaagtactttgacctttaaccttcggtccggcgcggtggagggaaacgcctccgtctctatataaggaattttccggtctcttcgggtcctttttcctctcttcagcgtggggcgcccacaatttgcgcgctctctttctgctgctccccagctctcggatacagccgacaccatgggtttcggagacctgaaaagccctgccggcctccaggtgctcaacgattacctggcggacaagagctacatcgaggggtatgtgccatcacaagcagatgtggcagtatttgaagccgtgtccagcccaccgcctgccgacttgtgtcatgccctacgttggtataatcacatcaagtcttacgaaaaggaaaaggccagcctgccaggagtgaagaaagctttgggcaaatatggtcctgccgatgtggaagacactacaggaagtggagctacagatagtaaagatgatgatgacattgacctctttggatctgatgatgaggaggtatggcgtcttctataaagaacatatcggccaggcgcagtggctcatgcctgtaatcccagcatgttgggaggctgaggcgggtggatcacgaggtcaggagttgaagaccagcctggccaagatggtgaaaccctgtctgtactaaaaatacaaaaaaatgtggcaggcatctgtaatcccagctactcaggcggctaaggcagagaattgcttgaacctaggaagcggaggttgcagtgagccaagatcgtgccactgcatccagcctgggcgacagagcgagactccgtcccaaaaaaaaaaa

SEQ ID NO: 448458 - DNA, 890 bp, Homo sapiens
aacttggcatggggcggggcctctgggaggcgtggcctccggccggctcctctgctgttgccaagggaaactgccgcgaggaggcggaaggagcagaggaccggcagccggcgtcgaggcggggcgcgggaacgacggcggccatggcggcctcggggcccgggtgtcgcagctggtgcttgtgtcccgaggtgccatccgccaccttcttcactgcgctgctctcgctgctggtttccgggcctcgcctgttcctgtgcaggctccaaggagtcctccagggtccccatgccctgagagaatttctagggaagtcatctcacttggccttctgaaggtcctccctaagagtctcctgacaaaagttacttattgaacacctctatgtgccaggctctgtgttgggtactttgatcaatgcccctgtttcagtctcatctgtactcacggcagccctgtggagtacggtgtactggcccagcttacagatgcagaaagcgagacgttctgccatcagataaagtcacgtggctctttagtaacacggacaaggctcctcgccaaggaactcgtggcagaagagggcagcagttggcagtagctgccgatgtctgtccccagctccaccattcctccctgtggctgtgccgtgctcgtggtttcagtgtccgtgtgtccatgtgtctgcccttcaggagctcgcagctggtgtgcttggcggtcccaggcctgtgtagtgtctctcccctgctgcgggcgcccccaccccgattcctctccccagaagcggtgggatgggcccccatgaactgcagcagcatgctgaggtgtccatgttgtctgcctttgtataaagaaacagcctctgaaaaaaaaagaaaaagtcgacg

SEQ ID NO: 448459 - DNA, 1831 bp, Homo sapiens
aacttggcatggggcggggcctctgggaggcgtggcctccggccggctcctctgctgttgccaagggaaactgccgcgaggaggcggaaggagcagaggaccggcagccggcgtcgaggcggggcgcgggaacgacggcggccatggcggcctcggggcccgggtgtcgcagctggtgcttgtgtcccgaggtgccatccgccaccttcttcactgcgctgctctcgctgctggtttccgggcctcgcctgttcctgctgcagcagcccctggcgccctcgggcctcacgctgaagtccgaggcccttcgcaactggcaagtttacaggctggtaacctacatctttgtctacgagaatcccatctccctgctctgcggcgctatcatcatctggcgctttgctggcaatttcgagagaaccgtgggcaccgtccgccactgcttcttcaccgtgatcttcgccatcttctccgctatcatcttcctgtcattcgaggctgtgtcatcactgtcaaagctgggggaagtggaggatgccagaggtttcaccccagtggcctttgccatgctgggagtcaccaccgtccgttctcggatgaggcgggccctggtgtttggcatggttgtgccctcagtcctggttccgtggctcctgctgggtgcctcgtggctcattccccagacctctttcctcagtaatgtctgcgggctgtccatcgggctggcctatggcctcacctactgctattccatcgacctctcagagcgagtggcgctgaagctcgatcagaccttccccttcagcctgatgaggaggatatccgtgttcaagtacgtctcagggtcttcagccgagaggagggcagcccagagccggaaactgaacccggtgcctggctcctaccccacacagagctgccaccctcacctgtccccaagccaccctgtgtcccagacgcagcacgccagtggtcagaagctggcctcctggccctcctgcacccccgggcacatgcccaccttgcctccgtaccagcctgcctccggcctgtgctatgtgcagaaccactttggtccaaaccccacctcctccagtgtctacccagcttctgcgggcacctccctgggcatccagccccccacgcctgtgaacagccctggcacggtgtattctggggccttgggcacaccaggggctgcaggctccaaggagtcctccagggtccccatgccctgagagaatttctagggaagtcatctcacttggccttctgaaggtcctccctaagagtctcctgacaaaagttacttattgaacacctctatgtgccaggctctgtgttgggtactttgatcaatgcccctgtttcagtctcatctgtactcacggcagccctgtggagtacggtgtactggcccagcttacagatgcagaaagcgagacgttctgccatcagataaagtcacgtggctctttagtaacacggacaaggctcctcgccaaggaactcgtggcagaagagggcagcagttggcagtagctgccgatgtctgtccccagctccaccattcctccctgtggctgtgccgtgctcgtggtttcagtgtccgtgtgtccatgtgtctgcccttcaggagctcgcagctggtgtgcttggcggtcccaggcctgtgtagtgtctctcccctgctgcgggcgcccccaccccgattcctctccccagaagcggtgggatgggcccccatgaactgcagcagcatgctgaggtgtccatgttgtctgcctttgtataaagaaacagcctctgaaaaaaaaagaaaaagtcgacg

SEQ ID NO: 448460 - DNA, 869 bp, Homo sapiens
aacttggcatggggcggggcctctgggaggcgtggcctccggccggctcctctgctgttgccaagggaaactgccgcgaggaggcggaaggagcagaggaccggcagccggcgtcgaggcggggcgcgggaacgacggcggccatggcggcctcggggcccgggtgtcgcagctggtgcttgtgtcccgaggtgccatccgccaccttcttcactgcgctgctctcgctgctggtttccgggcctcgcctgttcctgtgcaggctccaaggagtcctccagggtccccatgccctgagagaatttctagggaagtcatctcacttggccttctgaaggtcctccctaagagtctcctgacaaaagttacttattgaacacctctatgtgccaggctctgtgttgggtactttgatcaatgcccctgtttcagtctcatctgtactcacggcagccctgtggagtacggtgtactggcccagcttacagatgcagaaagcgagacgttctgccatcagataaagtcacgtggctctttagtaacacggacaaggctcctcgccaaggaactcgtggcagaagagggcagcagttggcagtagctgccgatgtctgtccccagctccaccattcctccctgtggctgtgccgtgctcgtggtttcagtgtccgtgtgtccatgtgtctgcccttcaggagctcgcagctggtgtgcttggcggtcccaggcctgtgtagtgtctctcccctgctgcgggcgcccccaccccgattcctctccccagaagcggtgggatgggcccccatgaactgcagcagcatgctgaggtgtccatgttgtctgcctttgtataaagaaacagcctctga

SEQ ID NO: 448461 - DNA, 549 bp, Homo sapiens
ccctgtggagtacggtgtactggcccagcttacagatgcagaaagcgagacgttctgccatcagataaagtcacgtggctctttagtaacacggacaaggctcctcgccaaggaactcgtggcagaagagggcagcagttggcagtagctgccgatgtctgtccccagctccaccattcctccctgtggctgtgccgtgctcgtggtttcagtgtccgtgtgtccatgcgtccgccactgcttcttcaccgtgatcttcgccatcttctccgctatcatcttcctgtcattcgaggctgtgtcatcactgtcaaagctgggggaagtggaggatgccagaggtttcaccccagtggcctttgccatgctgggagtcaccaccgtccgttctcggatgaggcgggccctggtgtttggcatggttgtgccctcagtcctggttccgtggctcctgctgggtgcctcgtggctcattccccagacctctttcctcagtaatgtctgcgggctgtccatcgggctggcctgtatccttcctagcagagagct

SEQ ID NO: 448462 - DNA, 1932 bp, Homo sapiens
aacttggcatggggcggggcctctgggaggcgtggcctccggccggctcctctgctgttgccaagggaaactgccgcgaggaggcggaaggagcagaggaccggcagccggcgtcgaggcggggcgcgggaacgacggcggccatggcggcctcggggcccgggtgtcgcagctggtgcttgtgtcccgaggtgccatccgccaccttcttcactgcgctgctctcgctgctggtttccgggcctcgcctgttcctgctgcagcagcccctggcgccctcgggcctcacgctgaagtccgaggcccttcgcaactggcaagccactatggaaggaggggtcaggattacagcagaggagactggcacacagagtgttaagtgacacccactcaatccaccccgaagctgttacacttaattaaccctcaaactgcccagtgagtttacaggctggtaacctacatctttgtctacgagaatcccatctccctgctctgcggcgctatcatcatctggcgctttgctggcaatttcgagagaaccgtgggcaccgtccgccactgcttcttcaccgtgatcttcgccatcttctccgctatcatcttcctgtcattcgaggctgtgtcatcactgtcaaagctgggggaagtggaggatgccagaggtttcaccccagtggcctttgccatgctgggagtcaccaccgtccgttctcggatgaggcgggccctggtgtttggcatggttgtgccctcagtcctggttccgtggctcctgctgggtgcctcgtggctcattccccagacctctttcctcagtaatgtctgcgggctgtccatcgggctggcctatggcctcacctactgctattccatcgacctctcagagcgagtggcgctgaagctcgatcagaccttccccttcagcctgatgaggaggatatccgtgttcaagtacgtctcagggtcttcagccgagaggagggcagcccagagccggaaactgaacccggtgcctggctcctaccccacacagagctgccaccctcacctgtccccaagccaccctgtgtcccagacgcagcacgccagtggtcagaagctggcctcctggccctcctgcacccccgggcacatgcccaccttgcctccgtaccagcctgcctccggcctgtgctatgtgcagaaccactttggtccaaaccccacctcctccagtgtctacccagcttctgcgggcacctccctgggcatccagccccccacgcctgtgaacagccctggcacggtgtattctggggccttgggcacaccaggggctgcaggctccaaggagtcctccagggtccccatgccctgagagaatttctagggaagtcatctcacttggccttctgaaggtcctccctaagagtctcctgacaaaagttacttattgaacacctctatgtgccaggctctgtgttgggtactttgatcaatgcccctgtttcagtctcatctgtactcacggcagccctgtggagtacggtgtactggcccagcttacagatgcagaaagcgagacgttctgccatcagataaagtcacgtggctctttagtaacacggacaaggctcctcgccaaggaactcgtggcagaagagggcagcagttggcagtagctgccgatgtctgtccccagctccaccattcctccctgtggctgtgccgtgctcgtggtttcagtgtccgtgtgtccatgtgtctgcccttcaggagctcgcagctggtgtgcttggcggtcccaggcctgtgtagtgtctctcccctgctgcgggcgcccccaccccgattcctctccccagaagcggtgggatgggcccccatgaactgcagcagcatgctgaggtgtccatgttgtctgcctttgtataaagaaacagcctctga

SEQ ID NO: 448463 - DNA, 1020 bp, Homo sapiens
aacttggcatggggcggggcctctgggaggcgtggcctccggccggctcctctgctgttgccaagggaaactgccgcgaggaggcggaaggagcagaggaccggcagccggcgtcgaggcggggcgcgggaacgacggcggccatggcggcctcggggcccgggtgtcgcagctggtgcttgtgtcccgaggtgccatccgccaccttcttcactgcgctgctctcgctgctggtttccgggcctcgcctgttcctgctgcagcagcccctggcgccctcgggcctcacgctgaagtccgaggcccttcgcaactggcaagtttacaggctggtaacctacatctttgtctacgagaatcccatctccctgctctgcggcgctatcatcatctggcgctttgctggcaatttcgagagaaccgtgggcaccgtccgccactgcttcttcaccgtgatcttcgccatcttctccgctatcatcttcctgtcattcgaggctgtgtcatcactgtcaaagctgggggaagtggaggatgccagaggtttcaccccagtggcctttgccatgctgggagtcaccaccgtccgttctcggatgaggcgggccctggtgtttggcatggttgtgccctcagtcctggttccgtggctcctgctgggtgcctcgtggctcattccccagacctctttcctcagtaatgtctgcgggctgtccatcgggctggcctatggcctcacctactgctattccatcgacctctcagagcgagtggcgctgaagctcgatcagaccttccccttcagcctgatgaggaggatatccgtgttcaagtacgtctcagggtcttcagccgagaggagggcagcccagagccggaaactgaacccggtgcctggctcctaccccacacagagctgccaccctcacctgtccccaagcgcctcgtccaactgctggtgaaggcccaccaggatgcccagcgccacgtagctgcagggacccactcggggtaccgagc

SEQ ID NO: 448464 - DNA, 908 bp, Homo sapiens
aacttggcatggggcggggcctctgggaggcgtggcctccggccggctcctctgctgttgccaagggaaactgccgcgaggaggcggaaggagcagaggaccggcagccggcgtcgaggcggggcgcgggaacgacggcggccatggcggcctcggggcccgggtgtcgcagctggtgcttgtgtcccgaggtgccatccgccaccttcttcactgcgctgctctcgctgctggtttccgggcctcgcctgttcctgctgcagcagcccctggcgccctcgggcctcacgctgaagtccgaggcccttcgcaactggcaagtttacaggctggtaacctacatctttgtctacgagaatcccatctccctgctctgcggcgctatcatcatctggcgctttgctggcaatttcgagagaaccgtgggcaccgtccgccactgcttcttcaccgtgatcttcgccatcttctccgctatcatcttcctgtcattcgaggctgtgtcatcactgtcaaagctgggggaagtggaggatgccagaggtttcaccccagtggcctttgccatgctgggagtcaccaccgtccgttctcggatgaggcgggccctggtgtttggcatggttgtgccctcagtcctggttccgtggctcctgctgggtgcctcgtggctcattccccagacctctttcctcagtaatgtctgcgggctgtccatcgggctggcctatggcctcacctactgctattccatcgacctctcccctgctgcgggcgcccccaccccgattcctctccccagaagcggtgggatgggcccccatgaactgcagcagcatgctgaggtgtccatgttgtctgcctttgtataaagaaacagcctctgaaaaaaaaagaaaaagtcgacg

SEQ ID NO: 448465 - DNA, 432 bp, Homo sapiens
tgttaagtgacacccactcaatccaccccgaagctgttacacttaattaaccctcaaactgcccagtgaggtaggtcagtatgaaaacctgaaaaaggattataaagcactttacaaattcagagactgccctctaccgaaaagtattatttttttccctctggaagtcagttaccgctaagagttgcaccaggcctggggaagtgtagggattagatattcatgcctctcctttgaggctctgggtccttcattgttgaacgcactgcttgtattgcctcctgctgcgactcactggctctcacttctctgtcacggaggggggctctctgcctttcctaggcggcttataacctggcttccctcctgggagcaacccgccgccaggcctctaacccgactccctctgcagtttacaggctggtaacctac

SEQ ID NO: 448466 - DNA, 1810 bp, Homo sapiens
aacttggcatggggcggggcctctgggaggcgtggcctccggccggctcctctgctgttgccaagggaaactgccgcgaggaggcggaaggagcagaggaccggcagccggcgtcgaggcggggcgcgggaacgacggcggccatggcggcctcggggcccgggtgtcgcagctggtgcttgtgtcccgaggtgccatccgccaccttcttcactgcgctgctctcgctgctggtttccgggcctcgcctgttcctgctgcagcagcccctggcgccctcgggcctcacgctgaagtccgaggcccttcgcaactggcaagtttacaggctggtaacctacatctttgtctacgagaatcccatctccctgctctgcggcgctatcatcatctggcgctttgctggcaatttcgagagaaccgtgggcaccgtccgccactgcttcttcaccgtgatcttcgccatcttctccgctatcatcttcctgtcattcgaggctgtgtcatcactgtcaaagctgggggaagtggaggatgccagaggtttcaccccagtggcctttgccatgctgggagtcaccaccgtccgttctcggatgaggcgggccctggtgtttggcatggttgtgccctcagtcctggttccgtggctcctgctgggtgcctcgtggctcattccccagacctctttcctcagtaatgtctgcgggctgtccatcgggctggcctatggcctcacctactgctattccatcgacctctcagagcgagtggcgctgaagctcgatcagaccttccccttcagcctgatgaggaggatatccgtgttcaagtacgtctcagggtcttcagccgagaggagggcagcccagagccggaaactgaacccggtgcctggctcctaccccacacagagctgccaccctcacctgtccccaagccaccctgtgtcccagacgcagcacgccagtggtcagaagctggcctcctggccctcctgcacccccgggcacatgcccaccttgcctccgtaccagcctgcctccggcctgtgctatgtgcagaaccactttggtccaaaccccacctcctccagtgtctacccagcttctgcgggcacctccctgggcatccagccccccacgcctgtgaacagccctggcacggtgtattctggggccttgggcacaccaggggctgcaggctccaaggagtcctccagggtccccatgccctgagagaatttctagggaagtcatctcacttggccttctgaaggtcctccctaagagtctcctgacaaaagttacttattgaacacctctatgtgccaggctctgtgttgggtactttgatcaatgcccctgtttcagtctcatctgtactcacggcagccctgtggagtacggtgtactggcccagcttacagatgcagaaagcgagacgttctgccatcagataaagtcacgtggctctttagtaacacggacaaggctcctcgccaaggaactcgtggcagaagagggcagcagttggcagtagctgccgatgtctgtccccagctccaccattcctccctgtggctgtgccgtgctcgtggtttcagtgtccgtgtgtccatgtgtctgcccttcaggagctcgcagctggtgtgcttggcggtcccaggcctgtgtagtgtctctcccctgctgcgggcgcccccaccccgattcctctccccagaagcggtgggatgggcccccatgaactgcagcagcatgctgaggtgtccatgttgtctgcctttgtataaagaaacagcctctga

SEQ ID NO: 448467 - DNA, 1040 bp, Homo sapiens
  misc_feature (882)..(882): n is a, c, g, or t
  misc_feature (892)..(892): n is a, c, g, or t
  misc_feature (911)..(911): n is a, c, g, or t
  misc_feature (917)..(917): n is a, c, g, or t
  misc_feature (920)..(920): n is a, c, g, or t
  misc_feature (926)..(926): n is a, c, g, or t
  misc_feature (931)..(931): n is a, c, g, or t
  misc_feature (940)..(940): n is a, c, g, or t
aacttggcatggggcggggcctctgggaggcgtggcctccggccggctcctctgctgttgccaagggaaactgccgcgaggaggcggaaggagcagaggaccggcagccggcgtcgaggcggggcgcgggaacgacggcggccatggcggcctcggggcccgggtgtcgcagctggtgcttgtgtcccgaggtgccatccgccaccttcttcactgcgctgctctcgctgctggtttccgggcctcgcctgttcctgctgcagcagcccctggcgccctcgggcctcacgctgaagtccgaggcccttcgcaactggcaagtttacaggctggtaacctacatctttgtctacgagaatcccatctccctgctctgcggcgctatcatcatctggcgctttgctggcaatttcgagagaaccgtgggcaccgtccgccactgcttcttcaccgtgatcttcgccatcttctccgctatcatcttcctgtcattcgaggctgtgtcatcactgtcaaagctgggggaagtggaggatgccagaggtttcaccccagtggcctttgccatgctgggagtcaccaccgtccgttctcggatgaggcgggccctggtgtttggcatggttgtgccctcagtcctggttccgtggctcctgctgggtgcctcgtggctcattccccagacctctttcctcagtaatgtctgcgggctgtccatcgggctggcctatggcctcacctactgctattccatcgacctctcagagcgagtggcgctgaagctcgatcagaccttccccttcagcctgatgaggaggatatccgtgttcaagtacgtctcagggtcttcagccgagaggagggcagcccagagccggaaantgacccgggnctggtcctaaccaaaaganttgcanctnactgtnccaangcacctgtntccagagcgacagcatggtcaaaagcggggcctgggctcctggagcccggggatggcccttgtccggcaaacatgcacagctggtatcgtgacaccattg

SEQ ID NO: 448468 - DNA, 1853 bp, Homo sapiens
aacttggcatggggcggggcctctgggaggcgtggcctccggccggctcctctgctgttgccaagggaaactgccgcgaggaggcggaaggagcagaggaccggcagccggcgtcgaggcggggcgcgggaacgacggcggccatggcggcctcggggcccgggtgtcgcagctggtgcttgtgtcccgaggtgccatccgccaccttcttcactgcgctgctctcgctgctggtttccgggcctcgcctgttcctgctgcagcagcccctggcgccctcgggcctcacgctgaagtccgaggcccttcgcaactggcaagtttacaggctggtaacctacatctttgtctacgagaatcccatctccctgctctgcggcgctatcatcatctggcgctttgctggcaatttcgagagaaccgtgggcaccgtccgccactgcttcttcaccgtgatcttcgccatcttctccgctatcatcttcctgtcattcgaggctgtgtcatcactgtcaaagctgggggaagtggaggatgccagaggtttcaccccagtggcctttgccatgctgggagtcaccaccgtccgttctcggatgaggcgggccctggtgtttggcatggttgtgccctcagtcctggttccgtggctcctgctgggtgcctcgtggctcattccccagacctctttcctcagtaatgtctgcgggctgtccatcgggctggcctatggcctcacctactgctattccatcgacctctcagagcgagtggcgctgaagctcgatcagaccttccccttcagcctgatgaggaggatatccgtgttcaagtacgtctcagggtcttcagccgagaggagggcagcccagagccggaaactgaacccggtgcctggctcctaccccacacagagctgccaccctcacctgtccccaagccaccctgtgtcccagacgcagcacgccagtggtcagaagctggcctcctggccctcctgcacccccgggcacatgcccaccttgcctccgtaccagcctgcctccggcctgtgctatgtgcagaaccactttggtccaaaccccacctcctccagtgtctacccagcttctgcgggcacctccctgggcatccagccccccacgcctgtgaacagccctggcacggtgtattctggggccttgggcacaccaggggctgcaggctccaaggagtcctccagggtccccatgccctgagagaatttctagggaagtcatctcacttggccttctgaaggtcctccctaagagtctcctgacaaaagttacttattgaacacctctatgtgccaggctctgtgttgggtactttgatcaatgcccctgtttcagtctcatctgtactcacggcagccctgtggagtacggtgtactggcccagcttacagatgcagaaagcgagacgttctgccatcagataaagtcacgtggctctttagtaacacggacaaggctcctcgccaaggaactcgtggcagaagagggcagcagttggcagtagctgccgatgtctgtccccagctccaccattcctccctgtggctgtgccgtgctcgtggtttcagtgtccgtgtgtccatgtgtctgcccttcaggaacaccaggggctgcaggctccaaggagtcctccagggtccccatgccctgagagaatttctagggaagtcatctcacttggccttctgaaggtcctccctaagagtccccaccccgattcctctccccagaagcggtgggatgggcccccatgaactgcagcagcatgctgaggtgtccatgttgtctgcctttgtataaagaaacagcctctga

SEQ ID NO: 448469 - DNA, 1396 bp, Homo sapiens
gtgacgggcacctgtagtcccagctactctggaggctgaggcaggagaatggtgtgatctgggaggcggagcttgcagtgagccaagatcacaccactgcactccagcctgggctgctagagtgagactccatctcaaaaaaaaaaacaaacctttggctctgggtttcccctgagctgcaaactccagccagagtgtgcagcgtgctaagcatgaaggcttctgtagagtgagtgggaacctgtgttctccccggggagtgttcggccctcctccctttgctgcctccagtttcacttaacacgccaacctcagatggcctcacctactgctattccatcgacctctcagagcgagtggcgctgaagctcgatcagaccttccccttcagcctgatgaggaggatatccgtgttcaagtacgtctcagggtcttcagccgagaggagggcagcccagagccggaaactgaacccggtgcctggctcctaccccacacagagctgccaccctcacctgtccccaagccaccctgtgtcccagacgcagcacgccagtggtcagaagctggcctcctggccctcctgcacccccgggcacatgcccaccttgcctccgtaccagcctgcctccggcctgtgctatgtgcagaaccactttggtccaaaccccacctcctccagtgtctacccagcttctgcgggcacctccctgggcatccagccccccacgcctgtgaacagccctggcacggtgtattctggggccttgggcacaccaggggctgcaggctccaaggagtcctccagggtccccatgccctgagagaatttctagggaagtcatctcacttggccttctgaaggtcctccctaagagtctcctgacaaaagttacttattgaacacctctatgtgccaggctctgtgttgggtactttgatcaatgcccctgtttcagtctcatctgtactcacggcagccctgtggagtacggtgtactggcccagcttacagatgcagaaagcgagacgttctgccatcagataaagtcacgtggctctttagtaacacggacaaggctcctcgccaaggaactcgtggcagaagagggcagcagttggcagtagctgccgatgtctgtccccagctccaccattcctccctgtggctgtgccgtgctcgtggtttcagtgtccgtgtgtccatgtgtctgcccttcaggagctcgcagctggtgtgcttggcggtcccaggcctgtgtagtgtctctcccctgctgcgggcgcccccaccccgattcctctccccagaagcggtgggatgggcccccatgaactgcagcagcatgctgaggtgtccatgttgtctgcctttgtataaagaaacagcctctga

SEQ ID NO: 448470 - DNA, 1095 bp, Homo sapiens
aacttggcatggggcggggcctctgggaggcgtggcctccggccggctcctctgctgttgccaagggaaactgccgcgaggaggcggaaggagcagaggaccggcagccggcgtcgaggcggggcgcgggaacgacggcggccatggcggcctcggggcccgggtgtcgcagctggtgcttgtgtcccgaggtgccatccgccaccttcttcactgcgctgctctcgctgctggtttccgggcctcgcctgttcctgctgcagcagcccctggcgccctcgggcctcacgctgaagtccgaggcccttcgcaactggcaagtttacaggctggtaacctacatctttgtctacgagaatcccatctccctgctctgcggcgctatcatcatctggcgctttgctggcaatttcgagagaaccgtgggcaccgtccgccactgcttcttcaccgtgatcttcgccatcttctccgctatcatcttcctgtcattcgaggctgtgtcatcactgtcaaagctgggggaagtggaggatgccagaggtttcaccccagtggcctttgccatgctgggagtcaccaccgtccgttctcggatgaggcgggccctggtgtttggcatggttgtgccctcagtcctggttccgtggctcctgctgggtgcctcgtggctcattccccagacctctttcctcagtaatgtctgcgggctgtccatcgggctggcctatggcctcacctactgctattccatcgacctctcagagcgagtggcgctgaagctcgatcagaccttccccttcagcctgatgaggaggatatccgtgttcaagtacgtctcagggtcttcagccgagaggagggcagcccagagccggaagtaagtgacagaactcttaagtgctgttaaatcttttttaaaaaaaaaattattttttttttttgagacggagtctcactctgtcacccaggctggagtgcagtggcacagtcataactcactgcagcctcaaacttctgggtttaagcagtcctcctacctcagcctcttaagtacctgggactagaagcatatgccaccagacctggctaatt

SEQ ID NO: 448471 - DNA, 549 bp, Homo sapiens
caaagttgaagaaactgagaaagttgtgaataaaatttatctggaggttaccaatattaatattttaaaatattaatacttaatattttaatctatgtttttaggtttgtgttccgcccttcttacataattgtcattgtaggattatcattgttcatctgagccaaggaccaccctgaaatatcccttgtgctatggtctcatgcaagggtttcccatgcctgtgagtgtgtttgtgatcccacatgtatcaggtgcctggctgctctgggacttgcagtaattgtctcttgtttgtttcaggtgtgatcccctgggcccgtttgttgtcgggggagaagacttagacccttttgggtgagtactgctggggaggtggcagcaacacaacttgcttttgtggcttttcagccccagctcatcttctaattttagagttttcggtcagtctcttcctttggggtggaggaggcagttgttgctgagcagctgagaaagcactgccacatacgctgcccctccacacctagagcggtgcaggagagcact

SEQ ID NO: 448472 - DNA, 3234 bp, Homo sapiens
agcggggcttccccgccccgccccgtccccgggcgtctccattttggtctcaggtgtggactcggcaagaaccagcgcaagagggaagcggagttatagctaccccggccgcggagccggctcactgcactacccccgcccccttctttcctccagacgccgaagtcgcgggcgctcatggcgggcctggaggtactgttcgcatcggcagcgccggccatcacctgcaggcaggacgcgctcgtctgcttcttgcattgggaagtggtgacacacggttactgcggcttgggtgtcggtgaccagccgggtcccaatgataagaagtcagaactgctgccagctgggtggaacaacaataaagacctgtatgtcctccggtatgagtataaggatgggtccagaaagctccttgtgaaagccatcaccgtggagagcagcatgatcctcaatgtgctggaatatggctcacagcaagtggcagacttgaccctgaacttggatgattatatcgatgcagaacacctgggtgacttccacaggacctacaagaacagtgaggagcttcggtctcgtattgtgtctggaatcatcacacctatccatgagcagtgggaaaaggctaatgtaagcagtccccaccgggagttcccccctgctaccgccagagaggtggacccactccggattcctccacaccacccacacaccagtcggcagcctccctggtgtgatcccctgggcccgtttgttgtcgggggagaagacttagacccttttgggcctcggagaggtggcatgattgtggatcccctgagatctggcttcccaagagcacttattgacccttcctcaggcctcccgaaccgacttcctccaggcgctgtgcccccaggagctcgctttgacccctttggacccattgggaccagcccacccggacctaacccagaccatctccccccgccgggctacgatgacatgtacctgtgaaggcctcaagaatgtaacatcccaggcttccctccattctcctggagctgccaccgctgtccccatcagcaaccatgttcttgcaggctgggggcaagggattctgctcatgtgtttgcagaccggctgggatagcctccccaccccttatcagagccaagacacctgctgcagctctccacctagctgcagatagctcccaaagagaaatcagtgtgtctctttcaccatcagctcctcccctttcaccaccagctcctctccacttcccaagggagactccggcaaccttcagcaacatatatcctcgaccagatgcagtgctataagaacagaacgcattttggatgttattattaagaaccaaatgtcaatacagaattcatgttgccggtttcccacttttctttttacattaatgcatagctgcttccatttatgagactttagagtttgagtttctgtagggctgaatgactctttttcctgcccagggcccattcttgcttctcaggcaccttccgtttattaattgccattgctcctgacatcactaagatgggtccccttctggctgcatgaatggaaatgagtgactggaaatcccataggccacaagaatgactttcacaagggcaggaacattgtggaaagactgcatcattctgatgaggcaaaatcctccagctattcctgtctgggccagttttgtaggtccatctgtgcatgggcagcagtagtcaaaaagccaaggaaaaaacagagcagacctgaaggctaatcttatttttgccactaacttagtgaatgaccctaagcaagttccttctcctcttagggccttgtgccaagcctatgaaattggaggtggctttcctgctctaaagcattttgatgtctcattctgtgtttggtaacccctataaactggggcagaggaaaagaatgatggttcaaggccatacttcccttgaaccttgtgtggttcttgcctaactctgtggtttttggaccccatggggcccagacagagcacaggagcatgggctgcctctgagtgtggtgttgaacttcgggaggagcagggagccctgcaccttgtgtcctggcccacctgacctttggtgttctccggatccttttcagcccgaggcctgacagacgcgggcagtgatgagccctgttctggagtggaaagagcacgatagagcaccaggctaagaggcacgagatcaaggcggtagtcacttccgctctgcagctagcatttcaaccatatgtggatcctttcatttctcagctccctggattccttcccctaaattaggacctattatttacctgtaggtaagcaagctactgtagctcttctgaggtatctgccaggctgttttctgtagcctcagattgcctatctgcttagcctgagaacaggtagatgaaaactaaactgatgcctaggcccagggtcagtctcagatggaagctgggcctgggtggggaggctagcatgcgtggctccctgggtatttctgtcagtccccatggcaagcagtgatttagtaaaacaccccagagtcagggaagccaaccaccttgaaacctttagaacatctctgctttggagaaagacccagagatcaggcagaggtgcagattcaatcattactcataacctttgagagctggcaaatgggaggagtgttagtctttgttttggaattggaccattcttgcaaccaaaaggacttagagcagtttgctcataaagacatcctttattataaaaggaagtatttaaaggatgatagagaccatcagatagaagcagggaaggtagataacttttaggaccttgatgtgaggaaaagataaaatttaaacaataaatttgccacttagattttctagcagcaaagtccgaaaagatagttatatacaaaattctgttttctgaaaacaaaattgtgattcaccttcagaattggccattttttttgtgagtttccttgcatcaaggacactgagaaacacagtcattgtcttaggtgttctatgggaggaagtgaatagagcctttaggaacttcctggtcaagcttatggtgcttattttgatctgggccacttccctccttccagtcatgagtaatcatcaaggagcaagttggagtgtttcaggtgtatattttgtagaacccaaaagattggagccttaacaataaacatcagcactaagtga

SEQ ID NO: 448473 - DNA, 4898 bp, Homo sapiens
agcggggcttccccgccccgccccgtccccgggcgtctccattttggtctcaggtgtggactcggcaagaaccagcgcaagagggaagcggagttatagctaccccggccgcggagccggctcactgcactacccccgcccccttctttcctccagacgccgaagtcgcgggcgctcatggcgggcctggaggtactgttcgcatcggcagcgccggccatcacctgcaggcaggacgcgctcgtctgcttcttgcattgggaagtggtgacacacggttactgcggcttgggtgtcggtgaccagccgggtcccaatgataagaagtcagaactgctgccagctgggtggaacaacaataaagacctgtatgtcctccggtatgagtataaggatgggtccagaaagctccttgtgaaagccatcaccgtggagagcagcatgatcctcaatgtgctggaatatggctcacagcaagtggcagacttgaccctgaacttggatgattatatcgatgcagaacacctgggtgacttccacaggacctacaagaacagtgaggagcttcggtctcgtattgtgtctggaatcatcacacctatccatgagcagtgggaaaaggctaatgtaagcagtccccaccgggagttcccccctgctaccgccagagaggtggacccactccggattcctccacaccacccacacaccagtcggcagcctccctggtgtgatcccctgggcccgtttgttgtcgggggagaagacttagacccttttgggcctcggagaggtggcatgattgtggatcccctgagatctggcttcccaagagcacttattgacccttcctcaggcctcccgaaccgacttcctccaggcgctgtgcccccaggagctcgctttgacccctttggacccattgggaccagcccacccggacctaacccagaccatctccccccgccgggctacgatgacatgtacctgtgaaggcctcaagaatgtaacatcccaggcttccctccattctcctggagctgccaccgctgtccccatcagcaaccatgttcttgcaggctgggggcaagggattctgctcatgtgtttgcagaccggctgggatagcctccccaccccttatcagagccaagacacctgctgcagctctccacctagctgcagatagctcccaaagagaaatcagtgtgtctctttcaccatcagctcctcccctttcaccaccagctcctctccacttcccaagggagactccggcaaccttcagcaacatatatcctcgaccagatgcagtgctataagaacagaacgcattttggatgttattattaagaaccaaatgtcaatacagaattcatgttgccggtttcccacttttctttttacattaatgcatagctgcttccatttatgagactttagagtttgagtttctgtagggctgaatgactctttttcctgcccagggcccattcttgcttctcaggcaccttccgtttattaattgccattgctcctgacatcactaagatgggtccccttctggctgcatgaatggaaatgagtgactggaaatcccataggccacaagaatgactttcacaagggcaggaacattgtggaaagactgcatcattctgatgaggcaaaatcctccagctattcctgtctgggccagttttgtaggtccatctgtgcatgggcagcagtagtcaaaaagccaaggaaaaaacagagcagacctgaaggctaatcttatttttgccactaacttagtgaatgaccctaagcaagttccttctcctcttagggccttgtgccaagcctatgaaattggaggtggctttcctgctctaaagcattttgatgtctcattctgtgtttggtaacccctataaactggggcagaggaaaagaatgatggttcaaggccatacttcccttgaaccttgtgtggttcttgcctaactctgtggtttttggaccccatggggcccagacagagcacaggagcatgggctgcctctgagtgtggtgttgaacttcgggaggagcagggagccctgcaccttgtgtcctggcccacctgacctttggtgttctccggatccttttcagcccgaggcctgacagacgcgggcagtgatgagccctgttctggagtggaaagagcacgatagagcaccaggctaagaggcacgagatcaaggcggtagtcacttccgctctgcagctagcatttcaaccatatgtggatcctttcatttctcagctccctggattccttcccctaaattaggacctattatttacctgtaggtaagcaagctactgtagctcttctgaggtatctgccaggctgttttctgtagcctcagattgcctatctgcttagcctgagaacaggtagatgaaaactaaactgatgcctaggcccagggtcagtctcagatggaagctgggcctgggtggggaggctagcatgcgtggctccctgggtatttctgtcagtccccatggcaagcagtgatttagtaaaacaccccagagtcagggaagccaaccaccttgaaacctttagaacatctctgctttggagaaagacccagagatcaggcagaggtgcagattcaatcattactcataacctttgagagctggcaaatgggaggagtgttagtctttgttttggaattggaccattcttgcaaccaaaaggacttagagcagtttgctcataaagacatcctttattataaaaggaagtatttaaaggatgatagagaccatcagatagaagcagggaaggtagataacttttaggaccttgatgtgaggaaaagataaaatttaaacaataaatttgccacttagattttctagcagcaaagtccgaaaagatagttatatacaaaattctgttttctgaaaacaaaattgtgattcaccttcagaattggccattttttttgtgagtttccttgcatcaaggacactgagaaacacagtcattgtcttaggtgttctatgggaggaagtgaatagagcctttaggaacttcctggtcaagcttatggtgcttattttgatctgggccacttccctccttccagtcatgagtaatcatcaaggagcaagttggagtgtttcaggtgtatattttgtagaacccaaaagattggagccttaacaataaacatcagcactaagtgacctgttcctccttttttaaatagcagctttattgagatataatttacatacccataatttacatacctgtttaaagtatacaattcagtggatttagtatgttcacagtgttgcacatccaccaccatttctaattcctgaacattttcaccacctcaaaaagaaaccacacacccattggcatgactccccattcccttgctcccagccccaggcaaccactaacatctgtctctaaagatttttctcttttttctggacagttctcataagtggaatcactcagtattatggccttttgtgtctggcttctttcatttcatgtgatgttttcaagattcattcatgctgtagcatgtatccatggtatggatatatcacattttgcttatccttttatcagttgatggacagttgggttgtttctacaaaaaggctattatgagtaatgcagccaagaacatttgtgtaccagtttttgagttttcagttgtttgagtttcagatgttttcagttcatttgggtatataccaaggagtggaattgctggttcacatggtagctctatattctactttgtgaggaattgtcagactgttttccacggaagctgcaccattttacatttccactggtaatttatgagggttccagtttccccacatcttcaccaactcttgttatttttcatgcttatggccatcctagttagcgtgaagtagcatctcattgtggtcttctcttccattttttaaaaaagaattttgacctacaccaagcaaggcagagaccagagtcagtcccccttggggagcaatctgtggttttgataatcaccaccttgggatgaacatggctggtgagctgcagagcagttgatttgacttttggggatggttctaggctggatgtgatacagggcaggttttgtctctagagaaagttctcatgaccttcaggtctaatgagattcagatcatcactttggtttggtttgaaatttctttgtttatccagtgaattacaagtagaataaagatctggttctaaattgtcttttggtggtgaagtgccatagaccatttcggaccatttctatgatgtaccagcagcccccacatcacacctcctcttccttggcttgtctcttccccaattcttagagttagcagtgtttcttactgcattcatctcctcagtcataagtgtctgtcaacctccgttgtgaagtcatgagtctcttgagactgaaactccaagaatgtattgtgctcacagtggcgatggtgttcctgtgctggatggtcagtggttgttgacatgtagttagaaaataggtagcaagttccacgcagcctcactctttggaacctagtttctcctatggcctccctttctactgttgttaataacattctattaatgatccatgcctctcttcacaggaggaatattagaatctatggagcagttagtattctttgtcacctaaatttgtctacttctgtacatttccaataaggcaccaccagggcaagggaagattccccacatgtatatccccagctgtttctgtcataaaacttgcatgtgtataaaccactattgactttttgcaccaaagggaggatttcaaggggacatccaagtccccagcccttta

SEQ ID NO: 448474 - DNA, 3601 bp, Homo sapiens
  misc_feature (3246)..(3246): n is a, c, g, or t
agcggggcttccccgccccgccccgtccccgggcgtctccattttggtctcaggtgtggactcggcaagaaccagcgcaagagggaagcggagttatagctaccccggccgcggagccggctcactgcactacccccgcccccttctttcctccagacgccgaagtcgcgggcgctcatggcgggcctggaggtactgttcgcatcggcagcgccggccatcacctgcaggcaggacgcgctcgtctgcttcttgcattgggaagtggtgacacacggttactgcggcttgggtgtcggtgaccagccgggtcccaatgataagaagtcagaactgctgccagctgggtggaacaacaataaagacctgtatgtcctccggtatgagtataaggatgggtccagaaagctccttgtgaaagccatcaccgtggagagcagcatgatcctcaatgtgctggaatatggctcacagcaagtggcagacttgaccctgaacttggatgattatatcgatgcagaacacctgggtgacttccacaggacctacaagaacagtgaggagcttcggtctcgtattgtgtctggaatcatcacacctatccatgagcagtgggaaaaggctaatgtaagcagtccccaccgggagttcccccctgctaccgccagagaggtggacccactccggattcctccacaccacccacacaccagtcggcagcctccctggtgtgatcccctgggcccgtttgttgtcgggggagaagacttagacccttttgggcctcggagaggtggcatgattgtggatcccctgagatctggcttcccaagagcacttattgacccttcctcaggcctcccgaaccgacttcctccaggcgctgtgcccccaggagctcgctttgacccctttggacccattgggaccagcccacccggacctaacccagaccatctccccccgccgggctacgatgacatgtacctgtgaaggcctcaagaatgtaacatcccaggcttccctccattctcctggagctgccaccgctgtccccatcagcaaccatgttcttgcaggctgggggcaagggattctgctcatgtgtttgcagaccggctgggatagcctccccaccccttatcagagccaagacacctgctgcagctctccacctagctgcagatagctcccaaagagaaatcagtgtgtctctttcaccatcagctcctcccctttcaccaccagctcctctccacttcccaagggagactccggcaaccttcagcaacatatatcctcgaccagatgcagtgctataagaacagaacgcattttggatgttattattaagaaccaaatgtcaatacagaattcatgttgccggtttcccacttttctttttacattaatgcatagctgcttccatttatgagactttagagtttgagtttctgtagggctgaatgactctttttcctgcccagggcccattcttgcttctcaggcaccttccgtttattaattgccattgctcctgacatcactaagatgggtccccttctggctgcatgaatggaaatgagtgactggaaatcccataggccacaagaatgactttcacaagggcaggaacattgtggaaagactgcatcattctgatgaggcaaaatcctccagctattcctgtctgggccagttttgtaggtccatctgtgcatgggcagcagtagtcaaaaagccaaggaaaaaacagagcagacctgaaggctaatcttatttttgccactaacttagtgaatgaccctaagcaagttccttctcctcttagggccttgtgccaagcctatgaaattggaggtggctttcctgctctaaagcattttgatgtctcattctgtgtttggtaacccctataaactggggcagaggaaaagaatgatggttcaaggccatacttcccttgaaccttgtgtggttcttgcctaactctgtggtttttggaccccatggggcccagacagagcacaggagcatgggctgcctctgagtgtggtgttgaacttcgggaggagcagggagccctgcaccttgtgtcctggcccacctgacctttggtgttctccggatccttttcagcccgaggcctgacagacgcgggcagtgatgagccctgttctggagtggaaagagcacgatagagcaccaggctaagaggcacgagatcaaggcggtagtcacttccgctctgcagctagcatttcaaccatatgtggatcctttcatttctcagctccctggattccttcccctaaattaggacctattatttacctgtaggtaagcaagctactgtagctcttctgaggtatctgccaggctgttttctgtagcctcagattgcctatctgcttagcctgagaacaggtagatgaaaactaaactgatgcctaggcccagggtcagtctcagatggaagctgggcctgggtggggaggctagcatgcgtggctccctgggtatttctgtcagtccccatggcaagcagtgatttagtaaaacaccccagagtcagggaagccaaccaccttgaaacctttagaacatctctgctttggagaaagacccagagatcaggcagaggtgcagattcaatcattactcataacctttgagagctggcaaatgggaggagtgttagtctttgttttggaattggaccattcttgcaaccaaaaggacttagagcagtttgctcataaagacatcctttattataaaaggaagtatttaaaggatgatagagaccatcagatagaagcagggaaggtagataacttttaggaccttgatgtgaggaaaagataaaatttaaacaataaatttgccacttagattttctagcagcaaagtccgaaaagatagttatatacaaaattctgttttctgaaaacaaaattgtgattcaccttcagaattggccattttttttgtgagtttccttgcatcaaggacactgagaaacacagtcattgtcttaggtgttctatgggaggaagtgaatagagcctttaggaacttcctggtcaagcttatggtgcttattttgatctgggccacttccctccttccagtcatgagtaatcatcaaggagcaagttggagtgtttcaggtgtatattttgtagaacccaaaagattggagccttaacaataaacatcagcactaagtgaaaaaaaaaaaanaaaaaaaaaaaaatgtgtgtgtggggcgcgcccttgggccctggaaaaagtttttataacccttctcgttggggggcgcgggggcccccgttgggttaggtgtgcgacaacgtgggcgcataacggtggttcccaaaggagaaactccggcgcccatagactatagtgtggcgggggattttcctcaccaaatataaaaagagcgcccgcgggggaaccccgaaggcgtttctgtgaaacaatctccggagatgggggagctccgagggggacacataacgggggacttctttcaacgcgggggagttcacaggagaggaacccgtattttaaatttgccccggggtgggtgggt

SEQ ID NO: 448475 - DNA, 2520 bp, Homo sapiens
agcggggcttccccgccccgccccgtccccgggcgtctccattttggtctcaggtgtggactcggcaagaaccagcgcaagagggaagcggagttatagctaccccggccgcggagccggctcactgcactacccccgcccccttctttcctccagacgccgaagtcgcgggcgctcatggcgggcctggaggtactgttcgcatcggcagcgccggccatcacctgcaggcaggacgcgctcgtctgcttcttgcattgggaagtggtgacacacggttactgcggcttgggtgtcggtgaccagccgggtcccaatgataagaagtcagaactgctgccagctgggtggaacaacaataaagacctgtatgtcctccggtatgagtataaggatgggtccagaaagctccttgtgaaagccatcaccgtggagagcagcatgatcctcaatgtgctggaatatggctcacagcaagtggcagacttgaccctgaacttggatgattatatcgatgcagaacacctgggtgacttccacaggacctacaagaacagtgaggagcttcggtctcgtattgtgtctggaatcatcacacctatccatgagcagtgggaaaaggctaatgtaagcagtccccaccgggagttcccccctgctaccgccagagaggtggacccactccggattcctccacaccacccacacaccagtcggcagcctccctggtgtgatcccctgggcccgtttgttgtcgggggagaagacttagacccttttgggcctcggagaggtggcatgattgtggatcccctgagatctggcttcccaagagcacttattgacccttcctcaggcctcccgaaccgacttcctccaggcgctgtgcccccaggagctcgctttgacccctttggacccattgggaccagcccacccggacctaacccagaccatctccccccgccgggctacgatgacatgtacctgtgaaggcctcaagaatgtaacatcccaggcttccctccattctcctggagctgccaccgctgtccccatcagcaaccatgttcttgcaggctgggggcaagggattctgctcatgtgtttgcagaccggctgggatagcctccccaccccttatcagagccaagacacctgctgcagctctccacctagctgcagatagctcccaaagagaaatcagtgtgtctctttcaccatcagctcctcccctttcaccaccagctcctctccacttcccaagggagactccggcaaccttcagcaacatatatcctcgaccagatgcagtgctataagaacagaacgcattttggatgttattattaagaaccaaatgtcaatacagaattcatgttgccggtttcccacttttctttttacattaatgcatagctgcttccatttatgagactttagagtttgagtttctgtagggctgaatgactctttttcctgcccagggcccattcttgcttctcaggcaccttccgtttattaattgccattgctcctgacatcactaagatgggtccccttctggctgcatgaatggaaatgagtgactggaaatcccataggccacaagaatgactttcacaagggcaggaacattgtggaaagactgcatcattctgatgaggcaaaatcctccagctattcctgtctgggccagttttgtaggtccatctgtgcatgggcagcagtagtcaaaaagccaaggaaaaaacagagcagacctgaaggctaatcttatttttgccactaacttagtgaatgaccctaagcaagttccttctcctcttagggccttgtgccaagcctatgaaattggaggtggctttcctgctctaaagcattttgatgtctcattctgtgtttggtaacccctataaactggggcagaggaaaagaatgatggttcaaggccatacttcccttgaaccttgtgtggttcttgcctaactctgtggtttttggaccccatggggcccagacagagcacaggagcatgggctgcctctgagtgtggtgttgaacttcgggaggagcagggagccctgcaccttgtgtcctggcccacctgacctttggtgttctccggatccttttcagcccgaggcctgacagacgcgggcagtgatgagccctgttctggagtggaaagagcacgatagagcaccaggctaagaggcacgagatcaaggcggtagtcacttccgctctgcagctagcatttcaaccatatgtggatcctttcatttctcagctccctggattccttcccctaaattaggacctattatttacctgtagctgaaatgtacctcctggggaacatcaaaaggagtccattctccaggagagaccagcaggcccagatggagggcctccctgactttgtcaggagcaagagacatactatggaggagaaggtgatcaaggcctgcatcatgcccacagaaatacaataaagccctcaccctttcctgtgta

SEQ ID NO: 448476 - DNA, 2370 bp, Homo sapiens
agcggggcttccccgccccgccccgtccccgggcgtctccattttggtctcaggtgtggactcggcaagaaccagcgcaagagggaagcggagttatagctaccccggccgcggagccggctcactgcactacccccgcccccttctttcctccagacgccgaagtcgcgggcgctcatggcgggcctggaggtactgttcgcatcggcagcgccggccatcacctgcaggcaggacgcgctcgtctgcttcttgcattgggaagtggtgacacacggttactgcggcttgggtgtcggtgaccagccgggtcccaatgataagaagtcagaactgctgccagctgggtggaacaacaataaagacctgtatgtcctccggtatgagtataaggatgggtccagaaagctccttgtgaaagccatcaccgtggagagcagcatgatcctcaatgtgctggaatatggctcacagcaagtggcagacttgaccctgaacttggatgattatatcgatgcagaacacctgggtgacttccacaggacctacaagaacagtgaggagcttcggtctcgtattgtgtctggaatcatcacacctatccatgagcagtgggaaaaggctaatgtaagcagtccccaccgggagttcccccctgctaccgccagagaggtggacccactccggattcctccacaccacccacacaccagtcggcagcctccctggtgtgatcccctgggcccgtttgttgtcgggggagaagacttagacccttttgggcctcggagaggtggcatgattgtggatcccctgagatctggcttcccaagagcacttattgacccttcctcaggcctcccgaaccgacttcctccaggcgctgtgcccccaggagctcgctttgacccctttggacccattgggaccagcccacccggacctaacccagaccatctccccccgccgggctacgatgacatgtacctgtgaaggcctcaagaatgtaacatcccaggcttccctccattctcctggagctgccaccgctgtccccatcagcaaccatgttcttgcaggctgggggcaagggattctgctcatgtgtttgcagaccggctgggatagcctccccaccccttatcagagccaagacacctgctgcagctctccacctagctgcagatagctcccaaagagaaatcagtgtgtctctttcaccatcagctcctcccctttcaccaccagctcctctccacttcccaagggagactccggcaaccttcagcaacatatatcctcgaccagatgcagtgctataagaacagaacgcattttggatgttattattaagaaccaaatgtcaatacagaattcatgttgccggtttcccacttttctttttacattaatgcatagctgcttccatttatgagactttagagtttgagtttctgtagggctgaatgactctttttcctgcccagggcccattcttgcttctcaggcaccttccgtttattaattgccattgctcctgacatcactaagatgggtccccttctggctgcatgaatggaaatgagtgactggaaatcccataggccacaagaatgactttcacaagggcaggaacattgtggaaagactgcatcattctgatgaggcaaaatcctccagctattcctgtctgggccagttttgtaggtccatctgtgcatgggcagcagtagtcaaaaagccaaggaaaaaacagagcagacctgaaggctaatcttatttttgccactaacttagtgaatgaccctaagcaagttccttctcctcttagggccttgtgccaagcctatgaaattggaggtggctttcctgctctaaagcattttgatgtctcattctgtgtttggtaacccctataaactggggcagaggaaaagaatgatggttcaaggccatacttcccttgaaccttgtgtggttcttgcctaactctgtggtttttggaccccatggggcccagacagagcacaggagcatgggctgcctctgagtgtggtgttgaacttcgggaggagcagggagccctgcaccttgtgtcctggcccacctgacctttggtgttctccggatccttttcagcccgaggcctgacagacgcgggcagtgatgagccctgttctggagtggaaagagcacgatagaagcctttaggaacttcctggtcaagcttatggtgcttattttgatctgggccacttccctccttccagtcatgagtaatcatcaaggagcaagttggagtgtttcaggtgtatattttgtagaacccaaaagattggagccttaacaataaacatcagcactaagtga

SEQ ID NO: 448477 - DNA, 3214 bp, Homo sapiens
ttccatcatcctgggccctcacctctggcataggctcttggtagtgggggcccagacagggaggcacctgccacctgcttcccttctcagccacccacagccctcatagggcagaatgggactcttgctgatgtagacgccgaagtcgcgggcgctcatggcgggcctggaggtactgttcgcatcggcagcgccggccatcacctgcaggcaggacgcgctcgtctgcttcttgcattgggaagtggtgacacacggttactgcggcttgggtgtcggtgaccagccgggtcccaatgataagaagtcagaactgctgccagctgggtggaacaacaataaagacctgtatgtcctccggtatgagtataaggatgggtccagaaagctccttgtgaaagccatcaccgtggagagcagcatgatcctcaatgtgctggaatatggctcacagcaagtggcagacttgaccctgaacttggatgattatatcgatgcagaacacctgggtgacttccacaggacctacaagaacagtgaggagcttcggtctcgtattgtgtctggaatcatcacacctatccatgagcagtgggaaaaggctaatgtaagcagtccccaccgggagttcccccctgctaccgccagagaggtggacccactccggattcctccacaccacccacacaccagtcggcagcctccctggtgtgatcccctgggcccgtttgttgtcgggggagaagacttagacccttttgggcctcggagaggtggcatgattgtggatcccctgagatctggcttcccaagagcacttattgacccttcctcaggcctcccgaaccgacttcctccaggcgctgtgcccccaggagctcgctttgacccctttggacccattgggaccagcccacccggacctaacccagaccatctccccccgccgggctacgatgacatgtacctgtgaaggcctcaagaatgtaacatcccaggcttccctccattctcctggagctgccaccgctgtccccatcagcaaccatgttcttgcaggctgggggcaagggattctgctcatgtgtttgcagaccggctgggatagcctccccaccccttatcagagccaagacacctgctgcagctctccacctagctgcagatagctcccaaagagaaatcagtgtgtctctttcaccatcagctcctcccctttcaccaccagctcctctccacttcccaagggagactccggcaaccttcagcaacatatatcctcgaccagatgcagtgctataagaacagaacgcattttggatgttattattaagaaccaaatgtcaatacagaattcatgttgccggtttcccacttttctttttacattaatgcatagctgcttccatttatgagactttagagtttgagtttctgtagggctgaatgactctttttcctgcccagggcccattcttgcttctcaggcaccttccgtttattaattgccattgctcctgacatcactaagatgggtccccttctggctgcatgaatggaaatgagtgactggaaatcccataggccacaagaatgactttcacaagggcaggaacattgtggaaagactgcatcattctgatgaggcaaaatcctccagctattcctgtctgggccagttttgtaggtccatctgtgcatgggcagcagtagtcaaaaagccaaggaaaaaacagagcagacctgaaggctaatcttatttttgccactaacttagtgaatgaccctaagcaagttccttctcctcttagggccttgtgccaagcctatgaaattggaggtggctttcctgctctaaagcattttgatgtctcattctgtgtttggtaacccctataaactggggcagaggaaaagaatgatggttcaaggccatacttcccttgaaccttgtgtggttcttgcctaactctgtggtttttggaccccatggggcccagacagagcacaggagcatgggctgcctctgagtgtggtgttgaacttcgggaggagcagggagccctgcaccttgtgtcctggcccacctgacctttggtgttctccggatccttttcagcccgaggcctgacagacgcgggcagtgatgagccctgttctggagtggaaagagcacgatagagcaccaggctaagaggcacgagatcaaggcggtagtcacttccgctctgcagctagcatttcaaccatatgtggatcctttcatttctcagctccctggattccttcccctaaattaggacctattatttacctgtaggtaagcaagctactgtagctcttctgaggtatctgccaggctgttttctgtagcctcagattgcctatctgcttagcctgagaacaggtagatgaaaactaaactgatgcctaggcccagggtcagtctcagatggaagctgggcctgggtggggaggctagcatgcgtggctccctgggtatttctgtcagtccccatggcaagcagtgatttagtaaaacaccccagagtcagggaagccaaccaccttgaaacctttagaacatctctgctttggagaaagacccagagatcaggcagaggtgcagattcaatcattactcataacctttgagagctggcaaatgggaggagtgttagtctttgttttggaattggaccattcttgcaaccaaaaggacttagagcagtttgctcataaagacatcctttattataaaaggaagtatttaaaggatgatagagaccatcagatagaagcagggaaggtagataacttttaggaccttgatgtgaggaaaagataaaatttaaacaataaatttgccacttagattttctagcagcaaagtccgaaaagatagttatatacaaaattctgttttctgaaaacaaaattgtgattcaccttcagaattggccattttttttgtgagtttccttgcatcaaggacactgagaaacacagtcattgtcttaggtgttctatgggaggaagtgaatagagcctttaggaacttcctggtcaagcttatggtgcttattttgatctgggccacttccctccttccagtcatgagtaatcatcaaggagcaagttggagtgtttcaggtgtatattttgtagaacccaaaagattggagccttaacaataaacatcagcactaagtga

SEQ ID NO: 448478 - DNA, 3064 bp, Homo sapiens
ttccatcatcctgggccctcacctctggcataggctcttggtagtgggggcccagacagggaggcacctgccacctgcttcccttctcagccacccacagccctcatagggcagaatgggactcttgctgatgtagccgggtcccaatgataagaagtcagaactgctgccagctgggtggaacaacaataaagacctgtatgtcctccggtatgagtataaggatgggtccagaaagctccttgtgaaagccatcaccgtggagagcagcatgatcctcaatgtgctggaatatggctcacagcaagtggcagacttgaccctgaacttggatgattatatcgatgcagaacacctgggtgacttccacaggacctacaagaacagtgaggagcttcggtctcgtattgtgtctggaatcatcacacctatccatgagcagtgggaaaaggctaatgtaagcagtccccaccgggagttcccccctgctaccgccagagaggtggacccactccggattcctccacaccacccacacaccagtcggcagcctccctggtgtgatcccctgggcccgtttgttgtcgggggagaagacttagacccttttgggcctcggagaggtggcatgattgtggatcccctgagatctggcttcccaagagcacttattgacccttcctcaggcctcccgaaccgacttcctccaggcgctgtgcccccaggagctcgctttgacccctttggacccattgggaccagcccacccggacctaacccagaccatctccccccgccgggctacgatgacatgtacctgtgaaggcctcaagaatgtaacatcccaggcttccctccattctcctggagctgccaccgctgtccccatcagcaaccatgttcttgcaggctgggggcaagggattctgctcatgtgtttgcagaccggctgggatagcctccccaccccttatcagagccaagacacctgctgcagctctccacctagctgcagatagctcccaaagagaaatcagtgtgtctctttcaccatcagctcctcccctttcaccaccagctcctctccacttcccaagggagactccggcaaccttcagcaacatatatcctcgaccagatgcagtgctataagaacagaacgcattttggatgttattattaagaaccaaatgtcaatacagaattcatgttgccggtttcccacttttctttttacattaatgcatagctgcttccatttatgagactttagagtttgagtttctgtagggctgaatgactctttttcctgcccagggcccattcttgcttctcaggcaccttccgtttattaattgccattgctcctgacatcactaagatgggtccccttctggctgcatgaatggaaatgagtgactggaaatcccataggccacaagaatgactttcacaagggcaggaacattgtggaaagactgcatcattctgatgaggcaaaatcctccagctattcctgtctgggccagttttgtaggtccatctgtgcatgggcagcagtagtcaaaaagccaaggaaaaaacagagcagacctgaaggctaatcttatttttgccactaacttagtgaatgaccctaagcaagttccttctcctcttagggccttgtgccaagcctatgaaattggaggtggctttcctgctctaaagcattttgatgtctcattctgtgtttggtaacccctataaactggggcagaggaaaagaatgatggttcaaggccatacttcccttgaaccttgtgtggttcttgcctaactctgtggtttttggaccccatggggcccagacagagcacaggagcatgggctgcctctgagtgtggtgttgaacttcgggaggagcagggagccctgcaccttgtgtcctggcccacctgacctttggtgttctccggatccttttcagcccgaggcctgacagacgcgggcagtgatgagccctgttctggagtggaaagagcacgatagagcaccaggctaagaggcacgagatcaaggcggtagtcacttccgctctgcagctagcatttcaaccatatgtggatcctttcatttctcagctccctggattccttcccctaaattaggacctattatttacctgtaggtaagcaagctactgtagctcttctgaggtatctgccaggctgttttctgtagcctcagattgcctatctgcttagcctgagaacaggtagatgaaaactaaactgatgcctaggcccagggtcagtctcagatggaagctgggcctgggtggggaggctagcatgcgtggctccctgggtatttctgtcagtccccatggcaagcagtgatttagtaaaacaccccagagtcagggaagccaaccaccttgaaacctttagaacatctctgctttggagaaagacccagagatcaggcagaggtgcagattcaatcattactcataacctttgagagctggcaaatgggaggagtgttagtctttgttttggaattggaccattcttgcaaccaaaaggacttagagcagtttgctcataaagacatcctttattataaaaggaagtatttaaaggatgatagagaccatcagatagaagcagggaaggtagataacttttaggaccttgatgtgaggaaaagataaaatttaaacaataaatttgccacttagattttctagcagcaaagtccgaaaagatagttatatacaaaattctgttttctgaaaacaaaattgtgattcaccttcagaattggccattttttttgtgagtttccttgcatcaaggacactgagaaacacagtcattgtcttaggtgttctatgggaggaagtgaatagagcctttaggaacttcctggtcaagcttatggtgcttattttgatctgggccacttccctccttccagtcatgagtaatcatcaaggagcaagttggagtgtttcaggtgtatattttgtagaacccaaaagattggagccttaacaataaacatcagcactaagtga

SEQ ID NO: 448479 - DNA, 3151 bp, Homo sapiens
agcggggcttccccgccccgccccgtccccgggcgtctccattttggtctcaggtgtggactcggcaagaaccagcgcaagagggaagcggagttatagctaccccggccgcggagccggctcactgcactacccccgcccccttctttcctccagacgccgaagtcgcgggcgctcatggcgggcctggaggtactgttcgcatcggcagcgccggccatcacctgcaggcaggacgcgctcgtctgcttcttgcattgggaagtggtgacacacggttactgcggcttgggtgtcggtgaccagccgggtcccaatgataagaagtcagaactgctgccagctgggtggaacaacaataaagacctgtatgtcctccggtatgagtataaggatgggtccagaaagctccttgtgaaagccatcaccgtggagagcagcatgatcctcaatgtgctggacctacaagaacagtgaggagcttcggtctcgtattgtgtctggaatcatcacacctatccatgagcagtgggaaaaggctaatgtaagcagtccccaccgggagttcccccctgctaccgccagagaggtggacccactccggattcctccacaccacccacacaccagtcggcagcctccctggtgtgatcccctgggcccgtttgttgtcgggggagaagacttagacccttttgggcctcggagaggtggcatgattgtggatcccctgagatctggcttcccaagagcacttattgacccttcctcaggcctcccgaaccgacttcctccaggcgctgtgcccccaggagctcgctttgacccctttggacccattgggaccagcccacccggacctaacccagaccatctccccccgccgggctacgatgacatgtacctgtgaaggcctcaagaatgtaacatcccaggcttccctccattctcctggagctgccaccgctgtccccatcagcaaccatgttcttgcaggctgggggcaagggattctgctcatgtgtttgcagaccggctgggatagcctccccaccccttatcagagccaagacacctgctgcagctctccacctagctgcagatagctcccaaagagaaatcagtgtgtctctttcaccatcagctcctcccctttcaccaccagctcctctccacttcccaagggagactccggcaaccttcagcaacatatatcctcgaccagatgcagtgctataagaacagaacgcattttggatgttattattaagaaccaaatgtcaatacagaattcatgttgccggtttcccacttttctttttacattaatgcatagctgcttccatttatgagactttagagtttgagtttctgtagggctgaatgactctttttcctgcccagggcccattcttgcttctcaggcaccttccgtttattaattgccattgctcctgacatcactaagatgggtccccttctggctgcatgaatggaaatgagtgactggaaatcccataggccacaagaatgactttcacaagggcaggaacattgtggaaagactgcatcattctgatgaggcaaaatcctccagctattcctgtctgggccagttttgtaggtccatctgtgcatgggcagcagtagtcaaaaagccaaggaaaaaacagagcagacctgaaggctaatcttatttttgccactaacttagtgaatgaccctaagcaagttccttctcctcttagggccttgtgccaagcctatgaaattggaggtggctttcctgctctaaagcattttgatgtctcattctgtgtttggtaacccctataaactggggcagaggaaaagaatgatggttcaaggccatacttcccttgaaccttgtgtggttcttgcctaactctgtggtttttggaccccatggggcccagacagagcacaggagcatgggctgcctctgagtgtggtgttgaacttcgggaggagcagggagccctgcaccttgtgtcctggcccacctgacctttggtgttctccggatccttttcagcccgaggcctgacagacgcgggcagtgatgagccctgttctggagtggaaagagcacgatagagcaccaggctaagaggcacgagatcaaggcggtagtcacttccgctctgcagctagcatttcaaccatatgtggatcctttcatttctcagctccctggattccttcccctaaattaggacctattatttacctgtaggtaagcaagctactgtagctcttctgaggtatctgccaggctgttttctgtagcctcagattgcctatctgcttagcctgagaacaggtagatgaaaactaaactgatgcctaggcccagggtcagtctcagatggaagctgggcctgggtggggaggctagcatgcgtggctccctgggtatttctgtcagtccccatggcaagcagtgatttagtaaaacaccccagagtcagggaagccaaccaccttgaaacctttagaacatctctgctttggagaaagacccagagatcaggcagaggtgcagattcaatcattactcataacctttgagagctggcaaatgggaggagtgttagtctttgttttggaattggaccattcttgcaaccaaaaggacttagagcagtttgctcataaagacatcctttattataaaaggaagtatttaaaggatgatagagaccatcagatagaagcagggaaggtagataacttttaggaccttgatgtgaggaaaagataaaatttaaacaataaatttgccacttagattttctagcagcaaagtccgaaaagatagttatatacaaaattctgttttctgaaaacaaaattgtgattcaccttcagaattggccattttttttgtgagtttccttgcatcaaggacactgagaaacacagtcattgtcttaggtgttctatgggaggaagtgaatagagcctttaggaacttcctggtcaagcttatggtgcttattttgatctgggccacttccctccttccagtcatgagtaatcatcaaggagcaagttggagtgtttcaggtgtatattttgtagaacccaaaagattggagccttaacaataaacatcagcactaagtga

SEQ ID NO: 448480 - DNA, 2831 bp, Homo sapiens
aggcctgggtggtgaatcggccgagggtggagagcagcatgatcctcaatgtgctggaatatggctcacagcaagtggcagacttgaccctgaacttggatgattatatcgatgcagaacacctgggtgacttccacaggacctacaagaacagtgaggagcttcggtctcgtattgtgtctggaatcatcacacctatccatgagcagtgggaaaaggctaatgtaagcagtccccaccgggagttcccccctgctaccgccagagaggtggacccactccggattcctccacaccacccacacaccagtcggcagcctccctggtgtgatcccctgggcccgtttgttgtcgggggagaagacttagacccttttgggcctcggagaggtggcatgattgtggatcccctgagatctggcttcccaagagcacttattgacccttcctcaggcctcccgaaccgacttcctccaggcgctgtgcccccaggagctcgctttgacccctttggacccattgggaccagcccacccggacctaacccagaccatctccccccgccgggctacgatgacatgtacctgtgaaggcctcaagaatgtaacatcccaggcttccctccattctcctggagctgccaccgctgtccccatcagcaaccatgttcttgcaggctgggggcaagggattctgctcatgtgtttgcagaccggctgggatagcctccccaccccttatcagagccaagacacctgctgcagctctccacctagctgcagatagctcccaaagagaaatcagtgtgtctctttcaccatcagctcctcccctttcaccaccagctcctctccacttcccaagggagactccggcaaccttcagcaacatatatcctcgaccagatgcagtgctataagaacagaacgcattttggatgttattattaagaaccaaatgtcaatacagaattcatgttgccggtttcccacttttctttttacattaatgcatagctgcttccatttatgagactttagagtttgagtttctgtagggctgaatgactctttttcctgcccagggcccattcttgcttctcaggcaccttccgtttattaattgccattgctcctgacatcactaagatgggtccccttctggctgcatgaatggaaatgagtgactggaaatcccataggccacaagaatgactttcacaagggcaggaacattgtggaaagactgcatcattctgatgaggcaaaatcctccagctattcctgtctgggccagttttgtaggtccatctgtgcatgggcagcagtagtcaaaaagccaaggaaaaaacagagcagacctgaaggctaatcttatttttgccactaacttagtgaatgaccctaagcaagttccttctcctcttagggccttgtgccaagcctatgaaattggaggtggctttcctgctctaaagcattttgatgtctcattctgtgtttggtaacccctataaactggggcagaggaaaagaatgatggttcaaggccatacttcccttgaaccttgtgtggttcttgcctaactctgtggtttttggaccccatggggcccagacagagcacaggagcatgggctgcctctgagtgtggtgttgaacttcgggaggagcagggagccctgcaccttgtgtcctggcccacctgacctttggtgttctccggatccttttcagcccgaggcctgacagacgcgggcagtgatgagccctgttctggagtggaaagagcacgatagagcaccaggctaagaggcacgagatcaaggcggtagtcacttccgctctgcagctagcatttcaaccatatgtggatcctttcatttctcagctccctggattccttcccctaaattaggacctattatttacctgtaggtaagcaagctactgtagctcttctgaggtatctgccaggctgttttctgtagcctcagattgcctatctgcttagcctgagaacaggtagatgaaaactaaactgatgcctaggcccagggtcagtctcagatggaagctgggcctgggtggggaggctagcatgcgtggctccctgggtatttctgtcagtccccatggcaagcagtgatttagtaaaacaccccagagtcagggaagccaaccaccttgaaacctttagaacatctctgctttggagaaagacccagagatcaggcagaggtgcagattcaatcattactcataacctttgagagctggcaaatgggaggagtgttagtctttgttttggaattggaccattcttgcaaccaaaaggacttagagcagtttgctcataaagacatcctttattataaaaggaagtatttaaaggatgatagagaccatcagatagaagcagggaaggtagataacttttaggaccttgatgtgaggaaaagataaaatttaaacaataaatttgccacttagattttctagcagcaaagtccgaaaagatagttatatacaaaattctgttttctgaaaacaaaattgtgattcaccttcagaattggccattttttttgtgagtttccttgcatcaaggacactgagaaacacagtcattgtcttaggtgttctatgggaggaagtgaatagagcctttaggaacttcctggtcaagcttatggtgcttattttgatctgggccacttccctccttccagtcatgagtaatcatcaaggagcaagttggagtgtttcaggtgtatattttgtagaacccaaaagattggagccttaacaataaacatcagcactaagtga

SEQ ID NO: 448481 - DNA, 2973 bp, Homo sapiens
gccctgtgcccctacaccctcacctctttctaatggggtggtaaacgaggaggggcaactcagatgcctaagaagcttgggcccaaatctcagagacagcgtggggctgttgcccccctcacccaggtccagcaggcggcctgttcccccacttataaacaggccaagcgcaatgccaggagctatcagggccgccgccgccgccgtcgttgcagccagaataccacttccagggttcctagccaactgcaagcagttgactcttcatctgcttcctgcaggacctacaagaacagtgaggagcttcggtctcgtattgtgtctggaatcatcacacctatccatgagcagtgggaaaaggctaatgtaagcagtccccaccgggagttcccccctgctaccgccagagaggtggacccactccggattcctccacaccacccacacaccagtcggcagcctccctggtgtgatcccctgggcccgtttgttgtcgggggagaagacttagacccttttgggcctcggagaggtggcatgattgtggatcccctgagatctggcttcccaagagcacttattgacccttcctcaggcctcccgaaccgacttcctccaggcgctgtgcccccaggagctcgctttgacccctttggacccattgggaccagcccacccggacctaacccagaccatctccccccgccgggctacgatgacatgtacctgtgaaggcctcaagaatgtaacatcccaggcttccctccattctcctggagctgccaccgctgtccccatcagcaaccatgttcttgcaggctgggggcaagggattctgctcatgtgtttgcagaccggctgggatagcctccccaccccttatcagagccaagacacctgctgcagctctccacctagctgcagatagctcccaaagagaaatcagtgtgtctctttcaccatcagctcctcccctttcaccaccagctcctctccacttcccaagggagactccggcaaccttcagcaacatatatcctcgaccagatgcagtgctataagaacagaacgcattttggatgttattattaagaaccaaatgtcaatacagaattcatgttgccggtttcccacttttctttttacattaatgcatagctgcttccatttatgagactttagagtttgagtttctgtagggctgaatgactctttttcctgcccagggcccattcttgcttctcaggcaccttccgtttattaattgccattgctcctgacatcactaagatgggtccccttctggctgcatgaatggaaatgagtgactggaaatcccataggccacaagaatgactttcacaagggcaggaacattgtggaaagactgcatcattctgatgaggcaaaatcctccagctattcctgtctgggccagttttgtaggtccatctgtgcatgggcagcagtagtcaaaaagccaaggaaaaaacagagcagacctgaaggctaatcttatttttgccactaacttagtgaatgaccctaagcaagttccttctcctcttagggccttgtgccaagcctatgaaattggaggtggctttcctgctctaaagcattttgatgtctcattctgtgtttggtaacccctataaactggggcagaggaaaagaatgatggttcaaggccatacttcccttgaaccttgtgtggttcttgcctaactctgtggtttttggaccccatggggcccagacagagcacaggagcatgggctgcctctgagtgtggtgttgaacttcgggaggagcagggagccctgcaccttgtgtcctggcccacctgacctttggtgttctccggatccttttcagcccgaggcctgacagacgcgggcagtgatgagccctgttctggagtggaaagagcacgatagagcaccaggctaagaggcacgagatcaaggcggtagtcacttccgctctgcagctagcatttcaaccatatgtggatcctttcatttctcagctccctggattccttcccctaaattaggacctattatttacctgtaggtaagcaagctactgtagctcttctgaggtatctgccaggctgttttctgtagcctcagattgcctatctgcttagcctgagaacaggtagatgaaaactaaactgatgcctaggcccagggtcagtctcagatggaagctgggcctgggtggggaggctagcatgcgtggctccctgggtatttctgtcagtccccatggcaagcagtgatttagtaaaacaccccagagtcagggaagccaaccaccttgaaacctttagaacatctctgctttggagaaagacccagagatcaggcagaggtgcagattcaatcattactcataacctttgagagctggcaaatgggaggagtgttagtctttgttttggaattggaccattcttgcaaccaaaaggacttagagcagtttgctcataaagacatcctttattataaaaggaagtatttaaaggatgatagagaccatcagatagaagcagggaaggtagataacttttaggaccttgatgtgaggaaaagataaaatttaaacaataaatttgccacttagattttctagcagcaaagtccgaaaagatagttatatacaaaattctgttttctgaaaacaaaattgtgattcaccttcagaattggccattttttttgtgagtttccttgcatcaaggacactgagaaacacagtcattgtcttaggtgttctatgggaggaagtgaatagagcctttaggaacttcctggtcaagcttatggtgcttattttgatctgggccacttccctccttccagtcatgagtaatcatcaaggagcaagttggagtgtttcaggtgtatattttgtagaacccaaaagattggagccttaacaataaacatcagcactaagtga

SEQ ID NO: 448482 - DNA, 1982 bp, Homo sapiens
agcggggcttccccgccccgccccgtccccgggcgtctccattttggtctcaggtgtggactcggcaagaaccagcgcaagagggaagcggagttatagctaccccggccgcggagccggctcactgcactacccccgcccccttctttcctccagacgccgaagtcgcgggcgctcatggcgggcctggaggtactgttcgcatcggcagcgccggccatcacctgcaggcaggacgcgctcgtctgcttcttgcattgggaagtggtgacacacggttactgcggcttgggtgtcggtgaccagccgggtcccaatgataagaagtcagaactgctgccagctgggtggaacaacaataaagacctgtatgtcctccggtatgagtataaggatgggtccagaaagctccttgtgaaagccatcaccgtggagagcagcatgatcctcaatgtgctggaatatggctcacagcaagtggcagacttgaccctgaacttggatgattatatcgatgcagaacacctgggtgacttccacaggacctacaagaacagtgaggagcttcggtctcgtattgtgtctggaatcatcacacctatccatgagcagtgggaggtggacccactccggattcctccacaccacccacacaccagtcggcagcctccctggtgtgatcccctgggcccgtttgttgtcgggggagaagacttagacccttttgggcctcggagaggtggcatgattgtggatcccctgagatctggcttcccaagagcacttattgacccttcctcaggcctcccgaaccgacttcctccaggcgctgtgcccccaggagctcgctttgacccctttggacccattgggaccagcccacccggcccgaggcctgacagacgcgggcagtgatgagccctgttctggagtggaaagagcacgatagagcaccaggctaagaggcacgagatcaaggcggtagtcacttccgctctgcagctagcatttcaaccatatgtggatcctttcatttctcagctccctggattccttcccctaaattaggacctattatttacctgtaggtaagcaagctactgtagctcttctgaggtatctgccaggctgttttctgtagcctcagattgcctatctgcttagcctgagaacaggtagatgaaaactaaactgatgcctaggcccagggtcagtctcagatggaagctgggcctgggtggggaggctagcatgcgtggctccctgggtatttctgtcagtccccatggcaagcagtgatttagtaaaacaccccagagtcagggaagccaaccaccttgaaacctttagaacatctctgctttggagaaagacccagagatcaggcagaggtgcagattcaatcattactcataacctttgagagctggcaaatgggaggagtgttagtctttgttttggaattggaccattcttgcaaccaaaaggacttagagcagtttgctcataaagacatcctttattataaaaggaagtatttaaaggatgatagagaccatcagatagaagcagggaaggtagataacttttaggaccttgatgtgaggaaaagataaaatttaaacaataaatttgccacttagattttctagcagcaaagtccgaaaagatagttatatacaaaattctgttttctgaaaacaaaattgtgattcaccttcagaattggccattttttttgtgagtttccttgcatcaaggacactgagaaacacagtcattgtcttaggtgttctatgggaggaagtgaatagagcctttaggaacttcctggtcaagcttatggtgcttattttgatctgggccacttccctccttccagtcatgagtaatcatcaaggagcaagttggagtgtttcaggtgtatattttgtagaacccaaaagattggagccttaacaataaacatcagcactaagtga

SEQ ID NO: 448483 - DNA, 906 bp, Homo sapiens
agcggggcttccccgccccgccccgtccccgggcgtctccattttggtctcaggtgtggactcggcaagaaccagcgcaagagggaagcggagttatagctaccccggccgcggagccggctcactgcactacccccgcccccttctttcctccagacgccgaagtcgcgggcgctcatggcgggcctggaggtactgttcgcatcggcagcgccggccatcacctgcaggcaggacgcgctcgtctgcttcttgcattgggaagtggtgacacacggttactgcggcttgggtgtcggtgaccagccgggtcccaatgataagaagtcagaactgctgccagctgggtggaacaacaataaagacctgtatgtcctccggtatgagtataaggatgggtccagaaagctccttgtgaaagccatcaccgtggagagcagcatgatcctcaatgtgctggaatatggctcacagcaagtggcagacttgaccctgaacttggatgattatatcgatgcagaacacctgggtgacttccacaggacctacaagaacagtgaggagcttcggtctcgtattgtgtctggaatcatcacacctatccatgagcagtgggaaaaggctaatgtaagcagtccccaccgggagttcccccctgctaccgccagagaggtggacccactccggattccctagctgcagatagctcccaaagagaaatcagtgtgtctctttcaccatcagctcctcccctttcaccaccagctcctctccacttcccaagggagactccggcaaccttcagcaacatatatcctcgaccagatgcagtgctataagaacagaacgcattttggatgttattattaagaaccaaatgtcaatacagaattcatgttgccggtt

SEQ ID NO: 448484 - DNA, 791 bp, Homo sapiens
agcggggcttccccgccccgccccgtccccgggcgtctccattttggtctcaggtgtggactcggcaagaaccagcgcaagagggaagcggagttatagctaccccggccgcggagccggctcactgcactacccccgcccccttctttcctccagacgccgaagtcgcgggcgctcatggcgggcctggaggtactgttcgcatcggcagcgccggccatcacctgcaggcaggacgcgctcgtctgcttcttgcattgggaagtggtgacacacggttactgcggcttgggtgtcggtgaccagccgggtcccaatgataagaagtcagaactgctgccagctgggtggaacaacaataaagacctgtatgtcctccggtatgagtataaggatgggtccagaaagctccttgtgaaagccatcaccgtggagagcagcatgatcctcaatgtgctggaatatggctcacagcaagtggcagacttgaccctgaacttggatgattatatcgatgcagaacacctgggtgacttccacaggacctacaagaacagtgaggagcttcggtctcgtattgtgtctggaatcatcagcaaccatgttcttgccccctttgaccttccccaaaggatggtcacacaccagcactttatacacttctggctcacaggaaagtgtctgcagtaggggacccagagtcccaggcccctggagttgttttcggcaggggccttgtctctcactgcatttggtcaggggggcatgaataaaggctacaggctccaaaa

SEQ ID NO: 448485 - DNA, 551 bp, Homo sapiens
agcggggcttccccgccccgccccgtccccgggcgtctccattttggtctcaggtgtggactcggcaagaaccagcgcaagagggaagcggagttatagctaccccggccgcggagccggctcactgcactacccccgcccccttctttcctccagacgccgaagtcgcgggcgctcatggcgggcctggaggtactgttcgcatcggcagcgccggccatcacctgcaggcaggacgcgctcgtctgcttcttgcattgggaagtggtgacacacggttactgcggcttgggtgtcggtgaccagccgggtcccaatgataagaagtcagaactgcctagctgcagatagctcccaaagagaaatcagtgtgtctctttcaccatcagctcctcccctttcaccaccagctcctctccacttcccaagggagactccggcaaccttcagcaacatatatcctcgaccagatgcagtgctataagaacagaacgcattttggatgttattattaagaaccaaatgtcaatacagaattcatgttgccggtt

SEQ ID NO: 448486 - DNA, 258 bp, Homo sapiens
actcaggtatgctgagaagtaggacctgatggcagcttggttcagtgtggcagcaatgaaggtttctagccccaggcacagagctgccgctgccttcacctgttgctgccaggagagtggagcctcctccagggccctgcctgatttctccctggagccttctaggagcttcctatccctcagtgcctctctttccccagctccactctggggaggactcaaagtaggaggaactaacaattcttgaaagttaagtat

SEQ ID NO: 448487 - DNA, 3221 bp, Homo sapiens
aacttaaggtctaggtacgaggcctgggttttggtctcaggtgtggactcggcaagaaccagcgcaagagggaagcggagttatagctaccccggccgcggagccggctcactgcactacccccgcccccttctttcctccagacgccgaagtcgcgggcgctcatggcgggcctggaggtactgttcgcatcggcagcgccggccatcacctgcaggcaggacgcgctcgtctgcttcttgcattgggaagtggtgacacacggttactgcggcttgggtgtcggtgaccagccgggtcccaatgataagaagtcagaactgctgccagctgggtggaacaacaataaagacctgtatgtcctccggtatgagtataaggatgggtccagaaagctccttgtgaaagccatcaccgtggagagcagcatgatcctcaatgtgctggaatatggctcacagcaagtggcagacttgaccctgaacttggatgattatatcgatgcagaacacctgggtgacttccacaggacctacaagaacagtgaggagcttcggtctcgtattgtgtctggaatcatcacacctatccatgagcagtgggaaaaggctaatgtaagcagtccccaccgggagttcccccctgctaccgccagagaggtggacccactccggattcctccacaccacccacacaccagtcggcagcctccctggtgtgatcccctgggcccgtttgttgtcgggggagaagacttagacccttttgggcctcggagaggtggcatgattgtggatcccctgagatctggcttcccaagagcacttattgacccttcctcaggcctcccgaaccgacttcctccaggcgctgtgcccccaggagctcgctttgacccctttggacccattgggaccagcccacccggacctaacccagaccatctccccccgccgggctacgatgacatgtacctgtgaaggcctcaagaatgtaacatcccaggcttccctccattctcctggagctgccaccgctgtccccatcagcaaccatgttcttgcaggctgggggcaagggattctgctcatgtgtttgcagaccggctgggatagcctccccaccccttatcagagccaagacacctgctgcagctctccacctagctgcagatagctcccaaagagaaatcagtgtgtctctttcaccatcagctcctcccctttcaccaccagctcctctccacttcccaagggagactccggcaaccttcagcaacatatatcctcgaccagatgcagtgctataagaacagaacgcattttggatgttattattaagaaccaaatgtcaatacagaattcatgttgccggtttcccacttttctttttacattaatgcatagctgcttccatttatgagactttagagtttgagtttctgtagggctgaatgactctttttcctgcccagggcccattcttgcttctcaggcaccttccgtttattaattgccattgctcctgacatcactaagatgggtccccttctggctgcatgaatggaaatgagtgactggaaatcccataggccacaagaatgactttcacaagggcaggaacattgtggaaagactgcatcattctgatgaggcaaaatcctccagctattcctgtctgggccagttttgtaggtccatctgtgcatgggcagcagtagtcaaaaagccaaggaaaaaacagagcagacctgaaggctaatcttatttttgccactaacttagtgaatgaccctaagcaagttccttctcctcttagggccttgtgccaagcctatgaaattggaggtggctttcctgctctaaagcattttgatgtctcattctgtgtttggtaacccctataaactggggcagaggaaaagaatgatggttcaaggccatacttcccttgaaccttgtgtggttcttgcctaactctgtggtttttggaccccatggggcccagacagagcacaggagcatgggctgcctctgagtgtggtgttgaacttcgggaggagcagggagccctgcaccttgtgtcctggcccacctgacctttggtgttctccggatccttttcagcccgaggcctgacagacgcgggcagtgatgagccctgttctggagtggaaagagcacgatagagcaccaggctaagaggcacgagatcaaggcggtagtcacttccgctctgcagctagcatttcaaccatatgtggatcctttcatttctcagctccctggattccttcccctaaattaggacctattatttacctgtaggtaagcaagctactgtagctcttctgaggtatctgccaggctgttttctgtagcctcagattgcctatctgcttagcctgagaacaggtagatgaaaactaaactgatgcctaggcccagggtcagtctcagatggaagctgggcctgggtggggaggctagcatgcgtggctccctgggtatttctgtcagtccccatggcaagcagtgatttagtaaaacaccccagagtcagggaagccaaccaccttgaaacctttagaacatctctgctttggagaaagacccagagatcaggcagaggtgcagattcaatcattactcataacctttgagagctggcaaatgggaggagtgttagtctttgttttggaattggaccattcttgcaaccaaaaggacttagagcagtttgctcataaagacatcctttattataaaaggaagtatttaaaggatgatagagaccatcagatagaagcagggaaggtagataacttttaggaccttgatgtgaggaaaagataaaatttaaacaataaatttgccacttagattttctagcagcaaagtccgaaaagatagttatatacaaaattctgttttctgaaaacaaaattgtgattcaccttcagaattggccattttttttgtgagtttccttgcatcaaggacactgagaaacacagtcattgtcttaggtgttctatgggaggaagtgaatagagcctttaggaacttcctggtcaagcttatggtgcttattttgatctgggccacttccctccttccagtcatgagtaatcatcaaggagcaagttggagtgtttcaggtgtatattttgtagaacccaaaagattggagccttaacaataaacatcagcactaagtga

SEQ ID NO: 448488 - DNA, 1389 bp, Homo sapiens
agcggggcttccccgccccgccccgtccccgggcgtctccattttggtctcaggtgtggactcggcaagaaccagcgcaagagggaagcggagttatagctaccccggccgcggagccggctcactgcactacccccgcccccttctttcctccagacgccgaagtcgcgggcgctcatggcgggcctggaggtactgttcgcatcggcagcgccggccatcacctgcaggcaggacgcgctcgtctgcttcttgcattgggaagtggtgacacacggttactgcggcttgggtgtcggtgaccagccgggtcccaatgataagaagtcagaactgctgccagctgggtggaacaacaataaagacctgtatgtcctccggtatgagtataaggatgggtccagaaagctccttgtgaaagccatcaccgtggagagcagcatgatcctcaatgtgctggaatatggctcacagcaagtggcagacttgaccctgaacttggatgattatatcgatgcagaacacctgggtgacttccacaggacctacaagaacagtgaggagcttcggtctcgtattgtgtctggaatcatcacacctatccatgagcagtgggaaaaggctaatgtaagcagtccccaccgggagttcccccctgctaccgccagagaggtggacccactccggattcctccacaccacccacacaccagtcggcagcctccctggtgtgatcccctgggcccgtttgttgtcgggggagaagacttagacccttttgggcctcggagaggtggcatgattgtggatcccctgagatctggcttcccaagagcacttattgacccttcctcaggcctcccgaaccgacttcctccaggcgctgtgcccccaggagctcgctttgacccctttggacccattgggaccagcccacccggacctaacccagaccatctccccccgccgggctacgatgacatgtacctgtgaaggcctcaagaatgtaacatcccaggcttccctccattctcctggagctgccaccgctgtccccatcagcaaccatgttcttgcaggctgggggcaagggattctgctcatgtgtttgcagaccggctgggatagcctccccaccccttatcagagccaagacacctgctgcagctctccacctagctgcagatagctcccaaagagaaatcagtgtgtctctttcaccatcagctcctcccctttcaccaccagctcctctccacttcccaagggagactccggcaaccttcagcaacatatatcctcgaccagatgcagtgctataagaacagaacgcattttggatgttattattaagaaccaaatgtcaatacagaattcatgttgccggtt

SEQ ID NO: 448489 - DNA, 2036 bp, Homo sapiens
agcggggcttccccgccccgccccgtccccgggcgtctccattttggtctcaggtgtggactcggcaagaaccagcgcaagagggaagcggagttatagctaccccggccgcggagccggctcactgcactacccccgcccccttctttcctccagacgccgaagtcgcgggcgctcatggcgggcctggaggtactgttcgcatcggcagcgccggccatcacctgcaggcaggacgcgctcgtctgcttcttgcattgggaagtggtgacacacggttactgcggcttgggtgtcggtgaccagccgggtcccaatgataagaagtcagaactgctgccagctgggtggaacaacaataaagacctgtatgtcctccggtatgagtataaggatgggtccagaaagctccttgtgaaagccatcaccgtggagagcagcatgatcctcaatgtgctggaatatggctcacagcaagtggcagacttgaccctgaacttggatgattatatcgatgcagaacacctgggtgacttccacaggacctacaagaacagtgaggagcttcggtctcgtattgtgtctggaatcatcacacctatccatgagcagtgggaaaaggctaatgtaagcagtccccaccgggagttcccccctgctaccgccagagaggtggacccactccggattcctccacaccacccacacaccagtcggcagcctccctggtgtgatcccctgggcccgtttgttgtcgggggagaagacttagacccttttgggcctcggagaggtggcatgattgtggatcccctgagatctggcttcccaagagcacttattgacccttcctcaggcctcccgaaccgacttcctccaggcgctgtgcccccaggagctcgctttgacccctttggacccattgggaccagcccacccggcccgaggcctgacagacgcgggcagtgatgagccctgttctggagtggaaagagcacgatagagcaccaggctaagaggcacgagatcaaggcggtagtcacttccgctctgcagctagcatttcaaccatatgtggatcctttcatttctcagctccctggattccttcccctaaattaggacctattatttacctgtaggtaagcaagctactgtagctcttctgaggtatctgccaggctgttttctgtagcctcagattgcctatctgcttagcctgagaacaggtagatgaaaactaaactgatgcctaggcccagggtcagtctcagatggaagctgggcctgggtggggaggctagcatgcgtggctccctgggtatttctgtcagtccccatggcaagcagtgatttagtaaaacaccccagagtcagggaagccaaccaccttgaaacctttagaacatctctgctttggagaaagacccagagatcaggcagaggtgcagattcaatcattactcataacctttgagagctggcaaatgggaggagtgttagtctttgttttggaattggaccattcttgcaaccaaaaggacttagagcagtttgctcataaagacatcctttattataaaaggaagtatttaaaggatgatagagaccatcagatagaagcagggaaggtagataacttttaggaccttgatgtgaggaaaagataaaatttaaacaataaatttgccacttagattttctagcagcaaagtccgaaaagatagttatatacaaaattctgttttctgaaaacaaaattgtgattcaccttcagaattggccattttttttgtgagtttccttgcatcaaggacactgagaaacacagtcattgtcttaggtgttctatgggaggaagtgaatagagcctttaggaacttcctggtcaagcttatggtgcttattttgatctgggccacttccctccttccagtcatgagtaatcatcaaggagcaagttggagtgtttcaggtgtatattttgtagaacccaaaagattggagccttaacaataaacatcagcactaagtga

SEQ ID NO: 448490 - DNA, 1709 bp, Homo sapiens
  misc_feature (1449)..(1449): n is a, c, g, or t
agcggggcttccccgccccgccccgtccccgggcgtctccattttggtctcaggtgtggactcggcaagaaccagcgcaagagggaagcggagttatagctaccccggccgcggagccggctcactgcactacccccgcccccttctttcctccagacgccgaagtcgcgggcgctcatggcgggcctggaggtactgttcgcatcggcagcgccggccatcacctgcaggcaggacgcgctcgtctgcttcttgcattgggaagtggtgacacacggttactgcggcttgggtgtcggtgaccagccgggtcccaatgataagaagtcagaactgctgccagctgggtggaacaacaataaagacctgtatgtcctccggtatgagtataaggatgggtccagaaagctccttgtgaaagccatcaccgtggagagcagcatgatcctcaatgtgctggaatatggctcacagcaagtggcagacttgaccctgaacttggatgattatatcgatgcagaacacctgggtgacttccacaggacctacaagaacagtgaggagcttcggtctcgtattgtgtctggaatcatcacacctatccatgagcagtgggaaaaggctaatgtaagcagtccccaccgggagttcccccctgctaccgccagagaggtggacccactccggattcctccacaccacccacacaccagtcggcagcctccctggtgtgatcccctgggcccgtttgttgtcgggggagaagacttagacccttttgggcctcggagaggtggcatgattgtggatcccctgagatctggcttcccaagagcacttattgacccttcctcaggcctcccgaaccgacttcctccaggcgctgtgcccccaggagctcgctttgacccctttggacccattgggaccagcccacccggacctaacccagaccatctccccccgccgggctacgatgacatgtacctgtgaaggcctcaagaatgtaacatcccaggcttccctccattctcctggagctgccaccgctgtccccatcagcaaccatgttcttgcaggctgggggcaagggattctgctcatgtgtttgcagaccggctgggatagcctccccaccccttatcagagccaagacacctgctgcagctctccacctagctgcagatagctcccaaagagaaatcagtgtgtctctttcaccatcagctcctcccctttcaccaccagctcctctccacttcccaagggagactccggcaaccttcagcaacatatatcctcgaccagatgcagtgctataagaacagaacgcattttggatgttattattaagaaccaaatgtcaatacagaattcatgttgccggttaaaaaaaaaaaaaaaaaaaaaaaaaaaaaaaaaaaaaaaaaaaaaaaaaaaaaaaaaaanaaaaaaaaaaaaaaaaaaaaaaagaaaaaaaaaaaaaaaaagaaaaaaaaacgaaacacgacagaacaagaaaaaacaacaaaccaaacaagagagaaacagacaacgaaggaaacgaggaggcggggcgcgcggacatccgacgcccaccgcagcggaggagcgggcaagcaaccacacgaccacccaaacaaaagcagggggcgcacgcaagccgcgcgcgggcgcccaccgcaggacgagaacaccatcaaaaaacc

SEQ ID NO: 448491 - DNA, 3120 bp, Homo sapiens
agcggggcttccccgccccgccccgtccccgggcgtctccattttggtctcaggtgtggactcggcaagaaccagcgcaagagggaagcggagttatagctaccccggccgcggagccggctcactgcactacccccgcccccttctttcctccagacgccgaagtcgcgggcgctcatggcgggcctggagccgggtcccaatgataagaagtcagaactgctgccagctgggtggaacaacaataaagacctgtatgtcctccggtatgagtataaggatgggtccagaaagctccttgtgaaagccatcaccgtggagagcagcatgatcctcaatgtgctggaatatggctcacagcaagtggcagacttgaccctgaacttggatgattatatcgatgcagaacacctgggtgacttccacaggacctacaagaacagtgaggagcttcggtctcgtattgtgtctggaatcatcacacctatccatgagcagtgggaaaaggctaatgtaagcagtccccaccgggagttcccccctgctaccgccagagaggtggacccactccggattcctccacaccacccacacaccagtcggcagcctccctggtgtgatcccctgggcccgtttgttgtcgggggagaagacttagacccttttgggcctcggagaggtggcatgattgtggatcccctgagatctggcttcccaagagcacttattgacccttcctcaggcctcccgaaccgacttcctccaggcgctgtgcccccaggagctcgctttgacccctttggacccattgggaccagcccacccggacctaacccagaccatctccccccgccgggctacgatgacatgtacctgtgaaggcctcaagaatgtaacatcccaggcttccctccattctcctggagctgccaccgctgtccccatcagcaaccatgttcttgcaggctgggggcaagggattctgctcatgtgtttgcagaccggctgggatagcctccccaccccttatcagagccaagacacctgctgcagctctccacctagctgcagatagctcccaaagagaaatcagtgtgtctctttcaccatcagctcctcccctttcaccaccagctcctctccacttcccaagggagactccggcaaccttcagcaacatatatcctcgaccagatgcagtgctataagaacagaacgcattttggatgttattattaagaaccaaatgtcaatacagaattcatgttgccggtttcccacttttctttttacattaatgcatagctgcttccatttatgagactttagagtttgagtttctgtagggctgaatgactctttttcctgcccagggcccattcttgcttctcaggcaccttccgtttattaattgccattgctcctgacatcactaagatgggtccccttctggctgcatgaatggaaatgagtgactggaaatcccataggccacaagaatgactttcacaagggcaggaacattgtggaaagactgcatcattctgatgaggcaaaatcctccagctattcctgtctgggccagttttgtaggtccatctgtgcatgggcagcagtagtcaaaaagccaaggaaaaaacagagcagacctgaaggctaatcttatttttgccactaacttagtgaatgaccctaagcaagttccttctcctcttagggccttgtgccaagcctatgaaattggaggtggctttcctgctctaaagcattttgatgtctcattctgtgtttggtaacccctataaactggggcagaggaaaagaatgatggttcaaggccatacttcccttgaaccttgtgtggttcttgcctaactctgtggtttttggaccccatggggcccagacagagcacaggagcatgggctgcctctgagtgtggtgttgaacttcgggaggagcagggagccctgcaccttgtgtcctggcccacctgacctttggtgttctccggatccttttcagcccgaggcctgacagacgcgggcagtgatgagccctgttctggagtggaaagagcacgatagagcaccaggctaagaggcacgagatcaaggcggtagtcacttccgctctgcagctagcatttcaaccatatgtggatcctttcatttctcagctccctggattccttcccctaaattaggacctattatttacctgtaggtaagcaagctactgtagctcttctgaggtatctgccaggctgttttctgtagcctcagattgcctatctgcttagcctgagaacaggtagatgaaaactaaactgatgcctaggcccagggtcagtctcagatggaagctgggcctgggtggggaggctagcatgcgtggctccctgggtatttctgtcagtccccatggcaagcagtgatttagtaaaacaccccagagtcagggaagccaaccaccttgaaacctttagaacatctctgctttggagaaagacccagagatcaggcagaggtgcagattcaatcattactcataacctttgagagctggcaaatgggaggagtgttagtctttgttttggaattggaccattcttgcaaccaaaaggacttagagcagtttgctcataaagacatcctttattataaaaggaagtatttaaaggatgatagagaccatcagatagaagcagggaaggtagataacttttaggaccttgatgtgaggaaaagataaaatttaaacaataaatttgccacttagattttctagcagcaaagtccgaaaagatagttatatacaaaattctgttttctgaaaacaaaattgtgattcaccttcagaattggccattttttttgtgagtttccttgcatcaaggacactgagaaacacagtcattgtcttaggtgttctatgggaggaagtgaatagagcctttaggaacttcctggtcaagcttatggtgcttattttgatctgggccacttccctccttccagtcatgagtaatcatcaaggagcaagttggagtgtttcaggtgtatattttgtagaacccaaaagattggagccttaacaataaacatcagcactaagtga

SEQ ID NO: 448492 - DNA, 1043 bp, Homo sapiens
agcggggcttccccgccccgccccgtccccgggcgtctccattttggtctcaggtgtggactcggcaagaaccagcgcaagagggaagcggagttatagctaccccggccgcggagccggctcactgcactacccccgcccccttctttcctccagacgccgaagtcgcgggcgctcatggcgggcctggaggtactgttcgcatcggcagcgccggccatcacctgcaggcaggacgcgctcgtctgcttcttgcattgggaagtggtgacacacggttactgcggcttgggtgtcggtgaccagccgggtcccaatgataagaagtcagaactgctgccagctgggtggaacaacaataaagacctgtatgtcctccggtatgagtataaggatgggtccagaaagctccttgtgaaagccatcaccgtggagagcagcatgatcctcaatgtgctggaatatggctcacagcaagtggcagacttgaccctgaacttggatgattatatcgatgcagaacacctgggtgacttccacaggacctacaagaacagtgaggagcttcggtctcgtattgtgtctggaatcatcacacctatccatgagcagtgggaaaaggctaatgtaagcagtccccaccgggagttcccccctgctaccgccagagaggtggacccactccggattcctccacaccacccacacaccagtcggcagcctccctggtgtgatcccctgggcccgtttgttgtcgggggagaagacttagacccttttgggcctcggagaggtggcatgattgtggatcccctgagatctggcttcccaagagcacttattgacccttcctcaggcctcccgaaccgacttcctccaggcgctgtgcccccaggagctcgctttgacccctttggacccattgggaccagcccacccggacctaacccagaccatctccccccgccgggctacgatgacatgtacctgatgactttggcttcttctcgtcgtcggagagcggtgccccggaggcggcggag

SEQ ID NO: 448493 - DNA, 3180 bp, Homo sapiens
agcggggcttccccgccccgccccgtccccgggcgtctccattttggtctcaggtgtggactcggcaagaaccagcgcaagagggaagcggagttatagctaccccggccgcggagccggctcactgcactacccccgcccccttctttcctccagacgccgaagtcgcgggcgctcatggcgggcctggaggtactgttcgcatcggcagcgccggccatcacctgcaggcaggacgcgctcgtctgcttcttgcattgggaagtggtgacacacggttactgcggcttgggtgtcggtgaccagccgggtcccaatgataagaagtcagaactgctgccagctgggtggaacaacaataaagacctgtatgtcctccggtatgagtataaggatgggtccagaaagctccttgtgaaagccatcaccgtggagagcagcatgatcctcaatgtgctggaatatggctcacagcaagtggcagacttgaccctgaacttggatgattatatcgatgcagaacacctgggtgacttccacaggacctacaagaacagtgaggagcttcggtctcgtattgtgtctggaatcatcacacctatccatgagcagtgggaggtggacccactccggattcctccacaccacccacacaccagtcggcagcctccctggtgtgatcccctgggcccgtttgttgtcgggggagaagacttagacccttttgggcctcggagaggtggcatgattgtggatcccctgagatctggcttcccaagagcacttattgacccttcctcaggcctcccgaaccgacttcctccaggcgctgtgcccccaggagctcgctttgacccctttggacccattgggaccagcccacccggacctaacccagaccatctccccccgccgggctacgatgacatgtacctgtgaaggcctcaagaatgtaacatcccaggcttccctccattctcctggagctgccaccgctgtccccatcagcaaccatgttcttgcaggctgggggcaagggattctgctcatgtgtttgcagaccggctgggatagcctccccaccccttatcagagccaagacacctgctgcagctctccacctagctgcagatagctcccaaagagaaatcagtgtgtctctttcaccatcagctcctcccctttcaccaccagctcctctccacttcccaagggagactccggcaaccttcagcaacatatatcctcgaccagatgcagtgctataagaacagaacgcattttggatgttattattaagaaccaaatgtcaatacagaattcatgttgccggtttcccacttttctttttacattaatgcatagctgcttccatttatgagactttagagtttgagtttctgtagggctgaatgactctttttcctgcccagggcccattcttgcttctcaggcaccttccgtttattaattgccattgctcctgacatcactaagatgggtccccttctggctgcatgaatggaaatgagtgactggaaatcccataggccacaagaatgactttcacaagggcaggaacattgtggaaagactgcatcattctgatgaggcaaaatcctccagctattcctgtctgggccagttttgtaggtccatctgtgcatgggcagcagtagtcaaaaagccaaggaaaaaacagagcagacctgaaggctaatcttatttttgccactaacttagtgaatgaccctaagcaagttccttctcctcttagggccttgtgccaagcctatgaaattggaggtggctttcctgctctaaagcattttgatgtctcattctgtgtttggtaacccctataaactggggcagaggaaaagaatgatggttcaaggccatacttcccttgaaccttgtgtggttcttgcctaactctgtggtttttggaccccatggggcccagacagagcacaggagcatgggctgcctctgagtgtggtgttgaacttcgggaggagcagggagccctgcaccttgtgtcctggcccacctgacctttggtgttctccggatccttttcagcccgaggcctgacagacgcgggcagtgatgagccctgttctggagtggaaagagcacgatagagcaccaggctaagaggcacgagatcaaggcggtagtcacttccgctctgcagctagcatttcaaccatatgtggatcctttcatttctcagctccctggattccttcccctaaattaggacctattatttacctgtaggtaagcaagctactgtagctcttctgaggtatctgccaggctgttttctgtagcctcagattgcctatctgcttagcctgagaacaggtagatgaaaactaaactgatgcctaggcccagggtcagtctcagatggaagctgggcctgggtggggaggctagcatgcgtggctccctgggtatttctgtcagtccccatggcaagcagtgatttagtaaaacaccccagagtcagggaagccaaccaccttgaaacctttagaacatctctgctttggagaaagacccagagatcaggcagaggtgcagattcaatcattactcataacctttgagagctggcaaatgggaggagtgttagtctttgttttggaattggaccattcttgcaaccaaaaggacttagagcagtttgctcataaagacatcctttattataaaaggaagtatttaaaggatgatagagaccatcagatagaagcagggaaggtagataacttttaggaccttgatgtgaggaaaagataaaatttaaacaataaatttgccacttagattttctagcagcaaagtccgaaaagatagttatatacaaaattctgttttctgaaaacaaaattgtgattcaccttcagaattggccattttttttgtgagtttccttgcatcaaggacactgagaaacacagtcattgtcttaggtgttctatgggaggaagtgaatagagcctttaggaacttcctggtcaagcttatggtgcttattttgatctgggccacttccctccttccagtcatgagtaatcatcaaggagcaagttggagtgtttcaggtgtatattttgtagaacccaaaagattggagccttaacaataaacatcagcactaagtga

SEQ ID NO: 448494 - DNA, 2773 bp, Homo sapiens
acttcccaccgggaggacttctcaccgggatttagcggggtgatgcctgttgggggccagtgccctcctaattggggggtaggggctaggctggagtggtaaaaggctcagaaaaatcctgcgaagaaaaaaacttctgaggtaataaataggattatcccgtgggaagtcgactccccaccgggagttcccccctgctaccgccagagaggtggacccactccggattcctccacaccacccacacaccagtcggcagcctccctggtgtgatcccctgggcccgtttgttgtcgggggagaagacttagacccttttgggcctcggagaggtggcatgattgtggatcccctgagatctggcttcccaagagcacttattgacccttcctcaggcctcccgaaccgacttcctccaggcgctgtgcccccaggagctcgctttgacccctttggacccattgggaccagcccacccggacctaacccagaccatctccccccgccgggctacgatgacatgtacctgtgaaggcctcaagaatgtaacatcccaggcttccctccattctcctggagctgccaccgctgtccccatcagcaaccatgttcttgcaggctgggggcaagggattctgctcatgtgtttgcagaccggctgggatagcctccccaccccttatcagagccaagacacctgctgcagctctccacctagctgcagatagctcccaaagagaaatcagtgtgtctctttcaccatcagctcctcccctttcaccaccagctcctctccacttcccaagggagactccggcaaccttcagcaacatatatcctcgaccagatgcagtgctataagaacagaacgcattttggatgttattattaagaaccaaatgtcaatacagaattcatgttgccggtttcccacttttctttttacattaatgcatagctgcttccatttatgagactttagagtttgagtttctgtagggctgaatgactctttttcctgcccagggcccattcttgcttctcaggcaccttccgtttattaattgccattgctcctgacatcactaagatgggtccccttctggctgcatgaatggaaatgagtgactggaaatcccataggccacaagaatgactttcacaagggcaggaacattgtggaaagactgcatcattctgatgaggcaaaatcctccagctattcctgtctgggccagttttgtaggtccatctgtgcatgggcagcagtagtcaaaaagccaaggaaaaaacagagcagacctgaaggctaatcttatttttgccactaacttagtgaatgaccctaagcaagttccttctcctcttagggccttgtgccaagcctatgaaattggaggtggctttcctgctctaaagcattttgatgtctcattctgtgtttggtaacccctataaactggggcagaggaaaagaatgatggttcaaggccatacttcccttgaaccttgtgtggttcttgcctaactctgtggtttttggaccccatggggcccagacagagcacaggagcatgggctgcctctgagtgtggtgttgaacttcgggaggagcagggagccctgcaccttgtgtcctggcccacctgacctttggtgttctccggatccttttcagcccgaggcctgacagacgcgggcagtgatgagccctgttctggagtggaaagagcacgatagagcaccaggctaagaggcacgagatcaaggcggtagtcacttccgctctgcagctagcatttcaaccatatgtggatcctttcatttctcagctccctggattccttcccctaaattaggacctattatttacctgtaggtaagcaagctactgtagctcttctgaggtatctgccaggctgttttctgtagcctcagattgcctatctgcttagcctgagaacaggtagatgaaaactaaactgatgcctaggcccagggtcagtctcagatggaagctgggcctgggtggggaggctagcatgcgtggctccctgggtatttctgtcagtccccatggcaagcagtgatttagtaaaacaccccagagtcagggaagccaaccaccttgaaacctttagaacatctctgctttggagaaagacccagagatcaggcagaggtgcagattcaatcattactcataacctttgagagctggcaaatgggaggagtgttagtctttgttttggaattggaccattcttgcaaccaaaaggacttagagcagtttgctcataaagacatcctttattataaaaggaagtatttaaaggatgatagagaccatcagatagaagcagggaaggtagataacttttaggaccttgatgtgaggaaaagataaaatttaaacaataaatttgccacttagattttctagcagcaaagtccgaaaagatagttatatacaaaattctgttttctgaaaacaaaattgtgattcaccttcagaattggccattttttttgtgagtttccttgcatcaaggacactgagaaacacagtcattgtcttaggtgttctatgggaggaagtgaatagagcctttaggaacttcctggtcaagcttatggtgcttattttgatctgggccacttccctccttccagtcatgagtaatcatcaaggagcaagttggagtgtttcaggtgtatattttgtagaacccaaaagattggagccttaacaataaacatcagcactaagtga

SEQ ID NO: 448495 - DNA, 1277 bp, Homo sapiens
actctctaattccaccgctacaggcctcggagaggtggcatgattgtggatcccctgagatctggcttcccaagagcacttattgacccttcctcaggcctcccgaaccgacttcctccaggcgctgtgcccccaggagctcgctttgacccctttggacccattgggaccagcccacccggcccgaggcctgacagacgcgggcagtgatgagccctgttctggagtggaaagagcacgatagagcaccaggctaagaggcacgagatcaaggcggtagtcacttccgctctgcagctagcatttcaaccatatgtggatcctttcatttctcagctccctggattccttcccctaaattaggacctattatttacctgtaggtaagcaagctactgtagctcttctgaggtatctgccaggctgttttctgtagcctcagattgcctatctgcttagcctgagaacaggtagatgaaaactaaactgatgcctaggcccagggtcagtctcagatggaagctgggcctgggtggggaggctagcatgcgtggctccctgggtatttctgtcagtccccatggcaagcagtgatttagtaaaacaccccagagtcagggaagccaaccaccttgaaacctttagaacatctctgctttggagaaagacccagagatcaggcagaggtgcagattcaatcattactcataacctttgagagctggcaaatgggaggagtgttagtctttgttttggaattggaccattcttgcaaccaaaaggacttagagcagtttgctcataaagacatcctttattataaaaggaagtatttaaaggatgatagagaccatcagatagaagcagggaaggtagataacttttaggaccttgatgtgaggaaaagataaaatttaaacaataaatttgccacttagattttctagcagcaaagtccgaaaagatagttatatacaaaattctgttttctgaaaacaaaattgtgattcaccttcagaattggccattttttttgtgagtttccttgcatcaaggacactgagaaacacagtcattgtcttaggtgttctatgggaggaagtgaatagagcctttaggaacttcctggtcaagcttatggtgcttattttgatctgggccacttccctccttccagtcatgagtaatcatcaaggagcaagttggagtgtttcaggtgtatattttgtagaacccaaaagattggagccttaacaataaacatcagcactaagtga

SEQ ID NO: 448496 - DNA, 872 bp, Homo sapiens
  misc_feature (462)..(462): n is a, c, g, or t
  misc_feature (477)..(477): n is a, c, g, or t
  misc_feature (480)..(481): n is a, c, g, or t
  misc_feature (487)..(487): n is a, c, g, or t
  misc_feature (508)..(508): n is a, c, g, or t
  misc_feature (519)..(519): n is a, c, g, or t
  misc_feature (522)..(522): n is a, c, g, or t
  misc_feature (538)..(539): n is a, c, g, or t
  misc_feature (543)..(543): n is a, c, g, or t
  misc_feature (545)..(545): n is a, c, g, or t
  misc_feature (569)..(569): n is a, c, g, or t
  misc_feature (587)..(587): n is a, c, g, or t
  misc_feature (598)..(598): n is a, c, g, or t
  misc_feature (600)..(601): n is a, c, g, or t
  misc_feature (615)..(615): n is a, c, g, or t
  misc_feature (635)..(636): n is a, c, g, or t
  misc_feature (643)..(643): n is a, c, g, or t
  misc_feature (668)..(668): n is a, c, g, or t
  misc_feature (674)..(674): n is a, c, g, or t
  misc_feature (680)..(680): n is a, c, g, or t
  misc_feature (685)..(685): n is a, c, g, or t
  misc_feature (696)..(698): n is a, c, g, or t
  misc_feature (709)..(709): n is a, c, g, or t
  misc_feature (711)..(712): n is a, c, g, or t
  misc_feature (714)..(715): n is a, c, g, or t
  misc_feature (718)..(718): n is a, c, g, or t
  misc_feature (723)..(726): n is a, c, g, or t
  misc_feature (728)..(728): n is a, c, g, or t
  misc_feature (746)..(746): n is a, c, g, or t
  misc_feature (751)..(751): n is a, c, g, or t
  misc_feature (765)..(766): n is a, c, g, or t
  misc_feature (768)..(768): n is a, c, g, or t
  misc_feature (771)..(771): n is a, c, g, or t
  misc_feature (773)..(775): n is a, c, g, or t
  misc_feature (778)..(779): n is a, c, g, or t
  misc_feature (789)..(789): n is a, c, g, or t
  misc_feature (796)..(796): n is a, c, g, or t
  misc_feature (805)..(805): n is a, c, g, or t
  misc_feature (809)..(809): n is a, c, g, or t
  misc_feature (829)..(829): n is a, c, g, or t
agcggggcttccccgccccgccccgtccccgggcgtctccattttggtctcaggtgtggactcggcaagaaccagcgcaagagggaagcggagttatagctaccccggccgcggagccggctcactgcactacccccgcccccttctttcctccagacgccgaagtcgcgggcgctcatggcgggcctggaggtactgttcgcatcggcagcgccggccatcacctgcaggcaggacgcgctcgtctgcttcttgcattgggaagtggtgacacacggttactgcggcttgggtgtcggtgaccagccgggtcccaatgataagaagtcagaactgctgccagctgggtggaacaacaataaagacctgtatgtcctccggtatgagtataaggatgggtccagaaagctccttgtgaaagccatcaccgtggagagcagcatgatcctcaatgtgctggtngaatatagggtgcanggnngtgggnactttacgcgcgctgacactnggatgatatantcngcgatagcgcaagcgnntagngngagcttgcccacgggcgcctcgcncgcccacagtgcagggcngcttagagtgntnngtacttagtagtantgtgccctgcctggcagcgnntgctggnctagcgagcagtaggagcaccacgnggtgcnttgtancggcngttgggggccnnngggccgtttgngnngnntanatccnnnngngccgccgccggtggggcnccccntaaaaaaaaaaaannanccncnnnccnncccgccgcgngccgttnggggcgggntggngttggttgttgctgggggtngggggggcgttttgtttgttggggggggcgcccgcgtttccgc

SEQ ID NO: 448497 - DNA, 1866 bp, Homo sapiens
ggacgcgtgggtcgacccacgcgtcgccacgcgtcgcggctctgcgacatccgcagcctcatttaccagagggagccagggctgcagcctcatctgtttgcggatcagaacccgagctgtgcttgtggctgcggctgctaactggctgcgcacagggagctgtcaccatgcctcactcgtacccagccctttctgctgagcagaagaaggagttgtctgacattgccctgcggattgtagccccgggcaaaggcattctggctgcggatgagtctgtaggcagcatggccaagcggctgagccaaattggggtggaaaacacagaggagaaccgccggctgtaccgccaggtcctgttcagtgctgatgaccgtgtgaaaaagtgcattggaggcgtcattttcttccatgagaccctctaccagaaagatgataatggtgttcccttcgtccgaaccatccaggataagggcatcgtcgtgggcatcaaggttgacaagggtgtggtgcctctagctgggactgatggagaaaccaccactcaagggctggatgggctctcagaacgctgtgcccaatacaagaaggatggtgctgactttgccaagtggcgctgtgtgctgaaaatcagtgagcgtacaccctctgcacttgccattctggagaacgccaacgtgctggcccgttatgccagtatctgccagcagaatggcattgtgcctattgtggaacctgaaatattgcctgatggagaccacgacctcaaacgttgtcagtatgttacagagaaggtcttggctgctgtgtacaaggccctgagtgaccatcatgtatacctggaggggaccctgctcaagcccaacatggtgaccccgggccatgcctgtcccatcaagtataccccagaggagattgccatggcaactgtcactgccctgcgtcgcactgtgcccccagctgtcccaggagtgaccttcctgtctgggggtcagagcgaagaagaggcatcattcaacctcaatgccatcaaccgctgcccccttccccgaccctgggcgcttaccttctcctatgggcgtgccctgcaagcctctgcactcaatgcctggcgagggcaacgggacaatgctggggctgccactgaggagttcatcaagcgggctgaggtgaatgggcttgcagcccagggcaagtatgaaggcagtggagaagatggtggagcagcagcacagtcactctacattgccaaccatgcctactgagtatccactccataccacagcccttggcccagccatctgcacccacttttgcttgtagtcatggccagggccaaatagctatgcagagcagagatgccttcacctggcaccaacttgtcttcctttctctcttcccttcccctctctcattgctgcacctgggaccataggatgggaggatagggagcccctcatgactgagggcagaagaaattgctagaagtcagaacaggatggctgggtctccccctacctcttccagctcccacaattttcccatgatgaggtagcttctccctgggctctccttcttgcctgccctgtctcctgggatcagagggtagtacagaagccctgactcatgccttgagtacataccatacagcaaataaatggtagcaaaacaaaaaaaaaaaaacaacaaaataaacacaacaaacaaaacacaaacacacacaacaacaacaacaacacacaaacaacaaacaaaaaacacacaaacaaagaaaaacacaacaaaacacacaaaacacacacaaaaaacaaacacagccacaagacacgccagagcgccggggcggcccctcctccccatcccccccgg

SEQ ID NO: 448498 - DNA, 1660 bp, Homo sapiens
ggacgcgtgggtcgacccacgcgtcgccacgcgtcgcggctctgcgacatccgcagcctcatttaccagagggagccagggctgcagcctcatctgtttgcggatcagaacccgagctgtgcttgtggctgcggctgctaactggctgcgcacagggagctgtcaccatgcctcactcgtacccagccctttctgctgagcagaagaaggagttgtctgacattgccctgcggattgtagccccgggcaaaggcattctggctgcggatgagtctgtaggcagcatggccaagcggctgagccaaattggggtggaaaacacagaggagaaccgccggctgtaccgccaggtcctgttcagtgctgatgaccgtgtgaaaaagtgcattggaggcgtcattttcttccatgagaccctctaccagaaagatgataatggtgttcccttcgtccgaaccatccaggataagggcatcgtcgtgggcatcaaggttgacaagggtgtggtgcctctagctgggactgatggagaaaccaccactcaagggctggatgggctctcagaacgctgtgcccaatacaagaaggatggtgctgactttgccaagtggcgctgtgtgctgaaaatcagtgagcgtacaccctctgcacttgccattctggagaacgccaacgtgctggcccgttatgccagtatctgccagcagaatggcattgtgcctattgtggaacctgaaatattgcctgatggagaccacgacctcaaacgttgtcagtatgttacagagaaggtcttggctgctgtgtacaaggccctgagtgaccatcatgtatacctggaggggaccctgctcaagcccaacatggtgaccccgggccatgcctgtcccatcaagtataccccagaggagattgccatggcaactgtcactgccctgcgtcgcactgtgcccccagctgtcccaggagtgaccttcctgtctgggggtcagagcgaagaagaggcatcattcaacctcaatgccatcaaccgctgcccccttccccgaccctgggcgcttaccttctcctatgggcgtgccctgcaagcctctgcactcaatgcctggcgagggcaacgggacaatgctggggctgccactgaggagttcatcaagcgggctgaggtgaatgggcttgcagcccagggcaagtatgaaggcagtggagaagatggtggagcagcagcacagtcactctacattgccaaccatgcctactgagtatccactccataccacagcccttggcccagccatctgcacccacttttgcttgtagtcatggccagggccaaatagctatgcagagcagagatgccttcacctggcaccaactgcacctgggaccataggatgggaggatagggagcccctcatgactgagggcagaagaaattgctagaagtcagaacaggatggctgggtctccccctacctcttccagctcccacaattttcccatgatgaggtagcttctccctgggctctccttcttgcctgccctgtctcctgggatcagagggtagtacagaagccctgactcatgccttgagtacataccatacagcaaataaatggtagcaaaacattctactttgcctgtctgttttacacatcaa

SEQ ID NO: 448499 - DNA, 1620 bp, Homo sapiens
  misc_feature (1)..(3): n is a, c, g, or t
  misc_feature (5)..(5): n is a, c, g, or t
  misc_feature (8)..(8): n is a, c, g, or t
  misc_feature (13)..(13): n is a, c, g, or t
nnngnggntgggnttactctagaatggcaagtgcagagggtgtacgctcactgattttcagcacacagcgcacaggggagctgtcaccatgcctcactcgtacccagccctttctgctgagcagaagaaggagttgtctgacattgccctgcggattgtagccccgggcaaaggcattctggctgcggatgagtctgtaggcagcatggccaagcggctgagccaaattggggtggaaaacacagaggagaaccgccggctgtaccgccaggtcctgttcagtgctgatgaccgtgtgaaaaagtgcattggaggcgtcattttcttccatgagaccctctaccagaaagatgataatggtgttcccttcgtccgaaccatccaggataagggcatcgtcgtgggcatcaaggttgacaagggtgtggtgcctctagctgggactgatggagaaaccaccactcaagggctggatgggctctcagaacgctgtgcccaatacaagaaggatggtgctgactttgccaagtggcgctgtgtgctgaaaatcagtgagcgtacaccctctgcacttgccattctggagaacgccaacgtgctggcccgttatgccagtatctgccagcagaatggcattgtgcctattgtggaacctgaaatattgcctgatggagaccacgacctcaaacgttgtcagtatgttacagagaaggtcttggctgctgtgtacaaggccctgagtgaccatcatgtatacctggaggggaccctgctcaagcccaacatggtgaccccgggccatgcctgtcccatcaagtataccccagaggagattgccatggcaactgtcactgccctgcgtcgcactgtgcccccagctgtcccaggagtgaccttcctgtctgggggtcagagcgaagaagaggcatcattcaacctcaatgccatcaaccgctgcccccttccccgaccctgggcgcttaccttctcctatgggcgtgccctgcaagcctctgcactcaatgcctggcgagggcaacgggacaatgctggggctgccactgaggagttcatcaagcgggctgaggtgaatgggcttgcagcccagggcaagtatgaaggcagtggagaagatggtggagcagcagcacagtcactctacattgccaaccatgcctactgagtatccactccataccacagcccttggcccagccatctgcacccacttttgcttgtagtcatggccagggccaaatagctatgcagagcagagatgccttcacctggcaccaacttgtcttcctttctctcttcccttcccctctctcattgctgcacctgggaccataggatgggaggatagggagcccctcatgactgagggcagaagaaattgctagaagtcagaacaggatggctgggtctccccctacctcttccagctcccacaattttcccatgatgaggtagcttctccctgggctctccttcttgcctgccctgtctcctgggatcagagggtagtacagaagccctgactcatgccttgagtacataccatacagcaaataaatggtagcaaaacattctactttgcctgtctgttttacacatcaa

SEQ ID NO: 448500 - DNA, 1633 bp, Homo sapiens
ggacgcgtgggtcgacccacgcgtcgccacgcgtcgcggacgcgtggtcgacccacgcgtcggccagggctgcagcctcatctgtttgcggatcagaacccgagctgtgcttgtggctgcggctgctaactggctgcgcacagggagctgtcaccatgcctcactcgtacccagccctttctgctgagcagaagaaggagttgtctgacattgccctgcggattgtagccccgggcaaaggcattctggctgcggatgagtctgtaggcagcatggccaagcggctgagccaaattggggtggaaaacacagaggagaaccgccggctgtaccgccaggtcctgttcagtgctgatgaccgtgtgaaaaagtgcattggaggcgtcattttcttccatgagaccctctaccagaaagatgataatggtgttcccttcgtccgaaccatccaggataagggcatcgtcgtgggcatcaaggttgacaagggtgtggtgcctctagctgggactgatggagaaaccaccactcaagggctggatgggctctcagaacgctgtgcccaatacaagaaggatggtgctgactttgccaagtggcgctgtgtggtgctggcccgttatgccagtatctgccagcagaatggcattgtgcctattgtggaacctgaaatattgcctgatggagaccacgacctcaaacgttgtcagtatgttacagagaaggtcttggctgctgtgtacaaggccctgagtgaccatcatgtatacctggaggggaccctgctcaagcccaacatggtgaccccgggccatgcctgtcccatcaagtataccccagaggagattgccatggcaactgtcactgccctgcgtcgcactgtgcccccagctgtcccaggagtgaccttcctgtctgggggtcagagcgaagaagaggcatcattcaacctcaatgccatcaaccgctgcccccttccccgaccctgggcgcttaccttctcctatgggcgtgccctgcaagcctctgcactcaatgcctggcgagggcaacgggacaatgctggggctgccactgaggagttcatcaagcgggctgaggtgaatgggcttgcagcccagggcaagtatgaaggcagtggagaagatggtggagcagcagcacagtcactctacattgccaaccatgcctactgagtatccactccataccacagcccttggcccagccatctgcacccacttttgcttgtagtcatggccagggccaaatagctatgcagagcagagatgccttcacctggcaccaacttgtcttcctttctctcttcccttcccctctctcattgctgcacctgggaccataggatgggaggatagggagcccctcatgactgagggcagaagaaattgctagaagtcagaacaggatggctgggtctccccctacctcttccagctcccacaattttcccatgatgaggtagcttctccctgggctctccttcttgcctgccctgtctcctgggatcagagggtagtacagaagccctgactcatgccttgagtacataccatacagcaaataaatggtagcaaaacattctactttgcctgtctgttttacacatcaa

SEQ ID NO: 448501 - DNA, 1119 bp, Homo sapiens
ggacgcgtgggtcgacccacgcgtcgccacgcgtcgcggctctgcgacatccgcagcctcatttaccagagggagccagggctgcagcctcatctgtttgcggatcagaacccgagctgtgcttgtggctgcggctgctaactggctgcgcacagggagctgtcaccatgcctcactcgtacccagccctttctgctgagcagaagaaggagttgtctgacattgccctgcggattgtagccccgggcaaaggcattctggctgcggatgagtctgtaggcagcatggccaagcggctgagccaaattggggtggaaaacacagaggagaaccgccggctgtaccgccaggtcctgttcagtgctgatgaccgtgtgaaaaagtgcattggaggcgtcattttcttccatgagaccctctaccagaaagatgataatggtgttcccttcgtccgaaccatccaggataagggcatcgtcgtgggcatcaaggttgacaagggtgtggtgcctctagctgggactgatggagaaaccaccactcaagggctggatgggctctcagaacgctgtgcccaatacaagaaggatggtgctgactttgccaagtggcgctgtgtgctgaaaatcagtgagcgtacaccctctgcacttgccattctggagaacgccaacgtgctggcccgttatgccagtatctgccagcagaatggcattgtgcctattgtggaacctgaaatattgcctgatggagaccacgacctcaaacgttgtcagtatgttacagagaaggtcttggctgctgtgtacaaggccctgagtgaccatcatgtatacgcacctgggaccataggatgggaggatagggagcccctcatgactgagggcagaagaaattgctagaagtcagaacaggatggctgggtctccccctacctcttccagctcccacaattttcccatgatgaggtagcttctccctgggctctccttcttgcctgccctgtctcctgggatcagagggtagtacagaagccctgactcatgccttgagtacataccatacagcaaataaatggtagcaaaacattctactttgcctgtctgttttacacatcaa

SEQ ID NO: 448502 - DNA, 661 bp, Homo sapiens
  misc_feature (134)..(134): n is a, c, g, or t
atcaaaaggttcaaatcttgttgttaatttaaagcacaatggtgaaattggtcaggcaattaagggtatggatataagaaaagccaggaagtatttgaaagatgtcattttacagaaacagtgtgtaccattcngacgttacaatggtggagttggcaggtgtgcgcaggccaagcaatggggctggacacaaggttggtggcccaaaaagagtgctgaatttttgctgcacatgcttaaaaacgcagagagtaatgctgaacttaagggtttagatgtagattctctggtcattgagcatatccaagtgaacaaagcacctaagatgcgccgccggacctacagagctcatggtcggattaacccatacatgagctctccctgccacattgagatgatccttacggaaaaggaacagattgttcctaaaccagaagaggaggtggcccagaagaaaaagatatcccagaagaaactgaagaaacaaaaacttatggcacgggagtaaattcagcattaaaataaatgtaattaaaaggaaaaaaaaaatcctgggatcagagggtagtacagaagccctgactcatgccttgagtacataccatacagcaaataaatggtagcaaaacattctactttgcctgtctgttttacacatcaa

SEQ ID NO: 448503 - DNA, 1699 bp, Homo sapiens
ggacgcgtgggtcgacccacgcgtcgccacgcgtcgcggctctgcgacatccgcagcctcatttaccagagggagccagggctgcagcctcatctgtttgcggatcagaacccgagctgtgcttgtggctgcggctgctaactggctgcgcacagggagctgtcaccatgcctcactcgtacccagccctttctgctgagcagaagaaggagttgtctgacattgccctgcggattgtagccccgggcaaaggcattctggctgcggatgagtctgtaggcagcatggccaagcggctgagccaaattggggtggaaaacacagaggagaaccgccggctgtaccgccaggtcctgttcagtgctgatgaccgtgtgaaaaagtgcattggaggcgtcattttcttccatgagaccctctaccagaaagatgataatggtgttcccttcgtccgaaccatccaggataagggcatcgtcgtgggcatcaaggttgacaagggtgtggtgcctctagctgggactgatggagaaaccaccactcaagggctggatgggctctcagaacgctgtgcccaatacaagaaggatggtgctgactttgccaagtggcgctgtgtgctgaaaatcagtgagcgtacaccctctgcacttgccattctggagaacgccaacgtgctggcccgttatgccagtatctgccagcagaatggcattgtgcctattgtggaacctgaaatattgcctgatggagaccacgacctcaaacgttgtcagtatgttacagagaaggtcttggctgctgtgtacaaggccctgagtgaccatcatgtatacctggaggggaccctgctcaagcccaacatggtgaccccgggccatgcctgtcccatcaagtataccccagaggagattgccatggcaactgtcactgccctgcgtcgcactgtgcccccagctgtcccaggagtgaccttcctgtctgggggtcagagcgaagaagaggcatcattcaacctcaatgccatcaaccgctgcccccttccccgaccctgggcgcttaccttctcctatgggcgtgccctgcaagcctctgcactcaatgcctggcgagggcaacgggacaatgctggggctgccactgaggagttcatcaagcgggctgaggtgaatgggcttgcagcccagggcaagtatgaaggcagtggagaagatggtggagcagcagcacagtcactctacattgccaaccatgcctactgagtatccactccataccacagcccttggcccagccatctgcacccacttttgcttgtagtcatggccagggccaaatagctatgcagagcagagatgccttcacctggcaccaacttgtcttcctttctctcttcccttcccctctctcattgctgcacctgggaccataggatgggaggatagggagcccctcatgactgagggcagaagaaattgctagaagtcagaacaggatggctgggtctccccctacctcttccagctcccacaattttcccatgatgaggtagcttctccctgggctctccttcttgcctgccctgtctcctgggatcagagggtagtacagaagccctgactcatgccttgagtacataccatacagcaaataaatggtagcaaaacattctactttgcctgtctgttttacacatcaa

SEQ ID NO: 448504 - DNA, 1687 bp, Homo sapiens
ggacgcgtgggtcgacccacgcgtcgccacgcgtcgcggacgcgtggtcgacccacgcgtcggccagggctgcagcctcatctgtttgcggatcagaacccgagctgtgcttgtggctgcggctgctaactggctgcgcacagggagctgtcaccatgcctcactcgtacccagccctttctgctgagcagaagaaggagttgtctgacattgccctgcggattgtagccccgggcaaaggcattctggctgcggatgagtctgtaggcagcatggccaagcggctgagccaaattggggtggaaaacacagaggagaaccgccggctgtaccgccaggtcctgttcagtgctgatgaccgtgtgaaaaagtgcattggaggcgtcattttcttccatgagaccctctaccagaaagatgataatggtgttcccttcgtccgaaccatccaggataagggcatcgtcgtgggcatcaaggttgacaagggtgtggtgcctctagctgggactgatggagaaaccaccactcaagggctggatgggctctcagaacgctgtgcccaatacaagaaggatggtgctgactttgccaagtggcgctgtgtgctgaaaatcagtgagcgtacaccctctgcacttgccattctggagaacgccaacgtgctggcccgttatgccagtatctgccagcagaatggcattgtgcctattgtggaacctgaaatattgcctgatggagaccacgacctcaaacgttgtcagtatgttacagagaaggtcttggctgctgtgtacaaggccctgagtgaccatcatgtatacctggaggggaccctgctcaagcccaacatggtgaccccgggccatgcctgtcccatcaagtataccccagaggagattgccatggcaactgtcactgccctgcgtcgcactgtgcccccagctgtcccaggagtgaccttcctgtctgggggtcagagcgaagaagaggcatcattcaacctcaatgccatcaaccgctgcccccttccccgaccctgggcgcttaccttctcctatgggcgtgccctgcaagcctctgcactcaatgcctggcgagggcaacgggacaatgctggggctgccactgaggagttcatcaagcgggctgaggtgaatgggcttgcagcccagggcaagtatgaaggcagtggagaagatggtggagcagcagcacagtcactctacattgccaaccatgcctactgagtatccactccataccacagcccttggcccagccatctgcacccacttttgcttgtagtcatggccagggccaaatagctatgcagagcagagatgccttcacctggcaccaacttgtcttcctttctctcttcccttcccctctctcattgctgcacctgggaccataggatgggaggatagggagcccctcatgactgagggcagaagaaattgctagaagtcagaacaggatggctgggtctccccctacctcttccagctcccacaattttcccatgatgaggtagcttctccctgggctctccttcttgcctgccctgtctcctgggatcagagggtagtacagaagccctgactcatgccttgagtacataccatacagcaaataaatggtagcaaaacattctactttgcctgtctgttttacacatcaa

SEQ ID NO: 448505 - DNA, 1755 bp, Homo sapiens
ggacgcgtgggtcgacccacgcgtcgccacgcgtcgcggctctgcgacatccgcagcctcatttaccagagggagccagggctgcagcctcatctgtttgcggatcagaacccgagctgtgcttgtggctgcggctgctaactggctgcgcacagaagctgagagaagagggtggcaataagtacttttgcctcattctgaagccttggaaggagctgtcaccatgcctcactcgtacccagccctttctgctgagcagaagaaggagttgtctgacattgccctgcggattgtagccccgggcaaaggcattctggctgcggatgagtctgtaggcagcatggccaagcggctgagccaaattggggtggaaaacacagaggagaaccgccggctgtaccgccaggtcctgttcagtgctgatgaccgtgtgaaaaagtgcattggaggcgtcattttcttccatgagaccctctaccagaaagatgataatggtgttcccttcgtccgaaccatccaggataagggcatcgtcgtgggcatcaaggttgacaagggtgtggtgcctctagctgggactgatggagaaaccaccactcaagggctggatgggctctcagaacgctgtgcccaatacaagaaggatggtgctgactttgccaagtggcgctgtgtgctgaaaatcagtgagcgtacaccctctgcacttgccattctggagaacgccaacgtgctggcccgttatgccagtatctgccagcagaatggcattgtgcctattgtggaacctgaaatattgcctgatggagaccacgacctcaaacgttgtcagtatgttacagagaaggtcttggctgctgtgtacaaggccctgagtgaccatcatgtatacctggaggggaccctgctcaagcccaacatggtgaccccgggccatgcctgtcccatcaagtataccccagaggagattgccatggcaactgtcactgccctgcgtcgcactgtgcccccagctgtcccaggagtgaccttcctgtctgggggtcagagcgaagaagaggcatcattcaacctcaatgccatcaaccgctgcccccttccccgaccctgggcgcttaccttctcctatgggcgtgccctgcaagcctctgcactcaatgcctggcgagggcaacgggacaatgctggggctgccactgaggagttcatcaagcgggctgaggtgaatgggcttgcagcccagggcaagtatgaaggcagtggagaagatggtggagcagcagcacagtcactctacattgccaaccatgcctactgagtatccactccataccacagcccttggcccagccatctgcacccacttttgcttgtagtcatggccagggccaaatagctatgcagagcagagatgccttcacctggcaccaacttgtcttcctttctctcttcccttcccctctctcattgctgcacctgggaccataggatgggaggatagggagcccctcatgactgagggcagaagaaattgctagaagtcagaacaggatggctgggtctccccctacctcttccagctcccacaattttcccatgatgaggtagcttctccctgggctctccttcttgcctgccctgtctcctgggatcagagggtagtacagaagccctgactcatgccttgagtacataccatacagcaaataaatggtagcaaaacattctactttgcctgtctgttttacacatcaa

SEQ ID NO: 448506 - DNA, 1047 bp, Homo sapiens
  misc_feature (13)..(13): n is a, c, g, or t
ttgaggaggaaanaccatggaaatgatggtccgttatgtcagtatctggcagtagaatggcattgtgcctattgtggaacctgaaatattgcctgatggagaccacgacctcaaacgttgtcagtatgttacagagaaggtcttggctgctgtgtacaaggccctgagtgaccatcatgtatacctggaggggaccctgctcaagcccaacatggtgaccccgggccatgcctgtcccatcaagtataccccagaggagattgccatggcaactgtcactgccctgcgtcgcactgtgcccccagctgtcccaggagtgaccttcctgtctgggggtcagagcgaagaagaggcatcattcaacctcaatgccatcaaccgctgcccccttccccgaccctgggcgcttaccttctcctatgggcgtgccctgcaagcctctgcactcaatgcctggcgagggcaacgggacaatgctggggctgccactgaggagttcatcaagcgggctgaggtgaatgggcttgcagcccagggcaagtatgaaggcagtggagaagatggtggagcagcagcacagtcactctacattgccaaccatgcctactgagtatccactccataccacagcccttggcccagccatctgcacccacttttgcttgtagtcatggccagggccaaatagctatgcagagcagagatgccttcacctggcaccaacttgtcttcctttctctcttcccttcccctctctcattgctgcacctgggaccataggatgggaggatagggagcccctcatgactgagggcagaagaaattgctagaagtcagaacaggatggctgggtctccccctacctcttccagctcccacaattttcccatgatgaggtagcttctccctgggctctccttcttgcctgccctgtctcctgggatcagagggtagtacagaagccctgactcatgccttgagtacataccatacagcaaataaatggtagcaaaacattctactttgcctgtctgttttacacatcaa

SEQ ID NO: 448507 - DNA, 465 bp, Homo sapiens
ggacgcgtgggtcgacccacgcgtcgccacgcgtcgcggacgcgtggtcgacccacgcgtcggccagggctgcagcctcatctgtttgcggatcagaacccgagctgtgcttgtggctgcggctgctaactggctgcgcacagtgtcttcctttctctcttcccttcccctctctcattgctgcacctgggaccataggatgggaggatagggagcccctcatgactgagggcagaagaaattgctagaagtcagaacaggatggctgggtctccccctacctcttccagctcccacaattttcccatgatgaggtagcttctccctgggctctccttcttgcctgccctgtctcctgggatcagagggtagtacagaagccctgactcatgccttgagtacataccatacagcaaataaatggtagcaaaacattctactttgcctgtctgttttacacatcaa

SEQ ID NO: 448508 - DNA, 2665 bp, Homo sapiens
ctataaattaaggatcccagctacttaattgacttatgcttcctagttcgttgcccagccaccaccgtctctccaaaaacccgaggtctcgctaaaatcatcatggattcacttggcgccgtcagcactcgacttgggtttgatcttttcaaagagctgaagaaaacaaatgatggcaacatcttcttttcccctgtgggcatcttgactgcaattggcatggtcctcctggggacccgaggagccaccgcttcccagttggaggaggtgtttcactctgaaaaagagacgaagagctcaagaataaaggctgaagaaaaagaggtgattgagaacacagaagcagtacatcaacaattccaaaagtttttgactgaaataagcaaactcactaatgattatgaactgaacataaccaacaggctgtttggagaaaaaacatacctcttccttcaaaaatacttagattatgttgaaaaatattatcatgcatctctggaacctgttgattttgtaaatgcagccgatgaaagtcgaaagaagattaattcctgggttgaaagcaaaacaaatgaaaaaatcaaggacttgttcccagatggctctattagtagctctaccaagctggtgctggtgaacatggtttattttaaagggcaatgggacagggagtttaagaaagaaaatactaaggaagagaaattttggatgaataagagcacaagtaaatctgtacagatgatgacacagagccattcctttagcttcactttcctggaggacttgcaggccaaaattctagggattccatataaaaacaacgacctaagcatgtttgtgcttctgcccaacgacatcgatggcctggagaagataatagataaaataagtcctgagaaattggtagagtggactagtccagggcatatggaagaaagaaaggtgaatctgcacttgccccggtttgaggtggaggacggttacgatctagaggcggtcctggctgccatggggatgggcgatgccttcagtgagcacaaagccgactactcgggaatgtcgtcaggctccgggttgtacgcccagaagttcctgcacagttcctttgtggcagtaactgaggaaggcaccgaggctgcagctgccaccggcataggctttactgtcacatccgccccaggtcatgaaaatgttcactgcaatcatcccttcctgttcttcatcaggcacaatgaatccaacagcatcctcttcttcggcagattttcttctccttaagatgatcgttgccatggcattgctgcttttagcaaaaaacaactaccagtgttactcatatgattatgaaaatcgtccattcttttaaatgttgtctcacttgcatttccagtcttggccatcaaatcaatgatttaatgactccaataatgtgtgtgtttataaccatcctcgaaagtgaaatgtccttttttttgtgccatgcgtaaggtgagtcaaaccaaacctcattgataatctcccctttggtttcctttgaaagtaaattggtatcttgtagttttgtgcacacgaaaggagagaaagtttctccagtaaagagtacgaactagtaattttggggggtctctctaattctggtattttgacatgttataatacgcaagtaaaataaaacaatagtttactcagctcatgttactattccccaacagatattgtggcaaatcacacataggaaagaggatttgggaatacagtagcaaaacataaattaaaactcaaatgcccaggacaaaataaaacaatataccagatggagaggatgcccgtattttcatcttccattctaacattatccattgttagatgcataagcattttgatattgtgtaataaatgtggtatttgagaagataaatgatgtagttgatcagtaatcctcctctatcacctttttagactttgtaaggtaaatatttggactaacttttagaaaagtttccctttttttctccatttacatttttctggtttttttttttttttttgagtgaggtacgagtattaccaaatgatattttctgaagatgctttttggaaagctctgaatctatacctaatgctcttaattattggcttgtttcatttttttcctccagtttttaacaagatcacataactggcttatttttaacagctttgtcaaactacaatttacatgccgtaaaatgtacacactgtaattttataattcattgacttttagtaaattttctagcgttatgcatcgccacaatccagttttagaatatttccatgaccctaagaagtttcctcatgtctattaatattcccaatcctaggcaccactgagttgttttctgtctttataagtttttctttctacatcttatataaatggaatcataatacatgtagtattttgtgtctggcgtcttgcacttagcatggtgttcttgaggttcatctgttgtagtatgtattgatacttaggatttttttattgccgaatactattccattgcatggaaaagacctattttatttctaggttcaccagttgagggacatttggattgttcccacttcttgggctgttaggaataatgttgctctgaacatgtaaataaagatctttgtgttc

SEQ ID NO: 448509 - DNA, 630 bp, Homo sapiens
ctataaattaaggatcccagctacttaattgacttatgcttcctagttcgttgcccagccaccaccgtctctccaaaaacccgaggtctcgctaaaatcatcatggattcacttggcgccgtcagcactcgacttgggtttgatcttttcaaagagctgaagaaaacaaatgatggcaacatcttcttttcccctgtgggcatcttgactgcaattggcatggtcctcctggggacccgaggagccaccgcttcccagttggaggaggtgtttcactctgaaaaagagacgaagagctcaagaataaaggctgaagaaaaagaggtggtaagaataaaggctgaaggaaaagaggtggggagatgtgttttacaaacttcagtagagttgcattttaggtgtggggtctctggggaaaaggactgagaaaggcatgaaagcaatattgttgctttactattaagcaataataatcaccatagacaaatattgttgtaaggattatacaataataataaccccttaatattgagaagagaccttaggtgtaatggacaataccgctatgatagaactggtaaaggctaatagacagaaaagttcccatagcagagtggatgggttttggag

SEQ ID NO: 448510 - DNA, 1176 bp, Homo sapiens
ctataaattaaggatcccagctacttaattgacttatgcttcctagttcgttgcccagccaccaccgtctctccaaaaacccgaggtctcgctaaaatcatcatggattcacttggcgccgtcagcactcgacttgggtttgatcttttcaaagagctgaagaaaacaaatgatggcaacatcttcttttcccctgtgggcatcttgactgcaattggcatggtcctcctggggacccgaggagccaccgcttcccagttggaggaggtgtttcactctgaaaaagagacgaagagctcaagaataaaggctgaagaaaaagaggtgattgagaacacagaagcagtacatcaacaattccaaaagtttttgactgaaataagcaaactcactaatgattatgaactgaacataaccaacaggctgtttggagaaaaaacatacctcttccttcaaaaatacttagattatgttgaaaaatattatcatgcatctctggaacctgttgattttgtaaatgcagccgatgaaagtcgaaagaagattaattcctgggttgaaagcaaaacaaatgaaaaaatcaaggacttgttcccagatggctctattagtagctctaccaagctggtgctggtgaacatggtttattttaaagggcaatgggacagggagtttaagaaagaaaatactaaggaagagaaattttggatgaataagagcacaagtaaatctgtacagatgatgacacagagccattcctttagcttcactttcctggaggacttgcaggccaaaattctagggattccatataaaaacaacgacctaagcatgtttgtgcttctgcccaacgacatcgatggcctggagaaggtaaacgcttacacctccttattctttctttcatttcctaaggctttttgtctcagggcttctgagtaggagctggtggccagcagtgtcaaatagaaagtgtttctcactctccagcagctacagatggatgtctactggggagcattaaatagtatgggtcaggtttattgagaacaactaatcctagaatgtttgggatgaactaaaatgaacatttaagattatatgggagtcctaacgatcacccaccattctgagaaatggttggtatctatggacccctttcctggaaaaaagaaa

SEQ ID NO: 448511 - DNA, 628 bp, Homo sapiens
atatctttagttttcccacgtgtggagataaaaaagtgggagataattctataacagctttaacacacacacacacacacacacacacacacacacacacgaaaaatcagaggtaaacgcagacctttttctgattttgcaaggagataatgtcacctcatataccaccgaggtttctttcagaagcgtccactctcccctgactgattctgtgtgaggttttctcttctctgagcaccacagtaatattttctatctcttccaggtgtttcactctgaaaaagagacgaagagctcaagaataaaggctgaagaaaaagaggtggtaagaataaaggctgaaggaaaagaggtggggagatgtgttttacaaacttcagtagagttgcattttaggtgtggggtctctggggaaaaggactgagaaaggcatgaaagcaatattgttgctttactattaagcaataataatcaccatagacaaatattgttgtaaggattatacaataataataaccccttaatattgagaagagaccttaggtgtaatggacaataccgctatgatagaactggtaaaggctaatagacagaaaagttcccatagcagagtggatgggttttggag

SEQ ID NO: 448512 - DNA, 3122 bp, Homo sapiens
ctataaattaaggatcccagctacttaattgacttatgcttcctagttcgttgcccagccaccaccgtctctccaaaaacccgaggtctcgctaaaatcatcatggattcacttggcgccgtcagcactcgacttgggtttgatcttttcaaagagctgaagaaaacaaatgatggcaacatcttcttttcccctgtgggcatcttgactgcaattggcatggtcctcctggggacccgaggagccaccgcttcccagttggaggaggtgtttcactctgaaaaagagacgaagagctcaagaataaaggctgaagaaaaagaggtgattgagaacacagaagcagtacatcaacaattccaaaagtttttgactgaaataagcaaactcactaatgattatgaactgaacataaccaacaggctgtttggagaaaaaacatacctcttccttcaaaaatacttagattatgttgaaaaatattatcatgcatctctggaacctgttgattttgtaaatgcagccgatgaaagtcgaaagaagattaattcctgggttgaaagcaaaacaaatgaaaaaatcaaggacttgttcccagatggctctattagtagctctaccaagctggtgctggtgaacatggtttattttaaagggcaatgggacagggagtttaagaaagaaaatactaaggaagagaaattttggatgaataagagcacaagtaaatctgtacagatgatgacacagagccattcctttagcttcactttcctggaggacttgcaggccaaaattctagggattccatataaaaacaacgacctaagcatgtttgtgcttctgcccaacgacatcgatggcctggagaagataatagataaaataagtcctgagaaattggtagagtggactagtccagggcatatggaagaaagaaaggtgaatctgcacttgccccggtttgaggtggaggacggttacgatctagaggcggtcctggctgccatggggatgggcgatgccttcagtgagcacaaagccgactactcgggaatgtcgtcaggctccgggttgtacgcccagaagttcctgcacagttcctttgtggcagtaactgaggaaggcaccgaggctgcagctgccaccggcataggctttactgtcacatccgccccaggtcatgaaaatgttcactgcaatcatcccttcctgttcttcatcaggcacaatgaatccaacagcatcctcttcttcggcagattttcttctccttaagatgatcgttgccatggcattgctgcttttagcaaaaaacaactaccagtgttactcatatgattatgaaaatcgtccattcttttaaatgttgtctcacttgcatttccagtcttggccatcaaatcaatgatttaatgactccaataatgtgtgtgtttataaccatcctcgaaagtgaaatgtccttttttttgtgccatgcgtaaggtgagtcaaaccaaacctcattgataatctcccctttggtttcctttgaaagtaaattggtatcttgtagttttgtgcacacgaaaggagagaaagtttctccagtaaagagtacgaactagtaattttggggggtctctctaattctggtattttgacatgttataatacgcaagtaaaataaaacaatagtttactcagctcatgttactattccccaacagatattgtggcaaatcacacataggaaagaggatttgggaatacagtagcaaaacataaattaaaactcaaatgcccaggacaaaataaaacaatataccagatggagaggatgcccgtattttcatcttccattctaacattatccattgttagatgcataagcattttgatattgtgtaataaatgtggtatttgagaagataaatgatgtagttgatcagtaatcctcctctatcacctttttagactttgtaaggtaaatatttggactaacttttagaaaagtttccctttttttctccatttacatttttctggtttttttttttttttttgagtgaggtacgagtattaccaaatgatattttctgaagatgctttttggaaagctctgaatctatacctaatgctcttaattattggcttgtttcatttttttcctccagtttttaacaagatcacataactggcttatttttaacagctttgtcaaactacaatttacatgccgtaaaatgtacacactgtaattttataattcattgacttttagtaaattttctagcgttatgcatcgccacaatccagttttagaatatttccatgaccctaagaagtttcctcatgtctattaatattcccaatcctaggcaccactgagttgttttctgtctttataagtttttctttctacatcttatataaatggaatcataatacatgtagtattttgtgtctggcgtcttgcacttagcatggtgttcttgaggttcatctgttgtagtatgtattgatacttaggatttttttattgccgaatactattccattgcatggaaaagacctattttatttctaggttcaccagttgagggacatttggattgttcccacttcttgggctgttaggaataatgttgctctgaacatgtaaataaagatctttgtgttcacatatgttttcatttctgttggggagattcctaggctagaaattgctgggccatatgaaaaatcaatagttagctttgtaagaaacagtcaaactgttttccaacgtgacattttatattcccaccaggaatgtttaaaactagtgtcttcaaatcctcaccaacatccaggattgtgtctttatgattatagccatttttgtaggtacaaagtggcatctcatggtggttttaatttgcatttccataatatctaattaggttgagctttttttatgtgcttattggccatttgtttgactttgtttggtgaaatgtatacaaatcatttgctcatttttaatttgggttgtctgtcttgtcttctcattttattgagttaaatgagttcttaataatctctggcttacaagtccttaatttatcaaatatatgatacgtggacatttcctcata

SEQ ID NO: 448513 - DNA, 2878 bp, Homo sapiens
ctataaattaaggatcccagctacttaattgacttatgcttcctagttcgttgcccagccaccaccgtctctccaaaaacccgaggtctcgctaaaatcatcatggattcacttggcgccgtcagcactcgacttgggtttgatcttttcaaagagctgaagaaaacaaatgatggcaacatcttcttttcccctgtgggcatcttgactgcaattggcatggtcctcctggggacccgaggagccaccgcttcccagttggaggaggtgtttcactctgaaaaagagacgaagagctcaagaataaaggctgaagaaaaagaggtgattgagaacacagaagcagtacatcaacaattccaaaagtttttgactgaaataagcaaactcactaatgattatgaactgaacataaccaacaggctgtttggagaaaaaacatacctcttccttcaaaaatacttagattatgttgaaaaatattatcatgcatctctggaacctgttgattttgtaaatgcagccgatgaaagtcgaaagaagattaattcctgggttgaaagcaaaacaaatgatgtggaaactgaggcacagagagtttaaataacttgcccaagattcctcagctgataagaggcaaactggatgctaacagaggcatctgaccccagagtctggactcttaaccatgaaccttaatttatccactgggataaataggcgatgggcaaaatgagaacctccccgtcgattctgccagcaaaccctttgtcagcaaggccctcagaaaaaatcaaggacttgttcccagatggctctattagtagctctaccaagctggtgctggtgaacatggtttattttaaagggcaatgggacagggagtttaagaaagaaaatactaaggaagagaaattttggatgaataagagcacaagtaaatctgtacagatgatgacacagagccattcctttagcttcactttcctggaggacttgcaggccaaaattctagggattccatataaaaacaacgacctaagcatgtttgtgcttctgcccaacgacatcgatggcctggagaagataatagataaaataagtcctgagaaattggtagagtggactagtccagggcatatggaagaaagaaaggtgaatctgcacttgccccggtttgaggtggaggacggttacgatctagaggcggtcctggctgccatggggatgggcgatgccttcagtgagcacaaagccgactactcgggaatgtcgtcaggctccgggttgtacgcccagaagttcctgcacagttcctttgtggcagtaactgaggaaggcaccgaggctgcagctgccaccggcataggctttactgtcacatccgccccaggtcatgaaaatgttcactgcaatcatcccttcctgttcttcatcaggcacaatgaatccaacagcatcctcttcttcggcagattttcttctccttaagatgatcgttgccatggcattgctgcttttagcaaaaaacaactaccagtgttactcatatgattatgaaaatcgtccattcttttaaatgttgtctcacttgcatttccagtcttggccatcaaatcaatgatttaatgactccaataatgtgtgtgtttataaccatcctcgaaagtgaaatgtccttttttttgtgccatgcgtaaggtgagtcaaaccaaacctcattgataatctcccctttggtttcctttgaaagtaaattggtatcttgtagttttgtgcacacgaaaggagagaaagtttctccagtaaagagtacgaactagtaattttggggggtctctctaattctggtattttgacatgttataatacgcaagtaaaataaaacaatagtttactcagctcatgttactattccccaacagatattgtggcaaatcacacataggaaagaggatttgggaatacagtagcaaaacataaattaaaactcaaatgcccaggacaaaataaaacaatataccagatggagaggatgcccgtattttcatcttccattctaacattatccattgttagatgcataagcattttgatattgtgtaataaatgtggtatttgagaagataaatgatgtagttgatcagtaatcctcctctatcacctttttagactttgtaaggtaaatatttggactaacttttagaaaagtttccctttttttctccatttacatttttctggtttttttttttttttttgagtgaggtacgagtattaccaaatgatattttctgaagatgctttttggaaagctctgaatctatacctaatgctcttaattattggcttgtttcatttttttcctccagtttttaacaagatcacataactggcttatttttaacagctttgtcaaactacaatttacatgccgtaaaatgtacacactgtaattttataattcattgacttttagtaaattttctagcgttatgcatcgccacaatccagttttagaatatttccatgaccctaagaagtttcctcatgtctattaatattcccaatcctaggcaccactgagttgttttctgtctttataagtttttctttctacatcttatataaatggaatcataatacatgtagtattttgtgtctggcgtcttgcacttagcatggtgttcttgaggttcatctgttgtagtatgtattgatacttaggatttttttattgccgaatactattccattgcatggaaaagacctattttatttctaggttcaccagttgagggacatttggattgttcccacttcttgggctgttaggaataatgttgctctgaacatgtaaataaagatctttgtgttc

SEQ ID NO: 448514 - DNA, 530 bp, Homo sapiens
ttatgtcctttgatattgtgtgctctgttaatttgttgcagagcacaagtaaatctgtacagatgatgacacagagccattcctttagcttcactttcctggaggacttgcaggccaaaattctagggattccatataaaaacaacgacctaagcatgtttgtgcttctgcccaacgacatcgatggcctggagaaggtaaacgcttacacctccttattctttctttcatttcctaaggctttttgtctcagggcttctgagtaggagctggtggccagcagtgtcaaatagaaagtgtttctcactctccagcagctacagatggatgtctactggggagcattaaatagtatgggtcaggtttattgagaacaactaatcctagaatgtttgggatgaactaaaatgaacatttaagattatatgggagtcctaacgatcacccaccattctgagaaatggttggtatctatggacccctttcctggaaaaaagaaatcacatatgcatatatacaaccagttctgc

SEQ ID NO: 448515 - DNA, 867 bp, Homo sapiens
gtgcggtggcactcacggaatctcgggtcttctgacgtgccgggcgggaagatgtcatcattgccaagaagagcgaaagtacaggtccaggatgtggtactgaaagatgaattttcttcattctctgagttatcatctgcctctgaagaagatgacaaggaagatagtgcctgggagccccaaaagaaagttcccagaagccgtaaacagccccctcccaaggaatccaaaccaaagaggatgcctcgggtgaagaagaatgccccacagatcagtgatggctcagaagtcgttgttgttaaggaggagctgaatagctctgtggctattgctgatactgctttagaagacagaaaaaataaattggatactgtacagactctgaaaacagccaagacaaaacagaaatgtgcagcgcagccacatacagttcgaaggactaaaaagctgaaagttgaagaagaaaccagcaaagccagcaacttagagggtgagagtaatagttcagagacaccatccacaagcactgtgtggggaggtacatgcaagaaggaagagaatgacgatgactttacatttggtcagtccgctttaaagaaaatcaagactgagacatatcctcaggggcagcctgtcaagtttccagcaaatgccaatagtactaaagaggaggtggaaatgaattgggacatggtacaggttttatctgagagaactaatattgaaccttgggtttgtgccaacatcattcgtctctttaatgatgataacacaattcccttcattatacgttatagaaaagagctcattaataaccttgatgctgattccttgagagaagttcagcaaaccctagaagagctacgg

SEQ ID NO: 448516 - DNA, 1370 bp, Homo sapiens
gtacccctttttattttgcttaggtagatcaaattctaagttgatcttttctagcagcagggtcagagtctagtgatcgtttttaaaatggcttagatgctacctttcttttctgagaactcagtgtgatataatccttataagatattgacagctaattttatggattatcctaccgggacagtggaacctaagtagtttgaagacgagaaattgttttgattcagaagcaatgggttcactagtgaaaggaaagatcccacgatcgtaagtggtaaatgtttatatttgttgaataactctctgaaaaaaggaaataaagtagattagccttggtaagaggtggcttaagagtggttttatgatctaagttttatttgaaaaatgtgtgaaacttgtttaaggtaaatgtgagaattaataaaggaattgagaagaaagatatttgatcgttttttgaataacatttacctaattaagaagttaactacttttctgaggcatcttttttatccctctccgttttcctcctcccaaaagaagttgttcttgattttaaaagtttgataaattaacaaggttgaaatttgaatatgatatacattgaattaagatttgttcagggctttcttaattcagttctcaagtatgaatttctcaggtctgaattttttaggtagaaaattctcaagtatgaatttcttttctagcaattgcagagcctgtttttgctgtggtcaaagctgactgatagactgtggtttaagtcaacttattcaaaaatgtcttcaaccctgctggtcgagacaagaaatctttatggggtagttggagctgaaagcaggttaggcacctattaaaacatcacagaacaggttagattgtggtttgaagaactggatattccccaatgttttaactgagtttatgtgcctaagtcttcaaaatggggtttatagtatcaagtgaggctgtttggttcttctgaaaacacactcattttctgacacatggctagactttatgccaggtacatgctatttttgaaaagctcttttttaagaggtaactgtttattaaaacaatctgtttcaccaaatatgttagccctgtaaaattgacatttacaaaagtttgaagaaaacaaatttgggaaagttaataattcgcctttctatcttcaaggattcaaattgaccgttttttctcctttttttgtcttttaacttactgtaattatgccccaatagttcgggtgcagtggtcacgcctataatcccagcactttgagaggctgaggtgggaggattgtttgagtccaggagtttgagaccagcctgggcctcatagcaagacccctgtcttaaaaa

SEQ ID NO: 448517 - DNA, 3794 bp, Homo sapiens
gttcgctggctgttccgagaatcagtccgggtcacgttggtgcctctcctttcctgttctgattggttgcttacgtgagcgtgactactttcttgcctcatgattggctgaaatcagtagcgtcatcggcggccgggagggcggagggacgagggaagtcggcgagagggagactgggttgggggaggggttcaggcctgttccccgcggctgcggcagcaccagggccggccgccaccgcctctagaacgcggaggaggtgggtcctgggaagcgggatgtccatcgctccagcttggtggtgaatgctgaggagagtcactgttgctgcagtctgtgccacccggaggaagttgtgtgaggccgggcgggagctcgcggcgctctggggaatcgaaacgcggggtcggtgcgaagactctgctgctgccagaccctttcctattctggccatgcctggaaggaacaaggcgaagtctacctgcagctgccctgacctgcagcccaatggacaggatctgggcgagaacagccgggttgcccgtctaggagcggatgaatctgaggaagagggacggagggggtctctcagtaatgctggggaccctgagatcgtcaagtctcccagcgaccccaagcaataccgatacatcaaattacagaatggcttgcaggcacttctgatttcagacctaagtaatatggaaggtaaaacaggaaatacaacagatgatgaagaagaagaggaggtggaggaagaagaagaagatgatgatgaagattctggagctgaaatagaagatgacgatgaagagggttttgatgatgaagatgagtttgatgatgaacatgatgatgatcttgatactgaggataatgaattggaagaattagaagagagagcagaagctagaaaaaaaactactgaaaaacagtctgcagcggctctttgtgttggagttgggagtttcgctgatccagatgacctgccggggctggcacactttttggagcacatggtattcatgggtagtttgaaatatccagatgagaatggatttgatgccttcctgaagaagcatgggggtagtgataatgcctcaactgattgtgaacgcactgtctttcagtttgatgtccagaggaagtacttcaaggaagctcttgatagatgggcgcagttcttcatccacccactaatgatcagagatgcaattgaccgtgaagttgaagctgttgatagtgaatatcaacttgcaaggccttctgatgcaaacagaaaggaaatgttgtttggaagccttgctagacctggccatcctatgggaaaatttttttggggaaatgctgagacgctcaagcatgagccaagaaagaataatattgatacacatgctagattgagagaattctggatgcgttactactcttctcattacatgactttagtggttcaatccaaagaaacactggatactttggaaaagtgggtgactgaaatcttctctcagataccaaacaatgggttacccagaccaaactttggccatttaacggatccatttgacacaccagcatttaacaaactttatagagttgttccaatcagaaaaattcatgctctgaccatcacatgggcacttcctcctcaacagcaacattacagggtgaagccacttcattatatatcctggctggttggacatgaaggcaaaggcagcattctttctttccttaggaaaaaatgctgggctcttgcactgtttggtggaaatggtgagacaggatttgagcaaaattctacttattcagtgttcagcatttctattacattgactgatgagggttatgaacatttttatgaggttgcttacactgtctttcagtatttaaaaatgctgcagaagctaggcccagaaaaaagaatttttgaagagattcggaaaattgaggataatgaatttcattaccaagaacagacagatccagttgagtatgtggaaaacatgtgtgagaacatgcagctgtacccattgcaggacattctcactggagatcagcttctttttgaatacaagccagaagtcattggtgaagccttgaatcagctagttcctcaaaaagcaaatcttgttttactgtctggtgctaatgagggaaaatgtgacctcaaggagaaatggtttggaactcaatatagtatagaagatattgaaaactcttgggctgaactgtggaatagtaatttcgaattaaatccagatcttcatcttccagctgaaaacaagtacatagccacggactttacgttgaaggctttcgattgcccggaaacagaatacccagttaaaattgtgaatactccacaaggttgcctgtggtataagaaagacaacaaattcaaaatccccaaagcatatatacgtttccatctaatttcaccgttgatacagaaatctgcagcaaatgtggtcctctttgatatctttgtcaatatccttacgcataaccttgcggaaccagcttatgaagcagatgtggcacagctggagtataaactggtagctggagaacatggtttaattattcgagtgaaaggatttaaccacaaactacctctactgtttcagctcattattgactacttagctgagttcaattccacaccagctgtctttacaatgataactgagcagttgaagaagacctactttaacatcctcatcaagcctgagactttggccaaagatgtacggcttttaatcttggaatatgcccgttggtctatgattgacaagtaccaggctttgatggacggcctttcccttgagtctctgctgagcttcgtcaaagaattcaaatcccagctctttgtggagggcctggtacaagggaatgtcacaagcacagaatctatggatttcctgaaatatgttgttgacaaactaaacttcaagcctctggagcaggagatgcctgtgcagttccaggtggtagagctgcccagtggccaccatctatgcaaagtgaaagctctgaacaagggtgatgccaactctgaagtcactgtgtactaccagtcaggtaccaggagtctaagagaatatacgcttatggagctgcttgtgatgcacatggaagaaccttgttttgacttccttcgaaccaagcagacccttgggtaccatgtctaccctacctgtaggaacacatccgggattctaggattttctgtcactgtggggactcaggcaaccaaatacaattctgaagttgttgataagaagatagaagagtttctttctagctttgaggagaagattgagaacctcactgaagaggcattcaacacccaggtcacagctctcatcaagctgaaggagtgtgaggatacccaccttggggaggaggtggataggaactggaatgaagtggttacacagcagtacctctttgaccgccttgcccacgagattgaagcactgaagtcattctcaaaatcagacctggtcaactggttcaaggcccatagagggccaggaagtaaaatgctcagcgttcatgttgttggatatgggaagtatgaactggaagaggatggtaccccttctagtgaggattcaaattcttcttgtgaagtgatgcagctgacctacctgccaacctctcctctgctggcagattgtatcatccccattactgatatcagggctttcacaacaacactcaaccttctcccctaccataaaatagtcaaataaataaactgcagtcacgttggcctgaagcaatgt

SEQ ID NO: 448518 - DNA, 923 bp, Homo sapiens
gcctgttgggacactctcttatcctccaccgctacaacgaatctatggatttcctgaaatatgttgttgacaaactaaacttcaagcctctggagcaggagatgcctgtgcagttccaggtggtagagctgcccagtggccaccatctatgcaaagtgaaagctctgaacaagggtgatgccaactctgaagtcactgtgtactaccagtcaggtaccaggagtctaagagaatatacgcttatggagctgcttgtgatgcacatggaagaaccttgttttgacttccttcgaaccaagcagacccttgggtaccatgtctaccctacctgtaggaacacatccgggattctaggattttctgtcactgtggggactcaggcaaccaaatacaattctgaagttgttgataagaagatagaagagtttctttctagctttgaggagaagattgagaacctcactgaagaggcattcaacacccaggtcacagctctcatcaagctgaaggagtgtgaggatacccaccttggggaggaggtggataggaactggaatgaagtggttacacagcagtacctctttgaccgccttgcccacgagattgaagcactgaagtcattctcaaaatcagacctggtcaactggttcaaggcccatagagggccaggaagtaaaatgctcagcgttcatgttgttggatatgggaagtatgaactggaagaggatggtaccccttctagtgaggattcaaattcttcttgtgaagtgatgcagctgacctacctgccaacctctcctctgctggcagattgtatcatccccattactgatatcagggctttcacaacaacactcaaccttctcccctaccataaaatagtcaaataaataaactgcagtcacgttggcctgaagcaatgt

SEQ ID NO: 448519 - DNA, 707 bp, Homo sapiens
  misc_feature (86)..(86): n is a, c, g, or t
  misc_feature (93)..(93): n is a, c, g, or t
tcccttttcttcagcaggtccaggtttaggaatttcccttgggcctcttgattccatggaaacctgtttgacttcatcgaccaagnagacctnggtaccatgtctaccctacctgtaggaacacatccgggattctaggattttctgtcactgtggggactcaggcaaccaaatacaattctgaagttgttgataagaagatagaagagtttctttctagctttgaggagaagattgagaacctcactgaagaggcattcaacacccaggtcacagctctcatcaagctgaaggagtgtgaggatacccaccttggggaggaggtggataggaactggaatgaagtggttacacagcagtacctctttgaccgccttgcccacgagattgaagcactgaagtcattctcaaaatcagacctggtcaactggttcaaggcccatagagggccaggaagtaaaatgctcagcgttcatgttgttggatatgggaagtatgaactggaagaggatggtaccccttctagtgaggattcaaattcttcttgtgaagtgatgcagctgacctacctgccaacctctcctctgctggcagattgtatcatccccattactgatatcagggctttcacaacaacactcaaccttctcccctaccataaaatagtcaaataaataaactgcagtcacgttggcctgaagcaatgt

SEQ ID NO: 448520 - DNA, 1227 bp, Homo sapiens
  misc_feature (86)..(86): n is a, c, g, or t
  misc_feature (93)..(93): n is a, c, g, or t
tcccttttcttcagcaggtccaggtttaggaatttcccttgggcctcttgattccatggaaacctgtttgacttcatcgaccaagnagacctnggtaccatgtctaccctacctgtaggaacacatccgggattctaggattttctgtcactgtggggactcaggcaaccaaatacaattctgaagttgttgataagaagatagaagagtttctttctagctttgaggagaagattgagaacctcactgaagaggcattcaacacccaggtcacagctctcatcaagctgaaggagtgtgaggatacccaccttggggaggaggtggataggaactggaatgaagtggttacacagcagtacctctttgaccgccttgcccacgagattgaagcactgaagtcattctcaaaatcagacctggtcaactggttcaaggcccatagagggccaggaagtaaaatgctcagcgttcatgttgttggatatgggaagtatgaactggaagaggatggtaccccttctagtgaggattcaaattcttcttgtgaagtgatgcagctgacctacctgccaacctctcctctgctggcagattgtatcatccccattactgatatcagggctttcacaacaacactcaaccttctcccctaccataaaatagtcaaataaataaactgcagtcacgttggcctgaagcaatgtgtattttaaaatgtgtttgtttgtattttatggagttagttatactactgccttagggcttccattgaagttttgcactggcatcatagcatttgatttactttttatcctttgttgagactaataaacccagggttactgtaggagctggcaaaggaaaattagcagaatgggccaagcgagaccagaaagcctgcagcagcactttgagaagccctggcctgtgtcctctcagactgagaatctacttcttgaaaggccttacgtaaccagtatattgaataactaactaaatgctaggtactaatacctgtttttttaatgtatttttaaataaaaaagatgatagatagatagatagatatagttctgtatttcccttcagaatgagccatctgctgctgtggcattcattttattctatctatctatctatttttgttcactgtggggtggggatctataaatacacactcttcccaaaccctctaaggcaataaaacatttttggataaaatgt

SEQ ID NO: 448521 - DNA, 183 bp, Homo sapiens
gacaaccttctcttttcagtcaggtaccaggagtctaagagaatatacgcttatggagctgcttgtgatgcacatggaagaaccttgttttgacttccttcgaaccaagcagacccttggcttctcccctaccataaaatagtcaaataaataaactgcagtcacgttggcctgaagcaatgt

SEQ ID NO: 448522 - DNA, 922 bp, Homo sapiens
taatctgatactgttttcccatcttacattgtgataaaaatggtctctctttagaaacacatcctttatagaactttgaccaaacatttctttattctgaagattcatttctaataacaaaactttgagtgttttttttctgccctctgtacagagatgtacggcttttaatcttggaatatgcccgttggtctatgattgacaagtaccaggctttgatggacggcctttcccttgagtctctgctgagcttcgtcaaagaattcaaatcccagctctttgtggagggcctggtacaagggaatgtcacaagcacagtgagtgtgagatgctctgtaggccaggtctgaatgcagttgtgaactctggaattgccatagttctttcctaaaggggaagctgtagttttggcaggccagcattatcatattctgtttagaagggaacctgacccctctgatgctgggcagctttcttcttaagatgaagactgctgggctgggaatgatggctcacgcctgtaatttcagcattttgggaggccaaggcagaagcattacttaaggtcaggatttcgagaccagtccaggcaacacagtgagaactcatccctacaaaaaataaaaaattagccaggcatggtggcacatgcctatagtctccgctacttgggaggctgaggtggaaggatcatttgagcccaggagtttggggctacagcatgctatgattgcaccacagtattccagcctgggcaacagagtaagaccctgtctcaaaagaaaagaaataaagaaagagagagagaaaaatagattgctggtaatagactaggattttgagtgaaatgggtttggcgtatctatactgtttgttacctttgttgaagattgtatgtggaaaccatgaacagtttagtata

SEQ ID NO: 448523 - DNA, 892 bp, Homo sapiens
gttcgctggctgttccgagaatcagtccgggtcacgttggtgcctctcctttcctgttctgattggttgcttacgtgagcgtgactactttcttgcctcatgattggctgaaatcagtagcgtcatcggcggccgggagggcggagggacgagggaagtcggcgagagggagactgggttgggggaggggttcaggcctgttccccgcggctgcggcagcaccagggccggccgccaccgcctctagaacgcggaggaggtgggtcctgggaagcgggatgtccatcgctccagcttggtggtgaatgctgaggagagtcactgttgctgcagtctgtgccacccggaggaagttgtgtgaggccgggcgggagctcgcggcgctctggggaatcgaaacgcggggtcggtgcgaagactctgctgctgccagaccctttcctattctggccatgcctggaaggaacaaggcgaagtctacctgcagctgccctgacctgcagcccaatggacaggatctgggcgagaacagccgggttgcccgtctaggagcggatgaatctgaggaagagggacggagggggtctctcagtaatgctggggaccctgagatcgtcaagtctcccagcgaccccaagcaataccgagagatgatctcactgtgtcacccaggctgtactgcagtggtgccatcatagctcactgcagcatcgaacttctaggctcaagtgatcctcctgcctgtgccgcccaaagtgttggaattacaggcatgagccactgcttctagatggatgtcttttattggcgggggggaaagccctatatacgtatatatgtattttttactaattctaaaactgctaacccaagcaggacaaaatttaattga

SEQ ID NO: 448524 - DNA, 4255 bp, Homo sapiens
gttcgctggctgttccgagaatcagtccgggtcacgttggtgcctctcctttcctgttctgattggttgcttacgtgagcgtgactactttcttgcctcatgattggctgaaatcagtagcgtcatcggcggccgggagggcggagggacgagggaagtcggcgagagggagactgggttgggggaggggttcaggcctgttccccgcggctgcggcagcaccagggccggccgccaccgcctctagaacgcggaggaggtgggtcctgggaagcgggatgtccatcgctccagcttggtggtgaatgctgaggagagtcactgttgctgcagtctgtgccacccggaggaagttgtgtgaggccgggcgggagctcgcggcgctctggggaatcgaaacgcggggtcggtgcgaagactctgctgctgccagaccctttcctattctggccatgcctggaaggaacaaggcgaagtctacctgcagctgccctgacctgcagcccaatggacaggatctgggcgagaacagccgggttgcccgtctaggagcggatgaatctgaggaagagggacggagggggtctctcagtaatgctggggaccctgagatcgtcaagtctcccagcgaccccaagcaataccgatacatcaaattacagaatggcttgcaggcacttctgatttcagacctaagtaatatggaaggtaaaacaggaaatacaacagatgatgaagaagaagaggaggtggaggaagaagaagaagatgatgatgaagattctggagctgaaatagaagatgacgatgaagagggttttgatgatgaagatgagtttgatgatgaacatgatgatgatcttgatactgaggataatgaattggaagaattagaagagagagcagaagctagaaaaaaaactactgaaaaacagtctgcagcggctctttgtgttggagttgggagtttcgctgatccagatgacctgccggggctggcacactttttggagcacatggtattcatgggtagtttgaaatatccagatgagaatggatttgatgccttcctgaagaagcatgggggtagtgataatgcctcaactgattgtgaacgcactgtctttcagtttgatgtccagaggaagtacttcaaggaagctcttgatagatgggcgcagttcttcatccacccactaatgatcagagatgcaattgaccgtgaagttgaagctgttgatagtgaatatcaacttgcaaggccttctgatgcaaacagaaaggaaatgttgtttggaagccttgctagacctggccatcctatgggaaaatttttttggggaaatgctgagacgctcaagcatgagccaagaaagaataatattgatacacatgctagattgagagaattctggatgcgttactactcttctcattacatgactttagtggttcaatccaaagaaacactggatactttggaaaagtgggtgactgaaatcttctctcagataccaaacaatgggttacccagaccaaactttggccatttaacggatccatttgacacaccagcatttaacaaactttatagagttgttccaatcagaaaaattcatgctctgaccatcacatgggcacttcctcctcaacagcaacattacagggtgaagccacttcattatatatcctggctggttggacatgaaggcaaaggcagcattctttctttccttaggaaaaaatgctgggctcttgcactgtttggtggaaatggtgagacaggatttgagcaaaattctacttattcagtgttcagcatttctattacattgactgatgagggttatgaacatttttatgaggttgcttacactgtctttcagtatttaaaaatgctgcagaagctaggcccagaaaaaaggtaataaacacttcctggaatgaggccaggagccagtcctggtatatttgaggcttcaggctgccggtagacatgctttagtcttgccttgatggtttttcaggcattttctgctctatttcctttattgactccatatccttatccctctacatgtgattgtatactaaggctttacacatatgtgggcagtccctttattttcacgcttctcttttattgttgatgcttctattgagaattttttaaacttttattctaggttcaggggtatatgtgcaggtttgttatgtaggtaaacttgtgtcacggtggtttgttgtacagattattttgtcacccaggtactaagcctactacccaatagttaccttttctgatcctctccctcctcccgcccttctccctcaagtaggcagaaattttaatgtatcttctaattatagttttctccttcacagaatttttgaagagattcggaaaattgaggataatgaatttcattaccaagaacagacagatccagttgagtatgtggaaaacatgtgtgagaacatgcagctgtacccattgcaggacattctcactggagatcagcttctttttgaatacaagccagaagtcattggtgaagccttgaatcagctagttcctcaaaaagcaaatcttgttttactgtctggtgctaatgagggaaaatgtgacctcaaggagaaatggtttggaactcaatatagtatagaagatattgaaaactcttgggctgaactgtggaatagtaatttcgaattaaatccagatcttcatcttccagctgaaaacaagtacatagccacggactttacgttgaaggctttcgattgcccggaaacagaatacccagttaaaattgtgaatactccacaaggttgcctgtggtataagaaagacaacaaattcaaaatccccaaagcatatatacgtttccatctaatttcaccgttgatacagaaatctgcagcaaatgtggtcctctttgatatctttgtcaatatccttacgcataaccttgcggaaccagcttatgaagcagatgtggcacagctggagtataaactggtagctggagaacatggtttaattattcgagtgaaaggatttaaccacaaactacctctactgtttcagctcattattgactacttagctgagttcaattccacaccagctgtctttacaatgataactgagcagttgaagaagacctactttaacatcctcatcaagcctgagactttggccaaagatgtacggcttttaatcttggaatatgcccgttggtctatgattgacaagtaccaggctttgatggacggcctttcccttgagtctctgctgagcttcgtcaaagaattcaaatcccagctctttgtggagggcctggtacaagggaatgtcacaagcacagaatctatggatttcctgaaatatgttgttgacaaactaaacttcaagcctctggagcaggagatgcctgtgcagttccaggtggtagagctgcccagtggccaccatctatgcaaagtgaaagctctgaacaagggtgatgccaactctgaagtcactgtgtactaccagtcaggtaccaggagtctaagagaatatacgcttatggagctgcttgtgatgcacatggaagaaccttgttttgacttccttcgaaccaagcagacccttgggtaccatgtctaccctacctgtaggaacacatccgggattctaggattttctgtcactgtggggactcaggcaaccaaatacaattctgaagttgttgataagaagatagaagagtttctttctagctttgaggagaagattgagaacctcactgaagaggcattcaacacccaggtcacagctctcatcaagctgaaggagtgtgaggatacccaccttggggaggaggtggataggaactggaatgaagtggttacacagcagtacctctttgaccgccttgcccacgagattgaagcactgaagtcattctcaaaatcagacctggtcaactggttcaaggcccatagagggccaggaagtaaaatgctcagcgttcatgttgttggatatgggaagtatgaactggaagaggatggtaccccttctagtgaggattcaaattcttcttgtgaagtgatgcagctgacctacctgccaacctctcctctgctggcagattgtatcatccccattactgatatcagggctttcacaacaacactcaaccttctcccctaccataaaatagtcaaataaataaactgcagtcacgttggcctgaagcaatgt

SEQ ID NO: 448525 - DNA, 3044 bp, Homo sapiens
agcggatttgagcaaaattctacttattcagtgttcagcatttctattacattgacgatgaagagggttttgatgatgaagatgagtttgatgatgaacatgatgatgatcttgatactgaggataatgaattggaagaattagaagagagagcagaagctagaaaaaaaactactgaaaaacagtctgcagcggctctttgtgttggagttgggagtttcgctgatccagatgacctgccggggctggcacactttttggagcacatggtattcatgggtagtttgaaatatccagatgagaatggatttgatgccttcctgaagaagcatgggggtagtgataatgcctcaactgattgtgaacgcactgtctttcagtttgatgtccagaggaagtacttcaaggaagctcttgatagatgggcgcagttcttcatccacccactaatgatcagagatgcaattgaccgtgaagttgaagctgttgatagtgaatatcaacttgcaaggccttctgatgcaaacagaaaggaaatgttgtttggaagccttgctagacctggccatcctatgggaaaatttttttggggaaatgctgagacgctcaagcatgagccaagaaagaataatattgatacacatgctagattgagagaattctggatgcgttactactcttctcattacatgactttagtggttcaatccaaagaaacactggatactttggaaaagtgggtgactgaaatcttctctcagataccaaacaatgggttacccagaccaaactttggccatttaacggatccatttgacacaccagcatttaacaaactttatagagttgttccaatcagaaaaattcatgctctgaccatcacatgggcacttcctcctcaacagcaacattacagggtgaagccacttcattatatatcctggctggttggacatgaaggcaaaggcagcattctttctttccttaggaaaaaatgctgggctcttgcactgtttggtggaaatggtgagacaggatttgagcaaaattctacttattcagtgttcagcatttctattacattgactgatgagggttatgaacatttttatgaggttgcttacactgtctttcagtatttaaaaatgctgcagaagctaggcccagaaaaaagaatttttgaagagattcggaaaattgaggataatgaatttcattaccaagaacagacagatccagttgagtatgtggaaaacatgtgtgagaacatgcagctgtacccattgcaggacattctcactggagatcagcttctttttgaatacaagccagaagtcattggtgaagccttgaatcagctagttcctcaaaaagcaaatcttgttttactgtctggtgctaatgagggaaaatgtgacctcaaggagaaatggtttggaactcaatatagtatagaagatattgaaaactcttgggctgaactgtggaatagtaatttcgaattaaatccagatcttcatcttccagctgaaaacaagtacatagccacggactttacgttgaaggctttcgattgcccggaaacagaatacccagttaaaattgtgaatactccacaaggttgcctgtggtataagaaagacaacaaattcaaaatccccaaagcatatatacgtttccatctaatttcaccgttgatacagaaatctgcagcaaatgtggtcctctttgatatctttgtcaatatccttacgcataaccttgcggaaccagcttatgaagcagatgtggcacagctggagtataaactggtagctggagaacatggtttaattattcgagtgaaaggatttaaccacaaactacctctactgtttcagctcattattgactacttagctgagttcaattccacaccagctgtctttacaatgataactgagcagttgaagaagacctactttaacatcctcatcaagcctgagactttggccaaagatgtacggcttttaatcttggaatatgcccgttggtctatgattgacaagtaccaggctttgatggacggcctttcccttgagtctctgctgagcttcgtcaaagaattcaaatcccagctctttgtggagggcctggtacaagggaatgtcacaagcacagaatctatggatttcctgaaatatgttgttgacaaactaaacttcaagcctctggagcaggagatgcctgtgcagttccaggtggtagagctgcccagtggccaccatctatgcaaagtgaaagctctgaacaagggtgatgccaactctgaagtcactgtgtactaccagtcaggtaccaggagtctaagagaatatacgcttatggagctgcttgtgatgcacatggaagaaccttgttttgacttccttcgaaccaagcagacccttgggtaccatgtctaccctacctgtaggaacacatccgggattctaggattttctgtcactgtggggactcaggcaaccaaatacaattctgaagttgttgataagaagatagaagagtttctttctagctttgaggagaagattgagaacctcactgaagaggcattcaacacccaggtcacagctctcatcaagctgaaggagtgtgaggatacccaccttggggaggaggtggataggaactggaatgaagtggttacacagcagtacctctttgaccgccttgcccacgagattgaagcactgaagtcattctcaaaatcagacctggtcaactggttcaaggcccatagagggccaggaagtaaaatgctcagcgttcatgttgttggatatgggaagtatgaactggaagaggatggtaccccttctagtgaggattcaaattcttcttgtgaagtgatgcagctgacctacctgccaacctctcctctgctggcagattgtatcatccccattactgatatcagggctttcacaacaacactcaaccttctcccctaccataaaatagtcaaataaataaactgcagtcacgttggcctgaagcaatgt

SEQ ID NO: 448526 - DNA, 3666 bp, Homo sapiens
gttcgctggctgttccgagaatcagtccgggtcacgttggtgcctctcctttcctgttctgattggttgcttacgtgagcgtgactactttcttgcctcatgattggctgaaatcagtagcgtcatcggcggccgggagggcggagggacgagggaagtcggcgagagggagactgggttgggggaggggttcaggcctgttccccgcggctgcggcagcaccagggccggccgccaccgcctctagaacgcggaggaggtgggtcctgggaagcgggatgtccatcgctccagcttggtggtgaatgctgaggagagtcactgttgctgcagtctgtgccacccggaggaagttgtgtgaggccgggcgggagctcgcggcgctctggggaatcgaaacgcggggtcggtgcgaagactctgctgctgccagaccctttcctattctggccatgcctggaaggaacaaggcgaagtctacctgcagctgccctgacctgcagcccaatggacaggatctgggcgagaacagccgggttgcccgtctaggagcggatgaatctgaggaagagggacggagggggtctctcagtaatgctggggaccctgagatcgtcaagtctcccagcgaccccaagcaataccgatacatcaaattacagaatggcttgcaggcacttctgatttcagacctaagtaatatggaaggtaaaacaggaaatacaacagatgatgaagaagaagaggaggtggaggaagaagaagaagatgatgatgaagattctggagctgaaatagaagatgacgatgaagagggttttgatgatgaagatgagtttgatgatgaacatgatgatgatcttgatactgaggataatgaattggaagaattagaagagagagcagaagctagaaaaaaaactactgaaaaacagtctgcagcggctctttgtgttggagttgggagtttcgctgatccagatgacctgccggggctggcacactttttggagcacatggtattcatgggtagtttgaaatatccagatgagaatggatttgatgccttcctgaagaagcatgggggtagtgataatgcctcaactgattgtgaacgcactgtctttcagtttgatgtccagaggaagtacttcaaggaagctcttgatagatgggcgcagttcttcatccacccactaatgatcagagatgcaattgaccgtgaagttgaagctgttgatagtgaatatcaacttgcaaggccttctgatgcaaacagaaaggaaatgttgtttggaagccttgctagacctggccatcctatgggaaaatttttttggggaaatgctgagacgctcaagcatgagccaagaaagaataatattgatacacatgctagattgagagaattctggatgcgttactactcttctcattacatgactttagtggttcaatccaaagaaacactggatactttggaaaagtgggtgactgaaatcttctctcagataccaaacaatgggttacccagaccaaactttggccatttaacggatccatttgacacaccagcatttaacaaactttatagagttgttccaatcagaaaaattcatgctctgaccatcacatgggcacttcctcctcaacagcaacattacagggtgaagccacttcattatatatcctggctggttggacatgaaggcaaaggcagcattctttctttccttaggaaaaaatgctgggctcttgcactgtttggtggaaatggtgagacaggatttgagcaaaattctacttattcagtgttcagcatttctattacattgactgatgagggttatgaacatttttatgaggttgcttacactgtctttcagtatttaaaaatgctgcagaagctaggcccagaaaaaagaatttttgaagagattcggaaaattgaggataatgaatttcattaccaagaacagacagatccagttgagtatgtggaaaacatgtgtgagaacatgcagctgtacccattgcaggacattctcactggagatcagcttctttttgaatacaagccagaagtcattggtgaagccttgaatcagctagttcctcaaaaagcaaatcttgttttactgtctggtgctaatgagggaaaatgtgacctcaaggagaaatggtttggaactcaatatagtatagaagatattgaaaactcttgggctgaactgtggaatagtaatttcgaattaaatccagatcttcatcttccagctgaaaacaagtacatagccacggactttacgttgaaggctttcgattgcccggaaacagaatacccagttaaaattgtgaatactccacaaggttgcctgtggtataagaaagacaacaaattcaaaatccccaaagcatatatacgtttccatctaatttcaccgttgatacagaaatctgcagcaaatgtggtcctctttgatatctttgtcaatatccttacgcataaccttgcggaaccagcttatgaagcagatgtggcacagctggagtataaactggtagctggagaacatggtttaattattcgagtgaaaggatttaaccacaaactacctagatgtacggcttttaatcttggaatatgcccgttggtctatgattgacaagtaccaggctttgatggacggcctttcccttgagtctctgctgagcttcgtcaaagaattcaaatcccagctctttgtggagggcctggtacaagggaatgtcacaagcacagaatctatggatttcctgaaatatgttgttgacaaactaaacttcaagcctctggagcaggagatgcctgtgcagttccaggtggtagagctgcccagtggccaccatctatgcaaagtgaaagctctgaacaagggtgatgccaactctgaagtcactgtgtactaccagtcaggtaccaggagtctaagagaatatacgcttatggagctgcttgtgatgcacatggaagaaccttgttttgacttccttcgaaccaagcagacccttgggtaccatgtctaccctacctgtaggaacacatccgggattctaggattttctgtcactgtggggactcaggcaaccaaatacaattctgaagttgttgataagaagatagaagagtttctttctagctttgaggagaagattgagaacctcactgaagaggcattcaacacccaggtcacagctctcatcaagctgaaggagtgtgaggatacccaccttggggaggaggtggataggaactggaatgaagtggttacacagcagtacctctttgaccgccttgcccacgagattgaagcactgaagtcattctcaaaatcagacctggtcaactggttcaaggcccatagagggccaggaagtaaaatgctcagcgttcatgttgttggatatgggaagtatgaactggaagaggatggtaccccttctagtgaggattcaaattcttcttgtgaagtgatgcagctgacctacctgccaacctctcctctgctggcagattgtatcatccccattactgatatcagggctttcacaacaacactcaaccttctcccctaccataaaatagtcaaataaataaactgcagtcacgttggcctgaagcaatgt

SEQ ID NO: 448527 - DNA, 3784 bp, Homo sapiens
gttcgctggctgttccgagaatcagtccgggtcacgttggtgcctctcctttcctgttctgattggttgcttacgtgagcgtgactactttcttgcctcatgattggctgaaatcagtagcgtcatcggcggccgggagggcggagggacgagggaagtcggcgagagggagactgggttgggggaggggttcaggcctgttccccgcggctgcggcagcaccagggccggccgccaccgcctctagaacgcggaggaggtgggtcctgggaagcgggatgtccatcgctccagcttggtggtgaatgctgaggagagtcactgttgctgcagtctgtgccacccggaggaagttgtgtgaggccgggcgggagctcgcggcgctctggggaatcgaaacgcggggtcggtgcgaagactctgctgctgccagaccctttcctattctggccatgcctggaaggaacaaggcgaagtctacctgcagctgccctgacctgcagcccaatggacaggatctgggcgagaacagccgggttgcccgtctaggagcggatgaatctgaggaagagggacggagggggtctctcagtaatgctggggaccctgagatcgtcaagtctcccagcgaccccaagcaataccgatacatcaaattacagaatggcttgcaggcacttctgatttcagacctaagtaatatggaaggtaaaacaggaaatacaacagatgatgaagaagaagaggaggtggaggaagaagaagaagatgatgatgaagattctggagctgaaatagaagatgacgatgaagagggttttgatgatgaagatgagtttgatgatgaacatgatgatgatcttgatactgaggataatgaattggaagaattagaagagagagcagaagctagaaaaaaaactactgaaaaacagtctgcagcggctctttgtgttggagttgggagtttcgctgatccagatgacctgccggggctggcacactttttggagcacatggtattcatgggtagtttgaaatatccagatgagaatggatttgatgccttcctgaagaagcatgggggtagtgataatgcctcaactgattgtgaacgcactgtctttcagtttgatgtccagaggaagtacttcaaggaagctcttgatagatgggcgcagttcttcatccacccactaatgatcagagatgcaattgaccgtgaagttgaagctgttgatagtgaatatcaacttgcaaggccttctgatgcaaacagaaaggaaatgttgtttggaagccttgctagacctggccatcctatgggaaaatttttttggggaaatgctgagacgctcaagcatgagccaagaaagaataatattgatacacatgctagattgagagaattctggatgcgttactactcttctcattacatgactttagtggttcaatccaaagaaacactggatactttggaaaagtgggtgactgaaatcttctctcagataccaaacaatgggttacccagaccaaactttggccatttaacggatccatttgacacaccagcatttaacaaactttatagagttgttccaatcagaaaaattcatgctctgaccatcacatgggcacttcctcctcaacagcaacattacagggtgaagccacttcattatatatcctggctggttggacatgaaggcaaaggcagcattctttctttccttaggaaaaaatgctgggctcttgcactgtttggtggaaatggtgagacaggatttgagcaaaattctacttattcagtgttcagcatttctattacattgactgatgagggttatgaacatttttatgaggttgcttacactgtctttcagtatttaaaaatgctgcagaagctaggcccagaaaaaagaatttttgaagagattcggaaaattgaggataatgaatttcattaccaagaacagacagatccagttgagtatgtggaaaacatgtgtgagaacatgcagctgtacccattgcaggacattctcactggagatcagcttctttttgaatacaagccagaagtcattggtgaagccttgaatcagctagttcctcaaaaagcaaatcttgttttactgtctggtgctaatgagggaaaatgtgacctcaaggagaaatggtttggaactcaatatagtatagaagatattgaaaactcttgggctgaactgtggaatagtaatttcgaattaaatccagatcttcatcttccagctgaaaacaagtacatagccacggactttacgttgaaggctttcgattgcccggaaacagaatacccagttaaaattgtgaatactccacaaggttgcctgtggtataagaaagacaacaaattcaaaatccccaaagcatatatacgtttccatctaatttcaccgttgatacagaaatctgcagcaaatgtggtcctctttgatatctttgtcaatatccttacgcataaccttgcggaaccagcttatgaagcagatgtggcacagctggagtataaactggtagctggagaacatggtttaattattcgagtgaaaggatttaaccacaaactacctctactgtttcagctcattattgactacttagctgagttcaattccacaccagctgtctttacaatgataactgagcagttgaagaagacctactttaacatcctcatcaagcctgagactttggccaaagatgtacggcttttaatcttggaatatgcccgttggtctatgattgacaagtaccaggctttgatggacggcctttcccttgagtctctgctgagcttcgtcaaagaattcaaatcccagctctttgtggagggcctggtacaagggaatgtcacaagcacagaatctatggatttcctgaaatatgttgttgacaaactaaacttcaagcctctggagcaggagatgcctgtgcagttccaggtggtagagctgcccagtggccaccatctatgcaaagtgaaagctctgaacaagggtgatgccaactctgaagtcactgtgtactaccagtcaggtaccaggagtctaagagaatatacgcttatggagctgcttgtggcccatggagaactggtagcatacttcgaaccagcagacctgggtaccatgtctaccctacctgtaggaacacatccgggattctaggattttctgtcactgtggggactcaggcaaccaaatacaattctgaagttgttgataagaagatagaagagtttctttctagctttgaggagaagattgagaacctcactgaagaggcattcaacacccaggtcacagctctcatcaagctgaaggagtgtgaggatacccaccttggggaggaggtggataggaactggaatgaagtggttacacagcagtacctctttgaccgccttgcccacgagattgaagcactgaagtcattctcaaaatcagacctggtcaactggttcaaggcccatagagggccaggaagtaaaatgctcagcgttcatgttgttggatatgggaagtatgaactggaagaggatggtaccccttctagtgaggattcaaattcttcttgtgaagtgatgcagctgacctacctgccaacctctcctctgctggcagattgtatcatccccattactgatatcagggctttcacaacaacactcaaccttctcccctaccataaaatagtcaaataaataaactgcagtcacgttggcctgaagcaatgt

SEQ ID NO: 448528 - DNA, 3845 bp, Homo sapiens
gttcgctggctgttccgagaatcagtccgggtcacgttggtgcctctcctttcctgttctgattggttgcttacgtgagcgtgactactttcttgcctcatgattggctgaaatcagtagcgtcatcggcggccgggagggcggagggacgagggaagtcggcgagagggagactgggttgggggaggggttcaggcctgttccccgcggctgcggcagcaccagggccggccgccaccgcctctagaacgcggaggaggtgggtcctgggaagcgggatgtccatcgctccagcttggtggtgaatgctgaggagagtcactgttgctgcagtctgtgccacccggaggaagttgtgtgaggccgggcgggagctcgcggcgctctggggaatcgaaacgcggggtcggtgcgaagactctgctgctgccagaccctttcctattctggccatgcctggaaggaacaaggcgaagtctacctgcagctgccctgacctgcagcccaatggacaggatctgggcgagaacagccgggttgcccgtctaggagcggatgaatctgaggaagagggacggagggggtctctcagtaatgctggggaccctgagatcgtcaagtctcccagcgaccccaagcaataccgatacatcaaattacagaatggcttgcaggcacttctgatttcagacctaagtaatatggaaggtaaaacaggaaatacaacagatgatgaagaagaagaggaggtggaggaagaagaagaagatgatgatgaagattctggagctgaaatagaagatgacgatgaagagggttttgatgatgaagatgagtttgatgatgaacatgatgatgatcttgatactgaggataatgaattggaagaattagaagagagagcagaagctagaaaaaaaactactgaaaaacagtctgcagcggctctttgtgttggagttgggagtttcgctgatccagatgacctgccggggctggcacactttttggagcacatggtattcatgggtagtttgaaatatccagatgagaatggatttgatgccttcctgaagaagcatgggggtagtgataatgcctcaactgattgtgaacgcactgtctttcagtttgatgtccagaggaagtacttcaaggaagctcttgatagatgggcgcagttcttcatccacccactaatgatcagagatgcaattgaccgtgaagttgaagctgttgatagtgaatatcaacttgcaaggccttctgatgcaaacagaaaggaaatgttgtttggaagccttgctagacctggccatcctatgggaaaatttttttggggaaatgctgagacgctcaagcatgagccaagaaagaataatattgatacacatgctagattgagagaattctggatgcgttactactcttctcattacatgactttagtggttcaatccaaagaaacactggatactttggaaaagtgggtgactgaaatcttctctcagataccaaacaatgggttacccagaccaaactttggccatttaacggatccatttgacacaccagcatttaacaaactttatagagttgttccaatcagaaaaattcatgctctgaccatcacatgggcacttcctcctcaacagcaacattacagggtgaagccacttcattatatatcctggctggttggacatgaaggcaaaggcagcattctttctttccttaggaaaaaatgctgggctcttgcactgtttggtggaaatggtgagacaggatttgagcaaaattctacttattcagtgttcagcatttctattacattgactgatgagggttatgaacatttttatgaggttgcttacactgtctttcagtatttaaaaatgctgcagaagctaggcccagaaaaaagaatttttgaagagattcggaaaattgaggataatgaatttcattaccaagaacagacagatccagttgagtatgtggaaaacatgtgtgagaacatgcagctgtacccattgcaggacattctcactggagatcagcttctttttgaatacaagccagaagtcattggtgaagccttgaatcagctagttcctcaaaaagcaaatcttgttttactgtctggtgctaatgagggaaaatgtgacctcaaggagaaatggtttggaactcaatatagtatagaagatattgaaaactcttgggctgaactgtggaatagtaatttcgaattaaatccagatcttcatcttccagctgaaaacaagtacatagccacggactttacgttgaaggctttcgattgcccggaaacagaatacccagttaaaattgtgaatactccacaaggttgcctgtggtataagaaagacaacaaattcaaaatccccaaagcatatatacgtttccatctaatttcaccgttgatacagaaatctgcagcaaatgtggtcctctttgatatctttgtcaatatccttacgcataaccttgcggaaccagcttatgaagcagatgtggcacagctggagtataaactggtagctggagaacatggtttaattattcgagtgaaaggatttaaccacaaactacctctactgtttcagctcattattgactacttagctgagttcaattccacaccagctgtctttacaatgataactgagcagttgaagaagacctactttaacatcctcatcaagcctgagactttggccaaagatgtacggcttttaatcttggaatatgcccgttggtctatgattgacaagtaccaggctttgatggacggcctttcccttgagtctctgctgagcttcgtcaaagaattcaaatcccagctctttgtggagggcctggtacaagggaatgtcacaagcacagaatctatggatttcctgaaatatgttgttgacaaactaaacttcaagcctctggagcaggagatgcctgtgcagttccaggtggtagagctgcccagtggccaccatctatgcaaagtgaaagctctgaacaagggtgatgccaactctgaagtcactgtgtactaccagtcaggtaccaggagtctaagagaatatacgcttatggagctgcttgtgatgcacatggaagaaccttgttttgacttccttcgaaccaagcagacccttgggtaccatgtctaccctacctgtaggaacacatccgggattctaggattttctgtcactgtggggactcaggcaaccaaatacaattctgaagttgttgataagaagatagaagagtttctttctagctttgaggagaagattgagaacctcactgaagaggcattcaacacccaggtcacagctctcatcaagctgaaggagtgtgaggatacccaccttggggaggaggtggataggaactggaatgaagtggttacacagcagtacctctttgaccgccttgcccacgagattgaagcactgaagtcattctcaaaatcagacctggtcaactggttcaaggcccatagagggccaggaagtaaaatgctcagcgttcatgttgttggatatgggaagtatgaactggaagaggatggtaccccttctagtgaggattcaaattcttcttgtgaagtgatgcagctgacctacctgccaacctctcctctgctggcagattgtatcatccccacagagagagcgtccttcccagggacgccgctgaccgctgagggatctctgggatgcccgtctttcccagccggtggctccagctgccgctgcttggggggtagggcgggcggcggggccagctcctgcacggagtccaccccacagaga

SEQ ID NO: 448529 - DNA, 4261 bp, Homo sapiens
gttcgctggctgttccgagaatcagtccgggtcacgttggtgcctctcctttcctgttctgattggttgcttacgtgagcgtgactactttcttgcctcatgattggctgaaatcagtagcgtcatcggcggccgggagggcggagggacgagggaagtcggcgagagggagactgggttgggggaggggttcaggcctgttccccgcggctgcggcagcaccagggccggccgccaccgcctctagaacgcggaggaggtgggtcctgggaagcgggatgtccatcgctccagcttggtggtgaatgctgaggagagtcactgttgctgcagtctgtgccacccggaggaagttgtgtgaggccgggcgggagctcgcggcgctctggggaatcgaaacgcggggtcggtgcgaagactctgctgctgccagaccctttcctattctggccatgcctggaaggaacaaggcgaagtctacctgcagctgccctgacctgcagcccaatggacaggatctgggcgagaacagccgggttgcccgtctaggagcggatgaatctgaggaagagggacggagggggtctctcagtaatgctggggaccctgagatcgtcaagtctcccagcgaccccaagcaataccgatacatcaaattacagaatggcttgcaggcacttctgatttcagacctaagtaatatggaaggtaaaacaggaaatacaacagatgatgaagaagaagaggaggtggaggaagaagaagaagatgatgatgaagattctggagctgaaatagaagatgacgatgaagagggttttgatgatgaagatgagtttgatgatgaacatgatgatgatcttgatactgaggataatgaattggaagaattagaagagagagcagaagctagaaaaaaaactactgaaaaacagtctgcagcggctctttgtgttggagttgggagtttcgctgatccagatgacctgccggggctggcacactttttggagcacatggtattcatgggtagtttgaaatatccagatgagaatggatttgatgccttcctgaagaagcatgggggtagtgataatgcctcaactgattgtgaacgcactgtctttcagtttgatgtccagaggaagtacttcaaggaagctcttgatagatgggcgcagttcttcatccacccactaatgatcagagatgcaattgaccgtgaagttgaagctgttgatagtgaatatcaacttgcaaggccttctgatgcaaacagaaaggaaatgttgtttggaagccttgctagacctggccatcctatgggaaaatttttttggggaaatgctgagacgctcaagcatgagccaagaaagaataatattgatacacatgctagattgagagaattctggatgcgttactactcttctcattacatgactttagtggttcaatccaaagaaacactggatactttggaaaagtgggtgactgaaatcttctctcagataccaaacaatgggttacccagaccaaactttggccatttaacggatccatttgacacaccagcatttaacaaactttatagagttgttccaatcagaaaaattcatgctctgaccatcacatgggcacttcctcctcaacagcaacattacagggtgaagccacttcattatatatcctggctggttggacatgaaggcaaaggcagcattctttctttccttaggaaaaaatgctgggctcttgcactgtttggtggaaatggtgagacaggatttgagcaaaattctacttattcagtgttcagcatttctattacattgactgatgagggttatgaacatttttatgaggttgcttacactgtctttcagtatttaaaaatgctgcagaagctaggcccagaaaaaagaatttttgaagagattcggaaaattgaggataatgaatttcattaccaagaacagacagatccagttgagtatgtggaaaacatgtgtgagaacatgcagctgtacccattgcaggacattctcactggagatcagcttctttttgaatacaagccagaagtcattggtgaagccttgaatcagctagttcctcaaaaagcaaatcttgttttactgtctggtgctaatgagggaaaatgtgacctcaaggagaaatggtttggaactcaatatagtatagaagatattgaaaactcttgggctgaactgtggaatagtaatttcgaattaaatccagatcttcatcttccagctgaaaacaagtacatagccacggactttacgttgaaggctttcgattgcccggaaacagaatacccagttaaaattgtgaatactccacaaggttgcctgtggtataagaaagacaacaaattcaaaatccccaaagcatatatacgtttccatctaatttcaccgttgatacagaaatctgcagcaaatgtggtcctctttgatatctttgtcaatatccttacgcataaccttgcggaaccagcttatgaagcagatgtggcacagctggagtataaactggtagctggagaacatggtttaattattcgagtgaaaggatttaaccacaaactacctctactgtttcagctcattattgactacttagctgagttcaattccacaccagctgtctttacaatgataactgagcagttgaagaagacctactttaacatcctcatcaagcctgagactttggccaaagatgtacggcttttaatcttggaatatgcccgttggtctatgattgacaagtaccaggctttgatggacggcctttcccttgagtctctgctgagcttcgtcaaagaattcaaatcccagctctttgtggagggcctggtacaagggaatgtcacaagcacagaatctatggatttcctgaaatatgttgttgacaaactaaacttcaagcctctggagcaggagatgcctgtgcagttccaggtggtagagctgcccagtggccaccatctatgcaaagtgaaagctctgaacaagggtgatgccaactctgaagtcactgtgtactaccagtcaggtaccaggagtctaagagaatatacgcttatggagctgcttgtgatgcacatggaagaaccttgttttgacttccttcgaaccaagcagacccttgggtaccatgtctaccctacctgtaggaacacatccgggattctaggattttctgtcactgtggggactcaggcaaccaaatacaattctgaagttgttgataagaagatagaagagtttctttctagctttgaggagaagattgagaacctcactgaagaggcattcaacacccaggtcacagctctcatcaagctgaaggagtgtgaggatacccaccttggggaggaggtggataggaactggaatgaagtggttacacagcagtacctctttgaccgccttgcccacgagattgaagcactgaagtcattctcaaaatcagacctggtcaactggttcaaggcccatagagggccaggaagatggtaccccttctagtgaggattcaaattcttcttgtgaagtgatgcagctgacctacctgccaacctctcctctgctggcagattgtatcatccccattactgatatcagggctttcacaacaacactcaaccttctcccctaccataaaatagtcaaataaataaactgcagtcacgttggcctgaagcaatgtgtattttaaaatgtgtttgtttgtattttatggagttagttatactactgccttagggcttccattgaagttttgcactggcatcatagcatttgatttactttttatcctttgttgagactaataaacccagggttactgtaggagctggcaaaggaaaattagcagaatgggccaagcgagaccagaaagcctgcagcagcactttgagaagccctggcctgtgtcctctcagactgagaatctacttcttgaaaggccttacgtaaccagtatattgaataactaactaaatgctaggtactaatacctgtttttttaatgtatttttaaataaaaaagatgatagatagatagatagatatagttctgtatttcccttcagaatgagccatctgctgctgtggcattcattttattctatctatctatctatttttgttcactgtggggtggggatctataaatacacactcttcccaaaccctctaaggcaataaaacatttttggataaaatgt

SEQ ID NO: 448530 - DNA, 3928 bp, Homo sapiens
gttcgctggctgttccgagaatcagtccgggtcacgttggtgcctctcctttcctgttctgattggttgcttacgtgagcgtgactactttcttgcctcatgattggctgaaatcagtagcgtcatcggcggccgggagggcggagggacgagggaagtcggcgagagggagactgggttgggggaggggttcaggcctgttccccgcggctgcggcagcaccagggccggccgccaccgcctctagaacgcggaggaggtgggtcctgggaagcgggatgtccatcgctccagcttggtggtgaatgctgaggagagtcactgttgctgcagtctgtgccacccggaggaagttgtgtgaggccgggcgggagctcgcggcgctctggggaatcgaaacgcggggtcggtgcgaagactctgctgctgccagaccctttcctattctggccatgcctggaaggaacaaggcgaagtctacctgcagctgccctgacctgcagcccaatggacaggatctgggcgagaacagccgggttgcccgtctaggagcggatgaatctgaggaagagggacggagggggtctctcagtaatgctggggaccctgagatcgtcaagtctcccagcgaccccaagcaataccgatacatcaaattacagaatggcttgcaggcacttctgatttcagacctaagtaatatggaaggtaaaacaggaaatacaacagatgatgaagaagaagaggaggtggaggaagaagaagaagatgatgatgaagattctggagctgaaatagaagatgacgatgaagagggttttgatgatgaagatgagtttgatgatgaacatgatgatgatcttgatactgaggataatgaattggaagaattagaagagagagcagaagctagaaaaaaaactactgaaaaacagtctgcagcggctctttgtgttggagttgggagtttcgctgatccagatgacctgccggggctggcacactttttggagcacatggtattcatgggtagtttgaaatatccagatgagaatggatttgatgccttcctgaagaagcatgggggtagtgataatgcctcaactgattgtgaacgcactgtctttcagtttgatgtccagaggaagtacttcaaggaagctcttgatagatgggcgcagttcttcatccacccactaatgatcagagatgcaattgaccgtgaagttgaagctgttgatagtgaatatcaacttgcaaggccttctgatgcaaacagaaaggaaatgttgtttggaagccttgctagacctggccatcctatgggaaaatttttttggggaaatgctgagacgctcaagcatgagccaagaaagaataatattgatacacatgctagattgagagaattctggatgcgttactactcttctcattacatgactttagtggttcaatccaaagaaacactggatactttggaaaagtgggtgactgaaatcttctctcagataccaaacaatgggttacccagaccaaactttggccatttaacggatccatttgacacaccagcatttaacaaactttatagagttgttccaatcagaaaaattcatgctctgaccatcacatgggcacttcctcctcaacagcaacattacagggtgaagccacttcattatatatcctggctggttggacatgaaggcaaaggcagcattctttctttccttaggaaaaaatgctgggctcttgcactgtttggtggaaatggtgagacaggatttgagcaaaattctacttattcagtgttcagcatttctattacattgactgatgagggttatgaacatttttatgaggttgcttacactgtctttcagtatttaaaaatgctgcagaagctaggcccagaaaaaagaatttttgaagagattcggaaaattgaggataatgaatttcattaccaagaacagacagatccagttgagtatgtggaaaacatgtgtgagaacatgcagctgtacccattgcaggacattctcactggagatcagcttctttttgaatacaagccagaagtcattggtgaagccttgaatcagctagttcctcaaaaagcaaatcttgttttactgtctggtgctaatgagggaaaatgtgacctcaaggagaaatggtttggaactcaatatagtatagaagatattgaaaactcttgggctgaactgtggaatagtaatttcgaattaaatccagatcttcatcttccagctgaaaacaagtacatagccacggactttacgttgaaggctttcgattgcccggaaacagaatacccagttaaaattgtgaatactccacaaggttgcctgtggtataagaaagacaacaaattcaaaatccccaaagcatatatacgtttccatctaatttcaccgttgatacagaaatctgcagcaaatgtggtcctctttgatatctttgtcaatatccttacgcataaccttgcggaaccagcttatgaagcagatgtggcacagctggagtataaactggtagctggagaacatggtttaattattcgagtgaaaggatttaaccacaaactacctctactgtttcagctcattattgactacttagctgagttcaattccacaccagctgtctttacaatgataactgagcagttgaagaagacctactttaacatcctcatcaagcctgagactttggccaaagatgtacggcttttaatcttggaatatgcccgttggtctatgattgacaagtaccaggctttgatggacggcctttcccttgagtctctgctgagcttcgtcaaagaattcaaatcccagctctttgtggagggcctggtacaagggaatgtcacaagcacagaatctatggatttcctgaaatatgttgttgacaaactaaacttcaagcctctggagcaggagatgcctgtgcagttccaggtggtagagctgcccagtggccaccatctatgcaaagtgaaagctctgaacaagggtgatgccaactctgaagtcactgtgtactaccagtcaggtaccaggagtctaagagaatatacgcttatggagctgcttgtgatgcacatggaagaaccttgttttgacttccttcgaaccaagcagacccttgggtaccatgtctaccctacctgtaggaacacatccgggattctaggattttctgtcactgtggggactcaggcaaccaaatacaattctgaagttgttgataagaagatagaagagtttctttctagctttgaggagaagattgagaacctcactgaagaggcattcaacacccaggtcacagctctcatcaagctgaaggagtgtgaggatacccaccttggggaggaggtggataggaactggaatgaagtggttacacagcagtacctctttgaccgccttgcccacgagattgaagcactgaagtcattctcaaaatcagacctggtcaactggttcaaggcccatagagggccaggaagtaaaatgctcagcgttcatgtgagtatgtttaactaactccatccattctagggttgtcatttactgagtgagtttgggtggttatcatcagaactcttaaacccctaaatctggtcagcatatttttcacttttgtctttgtcctctttcaggttgttggatatgggaagtatgaactggaagaggatggtaccccttctagtgaggattcaaattcttcttgtgaagtgatgcagctgacctacctgccaacctctcctctgctggcagattgtatcatccccattactgatatcagggctttcacaacaacactcaaccttctcccctaccataaaatagtcaaataaataaactgcagtcacgttggcctgaagcaatgt

SEQ ID NO: 448531 - DNA, 3514 bp, Homo sapiens
gttcgctggctgttccgagaatcagtccgggtcacgttggtgcctctcctttcctgttctgattggttgcttacgtgagcgtgactactttcttgcctcatgattggctgaaatcagtagcgtcatcggcggccgggagggcggagggacgagggaagtcggcgagagggagactgggttgggggaggggttcaggcctgttccccgcggctgcggcagcaccagggccggccgccaccgcctctagaacgcggaggaggtgggtcctgggaagcgggatgtccatcgctccagcttggtggtgaatgctgaggagagtcactgttgctgcagtctgtgccacccggaggaagttgtgtgaggccgggcgggagctcgcggcgctctggggaatcgaaacgcggggtcggtgcgaagactctgctgctgccagaccctttcctattctggccatgcctggaaggaacaaggcgaagtctacctgcagctgccctgacctgcagcccaatggacaggatctgggcgagaacagccgggttgcccgtctaggagcggatgaatctgaggaagagggacggagggggtctctcagtaatgctggggaccctgagatcgtcaagtctcccagcgaccccaagcaataccgatacatcaaattacagaatggcttgcaggcacttctgatttcagacctaagtaatatggaaggtaaaacaggaaatacaacagatgatgaagaagaagaggaggtggaggaagaagaagaagatgatgatgaagattctggagctgaaatagaagatgacgatgaagagggttttgatgatgaagatgagtttgatgatgaacatgatgatgatcttgatactgaggataatgaattggaagaattagaagagagagcagaagctagaaaaaaaactactgaaaaacagtctgcagcggctctttgtgttggagttgggagtttcgctgatccagatgacctgccggggctggcacactttttggagcacatggtattcatgggtagtttgaaatatccagatgagaatggatttgatgccttcctgaagaagcatgggggtagtgataatgcctcaactgattgtgaacgcactgtctttcagtttgatgtccagaggaagtacttcaaggaagctcttgatagatgggcgcagttcttcatccacccactaatgatcagagatgcaattgaccgtgaagttgaagctgttgatagtgaatatcaacttgcaaggccttctgatgcaaacagaaaggaaatgttgtttggaagccttgctagacctggccatcctatgggaaaatttttttggggaaatgctgagacgctcaagcatgagccaagaaagaataatattgatacacatgctagattgagagaattctggatgcgttactactcttctcattacatgactttagtggttcaatccaaagaaacactggatactttggaaaagtgggtgactgaaatcttctctcagataccaaacaatgggttacccagaccaaactttggccatttaacggatccatttgacacaccagcatttaacaaactttatagagttgttccaatcagaaaaattcatgctctgaccatcacatgggcacttcctcctcaacagcaacattacagggtgaagccacttcattatatatcctggctggttggacatgaaggcaaaggcagcattctttctttccttaggaaaaaatgctgggctcttgcactgtttggtggaaatggtgagacaggatttgagcaaaattctacttattcagtgttcagcatttctattacattgactgatgagggttatgaacatttttatgaggttgcttacactgtctttcagtatttaaaaatgctgcagaagctaggcccagaaaaaagaatttttgaagagattcggaaaattgaggataatgaatttcattaccaagaacagacagatccagttgagtatgtggaaaacatgtgtgagaacatgcagctgtacccattgcaggacattctcactggagatcagcttctttttgaatacaagccagaagtcattggtgaagccttgaatcagctagttcctcaaaaagcaaatcttgttttactgtctggtgctaatgagggaaaatgtgacctcaaggagaaatggtttggaactcaatatagtatagaagatattgaaaactcttgggctgaactgtggaatagtaatttcgaattaaatccagatcttcatcttccagctgaaaacaagtacatagccacggactttacgttgaaggctttcgattgcccggaaacagaatacccagttaaaattgtgaatactccacaaggttgcctgtggtataagaaagacaacaaattcaaaatccccaaagcatatatacgtttccatctaatttcaccgttgatacagaaatctgcagcaaatgtggtcctctttgatatctttgtcaatatccttacgcataaccttgcggaaccagcttatgaagcagatgtggcacagctggagtataaactggtagctggagaacatggtttaattattcgagtgaaaggatttaaccacaaactacctctactgtttcagctcattattgactacttagctgagttcaattccacaccagctgtctttacaatgataactgagcagttgaagaagacctactttaacatcctcatcaagcctgagactttggccaaagatgtacggcttttaatcttggaatatgcccgttggtctatgattgacaagtaccaggctttgatggacggcctttcccttgagtctctgctgagcttcgtcaaagaattcaaatcccagctctttgtggagggcctggtacaagggaatgtcacaagcacagtgagtgtgagatgctctgtaggccaggtctgaatgcagttgtgaactctggaattgccatagttctttcctaaaggggaagctgtagttttggcaggccagcattatcatattctgtttagaagggaacctgacccctctgatgctgggcagctttcttcttaagatgaagactgctgggctgggaatgatggctcacgcctgtaatttcagcattttgggaggccaaggcagaagcattacttaaggtcaggatttcgagaccagtccaggcaacacagtgagaactcatccctacaaaaaataaaaaattagccaggcatggtggcacatgcctatagtctccgctacttgggaggctgaggtggaaggatcatttgagcccaggagtttggggctacagcatgctatgattgcaccacagtattccagcctgggcaacagagtaagaccctgtctcaaaagaaaagaaataaagaaagagagagagaaaaatagattgctggtaatagactaggattttgagtgaaatgggtttggcgtatctatactgtttgttacctttgttgaagattgtatgtggaaaccatgaacagtttagtata

SEQ ID NO: 448532 - DNA, 2372 bp, Homo sapiens
gttcgctggctgttccgagaatcagtccgggtcacgttggtgcctctcctttcctgttctgattggttgcttacgtgagcgtgactactttcttgcctcatgattggctgaaatcagtagcgtcatcggcggccgggagggcggagggacgagggaagtcggcgagagggagactgggttgggggaggggttcaggcctgttccccgcggctgcggcagcaccagggccggccgccaccgcctctagaacgcggaggaggtgggtcctgggaagcgggatgtccatcgctccagcttggtggtgaatgctgaggagagtcactgttgctgcagtctgtgccacccggaggaagttgtgtgaggccgggcgggagctcgcggcgctctggggaatcgaaacgcggggtcggtgcgaagactctgctgctgccagaccctttcctattctggccatgcctggaaggaacaaggcgaagtctacctgcagctgccctgacctgcagcccaatggacaggatctgggcgagaacagccgggttgcccgtctaggagcggatgaatctgaggaagagggacggagggggtctctcagtaatgctggggaccctgagatcgtcaagtctcccagcgaccccaagcaataccgatacatcaaattacagaatggcttgcaggcacttctgatttcagacctaagtaatatggaaggtaaaacaggaaatacaacagatgatgaagaagaagaggaggtggaggaagaagaagaagatgatgatgaagattctggagctgaaatagaagatgacgatgaagagggttttgatgatgaagatgagtttgatgatgaacatgatgatgatcttgatactgaggataatgaattggaagaattagaagagagagcagaagctagaaaaaaaactactgaaaaacagtctgcagcggctctttgtgttggagttgggagtttcgctgatccagatgacctgccggggctggcacactttttggagcacatggtattcatgggtagtttgaaatatccagatgagaatggatttgatgccttcctgaagaagcatgggggtagtgataatgcctcaactgattgtgaacgcactgtctttcagtttgatgtccagaggaagtacttcaaggaagctcttgatagatgggcgcagttcttcatccacccactaatgatcagagatgcaattgaccgtgaagttgaagctgttgatagtgaatatcaacttgcaaggccttctgatgcaaacagaaaggaaatgttgtttggaagccttgctagacctggccatcctatgggaaaatttttttggggaaatgctgagacgctcaagcatgagccaagaaagaataatattgatacacatgctagattgagagaattctggatgcgttactactcttctcattacatgactttagtggttcaatccaaagaaacactggatactttggaaaagtgggtgactgaaatcttctctcagataccaaacaatgggttacccagaccaaactttggccatttaacggatccatttgacacaccagcatttaacaaactttatagagttgttccaatcagaaaaattcatgctctgaccatcacatgggcacttcctcctcaacagcaacattacagggtgaagccacttcattatatatcctggctggttggacatgaaggcaaaggcagcattctttctttccttaggaaaaagcaagtattcaattaataagtattttcagtatagcaatctctgaaaaatagtagacaataagtattatataatgcattcttttactttagctgccaggaagcctagaataaaatttaatgcttaattatagttattttaataacttacattattttaatggccatattatatttgtgtatttccttgtaagccaccttttagcccattgttggaagttatttgtacacaaaattttaaaaaatcataaatgaaattaatagattccagaattacataaaagaattagctctaatcaagaatttatatttgactgaatggtaaagaaatcaattatttaaatgccatggatctccaggctttcctaacccccaaggctagactttaatgaaaacttcattgggtaggtaaatcatagttaataggtgggactgcaaatggtatatgcagccatgttagcagaatgtttcctaagcattaaagcacctgtttaagtcacctatagccaaataatagaaatacaattttagaatcaagactaatatattaaagtaattccttgtttgatttttctataaatgaatagtatgagaatggaaggatagatgagacatttaaataagtattttt

SEQ ID NO: 448533 - DNA, 845 bp, Homo sapiens
agcggatttgagcaaaattctacttattcagtgttcagcatttctattacattgacgatgaagagggttttgatgatgaagatgagtttgatgatgaacatgatgatgatcttgatactgaggataatgaattggaagaattagaagagagagcagaagctagaaaaaaaactactgaaaaacagcaattgcagagcctgtttttgctgtggtcaaagctgactgatagactgtggtttaagtcaacttattcaaaaatgtcttcaaccctgctggtcgagacaagaaatctttatggggtagttggagctgaaagcaggttaggcacctattaaaacatcacagaacaggttagattgtggtttgaagaactggatattccccaatgttttaactgagtttatgtgcctaagtcttcaaaatggggtttatagtatcaagtgaggctgtttggttcttctgaaaacacactcattttctgacacatggctagactttatgccaggtacatgctatttttgaaaagctcttttttaagaggtaactgtttattaaaacaatctgtttcaccaaatatgttagccctgtaaaattgacatttacaaaagtttgaagaaaacaaatttgggaaagttaataattcgcctttctatcttcaaggattcaaattgaccgttttttctcctttttttgtcttttaacttactgtaattatgccccaatagttcgggtgcagtggtcacgcctataatcccagcactttgagaggctgaggtgggaggattgtttgagtccaggagtttgagaccagcctgggcctcatagcaagacccctgtcttaaaaa

SEQ ID NO: 448534 - DNA, 576 bp, Homo sapiens
ttacccagaccaaactttggccatttaacggatccatttgacacaccagcatttaacaaactttatagaggtttgtgaaccaaaagtttaaaactgtttgaaataatgttagcacattctctataacctaattgaagctgccaattttcattgaaaatgagaacacaacagaaaatacagctgggttggaaaggaagtagatgggcaatggagatctaattaataatagatagcagaccactgactagctgcagatcgattgattctggtgccctgctgctacttcagtctatttcatgctttctccttgttttacctttcttcccttttgttctctgttttgttaaattttcattcatgtttcattttatttatattctgctcttttgcctttaaatgaataaaaatagatgagagggaaaacactttggcaatcgtttccttttaaattcattgtgaaagtaatatttgctaaataaaaatataaaatgtcaagaaatgggagataaatcacccttaaatcttaccatgaagagaagtcatttgtatcggatttcttttttttttttttggaga

SEQ ID NO: 448535 - DNA, 470 bp, Homo sapiens
gtaccatgtctaccctacctgtaggaacacatccgggattctaggattttctgtcactgtggggactcaggcaaccaaatacaagtgagtgagtgagtgaatagatgagtgtaacctattatggacatggagagtaggggctacatgtgtttccttaaaccttgggcaaccctgaccaagcaggtttgctctatttagtcagtggaagctgggaagatgggggttgttatagatggtctgttccaggactgatcaatagttccagtggccctttcagacttgattcaagtcctgtggtcattgtgtggggcttgccagtgtttcttctcttcaggcagacctgaggacaagaagggaaaggatgcctgatctgacaggcattgctgaaacctgttagttttcagctttggaatggtcatacatggttgtgactgcttcattatgaggataccaggaaactgggctggagg

SEQ ID NO: 448536 - DNA, 569 bp, Homo sapiens
tcaggtaccaggagtctaagagaatatacgcttatggagctgcttgtggtaagtgcataaaggagatgctgaggttttcagcagcccctgacccactatgaggcccggccttttctgcctgggttagggacatggggtagtcagagatctgtgatttgaaggtgagatggtcatttactgttctcacccagtataagcctgggccaattaggaaaaaggcactaagggaggctggacttgggaggtatgtgaaacactctggggagagaaatggaggtttctctgctgggaggagttgggctgatgggcagtatgttgaattacagatgcacatggaagaaccttgttttgacttccttcgaaccaagcagacccttgggtaagtcagctggcagggccactgagctcaaataagggcctagggcttactttgcaggctgttcatcagatatccctactgagcagcctgttagagcttccttccatctcatagggtgatatttagtcatccaaacttttggaatttgtatctttgactgtaatcaggttttcagtttggtcaagtttca

SEQ ID NO: 448537 - DNA, 3998 bp, Homo sapiens
gttcgctggctgttccgagaatcagtccgggtcacgttggtgcctctcctttcctgttctgattggttgcttacgtgagcgtgactactttcttgcctcatgattggctgaaatcagtagcgtcatcggcggccgggagggcggagggacgagggaagtcggcgagagggagactgggttgggggaggggttcaggcctgttccccgcggctgcggcagcaccagggccggccgccaccgcctctagaacgcggaggaggtgggtcctgggaagcgggatgtccatcgctccagcttggtggtgaatgctgaggagagtcactgttgctgcagtctgtgccacccggaggaagttgtgtgaggccgggcgggagctcgcggcgctctggggaatcgaaacgcggggtcggtgcgaagactctgctgctgccagaccctttcctattctggccatgcctggaaggaacaaggcgaagtctacctgcagctgccctgacctgcagcccaatggacaggatctgggcgagaacagccgggttgcccgtctaggagcggatgaatctgaggaagagggacggagggggtctctcagtaatgctggggaccctgagatcgtcaagtctcccagcgaccccaagcaataccgatacatcaaattacagaatggcttgcaggcacttctgatttcagacctaagtaatatggaaggtaaaacaggaaatacaacagatgatgaagaagaagaggaggtggaggaagaagaagaagatgatgatgaagattctggagctgaaatagaagatgacgatgaagagggttttgatgatgaagatgagtttgatgatgaacatgatgatgatcttgatactgaggataatgaattggaagaattagaagagagagcagaagctagaaaaaaaactactgaaaaacagcaattgcagagcctgtttttgctgtggtcaaagctgactgatagactgtggtttaagtcaacttattcaaaaatgtcttcaaccctgctggtcgagacaagaaatctttatggggtagttggagctgaaagcaggtctgcacctgttcagcatttggcaggatggcaagcggaggagcagcagggtgaaactgacacagttctgtctgcagcggctctttgtgttggagttgggagtttcgctgatccagatgacctgccggggctggcacactttttggagcacatggtattcatgggtagtttgaaatatccagatgagaatggatttgatgccttcctgaagaagcatgggggtagtgataatgcctcaactgattgtgaacgcactgtctttcagtttgatgtccagaggaagtacttcaaggaagctcttgatagatgggcgcagttcttcatccacccactaatgatcagagatgcaattgaccgtgaagttgaagctgttgatagtgaatatcaacttgcaaggccttctgatgcaaacagaaaggaaatgttgtttggaagccttgctagacctggccatcctatgggaaaatttttttggggaaatgctgagacgctcaagcatgagccaagaaagaataatattgatacacatgctagattgagagaattctggatgcgttactactcttctcattacatgactttagtggttcaatccaaagaaacactggatactttggaaaagtgggtgactgaaatcttctctcagataccaaacaatgggttacccagaccaaactttggccatttaacggatccatttgacacaccagcatttaacaaactttatagagttgttccaatcagaaaaattcatgctctgaccatcacatgggcacttcctcctcaacagcaacattacagggtgaagccacttcattatatatcctggctggttggacatgaaggcaaaggcagcattctttctttccttaggaaaaaatgctgggctcttgcactgtttggtggaaatggtgagacaggatttgagcaaaattctacttattcagtgttcagcatttctattacattgactgatgagggttatgaacatttttatgaggttgcttacactgtctttcagtatttaaaaatgctgcagaagctaggcccagaaaaaagaatttttgaagagattcggaaaattgaggataatgaatttcattaccaagaacagacagatccagttgagtatgtggaaaacatgtgtgagaacatgcagctgtacccattgcaggacattctcactggagatcagcttctttttgaatacaagccagaagtcattggtgaagccttgaatcagctagttcctcaaaaagcaaatcttgttttactgtctggtgctaatgagggaaaatgtgacctcaaggagaaatggtttggaactcaatatagtatagaagatattgaaaactcttgggctgaactgtggaatagtaatttcgaattaaatccagatcttcatcttccagctgaaaacaagtacatagccacggactttacgttgaaggctttcgattgcccggaaacagaatacccagttaaaattgtgaatactccacaaggttgcctgtggtataagaaagacaacaaattcaaaatccccaaagcatatatacgtttccatctaatttcaccgttgatacagaaatctgcagcaaatgtggtcctctttgatatctttgtcaatatccttacgcataaccttgcggaaccagcttatgaagcagatgtggcacagctggagtataaactggtagctggagaacatggtttaattattcgagtgaaaggatttaaccacaaactacctctactgtttcagctcattattgactacttagctgagttcaattccacaccagctgtctttacaatgataactgagcagttgaagaagacctactttaacatcctcatcaagcctgagactttggccaaagatgtacggcttttaatcttggaatatgcccgttggtctatgattgacaagtaccaggctttgatggacggcctttcccttgagtctctgctgagcttcgtcaaagaattcaaatcccagctctttgtggagggcctggtacaagggaatgtcacaagcacagaatctatggatttcctgaaatatgttgttgacaaactaaacttcaagcctctggagcaggagatgcctgtgcagttccaggtggtagagctgcccagtggccaccatctatgcaaagtgaaagctctgaacaagggtgatgccaactctgaagtcactgtgtactaccagtcaggtaccaggagtctaagagaatatacgcttatggagctgcttgtgatgcacatggaagaaccttgttttgacttccttcgaaccaagcagacccttgggtaccatgtctaccctacctgtaggaacacatccgggattctaggattttctgtcactgtggggactcaggcaaccaaatacaattctgaagttgttgataagaagatagaagagtttctttctagctttgaggagaagattgagaacctcactgaagaggcattcaacacccaggtcacagctctcatcaagctgaaggagtgtgaggatacccaccttggggaggaggtggataggaactggaatgaagtggttacacagcagtacctctttgaccgccttgcccacgagattgaagcactgaagtcattctcaaaatcagacctggtcaactggttcaaggcccatagagggccaggaagtaaaatgctcagcgttcatgttgttggatatgggaagtatgaactggaagaggatggtaccccttctagtgaggattcaaattcttcttgtgaagtgatgcagctgacctacctgccaacctctcctctgctggcagattgtatcatccccattactgatatcagggctttcacaacaacactcaaccttctcccctaccataaaatagtcaaataaataaactgcagtcacgttggcctgaagcaatgt

SEQ ID NO: 448538 - DNA, 727 bp, Homo sapiens
gttcgctggctgttccgagaatcagtccgggtcacgttggtgcctctcctttcctgttctgattggttgcttacgtgagcgtgactactttcttgcctcatgattggctgaaatcagtagcgtcatcggcggccgggagggcggagggacgagggaagtcggcgagagggagactgggttgggggaggggttcaggcctgttccccgcggctgcggcagcaccagggccggccgccaccgcctctagaacgcggaggaggtgggtcctgggaagcgggatgtccatcgctccagcttggtggtgaatgctgaggagagtcactgttgctgcagtctgtgccacccggaggaagttgtgtgaggccgggcgggagctcgcggcgctctggggaatcgaaacgcggggtcggtgcgaagactctgctgctgccagaccctttcctattctggccatgcctggaaggaacaaggcgaagtctacctgcagctgccctgacctgcagcccaatggacaggatctgggcgagaacagccgggttgcccgtctaggagcggatgaatctgaggaagagggacggagggggtctctcagtaatgctggggaccctgagatcgtcaagtctcccagcgaccccaagcaataccgagtctccatctgtcacccatgctggagtgccatggcgcaatcttggctcactgcaacctcttcctccctggctcaagtgaa

SEQ ID NO: 448539 - DNA, 2120 bp, Homo sapiens
ccagtgatgaaggatccatgaatgcattcacaggaagggggtcacctggtaggggtcaaaagactaaagtctgtaccacaccttcatctggtcatgctgcatctgggaaggactcaagcagcagattggctgttacagaccccactcggcctggtgccaccaccaaaatcaccaccacctccacctacatttctgcctctacacttaaagttaacaagaaaaccaaagggctcattgatggccttactaagttttttacaccatcacctgatggtcgcagatcacgaggtgaaattatagactttacagatccagttgagtatgtggaaaacatgtgtgagaacatgcagctgtacccattgcaggacattctcactggagatcagcttctttttgaatacaagccagaagtcattggtgaagccttgaatcagctagttcctcaaaaagcaaatcttgttttactgtctggtgctaatgagggaaaatgtgacctcaaggagaaatggtttggaactcaatatagtatagaagatattgaaaactcttgggctgaactgtggaatagtaatttcgaattaaatccagatcttcatcttccagctgaaaacaagtacatagccacggactttacgttgaaggctttcgattgcccggaaacagaatacccagttaaaattgtgaatactccacaaggttgcctgtggtataagaaagacaacaaattcaaaatccccaaagcatatatacgtttccatctaatttcaccgttgatacagaaatctgcagcaaatgtggtcctctttgatatctttgtcaatatccttacgcataaccttgcggaaccagcttatgaagcagatgtggcacagctggagtataaactggtagctggagaacatggtttaattattcgagtgaaaggatttaaccacaaactacctctactgtttcagctcattattgactacttagctgagttcaattccacaccagctgtctttacaatgataactgagcagttgaagaagacctactttaacatcctcatcaagcctgagactttggccaaagatgtacggcttttaatcttggaatatgcccgttggtctatgattgacaagtaccaggctttgatggacggcctttcccttgagtctctgctgagcttcgtcaaagaattcaaatcccagctctttgtggagggcctggtacaagggaatgtcacaagcacagaatctatggatttcctgaaatatgttgttgacaaactaaacttcaagcctctggagcaggagatgcctgtgcagttccaggtggtagagctgcccagtggccaccatctatgcaaagtgaaagctctgaacaagggtgatgccaactctgaagtcactgtgtactaccagtcaggtaccaggagtctaagagaatatacgcttatggagctgcttgtgatgcacatggaagaaccttgttttgacttccttcgaaccaagcagacccttgggtaccatgtctaccctacctgtaggaacacatccgggattctaggattttctgtcactgtggggactcaggcaaccaaatacaattctgaagttgttgataagaagatagaagagtttctttctagctttgaggagaagattgagaacctcactgaagaggcattcaacacccaggtcacagctctcatcaagctgaaggagtgtgaggatacccaccttggggaggaggtggataggaactggaatgaagtggttacacagcagtacctctttgaccgccttgcccacgagattgaagcactgaagtcattctcaaaatcagacctggtcaactggttcaaggcccatagagggccaggaagtaaaatgctcagcgttcatgttgttggatatgggaagtatgaactggaagaggatggtaccccttctagtgaggattcaaattcttcttgtgaagtgatgcagctgacctacctgccaacctctcctctgctggcagattgtatcatccccattactgatatcagggctttcacaacaacactcaaccttctcccctaccataaaatagtcaaataaataaactgcagtcacgttggcctgaagcaatgt

SEQ ID NO: 448540 - DNA, 4314 bp, Homo sapiens
gttcgctggctgttccgagaatcagtccgggtcacgttggtgcctctcctttcctgttctgattggttgcttacgtgagcgtgactactttcttgcctcatgattggctgaaatcagtagcgtcatcggcggccgggagggcggagggacgagggaagtcggcgagagggagactgggttgggggaggggttcaggcctgttccccgcggctgcggcagcaccagggccggccgccaccgcctctagaacgcggaggaggtgggtcctgggaagcgggatgtccatcgctccagcttggtggtgaatgctgaggagagtcactgttgctgcagtctgtgccacccggaggaagttgtgtgaggccgggcgggagctcgcggcgctctggggaatcgaaacgcggggtcggtgcgaagactctgctgctgccagaccctttcctattctggccatgcctggaaggaacaaggcgaagtctacctgcagctgccctgacctgcagcccaatggacaggatctgggcgagaacagccgggttgcccgtctaggagcggatgaatctgaggaagagggacggagggggtctctcagtaatgctggggaccctgagatcgtcaagtctcccagcgaccccaagcaataccgatacatcaaattacagaatggcttgcaggcacttctgatttcagacctaagtaatatggaaggtaaaacaggaaatacaacagatgatgaagaagaagaggaggtggaggaagaagaagaagatgatgatgaagattctggagctgaaatagaagatgacgatgaagagggttttgatgatgaagatgagtttgatgatgaacatgatgatgatcttgatactgaggataatgaattggaagaattagaagagagagcagaagctagaaaaaaaactactgaaaaacagtctgcagcggctctttgtgttggagttgggagtttcgctgatccagatgacctgccggggctggcacactttttggagcacatggtattcatgggtagtttgaaatatccagatgagaatggatttgatgccttcctgaagaagcatgggggtagtgataatgcctcaactgattgtgaacgcactgtctttcagtttgatgtccagaggaagtacttcaaggaagctcttgatagatgggcgcagttcttcatccacccactaatgatcagagatgcaattgaccgtgaagttgaagctgttgatagtgaatatcaacttgcaaggccttctgatgcaaacagaaaggaaatgttgtttggaagccttgctagacctggccatcctatgggaaaatttttttggggaaatgctgagacgctcaagcatgagccaagaaagaataatattgatacacatgctagattgagagaattctggatgcgttactactcttctcattacatgactttagtggttcaatccaaagaaacactggatactttggaaaagtgggtgactgaaatcttctctcagataccaaacaatgggttacccagaccaaactttggccatttaacggatccatttgacacaccagcatttaacaaactttatagagttgttccaatcagaaaaattcatgctctgaccatcacatgggcacttcctcctcaacagcaacattacagggtgaagccacttcattatatatcctggctggttggacatgaaggcaaaggcagcattctttctttccttaggaaaaaatgctgggctcttgcactgtttggtggaaatggtgagacaggatttgagcaaaattctacttattcagtgttcagcatttctattacattgactgatgagggttatgaacatttttatgaggttgcttacactgtctttcagtatttaaaaatgctgcagaagctaggcccagaaaaaagaatttttgaagagattcggaaaattgaggataatgaatttcattaccaagaacagacagatccagttgagtatgtggaaaacatgtgtgagaacatgcagctgtacccattgcaggacattctcactggagatcagcttctttttgaatacaagccagaagtcattggtgaagccttgaatcagctagttcctcaaaaagcaaatcttgttttactgtctggtgctaatgagggaaaatgtgacctcaaggagaaatggtttggaactcaatatagtatagaagatattgaaaactcttgggctgaactgtggaatagtaatttcgaattaaatccagatcttcatcttccagctgaaaacaagtacatagccacggactttacgttgaaggctttcgattgcccggaaacagaatacccagttaaaattgtgaatactccacaaggttgcctgtggtataagaaagacaacaaattcaaaatccccaaagcatatatacgtttccatctaatttcaccgttgatacagaaatctgcagcaaatgtggtcctctttgatatctttgtcaatatccttacgcataaccttgcggaaccagcttatgaagcagatgtggcacagctggagtataaactggtagctggagaacatggtttaattattcgagtgaaaggatttaaccacaaactacctctactgtttcagctcattattgactacttagctgagttcaattccacaccagctgtctttacaatgataactgagcagttgaagaagacctactttaacatcctcatcaagcctgagactttggccaaagatgtacggcttttaatcttggaatatgcccgttggtctatgattgacaagtaccaggctttgatggacggcctttcccttgagtctctgctgagcttcgtcaaagaattcaaatcccagctctttgtggagggcctggtacaagggaatgtcacaagcacagaatctatggatttcctgaaatatgttgttgacaaactaaacttcaagcctctggagcaggagatgcctgtgcagttccaggtggtagagctgcccagtggccaccatctatgcaaagtgaaagctctgaacaagggtgatgccaactctgaagtcactgtgtactaccagtcaggtaccaggagtctaagagaatatacgcttatggagctgcttgtgatgcacatggaagaaccttgttttgacttccttcgaaccaagcagacccttgggtaccatgtctaccctacctgtaggaacacatccgggattctaggattttctgtcactgtggggactcaggcaaccaaatacaattctgaagttgttgataagaagatagaagagtttctttctagctttgaggagaagattgagaacctcactgaagaggcattcaacacccaggtcacagctctcatcaagctgaaggagtgtgaggatacccaccttggggaggaggtggataggaactggaatgaagtggttacacagcagtacctctttgaccgccttgcccacgagattgaagcactgaagtcattctcaaaatcagacctggtcaactggttcaaggcccatagagggccaggaagtaaaatgctcagcgttcatgttgttggatatgggaagtatgaactggaagaggatggtaccccttctagtgaggattcaaattcttcttgtgaagtgatgcagctgacctacctgccaacctctcctctgctggcagattgtatcatccccattactgatatcagggctttcacaacaacactcaaccttctcccctaccataaaatagtcaaataaataaactgcagtcacgttggcctgaagcaatgtgtattttaaaatgtgtttgtttgtattttatggagttagttatactactgccttagggcttccattgaagttttgcactggcatcatagcatttgatttactttttatcctttgttgagactaataaacccagggttactgtaggagctggcaaaggaaaattagcagaatgggccaagcgagaccagaaagcctgcagcagcactttgagaagccctggcctgtgtcctctcagactgagaatctacttcttgaaaggccttacgtaaccagtatattgaataactaactaaatgctaggtactaatacctgtttttttaatgtatttttaaataaaaaagatgatagatagatagatagatatagttctgtatttcccttcagaatgagccatctgctgctgtggcattcattttattctatctatctatctatttttgttcactgtggggtggggatctataaatacacactcttcccaaaccctctaaggcaataaaacatttttggataaaatgt

SEQ ID NO: 448541 - DNA, 4448 bp, Homo sapiens
gttcgctggctgttccgagaatcagtccgggtcacgttggtgcctctcctttcctgttctgattggttgcttacgtgagcgtgactactttcttgcctcatgattggctgaaatcagtagcgtcatcggcggccgggagggcggagggacgagggaagtcggcgagagggagactgggttgggggaggggttcaggcctgttccccgcggctgcggcagcaccagggccggccgccaccgcctctagaacgcggaggaggtgggtcctgggaagcgggatgtccatcgctccagcttggtggtgaatgctgaggagagtcactgttgctgcagtctgtgccacccggaggaagttgtgtgaggccgggcgggagctcgcggcgctctggggaatcgaaacgcggggtcggtgcgaagactctgctgctgccagaccctttcctattctggccatgcctggaaggaacaaggcgaagtctacctgcagctgccctgacctgcagcccaatggacaggatctgggcgagaacagccgggttgcccgtctaggagcggatgaatctgaggaagagggacggagggggtctctcagtaatgctggggaccctgagatcgtcaagtctcccagcgaccccaagcaataccgatacatcaaattacagaatggcttgcaggcacttctgatttcagacctaagtaatatggaaggtaaaacaggaaatacaacagatgatgaagaagaagaggaggtggaggaagaagaagaagatgatgatgaagattctggagctgaaatagaagatgacgatgaagagggttttgatgatgaagatgagtttgatgatgaacatgatgatgatcttgatactgaggataatgaattggaagaattagaagagagagcagaagctagaaaaaaaactactgaaaaacagtctgcagcggctctttgtgttggagttgggagtttcgctgatccagatgacctgccggggctggcacactttttggagcacatggtattcatgggtagtttgaaatatccagatgagaatggatttgatgccttcctgaagaagcatgggggtagtgataatgcctcaactgattgtgaacgcactgtctttcagtttgatgtccagaggaagtacttcaaggaagctcttgatagatgggcgcagttcttcatccacccactaatgatcagagatgcaattgaccgtgaagttgaagctgttgatagtgaatatcaacttgcaaggccttctgatgcaaacagaaaggaaatgttgtttggaagccttgctagacctggccatcctatgggaaaatttttttggggaaatgctgagacgctcaagcatgagccaagaaagaataatattgatacacatgctagattgagagaattctggatgcgttactactcttctcattacatgactttagtggttcaatccaaagaaacactggatactttggaaaagtgggtgactgaaatcttctctcagataccaaacaatgggttacccagaccaaactttggccatttaacggatccatttgacacaccagcatttaacaaactttatagagttgttccaatcagaaaaattcatgctctgaccatcacatgggcacttcctcctcaacagcaacattacagggtgaagccacttcattatatatcctggctggttggacatgaaggcaaaggcagcattctttctttccttaggaaaaaatgctgggctcttgcactgtttggtggaaatggtgagacaggatttgagcaaaattctacttattcagtgttcagcatttctattacattgactgatgagggttatgaacatttttatgaggttgcttacactgtctttcagtatttaaaaatgctgcagaagctaggcccagaaaaaagaatttttgaagagattcggaaaattgaggataatgaatttcattaccaagaacagacagatccagttgagtatgtggaaaacatgtgtgagaacatgcagctgtacccattgcaggacattctcactggagatcagcttctttttgaatacaagccagaagtcattggtgaagccttgaatcagctagttcctcaaaaagcaaatcttgttttactgtctggtgctaatgagggaaaatgtgacctcaaggagaaatggtttggaactcaatatagtatagaagatattgaaaactcttgggctgaactgtggaatagtaatttcgaattaaatccagatcttcatcttccagctgaaaacaagtacatagccacggactttacgttgaaggctttcgattgcccggaaacagaatacccagttaaaattgtgaatactccacaaggttgcctgtggtataagaaagacaacaaattcaaaatccccaaagcatatatacgtttccatctaatttcaccgttgatacagaaatctgcagcaaatgtggtcctctttgatatctttgtcaatatccttacgcataaccttgcggaaccagcttatgaagcagatgtggcacagctggagtataaactggtagctggagaacatggtttaattattcgagtgaaaggatttaaccacaaactacctctactgtttcagctcattattgactacttagctgagttcaattccacaccagctgtctttacaatgataactgagcagttgaagaagacctactttaacatcctcatcaagcctgagactttggccaaagatgtacggcttttaatcttggaatatgcccgttggtctatgattgacaagtaccaggctttgatggacggcctttcccttgagtctctgctgagcttcgtcaaagaattcaaatcccagctctttgtggagggcctggtacaagggaatgtcacaagcacagaatctatggatttcctgaaatatgttgttgacaaactaaacttcaagcctctggagcaggagatgcctgtgcagttccaggtggtagagctgcccagtggccaccatctatgcaaagtgaaagctctgaacaagggtgatgccaactctgaagtcactgtgtactaccagtcaggtaccaggagtctaagagaatatacgcttatggagctgcttgtgatgcacatggaagaaccttgttttgacttccttcgaaccaagcagacccttgggtaccatgtctaccctacctgtaggaacacatccgggattctaggattttctgtcactgtggggactcaggcaaccaaatacaattctgaagttgttgataagaagatagaagagtttctttctagctttgaggagaagattgagaacctcactgaagaggcattcaacacccaggtcacagctctcatcaagctgaaggagtgtgaggatacccaccttggggaggaggtggataggaactggaatgaagtggttacacagcagtacctctttgaccgccttgcccacgagattgaagcactgaagtcattctcaaaatcagacctggtcaactggttcaaggcccatagagggccaggaagtaaaatgctcagcgttcatgtgagtatgtttaactaactccatccattctagggttgtcatttactgagtgagtttgggtggttatcatcagaactcttaaacccctaaatctggtcagcatatttttcacttttgtctttgtcctctttcaggttgttggatatgggaagtatgaactggaagaggatggtaccccttctagtgaggattcaaattcttcttgtgaagtgatgcagctgacctacctgccaacctctcctctgctggcagattgtatcatccccattactgatatcagggctttcacaacaacactcaaccttctcccctaccataaaatagtcaaataaataaactgcagtcacgttggcctgaagcaatgtgtattttaaaatgtgtttgtttgtattttatggagttagttatactactgccttagggcttccattgaagttttgcactggcatcatagcatttgatttactttttatcctttgttgagactaataaacccagggttactgtaggagctggcaaaggaaaattagcagaatgggccaagcgagaccagaaagcctgcagcagcactttgagaagccctggcctgtgtcctctcagactgagaatctacttcttgaaaggccttacgtaaccagtatattgaataactaactaaatgctaggtactaatacctgtttttttaatgtatttttaaataaaaaagatgatagatagatagatagatatagttctgtatttcccttcagaatgagccatctgctgctgtggcattcattttattctatctatctatctatttttgttcactgtggggtggggatctataaatacacactcttcccaaaccctctaaggcaataaaacatttttggataaaatgt

SEQ ID NO: 448542 - DNA, 3474 bp, Homo sapiens
gttcgctggctgttccgagaatcagtccgggtcacgttggtgcctctcctttcctgttctgattggttgcttacgtgagcgtgactactttcttgcctcatgattggctgaaatcagtagcgtcatcggcggccgggagggcggagggacgagggaagtcggcgagagggagactgggttgggggaggggttcaggcctgttccccgcggctgcggcagcaccagggccggccgccaccgcctctagaacgcggaggaggtgggtcctgggaagcgggatgtccatcgctccagcttggtggtgaatgctgaggagagtcactgttgctgcagtctgtgccacccggaggaagttgtgtgaggccgggcgggagctcgcggcgctctggggaatcgaaacgcggggtcggtgcgaagactctgctgctgccagaccctttcctattctggccatgcctggaaggaacaaggcgaagtctacctgcagctgccctgacctgcagcccaatggacaggatctgggcgagaacagccgggttgcccgtctaggagcggatgaatctgaggaagagggacggagggggtctctcagtaatgctggggaccctgagatcgtcaagtctcccagcgaccccaagcaataccgatacatcaaattacagaatggcttgcaggcacttctgatttcagacctaagtaatatggaaggtaaaacaggaaatacaacagatgatgaagaagaagaggaggtggaggaagaagaagaagatgatgatgaagattctggagctgaaatagaagatgacgatgaagagggttttgatgatgaagatgagtttgatgatgaacatgatgatgatcttgatactgaggataatgaattggaagaattagaagagagagcagaagctagaaaaaaaactactgaaaaacagtctgcagcggctctttgtgttggagttgggagtttcgctgatccagatgacctgccggggctggcacactttttggagcacatggtattcatgggtagtttgaaatatccagatgagaatggatttgatgccttcctgaagaagcatgggggtagtgataatgcctcaactgattgtgaacgcactgtctttcagtttgatgtccagaggaagtacttcaaggaagctcttgatagatgggcgcagttcttcatccacccactaatgatcagagatgcaattgaccgtgaagttgaagctgttgatagtgaatatcaacttgcaaggccttctgatgcaaacagaaaggaaatgttgtttggaagccttgctagacctggccatcctatgggaaaatttttttggggaaatgctgagacgctcaagcatgagccaagaaagaataatattgatacacatgctagattgagagaattctggatgcgttactactcttctcattacatgactttagtggttcaatccaaagaaacactggatactttggaaaagtgggtgactgaaatcttctctcagataccaaacaatgggttacccagaccaaactttggccatttaacggatccatttgacacaccagcatttaacaaactttatagagttgttccaatcagaaaaattcatgctctgaccatcacatgggcacttcctcctcaacagcaacattacagggtgaagccacttcattatatatcctggctggttggacatgaaggcaaaggcagcattctttctttccttaggaaaaaatgctgggctcttgcactgtttggtggaaatggtgagacaggatttgagcaaaattctacttattcagtgttcagcatttctattacattgactgatgagggttatgaacatttttatgaggttgcttacactgtctttcagtatttaaaaatgctgcagaagctaggcccagaaaaaagaatttttgaagagattcggaaaattgaggataatgaatttcattaccaagaacagacagatccagttgagtatgtggaaaacatgtgtgagaacatgcagctgtacccattgcaggacattctcactggagatcagcttctttttgaatacaagccagaagtcattggtgaagccttgaatcagctagttcctcaaaaagcaaatcttgttttactgtctggtgctaatgagggaaaatgtgacctcaaggagaaatggtttggaactcaatatagtatagaagatattgaaaactcttgggctgaactgtggaatagtaatttcgaattaaatccagatcttcatcttccagctgaaaacaagtacatagccacggactttacgttgaaggctttcgattgcccggaaacagaatacccagttaaaattgtgaatactccacaaggttgcctgtggtataagaaagacaacaaattcaaaatccccaaagcatatatacgtttccatctaatttcaccgttgatacagaaatctgcagcaaatgtggtcctctttgatatctttgtcaatatccttacgcataaccttgcggaaccagcttatgaagcagatgtggcacagctggagtataaactggtagctggagaacatggtttaattattcgagtgaaaggatttaaccacaaactacctctactgtttcagctcattattgactacttagctgagttcaattccacaccagctgtctttacaatgataactgagcagttgaagaagacctactttaacatcctcatcaagcctgagactttggccaaagatgtacggcttttaatcttggaatatgcccgttggtctatgattgacaagtaccaggctttgatggacggcctttcccttgagtctctgctgagcttcgtcaaagaattcaaatcccagctctttgtggagggcctggtacaagggaatgtcacaagcacagaatctatggatttcctgaaatatgttgttgacaaactaaacttcaagcctctggagcaggagatgcctgtgcagttccaggtggtagagctgcccagtggccaccatctatgcaaagtgaaagctctgaacaagggtgatgccaactctgaagtcactgtgtactaccagtcaggtaccaggagtctaagagaatatacgcttatggagctgcttgtgatgcacatggaagaaccttgttttgacttccttcgaaccaagcagacccttgggtaccatgtctaccctacctgtaggaacacatccgggattctaggattttctgtcactgtggggactcaggcaaccaaatacaattctgaagttgttgataagaagatagaagagtttctttctagctttgaggagaagattgagaacctcactgaagaggcattcaacacccaggtcacagctctcatcaagctgaaggagtgtgaggataccctaccataaaatagtcaaataaataaacagcgatgcggccgtttttctcaaataaaaaattttagccgggtgttattta

SEQ ID NO: 448543 - DNA, 2534 bp, Homo sapiens
  misc_feature (2366)..(2366): n is a, c, g, or t
  misc_feature (2437)..(2437): n is a, c, g, or t
  misc_feature (2487)..(2487): n is a, c, g, or t
  misc_feature (2531)..(2531): n is a, c, g, or t
gttcgctggctgttccgagaatcagtccgggtcacgttggtgcctctcctttcctgttctgattggttgcttacgtgagcgtgactactttcttgcctcatgattggctgaaatcagtagcgtcatcggcggccgggagggcggagggacgagggaagtcggcgagagggagactgggttgggggaggggttcaggcctgttccccgcggctgcggcagcaccagggccggccgccaccgcctctagaacgcggaggaggtgggtcctgggaagcgggatgtccatcgctccagcttggtggtgaatgctgaggagagtcactgttgctgcagtctgtgccacccggaggaagttgtgtgaggccgggcgggagctcgcggcgctctggggaatcgaaacgcggggtcggtgcgaagactctgctgctgccagaccctttcctattctggccatgcctggaaggaacaaggcgaagtctacctgcagctgccctgacctgcagcccaatggacaggatctgggcgagaacagccgggttgcccgtctaggagcggatgaatctgaggaagagggacggagggggtctctcagtaatgctggggaccctgagatcgtcaagtctcccagcgaccccaagcaataccgatacatcaaattacagaatggcttgcaggcacttctgatttcagacctaagtaatatggaaggtaaaacaggaaatacaacagatgatgaagaagaagaggaggtggaggaagaagaagaagatgatgatgaagattctggagctgaaatagaagatgacgatgaagagggttttgatgatgaagatgagtttgatgatgaacatgatgatgatcttgatactgaggataatgaattggaagaattagaagagagagcagaagctagaaaaaaaactactgaaaaacagtctgcagcggctctttgtgttggagttgggagtttcgctgatccagatgacctgccggggctggcacactttttggagcacatggtattcatgggtagtttgaaatatccagatgagaatggatttgatgccttcctgaagaagcatgggggtagtgataatgcctcaactgattgtgaacgcactgtctttcagtttgatgtccagaggaagtacttcaaggaagctcttgatagatgggcgcagttcttcatccacccactaatgatcagagatgcaattgaccgtgaagttgaagctgttgatagtgaatatcaacttgcaaggccttctgatgcaaacagaaaggaaatgttgtttggaagccttgctagacctggccatcctatgggaaaatttttttggggaaatgctgagacgctcaagcatgagccaagaaagaataatattgatacacatgctagattgagagaattctggatgcgttactactcttctcattacatgactttagtggttcaatccaaagaaacactggatactttggaaaagtgggtgactgaaatcttctctcagataccaaacaatgggttacccagaccaaactttggccatttaacggatccatttgacacaccagcatttaacaaactttatagagttgttccaatcagaaaaattcatgctctgaccatcacatgggcacttcctcctcaacagcaacattacagggtgaagccacttcattatatatcctggctggttggacatgaaggcaaaggcagcattctttctttccttaggaaaaaatgctgggctcttgcactgtttggtggaaatggtgagacaggatttgagcaaaattctacttattcagtgttcagcatttctattacattgactgatgagggttatgaacatttttatgaggttgcttacactgtctttcagtatttaaaaatgctgcagaagctaggcccagaaaaaagaatttttgaagagattcggaaaattgaggataatgaatttcattaccaagaacagacagatccagttgagtatgtggaaaacatgtgtgagaacatgcagctgtacccattgcaggacattctcactggagatcagcttctttttgaatacaagccagaagtcattggtgaagccttgaatcagctagttcctcaaaaagcaaatcttgttttactgtctggtgctaatgagggaaaatgtgacctcaaggagaaatggtttggaactcaatatagtatagaagatattgaaaactcttgggctgaactgtggaatagtaatttcgaattaaatccagatcttcatcttccagctgaaaacaagtacatagccacggactttacgttgaaggctttcgattgcccggaaacagaatacccagttaaaattgtgaaataaccnttcccacaaaggggttgccctggtgggtaataaagaaaaggacaaacaaaattcaaaaaatcccccaaaangcatatatacgtttccatccaatttcaccgttgatacagaaatcctgcancaaatgtggggccccccctttggaaaaccctttggccaaataanccc

SEQ ID NO: 448544 - DNA, 1337 bp, Homo sapiens
gttcgctggctgttccgagaatcagtccgggtcacgttggtgcctctcctttcctgttctgattggttgcttacgtgagcgtgactactttcttgcctcatgattggctgaaatcagtagcgtcatcggcggccgggagggcggagggacgagggaagtcggcgagagggagactgggttgggggaggggttcaggcctgttccccgcggctgcggcagcaccagggccggccgccaccgcctctagaacgcggaggaggtgggtcctgggaagcgggatgtccatcgctccagcttggtggtgaatgctgaggagagtcactgttgctgcagtctgtgccacccggaggaagttgtgtgaggccgggcgggagctcgcggcgctctggggaatcgaaacgcggggtcggtgcgaagactctgctgctgccagaccctttcctattctggccatgcctggaaggaacaaggcgaagtctacctgcagctgccctgacctgcagcccaatggacaggatctgggcgagaacagccgggttgcccgtctaggagcggatgaatctgaggaagagggacggagggggtctctcagtaatgctggggaccctgagatcgtcaagtctcccagcgaccccaagcaataccgatacatcaaattacagaatggcttgcaggcacttctgatttcagacctaagtaatatggaaggtaaaacaggaaatacaacagatgatgaagaagaagaggaggtggaggaagaagaagaagatgatgatgaagattctggagctgaaatagaagatgacgatgaagagggttttgatgatgaagatgagtttgatgatgaacatgatgatgatcttgatactgaggataatgaattggaagaattagaagagagagcagaagctagaaaaaaaactactgaaaaacagggtgcgagtcatgtctgttttcttctaatttgggaattctttgggtaacttctaaactcaagctttattttttaatggcaaaaaggaagtatatagttatcttttggtcttcagtaaaggtctattctgtatcaggattacattttgaaaacattttcctccaattataaaagtagtaaatgctcattatataaactaatggaatataaagaaaacaaaaatataaaaatcacctatagctatatctctcagaggtaatcaacactcagaggtatttgaatttatgtgtatttgtatacattatatgttttaaaaacaaatactggtagatgaggagctgcagaattcttagcctggattagagaaataagagtatgttatccttggtgagactggaaaaag

SEQ ID NO: 448545 - DNA, 6380 bp, Homo sapiens
  misc_feature (4522)..(4522): n is a, c, g, or t
cccccggcggagccagctgctgctcttcggtgctggccccggtgccggccccgttgcccagggaacaggctcccggcagcccccgcggcccggagtccatcccgcctcctccggcccggcggggccgacgagtccggaggggctgccgcgggagcccccaggtttccctagatgacaaataaacattccttttcctgcgtgaagatagtctgtggaaaccttggccatggcatcgatatcagagcctgttacattcagagagttctgcccgttgtactatctcctcaatgccattccgacaaagatccagaagggtttccgctctatcgtggtctatctcacggccctcgacaccaacggggactacatcgcggtgggcagcagcatcggcatgctctatctgtactgccggcacctcaaccagatgaggaagtacaactttgaggggaagacggaatctatcactgtggtgaagctgctgagctgctttgatgacctggtggcagcaggcacagcctctggcagggttgcagtttttcaacttgtatcttcattgccagggagaaataaacagcttcggagatttgatgtcactggtattcacaaaaatagcattacagctctggcttggagccccaatggaatgaaattgttctctggagatgacaaaggcaaaattgtttattcttctctggatctagaccaggggctctgtaactcccagctggtgttggaggagccatcttccattgtgcagctggattatagccagaaagtgctgctggtctctactctgcaaagaagtctgctcttttacactgaagaaaagtctgtaaggcaaattggaacacaaccaaggaaaagtactgggaaatttggtgcttgttttataccaggactctgtaagcaaagtgatctaaccttgtatgcgtcacggcccgggctccggctatggaaggctgatgtccacgggactgttcaagccacgtttatcttaaaagatgcttttgccgggggagtcaagccttttgaactgcacccgcgtctggaatcccccaacagtggaagttgcagcttacctgagaggcacctggggcttgtttcatgtttctttcaagaaggctgggtgctgagttggaatgaatatagtatctatctcctagacacagtcaaccaggccacaattgctggtttggaaggatccggtgatattgtgtctgtttcgtgcacagaaaatgaaatatttttcttgaaaggagataggaacattataagaatttcaagcaggcctgaaggattaacatcaacagtgagagatggtctggagatgtctggatgctcagagcgtgtccacgtgcagcaagcggagaagctgccaggggccacagtttctgagacgaggctcagaggctcttccatggccagctccgtggccagcgagccaaggagcaggagcagctcgctcaactccaccgacagcggctccgggctcctgccccctgggctccaggccacccctgagctgggcaagggcagccagcccctgtcacagagattcaacgccatcagctcagaggactttgaccaggagcttgtcgtgaagcctatcaaagtgaaaaggaagaagaagaagaagaagacagaaggtggaagcaggagcacctgtcacagctccctggaatcgacaccctgctccgaatttcctggggacagtccccagtccttgaacacagacttgctgtcgatgacctcaagtgtcctgggcagtagcgtggatcagttaagtgcagagtctccagaccaggaaagcagcttcaatggtgaagtgaacggtgtcccacaggaaaatactgaccccgaaacgtttaatgtcctggaggtgtcaggatcaatgcctgattctctggctgaggaagatgacattagaactgaaatgccacactgtcaccatgcacatgggcgggagctgctcaatggagcgagggaagatgtgggaggcagtgatgtcacgggactcggagatgagccgtgtcctgcagatgatggaccaaatagcacacagttacccttccaagaacaggacagctctcctggggcgcatgatggggaagacatccaacccattggcccccaaagcactttttgtgaagtccccctcctgaactcactcactgtgccttccagcctcagctgggccccaagtgctgaacagtggctgcctgggaccagagctgatgaaggcagccccgtggagcccagccaagagcaggacatcctaaccagcatggaggcctctggccacctcagcacaaatctctggcatgctgtcactgatgatgacacaggtcagaaagaaatacccatttctgaacgtgtcttggggagtgtgggaggacagctgactccggtctctgccttggcagccagcactcacaagccctggcttgagcagcctccacgggatcagacattgacgtccagcgatgaggaggacatctatgcccacgggcttccttcttcatcctcagagacgagtgtgacagagctcggacctagttgctcccagcaggacctgagccggctgggtgcagaggacgccgggctgctcaagccagatcagtttgcagaaagctggatgggctactcgggtcccggctatggcatcctcagcttggtggtctccgagaagtatatctggtgcctggactacaaaggcggcctgttctgcagcgcgttgccgggcgccgggctgcgctggcagaagtttgaagatgctgtccagcaggtggcagtctcgccctcaggagcccttctctggaagattgaacagaaatctaaccgggcttttgcttgtgggaaagtcaccatcaaggggaagcggcactggtacgaagccctgccccaggcagtgtttgtggccctgagcgatgacacggcctggatcatcaggaccagtggggacctatacttgcagacaggtctgagcgtggatcgcccttgtgccagagccgtaaaggtggactgtccctacccgctgtcccagatcacagcccggaacaatgtggtgtgggcgctgacagagcagagggccctcctgtaccgggagggcgtgagcagcttctgtccggaaggcgagcagtggaagtgtgacattgtcagcgaaaggcaagctttagaacccgtctgcataacgctcggggatcagcagactctctgggccctggacatccatgggaacctgtggttcagaactggcattatttccaagaagccccaaggagatgacgaccattggtggcaagtgagcatcacggactatgtggtgtttgaccagtgcagcttatttcagacgataatccatgccactcactcggtggccacagcagcccaagcccccgtagaaaaggtggcagataagctgcgcatggcgttttggtcccagcagcttcagtgccagccaagccttctcggggtcaataacagcggtgtctggatctcctcgggcaagaatgaattccacgtcgctaagggaagtctcataggcacctactggaatcatgtggttccccgtgggacagcttctgctacaaaatgggcctttgtgttggcttctgcagctcccacgaaggaaggaagcttcctgtggctgtgccagagcagcaaggacctgtgcagcgtcagcgcccagagcgcacagtcgcggccctccacggtgcagctgcctcccgaagccgagatgcgcgcctatgccgcctgccaggatgcgctgtgggcgctggacagcctcggccaggtgttcatcaggacgctctccaagagctgccccacgggcatgcactggaccaggctggacctctcccagctaggagctgtaaaattgacaagcttggcatgtggaaatcagcacatctgggcctgtgattccaggggtggagtttacttccgtgtagggactcagcctctcaatcccagtctcatgcttccagcctggataatgattgagccacctgtccagcccgccggggtcagcttggtcagcgtccattccagccccaacgaccagatgctgtgggtgcttgacagcaggtggaacgtgcacgtgcggaccgggatcaccgaggagatgcctgtggggaccgcctgggagcatgtgccagggttgcaggcctgccagctggcgctgagcaccaggaccgtgtgggcccgctgtccaaacggagacctcgcccggcggtacggcgtcacagacaagaaccccgccggggactactggaagaaaattcccggcagcgtgtcgtgtttcacagtgactgcgtcagatgagctgtgggctgtgggcccgcccggctacctcctccaacggctgacaaagacgttcagccactcgcacggcacccagaagagcagccaggccgccatgccccaccctgaggacctggaggacgagtgggaggtcatctgaaggagccctggccgagtcacgcggaggggcccggcgtctgtggcgggcacaggggcttcngagtgactccctggtggacgcgctgcctcaacacttgtccagacacctctggccaggttggacccgcacacttactttcatctatgttggtttctgtctcgttccagaacccacagcctccacccgtggctggcgtgattgctgcagcagtggcgcctcctagctcaggacagtggcgactgcccggctgcatgcactccgattacccacgtgctgccgtcctggtctcatccacagatagctccagcttttgttggtgggagtggtctccggaggcctcccagaaccaagggtagccgggcagctggtttggcccagggcctccttccacattagtagccccagggccagatggagccaaaggtcagctctctgcagcgcgggatgtgctcggtgatggctttgtcccatcataggggggtgtccccccagagacaaagctgcagagcacattccatgccagacgctctggccaggaagctgaggccgggcttgagaggagagcgctggccatgccaggagagaacccacgcacatgcacaccacaacacacaacacacctcacctcacaccacagcacacctcaccacaccacaccgcactgcaccatacctcaccacatctcaccacaccacagcacacctcaccacacaacacaccacaccccacaccgcactgcaccgcaccgcaccgcaccgtacctcgccacatctcaccacaccacaccacaccacacctcactgcccacacacggcgcaggctgcccgcctcctggagagcacacttcagctgaaacagtaaagcctgatgggtgcaaatggaacctggatgtgtgcacgtgtgtcccaggtagggacggcacaggagggtgcatggggcgtgggggagctgagcaagggtcgctcacttagaaatgtctttggaatggtgtttaactaatgctgctggcggacatcctaaaaccagatgcatcctcagaggacgagtctactaattattgcctttgttgttgtattacaaatctgcataaaatacctcatttcaaatcaaatcttacaaatttagaagagagatatgttttccgaaaacagtggaagccctttgttccttcccgggtttgtcctgagcctgcactgtcctcgcctgcagcctcagaggggcaggcatccccgcacagacttgactggcagggcggtcacgggacctgcgggctggctccgagtggcagcccatgccttctgcggggtatgggttgacacttgacaggttgaaaccagtgcctctatggacggctgctgtggccccttcagacaatgggcagtgcccaccccgcccactggcatctgcgtgtgagggctaggccgccctgccacacatcccgccccctcccggaggcagcttcaggacaggacaccaggctggctgctttttttagcctgcccctggcccaggcccagtccttggtgtcagggagcccccaggccgcaggtggagggtgataaaatatgttctctgacaggacccagccagccacataggtggaggttttccatgtccaaatgaggtcaagatgccgaaatcccagatctgacttcacacttcccttttctagaaccttttgtaaaagttggtggcagcagaggcagccccaggccgggctgcatctctctgtgtctgttgtgccttgcccggcgcctcacggatggcaaagctctcctcacccatgggactgtagtgcaattaaacccgcgtctaggtgatgcttttaaagttgtagcttcgtgctttgtacagttttctttctggttttaatttttagttgtgctttgagtcagtgcaataaactagactttttcca

SEQ ID NO: 448546 - DNA, 8920 bp, Homo sapiens
  misc_feature (4522)..(4522): n is a, c, g, or t
cccccggcggagccagctgctgctcttcggtgctggccccggtgccggccccgttgcccagggaacaggctcccggcagcccccgcggcccggagtccatcccgcctcctccggcccggcggggccgacgagtccggaggggctgccgcgggagcccccaggtttccctagatgacaaataaacattccttttcctgcgtgaagatagtctgtggaaaccttggccatggcatcgatatcagagcctgttacattcagagagttctgcccgttgtactatctcctcaatgccattccgacaaagatccagaagggtttccgctctatcgtggtctatctcacggccctcgacaccaacggggactacatcgcggtgggcagcagcatcggcatgctctatctgtactgccggcacctcaaccagatgaggaagtacaactttgaggggaagacggaatctatcactgtggtgaagctgctgagctgctttgatgacctggtggcagcaggcacagcctctggcagggttgcagtttttcaacttgtatcttcattgccagggagaaataaacagcttcggagatttgatgtcactggtattcacaaaaatagcattacagctctggcttggagccccaatggaatgaaattgttctctggagatgacaaaggcaaaattgtttattcttctctggatctagaccaggggctctgtaactcccagctggtgttggaggagccatcttccattgtgcagctggattatagccagaaagtgctgctggtctctactctgcaaagaagtctgctcttttacactgaagaaaagtctgtaaggcaaattggaacacaaccaaggaaaagtactgggaaatttggtgcttgttttataccaggactctgtaagcaaagtgatctaaccttgtatgcgtcacggcccgggctccggctatggaaggctgatgtccacgggactgttcaagccacgtttatcttaaaagatgcttttgccgggggagtcaagccttttgaactgcacccgcgtctggaatcccccaacagtggaagttgcagcttacctgagaggcacctggggcttgtttcatgtttctttcaagaaggctgggtgctgagttggaatgaatatagtatctatctcctagacacagtcaaccaggccacaattgctggtttggaaggatccggtgatattgtgtctgtttcgtgcacagaaaatgaaatatttttcttgaaaggagataggaacattataagaatttcaagcaggcctgaaggattaacatcaacagtgagagatggtctggagatgtctggatgctcagagcgtgtccacgtgcagcaagcggagaagctgccaggggccacagtttctgagacgaggctcagaggctcttccatggccagctccgtggccagcgagccaaggagcaggagcagctcgctcaactccaccgacagcggctccgggctcctgccccctgggctccaggccacccctgagctgggcaagggcagccagcccctgtcacagagattcaacgccatcagctcagaggactttgaccaggagcttgtcgtgaagcctatcaaagtgaaaaggaagaagaagaagaagaagacagaaggtggaagcaggagcacctgtcacagctccctggaatcgacaccctgctccgaatttcctggggacagtccccagtccttgaacacagacttgctgtcgatgacctcaagtgtcctgggcagtagcgtggatcagttaagtgcagagtctccagaccaggaaagcagcttcaatggtgaagtgaacggtgtcccacaggaaaatactgaccccgaaacgtttaatgtcctggaggtgtcaggatcaatgcctgattctctggctgaggaagatgacattagaactgaaatgccacactgtcaccatgcacatgggcgggagctgctcaatggagcgagggaagatgtgggaggcagtgatgtcacgggactcggagatgagccgtgtcctgcagatgatggaccaaatagcacacagttacccttccaagaacaggacagctctcctggggcgcatgatggggaagacatccaacccattggcccccaaagcactttttgtgaagtccccctcctgaactcactcactgtgccttccagcctcagctgggccccaagtgctgaacagtggctgcctgggaccagagctgatgaaggcagccccgtggagcccagccaagagcaggacatcctaaccagcatggaggcctctggccacctcagcacaaatctctggcatgctgtcactgatgatgacacaggtcagaaagaaatacccatttctgaacgtgtcttggggagtgtgggaggacagctgactccggtctctgccttggcagccagcactcacaagccctggcttgagcagcctccacgggatcagacattgacgtccagcgatgaggaggacatctatgcccacgggcttccttcttcatcctcagagacgagtgtgacagagctcggacctagttgctcccagcaggacctgagccggctgggtgcagaggacgccgggctgctcaagccagatcagtttgcagaaagctggatgggctactcgggtcccggctatggcatcctcagcttggtggtctccgagaagtatatctggtgcctggactacaaaggcggcctgttctgcagcgcgttgccgggcgccgggctgcgctggcagaagtttgaagatgctgtccagcaggtggcagtctcgccctcaggagcccttctctggaagattgaacagaaatctaaccgggcttttgcttgtgggaaagtcaccatcaaggggaagcggcactggtacgaagccctgccccaggcagtgtttgtggccctgagcgatgacacggcctggatcatcaggaccagtggggacctatacttgcagacaggtctgagcgtggatcgcccttgtgccagagccgtaaaggtggactgtccctacccgctgtcccagatcacagcccggaacaatgtggtgtgggcgctgacagagcagagggccctcctgtaccgggagggcgtgagcagcttctgtccggaaggcgagcagtggaagtgtgacattgtcagcgaaaggcaagctttagaacccgtctgcataacgctcggggatcagcagactctctgggccctggacatccatgggaacctgtggttcagaactggcattatttccaagaagccccaaggagatgacgaccattggtggcaagtgagcatcacggactatgtggtgtttgaccagtgcagcttatttcagacgataatccatgccactcactcggtggccacagcagcccaagcccccgtagaaaaggtggcagataagctgcgcatggcgttttggtcccagcagcttcagtgccagccaagccttctcggggtcaataacagcggtgtctggatctcctcgggcaagaatgaattccacgtcgctaagggaagtctcataggcacctactggaatcatgtggttccccgtgggacagcttctgctacaaaatgggcctttgtgttggcttctgcagctcccacgaaggaaggaagcttcctgtggctgtgccagagcagcaaggacctgtgcagcgtcagcgcccagagcgcacagtcgcggccctccacggtgcagctgcctcccgaagccgagatgcgcgcctatgccgcctgccaggatgcgctgtgggcgctggacagcctcggccaggtgttcatcaggacgctctccaagagctgccccacgggcatgcactggaccaggctggacctctcccagctaggagctgtaaaattgacaagcttggcatgtggaaatcagcacatctgggcctgtgattccaggggtggagtttacttccgtgtagggactcagcctctcaatcccagtctcatgcttccagcctggataatgattgagccacctgtccagcccgccggggtcagcttggtcagcgtccattccagccccaacgaccagatgctgtgggtgcttgacagcaggtggaacgtgcacgtgcggaccgggatcaccgaggagatgcctgtggggaccgcctgggagcatgtgccagggttgcaggcctgccagctggcgctgagcaccaggaccgtgtgggcccgctgtccaaacggagacctcgcccggcggtacggcgtcacagacaagaaccccgccggggactactggaagaaaattcccggcagcgtgtcgtgtttcacagtgactgcgtcagatgagctgtgggctgtgggcccgcccggctacctcctccaacggctgacaaagacgttcagccactcgcacggcacccagaagagcagccaggccgccatgccccaccctgaggacctggaggacgagtgggaggtcatctgaaggagccctggccgagtcacgcggaggggcccggcgtctgtggcgggcacaggggcttcngagtgactccctggtggacgcgctgcctcaacacttgtccagacacctctggccaggttggacccgcacacttactttcatctatgttggtttctgtctcgttccagaacccacagcctccacccgtggctggcgtgattgctgcagcagtggcgcctcctagctcaggacagtggcgactgcccggctgcatgcactccgattacccacgtgctgccgtcctggtctcatccacagatagctccagcttttgttggtgggagtggtctccggaggcctcccagaaccaagggtagccgggcagctggtttggcccagggcctccttccacattagtagccccagggccagatggagccaaaggtcagctctctgcagcgcgggatgtgctcggtgatggctttgtcccatcataggggggtgtccccccagagacaaagctgcagagcacattccatgccagacgctctggccaggaagctgaggccgggcttgagaggagagcgctggccatgccaggagagaacccacgcacatgcacaccacaacacacaacacacctcacctcacaccacagcacacctcaccacaccacaccgcactgcaccatacctcaccacatctcaccacaccacagcacacctcaccacacaacacaccacaccccacaccgcactgcaccgcaccgcaccgcaccgtacctcgccacatctcaccacaccacaccacaccacacctcactgcccacacacggcgcaggctgcccgcctcctggagagcacacttcagctgaaacagtaaagcctgatgggtgcaaatggaacctggatgtgtgcacgtgtgtcccaggtagggacggcacaggagggtgcatggggcgtgggggagctgagcaagggtcgctcacttagaaatgtctttggaatggtgtttaactaatgctgctggcggacatcctaaaaccagatgcatcctcagaggacgagtctactaattattgcctttgttgttgtattacaaatctgcataaaatacctcatttcaaatcaaatcttacaaatttagaagagagatatgttttccgaaaacagtggaagccctttgttccttcccgggtttgtcctgagcctgcactgtcctcgcctgcagcctcagaggggcaggcatccccgcacagacttgactggcagggcggtcacgggacctgcgggctggctccgagtggcagcccatgccttctgcggggtatgggttgacacttgacaggttgaaaccagtgcctctatggacggctgctgtggccccttcagacaatgggcagtgcccaccccgcccactggcatctgcgtgtgagggctaggccgccctgccacacatcccgccccctcccggaggcagcttcaggacaggacaccaggctggctgctttttttagcctgcccctggcccaggcccagtccttggtgtcagggagcccccaggccgcaggtggagggtgataaaatatgttctctgacaggacccagccagccacataggtggaggttttccatgtccaaatgaggtcaagatgccgaaatcccagatctgacttcacacttcccttttctagaaccttttgtaaaagttggtggcagcagaggcagccccaggccgggctgcatctctctgtgtctgttgtgccttgcccggcgcctcacggatggcaaagctctcctcacccatgggactgtagtgcaattaaacccgcgtctaggtgatgcttttaaagttgtagcttcgtgctttgtacagttttctttctggttttaatttttagttgtgctttgagtcagtgcaataaactagactttttccaaacctggccgagtgtggtgcctgagctgtgagaagtgtcctcagccgacactcacgagggcagtgcaagggagaacctgccagcccagccccaccacagggagagtgcgtcagcagacctgtcctggcctggctggtgttgaaatacacaccggtttgcccaagtggctgttatgggggaatggccgctccagagctggctgtaccccatggtagcctctgaggaggacgctgtggggtgaggtccagggctgcctcctcatggagctgtgtgtgagcaggcgttggaggggttcgagcccctggttctgtatcttcagccagcaaacgaaaccatatcgcaaaccagagctgctggaaaccagcacacgcaaaagatgacgcccagcacagcagcaggacacaccatgtgccaggaaatgacctcagcaagaaacctcaggccgtgtgaagagcagcaaagctttccagaaggcataaaaggaaacttgaataaaggaagatatgttccacattcctggatggaggactacacacattatggaaagacctcattctttccaaaggaatttataggtgtagcttgatttcagttcaaatccccactgggattgttttgttggggcaggcagggaggaataatgttagtacccacaaatgcccatgactgtgcccaatgtgcttctcaccagagccctgcaaggggaagtctcattagccccttgagactcagagaggttaggtaacttgctcaaggtcacacagcactgggactggaagccagctctgtagaactgcagacctgtgctgtttgatgcctcctcactgtcccgtcactcctgggaagaagaaacgggtgagaactgctaagtgatgacaggtggagccccagcaggggccactctattgaatggcatggcccagaccctcggagggccaggcaacaggctagcaaggcccacagggagggagcagaatggagagggcatctcagatgcgcttaaggagcggcgggggcggggcatggggggtgtcacaactaatgtggccactgcttcattctctgggcaaaataatattaaatggattaaagaatctaaaaccagtgggaaaactgtctgatttctggatggcaaaggctttctaaactcaaaagtgataggacaagctacagaggaaaataagtacatagatttgatttctccaaaatacagaaatgctgctgggcacagtgatgtgcagttatagtcccagctacttgggaggccaaggcaggaggattacttgagcccaggagtttgaggctgcaatgaactatgatcacaccactgcactccagcctcggcgacagagcaagaccttgtttctcaaaaataaataaatagaaggaaataaatgtaaaaatgctgcaaattaaaaacctcaaagaagggaaataattgcaacaaatgggaattgatgttgaatatttaccttaaaaacctatacaacaataagaggagtgcgcccttcagcagcatgtatacaaaaattgcaacgatacagagattagcatggcccctgcacaaggatgactcgcaaattcataaagctttccataaatatatttattaaaaaccaataggaggagcacttcgagtcgagtgtaagggcccttcacaaaagcagaaggaacactggcccaaacccccagcaccccggaagcagaggtgagatgggagcagcttgggagccccccattggcgccgccctactggggaagccggtccgtacgtaggccttgcatctcgccacctccacttctgtcctcaagaacaagtcctaggtcaagggaaacagcacagcctgtttataattaggaaacacttaaaacagcctggcatttgggaacagccatgttaacgtgagcaaattcctctcatgaaatagcctgcagctattaagaagcacgtgtgtgcaggaagcggaggcgcaggacctcaccgcgccagcgtgaagttcccgggcatggtcatgaaagcgtggttctgtaagaaatcagagggagaaagggagagaagggggagggagacaacccaaacgttggagggtatttgttgtaaacttcaaacttttggcaggtttgaaatttttcataactccggggaggagcaagaggggtgaaaagaaacaagttctctacttgtgatcagcagctggtcatagtggttgcctggagtatatgcctttttgtatcctttgaatttccagccatgtaaatgtattatttattccaaaaataaagcagatttacattttaaaaattcagttgtctctaactactctttgttatcaaggctggttgagtcaaatatcacaaagtagacaccaatgacttcttaaaaatcatatttacaaagtacaatgggggaaatgcttatactacattaaggttaaaaaaatactaaattgtgtaactgatctggtttcatatatatataaatatacacagaaaaaaatgtaatatatatctgcacagaaaaaagctgaaagaaacatatg

SEQ ID NO: 448547 - DNA, 4379 bp, Homo sapiens
cccccggcggagccagctgctgctcttcggtgctggccccggtgccggccccgttgcccagggaacaggctcccggcagcccccgcggcccggagtccatcccgcctcctccggcccggcggggccgacgagtccggaggggctgccgcgggagcccccaggtttccctagatgacaaataaacattccttttcctgcgtgaagatagtctgtggaaaccttggccatggcatcgatatcagagcctgttacattcagagagttctgcccgttgtactatctcctcaatgccattccgacaaagatccagaagggtttccgctctatcgtggtctatctcacggccctcgacaccaacggggactacatcgcggtgggcagcagcatcggcatgctctatctgtactgccggcacctcaaccagatgaggaagtacaactttgaggggaagacggaatctatcactgtggtgaagctgctgagctgctttgatgacctggtggcagcaggcacagcctctggcagggttgcagtttttcaacttgtatcttcattgccagggagaaataaacagcttcggagatttgatgtcactggtattcacaaaaatagcattacagctctggcttggagccccaatggaatgaaattgttctctggagatgacaaaggcaaaattgtttattcttctctggatctagaccaggggctctgtaactcccagctggtgttggaggagccatcttccattgtgcagctggattatagccagaaagtgctgctggtctctactctgcaaagaagtctgctcttttacactgaagaaaagtctgtaaggcaaattggaacacaaccaaggaaaagtactgggaaatttggtgcttgttttataccaggactctgtaagcaaagtgatctaaccttgtatgcgtcacggcccgggctccggctatggaaggctgatgtccacgggactgttcaagccacgtttatcttaaaagatgcttttgccgggggagtcaagccttttgaactgcacccgcgtctggaatcccccaacagtggaagttgcagcttacctgagaggcacctggggcttgtttcatgtttctttcaagaaggctgggtgctgagttggaatgaatatagtatctatctcctagacacagtcaaccaggccacaattgctggtttggaaggatccggtgatattgtgtctgtttcgtgcacagaaaatgaaatatttttcttgaaaggagataggaacattataagaatttcaagcaggcctgaaggattaacatcaacagtgagagatggtctggagatgtctggatgctcagagcgtgtccacgtgcagcaagcggagaagctgccaggggccacagtttctgagacgaggctcagaggctcttccatggccagctccgtggccagcgagccaaggagcaggagcagctcgctcaactccaccgacagcggctccgggctcctgccccctgggctccaggccacccctgagctgggcaagggcagccagcccctgtcacagagattcaacgccatcagctcagaggactttgaccaggagcttgtcgtgaagcctatcaaagtgaaaaggaagaagaagaagaagaagacagaaggtggaagcaggagcacctgtcacagctccctggaatcgacaccctgctccgaatttcctggggacagtccccagtccttgaacacagacttgctgtcgatgacctcaagtgtcctgggcagtagcgtggatcagttaagtgcagagtctccagaccaggaaagcagcttcaatggtgaagtgaacggtgtcccacaggaaaatactgaccccgaaacgtttaatgtcctggaggtgtcaggatcaatgcctgattctctggctgaggaagatgacattagaactgaaatgccacactgtcaccatgcacatgggcgggagctgctcaatggagcgagggaagatgtgggaggcagtgatgtcacgggactcggagatgagccgtgtcctgcagatgatggaccaaatagcacacagttacccttccaagaacaggacagctctcctggggcgcatgatggggaagacatccaacccattggcccccaaagcactttttgtgaagtccccctcctgaactcactcactgtgccttccagcctcagctgggccccaagtgctgaacagtggctgcctgggaccagagctgatgaaggcagccccgtggagcccagccaagagcaggacatcctaaccagcatggaggcctctggccacctcagcacaaatctctggcatgctgtcactgatgatgacacaggtcagaaagaaatacccatttctgaacgtgtcttggggagtgtgggaggacagctgactccggtctctgccttggcagccagcactcacaagccctggcttgagcagcctccacgggatcagacattgacgtccagcgatgaggaggacatctatgcccacgggcttccttcttcatcctcagagacgagtgtgacagagctcggacctagttgctcccagcaggacctgagccggctgggtgcagaggacgccgggctgctcaagccagatcagtttgcagaaagctggatgggctactcgggtcccggctatggcatcctcagcttggtggtctccgagaagtatatctggtgcctggactacaaaggcggcctgttctgcagcgcgttgccgggcgccgggctgcgctggcagaagtttgaagatgctgtccagcaggtggcagtctcgccctcaggagcccttctctggaagattgaacagaaatctaaccgggcttttgcttgtgggaaagtcaccatcaaggggaagcggcactggtacgaagccctgccccaggcagtgtttgtggccctgagcgatgacacggcctggatcatcaggaccagtggggacctatacttgcagacaggtctgagcgtggatcgcccttgtgccagagccgtaaaggtggactgtccctacccgctgtcccagatcacagcccggaacaatgtggtgtgggcgctgacagagcagagggccctcctgtaccgggagggcgtgagcagcttctgtccggaaggcgagcagtggaagtgtgacattgtcagcgaaaggcaagctttagaacccgtctgcataacgctcggggatcagcagactctctgggccctggacatccatgggaacctgtggttcagaactggcattatttccaagaagccccaaggagatgacgaccattggtggcaagtgagcatcacggactatgtggtgtttgaccagtgcagcttatttcagacgataatccatgccactcactcggtggccacagcagcccaagcccccgtagaaaaggtggcagataagctgcgcatggcgttttggtcccagcagcttcagtgccagccaagccttctcggggtcaataacagcggtgtctggatctcctcgggcaagaatgaattccacgtcgctaagggaagtctcataggcacctactggaatcatgtggttccccgtgggacagcttctgctacaaaatgggcctttgtgttggcttctgcagctcccacgaaggaaggaagcttcctgtggctgtgccagagcagcaaggacctgtgcagcgtcagcgcccagagcgcacagtcgcggccctccacggtgcagctgcctcccgaagccgagatgcgcgcctatgccgcctgccaggatgcgctgtgggcgctggacagcctcggccaggtgttcatcaggacgctctccaagagctgccccacgggcatgcactggaccaggctggacctctcccagctaggagctgtaaaattgacaagcttggcatgtggaaatcagcacatctgggcctgtgattccaggggtggagtttacttccgtgtagggactcagcctctcaatcccagtctcatgcttccagcctggataatgattgagccacctgtccaggtaagcagaagttagctggtggaactcactcttcagtaagacagaaactgtgaggatgctggtactgggaaaaaggatctgcacagcctctagaggcctcccagcaaatgcggggagccatgcccccagggtctacacactctcgttcatcaacatcacaactggaattcgggatttgtgaagtttagagctgaacagactgttacagattatgagtcaacacgtatattttctctttcaaaataataatatttcgtttttgactttttactaagtgaatattattttttaaatctgcctatatattggaacctctattttataataataatgataataaatcagtacccagaagtataaaaaa

SEQ ID NO: 448548 - DNA, 325 bp, Homo sapiens
tggaaggctgatgtccacgggactgttcaagccacgtttatcttaaaagatgcttttgccgggggagtcaagccttttgaactgcacccgcgtctggaatcccccaacagtggaagttgcagcttacctgagaggcacctggggcttgtttcatgtttctttcaagaaggctgggtgctgagttggaatgaatatagtatctatctcctagacacagtcaaccaggtaagtgaagggacgccaccatatcttctgtgtctataggcaagagaatgtatctctataaactgttctactcagggacctcagaatgctaccaggagca

SEQ ID NO: 448549 - DNA, 8788 bp, Homo sapiens
  misc_feature (4522)..(4522): n is a, c, g, or t
cccccggcggagccagctgctgctcttcggtgctggccccggtgccggccccgttgcccagggaacaggctcccggcagcccccgcggcccggagtccatcccgcctcctccggcccggcggggccgacgagtccggaggggctgccgcgggagcccccaggtttccctagatgacaaataaacattccttttcctgcgtgaagatagtctgtggaaaccttggccatggcatcgatatcagagcctgttacattcagagagttctgcccgttgtactatctcctcaatgccattccgacaaagatccagaagggtttccgctctatcgtggtctatctcacggccctcgacaccaacggggactacatcgcggtgggcagcagcatcggcatgctctatctgtactgccggcacctcaaccagatgaggaagtacaactttgaggggaagacggaatctatcactgtggtgaagctgctgagctgctttgatgacctggtggcagcaggcacagcctctggcagggttgcagtttttcaacttgtatcttcattgccagggagaaataaacagcttcggagatttgatgtcactggtattcacaaaaatagcattacagctctggcttggagccccaatggaatgaaattgttctctggagatgacaaaggcaaaattgtttattcttctctggatctagaccaggggctctgtaactcccagctggtgttggaggagccatcttccattgtgcagctggattatagccagaaagtgctgctggtctctactctgcaaagaagtctgctcttttacactgaagaaaagtctgtaaggcaaattggaacacaaccaaggaaaagtactgggaaatttggtgcttgttttataccaggactctgtaagcaaagtgatctaaccttgtatgcgtcacggcccgggctccggctatggaaggctgatgtccacgggactgttcaagccacgtttatcttaaaagatgcttttgccgggggagtcaagccttttgaactgcacccgcgtctggaatcccccaacagtggaagttgcagcttacctgagaggcacctggggcttgtttcatgtttctttcaagaaggctgggtgctgagttggaatgaatatagtatctatctcctagacacagtcaaccaggccacaattgctggtttggaaggatccggtgatattgtgtctgtttcgtgcacagaaaatgaaatatttttcttgaaaggagataggaacattataagaatttcaagcaggcctgaaggattaacatcaacagtgagagatggtctggagatgtctggatgctcagagcgtgtccacgtgcagcaagcggagaagctgccaggggccacagtttctgagacgaggctcagaggctcttccatggccagctccgtggccagcgagccaaggagcaggagcagctcgctcaactccaccgacagcggctccgggctcctgccccctgggctccaggccacccctgagctgggcaagggcagccagcccctgtcacagagattcaacgccatcagctcagaggactttgaccaggagcttgtcgtgaagcctatcaaagtgaaaaggaagaagaagaagaagaagacagaaggtggaagcaggagcacctgtcacagctccctggaatcgacaccctgctccgaatttcctggggacagtccccagtccttgaacacagacttgctgtcgatgacctcaagtgtcctgggcagtagcgtggatcagttaagtgcagagtctccagaccaggaaagcagcttcaatggtgaagtgaacggtgtcccacaggaaaatactgaccccgaaacgtttaatgtcctggaggtgtcaggatcaatgcctgattctctggctgaggaagatgacattagaactgaaatgccacactgtcaccatgcacatgggcgggagctgctcaatggagcgagggaagatgtgggaggcagtgatgtcacgggactcggagatgagccgtgtcctgcagatgatggaccaaatagcacacagttacccttccaagaacaggacagctctcctggggcgcatgatggggaagacatccaacccattggcccccaaagcactttttgtgaagtccccctcctgaactcactcactgtgccttccagcctcagctgggccccaagtgctgaacagtggctgcctgggaccagagctgatgaaggcagccccgtggagcccagccaagagcaggacatcctaaccagcatggaggcctctggccacctcagcacaaatctctggcatgctgtcactgatgatgacacaggtcagaaagaaatacccatttctgaacgtgtcttggggagtgtgggaggacagctgactccggtctctgccttggcagccagcactcacaagccctggcttgagcagcctccacgggatcagacattgacgtccagcgatgaggaggacatctatgcccacgggcttccttcttcatcctcagagacgagtgtgacagagctcggacctagttgctcccagcaggacctgagccggctgggtgcagaggacgccgggctgctcaagccagatcagtttgcagaaagctggatgggctactcgggtcccggctatggcatcctcagcttggtggtctccgagaagtatatctggtgcctggactacaaaggcggcctgttctgcagcgcgttgccgggcgccgggctgcgctggcagaagtttgaagatgctgtccagcaggtggcagtctcgccctcaggagcccttctctggaagattgaacagaaatctaaccgggcttttgcttgtgggaaagtcaccatcaaggggaagcggcactggtacgaagccctgccccaggcagtgtttgtggccctgagcgatgacacggcctggatcatcaggaccagtggggacctatacttgcagacaggtctgagcgtggatcgcccttgtgccagagccgtaaaggtggactgtccctacccgctgtcccagatcacagcccggaacaatgtggtgtgggcgctgacagagcagagggccctcctgtaccgggagggcgtgagcagcttctgtccggaaggcgagcagtggaagtgtgacattgtcagcgaaaggcaagctttagaacccgtctgcataacgctcggggatcagcagactctctgggccctggacatccatgggaacctgtggttcagaactggcattatttccaagaagccccaaggagatgacgaccattggtggcaagtgagcatcacggactatgtggtgtttgaccagtgcagcttatttcagacgataatccatgccactcactcggtggccacagcagcccaagcccccgtagaaaaggtggcagataagctgcgcatggcgttttggtcccagcagcttcagtgccagccaagccttctcggggtcaataacagcggtgtctggatctcctcgggcaagaatgaattccacgtcgctaagggaagtctcataggcacctactggaatcatgtggttccccgtgggacagcttctgctacaaaatgggcctttgtgttggcttctgcagctcccacgaaggaaggaagcttcctgtggctgtgccagagcagcaaggacctgtgcagcgtcagcgcccagagcgcacagtcgcggccctccacggtgcagctgcctcccgaagccgagatgcgcgcctatgccgcctgccaggatgcgctgtgggcgctggacagcctcggccaggtgttcatcaggacgctctccaagagctgccccacgggcatgcactggaccaggctggacctctcccagctaggagctgtaaaattgacaagcttggcatgtggaaatcagcacatctgggcctgtgattccaggggtggagtttacttccgtgtagggactcagcctctcaatcccagtctcatgcttccagcctggataatgattgagccacctgtccagcccgccggggtcagcttggtcagcgtccattccagccccaacgaccagatgctgtgggtgcttgacagcaggtggaacgtgcacgtgcggaccgggatcaccgaggagatgcctgtggggaccgcctgggagcatgtgccagggttgcaggcctgccagctggcgctgagcaccaggaccgtgtgggcccgctgtccaaacggagacctcgcccggcggtacggcgtcacagacaagaaccccgccggggactactggaagaaaattcccggcagcgtgtcgtgtttcacagtgactgcgtcagatgagctgtgggctgtgggcccgcccggctacctcctccaacggctgacaaagacgttcagccactcgcacggcacccagaagagcagccaggccgccatgccccaccctgaggacctggaggacgagtgggaggtcatctgaaggagccctggccgagtcacgcggaggggcccggcgtctgtggcgggcacaggggcttcngagtgactccctggtggacgcgctgcctcaacacttgtccagacacctctggccaggttggacccgcacacttactttcatctatgttggtttctgtctcgttccagaacccacagcctccacccgtggctggcgtgattgctgcagcagtggcgcctcctagctcaggacagtggcgactgcccggctgcatgcactccgattacccacgtgctgccgtcctggtctcatccacagatagctccagcttttgttggtgggagtggtctccggaggcctcccagaaccaagggtagccgggcagctggtttggcccagggcctccttccacattagtagccccagggccagatggagccaaaggtcagctctctgcagcgcgggatgtgctcggtgatggctttgtcccatcataggggggtgtccccccagagacaaagctgcagagcacattccatgccagacgctctggccaggaagctgaggccgggcttgagaggagagcgctggccatgccaggagagaacccacgcacatgcacaccacaacacacaacacacctcacctcacaccacagcacacctcaccacaccacaccgcactgcaccatacctcaccacatctcaccacaccacagcacacctcaccacacaacacaccacaccccacaccgcactgcaccgcaccgcaccgcaccgtacctcgccacatctcaccacaccacaccacaccacacctcactgcccacacacggcgcaggctgcccgcctcctggagagcacacttcagctgaaacagtaaagcctgatgggtgcaaatggaacctggatgtgtgcacgtgtgtcccaggtagggacggcacaggagggtgcatggggcgtgggggagctgagcaagggtcgctcacttagaaatgtctttggaatggtgtttaactaatgctgctggcggacatcctaaaaccagatgcatcctcagaggacgagtctactaattattgcctttgttgttgtattacaaatctgcataaaatacctcatttcaaatcaaatcttacaaatttagaagagagatatgttttccgaaaacagtggaagccctttgttccttcccgggtttgtcctgagcctgcactgtcctcgcctgcagcctcagaggggcaggcatccccgcacagacttgactggcagggcggtcacgggacctgcgggctggctccgagtggcagcccatgccttctgcggggtatgggttgacacttgacaggttgaaaccagtgcctctatggacggctgctgtggccccttcagacaatgggcagtgcccaccccgcccactggcatctgcgtgtgagggctaggccgccctgccacacatcccgccccctcccggagccagccacataggtggaggttttccatgtccaaatgaggtcaagatgccgaaatcccagatctgacttcacacttcccttttctagaaccttttgtaaaagttggtggcagcagaggcagccccaggccgggctgcatctctctgtgtctgttgtgccttgcccggcgcctcacggatggcaaagctctcctcacccatgggactgtagtgcaattaaacccgcgtctaggtgatgcttttaaagttgtagcttcgtgctttgtacagttttctttctggttttaatttttagttgtgctttgagtcagtgcaataaactagactttttccaaacctggccgagtgtggtgcctgagctgtgagaagtgtcctcagccgacactcacgagggcagtgcaagggagaacctgccagcccagccccaccacagggagagtgcgtcagcagacctgtcctggcctggctggtgttgaaatacacaccggtttgcccaagtggctgttatgggggaatggccgctccagagctggctgtaccccatggtagcctctgaggaggacgctgtggggtgaggtccagggctgcctcctcatggagctgtgtgtgagcaggcgttggaggggttcgagcccctggttctgtatcttcagccagcaaacgaaaccatatcgcaaaccagagctgctggaaaccagcacacgcaaaagatgacgcccagcacagcagcaggacacaccatgtgccaggaaatgacctcagcaagaaacctcaggccgtgtgaagagcagcaaagctttccagaaggcataaaaggaaacttgaataaaggaagatatgttccacattcctggatggaggactacacacattatggaaagacctcattctttccaaaggaatttataggtgtagcttgatttcagttcaaatccccactgggattgttttgttggggcaggcagggaggaataatgttagtacccacaaatgcccatgactgtgcccaatgtgcttctcaccagagccctgcaaggggaagtctcattagccccttgagactcagagaggttaggtaacttgctcaaggtcacacagcactgggactggaagccagctctgtagaactgcagacctgtgctgtttgatgcctcctcactgtcccgtcactcctgggaagaagaaacgggtgagaactgctaagtgatgacaggtggagccccagcaggggccactctattgaatggcatggcccagaccctcggagggccaggcaacaggctagcaaggcccacagggagggagcagaatggagagggcatctcagatgcgcttaaggagcggcgggggcggggcatggggggtgtcacaactaatgtggccactgcttcattctctgggcaaaataatattaaatggattaaagaatctaaaaccagtgggaaaactgtctgatttctggatggcaaaggctttctaaactcaaaagtgataggacaagctacagaggaaaataagtacatagatttgatttctccaaaatacagaaatgctgctgggcacagtgatgtgcagttatagtcccagctacttgggaggccaaggcaggaggattacttgagcccaggagtttgaggctgcaatgaactatgatcacaccactgcactccagcctcggcgacagagcaagaccttgtttctcaaaaataaataaatagaaggaaataaatgtaaaaatgctgcaaattaaaaacctcaaagaagggaaataattgcaacaaatgggaattgatgttgaatatttaccttaaaaacctatacaacaataagaggagtgcgcccttcagcagcatgtatacaaaaattgcaacgatacagagattagcatggcccctgcacaaggatgactcgcaaattcataaagctttccataaatatatttattaaaaaccaataggaggagcacttcgagtcgagtgtaagggcccttcacaaaagcagaaggaacactggcccaaacccccagcaccccggaagcagaggtgagatgggagcagcttgggagccccccattggcgccgccctactggggaagccggtccgtacgtaggccttgcatctcgccacctccacttctgtcctcaagaacaagtcctaggtcaagggaaacagcacagcctgtttataattaggaaacacttaaaacagcctggcatttgggaacagccatgttaacgtgagcaaattcctctcatgaaatagcctgcagctattaagaagcacgtgtgtgcaggaagcggaggcgcaggacctcaccgcgccagcgtgaagttcccgggcatggtcatgaaagcgtggttctgtaagaaatcagagggagaaagggagagaagggggagggagacaacccaaacgttggagggtatttgttgtaaacttcaaacttttggcaggtttgaaatttttcataactccggggaggagcaagaggggtgaaaagaaacaagttctctacttgtgatcagcagctggtcatagtggttgcctggagtatatgcctttttgtatcctttgaatttccagccatgtaaatgtattatttattccaaaaataaagcagatttacattttaaaaattcagttgtctctaactactctttgttatcaaggctggttgagtcaaatatcacaaagtagacaccaatgacttcttaaaaatcatatttacaaagtacaatgggggaaatgcttatactacattaaggttaaaaaaatactaaattgtgtaactgatctggtttcatatatatataaatatacacagaaaaaaatgtaatatatatctgcacagaaaaaagctgaaagaaacatatg

SEQ ID NO: 448550 - DNA, 169 bp, Homo sapiens
cggcactggtacgaagccctgccccaggcagtgtttgtggccctgagcgatgacacggcctggatcatcaggaccagtggggacctatacttgcagacaggtaaccgcgggccacgcttagaggcctgccagctctgccgtcactgcctctgctgcaccctgctttgct

SEQ ID NO: 448551 - DNA, 1111 bp, Homo sapiens
gggtgggaacggcgccgagagtgtacacgtcggttgcctaacaaccggcagcggactcctttggctatggcctccaactttaagaaggcaaacatggcatcaagttctcagcgaaaaagaatgagccctaagcctgagcttactgaagagcaaaagcaggagatccgggaagcttttgatcttttcgatgcggatggaactggcaccatagatgttaaagaactgaaggtggcaatgagggccctgggctttgaacccaagaaagaagaaattaagaaaatgataagtgaaattgataaggaagggacaggaaaaatgaactttggtgactttttaactgtgatgacccagaaaatgtctgagaaagatactaaagaagaaatcctgaaagctttcaagctctttgatgatgatgaaactgggaagatttcgttcaaaaatctgaaacgcgtggccaaggagttgggtgagaacctgactgatgaggagctgcaggaaatgattgatgaagctgatcgagatggagatggagaggtcagtgagcaagagttcctgcgcatcatgaaaaagaccagcctctattaagatcagtgtcttctttttctactgcaagcacatgtaactagatttagtgcctgccatggtgtgaaatctggcttttgagaacacaaacttttcccccacggacctccctttatcactttaatagtgaccttgagcctattttagccgtttggaagtgttctttgatattacagttctttgtaaaatgacctgcgaattaccctaattctcaaaagcaaaacaagagcacacaagcgtgaagaaaaggatcttaaagctttgagcacctgccattttgccttgcatcgtttccctcgtcatgcatttccacatatccacaaacacagaacgactttagacaagcacatgttacacctgtgttgccacaagcagtcattcttgacggctccagtttttatttgacacttgagtttagttttctcttttataaacccagtgaactcctgcactggcatttggatgtgtgttaatgctatttgttttgtcttaaaagtaaaacctttctcagtttgaacttgtattctct

SEQ ID NO: 448552 - DNA, 1071 bp, Homo sapiens
aattatggccggggactcctttggctatggcctccaactttaagaaggcaaacatggcatcaagttctcagcgaaaaagaatgagccctaagcctgagcttactgaagagcaaaagcaggagatccgggaagcttttgatcttttcgatgcggatggaactggcaccatagatgttaaagaactgaaggtggcaatgagggccctgggctttgaacccaagaaagaagaaattaagaaaatgataagtgaaattgataaggaagggacaggaaaaatgaactttggtgactttttaactgtgatgacccagaaaatgtctgagaaagatactaaagaagaaatcctgaaagctttcaagctctttgatgatgatgaaactgggaagatttcgttcaaaaatctgaaacgcgtggccaaggagttgggtgagaacctgactgatgaggagctgcaggaaatgattgatgaagctgatcgagatggagatggagaggtcagtgagcaagagttcctgcgcatcatgaaaaagaccagcctctattaagatcagtgtcttctttttctactgcaagcacatgtaactagatttagtgcctgccatggtgtgaaatctggcttttgagaacacaaacttttcccccacggacctccctttatcactttaatagtgaccttgagcctattttagccgtttggaagtgttctttgatattacagttctttgtaaaatgacctgcgaattaccctaattctcaaaagcaaaacaagagcacacaagcgtgaagaaaaggatcttaaagctttgagcacctgccattttgccttgcatcgtttccctcgtcatgcatttccacatatccacaaacacagaacgactttagacaagcacatgttacacctgtgttgccacaagcagtcattcttgacggctccagtttttatttgacacttgagtttagttttctcttttataaacccagtgaactcctgcactggcatttggatgtgtgttaatgctatttgttttgtcttaaaagtaaaacctttctcagtttgaacttgtattctct

SEQ ID NO: 448553 - DNA, 1043 bp, Homo sapiens
gggtgggaacggcgccgagagtgtacacgtcggttgcctaacaaccggcagcggactcctttggctatggcctccaactttaagaaggcaaacatggcatcaagttctcagcgaaaaagaatgagccctaagcctgagcttactgaagagcaaaagcaggagatccgggaagcttttgatcttttcgatgcggatggaactggcaccatagatgttaaagaactgaaggtggcaatgagggccctgggctttgaacccaagaaagaagaaattaagaaaatgataagtgaaattgataaggaagggacaggaaaaatgaactttggtgactttttaactgtgatgacccagaaaatgtctgagaaagatactaaagaagaaatcctgaaagctttcaagctctttgatgatgatgaaactgggaagatttcgttcaaaaatctgaaacgcgtggccaaggagttgggtgagaacctgactgatgaggagctgcaggaaatgattgatgaagctgatcgagatggagatggagaggtcagtgagcaagagttcctgcgcatcatgaaaaagaccagcctctattaagatcagtgtcttctttttctactgcaagcacatgtaactagatttagtgcctgccatggtgtgaaatctggcttttgagaacacaaacttttcccccacggacctccctttatcactttaatagtgaccttgagcctattttagccgtttggaagtgttctttgatattacagttctttgtaaaatgacctgcgaattaccctaattctcaaaagcaaaacaagagcacacaagcgtgaagaaaaggatcttaaagctttgagcacctgccattttgccttgcatcgtttccctcgtcatgcatttccacatatccacaaacacagaacgactttagacaagcacatgttacacctgtgttgccacaagcagtcattcttgacggctccagtttttatttgacactttgcatccagagacacttgcatccagagacacatgcccgaggggatcctctg

SEQ ID NO: 448554 - DNA, 954 bp, Homo sapiens
gggtgggaacggcgccgagagtgtacacgtcggttgcctaacaaccggcagcggactcctttggctatggcctccaactttaagaaggcaaacatggcatcaagttctcagcgaaaaagaaaatgataagtgaaattgataaggaagggacaggaaaaatgaactttggtgactttttaactgtgatgacccagaaaatgtctgagaaagatactaaagaagaaatcctgaaagctttcaagctctttgatgatgatgaaactgggaagatttcgttcaaaaatctgaaacgcgtggccaaggagttgggtgagaacctgactgatgaggagctgcaggaaatgattgatgaagctgatcgagatggagatggagaggtcagtgagcaagagttcctgcgcatcatgaaaaagaccagcctctattaagatcagtgtcttctttttctactgcaagcacatgtaactagatttagtgcctgccatggtgtgaaatctggcttttgagaacacaaacttttcccccacggacctccctttatcactttaatagtgaccttgagcctattttagccgtttggaagtgttctttgatattacagttctttgtaaaatgacctgcgaattaccctaattctcaaaagcaaaacaagagcacacaagcgtgaagaaaaggatcttaaagctttgagcacctgccattttgccttgcatcgtttccctcgtcatgcatttccacatatccacaaacacagaacgactttagacaagcacatgttacacctgtgttgccacaagcagtcattcttgacggctccagtttttatttgacacttgagtttagttttctcttttataaacccagtgaactcctgcactggcatttggatgtgtgttaatgctatttgttttgtcttaaaagtaaaacctttctcagtttgaacttgtattctct

SEQ ID NO: 448555 - DNA, 1057 bp, Homo sapiens
gggtgggaacggcgccgagagtgtacacgtcggttgcctaacaaccggcagcggactcctttggctatggcctccaactttaagaaggcaaacatggcatcaagttctcagcgaaaaagaatgagccctaagcctgagcttactgaagagcaaaagcaggagatccgggaagcttttgatcttttcgatgcggatggaactggcaccatagatgttaaagaactgaaggtggcaatgagggccctgggctttgaacccaagaaagaagaaattaagaaaatgataagtgaaattgataaggaagggacaggaaaaatgaactttggtgactttttaactgtgatgacccagaaaatgtctgagaaagatactaaagaagaaatcctgaaagctttcaagctctttgatgatgatgaaactgggaagatttcgttcaaaaatctgaaacgcgtggccaaggagttgggtgagaacctgactgatgaggagctgcaggaaatgattgatgaagctgatcgagatggagatggagaggtcagtgagcaagagttcctgcgcatcatggtaactagatttagtgcctgccatggtgtgaaatctggcttttgagaacacaaacttttcccccacggacctccctttatcactttaatagtgaccttgagcctattttagccgtttggaagtgttctttgatattacagttctttgtaaaatgacctgcgaattaccctaattctcaaaagcaaaacaagagcacacaagcgtgaagaaaaggatcttaaagctttgagcacctgccattttgccttgcatcgtttccctcgtcatgcatttccacatatccacaaacacagaacgactttagacaagcacatgttacacctgtgttgccacaagcagtcattcttgacggctccagtttttatttgacacttgagtttagttttctcttttataaacccagtgaactcctgcactggcatttggatgtgtgttaatgctatttgttttgtcttaaaagtaaaacctttctcagtttgaacttgtattctct

SEQ ID NO: 448556 - DNA, 1036 bp, Homo sapiens
gggtgggaacggcgccgagagtgtacacgtcggttgcctaacaaccggcagcggactcctttggctatggcctccaactttaagaaggcaaacatggcatcaagttctcagcgaaaaagaatgagccctaagcctgagcttactgaagagcaaaagcaggagatccgggaagcttttgatcttttcgatgcggatggaactggcaccatagatgttaaagaactgaaggtggcaatgagggccctgggctttgaacccaagaaagaagaaattaagaaaatgataagtgaaattgataaggaagggacaggaaaaatgaactttggtgactttttaactgtgatgacccagaaaatgtctgagaaagatactaaagaagaaatcctgaaagctttcaagctctttgatgatgatgaaactgggaagatttcgttcaaaaatctgaaacgcgtggccaaggagttgggtgagaacctgactgatgaggagctgcaggaaatgattgatgaagctgatcgagatggagatggagaggtcagtgagcaagagttcctgcgcatcatgaaaaagaccagcctctattaagatcagtgtcttctttttctactgcaagcacatgtaactagatttagtgcctgccatggtgtgaaatctggcttttgagaacacaaacttttcccccacggacctccctttatcactttaatagtgaccttgagcctattttagccgtttggaagtgttctttgatattacagttctttgtaaaatgacctgcgaattaccctaattctcaaaagcaaaacaagagcacacaagcgtgaagaaaaggatcttaaagctttgagcacctgccattttgccttgcatcgtttccctcgtcatgcatttccacatatccacaaacacagaacgactttagacaagcacatgttacacctgtgttgccacaagcagtcattcttgacggctccagtttttatttgacacttgagtttagttttctcttttataaacccagtgaactcctgcactg

SEQ ID NO: 448557 - DNA, 2000 bp, Homo sapiens
gggtgggaacggcgccgagagtgtacacgtcggttgcctaacaaccggcagcggactcctttggctatggcctccaactttaagaaggcaaacatggcatcaagttctcagcgaaaaagaatgagccctaagcctgagcttactgaagagcaaaagcaggagatccgggaagcttttgatcttttcgatgcggatggaactggcaccatagatgttaaagaactgaaggtggcaatgagggccctgggctttgaacccaagaaagaagaaattaagaaaatgataagtgaaattgataaggaagggacaggaaaaatgaactttggtgactttttaactgtgatgacccagaaaatgtctgagaaagatactaaagaagaaatcctgaaagctttcaagctctttgatgatgatgaaactgggaagatttcgttcaaaaatctgaaacgcgtggccaaggagttgggtgagaacctgactgatgaggagctgcaggaaatgattgatgaagctgatcgagatggagatggagaggtcagtgagcaagagttcctgcgcatcatgaaaaagaccagcctctattaagatcagtgtcttctttttctactgcaagcacatgtaactagatttagtgcctgccatggtgtgaaatctggcttttgagaacacaaacttttcccccacggacctccctttatcactttaatagtgaccttgagcctattttagccgtttggaagtgttctttgatattacagttctttgtaaaatgacctgcgaattaccctaattctcaaaagcaaaacaagagcacacaagcgtgaagaaaaggatcttaaagctttgagcacctgccattttgccttgcatcgtttccctcgtcatgcatttccacatatccacaaacacagaacgactttagacaagcacatgttacacctgtgttgccacaagcagtcattcttgacggctccagtttttatttgacacttgagtttagttttctcttttataaacccagtgaactcctgcactggcatttggatgtgtgttaatgctatttgttttgtcttaaaagtaaaacctttctcagtttgaacttgtattctctaaggatgagttctttagctttgcttatgagttcctcttctcaattattgtgttgaaggcagcctattagatacaaaactccttaccagcctatggacagaaaatgaataatcctttgctactttcctggcatgaattgctttttgccttggaaggctgctggtttgtaaaactagcagaatttttatatcacctaagcctaaatgatgctctaaaaatagttttggcaaagctaagactggaaaagagtcttgttagtaatttgtgcttgaataaaatggggagagccaggctaacgcaacactaggatggattcagccaacctctcgtgaatttatttgcttatggtatctcatcgactcttggaggtgggttgggctgagtgaccccatccaaccatcttcctggccttgcccgggattccctgtgtgagaaatcctggtagatgacattaaagtctctgctccagggtgagagtggggaggcagaaggggtgagggagaatagaaaatgaacaatgatggaatgctcgtttgttcacatggagagggagaaaacagattttcaaacttctgggggtaggctagtcctctggggatagggttgcctgattcagctaataaaaagaaagttgaggtaaatttgcatttcagatcaatgatgccttttttttagtatgactatatcccatttgtattttttgtttattcattgttgatcttaaatgcaaatttacctaagcatcctgtattgccactggtaaccctacccggggagcacgttacagaggccagaagcctggccctcggtctcatgcctctggaccctgacatcctgtaggacttgggggcccaggaatatgaagtttaccatatcccccagatgagtct

SEQ ID NO: 448558 - DNA, 969 bp, Homo sapiens
ctgctcgcagcccatgcctcggggtgctgccatcttctctccctgcagggagagagaactggcacatagatgttaaagaactgaaggtggcaatgagggccctgggctttgaacccaagaaagaagaaattaagaaaatgataagtgaaattgataaggaagggacaggaaaaatgaactttggtgactttttaactgtgatgacccagaaaatgtctgagaaagatactaaagaagaaatcctgaaagctttcaagctctttgatgatgatgaaactgggaagatttcgttcaaaaatctgaaacgcgtggccaaggagttgggtgagaacctgactgatgaggagctgcaggaaatgattgatgaagctgatcgagatggagatggagaggtcagtgagcaagagttcctgcgcatcatgaaaaagaccagcctctattaagatcagtgtcttctttttctactgcaagcacatgtaactagatttagtgcctgccatggtgtgaaatctggcttttgagaacacaaacttttcccccacggacctccctttatcactttaatagtgaccttgagcctattttagccgtttggaagtgttctttgatattacagttctttgtaaaatgacctgcgaattaccctaattctcaaaagcaaaacaagagcacacaagcgtgaagaaaaggatcttaaagctttgagcacctgccattttgccttgcatcgtttccctcgtcatgcatttccacatatccacaaacacagaacgactttagacaagcacatgttacacctgtgttgccacaagcagtcattcttgacggctccagtttttatttgacacttgagtttagttttctcttttataaacccagtgaactcctgcactggcatttggatgtgtgttaatgctatttgttttgtcttaaaagtaaaacctttctcagtttgaacttgtattctct

SEQ ID NO: 448559 - DNA, 681 bp, Homo sapiens
cgaatgcacagccgaacccaagaatgtagagccagagcctcgtccgaacgccagagaagaagctatgctccgaccattccaacaaaagacagacttgaaggtcttcttgcttttaaagagaaaaggccccctcgctataaaggagaataaaaggaacagaaattcttaagatgccaatgtaataaatgtacttcctggaagtgtctttcggatccactatatgcctcagcacatggaaccttaatgaccaaagtgaagagcagattattcatacggtgtaataagcatctggaatggacccatccgtgtacttcattcaaatgtgtaaatgtcatattcattcagatttataaagctagtagtgtatagtcagaaacagaatcaaagttagatatacatttttaaatatttactgcatatgaggctttctgttaattttttaatgtgaataatttatatattgcacattctagggaataatattgattgtatgtctactgtgctgcattaagaaaataaaatttctatataccaaaaatgtgaagttataccaaataaagtttctaagtgattaatgcatacgaacagctacatatacatatatctaaacctgaaaaatgaattgatattctgagtgaaaactacctaatataaataaaattagtgaaaagaaaacatggg

SEQ ID NO: 448560 - DNA, 757 bp, Homo sapiens
ggcgggtccggacgccgtgcgcgtgcgcgcggcaggtcggcgccgggcgggggcggagcggccgtcgcaggtccacgccgtaaacagacaacatggcggccgcggtggcggcggcacctggggccttgggatccctgcatgctggcggcgcccgcctggtggccgcttgcagtgcgtggctctgcccggggttgaggctgcccggctcgttggcaggccggcgagcgggcccggcgatctgggcccagggctgggtacctgcggccgggggtcccgccccgaaaaggggctacagctctgagatgaagacggaggacgagctgcgggtgcggcacctggaggaggagaaccgagacagagacaagaacatggtcaaaggcatggagatgtgaacatgtgtggtgtatttgggacgtaacataaggaattgtggtgcttggaataaacagagcttatggcaaaaattcactcagtaaaaatcttataaaaatgctatcaaaagctgtggatgctttgaaatctgataagaaagtacggaccataataatcaggagtgaagtcccagggatattctgtgctgcttggcgagccggccaggggcatcacagccctttcattcctgtcgcctgcagctcagcgagttccaggtccttgtcccgcgaccaagaggaatgaggtgcgtggacaccagagagtgagtaaggcagagaagaattttattgagtgacataaggaaagctctcagctgtgagagggg

SEQ ID NO: 448561 - DNA, 1643 bp, Homo sapiens
ggcgggtccggacgccgtgcgcgtgcgcgcggcaggtcggcgccgggcgggggcggagcggccgtcgcaggtccacgccgtaaacagacaacatggcggccgcggtggcggcggcacctggggccttgggatccctgcatgctggcggcgcccgcctggtggccgcttgcagtgcgtggctctgcccggggttgaggctgcccggctcgttggcaggccggcgagcgggcccggcgatctgggcccagggctgggtacctgcggccgggggtcccgccccgaaaaggggctacagctctgagatgaagacggaggacgagctgcgggtgcggcacctggaggaggagaaccgaggaattgtggtgcttggaataaacagagcttatggcaaaaattcactcagtaaaaatcttataaaaatgctatcaaaagctgtggatgctttgaaatctgataagaaagtacggaccataataatcaggagtgaagtcccagggatattctgtgctggtgctgaccttaaggaaagagccaaaatgagttccagtgaagttggtccttttgtctccaaaataagagcagtgattaacgatattgctaatcttccagtaccaacaattgcagcaatagatggactcgctttaggtggtggtcttgaactggctttagcctgtgatatacgagtagcagcttcctctgcaaaaatgggcctggttgaaacaaaattggcgattattcctggtggaggggggacacagcgattgccacgcgccattggaatgtccctggccaaggagctcatattctctgcgcgagtcctcgatggcaaagaagccaaagcagtgggcttaatcagccacgttctggaacagaaccaggagggagacgcggcctacaggaaggccttggacctggcgagagagtttttacctcagggacctgttgcaatgagagtggcaaaattagcaattaatcaagggatggaggtcgatttagtaacagggttagccatagaagaagcttgttatgctcagaccattccaacaaaagacagacttgaaggtcttcttgcttttaaagagaaaaggccccctcgctataaaggagaataaaaggaacagaaattcttaagatgccaatgtaataaatgtacttcctggaagtgtctttcggatccactatatgcctcagcacatggaaccttaatgaccaaagtgaagagcagattattcatacggtgtaataagcatctggaatggacccatccgtgtacttcattcaaatgtgtaaatgtcatattcattcagatttataaagctagtagtgtatagtcagaaacagaatcaaagttagatatacatttttaaatatttactgcatatgaggctttctgttaattttttaatgtgaataatttatatattgcacattctagggaataatattgattgtatgtctactgtgctgcattaagaaaataaaatttctatataccaaaaatgtgaagttataccaaataaagtttctaagtgattaatgcatacgaacagctacatatacatatatctaaacctgaaaaatgaattgatattctgagtgaaaactacctaatataaataaaattagtgaaaagaaaacatggg

SEQ ID NO: 448562 - DNA, 1805 bp, Homo sapiens
ggcgggtccggacgccgtgcgcgtgcgcgcggcaggtcggcgccgggcgggggcggagcggccgtcgcaggtccacgccgtaaacagacaacatggcggccgcggtggcggcggcacctggggccttgggatccctgcatgctggcggcgcccgcctggtggccgcttgcagtgcgtggctctgcccggggttgaggctgcccggctcgttggcaggccggcgagcgggcccggcgatctgggcccagggctgggtacctgcggccgggggtcccgccccgaaaaggggctacagctctgagatgaagacggaggacgagctgcgggtgcggcacctggaggaggagaaccgagacagagacaagaacatggtcaaaggcatggagatgtgaacatgtgtggtgtatttgggacgtaacataaggcaagtgtggcataagcagaatagtaagaaattcagctggaagcatagactagcactggagtgattagagcctgaatgccatcatcttttgggaattgtggtgcttggaataaacagagcttatggcaaaaattcactcagtaaaaatcttataaaaatgctatcaaaagctgtggatgctttgaaatctgataagaaagtacggaccataataatcaggagtgaagtcccagggatattctgtgctggtgctgaccttaaggaaagagccaaaatgagttccagtgaagttggtccttttgtctccaaaataagagcagtgattaacgatattgctaatcttccagtaccaacaattgcagcaatagatggactcgctttaggtggtggtcttgaactggctttagcctgtgatatacgagtagcagcttcctctgcaaaaatgggcctggttgaaacaaaattggcgattattcctggtggaggggggacacagcgattgccacgcgccattggaatgtccctggccaaggagctcatattctctgcgcgagtcctcgatggcaaagaagccaaagcagtgggcttaatcagccacgttctggaacagaaccaggagggagacgcggcctacaggaaggccttggacctggcgagagagtttttacctcagggacctgttgcaatgagagtggcaaaattagcaattaatcaagggatggaggtcgatttagtaacagggttagccatagaagaagcttgttatgctcagaccattccaacaaaagacagacttgaaggtcttcttgcttttaaagagaaaaggccccctcgctataaaggagaataaaaggaacagaaattcttaagatgccaatgtaataaatgtacttcctggaagtgtctttcggatccactatatgcctcagcacatggaaccttaatgaccaaagtgaagagcagattattcatacggtgtaataagcatctggaatggacccatccgtgtacttcattcaaatgtgtaaatgtcatattcattcagatttataaagctagtagtgtatagtcagaaacagaatcaaagttagatatacatttttaaatatttactgcatatgaggctttctgttaattttttaatgtgaataatttatatattgcacattctagggaataatattgattgtatgtctactgtgctgcattaagaaaataaaatttctatataccaaaaatgtgaagttataccaaataaagtttctaagtgattaatgcatacgaacagctacatatacatatatctaaacctgaaaaatgaattgatattctgagtgaaaactacctaatataaataaaattagtgaaaagaaaacatggg

SEQ ID NO: 448563 - DNA, 1647 bp, Homo sapiens
ggcgggtccggacgccgtgcgcgtgcgcgcggcaggtcggcgccgggcgggggcggagcggccgtcgcaggtccacgccgtaaacagacaacatggcggccgcggtggcggcggcacctggggccttgggatccctgcatgctggcggcgcccgcctggtggccgcttgcagtgcgtggctctgcccggggttgaggctgcccggctcgttggcaggccggcgagcgggcccggcgatctgggcccagggctgggtacctgcggccgggggtcccgccccgaaaaggggctacagctctgagatgaagacggaggacgagctgcgggtgcggcacctggaggaggagaaccgaggaattgtggtgcttggaataaacagagcttatggcaaaaattcactcagtaaaaatcttataaaaatgctatcaaaagctgtggatgctttgaaatctgataagaaagtacggaccataataatcaggagtgaagtcccagggatattctgtgctggtgctgaccttaaggaaagagccaaaatgagttccagtgaagttggtccttttgtctccaaaataagagcagtgattaacgatattgctaatcttccagtaccaacaattgcagcaatagatggactcgctttaggtggtggtcttgaactggctttagcctgtgatatacgagtagcagcttcctctgcaaaaatgggcctggttgaaacaaaattggcgattattcctggtggaggggggacacagcgattgccacgcgccattggaatgtccctggccaaggagctcatattctctgcgcgagtcctcgatggcaaagaagccaaagcagtgggcttaatcagccacgttctggaacagaaccaggagggagacgcggcctacaggaaggccttggacctggcgagagagtttttacctcagggacctgttgcaatgagagtggcaaaattagcaattaatcaagggatggagcgattttagtaaacagggttaagccaatagaagaaagcttgttgatgctcagaccattccaacaaaagacagacttgaaggtcttcttgcttttaaagagaaaaggccccctcgctataaaggagaataaaaggaacagaaattcttaagatgccaatgtaataaatgtacttcctggaagtgtctttcggatccactatatgcctcagcacatggaaccttaatgaccaaagtgaagagcagattattcatacggtgtaataagcatctggaatggacccatccgtgtacttcattcaaatgtgtaaatgtcatattcattcagatttataaagctagtagtgtatagtcagaaacagaatcaaagttagatatacatttttaaatatttactgcatatgaggctttctgttaattttttaatgtgaataatttatatattgcacattctagggaataatattgattgtatgtctactgtgctgcattaagaaaataaaatttctatataccaaaaatgtgaagttataccaaataaagtttctaagtgattaatgcatacgaacagctacatatacatatatctaaacctgaaaaatgaattgatattctgagtgaaaactacctaatataaataaaattagtgaaaagaaaacatggg

SEQ ID NO: 448564 - DNA, 1504 bp, Homo sapiens
  misc_feature (1468)..(1468): n is a, c, g, or t
  misc_feature (1482)..(1482): n is a, c, g, or t
  misc_feature (1498)..(1499): n is a, c, g, or t
ggcgggtccggacgccgtgcgcgtgcgcgcggcaggtcggcgccgggcgggggcggagcggccgtcgcaggtccacgccgtaaacagacaacatggcggccgcggtggcggcggcacctggggccttgggatccctgcatgctggcggcgcccgcctggtggccgcttgcagtgcgtggctctgcccggggttgaggctgcccggctcgttggcaggccggcgagcgggcccggcgatctgggcccagggctgggtacctgcggccgggggtcccgccccgaaaaggggctacagctctgagatgaagacggaggacgagctgcgggtgcggcacctggaggaggagaaccgaggaattgtggtgcttggaataaacagagcttatggcaaaaattcactcagtaaaaatcttataaaaatgctatcaaaagctgtggatgctttgaaatctgataagaaagtacggaccataataatcaggagtgaagtcccagggatattctgtgctggtgctgaccttaaggaaagagccaaaatgagttccagtgaagttggtccttttgtctccaaaataagagcagtgattaacgatattgctaatcttccagtaccaacaattgcagcaatagatggactcgctttaggtggtggtcttgaactggctttagcctgtgatatacgagtagcagcttcctctgcaaaaatgggcctggttgaaacaaaattggcgattattcctggtggaggggggacacagcgattgccacgcgccattggaatgtccctggccaaggagctcatattctctgcgcgagtcctcgatggcaaagaagccaaagcagtgggcttaatcagccacgttctggaacagaaccaggagggagacgcggcctacaggaaggccttggacctggcgagagagtttttacctcagggacctgttgcaatgagagtggcaaaattagcaattaatcaagggatggaggtcgatttagtaacagggttagccatagaagaagcttgttatgctcagaccattccaacaaaagacagacttgaaggtcttcttgcttttaaagagaaaaggccccctcgctataaaggagaataaaaggaacagaaattcttaagatgccaatgtaataaatgtacttcctggaagtgtctttcggatccactatatgcctcagcacatggaaccttaatgaccaaagtgaagagcagattattcatacggtgtaataagcatctggaatggacccatccgtgtacttcattcaaatgtgtaaatgtcatattcattcagatttataaagctagtagtgtatagtcagaaacagaatcaaagttagatatacatttttaaatatttactgcatatgaggctttctgttaattttttaatgtgaataatttatatattgcacattctagggaataagggggaacgaatgtttttttactagntctagataataggntttttatataccaagnnaaaaa

SEQ ID NO: 448565 - DNA, 748 bp, Homo sapiens
  misc_feature (35)..(36): n is a, c, g, or t
  misc_feature (47)..(48): n is a, c, g, or t
  misc_feature (86)..(86): n is a, c, g, or t
ccccgcggcccgccatgaaagagtgtggtcactgnngcctaccattnncctaacccatgggaggcaaaatagcacttaatcaaggnatggagtcgatttagtaacagggttagccatagaagaagcttgttatgctcagaccattccaacaaaagacagacttgaaggtcttcttgcttttaaagagaaaaggccccctcgctataaaggagaataaaaggaacagaaattcttaagatgccaatgtaataaatgtacttcctggaagtgtctttcggatccactatatgcctcagcacatggaaccttaatgaccaaagtgaagagcagattattcatacggtgtaataagcatctggaatggacccatccgtgtacttcattcaaatgtgtaaatgtcatattcattcagatttataaagctagtagtgtatagtcagaaacagaatcaaagttagatatacatttttaaatatttactgcatatgaggctttctgttaattttttaatgtgaataatttatatattgcacattctagggaataatattgattgtatgtctactgtgctgcattaagaaaataaaatttctatataccaaaaatgtgaagttataccaaataaagtttctaagtgattaatgcatacgaacagctacatatacatatatctaaacctgaaaaatgaattgatattctgagtgaaaactacctaatataaataaaattagtgaaaagaaaacatggg

SEQ ID NO: 448566 - DNA, 713 bp, Homo sapiens
  misc_feature (1)..(1): n is a, c, g, or t
ngttccgggcccctgtcgcatgtaaatggcaaaatggcaattaatcaagggaggaggtcgatttagtaacagggttagccatagaagaagcttgttatgctcagaccattccaacaaaagacagacttgaaggtcttcttgcttttaaagagaaaaggccccctcgctataaaggagaataaaaggaacagaaattcttaagatgccaatgtaataaatgtacttcctggaagtgtctttcggatccactatatgcctcagcacatggaaccttaatgaccaaagtgaagagcagattattcatacggtgtaataagcatctggaatggacccatccgtgtacttcattcaaatgtgtaaatgtcatattcattcagatttataaagctagtagtgtatagtcagaaacagaatcaaagttagatatacatttttaaatatttactgcatatgaggctttctgttaattttttaatgtgaataatttatatattgcacattctagggaataatattgattgtatgtctactgtgctgcattaagaaaataaaatttctatataccaaaaatgtgaagttataccaaataaagtttctaagtgattaatgcatacgaacagctacatatacatatatctaaacctgaaaaatgaattgatattctgagtgaaaactacctaatataaataaaattagtgaaaagaaaacatggg

SEQ ID NO: 448567 - DNA, 1529 bp, Homo sapiens
ggcgggtccggacgccgtgcgcgtgcgcgcggcaggtcggcgccgggcgggggcggagcggccgtcgcaggtccacgccgtaaacagacaacatggcggccgcggtggcggcggcacctggggccttgggatccctgcatgctggcggcgcccgcctggtggccgcttgcagtgcgtggctctgcccggggttgaggctgcccggctcgttggcaggccggcgagcgggcccggcgatctgggcccagggctgggtacctgcggccgggggtcccgccccgaaaaggggctacagctctgagatgaagacggaggacgagctgcgggtgcggcacctggaggaggagaaccgaggaattgtggtgcttggaataaacagagcttatggcaaaaattcactcagtaaaaatcttataaaaatgctatcaaaagctgtggatgctttgaaatctgataagaaagtacggaccataataatcaggagtgaagtcccagggatattctgtgctggtgctgaccttaaggaaagagccaaaatgagttccagtgaagttggtccttttgtctccaaaataagagcagtgattaacgatattgctaatcttccagtaccaacaattgcagcaatagatggactcgctttaggtggtggtcttgaactggctttagcctgtgatatacgagtagcagcttcctctgcaaaaatgggcctggttgaaacaaaattggcgattattcctggtggaggggggacacagcgattgccacgcgccattggaatgtccctggccaaggagctcatattctctgcgcgagtcctcgatggcaaagaagccaaagcagtgggcttaatcagccacgttctggaacagaaccaggagggagacgcggcctacaggaaggccttggacctggcgagagagtttttacctcaggtcaaacaaataagaagatgttgatgtataagaagatgttgagttacttcagaaaatatgtgactgcaaaattacatgcacgagtcaccaaatgaagtttgagtggaatcacctttatttttatgtttgttactttgttgccaaatgattagtcctccagataactgaaagcttttgtaaaatcagtatttctaggtgatatctgtattatatattacttccatttatctgagaaaaaaaggcttgtaaagaagaaaaggcactggaaatgttttaaggaggaaacaaattaaatcaagcactatttctaatagcattttgaattttcctgtttttctcatggctttctaaactttacttcccaaagtgtggtctgtggaccagcagcctgggcatctcctggcagcttgttagacgtgcagaatctcaggcccatctcagacccactgagtccacatctgcattttaacaaggaggatggggatttgtgtgcatctaggagtttgacaagcaccttttcttggtcagttgacaatgaaaatggaaaaattagaggagcacaccatttaataaaatggattgattatcatgaaa

SEQ ID NO: 448568 - DNA, 175 bp, Homo sapiens
agatgtgaacatgtgtggtgtatttgggacgtaacataaggcaagtgtggcataagcagaatagtaagaaattcagctggaagcatagactagcactggagtgattagagcctgaatgccatcatcttttgggtaagcttagtcatgccgggacttcacttccgttaagtgtacc

SEQ ID NO: 448569 - DNA, 976 bp, Homo sapiens
ggcgggtccggacgccgtgcgcgtgcgcgcggcaggtcggcgccgggcgggggcggagcggccgtcgcaggtccacgccgtaaacagacaacatggcggccgcggtggcggcggcacctggggccttgggatccctgcatgctggcggcgcccgcctggtggccgcttgcagtgcgtggctctgcccggggttgaggctgcccggctcgttggcaggccggcgagcgggcccggcgatctgggcccagggctgggtacctgcggccgggggtcccgccccgaaaaggggctacagctctgagatgaagacggaggacgagctgcgggtgcggcacctggaggaggagaaccgaggaattgtggtgcttggaataaacagagcttatggcaaaaattcactcagtaaaaatcttataaaaatgctatcaaaagctgtggatgctttgaaatctgataagaaagtacggaccataataatcaggagtgaagtcccagggatattctgtgctggtgctgaccttaaggaaagagccaaaatgagttccagtgaagttggtccttttgtctccaaaataagagcagtgattaacgatattgctaatcttccagtaccaacaattgcagcaatagatggactcgctttaggtggtggtcttgaactggctttagcctgtgatatacgagtagcagcttcctctgcaaaaatgggcctggttgaaacaaaattggcgattattcctggtggagtgacttcctccactgaagtcttgaatccctccaagtcatccatgaagattggaatcatcatcttccaaactcctgttaatattgatattctggcctcttcccatgaatcatgaatgttcttaaagggatctagaatggcagatcctttccagaaggttttcaatttaatttgcccagatccataagaggaatcactgtctatggcagctatagccttatgaaatgtggt

SEQ ID NO: 448570 - DNA, 1685 bp, Homo sapiens
  misc_feature (1641)..(1641): n is a, c, g, or t
ggcgggtccggacgccgtgcgcgtgcgcgcggcaggtcggcgccgggcgggggcggagcggccgtcgcaggtccacgccgtaaacagacaacatggcggccgcggtggcggcggcacctggggccttgggatccctgcatgctggcggcgcccgcctggtggccgcttgcagtgcgtggctctgcccggggttgaggctgcccggctcgttggcaggccggcgagcgggcccggcgatctgggcccagggctgggtacctgcggccgggggtcccgccccgaaaaggggctacagctctgagatgaagacggaggacgagctgcgggtgcggcacctggaggaggagaaccgaggaattgtggtgcttggaataaacagagcttatggcaaaaattcactcagtaaaaatcttataaaaatgctatcaaaagctgtggatgctttgaaatctgataagaaagtacggaccataataatcaggagtgaagtcccagggatattctgtgctggtgctgaccttaaggaaagagccaaaatgagttccagtgaagttggtccttttgtctccaaaataagagcagtgattaacgatattgctaatcttccagtaccaacaattgcagcaatagatggactcgctttaggtggtggtcttgaactggctttagcctgtgatatacgagtagcagcttcctctgcaaaaatgggcctggttgaaacaaaattggcgattattcctggtggaggggggacacagcgattgccacgcgccattggaatgtccctggccaaggagctcatattctctgcgcgagtcctcgatggcaaagaagccaaagcagtgggcttaatcagccacgttctggaacagaaccaggagggagacgcggcctacaggaaggccttggacctggcgagagagtttttacctcagggacctgttgcaatgagagtggcaaaattagcaattaatcaagggatggaggtcgatttagtaacagggttagccatagaagaagcttgttatgctcagaccattccaacaaaagacagacttgaaggtcttcttgcttttaaagagaaaaggccccctcgctataaaggagaataaaaggaacagaaattcttaagatgccaatgtaataaatgtacttcctggaagtgtctttcggatccactatatgcctcagcacatggaaccttaatgaccaaagtgaagagcagattattcatacggtgtaataagcatctggaatggacccatccgtgtacttcattcaaatgtgtaaatgtcatattcattcagatttataaagctagtagtgtatagtcagaaacagaatcaaagttagatatacatttttaaatatttactgcatatgaggctttctgttaattttttaatgtgaataatttatatattgcacattctagggaataatattgattgtatgtctactgtgctgcattaagaaaataaaatttctatataccaaaaatgtgaagttataccaaataaagtttctaagtgattaatgcatacgaacagctacatatacatatatctaaacctgaaaaatgaattgatattctgagtgaaaactacctaatataaataaatcgatgacgcgagcaagccntcccctctttctcggcgatatatcttcgagatctaattcttacg

SEQ ID NO: 448571 - DNA, 1556 bp, Homo sapiens
ggcgggtccggacgccgtgcgcgtgcgcgcggcaggtcggcgccgggcgggggcggagcggccgtcgcaggtccacgccgtaaacagacaacatggcggccgcggtggcggcggcacctggggccttgggatccctgcatgctggcggcgcccgcctggtggccgcttgcagtgcgtggctctgcccggggttgaggctgcccggctcgttggcaggccggcgagcgggcccggcgatctgggcccagggctgggtacctgcggccgggggtcccgccccgaaaaggggctacagctctgagatgaagacggaggacgagctgcgggtgcggcacctggaggaggagaaccgaggaattgtggtgcttggaataaacagagcttatggcaaaaattcactcagtaaaaatcttataaaaatgctatcaaaagctgtggatgctttgaaatctgataagaaagtacggaccataataatcaggagtgaagtcccagggatattctgtgctgctaatcttccagtaccaacaattgcagcaatagatggactcgctttaggtggtggtcttgaactggctttagcctgtgatatacgagtagcagcttcctctgcaaaaatgggcctggttgaaacaaaattggcgattattcctggtggaggggggacacagcgattgccacgcgccattggaatgtccctggccaaggagctcatattctctgcgcgagtcctcgatggcaaagaagccaaagcagtgggcttaatcagccacgttctggaacagaaccaggagggagacgcggcctacaggaaggccttggacctggcgagagagtttttacctcagggacctgttgcaatgagagtggcaaaattagcaattaatcaagggatggaggtcgatttagtaacagggttagccatagaagaagcttgttatgctcagaccattccaacaaaagacagacttgaaggtcttcttgcttttaaagagaaaaggccccctcgctataaaggagaataaaaggaacagaaattcttaagatgccaatgtaataaatgtacttcctggaagtgtctttcggatccactatatgcctcagcacatggaaccttaatgaccaaagtgaagagcagattattcatacggtgtaataagcatctggaatggacccatccgtgtacttcattcaaatgtgtaaatgtcatattcattcagatttataaagctagtagtgtatagtcagaaacagaatcaaagttagatatacatttttaaatatttactgcatatgaggctttctgttaattttttaatgtgaataatttatatattgcacattctagggaataatattgattgtatgtctactgtgctgcattaagaaaataaaatttctatataccaaaaatgtgaagttataccaaataaagtttctaagtgattaatgcatacgaacagctacatatacatatatctaaacctgaaaaatgaattgatattctgagtgaaaactacctaatataaataaaattagtgaaaagaaaacatggg

SEQ ID NO: 448572 - DNA, 1595 bp, Homo sapiens
ggcgggtccggacgccgtgcgcgtgcgcgcggcaggtcggcgccgggcgggggcggagcggccgtcgcaggtccacgccgtaaacagacaacatggcggccgcggtggcggcggcacctggggccttgggatccctgcatgctggcggcgcccgcctggtggccgcttgcagtgcgtggctctgcccggggttgaggctgcccggctcgttggcaggccggcgagcgggcccggcgatctgggcccagggctgggtacctgcggccgggggtcccgccccgaaaaggggctacagctctgagatgaagacggaggacgagctgcgggtgcggcacctggaggaggagaaccgaggaattgtggtgcttggaataaacagagcttatggcaaaaattcactcagtaaaaatcttataaaaatgctatcaaaagctgtggatgctttgaaatctgataagaaagtacggaccataataatcaggagtgaagtcccagggatattctgtgctggtgctgaccttaaggaaagagccaaaatgagttccagtgaagttggtccttttgtctccaaaataagagcagtgattaacgatattgctaatcttccagtaccaacaattgcagcaatagatggactcgctttaggtggtggtcttgaactggctttagcctgtgatatacgagtagcagcttcctctgcaaaaatgggcctggttgaaacaaaattggcgattattcctggtggaggggggacacagcgattgccacgcgccattggaatgtccctggccaaggagctcatattctctgcgcgagtcctcgatggcaaagaagccaaagcagtgggcttaatcagccacgttctggaacagaaccaggagggagacgcggcctacaggaaggccttggacctggcgagagagtttttacctcagggacctgttgcaatgagagtggcaaaattagcaattaatcaagggatggagaccattccaacaaaagacagacttgaaggtcttcttgcttttaaagagaaaaggccccctcgctataaaggagaataaaaggaacagaaattcttaagatgccaatgtaataaatgtacttcctggaagtgtctttcggatccactatatgcctcagcacatggaaccttaatgaccaaagtgaagagcagattattcatacggtgtaataagcatctggaatggacccatccgtgtacttcattcaaatgtgtaaatgtcatattcattcagatttataaagctagtagtgtatagtcagaaacagaatcaaagttagatatacatttttaaatatttactgcatatgaggctttctgttaattttttaatgtgaataatttatatattgcacattctagggaataatattgattgtatgtctactgtgctgcattaagaaaataaaatttctatataccaaaaatgtgaagttataccaaataaagtttctaagtgattaatgcatacgaacagctacatatacatatatctaaacctgaaaaatgaattgatattctgagtgaaaactacctaatataaataaaattagtgaaaagaaaacatggg

SEQ ID NO: 448573 - DNA, 7922 bp, Homo sapiens
gggttgagtcaagatggcggccaaggtggcgaagcagcagccgcggcggcggcggcggctggagtgagcgtccgactcgccgcgccgaacgaggtcccggtgtagggccgcgcgccgtggccgcgtcccactcctcaggccggggcgcacgtcggctcccacgcttagccagctcccggtggtttcctagaaacatgattgtttattggcattgatctcacagtctggtgaggacttctttactgataatgtcaagttcaggttatcctcccaaccaaggagcattcagcacagaacaaagtcgttatcctcctcactctgtccagtatacatttcccaacacccgccaccagcaggagttcgcagtccctgattatcgttcctctcatcttgaagtgagtcaggcatcacagcttttgcagcaacagcagcagcaacagcttcgaaggcgaccttccttgctttcagaatttcacccaggttctgacaggcctcaagaaaggagaactagttatgaaccgtttcatccaggcccatccccagtggatcatgattcactggaatcgaagcgaccacgtctggaacaggtttctgattctcattttcagcgtgtcagtgctgcggttttgcctttagtgcacccgctgccagaagggctgagggcttctgcagatgctaagaaggatccagcattcggaggcaaacatgaagctccatcctctccaatttcggggcaaccatgtggagatgatcaaaatgcttcaccttcaaaactctcaaaggaagagttaatacagagtatggatcgtgtagatcgagaaattgcaaaagtagaacagcagatccttaaactgaaaaagaaacaacaacagcttgaagaagaggcagctaaacctcctgagcctgagaagcccgtgtcccctcctcctgtggagcagaaacaccgcagtattgtccaaattatttatgatgagaatcggaaaaaagcagaagaagctcataaaatttttgaaggtcttggcccaaaagttgaactgccactgtataaccagccatcagataccaaggtgtaccatgagaacatcaagacaaaccaggtgatgaggaaaaaactcattttattttttaaaagaagaaatcatgcaagaaaacaaagggaacaaaaaatctgccagcgttatgatcagctcatggaggcatgggagaaaaaagtggacagaatagaaaataatcctcggaggaaagctaaagaaagcaaaacaagggaatactatgaaaagcagtttccagaaattcgaaaacaaagagaacagcaagaaagatttcagcgagttgggcagaggggagctggtctttcagccaccattgctaggagtgagcatgagatttctgaaattattgatgggctctctgagcaggagaataatgagaaacaaatgcggcagctctctgtgattccacctatgatgtttgatgcagaacaaagacgagtcaagttcattaacatgaatgggcttatggaggaccctatgaaagtgtataaagataggcagtttatgaatgtttggactgaccatgaaaaggagatctttaaggacaagtttatccagcatccaaaaaactttggactaattgcatcatacttggagaggaagagtgttcctgattgtgttttgtattactatttaaccaagaaaaatgagaattataaagccctcgtcagaaggaattatgggaaacgcagaggcagaaaccagcaaattgctcgaccctcgcaagaagaaaaagtagaagaaaaagaagaggataaagcagaaaaaacagaaaaaaaagaagaagaaaagaaagatgaagaggaaaaagatgaaaaagaagactccaaagaaaataccaaggaaaaggacaagatagatggtacagcagaagaaactgaggaaagagagcaagccacaccccgggggcgaaagactgccaacagtcagggccgccgtaagggccggatcaccaggtccatgacaaacgaagctgcagctgccagtgctgcagccgcagcggctactgaagagcccccaccacctctgccaccgccaccagaacccatttctacagagcctgtggagacctctcgatggacagaagaagaaatggaagttgctaaaaaaggtctagtagaacatggtcgtaactgggcagcaattgctaaaatggtgggaacgaaaagtgaagctcaatgtaaaaacttctattttaactataaaaggcgacacaatcttgacaacctcttacagcagcataaacagaaaacttcacgaaaacctcgtgaagagcgagatgtgtctcaatgtgaaagtgtcgcttccactgtttctgctcaggaggatgaagatattgaagcctccaatgaagaagaaaatccagaagacagcgaagttgaagctgtcaagcccagcgaggacagtcctgaaaatgctacttctcgaggaaacacagaacctgcggttgagcttgagcccaccacggaaactgcacccagtacatctccctccttagcagttccaagtacaaaaccagctgaagatgaaagtgtggagacccaggtgaatgacagcatcagtgctgagacagcagagcagatggatgtagatcagcaggagcacagtgctgaagagggttctgtttgtgatcccccacccgctaccaaagctgactctgtggacgttgaagtgagggtgccagaaaaccatgcatctaaagttgaaggtgataataccaaagaaagagacttggatagagccagtgagaaggtggaacctagagatgaagatttggtggtagctcagcaaataaatgcccaaaggcccgagccccagtcagacaatgattccagtgccacgtgcagcgctgatgaggatgtggatggagagccagagaggcagagaatgtttcctatggactcaaagccttcactgttaaaccccactggatctatactcgtctcatctccgttaaaaccaaatccactggatctgccacagcttcagcatcgagctgctgttatcccaccaatggtatcctgcaccccatgtaacataccaattggaaccccagtgagcggctatgctctctaccagcgacacattaaagcaatgcatgagtcagcactcctggaggagcagcggcagagacaagaacagatagatttggaatgtagaagttctacaagtccatgtggcacatccaagagtccaaacagagagtgggaagtccttcagcctgctccacatcaagtgataactaatctccctgaaggcgttcggcttccgacaactcgaccaaccaggccaccgccccctctcatcccgtcatccaaaaccacagtggcttcagaaaaaccatcttttataatgggaggctccatctcacagggaacaccaggcacttatttgacttctcataatcaggcttcctacactcaagaaacacccaagccgtcagtgggatctatctctcttggactgccacggcaacaggaatctgccaaatcagctactttgccctacatcaagcaggaagaattttctccccgaagccaaaactcacaacctgagggtctgttggtcagggcccaacatgaaggtgtagtcagaggtaccgcaggagccatacaagaaggaagtataactcggggaactccaaccagcaaaatttcagtggagagcattccatccctacggggctctatcactcagggcaccccggctctgccccagactggcataccaacagaggctttggtgaaggggtccatttcgagaatgcccattgaagacagcagtcctgagaaaggcagagaggaagctgcatccaaaggccatgttatttatgaaggcaaaagtggacatatcttgtcatatgataatattaagaatgcccgagaagggactaggagtccaagaacagctcatgaaatcagtttaaagagaagctatgaatcagtggaaggaaatataaagcaagggatgtcaatgagggagtctcctgtatcagcaccgttagaggggctgatatgccgagcattacccagggggagtcctcattctgacctcaaagaaaggactgtattgtctggctccataatgcaggggacaccaagagcaacaactgaaagctttgaagatggccttaaatatcccaaacaaattaaaagggaaagtcctcccatacgagcatttgaaggtgccattaccaaaggaaaaccatatgatggcatcaccaccatcaaagaaatggggcgttccattcatgagattccaaggcaagatattttaactcaggaaagtcggaaaactccagaagtggtccagagcacacggccgataattgagggttccatttcccagggcacaccaataaagtttgacaacaactcaggtcaatctgccatcaaacacaatgtcaaatccttaatcacggggcctagcaaactatcccgtggaatgcctccgctggaaattgtgccagagaacataaaagtggtagaacggggaaaatatgaggatgtgaaagcaggcgagaccgtgcgttcccggcacacgtcagtggtaagctctggcccctccgttcttaggtccacactgcatgaagctcccaaagcacaactgagccctgggatttatgatgacaccagtgcacggaggacccctgtgagttatcaaaacaccatgtccagaggctcacccatgatgaacagaacttctgatgttacaatttcttctaacaagtctaccaatcatgaaaggaaatcgacactgacccctacccagagggaaagtatcccagcgaagtctccagtgcctggggtggaccctgtcgtgagccacagtccgtttgatccccatcacagaggcagcactgcaggcgaggtttatcggagccacctgcccacgcacttggatccagccatgccttttcacagggctttggatcctgcagcggctgcttacctgtttcagagacagctttcaccaactccaggttacccaagtcagtatcagctttacgcaatggagaacacaagacagacaatcttaaatgattacattacctcacaacagatgcaagtgaacttgcgtccagatgtggccagaggactctccccaagagagcagccactgggtctcccatacccagcaacgagaggaatcattgacctgaccaatatgcctccaacaattttagtgcctcatccagggggaacaagcactcctcccatggacagaatcacttatattcctggtacacagattactttccctcccaggccgtacaactctgcttccatgtctccaggacacccaacacaccttgcagctgctgcaagtgctgagagggaacgggaacgggagcgggagaaggagcgggagcgggaacggattgctgcagcttcctccgacctctacctgcggccaggctcagaacagcctggccgacctggcagtcatggatatgttcgctccccttccccttcagtaagaactcaggagaccatgttgcaacagagacccagtgttttccaaggaaccaatggaaccagtgtaatcacacctttggatccaactgctcagctacgaatcatgccactgcctgctgggggcccttcaataagccaaggcctgccagcctcccgttacaacactgctgcggatgccctggctgctcttgtggatgctgcagcttctgcaccccagatggatgtgtccaaaacaaaagagagtaagcatgaagctgccaggttagaagaaaatttgagaagcaggtcagcagcagttagtgaacagcagcagctagagcagaaaaccctggaggtggagaagagatctgttcagtgtttatacacttcttcagcctttccaagtggcaagccccagcctcattcttcagtagtttattctgaggctgggaaagataaagggcctcctccaaaatccagatatgaggaagagctaaggaccagagggaagactaccattactgcagctaacttcatagacgtgatcatcacccggcaaattgcctcggacaaggatgcgagggaacgtggctctcaaagttcagactcttctagtagcttatcttctcacaggtatgaaacacctagcgatgctattgaggtgataagtcctgccagctcacctgcgccaccccaggagaaactgcagacctatcagccagaggttgttaaggcaaatcaagcggaaaatgatcctaccagacaatatgaaggaccattacatcactatcgaccacagcaggaatcaccatctccccaacaacagctgcccccttcttcacaggcagagggaatggggcaagtgcccaggacccatcggctgatcacacttgctgatcacatctgtcaaattatcacacaagattttgctagaaatcaagtttcctcgcagactccccagcagcctcctacttctacattccagaactcaccttctgctttggtatctacacctgtgaggactaaaacatcaaaccgttacagcccagaatcccaggctcagtctgtccatcatcaaagaccaggttcaagggtctctccagaaaatcttgtggacaaatccaggggaagtaggcctggaaaatccccagagaggagtcacgtctcttcggagccctacgagcccatctccccaccccaggttccggttgtgcatgagaaacaggacagcttgctgctcttgtctcagaggggcgcagagcctgcagagcagaggaatgatgcccgctcaccagggagtataagctacttgccttcattcttcaccaagcttgaaaatacatcacccatggttaaatcaaagaagcaggagatttttcgtaagttgaactcctctggtggaggtgactctgatatggcagctgctcagccaggaactgagatctttaatctgccagcagttactacgtcaggctcagttagctctagaggccattcttttgctgatcctgccagtaatcttgggctggaagacattatcaggaaggctctcatgggaagctttgatgacaaagttgaggatcatggagttgtcatgtcccagcctatgggagtagtgcctggtactgccaacacctcagttgtgaccagtggtgagacacgaagagaggaaggggacccatcacctcattcaggaggagtttgcaaaccaaagctgatcagcaagtcaaacagcaggaaatctaagtctcctatacctgggcaaggctacttaggaacggaacggccctcttcagtctcctctgtacattcagaaggggattaccataggcagacgccagggtgggcctgggaagacaggccctcttcaacaggctcaactcagtttccttataaccctctgactatgcggatgctcagcagtactccaccaacaccgattgcatgtgctccctctgcggtgaaccaagcagctcctcaccaacagaacaggatctgggagcgagagcctgccccactgctctcagcacagtacgagaccctgtcggatagtgatgactgaactgcacaaagtgaggggaacagggtgcaggagagggatctctagtttttgtggtttaatttttagtagcaggtcaaaaacctgccctcctgtgacttattccctgagacttttcaggagagccagcccacagatgatgaagaaatgatggaagttcatttggagagtcaaatgggaaaaaaacaaacaaaaaactgcctttgatacaggcaattcagtggactataataatagtggagggttgagatgtagagtttttaaaaagtgaacagttgctgttcttacatctgtaaagaaaaccataatgtctttaaatcactcttctgtaaatagatgacctttttgcagtgt

SEQ ID NO: 448574 - DNA, 2856 bp, Homo sapiens
  misc_feature (190)..(190): n is a, c, g, or t
  misc_feature (200)..(200): n is a, c, g, or t
  misc_feature (204)..(205): n is a, c, g, or t
  misc_feature (210)..(210): n is a, c, g, or t
  misc_feature (217)..(218): n is a, c, g, or t
  misc_feature (232)..(232): n is a, c, g, or t
  misc_feature (236)..(236): n is a, c, g, or t
  misc_feature (240)..(242): n is a, c, g, or t
  misc_feature (246)..(246): n is a, c, g, or t
  misc_feature (257)..(257): n is a, c, g, or t
  misc_feature (263)..(263): n is a, c, g, or t
  misc_feature (272)..(273): n is a, c, g, or t
  misc_feature (282)..(282): n is a, c, g, or t
  misc_feature (287)..(288): n is a, c, g, or t
  misc_feature (294)..(294): n is a, c, g, or t
  misc_feature (300)..(301): n is a, c, g, or t
  misc_feature (305)..(305): n is a, c, g, or t
  misc_feature (317)..(318): n is a, c, g, or t
  misc_feature (320)..(321): n is a, c, g, or t
  misc_feature (332)..(332): n is a, c, g, or t
  misc_feature (336)..(337): n is a, c, g, or t
  misc_feature (348)..(348): n is a, c, g, or t
  misc_feature (351)..(351): n is a, c, g, or t
  misc_feature (360)..(360): n is a, c, g, or t
  misc_feature (362)..(362): n is a, c, g, or t
  misc_feature (365)..(368): n is a, c, g, or t
  misc_feature (370)..(370): n is a, c, g, or t
  misc_feature (373)..(373): n is a, c, g, or t
  misc_feature (377)..(377): n is a, c, g, or t
  misc_feature (382)..(382): n is a, c, g, or t
  misc_feature (387)..(388): n is a, c, g, or t
  misc_feature (390)..(390): n is a, c, g, or t
  misc_feature (393)..(393): n is a, c, g, or t
  misc_feature (405)..(405): n is a, c, g, or t
  misc_feature (414)..(416): n is a, c, g, or t
  misc_feature (425)..(425): n is a, c, g, or t
  misc_feature (437)..(437): n is a, c, g, or t
  misc_feature (441)..(441): n is a, c, g, or t
  misc_feature (443)..(444): n is a, c, g, or t
  misc_feature (459)..(459): n is a, c, g, or t
  misc_feature (461)..(461): n is a, c, g, or t
  misc_feature (470)..(470): n is a, c, g, or t
  misc_feature (476)..(477): n is a, c, g, or t
  misc_feature (485)..(485): n is a, c, g, or t
  misc_feature (487)..(487): n is a, c, g, or t
  misc_feature (492)..(492): n is a, c, g, or t
  misc_feature (496)..(496): n is a, c, g, or t
  misc_feature (502)..(502): n is a, c, g, or t
  misc_feature (508)..(508): n is a, c, g, or t
  misc_feature (515)..(515): n is a, c, g, or t
  misc_feature (520)..(520): n is a, c, g, or t
  misc_feature (523)..(523): n is a, c, g, or t
  misc_feature (672)..(672): n is a, c, g, or t
  misc_feature (689)..(689): n is a, c, g, or t
  misc_feature (1425)..(1425): n is a, c, g, or t
tctggccagtcacgtgaagcagtgggagtggaaaaggaacaaagaaatctgtaactggtggtgatcagttactgtaaacaccacttcacctagaccagcctgagtatttttctttcgggtttttttttttttttttttttgctagttgcaaaatgaacatatttattataaaaaagttgaaacatatttnttttttgagncagnntctcnctctgtnncccaggctgaagtncagnggcnnnatcntgctattgcancctcanctcctgggnncaagcaatnctcanncctcancctccnnagtngctgggaccacnnanntgtgccaccangccnngctaatttttntanttttagtananacnnnntntcnccangttgnccagnntngtntgaactcctggnctcaagcannnctcccaccntggcctcccaangtgntnngattacaggtgtgancnaccatgccnggctgnnatttgttntnttttntttntttttntttttnttttttngaganggngtttcgccatgttggccaggctggtcttgaacccctggcttcaggtgatccgcccgtcttggcctcccacagtgctgggattacaggcgcaagccaccacagccagccatggaaagcattctgctgcttgtggaagaattttccctgcntaaagttgtcgagatgnttgaataagtggtagagagagaggtcaggtgaatgtggcagatgaggcaaaacttcatagcccaattcattcaatttttgaagcattggttgtgtgacacaggtgttgtcgtggagaattgggctatttctgttgaccagtgctggctgcaggcattgcagttttcagtgcatctcattcatttgctgagcatacttgtcatatgtaatggttttgccgggattcggaaagctgtagtggctcagactggcagcagaccacctttttttggtgcaagtttggctttgggaagtgttttggagctgcttctcagtccagccactgaggtggttgtcgctagtttttgtataaaatctacttttcatcggatgtcatgatccagttgagaaatggtttgttgttgcctagaataagagaagacacttcagaaagacagtttttaaaattttcgctcagctcatggggcacccatttactgagctttttcacctttccagtttgcttcaaatgccaaacaaccgtagaatggttgacgttgagttctttggcaacttctcgtgtagttgtaagaggatcagcatcaatgattgctctcaattggttgttgtcaacttccgatggccggccactatgctcctcatcttcaaggctcttgtttcctttgtaaaacttcttgaaccaccactgcactgtatgcttgttaacagttcctgggccaaatgcgttgttgatgttntgaattgtctctgctgctttacaacccattttgaacttgaataagaaaatcacttgaatttgctttttgtataacataattttcatcgtctaaaataaatataaaacaccaagtaataagtcattaacaaaaaaagtgacaaatgcacattaaaatgatatattgcgtaactacattcagaagaaaacaagaacttaaccacatttatttaagaatgtattccagtatcaaacggcaaatttcaacaacgcaaaaactgcaattacatttgcaacaacctaataaaagctgttacatttacttgattttagtccttaagagaaacttctgagagttaaatcctgtaatagagtcctcacatgaaggtgagagcaaagttgattcacctaatgtacgtgtcataattttaagtgttatgtggctgagttgaaggatgaaggtacaggatgtcttcatgttgataaaaattcaatgtctaatttcctttcatgtatgtgtgctttcttctttgaagctatagattagcctgactctgtcataggttaaattttctgagcatcttgtgttttccctaaactcgagtgactcctctgctatttatgcttgatttgatggcagggcaccccggctctgccccagactggcataccaacagaggctttggtgaaggggtccatttcgagaatgcccattgaagacagcagtcctgagaaaggcagagaggaagctgcatccaaaggccatgttatttatgaaggcaaaagtggacatatcttgtcatatgatagtaagtattgtatgtatgcaccaaagccagtattacaatatgtgctaaaaacataggcttgggttttcccgcatttctgctctctgggagtcagtttatctttgctgagcctatgttttctctcagtaaatggggttagtaatacttgtctcatgagaattttgtgaataacagcttagtcgataaaaagtaattaacaacgcagagctcatattaaatgtcccataggtggtagctaagattgtcgactgtggtcagtcagtttagcttaggtaaagagcctttgttgaactttaatggaatacttttattttgaagagattcatgttttatgaattaagaattagagggtagataggctgggcgcggtggttcacgcctatctactatctaatcccagtactttgggaggccaaggcaggtggatcgcctggggtcgggagttcaagaccggcctgaccaacatggagaaaccccatctctactagaaatacaaagttagccaggcatggtggtgcatgcctgtaatcccagctactcgggaggctgaagcaggagaatcgcttgaatccgggaggcggaggttgctgtgagccgagatcgcgccatttccagcctgggcaacaagagggaaactccgtctc

SEQ ID NO: 448575 - DNA, 651 bp, Homo sapiens
actgcaatgccttaagcattattcttgaagataactttgattaaaaaatgataaaatcaattcaaccaataacatgacagaaataagcattacattacttgttaagagatggcaattattacattggttgtttgcatatttcgatttattttcttcctataggtatcctgcaccccatgtaacataccaattggaaccccagtgagcggctatgctctctaccagcgacacattaaagcaatgcatgagtcagcactcctggaggagcagcggcagagacaagaacagatagatttggaatgtagaagttctacaagtccatgtggcacatccaagagtccaaacagagagtgggaaggtaggtagatagagctatcaccaagagaacttttatgaagggaaataaagctaaacccaaaagcagtgtccattgtgctttgtaagttgtcagcctcccaactgattattatatttgtcctaacagacacagttccttaaattgaccttaaactatgaagaaatgttagtattattaactactaaaggatgccagtaacatttttaatagcattctagttaatgtgaattttctgatattcatctttgtgctggaagacattataaataaagttatgctttatgttccgttca

SEQ ID NO: 448576 - DNA, 973 bp, Homo sapiens
gatgagcaaagaaagtggtttcttgagattgaatctgcccctgaagatgctgtgaacatggctgaaatgacaacaaaggatttagaatactacattacataaacccagttaataaagaagggtttgagggatcaactccaattttgaaagttctactgtggctaaaatgctatcattgcatgctacaaataagtctttcatgaaaggaaaagaaattgccacagccatcccagcctttggcaaccgccatgcagattagtcagcagccatcaacatggaggcaagaccatccaccagcaaaataattgtgacttactaaaccctcagtatctctgaggtatgcctgtagtattttatttcattgagtaccaggatctggattcttcatgttaccattctgcttttttttcatttagcaatatataatcattagcattttggtaatttttgagaacttaatatattaatactttaacttgaatttcactttcaggaggagtttgcaaaccaaagctgatcagcaagtcaaacagcaggaaatctaagtctcctatacctgggcaaggctacttaggaacggaacggccctcttcagtctcctctgtacattcagaaggggattaccataggcagacgccagggtgggcctgggaagacaggccctcttcaacaggtaaggattctgctttaacttagaaaatgagacagagcaataatatcaatgtcttggttattagttcttcaaaattcagcaactcttctaatttggaaacctatattcccatttctgtatcattaatatgttccactttcccgaatagaagtatttttttgaggggtcttgttctgtcacccaggatctggattcttcatgttaccattctgcttttttttcatttagcaatatataatcattagcattttggtaatttttgagaacttaatatattaatactttaacttgaatttcact

SEQ ID NO: 448577 - DNA, 546 bp, Homo sapiens
tgatgatagtaaacatttttatttatattatgtacaaattacccttgattcacagagatagacaaaatccaaagtcatgtatggttctgtacctttagaataacacttaacataaattgtattgtcttttggataggaatcattgacctgaccaatatgcctccaacaattttagtgcctcatccagggggaacaagcactcctcccatggacagaatcacttatattcctggtacacagattactttccctcccaggccgtacaactctgcttccatgtctccaggtgagattgtacagttacacacctctctaatagaaccatcatgtttacatttttacaacatagccttttaaggtatcttgggcaatttttcctcatttggtttcttgtttttcttttaacatttaatagtagttcttatgtgccagctgtcactagataccttaggaatgccttaaaagcttatgttatgcttcagttcttatccaggactcttaataaaacaaacttctttttctcttttcttgttttttttttgtttt

SEQ ID NO: 448578 - DNA, 569 bp, Homo sapiens
caactaaagttcatttgcctttattcccaggaaagtgtaaatgagctttcttccccctgcatattattcttagaatgtccccactgtccttggcatttggtacctatgacctttttaatgtatattcaaaagatgattatattcctatttgttggtttgtaaagacagttaagaagaatgtgtagtttggtagtggtttggggacacttcagtggtgcttccgaataatacctctcatatttatctgtctcaatggtttctactgggtcagcatcagtagaagtttaagaaggtgatattggccagacatagtggcttatacctgtaatgctagcactttgggaggctgaggtaggaggattgcttgagcccaggaatttgagaccagcctgggcaacatagtgagatctcatctctacaaaaaaaaagtttatatattttttgtttgtttgtttgcttgcttctgcatttatattttattctaggcctcagacttctgtcagtgaataattttatatatatatatatgtatatatgtatgtatagatacacacacatatatatatgca

SEQ ID NO: 448579 - DNA, 907 bp, Homo sapiens
tttaaagaagagtattgaattttatttttaatgttacataaggtggtaaaatactggtgctatgatccaaaaggtgacagtactctccaaatctcagtttctactagttgtttacattttcatatgttgtttacattttcatattttgcaatattgaatgttaaatgttgagtggaaagagaagatccaaatacatgaatatagtctttatttgaatggttgagaaatggacaaatattatcatacttgcaagtttcttaagaacttgtggcattggctctttttttccagttacaatttcttctaacaagtctaccaatcatgaaaggaaatcgacactgacccctacccagagggaaagtatcccagcgaagtctccagtgcctggggtggaccctgtcgtgagccacagtccgtttgatccccatcacagaggcagcactgcaggcgaggtttatcggagccacctgcccacgcacttggatccagccatgccttttcacagggctttggatcctggtaaacacaaaatatagtgataatttatggcaaataaatatgccaccagtatgacttttcagctttctgttgttgtacaatatagtacaattgcaaatatcattaatgtacagctcagtgaattttcacaaactaaattctcccatgttaccagcacccagatcaagaaataaaatcttatcagcacccggtaaagaactaaaaagaatagtatatgaaaagctctcttatctgatggcacttggtgaaactagttgaaaaagtggattaatgtgaataattattttaaaatgacagaggcatacctaaacatgttaacttacagcataaatagacgttcatttaccagaactctgatctaatgccaaggctttttcataaacaagtg

SEQ ID NO: 448580 - DNA, 8511 bp, Homo sapiens
gggttgagtcaagatggcggccaaggtggcgaagcagcagccgcggcggcggcggcggctggagtgagcgtccgactcgccgcgccgaacgaggtcccggtgtagggccgcgcgccgtggccgcgtcccactcctcaggccggggcgcacgtcggctcccacgcttagccagctcccggtggtttcctagaaacatgattgtttattggcattgatctcacagtctggtgaggacttctttactgataatgtcaagttcaggttatcctcccaaccaaggagcattcagcacagaacaaagtcgttatcctcctcactctgtccagtatacatttcccaacacccgccaccagcaggagttcgcagtccctgattatcgttcctctcatcttgaagtgagtcaggcatcacagcttttgcagcaacagcagcagcaacagcttcgaaggcgaccttccttgctttcagaatttcacccaggttctgacaggcctcaagaaaggagaactagttatgaaccgtttcatccaggcccatccccagtggatcatgattcactggaatcgaagcgaccacgtctggaacaggtttctgattctcattttcagcgtgtcagtgctgcggttttgcctttagtgcacccgctgccagaagggctgagggcttctgcagatgctaagaaggatccagcattcggaggcaaacatgaagctccatcctctccaatttcggggcaaccatgtggagatgatcaaaatgcttcaccttcaaaactctcaaaggaagagttaatacagagtatggatcgtgtagatcgagaaattgcaaaagtagaacagcagatccttaaactgaaaaagaaacaacaacagcttgaagaagaggcagctaaacctcctgagcctgagaagcccgtgtcccctcctcctgtggagcagaaacaccgcagtattgtccaaattatttatgatgagaatcggaaaaaagcagaagaagctcataaaatttttgaaggtcttggcccaaaagttgaactgccactgtataaccagccatcagataccaaggtgtaccatgagaacatcaagacaaaccaggtgatgaggaaaaaactcattttattttttaaaagaagaaatcatgcaagaaaacaaagggaacaaaaaatctgccagcgttatgatcagctcatggaggcatgggagaaaaaagtggacagaatagaaaataatcctcggaggaaagctaaagaaagcaaaacaagggaatactatgaaaagcagtttccagaaattcgaaaacaaagagaacagcaagaaagatttcagcgagttgggcagaggggagctggtctttcagccaccattgctaggagtgagcatgagatttctgaaattattgatgggctctctgagcaggagaataatgagaaacaaatgcggcagctctctgtgattccacctatgatgtttgatgcagaacaaagacgagtcaagttcattaacatgaatgggcttatggaggaccctatgaaagtgtataaagataggcagtttatgaatgtttggactgaccatgaaaaggagatctttaaggacaagtttatccagcatccaaaaaactttggactaattgcatcatacttggagaggaagagtgttcctgattgtgttttgtattactatttaaccaagaaaaatgagaattataaagccctcgtcagaaggaattatgggaaacgcagaggcagaaaccagcaaattgctcgaccctcgcaagaagaaaaagtagaagaaaaagaagaggataaagcagaaaaaacagaaaaaaaagaagaagaaaagaaagatgaagaggaaaaagatgaaaaagaagactccaaagaaaataccaaggaaaaggacaagatagatggtacagcagaagaaactgaggaaagagagcaagccacaccccgggggcgaaagactgccaacagtcagggccgccgtaagggccggatcaccaggtccatgacaaacgaagctgcagctgccagtgctgcagccgcagcggctactgaagagcccccaccacctctgccaccgccaccagaacccatttctacagagcctgtggagacctctcgatggacagaagaagaaatggaagttgctaaaaaaggtctagtagaacatggtcgtaactgggcagcaattgctaaaatggtgggaacgaaaagtgaagctcaatgtaaaaacttctattttaactataaaaggcgacacaatcttgacaacctcttacagcagcataaacagaaaacttcacgaaaacctcgtgaagagcgagatgtgtctcaatgtgaaagtgtcgcttccactgtttctgctcaggaggatgaagatattgaagcctccaatgaagaagaaaatccagaagacagcgaaggtgcagaaaatagttctgatacagaaagtgctccttctccttcaccagttgaagctgtcaagcccagcgaggacagtcctgaaaatgctacttctcgaggaaacacagaacctgcggttgagcttgagcccaccacggaaactgcacccagtacatctccctccttagcagttccaagtacaaaaccagctgaagatgaaagtgtggagacccaggtgaatgacagcatcagtgctgagacagcagagcagatggatgtagatcagcaggagcacagtgctgaagagggttctgtttgtgatcccccacccgctaccaaagctgactctgtggacgttgaagtgagggtgccagaaaaccatgcatctaaagttgaaggtgataataccaaagaaagagacttggatagagccagtgagaaggtggaacctagagatgaagatttggtggtagctcagcaaataaatgcccaaaggcccgagccccagtcagacaatgattccagtgccacgtgcagcgctgatgaggatgtggatggagagccagagaggcagagaatgtttcctatggactcaaagccttcactgttaaaccccactggatctatactcgtctcatctccgttaaaaccaaatccactggatctgccacagcttcagcatcgagctgctgttatcccaccaatggtatcctgcaccccatgtaacataccaattggaaccccagtgagcggctatgctctctaccagcgacacattaaagcaatgcatgagtcagcactcctggaggagcagcggcagagacaagaacagatagatttggaatgtagaagttctacaagtccatgtggcacatccaagagtccaaacagagagtgggaagtccttcagcctgctccacatcaagtgataactaatctccctgaaggcgttcggcttccgacaactcgaccaaccaggccaccgccccctctcatcccgtcatccaaaaccacagtggcttcagaaaaaccatcttttataatgggaggctccatctcacagggaacaccaggcacttatttgacttctcataatcaggcttcctacactcaagaaacacccaagccgtcagtgggatctatctctcttggactgccacggcaacaggaatctgccaaatcagctactttgccctacatcaagcaggaagaattttctccccgaagccaaaactcacaacctgagggtctgttggtcagggcccaacatgaaggtgtagtcagaggtaccgcaggagccatacaagaaggaagtataactcggggaactccaaccagcaaaatttcagtggagagcattccatccctacggggctctatcactcagggcaccccggctctgccccagactggcataccaacagaggctttggtgaaggggtccatttcgagaatgcccattgaagacagcagtcctgagaaaggcagagaggaagctgcatccaaaggccatgttatttatgaaggcaaaagtggacatatcttgtcatatgataatattaagaatgcccgagaagggactaggagtccaagaacagctcatgaaatcagtttaaagagaagctatgaatcagtggaaggaaatataaagcaagggatgtcaatgagggagtctcctgtatcagcaccgttagaggggctgatatgccgagcattacccagggggagtcctcattctgacctcaaagaaaggactgtattgtctggctccataatgcaggggacaccaagagcaacaactgaaagctttgaagatggccttaaatatcccaaacaaattaaaagggaaagtcctcccatacgagcatttgaaggtgccattaccaaaggaaaaccatatgatggcatcaccaccatcaaagaaatggggcgttccattcatgagattccaaggcaagatattttaactcaggaaagtcggaaaactccagaagtggtccagagcacacggccgataattgagggttccatttcccagggcacaccaataaagtttgacaacaactcaggtcaatctgccatcaaacacaatgtcaaatccttaatcacggggcctagcaaactatcccgtggaatgcctccgctggaaattgtgccagagaacataaaagtggtagaacggggaaaatatgaggatgtgaaagcaggcgagaccgtgcgttcccggcacacgtcagtggtaagctctggcccctccgttcttaggtccacactgcatgaagctcccaaagcacaactgagccctgggatttatgatgacaccagtgcacggaggacccctgtgagttatcaaaacaccatgtccagaggctcacccatgatgaacagaacttctgatgttacaatttcttctaacaagtctaccaatcatgaaaggaaatcgacactgacccctacccagagggaaagtatcccagcgaagtctccagtgcctggggtggaccctgtcgtgagccacagtccgtttgatccccatcacagaggcagcactgcaggcgaggtttatcggagccacctgcccacgcacttggatccagccatgccttttcacagggctttggatcctgcagcggctgcttacctgtttcagagacagctttcaccaactccaggttacccaagtcagtatcagctttacgcaatggagaacacaagacagacaatcttaaatgattacattacctcacaacagatgcaagtgaacttgcgtccagatgtggccagaggactctccccaagagagcagccactgggtctcccatacccagcaacgagaggaatcattgacctgaccaatatgcctccaacaattttagtgcctcatccagggggaacaagcactcctcccatggacagaatcacttatattcctggtacacagattactttccctcccaggccgtacaactctgcttccatgtctccaggacacccaacacaccttgcagctgctgcaagtgctgagagggaacgggaacgggagcgggagaaggagcgggagcgggaacggattgctgcagcttcctccgacctctacctgcggccaggctcagaacagcctggccgacctggcagtcatggatatgttcgctccccttccccttcagtaagaactcaggagaccatgttgcaacagagacccagtgttttccaaggaaccaatggaaccagtgtaatcacacctttggatccaactgctcagctacgaatcatgccactgcctgctgggggcccttcaataagccaaggcctgccagcctcccgttacaacactgctgcggatgccctggctgctcttgtggatgctgcagcttctgcaccccagatggatgtgtccaaaacaaaagagagtaagcatgaagctgccaggttagaagaaaatttgagaagcaggtcagcagcagttagtgaacagcagcagctagagcagaaaaccctggaggtggagaagagatctgttcagtgtttatacacttcttcagcctttccaagtggcaagccccagcctcattcttcagtagtttattctgaggctgggaaagataaagggcctcctccaaaatccagatatgaggaagagctaaggaccagagggaagactaccattactgcagctaacttcatagacgtgatcatcacccggcaaattgcctcggacaaggatgcgagggaacgtggctctcaaagttcagactcttctagtagcttatcttctcacaggtatgaaacacctagcgatgctattgaggtgataagtcctgccagctcacctgcgccaccccaggagaaactgcagacctatcagccagaggttgttaaggcaaatcaagcggaaaatgatcctaccagacaatatgaaggaccattacatcactatcgaccacagcaggaatcaccatctccccaacaacagctgcccccttcttcacaggcagagggaatggggcaagtgcccaggacccatcggctgatcacacttgctgatcacatctgtcaaattatcacacaagattttgctagaaatcaagtttcctcgcagactccccagcagcctcctacttctacattccagaactcaccttctgctttggtatctacacctgtgaggactaaaacatcaaaccgttacagcccagaatcccaggctcagtctgtccatcatcaaagaccaggttcaagggtctctccagaaaatcttgtggacaaatccaggggaagtaggcctggaaaatccccagagaggagtcacgtctcttcggagccctacgagcccatctccccaccccaggttccggttgtgcatgagaaacaggacagcttgctgctcttgtctcagaggggcgcagagcctgcagagcagaggaatgatgcccgctcaccagggagtataagctacttgccttcattcttcaccaagcttgaaaatacatcacccatggttaaatcaaagaagcaggagatttttcgtaagttgaactcctctggtggaggtgactctgatatggcagctgctcagccaggaactgagatctttaatctgccagcagttactacgtcaggctcagttagctctagaggccattcttttgctgatcctgccagtaatcttgggctggaagacattatcaggaaggctctcatgggaagctttgatgacaaagttgaggatcatggagttgtcatgtcccagcctatgggagtagtgcctggtactgccaacacctcagttgtgaccagtggtgagacacgaagagaggaaggggacccatcacctcattcaggaggagtttgcaaaccaaagctgatcagcaagtcaaacagcaggaaatctaagtctcctatacctgggcaaggctacttaggaacggaacggccctcttcagtctcctctgtacattcagaaggggattaccataggcagacgccagggtgggcctgggaagacaggccctcttcaacaggctcaactcagtttccttataaccctctgactatgcggatgctcagcagtactccaccaacaccgattgcatgtgctccctctgcggtgaaccaagcagctcctcaccaacagaacaggatctgggagcgagagcctgccccactgctctcagcacagtacgagaccctgtcggatagtgatgactgaactgcacaaagtgaggggaacagggtgcaggagagggatctctagtttttgtggtttaatttttagtagcaggtcaaaaacctgccctcctgtgacttattccctgagacttttcaggagagccagcccacagatgatgaagaaatgatggaagttcatttggagagtcaaatgggaaaaaaacaaacaaaaaactgcctttgatacaggcaattcagtggactataataatagtggagggttgagatgtagagtttttaaaaagtgaacagttgctgttcttacatctgtaaagaaaaccataatgtctttaaatcactcttctgtaaatagatgacctttttgcagtgtatatccccttgctgtagtatctggtgtacttatgttcaaatcagcgcatcaactttgggggtgatttttaaaaatctttttgtctatctatctttttaaccctagccttctaaacaacctcatacagcccagttacataatgttggctgtcacgggcattgtacttttatctgatattgtttcctctaaattcagctttccagtgatgtttaaaatcttgtgaaaatgtttagatttttaacacagaccctgtcataaaatctgtacattagggtcaaaaggtaaaagtaacaaattctgccatattgtaaatttccagtgcaggctttaatttttttttttcattagtagcactgaaaaaatattactgcatgggtatgttctagttcagtttataaagttttaaaggcttatttgaggcatacctcactgttacgcacactggtaatttaaccatgcccctaagtattccttttctcctgcatttgatgcagcccaacaaagcttttgttttgaaataaatttgactaccctgtccata

SEQ ID NO: 448581 - DNA, 8376 bp, Homo sapiens
atgaagagaccgggcgcagcgcgacccgggaagctccgccgaggtggtttcctagaaacatgattgtttattggcattgatctcacagtctggtgaggacttctttactgataatgtcaagttcaggttatcctcccaaccaaggagcattcagcacagaacaaagtcgttatcctcctcactctgtccagtatacatttcccaacacccgccaccagcaggagttcgcagtccctgattatcgttcctctcatcttgaagtgagtcaggcatcacagcttttgcagcaacagcagcagcaacagcttcgaaggcgaccttccttgctttcagaatttcacccaggttctgacaggcctcaagaaaggagaactagttatgaaccgtttcatccaggcccatccccagtggatcatgattcactggaatcgaagcgaccacgtctggaacaggtttctgattctcattttcagcgtgtcagtgctgcggttttgcctttagtgcacccgctgccagaagggctgagggcttctgcagatgctaagaaggatccagcattcggaggcaaacatgaagctccatcctctccaatttcggggcaaccatgtggagatgatcaaaatgcttcaccttcaaaactctcaaaggaagagttaatacagagtatggatcgtgtagatcgagaaattgcaaaagtagaacagcagatccttaaactgaaaaagaaacaacaacagcttgaagaagaggcagctaaacctcctgagcctgagaagcccgtgtcccctcctcctgtggagcagaaacaccgcagtattgtccaaattatttatgatgagaatcggaaaaaagcagaagaagctcataaaatttttgaaggtcttggcccaaaagttgaactgccactgtataaccagccatcagataccaaggtgtaccatgagaacatcaagacaaaccaggtgatgaggaaaaaactcattttattttttaaaagaagaaatcatgcaagaaaacaaagggaacaaaaaatctgccagcgttatgatcagctcatggaggcatgggagaaaaaagtggacagaatagaaaataatcctcggaggaaagctaaagaaagcaaaacaagggaatactatgaaaagcagtttccagaaattcgaaaacaaagagaacagcaagaaagatttcagcgagttgggcagaggggagctggtctttcagccaccattgctaggagtgagcatgagatttctgaaattattgatgggctctctgagcaggagaataatgagaaacaaatgcggcagctctctgtgattccacctatgatgtttgatgcagaacaaagacgagtcaagttcattaacatgaatgggcttatggaggaccctatgaaagtgtataaagataggcagtttatgaatgtttggactgaccatgaaaaggagatctttaaggacaagtttatccagcatccaaaaaactttggactaattgcatcatacttggagaggaagagtgttcctgattgtgttttgtattactatttaaccaagaaaaatgagaattataaagccctcgtcagaaggaattatgggaaacgcagaggcagaaaccagcaaattgctcgaccctcgcaagaagaaaaagtagaagaaaaagaagaggataaagcagaaaaaacagaaaaaaaagaagaagaaaagaaagatgaagaggaaaaagatgaaaaagaagactccaaagaaaataccaaggaaaaggacaagatagatggtacagcagaagaaactgaggaaagagagcaagccacaccccgggggcgaaagactgccaacagtcagggccgccgtaagggccggatcaccaggtccatgacaaacgaagctgcagctgccagtgctgcagccgcagcggctactgaagagcccccaccacctctgccaccgccaccagaacccatttctacagagcctgtggagacctctcgatggacagaagaagaaatggaagttgctaaaaaaggtctagtagaacatggtcgtaactgggcagcaattgctaaaatggtgggaacgaaaagtgaagctcaatgtaaaaacttctattttaactataaaaggcgacacaatcttgacaacctcttacagcagcataaacagaaaacttcacgaaaacctcgtgaagagcgagatgtgtctcaatgtgaaagtgtcgcttccactgtttctgctcaggaggatgaagatattgaagcctccaatgaagaagaaaatccagaagacagcgaaggtgcagaaaatagttctgatacagaaagtgctccttctccttcaccagttgaagctgtcaagcccagcgaggacagtcctgaaaatgctacttctcgaggaaacacagaacctgcggttgagcttgagcccaccacggaaactgcacccagtacatctccctccttagcagttccaagtacaaaaccagctgaagatgaaagtgtggagacccaggtgaatgacagcatcagtgctgagacagcagagcagatggatgtagatcagcaggagcacagtgctgaagagggttctgtttgtgatcccccacccgctaccaaagctgactctgtggacgttgaagtgagggtgccagaaaaccatgcatctaaagttgaaggtgataataccaaagaaagagacttggatagagccagtgagaaggtggaacctagagatgaagatttggtggtagctcagcaaataaatgcccaaaggcccgagccccagtcagacaatgattccagtgccacgtgcagcgctgatgaggatgtggatggagagccagagaggcagagaatgtttcctatggactcaaagccttcactgttaaaccccactggatctatactcgtctcatctccgttaaaaccaaatccactggatctgccacagcttcagcatcgagctgctgttatcccaccaatggtatcctgcaccccatgtaacataccaattggaaccccagtgagcggctatgctctctaccagcgacacattaaagcaatgcatgagtcagcactcctggaggagcagcggcagagacaagaacagatagatttggaatgtagaagttctacaagtccatgtggcacatccaagagtccaaacagagagtgggaagtccttcagcctgctccacatcaagtgataactaatctccctgaaggcgttcggcttccgacaactcgaccaaccaggccaccgccccctctcatcccgtcatccaaaaccacagtggcttcagaaaaaccatcttttataatgggaggctccatctcacagggaacaccaggcacttatttgacttctcataatcaggcttcctacactcaagaaacacccaagccgtcagtgggatctatctctcttggactgccacggcaacaggaatctgccaaatcagctactttgccctacatcaagcaggaagaattttctccccgaagccaaaactcacaacctgagggtctgttggtcagggcccaacatgaaggtgtagtcagaggtaccgcaggagccatacaagaaggaagtataactcggggaactccaaccagcaaaatttcagtggagagcattccatccctacggggctctatcactcagggcaccccggctctgccccagactggcataccaacagaggctttggtgaaggggtccatttcgagaatgcccattgaagacagcagtcctgagaaaggcagagaggaagctgcatccaaaggccatgttatttatgaaggcaaaagtggacatatcttgtcatatgataatattaagaatgcccgagaagggactaggagtccaagaacagctcatgaaatcagtttaaagagaagctatgaatcagtggaaggaaatataaagcaagggatgtcaatgagggagtctcctgtatcagcaccgttagaggggctgatatgccgagcattacccagggggagtcctcattctgacctcaaagaaaggactgtattgtctggctccataatgcaggggacaccaagagcaacaactgaaagctttgaagatggccttaaatatcccaaacaaattaaaagggaaagtcctcccatacgagcatttgaaggtgccattaccaaaggaaaaccatatgatggcatcaccaccatcaaagaaatggggcgttccattcatgagattccaaggcaagatattttaactcaggaaagtcggaaaactccagaagtggtccagagcacacggccgataattgagggttccatttcccagggcacaccaataaagtttgacaacaactcaggtcaatctgccatcaaacacaatgtcaaatccttaatcacggggcctagcaaactatcccgtggaatgcctccgctggaaattgtgccagagaacataaaagtggtagaacggggaaaatatgaggatgtgaaagcaggcgagaccgtgcgttcccggcacacgtcagtggtaagctctggcccctccgttcttaggtccacactgcatgaagctcccaaagcacaactgagccctgggatttatgatgacaccagtgcacggaggacccctgtgagttatcaaaacaccatgtccagaggctcacccatgatgaacagaacttctgatgttacaatttcttctaacaagtctaccaatcatgaaaggaaatcgacactgacccctacccagagggaaagtatcccagcgaagtctccagtgcctggggtggaccctgtcgtgagccacagtccgtttgatccccatcacagaggcagcactgcaggcgaggtttatcggagccacctgcccacgcacttggatccagccatgccttttcacagggctttggatcctgcagcggctgcttacctgtttcagagacagctttcaccaactccaggttacccaagtcagtatcagctttacgcaatggagaacacaagacagacaatcttaaatgattacattacctcacaacagatgcaagtgaacttgcgtccagatgtggccagaggactctccccaagagagcagccactgggtctcccatacccagcaacgagaggaatcattgacctgaccaatatgcctccaacaattttagtgcctcatccagggggaacaagcactcctcccatggacagaatcacttatattcctggtacacagattactttccctcccaggccgtacaactctgcttccatgtctccaggacacccaacacaccttgcagctgctgcaagtgctgagagggaacgggaacgggagcgggagaaggagcgggagcgggaacggattgctgcagcttcctccgacctctacctgcggccaggctcagaacagcctggccgacctggcagtcatggatatgttcgctccccttccccttcagtaagaactcaggagaccatgttgcaacagagacccagtgttttccaaggaaccaatggaaccagtgtaatcacacctttggatccaactgctcagctacgaatcatgccactgcctgctgggggcccttcaataagccaaggcctgccagcctcccgttacaacactgctgcggatgccctggctgctcttgtggatgctgcagcttctgcaccccagatggatgtgtccaaaacaaaagagagtaagcatgaagctgccaggttagaagaaaatttgagaagcaggtcagcagcagttagtgaacagcagcagctagagcagaaaaccctggaggtggagaagagatctgttcagtgtttatacacttcttcagcctttccaagtggcaagccccagcctcattcttcagtagtttattctgaggctgggaaagataaagggcctcctccaaaatccagatatgaggaagagctaaggaccagagggaagactaccattactgcagctaacttcatagacgtgatcatcacccggcaaattgcctcggacaaggatgcgagggaacgtggctctcaaagttcagactcttctagtagcttatcttctcacaggtatgaaacacctagcgatgctattgaggtgataagtcctgccagctcacctgcgccaccccaggagaaactgcagacctatcagccagaggttgttaaggcaaatcaagcggaaaatgatcctaccagacaatatgaaggaccattacatcactatcgaccacagcaggaatcaccatctccccaacaacagctgcccccttcttcacaggcagagggaatggggcaagtgcccaggacccatcggctgatcacacttgctgatcacatctgtcaaattatcacacaagattttgctagaaatcaagtttcctcgcagactccccagcagcctcctacttctacattccagaactcaccttctgctttggtatctacacctgtgaggactaaaacatcaaaccgttacagcccagaatcccaggctcagtctgtccatcatcaaagaccaggttcaagggtctctccagaaaatcttgtggacaaatccaggggaagtaggcctggaaaatccccagagaggagtcacgtctcttcggagccctacgagcccatctccccaccccaggttccggttgtgcatgagaaacaggacagcttgctgctcttgtctcagaggggcgcagagcctgcagagcagaggaatgatgcccgctcaccagggagtataagctacttgccttcattcttcaccaagcttgaaaatacatcacccatggttaaatcaaagaagcaggagatttttcgtaagttgaactcctctggtggaggtgactctgatatggcagctgctcagccaggaactgagatctttaatctgccagcagttactacgtcaggctcagttagctctagaggccattcttttgctgatcctgccagtaatcttgggctggaagacattatcaggaaggctctcatgggaagctttgatgacaaagttgaggatcatggagttgtcatgtcccagcctatgggagtagtgcctggtactgccaacacctcagttgtgaccagtggtgagacacgaagagaggaaggggacccatcacctcattcaggaggagtttgcaaaccaaagctgatcagcaagtcaaacagcaggaaatctaagtctcctatacctgggcaaggctacttaggaacggaacggccctcttcagtctcctctgtacattcagaaggggattaccataggcagacgccagggtgggcctgggaagacaggccctcttcaacaggctcaactcagtttccttataaccctctgactatgcggatgctcagcagtactccaccaacaccgattgcatgtgctccctctgcggtgaaccaagcagctcctcaccaacagaacaggatctgggagcgagagcctgccccactgctctcagcacagtacgagaccctgtcggatagtgatgactgaactgcacaaagtgaggggaacagggtgcaggagagggatctctagtttttgtggtttaatttttagtagcaggtcaaaaacctgccctcctgtgacttattccctgagacttttcaggagagccagcccacagatgatgaagaaatgatggaagttcatttggagagtcaaatgggaaaaaaacaaacaaaaaactgcctttgatacaggcaattcagtggactataataatagtggagggttgagatgtagagtttttaaaaagtgaacagttgctgttcttacatctgtaaagaaaaccataatgtctttaaatcactcttctgtaaatagatgacctttttgcagtgtatatccccttgctgtagtatctggtgtacttatgttcaaatcagcgcatcaactttgggggtgatttttaaaaatctttttgtctatctatctttttaaccctagccttctaaacaacctcatacagcccagttacataatgttggctgtcacgggcattgtacttttatctgatattgtttcctctaaattcagctttccagtgatgtttaaaatcttgtgaaaatgtttagatttttaacacagaccctgtcataaaatctgtacattagggtcaaaaggtaaaagtaacaaattctgccatattgtaaatttccagtgcaggctttaatttttttttttcattagtagcactgaaaaaatattactgcatgggtatgttctagttcagtttataaagttttaaaggcttatttgaggcatacctcactgttacgcacactggtaatttaaccatgcccctaagtattccttttctcctgcatttgatgcagcccaacaaagcttttgttttgaaataaatttgactaccctgtccata

SEQ ID NO: 448582 - DNA, 8066 bp, Homo sapiens
  misc_feature (73)..(73): n is a, c, g, or t
tttttatttttattttttagatggagtctcactctgtcgcccaggcaggagtgcagcagcgtgagctcagctnactgcaacctctgtctcccacactcaagcgattcccctgcctaggcctcccaaagtgctgggattacaggcatgagccactgcacccggcccagaattaaaatcttaaaggatgcttcctcttagttttttttttaaactctatctaatgaaaatttgtgttgtttggttatgaaataaatctgattaattctctttgagctcttggtccatgagaccttcatggattaattggttaccctacagaatctgcaagcaaagcttagtagcctgtgttatctccagtggttaatcactgctgggtgtggtgtgcagcacatgcttgactctttctttctggatctcttagcaacagcttgaagaagaggcagctaaacctcctgagcctgagaagcccgtgtcccctcctcctgtggagcagaaacaccgcagtattgtccaaattatttatgatgagaatcggaaaaaagcagaagaagctcataaaatttttgaaggtcttggcccaaaagttgaactgccactgtataaccagccatcagataccaaggtgtaccatgagaacatcaagacaaaccaggtgatgaggaaaaaactcattttattttttaaaagaagaaatcatgcaagaaaacaaagggaacaaaaaatctgccagcgttatgatcagctcatggaggcatgggagaaaaaagtggacagaatagaaaataatcctcggaggaaagctaaagaaagcaaaacaagggaatactatgaaaagcagtttccagaaattcgaaaacaaagagaacagcaagaaagatttcagcgagttgggcagaggggagctggtctttcagccaccattgctaggagtgagcatgagatttctgaaattattgatgggctctctgagcaggagaataatgagaaacaaatgcggcagctctctgtgattccacctatgatgtttgatgcagaacaaagacgagtcaagttcattaacatgaatgggcttatggaggaccctatgaaagtgtataaagataggcagtttatgaatgtttggactgaccatgaaaaggagatctttaaggacaagtttatccagcatccaaaaaactttggactaattgcatcatacttggagaggaagagtgttcctgattgtgttttgtattactatttaaccaagaaaaatgagaattataaagccctcgtcagaaggaattatgggaaacgcagaggcagaaaccagcaaattgctcgaccctcgcaagaagaaaaagtagaagaaaaagaagaggataaagcagaaaaaacagaaaaaaaagaagaagaaaagaaagatgaagaggaaaaagatgaaaaagaagactccaaagaaaataccaaggaaaaggacaagatagatggtacagcagaagaaactgaggaaagagagcaagccacaccccgggggcgaaagactgccaacagtcagggccgccgtaagggccggatcaccaggtccatgacaaacgaagctgcagctgccagtgctgcagccgcagcggctactgaagagcccccaccacctctgccaccgccaccagaacccatttctacagagcctgtggagacctctcgatggacagaagaagaaatggaagttgctaaaaaaggtctagtagaacatggtcgtaactgggcagcaattgctaaaatggtgggaacgaaaagtgaagctcaatgtaaaaacttctattttaactataaaaggcgacacaatcttgacaacctcttacagcagcataaacagaaaacttcacgaaaacctcgtgaagagcgagatgtgtctcaatgtgaaagtgtcgcttccactgtttctgctcaggaggatgaagatattgaagcctccaatgaagaagaaaatccagaagacagcgaaggtgcagaaaatagttctgatacagaaagtgctccttctccttcaccagttgaagctgtcaagcccagcgaggacagtcctgaaaatgctacttctcgaggaaacacagaacctgcggttgagcttgagcccaccacggaaactgcacccagtacatctccctccttagcagttccaagtacaaaaccagctgaagatgaaagtgtggagacccaggtgaatgacagcatcagtgctgagacagcagagcagatggatgtagatcagcaggagcacagtgctgaagagggttctgtttgtgatcccccacccgctaccaaagctgactctgtggacgttgaagtgagggtgccagaaaaccatgcatctaaagttgaaggtgataataccaaagaaagagacttggatagagccagtgagaaggtggaacctagagatgaagatttggtggtagctcagcaaataaatgcccaaaggcccgagccccagtcagacaatgattccagtgccacgtgcagcgctgatgaggatgtggatggagagccagagaggcagagaatgtttcctatggactcaaagccttcactgttaaaccccactggatctatactcgtctcatctccgttaaaaccaaatccactggatctgccacagcttcagcatcgagctgctgttatcccaccaatggtatcctgcaccccatgtaacataccaattggaaccccagtgagcggctatgctctctaccagcgacacattaaagcaatgcatgagtcagcactcctggaggagcagcggcagagacaagaacagatagatttggaatgtagaagttctacaagtccatgtggcacatccaagagtccaaacagagagtgggaagtccttcagcctgctccacatcaagtgataactaatctccctgaaggcgttcggcttccgacaactcgaccaaccaggccaccgccccctctcatcccgtcatccaaaaccacagtggcttcagaaaaaccatcttttataatgggaggctccatctcacagggaacaccaggcacttatttgacttctcataatcaggcttcctacactcaagaaacacccaagccgtcagtgggatctatctctcttggactgccacggcaacaggaatctgccaaatcagctactttgccctacatcaagcaggaagaattttctccccgaagccaaaactcacaacctgagggtctgttggtcagggcccaacatgaaggtgtagtcagaggtaccgcaggagccatacaagaaggaagtataactcggggaactccaaccagcaaaatttcagtggagagcattccatccctacggggctctatcactcagggcaccccggctctgccccagactggcataccaacagaggctttggtgaaggggtccatttcgagaatgcccattgaagacagcagtcctgagaaaggcagagaggaagctgcatccaaaggccatgttatttatgaaggcaaaagtggacatatcttgtcatatgataatattaagaatgcccgagaagggactaggagtccaagaacagctcatgaaatcagtttaaagagaagctatgaatcagtggaaggaaatataaagcaagggatgtcaatgagggagtctcctgtatcagcaccgttagaggggctgatatgccgagcattacccagggggagtcctcattctgacctcaaagaaaggactgtattgtctggctccataatgcaggggacaccaagagcaacaactgaaagctttgaagatggccttaaatatcccaaacaaattaaaagggaaagtcctcccatacgagcatttgaaggtgccattaccaaaggaaaaccatatgatggcatcaccaccatcaaagaaatggggcgttccattcatgagattccaaggcaagatattttaactcaggaaagtcggaaaactccagaagtggtccagagcacacggccgataattgagggttccatttcccagggcacaccaataaagtttgacaacaactcaggtcaatctgccatcaaacacaatgtcaaatccttaatcacggggcctagcaaactatcccgtggaatgcctccgctggaaattgtgccagagaacataaaagtggtagaacggggaaaatatgaggatgtgaaagcaggcgagaccgtgcgttcccggcacacgtcagtggtaagctctggcccctccgttcttaggtccacactgcatgaagctcccaaagcacaactgagccctgggatttatgatgacaccagtgcacggaggacccctgtgagttatcaaaacaccatgtccagaggctcacccatgatgaacagaacttctgatgttacaatttcttctaacaagtctaccaatcatgaaaggaaatcgacactgacccctacccagagggaaagtatcccagcgaagtctccagtgcctggggtggaccctgtcgtgagccacagtccgtttgatccccatcacagaggcagcactgcaggcgaggtttatcggagccacctgcccacgcacttggatccagccatgccttttcacagggctttggatcctgcagcggctgcttacctgtttcagagacagctttcaccaactccaggttacccaagtcagtatcagctttacgcaatggagaacacaagacagacaatcttaaatgattacattacctcacaacagatgcaagtgaacttgcgtccagatgtggccagaggactctccccaagagagcagccactgggtctcccatacccagcaacgagaggaatcattgacctgaccaatatgcctccaacaattttagtgcctcatccagggggaacaagcactcctcccatggacagaatcacttatattcctggtacacagattactttccctcccaggccgtacaactctgcttccatgtctccaggacacccaacacaccttgcagctgctgcaagtgctgagagggaacgggaacgggagcgggagaaggagcgggagcgggaacggattgctgcagcttcctccgacctctacctgcggccaggctcagaacagcctggccgacctggcagtcatggatatgttcgctccccttccccttcagtaagaactcaggagaccatgttgcaacagagacccagtgttttccaaggaaccaatggaaccagtgtaatcacacctttggatccaactgctcagctacgaatcatgccactgcctgctgggggcccttcaataagccaaggcctgccagcctcccgttacaacactgctgcggatgccctggctgctcttgtggatgctgcagcttctgcaccccagatggatgtgtccaaaacaaaagagagtaagcatgaagctgccaggttagaagaaaatttgagaagcaggtcagcagcagttagtgaacagcagcagctagagcagaaaaccctggaggtggagaagagatctgttcagtgtttatacacttcttcagcctttccaagtggcaagccccagcctcattcttcagtagtttattctgaggctgggaaagataaagggcctcctccaaaatccagatatgaggaagagctaaggaccagagggaagactaccattactgcagctaacttcatagacgtgatcatcacccggcaaattgcctcggacaaggatgcgagggaacgtggctctcaaagttcagactcttctagtagcttatcttctcacaggtatgaaacacctagcgatgctattgaggtgataagtcctgccagctcacctgcgccaccccaggagaaactgcagacctatcagccagaggttgttaaggcaaatcaagcggaaaatgatcctaccagacaatatgaaggaccattacatcactatcgaccacagcaggaatcaccatctccccaacaacagctgcccccttcttcacaggcagagggaatggggcaagtgcccaggacccatcggctgatcacacttgctgatcacatctgtcaaattatcacacaagattttgctagaaatcaagtttcctcgcagactccccagcagcctcctacttctacattccagaactcaccttctgctttggtatctacacctgtgaggactaaaacatcaaaccgttacagcccagaatcccaggctcagtctgtccatcatcaaagaccaggttcaagggtctctccagaaaatcttgtggacaaatccaggggaagtaggcctggaaaatccccagagaggagtcacgtctcttcggagccctacgagcccatctccccaccccaggttccggttgtgcatgagaaacaggacagcttgctgctcttgtctcagaggggcgcagagcctgcagagcagaggaatgatgcccgctcaccagggagtataagctacttgccttcattcttcaccaagcttgaaaatacatcacccatggttaaatcaaagaagcaggagatttttcgtaagttgaactcctctggtggaggtgactctgatatggcagctgctcagccaggaactgagatctttaatctgccagcagttactacgtcaggctcagttagctctagaggccattcttttgctgatcctgccagtaatcttgggctggaagacattatcaggaaggctctcatgggaagctttgatgacaaagttgaggatcatggagttgtcatgtcccagcctatgggagtagtgcctggtactgccaacacctcagttgtgaccagtggtgagacacgaagagaggaaggggacccatcacctcattcaggaggagtttgcaaaccaaagctgatcagcaagtcaaacagcaggaaatctaagtctcctatacctgggcaaggctacttaggaacggaacggccctcttcagtctcctctgtacattcagaaggggattaccataggcagacgccagggtgggcctgggaagacaggccctcttcaacaggctcaactcagtttccttataaccctctgactatgcggatgctcagcagtactccaccaacaccgattgcatgtgctccctctgcggtgaaccaagcagctcctcaccaacagaacaggatctgggagcgagagcctgccccactgctctcagcacagtacgagaccctgtcggatagtgatgactgaactgcacaaagtgaggggaacagggtgcaggagagggatctctagtttttgtggtttaatttttagtagcaggtcaaaaacctgccctcctgtgacttattccctgagacttttcaggagagccagcccacagatgatgaagaaatgatggaagttcatttggagagtcaaatgggaaaaaaacaaacaaaaaactgcctttgatacaggcaattcagtggactataataatagtggagggttgagatgtagagtttttaaaaagtgaacagttgctgttcttacatctgtaaagaaaaccataatgtctttaaatcactcttctgtaaatagatgacctttttgcagtgtatatccccttgctgtagtatctggtgtacttatgttcaaatcagcgcatcaactttgggggtgatttttaaaaatctttttgtctatctatctttttaaccctagccttctaaacaacctcatacagcccagttacataatgttggctgtcacgggcattgtacttttatctgatattgtttcctctaaattcagctttccagtgatgtttaaaatcttgtgaaaatgtttagatttttaacacagaccctgtcataaaatctgtacattagggtcaaaaggtaaaagtaacaaattctgccatattgtaaatttccagtgcaggctttaatttttttttttcattagtagcactgaaaaaatattactgcatgggtatgttctagttcagtttataaagttttaaaggcttatttgaggcatacctcactgttacgcacactggtaatttaaccatgcccctaagtattccttttctcctgcatttgatgcagcccaacaaagcttttgttttgaaataaatttgactaccctgtccata

SEQ ID NO: 448583 - DNA, 9756 bp, Homo sapiens
gggttgagtcaagatggcggccaaggtggcgaagcagcagccgcggcggcggcggcggctggagtgagcgtccgactcgccgcgccgaacgaggtcccggtgtagggccgcgcgccgtggccgcgtcccactcctcaggccggggcgcacgtcggctcccacgcttagccagctcccggtggtttcctagaaacatgattgtttattggcattgatctcacagtctggtgaggacttctttactgataatgtcaagttcaggttatcctcccaaccaaggagcattcagcacagaacaaagtcgttatcctcctcactctgtccagtatacatttcccaacacccgccaccagcaggagttcgcagtccctgattatcgttcctctcatcttgaagtgagtcaggcatcacagcttttgcagcaacagcagcagcaacagcttcgaaggcgaccttccttgctttcagaatttcacccaggttctgacaggcctcaagaaaggagaactagttatgaaccgtttcatccaggcccatccccagtggatcatgattcactggaatcgaagcgaccacgtctggaacaggtttctgattctcattttcagcgtgtcagtgctgcggttttgcctttagtgcacccgctgccagaagggctgagggcttctgcagatgctaagaaggatccagcattcggaggcaaacatgaagctccatcctctccaatttcggggcaaccatgtggagatgatcaaaatgcttcaccttcaaaactctcaaaggaagagttaatacagagtatggatcgtgtagatcgagaaattgcaaaagtagaacagcagatccttaaactgaaaaagaaacaacaacagcttgaagaagaggcagctaaacctcctgagcctgagaagcccgtgtcccctcctcctgtggagcagaaacaccgcagtattgtccaaattatttatgatgagaatcggaaaaaagcagaagaagctcataaaatttttgaaggtcttggcccaaaagttgaactgccactgtataaccagccatcagataccaaggtgtaccatgagaacatcaagacaaaccaggtgatgaggaaaaaactcattttattttttaaaagaagaaatcatgcaagaaaacaaagggaacaaaaaatctgccagcgttatgatcagctcatggaggcatgggagaaaaaagtggacagaatagaaaataatcctcggaggaaagctaaagaaagcaaaacaagggaatactatgaaaagcagtttccagaaattcgaaaacaaagagaacagcaagaaagatttcagcgagttgggcagaggggagctggtctttcagccaccattgctaggagtgagcatgagatttctgaaattattgatgggctctctgagcaggagaataatgagaaacaaatgcggcagctctctgtgattccacctatgatgtttgatgcagaacaaagacgagtcaagttcattaacatgaatgggcttatggaggaccctatgaaagtgtataaagataggcagtttatgaatgtttggactgaccatgaaaaggagatctttaaggacaagtttatccagcatccaaaaaactttggactaattgcatcatacttggagaggaagagtgttcctgattgtgttttgtattactatttaaccaagaaaaatgagaattataaagccctcgtcagaaggaattatgggaaacgcagaggcagaaaccagcaaattgctcgaccctcgcaagaagaaaaagtagaagaaaaagaagaggataaagcagaaaaaacagaaaaaaaagaagaagaaaagaaagatgaagaggaaaaagatgaaaaagaagactccaaagaaaataccaaggaaaaggacaagatagatggtacagcagaagaaactgaggaaagagagcaagccacaccccgggggcgaaagactgccaacagtcagggccgccgtaagggccggatcaccaggtccatgacaaacgaagctgcagctgccagtgctgcagccgcagcggctactgaagagcccccaccacctctgccaccgccaccagaacccatttctacagagcctgtggagacctctcgatggacagaagaagaaatggaagttgctaaaaaaggtctagtagaacatggtcgtaactgggcagcaattgctaaaatggtgggaacgaaaagtgaagctcaatgtaaaaacttctattttaactataaaaggcgacacaatcttgacaacctcttacagcagcataaacagaaaacttcacgaaaacctcgtgaagagcgagatgtgtctcaatgtgaaagtgtcgcttccactgtttctgctcaggaggatgaagatattgaagcctccaatgaagaagaaaatccagaagacagcgaaggtgcagaaaatagttctgatacagaaagtgctccttctccttcaccagttgaagctgtcaagcccagcgaggacagtcctgaaaatgctacttctcgaggaaacacagaacctgcggttgagcttgagcccaccacggaaactgcacccagtacatctccctccttagcagttccaagtacaaaaccagctgaagatgaaagtgtggagacccaggtgaatgacagcatcagtgctgagacagcagagcagatggatgtagatcagcaggagcacagtgctgaagagggttctgtttgtgatcccccacccgctaccaaagctgactctgtggacgttgaagtgagggtgccagaaaaccatgcatctaaagttgaaggtgataataccaaagaaagagacttggatagagccagtgagaaggtggaacctagagatgaagatttggtggtagctcagcaaataaatgcccaaaggcccgagccccagtcagacaatgattccagtgccacgtgcagcgctgatgaggatgtggatggagagccagagaggcagagaatgtttcctatggactcaaagccttcactgttaaaccccactggatctatactcgtctcatctccgttaaaaccaaatccactggatctgccacagcttcagcatcgagctgctgttatcccaccaatggtatcctgcaccccatgtaacataccaattggaaccccagtgagcggctatgctctctaccagcgacacattaaagcaatgcatgagtcagcactcctggaggagcagcggcagagacaagaacagatagatttggaatgtagaagttctacaagtccatgtggcacatccaagagtccaaacagagagtgggaagtccttcagcctgctccacatcaagtgataactaatctccctgaaggcgttcggcttccgacaactcgaccaaccaggccaccgccccctctcatcccgtcatccaaaaccacagtggcttcagaaaaaccatcttttataatgggaggctccatctcacagggaacaccaggcacttatttgacttctcataatcaggcttcctacactcaagaaacacccaagccgtcagtgggatctatctctcttggactgccacggcaacaggaatctgccaaatcagctactttgccctacatcaagcaggaagaattttctccccgaagccaaaactcacaacctgagggtctgttggtcagggcccaacatgaaggtgtagtcagaggtaccgcaggagccatacaagaaggaagtataactcggggaactccaaccagcaaaatttcagtggagagcattccatccctacggggctctatcactcagggcaccccggctctgccccagactggcataccaacagaggctttggtgaaggggtccatttcgagaatgcccattgaagacagcagtcctgagaaaggcagagaggaagctgcatccaaaggccatgttatttatgaaggcaaaagtggacatatcttgtcatatgataatattaagaatgcccgagaagggactaggagtccaagaacagctcatgaaatcagtttaaagagaagctatgaatcagtggaaggaaatataaagcaagggatgtcaatgagggagtctcctgtatcagcaccgttagaggggctgatatgccgagcattacccagggggagtcctcattctgacctcaaagaaaggactgtattgtctggctccataatgcaggggacaccaagagcaacaactgaaagctttgaagatggccttaaatatcccaaacaaattaaaagggaaagtcctcccatacgagcatttgaaggtgccattaccaaaggaaaaccatatgatggcatcaccaccatcaaagaaatggggcgttccattcatgagattccaaggcaagatattttaactcaggaaagtcggaaaactccagaagtggtccagagcacacggccgataattgagggttccatttcccagggcacaccaataaagtttgacaacaactcaggtcaatctgccatcaaacacaatgtcaaatccttaatcacggggcctagcaaactatcccgtggaatgcctccgctggaaattgtgccagagaacataaaagtggtagaacggggaaaatatgaggatgtgaaagcaggcgagaccgtgcgttcccggcacacgtcagtggtaagctctggcccctccgttcttaggtccacactgcatgaagctcccaaagcacaactgagccctgggatttatgatgacaccagtgcacggaggacccctgtgagttatcaaaacaccatgtccagaggctcacccatgatgaacagaacttctgatgttacaatttcttctaacaagtctaccaatcatgaaaggaaatcgacactgacccctacccagagggaaagtatcccagcgaagtctccagtgcctggggtggaccctgtcgtgagccacagtccgtttgatccccatcacagaggcagcactgcaggcgaggtttatcggagccacctgcccacgcacttggatccagccatgccttttcacagggctttggatcctgcagcggctgcttacctgtttcagagacagctttcaccaactccaggttacccaagtcagtatcagctttacgcaatggagaacacaagacagacaatcttaaatgattacattacctcacaacagatgcaagtgaacttgcgtccagatgtggccagaggactctccccaagagagcagccactgggtctcccatacccagcaacgagaggaatcattgacctgaccaatatgcctccaacaattttagtgcctcatccagggggaacaagcactcctcccatggacagaatcacttatattcctggtacacagattactttccctcccaggccgtacaactctgcttccatgtctccaggacacccaacacaccttgcagctgctgcaagtgctgagagggaacgggaacgggagcgggagaaggagcgggagcgggaacggattgctgcagcttcctccgacctctacctgcggccaggctcagaacagcctggccgacctggcagtcatggatatgttcgctccccttccccttcagtaagaactcaggagaccatgttgcaacagagacccagtgttttccaaggaaccaatggaaccagtgtaatcacacctttggatccaactgctcagctacgaatcatgccactgcctgctgggggcccttcaataagccaaggcctgccagcctcccgttacaacactgctgcggatgccctggctgctcttgtggatgctgcagcttctgcaccccagatggatgtgtccaaaacaaaagagagtaagcatgaagctgccaggttagaagaaaatttgagaagcaggtcagcagcagttagtgaacagcagcagctagagcagaaaaccctggaggtggagaagagatctgttcagtgtttatacacttcttcagcctttccaagtggcaagccccagcctcattcttcagtagtttattctgaggctgggaaagataaagggcctcctccaaaatccagatatgaggaagagctaaggaccagagggaagactaccattactgcagctaacttcatagacgtgatcatcacccggcaaattgcctcggacaaggatgcgagggaacgtggctctcaaagttcagactcttctagtagcttatcttctcacaggtatgaaacacctagcgatgctattgaggtgataagtcctgccagctcacctgcgccaccccaggagaaactgcagacctatcagccagaggttgttaaggcaaatcaagcggaaaatgatcctaccagacaatatgaaggaccattacatcactatcgaccacagcaggaatcaccatctccccaacaacagctgcccccttcttcacaggcagagggaatggggcaagtgcccaggacccatcggctgatcacacttgctgatcacatctgtcaaattatcacacaagattttgctagaaatcaagtttcctcgcagactccccagcagcctcctacttctacattccagaactcaccttctgctttggtatctacacctgtgaggactaaaacatcaaaccgttacagcccagaatcccaggctcagtctgtccatcatcaaagaccaggttcaagggtctctccagaaaatcttgtggacaaatccaggggaagtaggcctggaaaatccccagagaggagtcacgtctcttcggagccctacgagcccatctccccaccccaggttccggttgtgcatgagaaacaggacagcttgctgctcttgtctcagaggggcgcagagcctgcagagcagaggaatgatgcccgctcaccagggagtataagctacttgccttcattcttcaccaagcttgaaaatacatcacccatggttaaatcaaagaagcaggagatttttcgtaagttgaactcctctggtggaggtgactctgatatggcagctgctcagccaggaactgagatctttaatctgccagcagttactacgtcaggctcagttagctctagaggccattcttttgctgatcctgccagtaatcttgggctggaagacattatcaggaaggctctcatgggaagctttgatgacaaagttgaggatcatggagttgtcatgtcccagcctatgggagtagtgcctggtactgccaacacctcagttgtgaccagtggtgagacacgaagagaggaaggggacccatcacctcattcaggaggagtttgcaaaccaaagctgatcagcaagtcaaacagcaggaaatctaagtctcctatacctgggcaaggctacttaggaacggaacggccctcttcagtctcctctgtacattcagaaggggattaccataggcagacgccagggtgggcctgggaagacaggccctcttcaacaggctcaactcagtttccttataaccctctgactatgcggatgctcagcagtactccaccaacaccgattgcatgtgctccctctgcggtgaaccaagcagctcctcaccaacagaacaggatctgggagcgagagcctgccccactgctctcagcacagtacgagaccctgtcggatagtgatgactgaactgcacaaagtgaggggaacagggtgcaggagagggatctctagtttttgtggtttaatttttagtagcaggtcaaaaacctgccctcctgtgacttattccctgagacttttcaggagagccagcccacagatgatgaagaaatgatggaagttcatttggagagtcaaatgggaaaaaaacaaacaaaaaactgcctttgatacaggcaattcagtggactataataatagtggagggttgagatgtagagtttttaaaaagtgaacagttgctgttcttacatctgtaaagaaaaccataatgtctttaaatcactcttctgtaaatagatgacctttttgcagtgtatatccccttgctgtagtatctggtgtacttatgttcaaatcagcgcatcaactttgggggtgatttttaaaaatctttttgtctatctatctttttaaccctagccttctaaacaacctcatacagcccagttacataatgttggctgtcacgggcattgtacttttatctgatattgtttcctctaaattcagctttccagtgatgtttaaaatcttgtgaaaatgtttagatttttaacacagaccctgtcataaaatctgtacattagggtcaaaaggtaaaagtaacaaattctgccatattgtaaatttccagtgcaggctttaatttttttttttcagtgctactaatgaaaaaaaaaactcgtgccgaattcggcacgagagaacaaggggtctgtggaaatcatgagaaaggacttgaatgacgcccgggacctgcatggccaggcagagtcagcagctgcagtgtggaagggacacgtgatggaccgtaggaagaaggcactgaccgactacaagaagctgcgggccttctttgtggaggaggaggagcatttcctgcaggaggctgagaaggaggaggggctccctgaggacgagctggctgaccccactgagcggttcaggtcactgctgcaggcggtctcggagctggagaagaagcatcgcaacctgggcctcagcatgctgctgcagtgatggcgccaacccgtggcagtcccagagctggaggcaggaggatggatcctcatctccatgggaagtgtcagcgtgtggctgccagggaagcgtggcaggcgcctggccttgggtccatctacatagttgcgtgtttcaacaatgtccatttatccttcaccccgaggcgtgttttgggggctgcaaacacctcccggtagaggctggacctgaggacccttcccacctgtgcccgtcccttcctgaagtcctagccacagcccatcctccatgagtcccggcagctctgggtcatgcccttccctggtcacccatctgcccctcacccgtcatccagggaccagaccctgcaccttccatgtgggcccacaaatccttggcaggtacctgaggtgcaccattgagtgtcggatttggggttagcatccagaaagaagaatgcgcatgacgctctgtgaaggctggaactcaggtcttcagggagagaaaggaagactggattgccccttgatgcctcctgaggaggcggcccccctcttgaggtgggcgtgggcccggcccagccttatccaagtcgctctgtccacctcccccttcctggcccccaccccactcctgtgcctcccaggagccctccctgtgttccacctgcctccgcagaaggaagcctctttctctgtttccctgggtgagggggctggcaggtggctaaccccatttagcatttccaggccctgccatggtgtctcatcttgctgttatctctagctctttccctcctcccatttcctttagtagttgaattttgcaaagcttgtagcagtagctcagttgcctgcagcatccttgtgtgtagataaattagtcgacagaaaatcagcactggggacaggattgcaaagtcggggaaatagatgcagacagttgttgagatttggggatagccgggcttgtgagcggtgcccatttccagatgaagcctttcagcccttttgagtccccggcccttggtgcgatgtttgtgagtttgacctgcccagcgtgtgggctggctcaatgctgaataaagtgggtttgtgtc

SEQ ID NO: 448584 - DNA, 11024 bp, Homo sapiens
gggttgagtcaagatggcggccaaggtggcgaagcagcagccgcggcggcggcggcggctggagtgagcgtccgactcgccgcgccgaacgaggtcccggtgtagggccgcgcgccgtggccgcgtcccactcctcaggccggggcgcacgtcggctcccacgcttagccagctcccggtggtttcctagaaacatgattgtttattggcattgatctcacagtctggtgaggacttctttactgataatgtcaagttcaggttatcctcccaaccaaggagcattcagcacagaacaaagtcgttatcctcctcactctgtccagtatacatttcccaacacccgccaccagcaggagttcgcagtccctgattatcgttcctctcatcttgaagtgagtcaggcatcacagcttttgcagcaacagcagcagcaacagcttcgaaggcgaccttccttgctttcagaatttcacccaggttctgacaggcctcaagaaaggagaactagttatgaaccgtttcatccaggcccatccccagtggatcatgattcactggaatcgaagcgaccacgtctggaacaggtttctgattctcattttcagcgtgtcagtgctgcggttttgcctttagtgcacccgctgccagaagggctgagggcttctgcagatgctaagaaggatccagcattcggaggcaaacatgaagctccatcctctccaatttcggggcaaccatgtggagatgatcaaaatgcttcaccttcaaaactctcaaaggaagagttaatacagagtatggatcgtgtagatcgagaaattgcaaaagtagaacagcagatccttaaactgaaaaagaaacaacaacagcttgaagaagaggcagctaaacctcctgagcctgagaagcccgtgtcccctcctcctgtggagcagaaacaccgcagtattgtccaaattatttatgatgagaatcggaaaaaagcagaagaagctcataaaatttttgaaggtcttggcccaaaagttgaactgccactgtataaccagccatcagataccaaggtgtaccatgagaacatcaagacaaaccaggtgatgaggaaaaaactcattttattttttaaaagaagaaatcatgcaagaaaacaaagggaacaaaaaatctgccagcgttatgatcagctcatggaggcatgggagaaaaaagtggacagaatagaaaataatcctcggaggaaagctaaagaaagcaaaacaagggaatactatgaaaagcagtttccagaaattcgaaaacaaagagaacagcaagaaagatttcagcgagttgggcagaggggagctggtctttcagccaccattgctaggagtgagcatgagatttctgaaattattgatgggctctctgagcaggagaataatgagaaacaaatgcggcagctctctgtgattccacctatgatgtttgatgcagaacaaagacgagtcaagttcattaacatgaatgggcttatggaggaccctatgaaagtgtataaagataggcagtttatgaatgtttggactgaccatgaaaaggagatctttaaggacaagtttatccagcatccaaaaaactttggactaattgcatcatacttggagaggaagagtgttcctgattgtgttttgtattactatttaaccaagaaaaatgagaattataaagccctcgtcagaaggaattatgggaaacgcagaggcagaaaccagcaaattgctcgaccctcgcaagaagaaaaagtagaagaaaaagaagaggataaagcagaaaaaacagaaaaaaaagaagaagaaaagaaagatgaagaggaaaaagatgaaaaagaagactccaaagaaaataccaaggaaaaggacaagatagatggtacagcagaagaaactgaggaaagagagcaagccacaccccgggggcgaaagactgccaacagtcagggccgccgtaagggccggatcaccaggtccatgacaaacgaagctgcagctgccagtgctgcagccgcagcggctactgaagagcccccaccacctctgccaccgccaccagaacccatttctacagagcctgtggagacctctcgatggacagaagaagaaatggaagttgctaaaaaaggtctagtagaacatggtcgtaactgggcagcaattgctaaaatggtgggaacgaaaagtgaagctcaatgtaaaaacttctattttaactataaaaggcgacacaatcttgacaacctcttacagcagcataaacagaaaacttcacgaaaacctcgtgaagagcgagatgtgtctcaatgtgaaagtgtcgcttccactgtttctgctcaggaggatgaagatattgaagcctccaatgaagaagaaaatccagaagacagcgaaggtgcagaaaatagttctgatacagaaagtgctccttctccttcaccagttgaagctgtcaagcccagcgaggacagtcctgaaaatgctacttctcgaggaaacacagaacctgcggttgagcttgagcccaccacggaaactgcacccagtacatctccctccttagcagttccaagtacaaaaccagctgaagatgaaagtgtggagacccaggtgaatgacagcatcagtgctgagacagcagagcagatggatgtagatcagcaggagcacagtgctgaagagggttctgtttgtgatcccccacccgctaccaaagctgactctgtggacgttgaagtgagggtgccagaaaaccatgcatctaaagttgaaggtgataataccaaagaaagagacttggatagagccagtgagaaggtggaacctagagatgaagatttggtggtagctcagcaaataaatgcccaaaggcccgagccccagtcagacaatgattccagtgccacgtgcagcgctgatgaggatgtggatggagagccagagaggcagagaatgtttcctatggactcaaagccttcactgttaaaccccactggatctatactcgtctcatctccgttaaaaccaaatccactggatctgccacagcttcagcatcgagctgctgttatcccaccaatggtatcctgcaccccatgtaacataccaattggaaccccagtgagcggctatgctctctaccagcgacacattaaagcaatgcatgagtcagcactcctggaggagcagcggcagagacaagaacagatagatttggaatgtagaagttctacaagtccatgtggcacatccaagagtccaaacagagagtgggaaggaaaatcagtcgcctatatgccttatgctgaggtcaaacgtgctctagaacaggaagcacagatgcacaatactgcagcaaggtcagcctcaccgtgtaggctttctccaagagaagtcagtaaagccgctccacagcctgatatgagtgcagcccgctatagtgtcccgccagtccttcagcctgctccacatcaagtgataactaatctccctgaaggcgttcggcttccgacaactcgaccaaccaggccaccgccccctctcatcccgtcatccaaaaccacagtggcttcagaaaaaccatcttttataatgggaggctccatctcacagggaacaccaggcacttatttgacttctcataatcaggcttcctacactcaagaaacacccaagccgtcagtgggatctatctctcttggactgccacggcaacaggaatctgccaaatcagctactttgccctacatcaagcaggaagaattttctccccgaagccaaaactcacaacctgagggtctgttggtcagggcccaacatgaaggtgtagtcagaggtaccgcaggagccatacaagaaggaagtataactcggggaactccaaccagcaaaatttcagtggagagcattccatccctacggggctctatcactcagggcaccccggctctgccccagactggcataccaacagaggctttggtgaaggggtccatttcgagaatgcccattgaagacagcagtcctgagaaaggcagagaggaagctgcatccaaaggccatgttatttatgaaggcaaaagtggacatatcttgtcatatgataatattaagaatgcccgagaagggactaggagtccaagaacagctcatgaaatcagtttaaagagaagctatgaatcagtggaaggaaatataaagcaagggatgtcaatgagggagtctcctgtatcagcaccgttagaggggctgatatgccgagcattacccagggggagtcctcattctgacctcaaagaaaggactgtattgtctggctccataatgcaggggacaccaagagcaacaactgaaagctttgaagatggccttaaatatcccaaacaaattaaaagggaaagtcctcccatacgagcatttgaaggtgccattaccaaaggaaaaccatatgatggcatcaccaccatcaaagaaatggggcgttccattcatgagattccaaggcaagatattttaactcaggaaagtcggaaaactccagaagtggtccagagcacacggccgataattgagggttccatttcccagggcacaccaataaagtttgacaacaactcaggtcaatctgccatcaaacacaatgtcaaatccttaatcacggggcctagcaaactatcccgtggaatgcctccgctggaaattgtgccagagaacataaaagtggtagaacggggaaaatatgaggatgtgaaagcaggcgagaccgtgcgttcccggcacacgtcagtggtaagctctggcccctccgttcttaggtccacactgcatgaagctcccaaagcacaactgagccctgggatttatgatgacaccagtgcacggaggacccctgtgagttatcaaaacaccatgtccagaggctcacccatgatgaacagaacttctgatgttacaatttcttctaacaagtctaccaatcatgaaaggaaatcgacactgacccctacccagagggaaagtatcccagcgaagtctccagtgcctggggtggaccctgtcgtgagccacagtccgtttgatccccatcacagaggcagcactgcaggcgaggtttatcggagccacctgcccacgcacttggatccagccatgccttttcacagggctttggatcctgcagcggctgcttacctgtttcagagacagctttcaccaactccaggttacccaagtcagtatcagctttacgcaatggagaacacaagacagacaatcttaaatgattacattacctcacaacagatgcaagtgaacttgcgtccagatgtggccagaggactctccccaagagagcagccactgggtctcccatacccagcaacgagaggaatcattgacctgaccaatatgcctccaacaattttagtgcctcatccagggggaacaagcactcctcccatggacagaatcacttatattcctggtacacagattactttccctcccaggccgtacaactctgcttccatgtctccaggacacccaacacaccttgcagctgctgcaagtgctgagagggaacgggaacgggagcgggagaaggagcgggagcgggaacggattgctgcagcttcctccgacctctacctgcggccaggctcagaacagcctggccgacctggcagtcatggatatgttcgctccccttccccttcagtaagaactcaggagaccatgttgcaacagagacccagtgttttccaaggaaccaatggaaccagtgtaatcacacctttggatccaactgctcagctacgaatcatgccactgcctgctgggggcccttcaataagccaaggcctgccagcctcccgttacaacactgctgcggatgccctggctgctcttgtggatgctgcagcttctgcaccccagatggatgtgtccaaaacaaaagagagtaagcatgaagctgccaggttagaagaaaatttgagaagcaggtcagcagcagttagtgaacagcagcagctagagcagaaaaccctggaggtggagaagagatctgttcagtgtttatacacttcttcagcctttccaagtggcaagccccagcctcattcttcagtagtttattctgaggctgggaaagataaagggcctcctccaaaatccagatatgaggaagagctaaggaccagagggaagactaccattactgcagctaacttcatagacgtgatcatcacccggcaaattgcctcggacaaggatgcgagggaacgtggctctcaaagttcagactcttctagtagcttatcttctcacaggtatgaaacacctagcgatgctattgaggtgataagtcctgccagctcacctgcgccaccccaggagaaactgcagacctatcagccagaggttgttaaggcaaatcaagcggaaaatgatcctaccagacaatatgaaggaccattacatcactatcgaccacagcaggaatcaccatctccccaacaacagctgcccccttcttcacaggcagagggaatggggcaagtgcccaggacccatcggctgatcacacttgctgatcacatctgtcaaattatcacacaagattttgctagaaatcaagtttcctcgcagactccccagcagcctcctacttctacattccagaactcaccttctgctttggtatctacacctgtgaggactaaaacatcaaaccgttacagcccagaatcccaggctcagtctgtccatcatcaaagaccaggttcaagggtctctccagaaaatcttgtggacaaatccaggggaagtaggcctggaaaatccccagagaggagtcacgtctcttcggagccctacgagcccatctccccaccccaggttccggttgtgcatgagaaacaggacagcttgctgctcttgtctcagaggggcgcagagcctgcagagcagaggaatgatgcccgctcaccagggagtataagctacttgccttcattcttcaccaagcttgaaaatacatcacccatggttaaatcaaagaagcaggagatttttcgtaagttgaactcctctggtggaggtgactctgatatggcagctgctcagccaggaactgagatctttaatctgccagcagttactacgtcaggctcagttagctctagaggccattcttttgctgatcctgccagtaatcttgggctggaagacattatcaggaaggctctcatgggaagctttgatgacaaagttgaggatcatggagttgtcatgtcccagcctatgggagtagtgcctggtactgccaacacctcagttgtgaccagtggtgagacacgaagagaggaaggggacccatcacctcattcaggaggagtttgcaaaccaaagctgatcagcaagtcaaacagcaggaaatctaagtctcctatacctgggcaaggctacttaggaacggaacggccctcttcagtctcctctgtacattcagaaggggattaccataggcagacgccagggtgggcctgggaagacaggccctcttcaacaggctcaactcagtttccttataaccctctgactatgcggatgctcagcagtactccaccaacaccgattgcatgtgctccctctgcggtgaaccaagcagctcctcaccaacagaacaggatctgggagcgagagcctgccccactgctctcagcacagtacgagaccctgtcggatagtgatgactgaactgcacaaagtgaggggaacagggtgcaggagagggatctctagtttttgtggtttaatttttagtagcaggtcaaaaacctgccctcctgtgacttattccctgagacttttcaggagagccagcccacagatgatgaagaaatgatggaagttcatttggagagtcaaatgggaaaaaaacaaacaaaaaactgcctttgatacaggcaattcagtggactataataatagtggagggttgagatgtagagtttttaaaaagtgaacagttgctgttcttacatctgtaaagaaaaccataatgtctttaaatcactcttctgtaaatagatgacctttttgcagtgtatatccccttgctgtagtatctggtgtacttatgttcaaatcagcgcatcaactttgggggtgatttttaaaaatctttttgtctatctatctttttaaccctagccttctaaacaacctcatacagcccagttacataatgttggctgtcacgggcattgtacttttatctgatattgtttcctctaaattcagctttccagtgatgtttaaaatcttgtgaaaatgtttagatttttaacacagaccctgtcataaaatctgtacattagggtcaaaaggtaaaagtaacaaattctgccatattgtaaatttccagtgcaggctttaatttttttttttcattagtagcactgaaaaaatattactgcatgggtatgttctagttcagtttataaagttttaaaggcttatttgaggcatacctcactgttacgcacactggtaatttaaccatgcccctaagtattccttttctcctgcatttgatgcagcccaacaaagcttttgttttgaaataaatttgactaccctgtccatagctacagtagattatttgtggtttaaggctcctggtgtctcaggttccaaaggaaaagcttacatatttttcccttagtttgaatatatgattggttgggttaaaagataatgatctgtgtagtatttagataagctttatgctgcatcctgaaaaactcatggtgaacacagtcctttttccccatcactatggaccagcatttactctcactttgctcccttgggacaagagtttactgttaaatgttttcatttcacagagtctcaaggtgcaaataatttaaaagactgaattctaaactaattatggtactagagggccagttttatctttcattaagaattgcttgctgaattttaaagtttttttcatacaatttatcatagcatttaagtatctttctataacatagatactaacagttttgggagaatgccactggtaactggaaaggggagaaacagatctctcaggatgataaaaattagcactttacagactttcaagtagacctaaacttttaaacaaaagtactcaaggcttttaaggaagcagctctgtgattagctactgaccaagaccctcctatcactggtgtctaatccctatgttacagatgaagacacaggtttagtactttgcccatatagttaaattagtgacagagataggccataagcccacatttgtcttcagtcaaagctttcactcctgtccctgttccactcctgtatacctgaggtccccaacataaactttagatcaggcttagtggtcagcattcctagtacttggaaagttggtattttttacaacagatatatgtaaacatataaaaatttcaaaatgaatgaaaaacagtgactaaatgttccacttcacagttttctgctgaatttttttttttcaggtactggtaatattttagagtttgttaataatttatattgccaacctaccataaaagagattatgatggtatttttctatgaccctgagggtcttaagctattctgagtcagaatacagttgacccttgaacaacacgggtttgaactgtgtgggtccacttatacatggattttcttccacctctgccacccaagatagcaagaccaaccccttctcatcctcagcctattcaacatgaagatgacaaggatgaagaccttcatgatgatccacttccacttaatgaatagtaaatatattttctcttccttataatcttaacaaacattttctcttctctagcttactttattgtaagaatacagtatataatacatatacaaaatatgtgtcaatcgactatgttatccgtaagacttctggtcagcagtaggccatgagtagttaagttttggaggagtcaaagttagatgtggatttttgactacttagggggtctatgcccctaactcctgcattatttgaaggtcaaccgtatagtttctgagaacatgtcagatcagagcctaacttcttactcttgcagttctacctgaggacccgaaggtgaggtgctgtgaaccactccctccatcctcatcataatgcatgtgcgtattactttatttaccatcacctggagaagaaatctcagaatgagagttaaaatccaataatagttcttgggttcaaaataaatgaaaggacagaattctcacatggtttacctatggaggttcaccttatcatgatttaagtggtaagcacagagcagcactgacaacttactgtggttcactgcaaaccaaaacatgatattctttgtagacttagatttcagtgttctgacactatatcccttacaccgtgatttttttagcacccagaactaaattaaggtcttcctaaatactcttcataaaagtattctgacagccagttttccactgcatgtttatgactgcaaatttcataatgcttttaattttggtacactgagtgattctattttaaaaatatttatgcccagaaaactccagtgaccattggacagttaaaaaattttaatgacacgattttaaccaattcacttttgaatttagaccaatcagtaaaggagatcagtcctccttttgcttcagtaccttattttacaacagtgtaaatgaactgtaatgaaaacacccacatgaagagactgtcctgaaaactcctagtgtttccaacaacgagaccatgagctgagtcactgtggatgatttaaaattaataaataaataaaacttggaatgaaaaacctttcagtaacccctgcagttgtgaaaaggtaaaaacattctcaatgcaaaaggtgagtggttgacattaatttttttaagaaatca

SEQ ID NO: 448585 - DNA, 9641 bp, Homo sapiens
gggttgagtcaagatggcggccaaggtggcgaagcagcagccgcggcggcggcggcggctggagtgagcgtccgactcgccgcgccgaacgaggtcccggtgtagggccgcgcgccgtggccgcgtcccactcctcaggccggggcgcacgtcggctcccacgcttagccagctcccggtggtttcctagaaacatgattgtttattggcattgatctcacagtctggtgaggacttctttactgataatgtcaagttcaggttatcctcccaaccaaggagcattcagcacagaacaaagtcgttatcctcctcactctgtccagtatacatttcccaacacccgccaccagcaggagttcgcagtccctgattatcgttcctctcatcttgaagtgagtcaggcatcacagcttttgcagcaacagcagcagcaacagcttcgaaggcgaccttccttgctttcagaatttcacccaggttctgacaggcctcaagaaaggagaactagttatgaaccgtttcatccaggcccatccccagtggatcatgattcactggaatcgaagcgaccacgtctggaacaggtttctgattctcattttcagcgtgtcagtgctgcggttttgcctttagtgcacccgctgccagaagggctgagggcttctgcagatgctaagaaggatccagcattcggaggcaaacatgaagctccatcctctccaatttcggggcaaccatgtggagatgatcaaaatgcttcaccttcaaaactctcaaaggaagagttaatacagagtatggatcgtgtagatcgagaaattgcaaaagtagaacagcagatccttaaactgaaaaagaaacaacaacagcttgaagaagaggcagctaaacctcctgagcctgagaagcccgtgtcccctcctcctgtggagcagaaacaccgcagtattgtccaaattatttatgatgagaatcggaaaaaagcagaagaagctcataaaatttttgaaggtcttggcccaaaagttgaactgccactgtataaccagccatcagataccaaggtgtaccatgagaacatcaagacaaaccaggtgatgaggaaaaaactcattttattttttaaaagaagaaatcatgcaagaaaacaaagggaacaaaaaatctgccagcgttatgatcagctcatggaggcatgggagaaaaaagtggacagaatagaaaataatcctcggaggaaagctaaagaaagcaaaacaagggaatactatgaaaagcagtttccagaaattcgaaaacaaagagaacagcaagaaagatttcagcgagttgggcagaggggagctggtctttcagccaccattgctaggagtgagcatgagatttctgaaattattgatgggctctctgagcaggagaataatgagaaacaaatgcggcagctctctgtgattccacctatgatgtttgatgcagaacaaagacgagtcaagttcattaacatgaatgggcttatggaggaccctatgaaagtgtataaagataggcagtttatgaatgtttggactgaccatgaaaaggagatctttaaggacaagtttatccagcatccaaaaaactttggactaattgcatcatacttggagaggaagagtgttcctgattgtgttttgtattactatttaaccaagaaaaatgagaattataaagccctcgtcagaaggaattatgggaaacgcagaggcagaaaccagcaaattgctcgaccctcgcaagaagaaaaagtagaagaaaaagaagaggataaagcagaaaaaacagaaaaaaaagaagaagaaaagaaagatgaagaggaaaaagatgaaaaagaagactccaaagaaaataccaaggaaaaggacaagatagatggtacagcagaagaaactgaggaaagagagcaagccacaccccgggggcgaaagactgccaacagtcagggccgccgtaagggccggatcaccaggtccatgacaaacgaagctgcagctgccagtgctgcagccgcagcggctactgaagagcccccaccacctctgccaccgccaccagaacccatttctacagagcctgtggagacctctcgatggacagaagaagaaatggaagttgctaaaaaaggtctagtagaacatggtcgtaactgggcagcaattgctaaaatggtgggaacgaaaagtgaagctcaatgtaaaaacttctattttaactataaaaggcgacacaatcttgacaacctcttacagcagcataaacagaaaacttcacgaaaacctcgtgaagagcgagatgtgtctcaatgtgaaagtgtcgcttccactgtttctgctcaggaggatgaagatattgaagcctccaatgaagaagaaaatccagaagacagcgaaggtgcagaaaatagttctgatacagaaagtgctccttctccttcaccagttgaagctgtcaagcccagcgaggacagtcctgaaaatgctacttctcgaggaaacacagaacctgcggttgagcttgagcccaccacggaaactgcacccagtacatctccctccttagcagttccaagtacaaaaccagctgaagatgaaagtgtggagacccaggtgaatgacagcatcagtgctgagacagcagagcagatggatgtagatcagcaggagcacagtgctgaagagggttctgtttgtgatcccccacccgctaccaaagctgactctgtggacgttgaagtgagggtgccagaaaaccatgcatctaaagttgaaggtgataataccaaagaaagagacttggatagagccagtgagaaggtggaacctagagatgaagatttggtggtagctcagcaaataaatgcccaaaggcccgagccccagtcagacaatgattccagtgccacgtgcagcgctgatgaggatgtggatggagagccagagaggcagagaatgtttcctatggactcaaagccttcactgttaaaccccactggatctatactcgtctcatctccgttaaaaccaaatccactggatctgccacagcttcagcatcgagctgctgttatcccaccaatggtatcctgcaccccatgtaacataccaattggaaccccagtgagcggctatgctctctaccagcgacacattaaagcaatgcatgagtcagcactcctggaggagcagcggcagagacaagaacagatagatttggaatgtagaagttctacaagtccatgtggcacatccaagagtccaaacagagagtgggaagtccttcagcctgctccacatcaagtgataactaatctccctgaaggcgttcggcttccgacaactcgaccaaccaggccaccgccccctctcatcccgtcatccaaaaccacagtggcttcagaaaaaccatcttttataatgggaggctccatctcacagggaacaccaggcacttatttgacttctcataatcaggcttcctacactcaagaaacacccaagccgtcagtgggatctatctctcttggactgccacggcaacaggaatctgccaaatcagctactttgccctacatcaagcaggaagaattttctccccgaagccaaaactcacaacctgagggtctgttggtcagggcccaacatgaaggtgtagtcagaggtaccgcaggagccatacaagaaggaagtataactcggggaactccaaccagcaaaatttcagtggagagcattccatccctacggggctctatcactcagggcaccccggctctgccccagactggcataccaacagaggctttggtgaaggggtccatttcgagaatgcccattgaagacagcagtcctgagaaaggcagagaggaagctgcatccaaaggccatgttatttatgaaggcaaaagtggacatatcttgtcatatgataatattaagaatgcccgagaagggactaggagtccaagaacagctcatgaaatcagtttaaagagaagctatgaatcagtggaaggaaatataaagcaagggatgtcaatgagggagtctcctgtatcagcaccgttagaggggctgatatgccgagcattacccagggggagtcctcattctgacctcaaagaaaggactgtattgtctggctccataatgcaggggacaccaagagcaacaactgaaagctttgaagatggccttaaatatcccaaacaaattaaaagggaaagtcctcccatacgagcatttgaaggtgccattaccaaaggaaaaccatatgatggcatcaccaccatcaaagaaatggggcgttccattcatgagattccaaggcaagatattttaactcaggaaagtcggaaaactccagaagtggtccagagcacacggccgataattgagggttccatttcccagggcacaccaataaagtttgacaacaactcaggtcaatctgccatcaaacacaatgtcaaatccttaatcacggggcctagcaaactatcccgtggaatgcctccgctggaaattgtgccagagaacataaaagtggtagaacggggaaaatatgaggatgtgaaagcaggcgagaccgtgcgttcccggcacacgtcagtggtaagctctggcccctccgttcttaggtccacactgcatgaagctcccaaagcacaactgagccctgggatttatgatgacaccagtgcacggaggacccctgtgagttatcaaaacaccatgtccagaggctcacccatgatgaacagaacttctgatgttacaatttcttctaacaagtctaccaatcatgaaaggaaatcgacactgacccctacccagagggaaagtatcccagcgaagtctccagtgcctggggtggaccctgtcgtgagccacagtccgtttgatccccatcacagaggcagcactgcaggcgaggtttatcggagccacctgcccacgcacttggatccagccatgccttttcacagggctttggatcctgcagcggctgcttacctgtttcagagacagctttcaccaactccaggttacccaagtcagtatcagctttacgcaatggagaacacaagacagacaatcttaaatgattacattacctcacaacagatgcaagtgaacttgcgtccagatgtggccagaggactctccccaagagagcagccactgggtctcccatacccagcaacgagaggaatcattgacctgaccaatatgcctccaacaattttagtgcctcatccagggggaacaagcactcctcccatggacagaatcacttatattcctggtacacagattactttccctcccaggccgtacaactctgcttccatgtctccaggacacccaacacaccttgcagctgctgcaagtgctgagagggaacgggaacgggagcgggagaaggagcgggagcgggaacggattgctgcagcttcctccgacctctacctgcggccaggctcagaacagcctggccgacctggcagtcatggatatgttcgctccccttccccttcagtaagaactcaggagaccatgttgcaacagagacccagtgttttccaaggaaccaatggaaccagtgtaatcacacctttggatccaactgctcagctacgaatcatgccactgcctgctgggggcccttcaataagccaaggcctgccagcctcccgttacaacactgctgcggatgccctggctgctcttgtggatgctgcagcttctgcaccccagatggatgtgtccaaaacaaaagagagtaagcatgaagctgccaggttagaagaaaatttgagaagcaggtcagcagcagttagtgaacagcagcagctagagcagaaaaccctggaggtggagaagagatctgttcagtgtttatacacttcttcagcctttccaagtggcaagccccagcctcattcttcagtagtttattctgaggctgggaaagataaagggcctcctccaaaatccagatatgaggaagagctaaggaccagagggaagactaccattactgcagctaacttcatagacgtgatcatcacccggcaaattgcctcggacaaggatgcgagggaacgtggctctcaaagttcagactcttctagtagcttatcttctcacaggtatgaaacacctagcgatgctattgaggtgataagtcctgccagctcacctgcgccaccccaggagaaactgcagacctatcagccagaggttgttaaggcaaatcaagcggaaaatgatcctaccagacaatatgaaggaccattacatcactatcgaccacagcaggaatcaccatctccccaacaacagctgcccccttcttcacaggcagagggaatggggcaagtgcccaggacccatcggctgatcacacttgctgatcacatctgtcaaattatcacacaagattttgctagaaatcaagtttcctcgcagactccccagcagcctcctacttctacattccagaactcaccttctgctttggtatctacacctgtgaggactaaaacatcaaaccgttacagcccagaatcccaggctcagtctgtccatcatcaaagaccaggttcaagggtctctccagaaaatcttgtggacaaatccaggggaagtaggcctggaaaatccccagagaggagtcacgtctcttcggagccctacgagcccatctccccaccccaggttccggttgtgcatgagaaacaggacagcttgctgctcttgtctcagaggggcgcagagcctgcagagcagaggaatgatgcccgctcaccagggagtataagctacttgccttcattcttcaccaagcttgaaaatacatcacccatggttaaatcaaagaagcaggagatttttcgtaagttgaactcctctggtggaggtgactctgatatggcagctgctcagccaggaactgagatctttaatctgccagcagttactacgtcaggctcagttagctctagaggccattcttttgctgatcctgccagtaatcttgggctggaagacattatcaggaaggctctcatgggaagctttgatgacaaagttgaggatcatggagttgtcatgtcccagcctatgggagtagtgcctggtactgccaacacctcagttgtgaccagtggtgagacacgaagagaggaaggggacccatcacctcattcaggaggagtttgcaaaccaaagctgatcagcaagtcaaacagcaggaaatctaagtctcctatacctgggcaaggctacttaggaacggaacggccctcttcagtctcctctgtacattcagaaggggattaccataggcagacgccagggtgggcctgggaagacaggccctcttcaacaggctcaactcagtttccttataaccctctgactatgcggatgctcagcagtactccaccaacaccgattgcatgtgctccctctgcggtgaaccaagcagctcctcaccaacagaacaggatctgggagcgagagcctgccccactgctctcagcacagtacgagaccctgtcggatagtgatgactgaactgcacaaagtgaggggaacagggtgcaggagagggatctctagtttttgtggtttaatttttagtagcaggtcaaaaacctgccctcctgtgacttattccctgagacttttcaggagagccagcccacagatgatgaagaaatgatggaagttcatttggagagtcaaatgggaaaaaaacaaacaaaaaactgcctttgatacaggcaattcagtggactataataatagtggagggttgagatgtagagtttttaaaaagtgaacagttgctgttcttacatctgtaaagaaaaccataatgtctttaaatcactcttctgtaaatagatgacctttttgcagtgtatatccccttgctgtagtatctggtgtacttatgttcaaatcagcgcatcaactttgggggtgatttttaaaaatctttttgtctatctatctttttaaccctagccttctaaacaacctcatacagcccagttacataatgttggctgtcacgggcattgtacttttatctgatattgtttcctctaaattcagctttccagtgatgtttaaaatcttgtgaaaatgtttagatttttaacacagaccctgtcataaaatctgtacattagggtcaaaaggtaaaagtaacaaattctgccatattgtaaatttccagtgcaggctttaatttttttttttcattagtagcactgaaaaaatattactgcatgggtatgttctagttcagtttataaagttttaaaggcttatttgaggcatacctcactgttacgcacactggtaatttaaccatgcccctaagtattccttttctcctgcatttgatgcagcccaacaaagcttttgttttgaaataaatttgactaccctgtccatagctacagtagattatttgtggtttaaggctcctggtgtctcaggttccaaaggaaaagcttacatatttttcccttagtttgaatatatgattggttgggttaaaagataatgatctgtgtagtatttagataagctttatgctgcatcctgaaaaactcatggtgaacacagtcctttttccccatcactatggaccagcatttactctcactttgctcccttgggacaagagtttactgttaaatgttttcatttcacagagtctcaaggtgcaaataatttaaaagactgaattctaaactaattatggtactagagggccagttttatctttcattaagaattgcttgctgaattttaaagtttttttcatacaatttatcatagcatttaagtatctttctataacatagatactaacagttttgggagaatgccactggtaactggaaaggggagaaacagatctctcaggatgataaaaattagcactttacagactttcaagtagacctaaacttttaaacaaaagtactcaaggcttttaaggaagcagctctgtgattagctactgaccaagaccctcctatcactggtgtctaatccctatgttacagatgaagacacaggtttagtactttgcccatatagttaaattagtgacagagataggccataagcccacatttgtcttcagtcaaagctttcactcctgtccctgttccactcctgtatacctgaggtccccaacataaactttagatcaggcttagtggtcagcattcctagtacttggaaagttggtattttttacaacagatatatgtaaacatataaaaatttcaaaatgaatgaaaaacagtgactaaatgttccacttcacagttttctgctgaatttttttttttcaggtactggtccagcaggttatgtctctaaaattacttttcgttcagagcagaatgttgtcctatctacttgatacaatcctttatggaccaacgcatctggtatgaaactcgagcaaggaaatataacacaacgggtattcccctctcagagactatacaatctaatatgtaaacatgatttactattactgctactaaacttgttccgtcttgctgc

SEQ ID NO: 448586 - DNA, 11058 bp, Homo sapiens
gggttgagtcaagatggcggccaaggtggcgaagcagcagccgcggcggcggcggcggctggagtgagcgtccgactcgccgcgccgaacgaggtcccggtgtagggccgcgcgccgtggccgcgtcccactcctcaggccggggcgcacgtcggctcccacgcttagccagctcccggtggtttcctagaaacatgattgtttattggcattgatctcacagtctggtgaggacttctttactgataatgtcaagttcaggttatcctcccaaccaaggagcattcagcacagaacaaagtcgttatcctcctcactctgtccagtatacatttcccaacacccgccaccagcaggagttcgcagtccctgattatcgttcctctcatcttgaagtgagtcaggcatcacagcttttgcagcaacagcagcagcaacagcttcgaaggcgaccttccttgctttcagaatttcacccaggttctgacaggcctcaagaaaggagaactagttatgaaccgtttcatccaggcccatccccagtggatcatgattcactggaatcgaagcgaccacgtctggaacaggtttctgattctcattttcagcgtgtcagtgctgcggttttgcctttagtgcacccgctgccagaagggctgagggcttctgcagatgctaagaaggatccagcattcggaggcaaacatgaagctccatcctctccaatttcggggcaaccatgtggagatgatcaaaatgcttcaccttcaaaactctcaaaggaagagttaatacagagtatggatcgtgtagatcgagaaattgcaaaagtagaacagcagatccttaaactgaaaaagaaacaacaacagcttgaagaagaggcagctaaacctcctgagcctgagaagcccgtgtcccctcctcctgtggagcagaaacaccgcagtattgtccaaattatttatgatgagaatcggaaaaaagcagaagaagctcataaaatttttgaaggtcttggcccaaaagttgaactgccactgtataaccagccatcagataccaaggtgtaccatgagaacatcaagacaaaccaggtgatgaggaaaaaactcattttattttttaaaagaagaaatcatgcaagaaaacaaagggaacaaaaaatctgccagcgttatgatcagctcatggaggcatgggagaaaaaagtggacagaatagaaaataatcctcggaggaaagctaaagaaagcaaaacaagggaatactatgaaaagcagtttccagaaattcgaaaacaaagagaacagcaagaaagatttcagcgagttgggcagaggggagctggtctttcagccaccattgctaggagtgagcatgagatttctgaaattattgatgggctctctgagcaggagaataatgagaaacaaatgcggcagctctctgtgattccacctatgatgtttgatgcagaacaaagacgagtcaagttcattaacatgaatgggcttatggaggaccctatgaaagtgtataaagataggcagtttatgaatgtttggactgaccatgaaaaggagatctttaaggacaagtttatccagcatccaaaaaactttggactaattgcatcatacttggagaggaagagtgttcctgattgtgttttgtattactatttaaccaagaaaaatgagaattataaagccctcgtcagaaggaattatgggaaacgcagaggcagaaaccagcaaattgctcgaccctcgcaagaagaaaaagtagaagaaaaagaagaggataaagcagaaaaaacagaaaaaaaagaagaagaaaagaaagatgaagaggaaaaagatgaaaaagaagactccaaagaaaataccaaggaaaaggacaagatagatggtacagcagaagaaactgaggaaagagagcaagccacaccccgggggcgaaagactgccaacagtcagggccgccgtaagggccggatcaccaggtccatgacaaacgaagctgcagctgccagtgctgcagccgcagcggctactgaagagcccccaccacctctgccaccgccaccagaacccatttctacagagcctgtggagacctctcgatggacagaagaagaaatggaagttgctaaaaaaggtctagtagaacatggtcgtaactgggcagcaattgctaaaatggtgggaacgaaaagtgaagctcaatgtaaaaacttctattttaactataaaaggcgacacaatcttgacaacctcttacagcagcataaacagaaaacttcacgaaaacctcgtgaagagcgagatgtgtctcaatgtgaaagtgtcgcttccactgtttctgctcaggaggatgaagatattgaagcctccaatgaagaagaaaatccagaagacagcgaaggtgcagaaaatagttctgatacagaaagtgctccttctccttcaccagttgaagctgtcaagcccagcgaggacagtcctgaaaatgctacttctcgaggaaacacagaacctgcggttgagcttgagcccaccacggaaactgcacccagtacatctccctccttagcagttccaagtacaaaaccagctgaagatgaaagtgtggagacccaggtgaatgacagcatcagtgctgagacagcagagcagatggatgtagatcagcaggagcacagtgctgaagagggttctgtttgtgatcccccacccgctaccaaagctgactctgtggacgttgaagtgagggtgccagaaaaccatgcatctaaagttgaaggtgataataccaaagaaagagacttggatagagccagtgagaaggtggaacctagagatgaagatttggtggtagctcagcaaataaatgcccaaaggcccgagccccagtcagacaatgattccagtgccacgtgcagcgctgatgaggatgtggatggagagccagagaggcagagaatgtttcctatggactcaaagccttcactgttaaaccccactggatctatactcgtctcatctccgttaaaaccaaatccactggatctgccacagcttcagcatcgagctgctgttatcccaccaatggtatcctgcaccccatgtaacataccaattggaaccccagtgagcggctatgctctctaccagcgacacattaaagcaatgcatgagtcagcactcctggaggagcagcggcagagacaagaacagatagatttggaatgtagaagttctacaagtccatgtggcacatccaagagtccaaacagagagtgggaagtccttcagcctgctccacatcaagtgataactaatctccctgaaggcgttcggcttccgacaactcgaccaaccaggccaccgccccctctcatcccgtcatccaaaaccacagtggcttcagaaaaaccatcttttataatgggaggctccatctcacagggaacaccaggcacttatttgacttctcataatcaggcttcctacactcaagaaacacccaagccgtcagtgggatctatctctcttggactgccacggcaacaggaatctgccaaatcagctactttgccctacatcaagcaggaagaattttctccccgaagccaaaactcacaacctgagggtctgttggtcagggcccaacatgaaggtgtagtcagaggtaccgcaggagccatacaagaaggaagtataactcggggaactccaaccagcaaaatttcagtggagagcattccatccctacggggctctatcactcagggcaccccggctctgccccagactggcataccaacagaggctttggtgaaggggtccatttcgagaatgcccattgaagacagcagtcctgagaaaggcagagaggaagctgcatccaaaggccatgttatttatgaaggcaaaagtggacatatcttgtcatatgataatattaagaatgcccgagaagggactaggagtccaagaacagctcatgaaatcagtttaaagagaagctatgaatcagtggaaggaaatataaagcaagggatgtcaatgagggagtctcctgtatcagcaccgttagaggggctgatatgccgagcattacccagggggagtcctcattctgacctcaaagaaaggactgtattgtctggctccataatgcaggggacaccaagagcaacaactgaaagctttgaagatggccttaaatatcccaaacaaattaaaagggaaagtcctcccatacgagcatttgaaggtgccattaccaaaggaaaaccatatgatggcatcaccaccatcaaagaaatggggcgttccattcatgagattccaaggcaagatattttaactcaggaaagtcggaaaactccagaagtggtccagagcacacggccgataattgagggttccatttcccagggcacaccaataaagtttgacaacaactcaggtcaatctgccatcaaacacaatgtcaaatccttaatcacggggcctagcaaactatcccgtggaatgcctccgctggaaattgtgccagagaacataaaagtggtagaacggggaaaatatgaggatgtgaaagcaggcgagaccgtgcgttcccggcacacgtcagtggtaagctctggcccctccgttcttaggtccacactgcatgaagctcccaaagcacaactgagccctgggatttatgatgacaccagtgcacggaggacccctgtgagttatcaaaacaccatgtccagaggctcacccatgatgaacagaacttctgatgttacaatttcttctaacaagtctaccaatcatgaaaggaaatcgacactgacccctacccagagggaaagtatcccagcgaagtctccagtgcctggggtggaccctgtcgtgagccacagtccgtttgatccccatcacagaggcagcactgcaggcgaggtttatcggagccacctgcccacgcacttggatccagccatgccttttcacagggctttggatcctgcagcggctgcttacctgtttcagagacagctttcaccaactccaggttacccaagtcagtatcagctttacgcaatggagaacacaagacagacaatcttaaatgattacattacctcacaacagatgcaagtgaacttgcgtccagatgtggccagaggactctccccaagagagcagccactgggtctcccatacccagcaacgagaggaatcattgacctgaccaatatgcctccaacaattttagtgcctcatccagggggaacaagcactcctcccatggacagaatcacttatattcctggtacacagattactttccctcccaggccgtacaactctgcttccatgtctccaggacacccaacacaccttgcagctgctgcaagtgctgagagggaacgggaacgggagcgggagaaggagcgggagcgggaacggattgctgcagcttcctccgacctctacctgcggccaggctcagaacagcctggccgacctggcagtcatggatatgttcgctccccttccccttcagtaagaactcaggagaccatgttgcaacagagacccagtgttttccaaggaaccaatggaaccagtgtaatcacacctttggatccaactgctcagctacgaatcatgtcagtctcttgtacatattttgacaaaaaatgtctcttgcatatacattttaaaatttgtgactgcaatagtctaagtatagtcatgcttttctgcccatgccatgaaggcttttttgttgttgttgcagtttgtccttccatctccccaccacattcccagcaaatggtcttcccttcacagagctgtgatttggttttatttacagccactgcctgctgggggcccttcaataagccaaggcctgccagcctcccgttacaacactgctgcggatgccctggctgctcttgtggatgctgcagcttctgcaccccagatggatgtgtccaaaacaaaagagagtaagcatgaagctgccaggttagaagaaaatttgagaagcaggtcagcagcagttagtgaacagcagcagctagagcagaaaaccctggaggtggagaagagatctgttcagtgtttatacacttcttcagcctttccaagtggcaagccccagcctcattcttcagtagtttattctgaggctgggaaagataaagggcctcctccaaaatccagatatgaggaagagctaaggaccagagggaagactaccattactgcagctaacttcatagacgtgatcatcacccggcaaattgcctcggacaaggatgcgagggaacgtggctctcaaagttcagactcttctagtagcttatcttctcacaggtatgaaacacctagcgatgctattgaggtgataagtcctgccagctcacctgcgccaccccaggagaaactgcagacctatcagccagaggttgttaaggcaaatcaagcggaaaatgatcctaccagacaatatgaaggaccattacatcactatcgaccacagcaggaatcaccatctccccaacaacagctgcccccttcttcacaggcagagggaatggggcaagtgcccaggacccatcggctgatcacacttgctgatcacatctgtcaaattatcacacaagattttgctagaaatcaagtttcctcgcagactccccagcagcctcctacttctacattccagaactcaccttctgctttggtatctacacctgtgaggactaaaacatcaaaccgttacagcccagaatcccaggctcagtctgtccatcatcaaagaccaggttcaagggtctctccagaaaatcttgtggacaaatccaggggaagtaggcctggaaaatccccagagaggagtcacgtctcttcggagccctacgagcccatctccccaccccaggttccggttgtgcatgagaaacaggacagcttgctgctcttgtctcagaggggcgcagagcctgcagagcagaggaatgatgcccgctcaccagggagtataagctacttgccttcattcttcaccaagcttgaaaatacatcacccatggttaaatcaaagaagcaggagatttttcgtaagttgaactcctctggtggaggtgactctgatatggcagctgctcagccaggaactgagatctttaatctgccagcagttactacgtcaggctcagttagctctagaggccattcttttgctgatcctgccagtaatcttgggctggaagacattatcaggaaggctctcatgggaagctttgatgacaaagttgaggatcatggagttgtcatgtcccagcctatgggagtagtgcctggtactgccaacacctcagttgtgaccagtggtgagacacgaagagaggaaggggacccatcacctcattcaggaggagtttgcaaaccaaagctgatcagcaagtcaaacagcaggaaatctaagtctcctatacctgggcaaggctacttaggaacggaacggccctcttcagtctcctctgtacattcagaaggggattaccataggcagacgccagggtgggcctgggaagacaggccctcttcaacaggctcaactcagtttccttataaccctctgactatgcggatgctcagcagtactccaccaacaccgattgcatgtgctccctctgcggtgaaccaagcagctcctcaccaacagaacaggatctgggagcgagagcctgccccactgctctcagcacagtacgagaccctgtcggatagtgatgactgaactgcacaaagtgaggggaacagggtgcaggagagggatctctagtttttgtggtttaatttttagtagcaggtcaaaaacctgccctcctgtgacttattccctgagacttttcaggagagccagcccacagatgatgaagaaatgatggaagttcatttggagagtcaaatgggaaaaaaacaaacaaaaaactgcctttgatacaggcaattcagtggactataataatagtggagggttgagatgtagagtttttaaaaagtgaacagttgctgttcttacatctgtaaagaaaaccataatgtctttaaatcactcttctgtaaatagatgacctttttgcagtgtatatccccttgctgtagtatctggtgtacttatgttcaaatcagcgcatcaactttgggggtgatttttaaaaatctttttgtctatctatctttttaaccctagccttctaaacaacctcatacagcccagttacataatgttggctgtcacgggcattgtacttttatctgatattgtttcctctaaattcagctttccagtgatgtttaaaatcttgtgaaaatgtttagatttttaacacagaccctgtcataaaatctgtacattagggtcaaaaggtaaaagtaacaaattctgccatattgtaaatttccagtgcaggctttaatttttttttttcattagtagcactgaaaaaatattactgcatgggtatgttctagttcagtttataaagttttaaaggcttatttgaggcatacctcactgttacgcacactggtaatttaaccatgcccctaagtattccttttctcctgcatttgatgcagcccaacaaagcttttgttttgaaataaatttgactaccctgtccatagctacagtagattatttgtggtttaaggctcctggtgtctcaggttccaaaggaaaagcttacatatttttcccttagtttgaatatatgattggttgggttaaaagataatgatctgtgtagtatttagataagctttatgctgcatcctgaaaaactcatggtgaacacagtcctttttccccatcactatggaccagcatttactctcactttgctcccttgggacaagagtttactgttaaatgttttcatttcacagagtctcaaggtgcaaataatttaaaagactgaattctaaactaattatggtactagagggccagttttatctttcattaagaattgcttgctgaattttaaagtttttttcatacaatttatcatagcatttaagtatctttctataacatagatactaacagttttgggagaatgccactggtaactggaaaggggagaaacagatctctcaggatgataaaaattagcactttacagactttcaagtagacctaaacttttaaacaaaagtactcaaggcttttaaggaagcagctctgtgattagctactgaccaagaccctcctatcactggtgtctaatccctatgttacagatgaagacacaggtttagtactttgcccatatagttaaattagtgacagagataggccataagcccacatttgtcttcagtcaaagctttcactcctgtccctgttccactcctgtatacctgaggtccccaacataaactttagatcaggcttagtggtcagcattcctagtacttggaaagttggtattttttacaacagatatatgtaaacatataaaaatttcaaaatgaatgaaaaacagtgactaaatgttccacttcacagttttctgctgaatttttttttttcaggtactggtaatattttagagtttgttaataatttatattgccaacctaccataaaagagattatgatggtatttttctatgaccctgagggtcttaagctattctgagtcagaatacagttgacccttgaacaacacgggtttgaactgtgtgggtccacttatacatggattttcttccacctctgccacccaagatagcaagaccaaccccttctcatcctcagcctattcaacatgaagatgacaaggatgaagaccttcatgatgatccacttccacttaatgaatagtaaatatattttctcttccttataatcttaacaaacattttctcttctctagcttactttattgtaagaatacagtatataatacatatacaaaatatgtgtcaatcgactatgttatccgtaagacttctggtcagcagtaggccatgagtagttaagttttggaggagtcaaagttagatgtggatttttgactacttagggggtctatgcccctaactcctgcattatttgaaggtcaaccgtatagtttctgagaacatgtcagatcagagcctaacttcttactcttgcagttctacctgaggacccgaaggtgaggtgctgtgaaccactccctccatcctcatcataatgcatgtgcgtattactttatttaccatcacctggagaagaaatctcagaatgagagttaaaatccaataatagttcttgggttcaaaataaatgaaaggacagaattctcacatggtttacctatggaggttcaccttatcatgatttaagtggtaagcacagagcagcactgacaacttactgtggttcactgcaaaccaaaacatgatattctttgtagacttagatttcagtgttctgacactatatcccttacaccgtgatttttttagcacccagaactaaattaaggtcttcctaaatactcttcataaaagtattctgacagccagttttccactgcatgtttatgactgcaaatttcataatgcttttaattttggtacactgagtgattctattttaaaaatatttatgcccagaaaactccagtgaccattggacagttaaaaaattttaatgacacgattttaaccaattcacttttgaatttagaccaatcagtaaaggagatcagtcctccttttgcttcagtaccttattttacaacagtgtaaatgaactgtaatgaaaacacccacatgaagagactgtcctgaaaactcctagtgtttccaacaacgagaccatgagctgagtcactgtggatgatttaaaattaataaataaataaaacttggaatgaaaaacctttcagtaacccctgcagttgtgaaaaggtaaaaacattctcaatgcaaaaggtgagtggttgacattaatttttttaagaaatca

SEQ ID NO: 448587 - DNA, 8983 bp, Homo sapiens
gggttgagtcaagatggcggccaaggtggcgaagcagcagccgcggcggcggcggcggctggagtgagcgtccgactcgccgcgccgaacgaggtcccggtgtagggccgcgcgccgtggccgcgtcccactcctcaggccggggcgcacgtcggctcccacgcttagccagctcccggtggtttcctagaaacatgattgtttattggcattgatctcacagtctggtgaggacttctttactgataatgtcaagttcaggttatcctcccaaccaaggagcattcagcacagaacaaagtcgttatcctcctcactctgtccagtatacatttcccaacacccgccaccagcaggagttcgcagtccctgattatcgttcctctcatcttgaagtgagtcaggcatcacagcttttgcagcaacagcagcagcaacagcttcgaaggcgaccttccttgctttcagaatttcacccaggttctgacaggcctcaagaaaggagaactagttatgaaccgtttcatccaggcccatccccagtggatcatgattcactggaatcgaagcgaccacgtctggaacaggtttctgattctcattttcagcgtgtcagtgctgcggttttgcctttagtgcacccgctgccagaagggctgagggcttctgcagatgctaagaaggatccagcattcggaggcaaacatgaagctccatcctctccaatttcggggcaaccatgtggagatgatcaaaatgcttcaccttcaaaactctcaaaggaagagttaatacagagtatggatcgtgtagatcgagaaattgcaaaagtagaacagcagatccttaaactgaaaaagaaacaacaacagcttgaagaagaggcagctaaacctcctgagcctgagaagcccgtgtcccctcctcctgtggagcagaaacaccgcagtattgtccaaattatttatgatgagaatcggaaaaaagcagaagaagctcataaaatttttgaaggtcttggcccaaaagttgaactgccactgtataaccagccatcagataccaaggtgtaccatgagaacatcaagacaaaccaggtgatgaggaaaaaactcattttattttttaaaagaagaaatcatgcaagaaaacaaagggaacaaaaaatctgccagcgttatgatcagctcatggaggcatgggagaaaaaagtggacagaatagaaaataatcctcggaggaaagctaaagaaagcaaaacaagggaatactatgaaaagcagtttccagaaattcgaaaacaaagagaacagcaagaaagatttcagcgagttgggcagaggggagctggtctttcagccaccattgctaggagtgagcatgagatttctgaaattattgatgggctctctgagcaggagaataatgagaaacaaatgcggcagctctctgtgattccacctatgatgtttgatgcagaacaaagacgagtcaagttcattaacatgaatgggcttatggaggaccctatgaaagtgtataaagataggcagtttatgaatgtttggactgaccatgaaaaggagatctttaaggacaagtttatccagcatccaaaaaactttggactaattgcatcatacttggagaggaagagtgttcctgattgtgttttgtattactatttaaccaagaaaaatgagaattataaagccctcgtcagaaggaattatgggaaacgcagaggcagaaaccagcaaattgctcgaccctcgcaagaagaaaaagtagaagaaaaagaagaggataaagcagaaaaaacagaaaaaaaagaagaagaaaagaaagatgaagaggaaaaagatgaaaaagaagactccaaagaaaataccaaggaaaaggacaagatagatggtacagcagaagaaactgaggaaagagagcaagccacaccccgggggcgaaagactgccaacagtcagggccgccgtaagggccggatcaccaggtccatgacaaacgaagctgcagctgccagtgctgcagccgcagcggctactgaagagcccccaccacctctgccaccgccaccagaacccatttctacagagcctgtggagacctctcgatggacagaagaagaaatggaagttgctaaaaaaggtctagtagaacatggtcgtaactgggcagcaattgctaaaatggtgggaacgaaaagtgaagctcaatgtaaaaacttctattttaactataaaaggcgacacaatcttgacaacctcttacagcagcataaacagaaaacttcacgaaaacctcgtgaagagcgagatgtgtctcaatgtgaaagtgtcgcttccactgtttctgctcaggaggatgaagatattgaagcctccaatgaagaagaaaatccagaagacagcgaaggtgcagaaaatagttctgatacagaaagtgctccttctccttcaccagttgaagctgtcaagcccagcgaggacagtcctgaaaatgctacttctcgaggaaacacagaacctgcggttgagcttgagcccaccacggaaactgcacccagtacatctccctccttagcagttccaagtacaaaaccagctgaagatgaaagtgtggagacccaggtgaatgacagcatcagtgctgagacagcagagcagatggatgtagatcagcaggagcacagtgctgaagagggttctgtttgtgatcccccacccgctaccaaagctgactctgtggacgttgaagtgagggtgccagaaaaccatgcatctaaagttgaaggtgataataccaaagaaagagacttggatagagccagtgagaaggtggaacctagagatgaagatttggtggtagctcagcaaataaatgcccaaaggcccgagccccagtcagacaatgattccagtgccacgtgcagcgctgatgaggatgtggatggagagccagagaggcagagaatgtttcctatggactcaaagccttcactgttaaaccccactggatctatactcgtctcatctccgttaaaaccaaatccactggatctgccacagcttcagcatcgagctgctgttatcccaccaatggtatcctgcaccccatgtaacataccaattggaaccccagtgagcggctatgctctctaccagcgacacattaaagcaatgcatgagtcagcactcctggaggagcagcggcagagacaagaacagatagatttggaatgtagaagttctacaagtccatgtggcacatccaagagtccaaacagagagtgggaagtccttcagcctgctccacatcaagtgataactaatctccctgaaggcgttcggcttccgacaactcgaccaaccaggccaccgccccctctcatcccgtcatccaaaaccacagtggcttcagaaaaaccatcttttataatgggaggctccatctcacagggaacaccaggcacttatttgacttctcataatcaggcttcctacactcaagaaacacccaagccgtcagtgggatctatctctcttggactgccacggcaacaggaatctgccaaatcagctactttgccctacatcaagcaggaagaattttctccccgaagccaaaactcacaacctgagggtctgttggtcagggcccaacatgaaggtgtagtcagaggtaccgcaggagccatacaagaaggaagtataactcggggaactccaaccagcaaaatttcagtggagagcattccatccctacggggctctatcactcagggcaccccggctctgccccagactggcataccaacagaggctttggtgaaggggtccatttcgagaatgcccattgaagacagcagtcctgagaaaggcagagaggaagctgcatccaaaggccatgttatttatgaaggcaaaagtggacatatcttgtcatatgataatattaagaatgcccgagaagggactaggagtccaagaacagctcatgaaatcagtttaaagagaagctatgaatcagtggaaggaaatataaagcaagggatgtcaatgagggagtctcctgtatcagcaccgttagaggggctgatatgccgagcattacccagggggagtcctcattctgacctcaaagaaaggactgtattgtctggctccataatgcaggggacaccaagagcaacaactgaaagctttgaagatggccttaaatatcccaaacaaattaaaagggaaagtcctcccatacgagcatttgaaggtgccattaccaaaggaaaaccatatgatggcatcaccaccatcaaagaaatggggcgttccattcatgagattccaaggcaagatattttaactcaggaaagtcggaaaactccagaagtggtccagagcacacggccgataattgagggttccatttcccagggcacaccaataaagtttgacaacaactcaggtcaatctgccatcaaacacaatgtcaaatccttaatcacggggcctagcaaactatcccgtggaatgcctccgctggaaattgtgccagagaacataaaagtggtagaacggggaaaatatgaggatgtgaaagcaggcgagaccgtgcgttcccggcacacgtcagtggtaagctctggcccctccgttcttaggtccacactgcatgaagctcccaaagcacaactgagccctgggatttatgatgacaccagtgcacggaggacccctgtgagttatcaaaacaccatgtccagaggctcacccatgatgaacagaacttctgatgttacaatttcttctaacaagtctaccaatcatgaaaggaaatcgacactgacccctacccagagggaaagtatcccagcgaagtctccagtgcctggggtggaccctgtcgtgagccacagtccgtttgatccccatcacagaggcagcactgcaggcgaggtttatcggagccacctgcccacgcacttggatccagccatgccttttcacagggctttggatcctgcagcggctgcttacctgtttcagagacagctttcaccaactccaggttacccaagtcagtatcagctttacgcaatggagaacacaagacagacaatcttaaatgattacattacctcacaacagatgcaagtgaacttgcgtccagatgtggccagaggactctccccaagagagcagccactgggtctcccatacccagcaacgagaggaatcattgacctgaccaatatgcctccaacaattttagtgcctcatccagggggaacaagcactcctcccatggacagaatcacttatattcctggtacacagattactttccctcccaggccgtacaactctgcttccatgtctccaggacacccaacacaccttgcagctgctgcaagtgctgagagggaacgggaacgggagcgggagaaggagcgggagcgggaacggattgctgcagcttcctccgacctctacctgcggccaggctcagaacagcctggccgacctggcagtcatggatatgttcgctccccttccccttcagtaagaactcaggagaccatgttgcaacagagacccagtgttttccaaggaaccaatggaaccagtgtaatcacacctttggatccaactgctcagctacgaatcatgccactgcctgctgggggcccttcaataagccaaggcctgccagcctcccgttacaacactgctgcggatgccctggctgctcttgtggatgctgcagcttctgcaccccagatggatgtgtccaaaacaaaagagagtaagcatgaagctgccaggttagaagaaaatttgagaagcaggtcagcagcagttagtgaacagcagcagctagagcagaaaaccctggaggtggagaagagatctgttcagtgtttatacacttcttcagcctttccaagtggcaagccccagcctcattcttcagtagtttattctgaggctgggaaagataaagggcctcctccaaaatccagatatgaggaagagctaaggaccagagggaagactaccattactgcagctaacttcatagacgtgatcatcacccggcaaattgcctcggacaaggatgcgagggaacgtggctctcaaagttcagactcttctagtagcttatcttctcacaggtatgaaacacctagcgatgctattgaggtgataagtcctgccagctcacctgcgccaccccaggagaaactgcagacctatcagccagaggttgttaaggcaaatcaagcggaaaatgatcctaccagacaatatgaaggaccattacatcactatcgaccacagcaggaatcaccatctccccaacaacagctgcccccttcttcacaggcagagggaatggggcaagtgcccaggacccatcggctgatcacacttgctgatcacatctgtcaaattatcacacaagattttgctagaaatcaagtttcctcgcagactccccagcagcctcctacttctacattccagaactcaccttctgctttggtatctacacctgtgaggactaaaacatcaaaccgttacagcccagaatcccaggctcagtctgtccatcatcaaagaccaggttcaagggtctctccagaaaatcttgtggacaaatccaggggaagtaggcctggaaaatccccagagaggagtcacgtctcttcggagccctacgagcccatctccccaccccaggttccggttgtgcatgagaaacaggacagcttgctgctcttgtctcagaggggcgcagagcctgcagagcagaggaatgatgcccgctcaccagggagtataagctacttgccttcattcttcaccaagcttgaaaatacatcacccatggttaaatcaaagaagcaggagatttttcgtaagttgaactcctctggtggaggtgactctgatatggcagctgctcagccaggaactgagatctttaatctgccagcagttactacgtcaggctcagttagctctagaggccattcttttgctgatcctgccagtaatcttgggctggaagacattatcaggaaggctctcatgggaagctttgatgacaaagttgaggatcatggagttgtcatgtcccagcctatgggagtagtgcctggtactgccaacacctcagttgtgaccagtggtgagacacgaagagaggaaggggacccatcacctcattcaggaggagtttgcaaaccaaagctgatcagcaagtcaaacagcaggaaatctaagtctcctatacctgggcaaggctacttaggaacggaacggccctcttcagtctcctctgtacattcagaaggggattaccataggcagacgccagggtgggcctgggaagacaggccctcttcaacaggctcaactcagtttccttataaccctctgactatgcggatgctcagcagtactccaccaacaccgattgcatgtgctccctctgcggtgaaccaagcagctcctcaccaacagaacaggatctgggagcgagagcctgccccactgctctcagcacagtacgagaccctgtcggatagtgatgactgaactgcacaaagtgaggggaacagggtgcaggagagggatctctagtttttgtggtttaatttttagtagcaggtcaaaaacctgccctcctgtgacttattccctgagacttttcaggagagccagcccacagatgatgaagaaatgatggaagttcatttggagagtcaaatgggaaaaaaacaaacaaaaaactgcctttgatacaggcaattcagtggactataataatagtggagggttgagatgtagagtttttaaaaagtgaacagttgctgttcttacatctgtaaagaaaaccataatgtctttaaatcactcttctgtaaatagatgacctttttgcagtgtatatccccttgctgtagtatctggtgtacttatgttcaaatcagcgcatcaactttgggggtgatttttaaaaatctttttgtctatctatctttttaaccctagccttctaaacaacctcatacagcccagttacataatgttggctgtcacgggcattgtacttttatctgatattgtttcctctaaattcagctttccagtgatgtttaaaatcttgtgaaaatgtttagatttttaacacagaccctgtcataaaatctgtacattagggtcaaaaggtaaaagtaacaaattctgccatattgtaaatttccagtgcaggctttaatttttttttttcattagtagcactgaaaaaatattactgcatgggtatgttctagttcagtttataaagttttaaaggcttatttgaggcatacctcactgttacgcacactggtaatttaaccatgcccctaagtattccttttctcctgcatttgatgcagcccaacaaagcttttgttttgaaataaatttgactaccctgtccataaaaaaaaaaaaaaaaaaaaaaaaaaaaaaaaagaacaacaaaaaaaaaaaagacaaaaaaaaaaaaaaaaaaaaaaacacacaaaacaaaagaacaaaaaaaaaacaagaaaaaaaaaggaaaaaagaaaaacaaaaacaacagagagagggagcggggggcgggcatcaataattccgatgggcggggcgacgacacgcaacgcccccgtattgttagtactagcggcgaccacgaggggagaggagcaacaacaaggaggcgcgagagcaaacaccaacgcgaagcagaacaacccccgccgcacctcaagaggaagacacctccgggggaggaaggagcagcaacacaccacaaccagagaacccgcgcagataaaaaataaaaccggtgcggaggtggacacacgccactaaccacgcgccgcgacccgacccacacgcgtagtgacacaacacagggcgcgagaaga

SEQ ID NO: 448588 - DNA, 6385 bp, Homo sapiens
aaactatatgtgctaggtcgagcgcctggtgttaattcggcagagtgtactcacggggcctagcaaactatcccgtggaatgcctccgctggaaattgtgccagagaacataaaagtggtagaacggggaaaatatgaggatgtgaaagcaggcgagaccgtgcgttcccggcacacgtcagtggtaagctctggcccctccgttcttaggtccacactgcatgaagctcccaaagcacaactgagccctgggatttatgatgacaccagtgcacggaggacccctgtgagttatcaaaacaccatgtccagaggctcacccatgatgaacagaacttctgatgttacaatttcttctaacaagtctaccaatcatgaaaggaaatcgacactgacccctacccagagggaaagtatcccagcgaagtctccagtgcctggggtggaccctgtcgtgagccacagtccgtttgatccccatcacagaggcagcactgcaggcgaggtttatcggagccacctgcccacgcacttggatccagccatgccttttcacagggctttggatcctgcagcggctgcttacctgtttcagagacagctttcaccaactccaggttacccaagtcagtatcagctttacgcaatggagaacacaagacagacaatcttaaatgattacattacctcacaacagatgcaagtgaacttgcgtccagatgtggccagaggactctccccaagagagcagccactgggtctcccatacccagcaacgagaggaatcattgacctgaccaatatgcctccaacaattttagtgcctcatccagggggaacaagcactcctcccatggacagaatcacttatattcctggtacacagattactttccctcccaggccgtacaactctgcttccatgtctccaggacacccaacacaccttgcagctgctgcaagtgctgagagggaacgggaacgggagcgggagaaggagcgggagcgggaacggattgctgcagcttcctccgacctctacctgcggccaggctcagaacagcctggccgacctggcagtcatggatatgttcgctccccttccccttcagtaagaactcaggagaccatgttgcaacagagacccagtgttttccaaggaaccaatggaaccagtgtaatcacacctttggatccaactgctcagctacgaatcatgccactgcctgctgggggcccttcaataagccaaggcctgccagcctcccgttacaacactgctgcggatgccctggctgctcttgtggatgctgcagcttctgcaccccagatggatgtgtccaaaacaaaagagagtaagcatgaagctgccaggttagaagaaaatttgagaagcaggtcagcagcagttagtgaacagcagcagctagagcagaaaaccctggaggtggagaagagatctgttcagtgtttatacacttcttcagcctttccaagtggcaagccccagcctcattcttcagtagtttattctgaggctgggaaagataaagggcctcctccaaaatccagatatgaggaagagctaaggaccagagggaagactaccattactgcagctaacttcatagacgtgatcatcacccggcaaattgcctcggacaaggatgcgagggaacgtggctctcaaagttcagactcttctagtagcttatcttctcacaggtatgaaacacctagcgatgctattgaggtgataagtcctgccagctcacctgcgccaccccaggagaaactgcagacctatcagccagaggttgttaaggcaaatcaagcggaaaatgatcctaccagacaatatgaaggaccattacatcactatcgaccacagcaggaatcaccatctccccaacaacagctgcccccttcttcacaggcagagggaatggggcaagtgcccaggacccatcggctgatcacacttgctgatcacatctgtcaaattatcacacaagattttgctagaaatcaagtttcctcgcagactccccagcagcctcctacttctacattccagaactcaccttctgctttggtatctacacctgtgaggactaaaacatcaaaccgttacagcccagaatcccaggctcagtctgtccatcatcaaagaccaggttcaagggtctctccagaaaatcttgtggacaaatccaggggaagtaggcctggaaaatccccagagaggagtcacgtctcttcggagccctacgagcccatctccccaccccaggttccggttgtgcatgagaaacaggacagcttgctgctcttgtctcagaggggcgcagagcctgcagagcagaggaatgatgcccgctcaccagggagtataagctacttgccttcattcttcaccaagcttgaaaatacatcacccatggttaaatcaaagaagcaggagatttttcgtaagttgaactcctctggtggaggtgactctgatatggcagctgctcagccaggaactgagatctttaatctgccagcagttactacgtcaggctcagttagctctagaggccattcttttgctgatcctgccagtaatcttgggctggaagacattatcaggaaggctctcatgggaagctttgatgacaaagttgaggatcatggagttgtcatgtcccagcctatgggagtagtgcctggtactgccaacacctcagttgtgaccagtggtgagacacgaagagaggaaggggacccatcacctcattcaggaggagtttgcaaaccaaagctgatcagcaagtcaaacagcaggaaatctaagtctcctatacctgggcaaggctacttaggaacggaacggccctcttcagtctcctctgtacattcagaaggggattaccataggcagacgccagggtgggcctgggaagacaggccctcttcaacaggctcaactcagtttccttataaccctctgactatgcggatgctcagcagtactccaccaacaccgattgcatgtgctccctctgcggtgaaccaagcagctcctcaccaacagaacaggatctgggagcgagagcctgccccactgctctcagcacagtacgagaccctgtcggatagtgatgactgaactgcacaaagtgaggggaacagggtgcaggagagggatctctagtttttgtggtttaatttttagtagcaggtcaaaaacctgccctcctgtgacttattccctgagacttttcaggagagccagcccacagatgatgaagaaatgatggaagttcatttggagagtcaaatgggaaaaaaacaaacaaaaaactgcctttgatacaggcaattcagtggactataataatagtggagggttgagatgtagagtttttaaaaagtgaacagttgctgttcttacatctgtaaagaaaaccataatgtctttaaatcactcttctgtaaatagatgacctttttgcagtgtatatccccttgctgtagtatctggtgtacttatgttcaaatcagcgcatcaactttgggggtgatttttaaaaatctttttgtctatctatctttttaaccctagccttctaaacaacctcatacagcccagttacataatgttggctgtcacgggcattgtacttttatctgatattgtttcctctaaattcagctttccagtgatgtttaaaatcttgtgaaaatgtttagatttttaacacagaccctgtcataaaatctgtacattagggtcaaaaggtaaaagtaacaaattctgccatattgtaaatttccagtgcaggctttaatttttttttttcattagtagcactgaaaaaatattactgcatgggtatgttctagttcagtttataaagttttaaaggcttatttgaggcatacctcactgttacgcacactggtaatttaaccatgcccctaagtattccttttctcctgcatttgatgcagcccaacaaagcttttgttttgaaataaatttgactaccctgtccatagctacagtagattatttgtggtttaaggctcctggtgtctcaggttccaaaggaaaagcttacatatttttcccttagtttgaatatatgattggttgggttaaaagataatgatctgtgtagtatttagataagctttatgctgcatcctgaaaaactcatggtgaacacagtcctttttccccatcactatggaccagcatttactctcactttgctcccttgggacaagagtttactgttaaatgttttcatttcacagagtctcaaggtgcaaataatttaaaagactgaattctaaactaattatggtactagagggccagttttatctttcattaagaattgcttgctgaattttaaagtttttttcatacaatttatcatagcatttaagtatctttctataacatagatactaacagttttgggagaatgccactggtaactggaaaggggagaaacagatctctcaggatgataaaaattagcactttacagactttcaagtagacctaaacttttaaacaaaagtactcaaggcttttaaggaagcagctctgtgattagctactgaccaagaccctcctatcactggtgtctaatccctatgttacagatgaagacacaggtttagtactttgcccatatagttaaattagtgacagagataggccataagcccacatttgtcttcagtcaaagctttcactcctgtccctgttccactcctgtatacctgaggtccccaacataaactttagatcaggcttagtggtcagcattcctagtacttggaaagttggtattttttacaacagatatatgtaaacatataaaaatttcaaaatgaatgaaaaacagtgactaaatgttccacttcacagttttctgctgaatttttttttttcaggtactggtaatattttagagtttgttaataatttatattgccaacctaccataaaagagattatgatggtatttttctatgaccctgagggtcttaagctattctgagtcagaatacagttgacccttgaacaacacgggtttgaactgtgtgggtccacttatacatggattttcttccacctctgccacccaagatagcaagaccaaccccttctcatcctcagcctattcaacatgaagatgacaaggatgaagaccttcatgatgatccacttccacttaatgaatagtaaatatattttctcttccttataatcttaacaaacattttctcttctctagcttactttattgtaagaatacagtatataatacatatacaaaatatgtgtcaatcgactatgttatccgtaagacttctggtcagcagtaggccatgagtagttaagttttggaggagtcaaagttagatgtggatttttgactacttagggggtctatgcccctaactcctgcattatttgaaggtcaaccgtatagtttctgagaacatgtcagatcagagcctaacttcttactcttgcagttctacctgaggacccgaaggtgaggtgctgtgaaccactccctccatcctcatcataatgcatgtgcgtattactttatttaccatcacctggagaagaaatctcagaatgagagttaaaatccaataatagttcttgggttcaaaataaatgaaaggacagaattctcacatggtttacctatggaggttcaccttatcatgatttaagtggtaagcacagagcagcactgacaacttactgtggttcactgcaaaccaaaacatgatattctttgtagacttagatttcagtgttctgacactatatcccttacaccgtgatttttttagcacccagaactaaattaaggtcttcctaaatactcttcataaaagtattctgacagccagttttccactgcatgtttatgactgcaaatttcataatgcttttaattttggtacactgagtgattctattttaaaaatatttatgcccagaaaactccagtgaccattggacagttaaaaaattttaatgacacgattttaaccaattcacttttgaatttagaccaatcagtaaaggagatcagtcctccttttgcttcagtaccttattttacaacagtgtaaatgaactgtaatgaaaacacccacatgaagagactgtcctgaaaactcctagtgtttccaacaacgagaccatgagctgagtcactgtggatgatttaaaattaataaataaataaaacttggaatgaaaaacctttcagtaacccctgcagttgtgaaaaggtaaaaacattctcaatgcaaaaggtgagtggttgacattaatttttttaagaaatca

SEQ ID NO: 448589 - DNA, 4818 bp, Homo sapiens
tagaaacagcaatcgattcttttttattttttaatgatacagaaaattgtttatattaattttgtttgcttacttctgcatttatattttgttccactagtcctcagacttcttcagtgaataattttttttttctccaaaattaagataagttctttgtttggagctatgtaccacatcctttcaggtgttcttctgaattatatttaatctttgataatgagtgaaaagcacagacattcctggagtaagacatctatgtgttctctcctagatgatcctaccagacaatatgaaggaccattacatcactatcgaccacagcaggaatcaccatctccccaacaacagctgcccccttcttcacaggcagagggaatggggcaagtgcccaggacccatcggctgatcacacttgctgatcacatctgtcaaattatcacacaagattttgctagaaatcaagtttcctcgcagactccccagcagcctcctacttctacattccagaactcaccttctgctttggtatctacacctgtgaggactaaaacatcaaaccgttacagcccagaatcccaggctcagtctgtccatcatcaaagaccaggttcaagggtctctccagaaaatcttgtggacaaatccaggggaagtaggcctggaaaatccccagagaggagtcacgtctcttcggagccctacgagcccatctccccaccccaggttccggttgtgcatgagaaacaggacagcttgctgctcttgtctcagaggggcgcagagcctgcagagcagaggaatgatgcccgctcaccagggagtataagctacttgccttcattcttcaccaagcttgaaaatacatcacccatggttaaatcaaagaagcaggagatttttcgtaagttgaactcctctggtggaggtgactctgatatggcagctgctcagccaggaactgagatctttaatctgccagcagttactacgtcaggctcagttagctctagaggccattcttttgctgatcctgccagtaatcttgggctggaagacattatcaggaaggctctcatgggaagctttgatgacaaagttgaggatcatggagttgtcatgtcccagcctatgggagtagtgcctggtactgccaacacctcagttgtgaccagtggtgagacacgaagagaggaaggggacccatcacctcattcaggaggagtttgcaaaccaaagctgatcagcaagtcaaacagcaggaaatctaagtctcctatacctgggcaaggctacttaggaacggaacggccctcttcagtctcctctgtacattcagaaggggattaccataggcagacgccagggtgggcctgggaagacaggccctcttcaacaggctcaactcagtttccttataaccctctgactatgcggatgctcagcagtactccaccaacaccgattgcatgtgctccctctgcggtgaaccaagcagctcctcaccaacagaacaggatctgggagcgagagcctgccccactgctctcagcacagtacgagaccctgtcggatagtgatgactgaactgcacaaagtgaggggaacagggtgcaggagagggatctctagtttttgtggtttaatttttagtagcaggtcaaaaacctgccctcctgtgacttattccctgagacttttcaggagagccagcccacagatgatgaagaaatgatggaagttcatttggagagtcaaatgggaaaaaaacaaacaaaaaactgcctttgatacaggcaattcagtggactataataatagtggagggttgagatgtagagtttttaaaaagtgaacagttgctgttcttacatctgtaaagaaaaccataatgtctttaaatcactcttctgtaaatagatgacctttttgcagtgtatatccccttgctgtagtatctggtgtacttatgttcaaatcagcgcatcaactttgggggtgatttttaaaaatctttttgtctatctatctttttaaccctagccttctaaacaacctcatacagcccagttacataatgttggctgtcacgggcattgtacttttatctgatattgtttcctctaaattcagctttccagtgatgtttaaaatcttgtgaaaatgtttagatttttaacacagaccctgtcataaaatctgtacattagggtcaaaaggtaaaagtaacaaattctgccatattgtaaatttccagtgcaggctttaatttttttttttcattagtagcactgaaaaaatattactgcatgggtatgttctagttcagtttataaagttttaaaggcttatttgaggcatacctcactgttacgcacactggtaatttaaccatgcccctaagtattccttttctcctgcatttgatgcagcccaacaaagcttttgttttgaaataaatttgactaccctgtccatagctacagtagattatttgtggtttaaggctcctggtgtctcaggttccaaaggaaaagcttacatatttttcccttagtttgaatatatgattggttgggttaaaagataatgatctgtgtagtatttagataagctttatgctgcatcctgaaaaactcatggtgaacacagtcctttttccccatcactatggaccagcatttactctcactttgctcccttgggacaagagtttactgttaaatgttttcatttcacagagtctcaaggtgcaaataatttaaaagactgaattctaaactaattatggtactagagggccagttttatctttcattaagaattgcttgctgaattttaaagtttttttcatacaatttatcatagcatttaagtatctttctataacatagatactaacagttttgggagaatgccactggtaactggaaaggggagaaacagatctctcaggatgataaaaattagcactttacagactttcaagtagacctaaacttttaaacaaaagtactcaaggcttttaaggaagcagctctgtgattagctactgaccaagaccctcctatcactggtgtctaatccctatgttacagatgaagacacaggtttagtactttgcccatatagttaaattagtgacagagataggccataagcccacatttgtcttcagtcaaagctttcactcctgtccctgttccactcctgtatacctgaggtccccaacataaactttagatcaggcttagtggtcagcattcctagtacttggaaagttggtattttttacaacagatatatgtaaacatataaaaatttcaaaatgaatgaaaaacagtgactaaatgttccacttcacagttttctgctgaatttttttttttcaggtactggtaatattttagagtttgttaataatttatattgccaacctaccataaaagagattatgatggtatttttctatgaccctgagggtcttaagctattctgagtcagaatacagttgacccttgaacaacacgggtttgaactgtgtgggtccacttatacatggattttcttccacctctgccacccaagatagcaagaccaaccccttctcatcctcagcctattcaacatgaagatgacaaggatgaagaccttcatgatgatccacttccacttaatgaatagtaaatatattttctcttccttataatcttaacaaacattttctcttctctagcttactttattgtaagaatacagtatataatacatatacaaaatatgtgtcaatcgactatgttatccgtaagacttctggtcagcagtaggccatgagtagttaagttttggaggagtcaaagttagatgtggatttttgactacttagggggtctatgcccctaactcctgcattatttgaaggtcaaccgtatagtttctgagaacatgtcagatcagagcctaacttcttactcttgcagttctacctgaggacccgaaggtgaggtgctgtgaaccactccctccatcctcatcataatgcatgtgcgtattactttatttaccatcacctggagaagaaatctcagaatgagagttaaaatccaataatagttcttgggttcaaaataaatgaaaggacagaattctcacatggtttacctatggaggttcaccttatcatgatttaagtggtaagcacagagcagcactgacaacttactgtggttcactgcaaaccaaaacatgatattctttgtagacttagatttcagtgttctgacactatatcccttacaccgtgatttttttagcacccagaactaaattaaggtcttcctaaatactcttcataaaagtattctgacagccagttttccactgcatgtttatgactgcaaatttcataatgcttttaattttggtacactgagtgattctattttaaaaatatttatgcccagaaaactccagtgaccattggacagttaaaaaattttaatgacacgattttaaccaattcacttttgaatttagaccaatcagtaaaggagatcagtcctccttttgcttcagtaccttattttacaacagtgtaaatgaactgtaatgaaaacacccacatgaagagactgtcctgaaaactcctagtgtttccaacaacgagaccatgagctgagtcactgtggatgatttaaaattaataaataaataaaacttggaatgaaaaacctttcagtaacccctgcagttgtgaaaaggtaaaaacattctcaatgcaaaaggtgagtggttgacattaatttttttaagaaatca

SEQ ID NO: 448590 - DNA, 4406 bp, Homo sapiens
ccttcatttctcattcacagcaaattatcacacaagattttgctagaaatcaagtttcctcgcagactccccagcagcctcctacttctacattccagaactcaccttctgctttggtatctacacctgtgaggactaaaacatcaaaccgttacagcccagaatcccaggctcagtctgtccatcatcaaagaccaggttcaagggtctctccagaaaatcttgtggacaaatccaggggaagtaggcctggaaaatccccagagaggagtcacgtctcttcggagccctacgagcccatctccccaccccaggttccggttgtgcatgagaaacaggacagcttgctgctcttgtctcagaggggcgcagagcctgcagagcagaggaatgatgcccgctcaccagggagtataagctacttgccttcattcttcaccaagcttgaaaatacatcacccatggttaaatcaaagaagcaggagatttttcgtaagttgaactcctctggtggaggtgactctgatatggcagctgctcagccaggaactgagatctttaatctgccagcagttactacgtcaggctcagttagctctagaggccattcttttgctgatcctgccagtaatcttgggctggaagacattatcaggaaggctctcatgggaagctttgatgacaaagttgaggatcatggagttgtcatgtcccagcctatgggagtagtgcctggtactgccaacacctcagttgtgaccagtggtgagacacgaagagaggaaggggacccatcacctcattcaggaggagtttgcaaaccaaagctgatcagcaagtcaaacagcaggaaatctaagtctcctatacctgggcaaggctacttaggaacggaacggccctcttcagtctcctctgtacattcagaaggggattaccataggcagacgccagggtgggcctgggaagacaggccctcttcaacaggctcaactcagtttccttataaccctctgactatgcggatgctcagcagtactccaccaacaccgattgcatgtgctccctctgcggtgaaccaagcagctcctcaccaacagaacaggatctgggagcgagagcctgccccactgctctcagcacagtacgagaccctgtcggatagtgatgactgaactgcacaaagtgaggggaacagggtgcaggagagggatctctagtttttgtggtttaatttttagtagcaggtcaaaaacctgccctcctgtgacttattccctgagacttttcaggagagccagcccacagatgatgaagaaatgatggaagttcatttggagagtcaaatgggaaaaaaacaaacaaaaaactgcctttgatacaggcaattcagtggactataataatagtggagggttgagatgtagagtttttaaaaagtgaacagttgctgttcttacatctgtaaagaaaaccataatgtctttaaatcactcttctgtaaatagatgacctttttgcagtgtatatccccttgctgtagtatctggtgtacttatgttcaaatcagcgcatcaactttgggggtgatttttaaaaatctttttgtctatctatctttttaaccctagccttctaaacaacctcatacagcccagttacataatgttggctgtcacgggcattgtacttttatctgatattgtttcctctaaattcagctttccagtgatgtttaaaatcttgtgaaaatgtttagatttttaacacagaccctgtcataaaatctgtacattagggtcaaaaggtaaaagtaacaaattctgccatattgtaaatttccagtgcaggctttaatttttttttttcattagtagcactgaaaaaatattactgcatgggtatgttctagttcagtttataaagttttaaaggcttatttgaggcatacctcactgttacgcacactggtaatttaaccatgcccctaagtattccttttctcctgcatttgatgcagcccaacaaagcttttgttttgaaataaatttgactaccctgtccatagctacagtagattatttgtggtttaaggctcctggtgtctcaggttccaaaggaaaagcttacatatttttcccttagtttgaatatatgattggttgggttaaaagataatgatctgtgtagtatttagataagctttatgctgcatcctgaaaaactcatggtgaacacagtcctttttccccatcactatggaccagcatttactctcactttgctcccttgggacaagagtttactgttaaatgttttcatttcacagagtctcaaggtgcaaataatttaaaagactgaattctaaactaattatggtactagagggccagttttatctttcattaagaattgcttgctgaattttaaagtttttttcatacaatttatcatagcatttaagtatctttctataacatagatactaacagttttgggagaatgccactggtaactggaaaggggagaaacagatctctcaggatgataaaaattagcactttacagactttcaagtagacctaaacttttaaacaaaagtactcaaggcttttaaggaagcagctctgtgattagctactgaccaagaccctcctatcactggtgtctaatccctatgttacagatgaagacacaggtttagtactttgcccatatagttaaattagtgacagagataggccataagcccacatttgtcttcagtcaaagctttcactcctgtccctgttccactcctgtatacctgaggtccccaacataaactttagatcaggcttagtggtcagcattcctagtacttggaaagttggtattttttacaacagatatatgtaaacatataaaaatttcaaaatgaatgaaaaacagtgactaaatgttccacttcacagttttctgctgaatttttttttttcaggtactggtaatattttagagtttgttaataatttatattgccaacctaccataaaagagattatgatggtatttttctatgaccctgagggtcttaagctattctgagtcagaatacagttgacccttgaacaacacgggtttgaactgtgtgggtccacttatacatggattttcttccacctctgccacccaagatagcaagaccaaccccttctcatcctcagcctattcaacatgaagatgacaaggatgaagaccttcatgatgatccacttccacttaatgaatagtaaatatattttctcttccttataatcttaacaaacattttctcttctctagcttactttattgtaagaatacagtatataatacatatacaaaatatgtgtcaatcgactatgttatccgtaagacttctggtcagcagtaggccatgagtagttaagttttggaggagtcaaagttagatgtggatttttgactacttagggggtctatgcccctaactcctgcattatttgaaggtcaaccgtatagtttctgagaacatgtcagatcagagcctaacttcttactcttgcagttctacctgaggacccgaaggtgaggtgctgtgaaccactccctccatcctcatcataatgcatgtgcgtattactttatttaccatcacctggagaagaaatctcagaatgagagttaaaatccaataatagttcttgggttcaaaataaatgaaaggacagaattctcacatggtttacctatggaggttcaccttatcatgatttaagtggtaagcacagagcagcactgacaacttactgtggttcactgcaaaccaaaacatgatattctttgtagacttagatttcagtgttctgacactatatcccttacaccgtgatttttttagcacccagaactaaattaaggtcttcctaaatactcttcataaaagtattctgacagccagttttccactgcatgtttatgactgcaaatttcataatgcttttaattttggtacactgagtgattctattttaaaaatatttatgcccagaaaactccagtgaccattggacagttaaaaaattttaatgacacgattttaaccaattcacttttgaatttagaccaatcagtaaaggagatcagtcctccttttgcttcagtaccttattttacaacagtgtaaatgaactgtaatgaaaacacccacatgaagagactgtcctgaaaactcctagtgtttccaacaacgagaccatgagctgagtcactgtggatgatttaaaattaataaataaataaaacttggaatgaaaaacctttcagtaacccctgcagttgtgaaaaggtaaaaacattctcaatgcaaaaggtgagtggttgacattaatttttttaagaaatca

SEQ ID NO: 448591 - DNA, 5182 bp, Homo sapiens
cgctgcactccagcctgggcggcagagtgagctccgtcttaaaaataaattaattaataaattaattaatttcacattctggctgagcacagtggcccatgcctgtaatcccagcactttaggaggctgaggtgggtagatcacctgaggtcaggagttcgagaccagcctggccaaaatggtgaaactccgtctctactaaaaatacaaaaattagctgggcatggtggcggggggcctataatcccagctgctcgggaggctgaggcaggagaactgcttgaacccaggaggcagaggttgcagtgagcctagatcacgccattgcactccagcctgggtgacaagaataaaacaccaccatctcaaaggaaaaaaaaaaaaaaaaaaaaaaaaagaactttcacattctttgggacacatcatttggctgcccacttgctttctgcattctttttttctctttaaaattcttagcgtcaagttgggaatgacggaaacaccaatttatgtcccaaattcttcccctttctggcacactgctttattataggcggttcccaggtcttatgctgttatcattcaaactgcagattacaagttgcacagtcagcaggaatgaaaaggatcaacagagtcttttgttttttccagcaaatatcctgagtttccagttagccatgcagggaaacacagtcattttcatagtattcactgtggtggctttcctctggatcacatcccaggctgcctcaaacctgttggtatttgtggcggtcatcccagagtccaaggtttcttcttcgtcagaaagccttggttcctgttctgagaacagcattttcctatttgtttttctccagcagtgcaaagttcctttcccttttctgggttacactgcttctttttttatttatttatttatttttggtaaacagatgggagagtctcactgtgttgcccaggctggcctcaaattcctatgctcaagcagtcctaccgcctcagcctgctgagtagctgggggactaggagtgcaccactgcacacagcttattgctcttcttttgatgttcctaccttacctatttcctgatttccctttaaaaatagcctgggcaacagagtgagaccctgtctcaaaaaaaaaaaatacttccattttatcttcacttaatgggtgagaaataaaggttgagatcatgaaaaataaaaagattaattttattataggaattttttgagactttagtttggtatatatgattatcacatcttaattaacttgaatgtttgcttaaatatagcagctgctcagccaggaactgagatctttaatctgccagcagttactacgtcaggctcagttagctctagaggccattcttttgctgatcctgccagtaatcttgggctggaagacattatcaggaaggctctcatgggaagctttgatgacaaagttgaggatcatggagttgtcatgtcccagcctatgggagtagtgcctggtactgccaacacctcagttgtgaccagtggtgagacacgaagagaggaaggggacccatcacctcattcaggaggagtttgcaaaccaaagctgatcagcaagtcaaacagcaggaaatctaagtctcctatacctgggcaaggctacttaggaacggaacggccctcttcagtctcctctgtacattcagaaggggattaccataggcagacgccagggtgggcctgggaagacaggccctcttcaacaggctcaactcagtttccttataaccctctgactatgcggatgctcagcagtactccaccaacaccgattgcatgtgctccctctgcggtgaaccaagcagctcctcaccaacagaacaggatctgggagcgagagcctgccccactgctctcagcacagtacgagaccctgtcggatagtgatgactgaactgcacaaagtgaggggaacagggtgcaggagagggatctctagtttttgtggtttaatttttagtagcaggtcaaaaacctgccctcctgtgacttattccctgagacttttcaggagagccagcccacagatgatgaagaaatgatggaagttcatttggagagtcaaatgggaaaaaaacaaacaaaaaactgcctttgatacaggcaattcagtggactataataatagtggagggttgagatgtagagtttttaaaaagtgaacagttgctgttcttacatctgtaaagaaaaccataatgtctttaaatcactcttctgtaaatagatgacctttttgcagtgtatatccccttgctgtagtatctggtgtacttatgttcaaatcagcgcatcaactttgggggtgatttttaaaaatctttttgtctatctatctttttaaccctagccttctaaacaacctcatacagcccagttacataatgttggctgtcacgggcattgtacttttatctgatattgtttcctctaaattcagctttccagtgatgtttaaaatcttgtgaaaatgtttagatttttaacacagaccctgtcataaaatctgtacattagggtcaaaaggtaaaagtaacaaattctgccatattgtaaatttccagtgcaggctttaatttttttttttcattagtagcactgaaaaaatattactgcatgggtatgttctagttcagtttataaagttttaaaggcttatttgaggcatacctcactgttacgcacactggtaatttaaccatgcccctaagtattccttttctcctgcatttgatgcagcccaacaaagcttttgttttgaaataaatttgactaccctgtccatagctacagtagattatttgtggtttaaggctcctggtgtctcaggttccaaaggaaaagcttacatatttttcccttagtttgaatatatgattggttgggttaaaagataatgatctgtgtagtatttagataagctttatgctgcatcctgaaaaactcatggtgaacacagtcctttttccccatcactatggaccagcatttactctcactttgctcccttgggacaagagtttactgttaaatgttttcatttcacagagtctcaaggtgcaaataatttaaaagactgaattctaaactaattatggtactagagggccagttttatctttcattaagaattgcttgctgaattttaaagtttttttcatacaatttatcatagcatttaagtatctttctataacatagatactaacagttttgggagaatgccactggtaactggaaaggggagaaacagatctctcaggatgataaaaattagcactttacagactttcaagtagacctaaacttttaaacaaaagtactcaaggcttttaaggaagcagctctgtgattagctactgaccaagaccctcctatcactggtgtctaatccctatgttacagatgaagacacaggtttagtactttgcccatatagttaaattagtgacagagataggccataagcccacatttgtcttcagtcaaagctttcactcctgtccctgttccactcctgtatacctgaggtccccaacataaactttagatcaggcttagtggtcagcattcctagtacttggaaagttggtattttttacaacagatatatgtaaacatataaaaatttcaaaatgaatgaaaaacagtgactaaatgttccacttcacagttttctgctgaatttttttttttcaggtactggtaatattttagagtttgttaataatttatattgccaacctaccataaaagagattatgatggtatttttctatgaccctgagggtcttaagctattctgagtcagaatacagttgacccttgaacaacacgggtttgaactgtgtgggtccacttatacatggattttcttccacctctgccacccaagatagcaagaccaaccccttctcatcctcagcctattcaacatgaagatgacaaggatgaagaccttcatgatgatccacttccacttaatgaatagtaaatatattttctcttccttataatcttaacaaacattttctcttctctagcttactttattgtaagaatacagtatataatacatatacaaaatatgtgtcaatcgactatgttatccgtaagacttctggtcagcagtaggccatgagtagttaagttttggaggagtcaaagttagatgtggatttttgactacttagggggtctatgcccctaactcctgcattatttgaaggtcaaccgtatagtttctgagaacatgtcagatcagagcctaacttcttactcttgcagttctacctgaggacccgaaggtgaggtgctgtgaaccactccctccatcctcatcataatgcatgtgcgtattactttatttaccatcacctggagaagaaatctcagaatgagagttaaaatccaataatagttcttgggttcaaaataaatgaaaggacagaattctcacatggtttacctatggaggttcaccttatcatgatttaagtggtaagcacagagcagcactgacaacttactgtggttcactgcaaaccaaaacatgatattctttgtagacttagatttcagtgttctgacactatatcccttacaccgtgatttttttagcacccagaactaaattaaggtcttcctaaatactcttcataaaagtattctgacagccagttttccactgcatgtttatgactgcaaatttcataatgcttttaattttggtacactgagtgattctattttaaaaatatttatgcccagaaaactccagtgaccattggacagttaaaaaattttaatgacacgattttaaccaattcacttttgaatttagaccaatcagtaaaggagatcagtcctccttttgcttcagtaccttattttacaacagtgtaaatgaactgtaatgaaaacacccacatgaagagactgtcctgaaaactcctagtgtttccaacaacgagaccatgagctgagtcactgtggatgatttaaaattaataaataaataaaacttggaatgaaaaacctttcagtaacccctgcagttgtgaaaaggtaaaaacattctcaatgcaaaaggtgagtggttgacattaatttttttaagaaatca

SEQ ID NO: 448592 - DNA, 7461 bp, Homo sapiens
  misc_feature (7358)..(7358): n is a, c, g, or t
  misc_feature (7371)..(7371): n is a, c, g, or t
  misc_feature (7387)..(7387): n is a, c, g, or t
gggttgagtcaagatggcggccaaggtggcgaagcagcagccgcggcggcggcggcggctggagtgagcgtccgactcgccgcgccgaacgaggtcccggtgtagggccgcgcgccgtggccgcgtcccactcctcaggccggggcgcacgtcggctcccacgcttagccagctcccggtggtttcctagaaacatgattgtttattggcattgatctcacagtctggtgaggacttctttactgataatgtcaagttcaggttatcctcccaaccaaggagcattcagcacagaacaaagtcgttatcctcctcactctgtccagtatacatttcccaacacccgccaccagcaggagttcgcagtccctgattatcgttcctctcatcttgaagtgagtcaggcatcacagcttttgcagcaacagcagcagcaacagcttcgaaggcgaccttccttgctttcagaatttcacccaggttctgacaggcctcaagaaaggagaactagttatgaaccgtttcatccaggcccatccccagtggatcatgattcactggaatcgaagcgaccacgtctggaacaggtttctgattctcattttcagcgtgtcagtgctgcggttttgcctttagtgcacccgctgccagaagggctgagggcttctgcagatgctaagaaggatccagcattcggaggcaaacatgaagctccatcctctccaatttcggggcaaccatgtggagatgatcaaaatgcttcaccttcaaaactctcaaaggaagagttaatacagagtatggatcgtgtagatcgagaaattgcaaaagtagaacagcagatccttaaactgaaaaagaaacaacaacagcttgaagaagaggcagctaaacctcctgagcctgagaagcccgtgtcccctcctcctgtggagcagaaacaccgcagtattgtccaaattatttatgatgagaatcggaaaaaagcagaagaagctcataaaatttttgaaggtcttggcccaaaagttgaactgccactgtataaccagccatcagataccaaggtgtaccatgagaacatcaagacaaaccaggtgatgaggaaaaaactcattttattttttaaaagaagaaatcatgcaagaaaacaaagggaacaaaaaatctgccagcgttatgatcagctcatggaggcatgggagaaaaaagtggacagaatagaaaataatcctcggaggaaagctaaagaaagcaaaacaagggaatactatgaaaagcagtttccagaaattcgaaaacaaagagaacagcaagaaagatttcagcgagttgggcagaggggagctggtctttcagccaccattgctaggagtgagcatgagatttctgaaattattgatgggctctctgagcaggagaataatgagaaacaaatgcggcagctctctgtgattccacctatgatgtttgatgcagaacaaagacgagtcaagttcattaacatgaatgggcttatggaggaccctatgaaagtgtataaagataggcagtttatgaatgtttggactgaccatgaaaaggagatctttaaggacaagtttatccagcatccaaaaaactttggactaattgcatcatacttggagaggaagagtgttcctgattgtgttttgtattactatttaaccaagaaaaatgagaattataaagccctcgtcagaaggaattatgggaaacgcagaggcagaaaccagcaaattgctcgaccctcgcaagaagaaaaagtagaagaaaaagaagaggataaagcagaaaaaacagaaaaaaaagaagaagaaaagaaagatgaagaggaaaaagatgaaaaagaagactccaaagaaaataccaaggaaaaggacaagatagatggtacagcagaagaaactgaggaaagagagcaagccacaccccgggggcgaaagactgccaacagtcagggccgccgtaagggccggatcaccaggtccatgacaaacgaagctgcagctgccagtgctgcagccgcagcggctactgaagagcccccaccacctctgccaccgccaccagaacccatttctacagagcctgtggagacctctcgatggacagaagaagaaatggaagttgctaaaaaaggtctagtagaacatggtcgtaactgggcagcaattgctaaaatggtgggaacgaaaagtgaagctcaatgtaaaaacttctattttaactataaaaggcgacacaatcttgacaacctcttacagcagcataaacagaaaacttcacgaaaacctcgtgaagagcgagatgtgtctcaatgtgaaagtgtcgcttccactgtttctgctcaggaggatgaagatattgaagcctccaatgaagaagaaaatccagaagacagcgaaggtgcagaaaatagttctgatacagaaagtgctccttctccttcaccagttgaagctgtcaagcccagcgaggacagtcctgaaaatgctacttctcgaggaaacacagaacctgcggttgagcttgagcccaccacggaaactgcacccagtacatctccctccttagcagttccaagtacaaaaccagctgaagatgaaagtgtggagacccaggtgaatgacagcatcagtgctgagacagcagagcagatggatgtagatcagcaggagcacagtgctgaagagggttctgtttgtgatcccccacccgctaccaaagctgactctgtggacgttgaagtgagggtgccagaaaaccatgcatctaaagttgaaggtgataataccaaagaaagagacttggatagagccagtgagaaggtggaacctagagatgaagatttggtggtagctcagcaaataaatgcccaaaggcccgagccccagtcagacaatgattccagtgccacgtgcagcgctgatgaggatgtggatggagagccagagaggcagagaatgtttcctatggactcaaagccttcactgttaaaccccactggatctatactcgtctcatctccgttaaaaccaaatccactggatctgccacagcttcagcatcgagctgctgttatcccaccaatggtatcctgcaccccatgtaacataccaattggaaccccagtgagcggctatgctctctaccagcgacacattaaagcaatgcatgagtcagcactcctggaggagcagcggcagagacaagaacagatagatttggaatgtagaagttctacaagtccatgtggcacatccaagagtccaaacagagagtgggaagtccttcagcctgctccacatcaagtgataactaatctccctgaaggcgttcggcttccgacaactcgaccaaccaggccaccgccccctctcatcccgtcatccaaaaccacagtggcttcagaaaaaccatcttttataatgggaggctccatctcacagggaacaccaggcacttatttgacttctcataatcaggcttcctacactcaagaaacacccaagccgtcagtgggatctatctctcttggactgccacggcaacaggaatctgccaaatcagctactttgccctacatcaagcaggaagaattttctccccgaagccaaaactcacaacctgagggtctgttggtcagggcccaacatgaaggtgtagtcagaggtaccgcaggagccatacaagaaggaagtataactcggggaactccaaccagcaaaatttcagtggagagcattccatccctacggggctctatcactcagggcaccccggctctgccccagactggcataccaacagaggctttggtgaaggggtccatttcgagaatgcccattgaagacagcagtcctgagaaaggcagagaggaagctgcatccaaaggccatgttatttatgaaggcaaaagtggacatatcttgtcatatgataatattaagaatgcccgagaagggactaggagtccaagaacagctcatgaaatcagtttaaagagaagctatgaatcagtggaaggaaatataaagcaagggatgtcaatgagggagtctcctgtatcagcaccgttagaggggctgatatgccgagcattacccagggggagtcctcattctgacctcaaagaaaggactgtattgtctggctccataatgcaggggacaccaagagcaacaactgaaagctttgaagatggccttaaatatcccaaacaaattaaaagggaaagtcctcccatacgagcatttgaaggtgccattaccaaaggaaaaccatatgatggcatcaccaccatcaaagaaatggggcgttccattcatgagattccaaggcaagatattttaactcaggaaagtcggaaaactccagaagtggtccagagcacacggccgataattgagggttccatttcccagggcacaccaataaagtttgacaacaactcaggtcaatctgccatcaaacacaatgtcaaatccttaatcacggggcctagcaaactatcccgtggaatgcctccgctggaaattgtgccagagaacataaaagtggtagaacggggaaaatatgaggatgtgaaagcaggcgagaccgtgcgttcccggcacacgtcagtggtaagctctggcccctccgttcttaggtccacactgcatgaagctcccaaagcacaactgagccctgggatttatgatgacaccagtgcacggaggacccctgtgagttatcaaaacaccatgtccagaggctcacccatgatgaacagaacttctgatgttacaatttcttctaacaagtctaccaatcatgaaaggaaatcgacactgacccctacccagagggaaagtatcccagcgaagtctccagtgcctggggtggaccctgtcgtgagccacagtccgtttgatccccatcacagaggcagcactgcaggcgaggtttatcggagccacctgcccacgcacttggatccagccatgccttttcacagggctttggatcctgcagcggctgcttacctgtttcagagacagctttcaccaactccaggttacccaagtcagtatcagctttacgcaatggagaacacaagacagacaatcttaaatgattacattacctcacaacagatgcaagtgaacttgcgtccagatgtggccagaggactctccccaagagagcagccactgggtctcccatacccagcaacgagaggaatcattgacctgaccaatatgcctccaacaattttagtgcctcatccagggggaacaagcactcctcccatggacagaatcacttatattcctggtacacagattactttccctcccaggccgtacaactctgcttccatgtctccaggacacccaacacaccttgcagctgctgcaagtgctgagagggaacgggaacgggagcgggagaaggagcgggagcgggaacggattgctgcagcttcctccgacctctacctgcggccaggctcagaacagcctggccgacctggcagtcatggatatgttcgctccccttccccttcagtaagaactcaggagaccatgttgcaacagagacccagtgttttccaaggaaccaatggaaccagtgtaatcacacctttggatccaactgctcagctacgaatcatgccactgcctgctgggggcccttcaataagccaaggcctgccagcctcccgttacaacactgctgcggatgccctggctgctcttgtggatgctgcagcttctgcaccccagatggatgtgtccaaaacaaaagagagtaagcatgaagctgccaggttagaagaaaatttgagaagcaggtcagcagcagttagtgaacagcagcagctagagcagaaaaccctggaggtggagaagagatctgttcagtgtttatacacttcttcagcctttccaagtggcaagccccagcctcattcttcagtagtttattctgaggctgggaaagataaagggcctcctccaaaatccagatatgaggaagagctaaggaccagagggaagactaccattactgcagctaacttcatagacgtgatcatcacccggcaaattgcctcggacaaggatgcgagggaacgtggctctcaaagttcagactcttctagtagcttatcttctcacaggtatgaaacacctagcgatgctattgaggtgataagtcctgccagctcacctgcgccaccccaggagaaactgcagacctatcagccagaggttgttaaggcaaatcaagcggaaaatgatcctaccagacaatatgaaggaccattacatcactatcgaccacagcaggaatcaccatctccccaacaacagctgcccccttcttcacaggcagagggaatggggcaagtgcccaggacccatcggctgatcacacttgctgatcacatctgtcaaattatcacacaagattttgctagaaatcaagtttcctcgcagactccccagcagcctcctacttctacattccagaactcaccttctgctttggtatctacacctgtgaggactaaaacatcaaaccgttacagcccagaatcccaggctcagtctgtccatcatcaaagaccaggttcaagggtctctccagaaaatcttgtggacaaatccaggggaagtaggcctggaaaatccccagagaggagtcacgtctcttcggagccctacgagcccatctccccaccccaggttccggttgtgcatgagaaacaggacagcttgctgctcttgtctcagaggggcgcagagcctgcagagcagaggaatgatgcccgctcaccagggagtataagctacttgccttcattcttcaccaagcttgaaaatacatcacccatggttaaatcaaagaagcaggagatttttcgtaagttgaactcctctggtggaggtgactctgatatggcagctgctcagccaggaactgagatctttaatctgccagcagttactacgtcaggctcagttagctctagaggccattcttttgctgatcctgccagtaatcttgggctggaagacattatcaggaaggctctcatgggaagctttgatgacaaagttgaggatcatggagttgtcatgtcccagcctatgggagtagtgcctggtactgccaacacctcagttgtgaccagtggtgagacacgaagagaggaaggggacccatcacctcattcaggtacagctttcattttagtgcttttctgctgcttttccccaaaaaagccagtttatttcccaaattctgatgcatcactaagacatttcatttatgtctttatgtgntcagagtcacctnttagggtttccgttanttaaaaaaggtttttgaaaacctacccagacattataatatgaacagaaataaaatggaagaaaatttttaccc

SEQ ID NO: 448593 - DNA, 4092 bp, Homo sapiens
gatgagcaaagaaagtggtttcttgagattgaatctgcccctgaagatgctgtgaacatggctgaaatgacaacaaaggatttagaatactacattacataaacccagttaataaagaagggtttgagggatcaactccaattttgaaagttctactgtggctaaaatgctatcattgcatgctacaaataagtctttcatgaaaggaaaagaaattgccacagccatcccagcctttggcaaccgccatgcagattagtcagcagccatcaacatggaggcaagaccatccaccagcaaaataattgtgacttactaaaccctcagtatctctgaggtatgcctgtagtattttatttcattgagtaccaggatctggattcttcatgttaccattctgcttttttttcatttagcaatatataatcattagcattttggtaatttttgagaacttaatatattaatactttaacttgaatttcactttcaggaggagtttgcaaaccaaagctgatcagcaagtcaaacagcaggaaatctaagtctcctatacctgggcaaggctacttaggaacggaacggccctcttcagtctcctctgtacattcagaaggggattaccataggcagacgccagggtgggcctgggaagacaggccctcttcaacaggctcaactcagtttccttataaccctctgactatgcggatgctcagcagtactccaccaacaccgattgcatgtgctccctctgcggtgaaccaagcagctcctcaccaacagaacaggatctgggagcgagagcctgccccactgctctcagcacagtacgagaccctgtcggatagtgatgactgaactgcacaaagtgaggggaacagggtgcaggagagggatctctagtttttgtggtttaatttttagtagcaggtcaaaaacctgccctcctgtgacttattccctgagacttttcaggagagccagcccacagatgatgaagaaatgatggaagttcatttggagagtcaaatgggaaaaaaacaaacaaaaaactgcctttgatacaggcaattcagtggactataataatagtggagggttgagatgtagagtttttaaaaagtgaacagttgctgttcttacatctgtaaagaaaaccataatgtctttaaatcactcttctgtaaatagatgacctttttgcagtgtatatccccttgctgtagtatctggtgtacttatgttcaaatcagcgcatcaactttgggggtgatttttaaaaatctttttgtctatctatctttttaaccctagccttctaaacaacctcatacagcccagttacataatgttggctgtcacgggcattgtacttttatctgatattgtttcctctaaattcagctttccagtgatgtttaaaatcttgtgaaaatgtttagatttttaacacagaccctgtcataaaatctgtacattagggtcaaaaggtaaaagtaacaaattctgccatattgtaaatttccagtgcaggctttaatttttttttttcattagtagcactgaaaaaatattactgcatgggtatgttctagttcagtttataaagttttaaaggcttatttgaggcatacctcactgttacgcacactggtaatttaaccatgcccctaagtattccttttctcctgcatttgatgcagcccaacaaagcttttgttttgaaataaatttgactaccctgtccatagctacagtagattatttgtggtttaaggctcctggtgtctcaggttccaaaggaaaagcttacatatttttcccttagtttgaatatatgattggttgggttaaaagataatgatctgtgtagtatttagataagctttatgctgcatcctgaaaaactcatggtgaacacagtcctttttccccatcactatggaccagcatttactctcactttgctcccttgggacaagagtttactgttaaatgttttcatttcacagagtctcaaggtgcaaataatttaaaagactgaattctaaactaattatggtactagagggccagttttatctttcattaagaattgcttgctgaattttaaagtttttttcatacaatttatcatagcatttaagtatctttctataacatagatactaacagttttgggagaatgccactggtaactggaaaggggagaaacagatctctcaggatgataaaaattagcactttacagactttcaagtagacctaaacttttaaacaaaagtactcaaggcttttaaggaagcagctctgtgattagctactgaccaagaccctcctatcactggtgtctaatccctatgttacagatgaagacacaggtttagtactttgcccatatagttaaattagtgacagagataggccataagcccacatttgtcttcagtcaaagctttcactcctgtccctgttccactcctgtatacctgaggtccccaacataaactttagatcaggcttagtggtcagcattcctagtacttggaaagttggtattttttacaacagatatatgtaaacatataaaaatttcaaaatgaatgaaaaacagtgactaaatgttccacttcacagttttctgctgaatttttttttttcaggtactggtaatattttagagtttgttaataatttatattgccaacctaccataaaagagattatgatggtatttttctatgaccctgagggtcttaagctattctgagtcagaatacagttgacccttgaacaacacgggtttgaactgtgtgggtccacttatacatggattttcttccacctctgccacccaagatagcaagaccaaccccttctcatcctcagcctattcaacatgaagatgacaaggatgaagaccttcatgatgatccacttccacttaatgaatagtaaatatattttctcttccttataatcttaacaaacattttctcttctctagcttactttattgtaagaatacagtatataatacatatacaaaatatgtgtcaatcgactatgttatccgtaagacttctggtcagcagtaggccatgagtagttaagttttggaggagtcaaagttagatgtggatttttgactacttagggggtctatgcccctaactcctgcattatttgaaggtcaaccgtatagtttctgagaacatgtcagatcagagcctaacttcttactcttgcagttctacctgaggacccgaaggtgaggtgctgtgaaccactccctccatcctcatcataatgcatgtgcgtattactttatttaccatcacctggagaagaaatctcagaatgagagttaaaatccaataatagttcttgggttcaaaataaatgaaaggacagaattctcacatggtttacctatggaggttcaccttatcatgatttaagtggtaagcacagagcagcactgacaacttactgtggttcactgcaaaccaaaacatgatattctttgtagacttagatttcagtgttctgacactatatcccttacaccgtgatttttttagcacccagaactaaattaaggtcttcctaaatactcttcataaaagtattctgacagccagttttccactgcatgtttatgactgcaaatttcataatgcttttaattttggtacactgagtgattctattttaaaaatatttatgcccagaaaactccagtgaccattggacagttaaaaaattttaatgacacgattttaaccaattcacttttgaatttagaccaatcagtaaaggagatcagtcctccttttgcttcagtaccttattttacaacagtgtaaatgaactgtaatgaaaacacccacatgaagagactgtcctgaaaactcctagtgtttccaacaacgagaccatgagctgagtcactgtggatgatttaaaattaataaataaataaaacttggaatgaaaaacctttcagtaacccctgcagttgtgaaaaggtaaaaacattctcaatgcaaaaggtgagtggttgacattaatttttttaagaaatca

SEQ ID NO: 448594 - DNA, 6213 bp, Homo sapiens
gggttgagtcaagatggcggccaaggtggcgaagcagcagccgcggcggcggcggcggctggagtgagcgtccgactcgccgcgccgaacgaggtcccggtgtagggccgcgcgccgtggccgcgtcccactcctcaggccggggcgcacgtcggctcccacgcttagccagctcccggtggtttcctagaaacatgattgtttattggcattgatctcacagtctggtgaggacttctttactgataatgtcaagttcaggttatcctcccaaccaaggagcattcagcacagaacaaagtcgttatcctcctcactctgtccagtatacatttcccaacacccgccaccagcaggagttcgcagtccctgattatcgttcctctcatcttgaagtgagtcaggcatcacagcttttgcagcaacagcagcagcaacagcttcgaaggcgaccttccttgctttcagaatttcacccaggttctgacaggcctcaagaaaggagaactagttatgaaccgtttcatccaggcccatccccagtggatcatgattcactggaatcgaagcgaccacgtctggaacaggtttctgattctcattttcagcgtgtcagtgctgcggttttgcctttagtgcacccgctgccagaagggctgagggcttctgcagatgctaagaaggatccagcattcggaggcaaacatgaagctccatcctctccaatttcggggcaaccatgtggagatgatcaaaatgcttcaccttcaaaactctcaaaggaagagttaatacagagtatggatcgtgtagatcgagaaattgcaaaagtagaacagcagatccttaaactgaaaaagaaacaacaacagcttgaagaagaggcagctaaacctcctgagcctgagaagcccgtgtcccctcctcctgtggagcagaaacaccgcagtattgtccaaattatttatgatgagaatcggaaaaaagcagaagaagctcataaaatttttgaaggtcttggcccaaaagttgaactgccactgtataaccagccatcagataccaaggtgtaccatgagaacatcaagacaaaccaggtgatgaggaaaaaactcattttattttttaaaagaagaaatcatgcaagaaaacaaagggaacaaaaaatctgccagcgttatgatcagctcatggaggcatgggagaaaaaagtggacagaatagaaaataatcctcggaggaaagctaaagaaagcaaaacaagggaatactatgaaaagcagtttccagaaattcgaaaacaaagagaacagcaagaaagatttcagcgagttgggcagaggggagctggtctttcagccaccattgctaggagtgagcatgagatttctgaaattattgatgggctctctgagcaggagaataatgagaaacaaatgcggcagctctctgtgattccacctatgatgtttgatgcagaacaaagacgagtcaagttcattaacatgaatgggcttatggaggaccctatgaaagtgtataaagataggcagtttatgaatgtttggactgaccatgaaaaggagatctttaaggacaagtttatccagcatccaaaaaactttggactaattgcatcatacttggagaggaagagtgttcctgattgtgttttgtattactatttaaccaagaaaaatgagaattataaagccctcgtcagaaggaattatgggaaacgcagaggcagaaaccagcaaattgctcgaccctcgcaagaagaaaaagtagaagaaaaagaagaggataaagcagaaaaaacagaaaaaaaagaagaagaaaagaaagatgaagaggaaaaagatgaaaaagaagactccaaagaaaataccaaggaaaaggacaagatagatggtacagcagaagaaactgaggaaagagagcaagccacaccccgggggcgaaagactgccaacagtcagggccgccgtaagggccggatcaccaggtccatgacaaacgaagctgcagctgccagtgctgcagccgcagcggctactgaagagcccccaccacctctgccaccgccaccagaacccatttctacagagcctgtggagacctctcgatggacagaagaagaaatggaagttgctaaaaaaggtctagtagaacatggtcgtaactgggcagcaattgctaaaatggtgggaacgaaaagtgaagctcaatgtaaaaacttctattttaactataaaaggcgacacaatcttgacaacctcttacagcagcataaacagaaaacttcacgaaaacctcgtgaagagcgagatgtgtctcaatgtgaaagtgtcgcttccactgtttctgctcaggaggatgaagatattgaagcctccaatgaagaagaaaatccagaagacagcgaaggtgcagaaaatagttctgatacagaaagtgctccttctccttcaccagttgaagctgtcaagcccagcgaggacagtcctgaaaatgctacttctcgaggaaacacagaacctgcggttgagcttgagcccaccacggaaactgcacccagtacatctccctccttagcagttccaagtacaaaaccagctgaagatgaaagtgtggagacccaggtgaatgacagcatcagtgctgagacagcagagcagatggatgtagatcagcaggagcacagtgctgaagagggttctgtttgtgatcccccacccgctaccaaagctgactctgtggacgttgaagtgagggtgccagaaaaccatgcatctaaagttgaaggtgataataccaaagaaagagacttggatagagccagtgagaaggtggaacctagagatgaagatttggtggtagctcagcaaataaatgcccaaaggcccgagccccagtcagacaatgattccagtgccacgtgcagcgctgatgaggatgtggatggagagccagagaggcagagaatgtttcctatggactcaaagccttcactgttaaaccccactggatctatactcgtctcatctccgttaaaaccaaatccactggatctgccacagcttcagcatcgagctgctgttatcccaccaatggtatcctgcaccccatgtaacataccaattggaaccccagtgagcggctatgctctctaccagcgacacattaaagcaatgcatgagtcagcactcctggaggagcagcggcagagacaagaacagatagatttggaatgtagaagttctacaagtccatgtggcacatccaagagtccaaacagagagtgggaagtccttcagcctgctccacatcaagtgataactaatctccctgaaggcgttcggcttccgacaactcgaccaaccaggccaccgccccctctcatcccgtcatccaaaaccacagtggcttcagaaaaaccatcttttataatgggaggctccatctcacagggaacaccaggcacttatttgacttctcataatcaggcttcctacactcaagaaacacccaagccgtcagtgggatctatctctcttggactgccacggcaacaggaatctgccaaatcagctactttgccctacatcaagcaggaagaattttctccccgaagccaaaactcacaacctgagggtctgttggtcagggcccaacatgaaggtgtagtcagaggtaccgcaggagccatacaagaaggaagtataactcggggaactccaaccagcaaaatttcagtggagagcattccatccctacggggctctatcactcagggcaccccggctctgccccagactggcataccaacagaggctttggtgaaggggtccatttcgagaatgcccattgaagacagcagtcctgagaaaggcagagaggaagctgcatccaaaggccatgttatttatgaaggcaaaagtggacatatcttgtcatatgataatattaagaatgcccgagaagggactaggagtccaagaacagctcatgaaatcagtttaaagagaagctatgaatcagtggaaggaaatataaagcaagggatgtcaatgagggagtctcctgtatcagcaccgttagaggggctgatatgccgagcattacccagggggagtcctcattctgacctcaaagaaaggactgtattgtctggctccataatgcaggggacaccaagagcaacaactgaaagctttgaagatggccttaaatatcccaaacaaattaaaagggaaagtcctcccatacgagcatttgaaggtgccattaccaaaggaaaaccatatgatggcatcaccaccatcaaagaaatggggcgttccattcatgagattccaaggcaagatattttaactcaggaaagtcggaaaactccagaagtggtccagagcacacggccgataattgagggttccatttcccagggcacaccaataaagtttgacaacaactcaggtcaatctgccatcaaacacaatgtcaaatccttaatcacggggcctagcaaactatcccgtggaatgcctccgctggaaattgtgccagagaacataaaagtggtagaacggggaaaatatgaggatgtgaaagcaggcgagaccgtgcgttcccggcacacgtcagtggtaagctctggcccctccgttcttaggtccacactgcatgaagctcccaaagcacaactgagccctgggatttatgatgacaccagtgcacggaggacccctgtgagttatcaaaacaccatgtccagaggctcacccatgatgaacagaacttctgatgttacaatttcttctaacaagtctaccaatcatgaaaggaaatcgacactgacccctacccagagggaaagtatcccagcgaagtctccagtgcctggggtggaccctgtcgtgagccacagtccgtttgatccccatcacagaggcagcactgcaggcgaggtttatcggagccacctgcccacgcacttggatccagccatgccttttcacagggctttggatcctgcagcggctgcttacctgtttcagagacagctttcaccaactccaggttacccaagtcagtatcagctttacgcaatggagaacacaagacagacaatcttaaatgattacattacctcacaacagatgcaagtgaacttgcgtccagatgtggccagaggactctccccaagagagcagccactgggtctcccatacccagcaacgagaggaatcattgacctgaccaatatgcctccaacaattttagtgcctcatccagggggaacaagcactcctcccatggacagaatcacttatattcctggtacacagattactttccctcccaggccgtacaactctgcttccatgtctccaggacacccaacacaccttgcagctgctgcaagtgctgagagggaacgggaacgggagcgggagaaggagcgggagcgggaacggattgctgcagcttcctccgacctctacctgcggccaggctcagaacagcctggccgacctggcagtcatggatatgttcgctccccttccccttcagtaagaactcaggagaccatgttgcaacagagacccagtgttttccaaggaaccaatggaaccagtgtaatcacacctttggatccaactgctcagctacgaatcatgtcagtctcttgtacatattttgacaaaaaatgtctcttgcatatacattttaaaatttgtgactgcaatagtctaagtatagtcatgcttttctgcccatgccatgaaggcttttttgttgttgttgcagtttgtccttccatctccccaccacattcccagcaaatggtcttcccttcacagagctgtgatttggttttatttacagccactgcctgctgggggcccttcaataagccaaggcctgccagcctcccgttacaacactgctgcggatgccctggctgctcttgtggatgctgcagcttctgcaccccagatggatgtgtccaaaacaaaagagagccagcctgggcaagatggtgaaaccctgtctctactaaaaatataaacagctggtcatggtggcgtgcacctgtaatcccagctactcaggaggctgaagcatgagaatcatttgaacctgggaggcagaggttgcagtgagccaagattgtgccactgcattccagcctgggcaacaaagtga

SEQ ID NO: 448595 - DNA, 4855 bp, Homo sapiens
gggttgagtcaagatggcggccaaggtggcgaagcagcagccgcggcggcggcggcggctggagtgagcgtccgactcgccgcgccgaacgaggtcccggtgtagggccgcgcgccgtggccgcgtcccactcctcaggccggggcgcacgtcggctcccacgcttagccagctcccggtggtttcctagaaacatgattgtttattggcattgatctcacagtctggtgaggacttctttactgataatgtcaagttcaggttatcctcccaaccaaggagcattcagcacagaacaaagtcgttatcctcctcactctgtccagtatacatttcccaacacccgccaccagcaggagttcgcagtccctgattatcgttcctctcatcttgaagtgagtcaggcatcacagcttttgcagcaacagcagcagcaacagcttcgaaggcgaccttccttgctttcagaatttcacccaggttctgacaggcctcaagaaaggagaactagttatgaaccgtttcatccaggcccatccccagtggatcatgattcactggaatcgaagcgaccacgtctggaacaggtttctgattctcattttcagcgtgtcagtgctgcggttttgcctttagtgcacccgctgccagaagggctgagggcttctgcagatgctaagaaggatccagcattcggaggcaaacatgaagctccatcctctccaatttcggggcaaccatgtggagatgatcaaaatgcttcaccttcaaaactctcaaaggaagagttaatacagagtatggatcgtgtagatcgagaaattgcaaaagtagaacagcagatccttaaactgaaaaagaaacaacaacagcttgaagaagaggcagctaaacctcctgagcctgagaagcccgtgtcccctcctcctgtggagcagaaacaccgcagtattgtccaaattatttatgatgagaatcggaaaaaagcagaagaagctcataaaatttttgaaggtcttggcccaaaagttgaactgccactgtataaccagccatcagataccaaggtgtaccatgagaacatcaagacaaaccaggtgatgaggaaaaaactcattttattttttaaaagaagaaatcatgcaagaaaacaaagggaacaaaaaatctgccagcgttatgatcagctcatggaggcatgggagaaaaaagtggacagaatagaaaataatcctcggaggaaagctaaagaaagcaaaacaagggaatactatgaaaagcagtttccagaaattcgaaaacaaagagaacagcaagaaagatttcagcgagttgggcagaggggagctggtctttcagccaccattgctaggagtgagcatgagatttctgaaattattgatgggctctctgagcaggagaataatgagaaacaaatgcggcagctctctgtgattccacctatgatgtttgatgcagaacaaagacgagtcaagttcattaacatgaatgggcttatggaggaccctatgaaagtgtataaagataggcagtttatgaatgtttggactgaccatgaaaaggagatctttaaggacaagtttatccagcatccaaaaaactttggactaattgcatcatacttggagaggaagagtgttcctgattgtgttttgtattactatttaaccaagaaaaatgagaattataaagccctcgtcagaaggaattatgggaaacgcagaggcagaaaccagcaaattgctcgaccctcgcaagaagaaaaagtagaagaaaaagaagaggataaagcagaaaaaacagaaaaaaaagaagaagaaaagaaagatgaagaggaaaaagatgaaaaagaagactccaaagaaaataccaaggaaaaggacaagatagatggtacagcagaagaaactgaggaaagagagcaagccacaccccgggggcgaaagactgccaacagtcagggccgccgtaagggccggatcaccaggtccatgacaaacgaagctgcagctgccagtgctgcagccgcagcggctactgaagagcccccaccacctctgccaccgccaccagaacccatttctacagagcctgtggagacctctcgatggacagaagaagaaatggaagttgctaaaaaaggtctagtagaacatggtcgtaactgggcagcaattgctaaaatggtgggaacgaaaagtgaagctcaatgtaaaaacttctattttaactataaaaggcgacacaatcttgacaacctcttacagcagcataaacagaaaacttcacgaaaacctcgtgaagagcgagatgtgtctcaatgtgaaagtgtcgcttccactgtttctgctcaggaggatgaagatattgaagcctccaatgaagaagaaaatccagaagacagcgaaggtgcagaaaatagttctgatacagaaagtgctccttctccttcaccagttgaagctgtcaagcccagcgaggacagtcctgaaaatgctacttctcgaggaaacacagaacctgcggttgagcttgagcccaccacggaaactgcacccagtacatctccctccttagcagttccaagtacaaaaccagctgaagatgaaagtgtggagacccaggtgaatgacagcatcagtgctgagacagcagagcagatggatgtagatcagcaggagcacagtgctgaagagggttctgtttgtgatcccccacccgctaccaaagctgactctgtggacgttgaagtgagggtgccagaaaaccatgcatctaaagttgaaggtgataataccaaagaaagagacttggatagagccagtgagaaggtggaacctagagatgaagatttggtggtagctcagcaaataaatgcccaaaggcccgagccccagtcagacaatgattccagtgccacgtgcagcgctgatgaggatgtggatggagagccagagaggcagagaatgtttcctatggactcaaagccttcactgttaaaccccactggatctatactcgtctcatctccgttaaaaccaaatccactggatctgccacagcttcagcatcgagctgctgttatcccaccaatggtatcctgcaccccatgtaacataccaattggaaccccagtgagcggctatgctctctaccagcgacacattaaagcaatgcatgagtcagcactcctggaggagcagcggcagagacaagaacagatagatttggaatgtagaagttctacaagtccatgtggcacatccaagagtccaaacagagagtgggaagtccttcagcctgctccacatcaagtgataactaatctccctgaaggcgttcggcttccgacaactcgaccaaccaggccaccgccccctctcatcccgtcatccaaaaccacagtggcttcagaaaaaccatcttttataatgggaggctccatctcacagggaacaccaggcacttatttgacttctcataatcaggcttcctacactcaagaaacacccaagccgtcagtgggatctatctctcttggactgccacggcaacaggaatctgccaaatcagctactttgccctacatcaagcaggaagaattttctccccgaagccaaaactcacaacctgagggtctgttggtcagggcccaacatgaaggtgtagtcagaggtaccgcaggagccatacaagaaggaagtataactcggggaactccaaccagcaaaatttcagtggagagcattccatccctacggggctctatcactcagggcaccccggctctgccccagactggcataccaacagaggctttggtgaaggggtccatttcgagaatgcccattgaagacagcagtcctgagaaaggcagagaggaagctgcatccaaaggccatgttatttatgaaggcaaaagtggacatatcttgtcatatgataatattaagaatgcccgagaagggactaggagtccaagaacagctcatgaaatcagtttaaagagaagctatgaatcagtggaaggaaatataaagcaagggatgtcaatgagggagtctcctgtatcagcaccgttagaggggctgatatgccgagcattacccagggggagtcctcattctgacctcaaagaaaggactgtattgtctggctccataatgcaggggacaccaagagcaacaactgaaagctttgaagatggccttaaatatcccaaacaaattaaaagggaaagtcctcccatacgagcatttgaaggtgccattaccaaaggaaaaccatatgatggcatcaccaccatcaaagaaatggggcgttccattcatgagattccaaggcaagatattttaactcaggaaagtcggaaaactccagaagtggtccagagcacacggccgataattgagggttccatttcccagggcacaccaataaagtttgacaacaactcaggtcaatctgccatcaaacacaatgtcaaatccttaatcacggggcctagcaaactatcccgtggaatgcctccgctggaaattgtgccagagaacataaaagtggtagaacggggaaaatatgaggatgtgaaagcaggcgagaccgtgcgttcccggcacacgtcagtggtaagctctggcccctccgttcttaggtccacactgcatgaagctcccaaagcacaactgagccctgggatttatgatgacaccagtgcacggaggacccctgtgagttatcaaaacaccatgtccagaggctcacccatgatgaacagaacttctgatggtatgttacttttgttgcttggtctgatactttttattgcatttaa

SEQ ID NO: 448596 - DNA, 4610 bp, Homo sapiens
gggttgagtcaagatggcggccaaggtggcgaagcagcagccgcggcggcggcggcggctggagtgagcgtccgactcgccgcgccgaacgaggtcccggtgtagggccgcgcgccgtggccgcgtcccactcctcaggccggggcgcacgtcggctcccacgcttagccagctcccggtggtttcctagaaacatgattgtttattggcattgatctcacagtctggtgaggacttctttactgataatgtcaagttcaggttatcctcccaaccaaggagcattcagcacagaacaaagtcgttatcctcctcactctgtccagtatacatttcccaacacccgccaccagcaggagttcgcagtccctgattatcgttcctctcatcttgaagtgagtcaggcatcacagcttttgcagcaacagcagcagcaacagcttcgaaggcgaccttccttgctttcagaatttcacccaggttctgacaggcctcaagaaaggagaactagttatgaaccgtttcatccaggcccatccccagtggatcatgattcactggaatcgaagcgaccacgtctggaacaggtttctgattctcattttcagcgtgtcagtgctgcggttttgcctttagtgcacccgctgccagaagggctgagggcttctgcagatgctaagaaggatccagcattcggaggcaaacatgaagctccatcctctccaatttcggggcaaccatgtggagatgatcaaaatgcttcaccttcaaaactctcaaaggaagagttaatacagagtatggatcgtgtagatcgagaaattgcaaaagtagaacagcagatccttaaactgaaaaagaaacaacaacagcttgaagaagaggcagctaaacctcctgagcctgagaagcccgtgtcccctcctcctgtggagcagaaacaccgcagtattgtccaaattatttatgatgagaatcggaaaaaagcagaagaagctcataaaatttttgaaggtcttggcccaaaagttgaactgccactgtataaccagccatcagataccaaggtgtaccatgagaacatcaagacaaaccaggtgatgaggaaaaaactcattttattttttaaaagaagaaatcatgcaagaaaacaaagggaacaaaaaatctgccagcgttatgatcagctcatggaggcatgggagaaaaaagtggacagaatagaaaataatcctcggaggaaagctaaagaaagcaaaacaagggaatactatgaaaagcagtttccagaaattcgaaaacaaagagaacagcaagaaagatttcagcgagttgggcagaggggagctggtctttcagccaccattgctaggagtgagcatgagatttctgaaattattgatgggctctctgagcaggagaataatgagaaacaaatgcggcagctctctgtgattccacctatgatgtttgatgcagaacaaagacgagtcaagttcattaacatgaatgggcttatggaggaccctatgaaagtgtataaagataggcagtttatgaatgtttggactgaccatgaaaaggagatctttaaggacaagtttatccagcatccaaaaaactttggactaattgcatcatacttggagaggaagagtgttcctgattgtgttttgtattactatttaaccaagaaaaatgagaattataaagccctcgtcagaaggaattatgggaaacgcagaggcagaaaccagcaaattgctcgaccctcgcaagaagaaaaagtagaagaaaaagaagaggataaagcagaaaaaacagaaaaaaaagaagaagaaaagaaagatgaagaggaaaaagatgaaaaagaagactccaaagaaaataccaaggaaaaggacaagatagatggtacagcagaagaaactgaggaaagagagcaagccacaccccgggggcgaaagactgccaacagtcagggccgccgtaagggccggatcaccaggtccatgacaaacgaagctgcagctgccagtgctgcagccgcagcggctactgaagagcccccaccacctctgccaccgccaccagaacccatttctacagagcctgtggagacctctcgatggacagaagaagaaatggaagttgctaaaaaaggtctagtagaacatggtcgtaactgggcagcaattgctaaaatggtgggaacgaaaagtgaagctcaatgtaaaaacttctattttaactataaaaggcgacacaatcttgacaacctcttacagcagcataaacagaaaacttcacgaaaacctcgtgaagagcgagatgtgtctcaatgtgaaagtgtcgcttccactgtttctgctcaggaggatgaagatattgaagcctccaatgaagaagaaaatccagaagacagcgaaggtgcagaaaatagttctgatacagaaagtgctccttctccttcaccagttgaagctgtcaagcccagcgaggacagtcctgaaaatgctacttctcgaggaaacacagaacctgcggttgagcttgagcccaccacggaaactgcacccagtacatctccctccttagcagttccaagtacaaaaccagctgaagatgaaagtgtggagacccaggtgaatgacagcatcagtgctgagacagcagagcagatggatgtagatcagcaggagcacagtgctgaagagggttctgtttgtgatcccccacccgctaccaaagctgactctgtggacgttgaagtgagggtgccagaaaaccatgcatctaaagttgaaggtgataataccaaagaaagagacttggatagagccagtgagaaggtggaacctagagatgaagatttggtggtagctcagcaaataaatgcccaaaggcccgagccccagtcagacaatgattccagtgccacgtgcagcgctgatgaggatgtggatggagagccagagaggcagagaatgtttcctatggactcaaagccttcactgttaaaccccactggatctatactcgtctcatctccgttaaaaccaaatccactggatctgccacagcttcagcatcgagctgctgttatcccaccaatggtatcctgcaccccatgtaacataccaattggaaccccagtgagcggctatgctctctaccagcgacacattaaagcaatgcatgagtcagcactcctggaggagcagcggcagagacaagaacagatagatttggaatgtagaagttctacaagtccatgtggcacatccaagagtccaaacagagagtgggaagtccttcagcctgctccacatcaagtgataactaatctccctgaaggcgttcggcttccgacaactcgaccaaccaggccaccgccccctctcatcccgtcatccaaaaccacagtggcttcagaaaaaccatcttttataatgggaggctccatctcacagggaacaccaggcacttatttgacttctcataatcaggcttcctacactcaagaaacacccaagccgtcagtgggatctatctctcttggactgccacggcaacaggaatctgccaaatcagctactttgccctacatcaagcaggaagaattttctccccgaagccaaaactcacaacctgagggtctgttggtcagggcccaacatgaaggtgtagtcagaggtaccgcaggagccatacaagaaggaagtataactcggggaactccaaccagcaaaatttcagtggagagcattccatccctacggggctctatcactcagggcaccccggctctgccccagactggcataccaacagaggctttggtgaaggggtccatttcgagaatgcccattgaagacagcagtcctgagaaaggcagagaggaagctgcatccaaaggccatgttatttatgaaggcaaaagtggacatatcttgtcatatgatagtaagtattgtatgtatgcaccaaagccagtattacaatatgtgctaaaaacataggcttgggttttcccgcatttctgctctctgggagtcagtttatctttgctgagcctatgttttctctcagtaaatggggttagtaatacttgtctcatgagaattttgtgaataacagcttagtcgataaaaagtaattaacaacgcagagctcatattaaatgtcccataggtggtagctaagattgtcgactgtggtcagtcagtttagcttaggtaaagagcctttgttgaactttaatggaatacttttattttgaagagattcatgttttatgaattaagaattagagggtagataggctgggcgcggtggttcacgcctatctactatctaatcccagtactttgggaggccaaggcaggtggatcgcctggggtcgggagttcaagaccggcctgaccaacatggagaaaccccatctctactagaaatacaaagttagccaggcatggtggtgcatgcctgtaatcccagctactcgggaggctgaagcaggagaatcgcttgaatccgggaggcggaggttgctgtgagccgagatcgcgccatttccagcctgggcaacaagagggaaactccgtctc

SEQ ID NO: 448597 - DNA, 3788 bp, Homo sapiens
  misc_feature (3498)..(3498): n is a, c, g, or t
gggttgagtcaagatggcggccaaggtggcgaagcagcagccgcggcggcggcggcggctggagtgagcgtccgactcgccgcgccgaacgaggtcccggtgtagggccgcgcgccgtggccgcgtcccactcctcaggccggggcgcacgtcggctcccacgcttagccagctcccggtggtttcctagaaacatgattgtttattggcattgatctcacagtctggtgaggacttctttactgataatgtcaagttcaggttatcctcccaaccaaggagcattcagcacagaacaaagtcgttatcctcctcactctgtccagtatacatttcccaacacccgccaccagcaggagttcgcagtccctgattatcgttcctctcatcttgaagtgagtcaggcatcacagcttttgcagcaacagcagcagcaacagcttcgaaggcgaccttccttgctttcagaatttcacccaggttctgacaggcctcaagaaaggagaactagttatgaaccgtttcatccaggcccatccccagtggatcatgattcactggaatcgaagcgaccacgtctggaacaggtttctgattctcattttcagcgtgtcagtgctgcggttttgcctttagtgcacccgctgccagaagggctgagggcttctgcagatgctaagaaggatccagcattcggaggcaaacatgaagctccatcctctccaatttcggggcaaccatgtggagatgatcaaaatgcttcaccttcaaaactctcaaaggaagagttaatacagagtatggatcgtgtagatcgagaaattgcaaaagtagaacagcagatccttaaactgaaaaagaaacaacaacagcttgaagaagaggcagctaaacctcctgagcctgagaagcccgtgtcccctcctcctgtggagcagaaacaccgcagtattgtccaaattatttatgatgagaatcggaaaaaagcagaagaagctcataaaatttttgaaggtcttggcccaaaagttgaactgccactgtataaccagccatcagataccaaggtgtaccatgagaacatcaagacaaaccaggtgatgaggaaaaaactcattttattttttaaaagaagaaatcatgcaagaaaacaaagggaacaaaaaatctgccagcgttatgatcagctcatggaggcatgggagaaaaaagtggacagaatagaaaataatcctcggaggaaagctaaagaaagcaaaacaagggaatactatgaaaagcagtttccagaaattcgaaaacaaagagaacagcaagaaagatttcagcgagttgggcagaggggagctggtctttcagccaccattgctaggagtgagcatgagatttctgaaattattgatgggctctctgagcaggagaataatgagaaacaaatgcggcagctctctgtgattccacctatgatgtttgatgcagaacaaagacgagtcaagttcattaacatgaatgggcttatggaggaccctatgaaagtgtataaagataggcagtttatgaatgtttggactgaccatgaaaaggagatctttaaggacaagtttatccagcatccaaaaaactttggactaattgcatcatacttggagaggaagagtgttcctgattgtgttttgtattactatttaaccaagaaaaatgagaattataaagccctcgtcagaaggaattatgggaaacgcagaggcagaaaccagcaaattgctcgaccctcgcaagaagaaaaagtagaagaaaaagaagaggataaagcagaaaaaacagaaaaaaaagaagaagaaaagaaagatgaagaggaaaaagatgaaaaagaagactccaaagaaaataccaaggaaaaggacaagatagatggtacagcagaagaaactgaggaaagagagcaagccacaccccgggggcgaaagactgccaacagtcagggccgccgtaagggccggatcaccaggtccatgacaaacgaagctgcagctgccagtgctgcagccgcagcggctactgaagagcccccaccacctctgccaccgccaccagaacccatttctacagagcctgtggagacctctcgatggacagaagaagaaatggaagttgctaaaaaaggtctagtagaacatggtcgtaactgggcagcaattgctaaaatggtgggaacgaaaagtgaagctcaatgtaaaaacttctattttaactataaaaggcgacacaatcttgacaacctcttacagcagcataaacagaaaacttcacgaaaacctcgtgaagagcgagatgtgtctcaatgtgaaagtgtcgcttccactgtttctgctcaggaggatgaagatattgaagcctccaatgaagaagaaaatccagaagacagcgaaggtgcagaaaatagttctgatacagaaagtgctccttctccttcaccagttgaagctgtcaagcccagcgaggacagtcctgaaaatgctacttctcgaggaaacacagaacctgcggttgagcttgagcccaccacggaaactgcacccagtacatctccctccttagcagttccaagtacaaaaccagctgaagatgaaagtgtggagacccaggtgaatgacagcatcagtgctgagacagcagagcagatggatgtagatcagcaggagcacagtgctgaagagggttctgtttgtgatcccccacccgctaccaaagctgactctgtggacgttgaagtgagggtgccagaaaaccatgcatctaaagttgaaggtgataataccaaagaaagagacttggatagagccagtgagaaggtggaacctagagatgaagatttggtggtagctcagcaaataaatgcccaaaggcccgagccccagtcagacaatgattccagtgccacgtgcagcgctgatgaggatgtggatggagagccagagaggcagagaatgtttcctatggactcaaagccttcactgttaaaccccactggatctatactcgtctcatctccgttaaaaccaaatccactggatctgccacagcttcagcatcgagctgctgttatcccaccaatggtatcctgcaccccatgtaacataccaattggaaccccagtgagcggctatgctctctaccagcgacacattaaagcaatgcatgagtcagcactcctggaggagcagcggcagagacaagaacagatagatttggaatgtagaagttctacaagtccatgtggcacatccaagagtccaaacagagagtgggaagtccttcagcctgctccacatcaagtgataactaatctccctgaaggcgttcggcttccgacaactcgaccaaccaggccaccgccccctctcatcccgtcatccaaaagcaacgtgggatccgtgccattgtgaagaacagagaaaatgcatgtaaaattccttgcatataacaggcactttatanatggcagctagagttagaattttaactcaatgaacacagatacaaggagccttttaactgggagcaaagagaattaaactctaagtagagcacctaagtgcatgtctgtgtttgaacacatttcatcacatttataataaccctgagggattaggaaggggttcagttggagagagagcagcacttggtagaagaaacgtgtgtctgggggtcagacacacctggttcaaatcccagcagcactacttctagccttgtgccacaatgcacgtgatcgggatcctctagat

SEQ ID NO: 448598 - DNA, 3025 bp, Homo sapiens
gggttgagtcaagatggcggccaaggtggcgaagcagcagccgcggcggcggcggcggctggagtgagcgtccgactcgccgcgccgaacgaggtcccggtgtagggccgcgcgccgtggccgcgtcccactcctcaggccggggcgcacgtcggctcccacgcttagccagctcccggtggtttcctagaaacatgattgtttattggcattgatctcacagtctggtgaggacttctttactgataatgtcaagttcaggttatcctcccaaccaaggagcattcagcacagaacaaagtcgttatcctcctcactctgtccagtatacatttcccaacacccgccaccagcaggagttcgcagtccctgattatcgttcctctcatcttgaagtgagtcaggcatcacagcttttgcagcaacagcagcagcaacagcttcgaaggcgaccttccttgctttcagaatttcacccaggttctgacaggcctcaagaaaggagaactagttatgaaccgtttcatccaggcccatccccagtggatcatgattcactggaatcgaagcgaccacgtctggaacaggtttctgattctcattttcagcgtgtcagtgctgcggttttgcctttagtgcacccgctgccagaagggctgagggcttctgcagatgctaagaaggatccagcattcggaggcaaacatgaagctccatcctctccaatttcggggcaaccatgtggagatgatcaaaatgcttcaccttcaaaactctcaaaggaagagttaatacagagtatggatcgtgtagatcgagaaattgcaaaagtagaacagcagatccttaaactgaaaaagaaacaacaacagcttgaagaagaggcagctaaacctcctgagcctgagaagcccgtgtcccctcctcctgtggagcagaaacaccgcagtattgtccaaattatttatgatgagaatcggaaaaaagcagaagaagctcataaaatttttgaaggtcttggcccaaaagttgaactgccactgtataaccagccatcagataccaaggtgtaccatgagaacatcaagacaaaccaggtgatgaggaaaaaactcattttattttttaaaagaagaaatcatgcaagaaaacaaagggaacaaaaaatctgccagcgttatgatcagctcatggaggcatgggagaaaaaagtggacagaatagaaaataatcctcggaggaaagctaaagaaagcaaaacaagggaatactatgaaaagcagtttccagaaattcgaaaacaaagagaacagcaagaaagatttcagcgagttgggcagaggggagctggtctttcagccaccattgctaggagtgagcatgagatttctgaaattattgatgggctctctgagcaggagaataatgagaaacaaatgcggcagctctctgtgattccacctatgatgtttgatgcagaacaaagacgagtcaagttcattaacatgaatgggcttatggaggaccctatgaaagtgtataaagataggcagtttatgaatgtttggactgaccatgaaaaggagatctttaaggacaagtttatccagcatccaaaaaactttggactaattgcatcatacttggagaggaagagtgttcctgattgtgttttgtattactatttaaccaagaaaaatgagaattataaagccctcgtcagaaggaattatgggaaacgcagaggcagaaaccagcaaattgctcgaccctcgcaagaagaaaaagtagaagaaaaagaagaggataaagcagaaaaaacagaaaaaaaagaagaagaaaagaaagatgaagaggaaaaagatgaaaaagaagactccaaagaaaataccaaggaaaaggacaagatagatggtacagcagaagaaactgaggaaagagagcaagccacaccccgggggcgaaagactgccaacagtcagggccgccgtaagggccggatcaccaggtccatgacaaacgaagctgcagctgccagtgctgcagccgcagcggctactgaagagcccccaccacctctgccaccgccaccagaacccatttctacagagcctgtggagacctctcgatggacagaagaagaaatggaagttgctaaaaaaggtctagtagaacatggtcgtaactgggcagcaattgctaaaatggtgggaacgaaaagtgaagctcaatgtaaaaacttctattttaactataaaaggcgacacaatcttgacaacctcttacagcagcataaacagaaaacttcacgaaaacctcgtgaagagcgagatgtgtctcaatgtgaaagtgtcgcttccactgtttctgctcaggaggatgaagatattgaagcctccaatgaagaagaaaatccagaagacagcgaaggtgcagaaaatagttctgatacagaaagtgctccttctccttcaccagttgaagctgtcaagcccagcgaggacagtcctgaaaatgctacttctcgaggaaacacagaacctgcggttgagcttgagcccaccacggaaactgcacccagtacatctccctccttagcagttccaagtacaaaaccagctgaagatgaaagtgtggagacccaggtgaatgacagcatcagtgctgagacagcagagcagatggatgtagatcagcaggagcacagtgctgaagagggttctgtttgtgatcccccacccgctaccaaagctgactctgtggacgttgaagtgagggtgccagaaaaccatgcatctaaagttgaaggtgataataccaaagaaagagacttggatagagccagtgagaaggtggaacctagagatgaagatttggtggtagctcagcaaataaatgcccaaaggcccgagccccagtcagacaatgattccagtggtgaataagcaactttctacagttttgcaccacggcgagcaccaccaatacatgcagcaccaccaatacaggcagcaccaccaataca

SEQ ID NO: 448599 - DNA, 2004 bp, Homo sapiens
gggttgagtcaagatggcggccaaggtggcgaagcagcagccgcggcggcggcggcggctggagtgagcgtccgactcgccgcgccgaacgaggtcccggtgtagggccgcgcgccgtggccgcgtcccactcctcaggccggggcgcacgtcggctcccacgcttagccagctcccggtggtttcctagaaacatgattgtttattggcattgatctcacagtctggtgaggacttctttactgataatgtcaagttcaggttatcctcccaaccaaggagcattcagcacagaacaaagtcgttatcctcctcactctgtccagtatacatttcccaacacccgccaccagcaggagttcgcagtccctgattatcgttcctctcatcttgaagtgagtcaggcatcacagcttttgcagcaacagcagcagcaacagcttcgaaggcgaccttccttgctttcagaatttcacccaggttctgacaggcctcaagaaaggagaactagttatgaaccgtttcatccaggcccatccccagtggatcatgattcactggaatcgaagcgaccacgtctggaacaggtttctgattctcattttcagcgtgtcagtgctgcggttttgcctttagtgcacccgctgccagaagggctgagggcttctgcagatgctaagaaggatccagcattcggaggcaaacatgaagctccatcctctccaatttcggggcaaccatgtggagatgatcaaaatgcttcaccttcaaaactctcaaaggaagagttaatacagagtatggatcgtgtagatcgagaaattgcaaaagtagaacagcagatccttaaactgaaaaagaaacaacaacagcttgaagaagaggcagctaaacctcctgagcctgagaagcccgtgtcccctcctcctgtggagcagaaacaccgcagtattgtccaaattatttatgatgagaatcggaaaaaagcagaagaagctcataaaatttttgaaggtcttggcccaaaagttgaactgccactgtataaccagccatcagataccaaggtgtaccatgagaacatcaagacaaaccaggtgatgaggaaaaaactcattttattttttaaaagaagaaatcatgcaagaaaacaaagggaacaaaaaatctgccagcgttatgatcagctcatggaggcatgggagaaaaaagtggacagaatagaaaataatcctcggaggaaagctaaagaaagcaaaacaagggaatactatgaaaagcagtttccagaaattcgaaaacaaagagaacagcaagaaagatttcagcgagttgggcagaggggagctggtctttcagccaccattgctaggagtgagcatgagatttctgaaattattgatgggctctctgagcaggagaataatgagaaacaaatgcggcagctctctgtgattccacctatgatgtttgatgcagaacaaagacgagtcaagttcattaacatgaatgggcttatggaggaccctatgaaagtgtataaagataggcagtttatgaatgtttggactgaccatgaaaaggagatctttaaggacaagtttatccagcatccaaaaaactttggactaattgcatcatacttggagaggaagagtgttcctgattgtgttttgtattactatttaaccaagaaaaatgagaattataaagccctcgtcagaaggaattatgggaaacgcagaggcagaaaccagcaaattgctcgaccctcgcaagaagaaaaagtagaagaaaaagaagaggataaagcagaaaaaacagaaaaaaaagaagaagaaaagaaagatgaagaggaaaaagatgaaaaagaagactccaaagaaaataccaaggaaaagtagaagaaaaagaagaggataaagcagaaaaaacagaaaaaaaagaagaagaaaagaaagatgaagaggaaaaagatgaaaaagaagactccaaaaaaaaaaa

SEQ ID NO: 448600 - DNA, 1475 bp, Homo sapiens
gggttgagtcaagatggcggccaaggtggcgaagcagcagccgcggcggcggcggcggctggagtgagcgtccgactcgccgcgccgaacgaggtcccggtgtagggccgcgcgccgtggccgcgtcccactcctcaggccggggcgcacgtcggctcccacgcttagccagctcccggtggtttcctagaaacatgattgtttattggcattgatctcacagtctggtgaggacttctttactgataatgtcaagttcaggttatcctcccaaccaaggagcattcagcacagaacaaagtcgttatcctcctcactctgtccagtatacatttcccaacacccgccaccagcaggagttcgcagtccctgattatcgttcctctcatcttgaagtgagtcaggcatcacagcttttgcagcaacagcagcagcaacagcttcgaaggcgaccttccttgctttcagaatttcacccaggttctgacaggcctcaagaaaggagaactagttatgaaccgtttcatccaggcccatccccagtggatcatgattcactggaatcgaagcgaccacgtctggaacaggtttctgattctcattttcagcgtgtcagtgctgcggttttgcctttagtgcacccgctgccagaagggctgagggcttctgcagatgctaagaaggatccagcattcggaggcaaacatgaagctccatcctctccaatttcggggcaaccatgtggagatgatcaaaatgcttcaccttcaaaactctcaaaggaagagttaatacagagtatggatcgtgtagatcgagaaattgcaaaagtagaacagcagatccttaaactgaaaaagaaacaacaacagcttgaagaagaggcagctaaacctcctgagcctgagaagcccgtgtcccctcctcctgtggagcagaaacaccgcagtattgtccaaattatttatgatgagaatcggaaaaaagcagaagaagctcataaaatttttgaaggtcttggcccaaaagttgaactgccactgtataaccagccatcagataccaaggtgtaccatgagaacatcaagacgtaagtattgatcatctttggagttcttcaattaaagaccgtatattctataaagagatcatttttgttatctgctgacattattataatatattgtaggtatgttttagatttgtgtaatttgctgtcgttttattatatgttatcttcctctggcttcttgggggttggggtaacagctttgagtttccgaggccaaaaaatgaaataaattattgcataaaactagctggttttataatctgctagtaaaaaaggtggatacttaacattgaaatggcttaccttgaggcttgaattttttgcctcctgttttgtctttttttcagtggagtacctgcaaggcgcatgatgaagtaagataatgaagctttttcatttaaga

SEQ ID NO: 448601 - DNA, 738 bp, Homo sapiens
  misc_feature (73)..(73): n is a, c, g, or t
tttttatttttattttttagatggagtctcactctgtcgcccaggcaggagtgcagcagcgtgagctcagctnactgcaacctctgtctcccacactcaagcgattcccctgcctaggcctcccaaagtgctgggattacaggcatgagccactgcacccggcccagaattaaaatcttaaaggatgcttcctcttagttttttttttaaactctatctaatgaaaatttgtgttgtttggttatgaaataaatctgattaattctctttgagctcttggtccatgagaccttcatggattaattggttaccctacagaatctgcaagcaaagcttagtagcctgtgttatctccagtggttaatcactgctgggtgtggtgtgcagcacatgcttgactctttctttctggatctcttagcaacagcttgaagaagaggcagctaaacctcctgagcctgagaagcccgtgtcccctcctcctgtggagcagaaacaccgcagtattgtccaaattatttatgatgagaatcgggtaagctcataccatctctggcagcacaggcttcctgagtaggtgggactgcaggcatgtgccaccatccccagctaatttttgtatttttagtagagatggggttctgccatattggtcaggctggtcttgaactcctgacctcaagtgatccaccttcttcggcctcccaaagtgctgggattacaggcatgagccaccac

SEQ ID NO: 448602 - DNA, 446 bp, Homo sapiens
cccagggggagtcctcattctgacctcaaagaaaggactgtattgtctggctccataatgcagggtaaactttctgcttgttttgcatttttatttataactgcctccctggcaaaatagtttgacattaatttacagtgtatttctgcttttcaagttattttcccttttgaaatattaaagtcttggttattacttttctgcctctgagctacataatttattggaagatgatagttgcttaatcttttaatatagagatatctttattatgcaagaaccattctgtgactattatgaatgatgcattaatatcatatctcaagcaaccctaaagaaataatgattgataaatactgatttgaggatctactgtaaacagaaagttaattagaaactacaagatgtcaaggcattattttaaattatgttaaaatatatgtaac

SEQ ID NO: 448603 - DNA, 432 bp, Homo sapiens
gaagtaccctaagagtgattggcgagagagaaaaaatttttgaagactgatgtttgctatgctaagcagaagtttgaaataagcatcagcttgaaagctgtggtttgaaagggagttgaatatttcaaccccacaaatagtatttgtgacaaatatgtatacaggcttacgtgaatgagaaatttaaaatagaaatgttcattgttggtttcatcttacattttttaattagtgatttaaaaattcaggaatgactgagagaggtaacatgttgtaaactaggaaatggactagtttaaaatcatttttctttccttttaaaagtccttcagcctgctccacatcaagtgataactaatctccctgaaggcgttcggcttccgacaactcgaccaaccaggccaccgccccctctcatcccgtcatccaaaa

SEQ ID NO: 448604 - DNA, 670 bp, Homo sapiens
tttcttgttgcttttatggaagagagtttttggaagtccttattactttgctgtatttgctgataccactctccatagcatttttagtcggaatgaatattaataatagtagcttacattttgattgcaacatataagtgctttatttatgtaatttattaatagtaaatactatttacatgtaatgtatggtaattttagaagacatatcctactccctttaaaattttttttatatttaagcaatctacgatgaagattttcttgctttacaaaaactattcttggttttgggtagaaggggtataattttttttttttttaaacagaaatgggaatgctgactttgtgaaattgaccttgtgaaaaaaacaatgtttgcttaatctttaaatttttttttgtttttttcttagggaacaccaggcacttatttgacttctcataatcaggcttcctacactcaagaaacacccaagccgtcagtgggatctatctctcttggactgccacggcaacaggaatctgccaaatcaggtcagtgagttaatacagtcataatgcatctacgtttgtagcatcacagccagtaatttagtactggattgtttcatgtttctctgcctttccacagctactttgccctacatcaagcaggaagaattttctc

SEQ ID NO: 448605 - DNA, 177 bp, Homo sapiens
cgcggctccgcgggctggggggagggagaggggttgagtcaagatggcggccaaggtggcgaagcagcagccgcggcggcggcggcggctggagtgagcgtccgactcgccgcgccgaacgaggtcccggtgtagggccgcgcgccgtggccgcgtcccactcctcaggccggggcg

SEQ ID NO: 448606 - DNA, 294 bp, Homo sapiens
gccggtccgttatggtggtgctgactctgtggacgttgaagtgagggtgccagaaaaccatgcatctaaagttgaaggtgataataccaaagaaagagacttggatagagccagtgagaaggtggaacctagagatgaagatttggtggtagctcagcaaataaatgcccaaaggcccgagccccagtcagacaatgattccagtggtgaataagcaactttctacagttttgcaccacggcgagcaccaccaatacatgcagcaccaccaatacaggcagcaccaccaataca

SEQ ID NO: 448607 - DNA, 673 bp, Homo sapiens
gggttgagtcaagatggcggccaaggtggcgaagcagcagccgcggcggcggcggcggctggagtgagcgtccgactcgccgcgccgaacgaggtcccggtgtagggccgcgcgccgtggccgcgtcccactcctcaggccggggcgcacgtcggctcccacgcttagccagctcccgagtttcactcttgttgcccaggctggagtgcaatggcacgatctcggctcaccgcaacctctgcctcttgggttcaagcgattctcctgcctcagcctctcgagtagctgggattacaggcatgtgccaccacgcctggctaatttttatattttcagtagagacggggtttcaccatgttggtcaggctggtctcgaactctcaacctcaggtgatccacccgcctcagcctcccaaagtgctgggattacaggtgtgagccaccgcacccggcccatatagagaaatactgtttagcaatagaaagaaccataaattgatgagaataattgccaagatgtttttttttttttttttttttgagacggagtctcactctgttgcccaggctagagggtagtggcgcaatctcggctcactgcaagctctgcctcctgggttcatgccattctcccgcctcagcctcctgagtagctggaactacaggcgcccgc

SEQ ID NO: 448608 - DNA, 8630 bp, Homo sapiens
gggttgagtcaagatggcggccaaggtggcgaagcagcagccgcggcggcggcggcggctggagtgagcgtccgactcgccgcgccgaacgaggtcccggtgtagggccgcgcgccgtggccgcgtcccactcctcaggccggggcgcacgtcggctcccacgcttagccagctcccgagtttcactcttgttgcccaggctggagtgcaatggcacgatctcggctcaccgcaacctctgcctcttgggttcaagcgattctcctgcctcagcctctcgagtagctgggattacaggtggtttcctagaaacatgattgtttattggcattgatctcacagtctggtgaggacttctttactgataatgtcaagttcaggttatcctcccaaccaaggagcattcagcacagaacaaagtcgttatcctcctcactctgtccagtatacatttcccaacacccgccaccagcaggagttcgcagtccctgattatcgttcctctcatcttgaagtgagtcaggcatcacagcttttgcagcaacagcagcagcaacagcttcgaaggcgaccttccttgctttcagaatttcacccaggttctgacaggcctcaagaaaggagaactagttatgaaccgtttcatccaggcccatccccagtggatcatgattcactggaatcgaagcgaccacgtctggaacaggtttctgattctcattttcagcgtgtcagtgctgcggttttgcctttagtgcacccgctgccagaagggctgagggcttctgcagatgctaagaaggatccagcattcggaggcaaacatgaagctccatcctctccaatttcggggcaaccatgtggagatgatcaaaatgcttcaccttcaaaactctcaaaggaagagttaatacagagtatggatcgtgtagatcgagaaattgcaaaagtagaacagcagatccttaaactgaaaaagaaacaacaacagcttgaagaagaggcagctaaacctcctgagcctgagaagcccgtgtcccctcctcctgtggagcagaaacaccgcagtattgtccaaattatttatgatgagaatcggaaaaaagcagaagaagctcataaaatttttgaaggtcttggcccaaaagttgaactgccactgtataaccagccatcagataccaaggtgtaccatgagaacatcaagacaaaccaggtgatgaggaaaaaactcattttattttttaaaagaagaaatcatgcaagaaaacaaagggaacaaaaaatctgccagcgttatgatcagctcatggaggcatgggagaaaaaagtggacagaatagaaaataatcctcggaggaaagctaaagaaagcaaaacaagggaatactatgaaaagcagtttccagaaattcgaaaacaaagagaacagcaagaaagatttcagcgagttgggcagaggggagctggtctttcagccaccattgctaggagtgagcatgagatttctgaaattattgatgggctctctgagcaggagaataatgagaaacaaatgcggcagctctctgtgattccacctatgatgtttgatgcagaacaaagacgagtcaagttcattaacatgaatgggcttatggaggaccctatgaaagtgtataaagataggcagtttatgaatgtttggactgaccatgaaaaggagatctttaaggacaagtttatccagcatccaaaaaactttggactaattgcatcatacttggagaggaagagtgttcctgattgtgttttgtattactatttaaccaagaaaaatgagaattataaagccctcgtcagaaggaattatgggaaacgcagaggcagaaaccagcaaattgctcgaccctcgcaagaagaaaaagtagaagaaaaagaagaggataaagcagaaaaaacagaaaaaaaagaagaagaaaagaaagatgaagaggaaaaagatgaaaaagaagactccaaagaaaataccaaggaaaaggacaagatagatggtacagcagaagaaactgaggaaagagagcaagccacaccccgggggcgaaagactgccaacagtcagggccgccgtaagggccggatcaccaggtccatgacaaacgaagctgcagctgccagtgctgcagccgcagcggctactgaagagcccccaccacctctgccaccgccaccagaacccatttctacagagcctgtggagacctctcgatggacagaagaagaaatggaagttgctaaaaaaggtctagtagaacatggtcgtaactgggcagcaattgctaaaatggtgggaacgaaaagtgaagctcaatgtaaaaacttctattttaactataaaaggcgacacaatcttgacaacctcttacagcagcataaacagaaaacttcacgaaaacctcgtgaagagcgagatgtgtctcaatgtgaaagtgtcgcttccactgtttctgctcaggaggatgaagatattgaagcctccaatgaagaagaaaatccagaagacagcgaaggtgcagaaaatagttctgatacagaaagtgctccttctccttcaccagttgaagctgtcaagcccagcgaggacagtcctgaaaatgctacttctcgaggaaacacagaacctgcggttgagcttgagcccaccacggaaactgcacccagtacatctccctccttagcagttccaagtacaaaaccagctgaagatgaaagtgtggagacccaggtgaatgacagcatcagtgctgagacagcagagcagatggatgtagatcagcaggagcacagtgctgaagagggttctgtttgtgatcccccacccgctaccaaagctgactctgtggacgttgaagtgagggtgccagaaaaccatgcatctaaagttgaaggtgataataccaaagaaagagacttggatagagccagtgagaaggtggaacctagagatgaagatttggtggtagctcagcaaataaatgcccaaaggcccgagccccagtcagacaatgattccagtgccacgtgcagcgctgatgaggatgtggatggagagccagagaggcagagaatgtttcctatggactcaaagccttcactgttaaaccccactggatctatactcgtctcatctccgttaaaaccaaatccactggatctgccacagcttcagcatcgagctgctgttatcccaccaatggtatcctgcaccccatgtaacataccaattggaaccccagtgagcggctatgctctctaccagcgacacattaaagcaatgcatgagtcagcactcctggaggagcagcggcagagacaagaacagatagatttggaatgtagaagttctacaagtccatgtggcacatccaagagtccaaacagagagtgggaagtccttcagcctgctccacatcaagtgataactaatctccctgaaggcgttcggcttccgacaactcgaccaaccaggccaccgccccctctcatcccgtcatccaaaaccacagtggcttcagaaaaaccatcttttataatgggaggctccatctcacagggaacaccaggcacttatttgacttctcataatcaggcttcctacactcaagaaacacccaagccgtcagtgggatctatctctcttggactgccacggcaacaggaatctgccaaatcagctactttgccctacatcaagcaggaagaattttctccccgaagccaaaactcacaacctgagggtctgttggtcagggcccaacatgaaggtgtagtcagaggtaccgcaggagccatacaagaaggaagtataactcggggaactccaaccagcaaaatttcagtggagagcattccatccctacggggctctatcactcagggcaccccggctctgccccagactggcataccaacagaggctttggtgaaggggtccatttcgagaatgcccattgaagacagcagtcctgagaaaggcagagaggaagctgcatccaaaggccatgttatttatgaaggcaaaagtggacatatcttgtcatatgataatattaagaatgcccgagaagggactaggagtccaagaacagctcatgaaatcagtttaaagagaagctatgaatcagtggaaggaaatataaagcaagggatgtcaatgagggagtctcctgtatcagcaccgttagaggggctgatatgccgagcattacccagggggagtcctcattctgacctcaaagaaaggactgtattgtctggctccataatgcaggggacaccaagagcaacaactgaaagctttgaagatggccttaaatatcccaaacaaattaaaagggaaagtcctcccatacgagcatttgaaggtgccattaccaaaggaaaaccatatgatggcatcaccaccatcaaagaaatggggcgttccattcatgagattccaaggcaagatattttaactcaggaaagtcggaaaactccagaagtggtccagagcacacggccgataattgagggttccatttcccagggcacaccaataaagtttgacaacaactcaggtcaatctgccatcaaacacaatgtcaaatccttaatcacggggcctagcaaactatcccgtggaatgcctccgctggaaattgtgccagagaacataaaagtggtagaacggggaaaatatgaggatgtgaaagcaggcgagaccgtgcgttcccggcacacgtcagtggtaagctctggcccctccgttcttaggtccacactgcatgaagctcccaaagcacaactgagccctgggatttatgatgacaccagtgcacggaggacccctgtgagttatcaaaacaccatgtccagaggctcacccatgatgaacagaacttctgatgttacaatttcttctaacaagtctaccaatcatgaaaggaaatcgacactgacccctacccagagggaaagtatcccagcgaagtctccagtgcctggggtggaccctgtcgtgagccacagtccgtttgatccccatcacagaggcagcactgcaggcgaggtttatcggagccacctgcccacgcacttggatccagccatgccttttcacagggctttggatcctgcagcggctgcttacctgtttcagagacagctttcaccaactccaggttacccaagtcagtatcagctttacgcaatggagaacacaagacagacaatcttaaatgattacattacctcacaacagatgcaagtgaacttgcgtccagatgtggccagaggactctccccaagagagcagccactgggtctcccatacccagcaacgagaggaatcattgacctgaccaatatgcctccaacaattttagtgcctcatccagggggaacaagcactcctcccatggacagaatcacttatattcctggtacacagattactttccctcccaggccgtacaactctgcttccatgtctccaggacacccaacacaccttgcagctgctgcaagtgctgagagggaacgggaacgggagcgggagaaggagcgggagcgggaacggattgctgcagcttcctccgacctctacctgcggccaggctcagaacagcctggccgacctggcagtcatggatatgttcgctccccttccccttcagtaagaactcaggagaccatgttgcaacagagacccagtgttttccaaggaaccaatggaaccagtgtaatcacacctttggatccaactgctcagctacgaatcatgccactgcctgctgggggcccttcaataagccaaggcctgccagcctcccgttacaacactgctgcggatgccctggctgctcttgtggatgctgcagcttctgcaccccagatggatgtgtccaaaacaaaagagagtaagcatgaagctgccaggttagaagaaaatttgagaagcaggtcagcagcagttagtgaacagcagcagctagagcagaaaaccctggaggtggagaagagatctgttcagtgtttatacacttcttcagcctttccaagtggcaagccccagcctcattcttcagtagtttattctgaggctgggaaagataaagggcctcctccaaaatccagatatgaggaagagctaaggaccagagggaagactaccattactgcagctaacttcatagacgtgatcatcacccggcaaattgcctcggacaaggatgcgagggaacgtggctctcaaagttcagactcttctagtagcttatcttctcacaggtatgaaacacctagcgatgctattgaggtgataagtcctgccagctcacctgcgccaccccaggagaaactgcagacctatcagccagaggttgttaaggcaaatcaagcggaaaatgatcctaccagacaatatgaaggaccattacatcactatcgaccacagcaggaatcaccatctccccaacaacagctgcccccttcttcacaggcagagggaatggggcaagtgcccaggacccatcggctgatcacacttgctgatcacatctgtcaaattatcacacaagattttgctagaaatcaagtttcctcgcagactccccagcagcctcctacttctacattccagaactcaccttctgctttggtatctacacctgtgaggactaaaacatcaaaccgttacagcccagaatcccaggctcagtctgtccatcatcaaagaccaggttcaagggtctctccagaaaatcttgtggacaaatccaggggaagtaggcctggaaaatccccagagaggagtcacgtctcttcggagccctacgagcccatctccccaccccaggttccggttgtgcatgagaaacaggacagcttgctgctcttgtctcagaggggcgcagagcctgcagagcagaggaatgatgcccgctcaccagggagtataagctacttgccttcattcttcaccaagcttgaaaatacatcacccatggttaaatcaaagaagcaggagatttttcgtaagttgaactcctctggtggaggtgactctgatatggcagctgctcagccaggaactgagatctttaatctgccagcagttactacgtcaggctcagttagctctagaggccattcttttgctgatcctgccagtaatcttgggctggaagacattatcaggaaggctctcatgggaagctttgatgacaaagttgaggatcatggagttgtcatgtcccagcctatgggagtagtgcctggtactgccaacacctcagttgtgaccagtggtgagacacgaagagaggaaggggacccatcacctcattcaggaggagtttgcaaaccaaagctgatcagcaagtcaaacagcaggaaatctaagtctcctatacctgggcaaggctacttaggaacggaacggccctcttcagtctcctctgtacattcagaaggggattaccataggcagacgccagggtgggcctgggaagacaggccctcttcaacaggctcaactcagtttccttataaccctctgactatgcggatgctcagcagtactccaccaacaccgattgcatgtgctccctctgcggtgaaccaagcagctcctcaccaacagaacaggatctgggagcgagagcctgccccactgctctcagcacagtacgagaccctgtcggatagtgatgactgaactgcacaaagtgaggggaacagggtgcaggagagggatctctagtttttgtggtttaatttttagtagcaggtcaaaaacctgccctcctgtgacttattccctgagacttttcaggagagccagcccacagatgatgaagaaatgatggaagttcatttggagagtcaaatgggaaaaaaacaaacaaaaaactgcctttgatacaggcaattcagtggactataataatagtggagggttgagatgtagagtttttaaaaagtgaacagttgctgttcttacatctgtaaagaaaaccataatgtctttaaatcactcttctgtaaatagatgacctttttgcagtgtatatccccttgctgtagtatctggtgtacttatgttcaaatcagcgcatcaactttgggggtgatttttaaaaatctttttgtctatctatctttttaaccctagccttctaaacaacctcatacagcccagttacataatgttggctgtcacgggcattgtacttttatctgatattgtttcctctaaattcagctttccagtgatgtttaaaatcttgtgaaaatgtttagatttttaacacagaccctgtcataaaatctgtacattagggtcaaaaggtaaaagtaacaaattctgccatattgtaaatttccagtgcaggctttaatttttttttttcattagtagcactgaaaaaatattactgcatgggtatgttctagttcagtttataaagttttaaaggcttatttgaggcatacctcactgttacgcacactggtaatttaaccatgcccctaagtattccttttctcctgcatttgatgcagcccaacaaagcttttgttttgaaataaatttgactaccctgtccata

SEQ ID NO: 448609 - DNA, 7735 bp, Homo sapiens
tctcctagggagctactactgctgtctaaacctctgtgaaatggtagcccaaaaaagccatcaaaggatcacaggagataaaacaccaatcagtgtaagctgttaaagatgactgtgattaaataaccaaatatcaaatatccaataaggtaattaaatttagattaaaaaaaaactaagcaccagctgtacatacattattaaatgttctaatctctttcctgattcatagccatattctacatgatgatcaaagactgtccactgtataaccagccatcagataccaaggtgtaccatgagaacatcaagacaaaccaggtgatgaggaaaaaactcattttattttttaaaagaagaaatcatgcaagaaaacaaagggaacaaaaaatctgccagcgttatgatcagctcatggaggcatgggagaaaaaagtggacagaatagaaaataatcctcggaggaaagctaaagaaagcaaaacaagggaatactatgaaaagcagtttccagaaattcgaaaacaaagagaacagcaagaaagatttcagcgagttgggcagaggggagctggtctttcagccaccattgctaggagtgagcatgagatttctgaaattattgatgggctctctgagcaggagaataatgagaaacaaatgcggcagctctctgtgattccacctatgatgtttgatgcagaacaaagacgagtcaagttcattaacatgaatgggcttatggaggaccctatgaaagtgtataaagataggcagtttatgaatgtttggactgaccatgaaaaggagatctttaaggacaagtttatccagcatccaaaaaactttggactaattgcatcatacttggagaggaagagtgttcctgattgtgttttgtattactatttaaccaagaaaaatgagaattataaagccctcgtcagaaggaattatgggaaacgcagaggcagaaaccagcaaattgctcgaccctcgcaagaagaaaaagtagaagaaaaagaagaggataaagcagaaaaaacagaaaaaaaagaagaagaaaagaaagatgaagaggaaaaagatgaaaaagaagactccaaagaaaataccaaggaaaaggacaagatagatggtacagcagaagaaactgaggaaagagagcaagccacaccccgggggcgaaagactgccaacagtcagggccgccgtaagggccggatcaccaggtccatgacaaacgaagctgcagctgccagtgctgcagccgcagcggctactgaagagcccccaccacctctgccaccgccaccagaacccatttctacagagcctgtggagacctctcgatggacagaagaagaaatggaagttgctaaaaaaggtctagtagaacatggtcgtaactgggcagcaattgctaaaatggtgggaacgaaaagtgaagctcaatgtaaaaacttctattttaactataaaaggcgacacaatcttgacaacctcttacagcagcataaacagaaaacttcacgaaaacctcgtgaagagcgagatgtgtctcaatgtgaaagtgtcgcttccactgtttctgctcaggaggatgaagatattgaagcctccaatgaagaagaaaatccagaagacagcgaaggtgcagaaaatagttctgatacagaaagtgctccttctccttcaccagttgaagctgtcaagcccagcgaggacagtcctgaaaatgctacttctcgaggaaacacagaacctgcggttgagcttgagcccaccacggaaactgcacccagtacatctccctccttagcagttccaagtacaaaaccagctgaagatgaaagtgtggagacccaggtgaatgacagcatcagtgctgagacagcagagcagatggatgtagatcagcaggagcacagtgctgaagagggttctgtttgtgatcccccacccgctaccaaagctgactctgtggacgttgaagtgagggtgccagaaaaccatgcatctaaagttgaaggtgataataccaaagaaagagacttggatagagccagtgagaaggtggaacctagagatgaagatttggtggtagctcagcaaataaatgcccaaaggcccgagccccagtcagacaatgattccagtgccacgtgcagcgctgatgaggatgtggatggagagccagagaggcagagaatgtttcctatggactcaaagccttcactgttaaaccccactggatctatactcgtctcatctccgttaaaaccaaatccactggatctgccacagcttcagcatcgagctgctgttatcccaccaatggtatcctgcaccccatgtaacataccaattggaaccccagtgagcggctatgctctctaccagcgacacattaaagcaatgcatgagtcagcactcctggaggagcagcggcagagacaagaacagatagatttggaatgtagaagttctacaagtccatgtggcacatccaagagtccaaacagagagtgggaagtccttcagcctgctccacatcaagtgataactaatctccctgaaggcgttcggcttccgacaactcgaccaaccaggccaccgccccctctcatcccgtcatccaaaaccacagtggcttcagaaaaaccatcttttataatgggaggctccatctcacagggaacaccaggcacttatttgacttctcataatcaggcttcctacactcaagaaacacccaagccgtcagtgggatctatctctcttggactgccacggcaacaggaatctgccaaatcagctactttgccctacatcaagcaggaagaattttctccccgaagccaaaactcacaacctgagggtctgttggtcagggcccaacatgaaggtgtagtcagaggtaccgcaggagccatacaagaaggaagtataactcggggaactccaaccagcaaaatttcagtggagagcattccatccctacggggctctatcactcagggcaccccggctctgccccagactggcataccaacagaggctttggtgaaggggtccatttcgagaatgcccattgaagacagcagtcctgagaaaggcagagaggaagctgcatccaaaggccatgttatttatgaaggcaaaagtggacatatcttgtcatatgataatattaagaatgcccgagaagggactaggagtccaagaacagctcatgaaatcagtttaaagagaagctatgaatcagtggaaggaaatataaagcaagggatgtcaatgagggagtctcctgtatcagcaccgttagaggggctgatatgccgagcattacccagggggagtcctcattctgacctcaaagaaaggactgtattgtctggctccataatgcaggggacaccaagagcaacaactgaaagctttgaagatggccttaaatatcccaaacaaattaaaagggaaagtcctcccatacgagcatttgaaggtgccattaccaaaggaaaaccatatgatggcatcaccaccatcaaagaaatggggcgttccattcatgagattccaaggcaagatattttaactcaggaaagtcggaaaactccagaagtggtccagagcacacggccgataattgagggttccatttcccagggcacaccaataaagtttgacaacaactcaggtcaatctgccatcaaacacaatgtcaaatccttaatcacggggcctagcaaactatcccgtggaatgcctccgctggaaattgtgccagagaacataaaagtggtagaacggggaaaatatgaggatgtgaaagcaggcgagaccgtgcgttcccggcacacgtcagtggtaagctctggcccctccgttcttaggtccacactgcatgaagctcccaaagcacaactgagccctgggatttatgatgacaccagtgcacggaggacccctgtgagttatcaaaacaccatgtccagaggctcacccatgatgaacagaacttctgatgttacaatttcttctaacaagtctaccaatcatgaaaggaaatcgacactgacccctacccagagggaaagtatcccagcgaagtctccagtgcctggggtggaccctgtcgtgagccacagtccgtttgatccccatcacagaggcagcactgcaggcgaggtttatcggagccacctgcccacgcacttggatccagccatgccttttcacagggctttggatcctgcagcggctgcttacctgtttcagagacagctttcaccaactccaggttacccaagtcagtatcagctttacgcaatggagaacacaagacagacaatcttaaatgattacattacctcacaacagatgcaagtgaacttgcgtccagatgtggccagaggactctccccaagagagcagccactgggtctcccatacccagcaacgagaggaatcattgacctgaccaatatgcctccaacaattttagtgcctcatccagggggaacaagcactcctcccatggacagaatcacttatattcctggtacacagattactttccctcccaggccgtacaactctgcttccatgtctccaggacacccaacacaccttgcagctgctgcaagtgctgagagggaacgggaacgggagcgggagaaggagcgggagcgggaacggattgctgcagcttcctccgacctctacctgcggccaggctcagaacagcctggccgacctggcagtcatggatatgttcgctccccttccccttcagtaagaactcaggagaccatgttgcaacagagacccagtgttttccaaggaaccaatggaaccagtgtaatcacacctttggatccaactgctcagctacgaatcatgccactgcctgctgggggcccttcaataagccaaggcctgccagcctcccgttacaacactgctgcggatgccctggctgctcttgtggatgctgcagcttctgcaccccagatggatgtgtccaaaacaaaagagagtaagcatgaagctgccaggttagaagaaaatttgagaagcaggtcagcagcagttagtgaacagcagcagctagagcagaaaaccctggaggtggagaagagatctgttcagtgtttatacacttcttcagcctttccaagtggcaagccccagcctcattcttcagtagtttattctgaggctgggaaagataaagggcctcctccaaaatccagatatgaggaagagctaaggaccagagggaagactaccattactgcagctaacttcatagacgtgatcatcacccggcaaattgcctcggacaaggatgcgagggaacgtggctctcaaagttcagactcttctagtagcttatcttctcacaggtatgaaacacctagcgatgctattgaggtgataagtcctgccagctcacctgcgccaccccaggagaaactgcagacctatcagccagaggttgttaaggcaaatcaagcggaaaatgatcctaccagacaatatgaaggaccattacatcactatcgaccacagcaggaatcaccatctccccaacaacagctgcccccttcttcacaggcagagggaatggggcaagtgcccaggacccatcggctgatcacacttgctgatcacatctgtcaaattatcacacaagattttgctagaaatcaagtttcctcgcagactccccagcagcctcctacttctacattccagaactcaccttctgctttggtatctacacctgtgaggactaaaacatcaaaccgttacagcccagaatcccaggctcagtctgtccatcatcaaagaccaggttcaagggtctctccagaaaatcttgtggacaaatccaggggaagtaggcctggaaaatccccagagaggagtcacgtctcttcggagccctacgagcccatctccccaccccaggttccggttgtgcatgagaaacaggacagcttgctgctcttgtctcagaggggcgcagagcctgcagagcagaggaatgatgcccgctcaccagggagtataagctacttgccttcattcttcaccaagcttgaaaatacatcacccatggttaaatcaaagaagcaggagatttttcgtaagttgaactcctctggtggaggtgactctgatatggcagctgctcagccaggaactgagatctttaatctgccagcagttactacgtcaggctcagttagctctagaggccattcttttgctgatcctgccagtaatcttgggctggaagacattatcaggaaggctctcatgggaagctttgatgacaaagttgaggatcatggagttgtcatgtcccagcctatgggagtagtgcctggtactgccaacacctcagttgtgaccagtggtgagacacgaagagaggaaggggacccatcacctcattcaggaggagtttgcaaaccaaagctgatcagcaagtcaaacagcaggaaatctaagtctcctatacctgggcaaggctacttaggaacggaacggccctcttcagtctcctctgtacattcagaaggggattaccataggcagacgccagggtgggcctgggaagacaggccctcttcaacaggctcaactcagtttccttataaccctctgactatgcggatgctcagcagtactccaccaacaccgattgcatgtgctccctctgcggtgaaccaagcagctcctcaccaacagaacaggatctgggagcgagagcctgccccactgctctcagcacagtacgagaccctgtcggatagtgatgactgaactgcacaaagtgaggggaacagggtgcaggagagggatctctagtttttgtggtttaatttttagtagcaggtcaaaaacctgccctcctgtgacttattccctgagacttttcaggagagccagcccacagatgatgaagaaatgatggaagttcatttggagagtcaaatgggaaaaaaacaaacaaaaaactgcctttgatacaggcaattcagtggactataataatagtggagggttgagatgtagagtttttaaaaagtgaacagttgctgttcttacatctgtaaagaaaaccataatgtctttaaatcactcttctgtaaatagatgacctttttgcagtgtatatccccttgctgtagtatctggtgtacttatgttcaaatcagcgcatcaactttgggggtgatttttaaaaatctttttgtctatctatctttttaaccctagccttctaaacaacctcatacagcccagttacataatgttggctgtcacgggcattgtacttttatctgatattgtttcctctaaattcagctttccagtgatgtttaaaatcttgtgaaaatgtttagatttttaacacagaccctgtcataaaatctgtacattagggtcaaaaggtaaaagtaacaaattctgccatattgtaaatttccagtgcaggctttaatttttttttttcattagtagcactgaaaaaatattactgcatgggtatgttctagttcagtttataaagttttaaaggcttatttgaggcatacctcactgttacgcacactggtaatttaaccatgcccctaagtattccttttctcctgcatttgatgcagcccaacaaagcttttgttttgaaataaatttgactaccctgtccata

SEQ ID NO: 448610 - DNA, 10850 bp, Homo sapiens
gggttgagtcaagatggcggccaaggtggcgaagcagcagccgcggcggcggcggcggctggagtgagcgtccgactcgccgcgccgaacgaggtcccggtgtagggccgcgcgccgtggccgcgtcccactcctcaggccggggcgcacgtcggctcccacgcttagccagctcccggtggtttcctagaaacatgattgtttattggcattgatctcacagtctggtgaggacttctttactgataatgtcaagttcaggttatcctcccaaccaaggagcattcagcacagaacaaagtcgttatcctcctcactctgtccagtatacatttcccaacacccgccaccagcaggagttcgcagtccctgattatcgttcctctcatcttgaagtgagtcaggcatcacagcttttgcagcaacagcagcagcaacagcttcgaaggcgaccttccttgctttcagaatttcacccaggttctgacaggcctcaagaaaggagaactagttatgaaccgtttcatccaggcccatccccagtggatcatgattcactggaatcgaagcgaccacgtctggaacaggtttctgattctcattttcagcgtgtcagtgctgcggttttgcctttagtgcacccgctgccagaagggctgagggcttctgcagatgctaagaaggatccagcattcggaggcaaacatgaagctccatcctctccaatttcggggcaaccatgtggagatgatcaaaatgcttcaccttcaaaactctcaaaggaagagttaatacagagtatggatcgtgtagatcgagaaattgcaaaagtagaacagcagatccttaaactgaaaaagaaacaacaacagcttgaagaagaggcagctaaacctcctgagcctgagaagcccgtgtcccctcctcctgtggagcagaaacaccgcagtattgtccaaattatttatgatgagaatcggaaaaaagcagaagaagctcataaaatttttgaaggtcttggcccaaaagttgaactgccactgtataaccagccatcagataccaaggtgtaccatgagaacatcaagacaaaccaggtgatgaggaaaaaactcattttattttttaaaagaagaaatcatgcaagaaaacaaagggaacaaaaaatctgccagcgttatgatcagctcatggaggcatgggagaaaaaagtggacagaatagaaaataatcctcggaggaaagctaaagaaagcaaaacaagggaatactatgaaaagcagtttccagaaattcgaaaacaaagagaacagcaagaaagatttcagcgagttgggcagaggggagctggtctttcagccaccattgctaggagtgagcatgagatttctgaaattattgatgggctctctgagcaggagaataatgagaaacaaatgcggcagctctctgtgattccacctatgatgtttgatgcagaacaaagacgagtcaagttcattaacatgaatgggcttatggaggaccctatgaaagtgtataaagataggcagtttatgaatgtttggactgaccatgaaaaggagatctttaaggacaagtttatccagcatccaaaaaactttggactaattgcatcatacttggagaggaagagtgttcctgattgtgttttgtattactatttaaccaagaaaaatgagaattataaagccctcgtcagaaggaattatgggaaacgcagaggcagaaaccagcaaattgctcgaccctcgcaagaagaaaaagtagaagaaaaagaagaggataaagcagaaaaaacagaaaaaaaagaagaagaaaagaaagatgaagaggaaaaagatgaaaaagaagactccaaagaaaataccaaggaaaaggacaagatagatggtacagcagaagaaactgaggaaagagagcaagccacaccccgggggcgaaagactgccaacagtcagggccgccgtaagggccggatcaccaggtccatgacaaacgaagctgcagctgccagtgctgcagccgcagcggctactgaagagcccccaccacctctgccaccgccaccagaacccatttctacagagcctgtggagacctctcgatggacagaagaagaaatggaagttgctaaaaaaggtctagtagaacatggtcgtaactgggcagcaattgctaaaatggtgggaacgaaaagtgaagctcaatgtaaaaacttctattttaactataaaaggcgacacaatcttgacaacctcttacagcagcataaacagaaaacttcacgaaaacctcgtgaagagcgagatgtgtctcaatgtgaaagtgtcgcttccactgtttctgctcaggaggatgaagatattgaagcctccaatgaagaagaaaatccagaagacagcgaaggtgcagaaaatagttctgatacagaaagtgctccttctccttcaccagttgaagctgtcaagcccagcgaggacagtcctgaaaatgctacttctcgaggaaacacagaacctgcggttgagcttgagcccaccacggaaactgcacccagtacatctccctccttagcagttccaagtacaaaaccagctgaagatgaaagtgtggagacccaggtgaatgacagcatcagtgctgagacagcagagcagatggatgtagatcagcaggagcacagtgctgaagagggttctgtttgtgatcccccacccgctaccaaagctgactctgtggacgttgaagtgagggtgccagaaaaccatgcatctaaagttgaaggtgataataccaaagaaagagacttggatagagccagtgagaaggtggaacctagagatgaagatttggtggtagctcagcaaataaatgcccaaaggcccgagccccagtcagacaatgattccagtgccacgtgcagcgctgatgaggatgtggatggagagccagagaggcagagaatgtttcctatggactcaaagccttcactgttaaaccccactggatctatactcgtctcatctccgttaaaaccaaatccactggatctgccacagcttcagcatcgagctgctgttatcccaccaatggtatcctgcaccccatgtaacataccaattggaaccccagtgagcggctatgctctctaccagcgacacattaaagcaatgcatgagtcagcactcctggaggagcagcggcagagacaagaacagatagatttggaatgtagaagttctacaagtccatgtggcacatccaagagtccaaacagagagtgggaagtccttcagcctgctccacatcaagtgataactaatctccctgaaggcgttcggcttccgacaactcgaccaaccaggccaccgccccctctcatcccgtcatccaaaaccacagtggcttcagaaaaaccatcttttataatgggaggctccatctcacagggaacaccaggcacttatttgacttctcataatcaggcttcctacactcaagaaacacccaagccgtcagtgggatctatctctcttggactgccacggcaacaggaatctgccaaatcagctactttgccctacatcaagcaggaagaattttctccccgaagccaaaactcacaacctgagggtctgttggtcagggcccaacatgaaggtgtagtcagaggtaccgcaggagccatacaagaaggaagtataactcggggaactccaaccagcaaaatttcagtggagagcattccatccctacggggctctatcactcagggcaccccggctctgccccagactggcataccaacagaggctttggtgaaggggtccatttcgagaatgcccattgaagacagcagtcctgagaaaggcagagaggaagctgcatccaaaggccatgttatttatgaaggcaaaagtggacatatcttgtcatatgataatattaagaatgcccgagaagggactaggagtccaagaacagctcatgaaatcagtttaaagagaagctatgaatcagtggaaggaaatataaagcaagggatgtcaatgagggagtctcctgtatcagcaccgttagaggggctgatatgccgagcattacccagggggagtcctcattctgacctcaaagaaaggactgtattgtctggctccataatgcaggggacaccaagagcaacaactgaaagctttgaagatggccttaaatatcccaaacaaattaaaagggaaagtcctcccatacgagcatttgaaggtgccattaccaaaggaaaaccatatgatggcatcaccaccatcaaagaaatggggcgttccattcatgagattccaaggcaagatattttaactcaggaaagtcggaaaactccagaagtggtccagagcacacggccgataattgagggttccatttcccagggcacaccaataaagtttgacaacaactcaggtcaatctgccatcaaacacaatgtcaaatccttaatcacggggcctagcaaactatcccgtggaatgcctccgctggaaattgtgccagagaacataaaagtggtagaacggggaaaatatgaggatgtgaaagcaggcgagaccgtgcgttcccggcacacgtcagtggtaagctctggcccctccgttcttaggtccacactgcatgaagctcccaaagcacaactgagccctgggatttatgatgacaccagtgcacggaggacccctgtgagttatcaaaacaccatgtccagaggctcacccatgatgaacagaacttctgatgttacaatttcttctaacaagtctaccaatcatgaaaggaaatcgacactgacccctacccagagggaaagtatcccagcgaagtctccagtgcctggggtggaccctgtcgtgagccacagtccgtttgatccccatcacagaggcagcactgcaggcgaggtttatcggagccacctgcccacgcacttggatccagccatgccttttcacagggctttggatcctgcagcggctgcttacctgtttcagagacagctttcaccaactccaggttacccaagtcagtatcagctttacgcaatggagaacacaagacagacaatcttaaatgattacattacctcacaacagatgcaagtgaacttgcgtccagatgtggccagaggactctccccaagagagcagccactgggtctcccatacccagcaacgagaggaatcattgacctgaccaatatgcctccaacaattttagtgcctcatccagggggaacaagcactcctcccatggacagaatcacttatattcctggtacacagattactttccctcccaggccgtacaactctgcttccatgtctccaggacacccaacacaccttgcagctgctgcaagtgctgagagggaacgggaacgggagcgggagaaggagcgggagcgggaacggattgctgcagcttcctccgacctctacctgcggccaggctcagaacagcctggccgacctggcagtcatggatatgttcgctccccttccccttcagtaagaactcaggagaccatgttgcaacagagacccagtgttttccaaggaaccaatggaaccagtgtaatcacacctttggatccaactgctcagctacgaatcatgccactgcctgctgggggcccttcaataagccaaggcctgccagcctcccgttacaacactgctgcggatgccctggctgctcttgtggatgctgcagcttctgcaccccagatggatgtgtccaaaacaaaagagagtaagcatgaagctgccaggttagaagaaaatttgagaagcaggtcagcagcagttagtgaacagcagcagctagagcagaaaaccctggaggtggagaagagatctgttcagtgtttatacacttcttcagcctttccaagtggcaagccccagcctcattcttcagtagtttattctgaggctgggaaagataaagggcctcctccaaaatccagatatgaggaagagctaaggaccagagggaagactaccattactgcagctaacttcatagacgtgatcatcacccggcaaattgcctcggacaaggatgcgagggaacgtggctctcaaagttcagactcttctagtagcttatcttctcacaggtatgaaacacctagcgatgctattgaggtgataagtcctgccagctcacctgcgccaccccaggagaaactgcagacctatcagccagaggttgttaaggcaaatcaagcggaaaatgatcctaccagacaatatgaaggaccattacatcactatcgaccacagcaggaatcaccatctccccaacaacagctgcccccttcttcacaggcagagggaatggggcaagtgcccaggacccatcggctgatcacacttgctgatcacatctgtcaaattatcacacaagattttgctagaaatcaagtttcctcgcagactccccagcagcctcctacttctacattccagaactcaccttctgctttggtatctacacctgtgaggactaaaacatcaaaccgttacagcccagaatcccaggctcagtctgtccatcatcaaagaccaggttcaagggtctctccagaaaatcttgtggacaaatccaggggaagtaggcctggaaaatccccagagaggagtcacgtctcttcggagccctacgagcccatctccccaccccaggttccggttgtgcatgagaaacaggacagcttgctgctcttgtctcagaggggcgcagagcctgcagagcagaggaatgatgcccgctcaccagggagtataagctacttgccttcattcttcaccaagcttgaaaatacatcacccatggttaaatcaaagaagcaggagatttttcgtaagttgaactcctctggtggaggtgactctgatatggcagctgctcagccaggaactgagatctttaatctgccagcagttactacgtcaggctcagttagctctagaggccattcttttgctgatcctgccagtaatcttgggctggaagacattatcaggaaggctctcatgggaagctttgatgacaaagttgaggatcatggagttgtcatgtcccagcctatgggagtagtgcctggtactgccaacacctcagttgtgaccagtggtgagacacgaagagaggaaggggacccatcacctcattcaggaggagtttgcaaaccaaagctgatcagcaagtcaaacagcaggaaatctaagtctcctatacctgggcaaggctacttaggaacggaacggccctcttcagtctcctctgtacattcagaaggggattaccataggcagacgccagggtgggcctgggaagacaggccctcttcaacaggctcaactcagtttccttataaccctctgactatgcggatgctcagcagtactccaccaacaccgattgcatgtgctccctctgcggtgaaccaagcagctcctcaccaacagaacaggatctgggagcgagagcctgccccactgctctcagcacagtacgagaccctgtcggatagtgatgactgaactgcacaaagtgaggggaacagggtgcaggagagggatctctagtttttgtggtttaatttttagtagcaggtcaaaaacctgccctcctgtgacttattccctgagacttttcaggagagccagcccacagatgatgaagaaatgatggaagttcatttggagagtcaaatgggaaaaaaacaaacaaaaaactgcctttgatacaggcaattcagtggactataataatagtggagggttgagatgtagagtttttaaaaagtgaacagttgctgttcttacatctgtaaagaaaaccataatgtctttaaatcactcttctgtaaatagatgacctttttgcagtgtatatccccttgctgtagtatctggtgtacttatgttcaaatcagcgcatcaactttgggggtgatttttaaaaatctttttgtctatctatctttttaaccctagccttctaaacaacctcatacagcccagttacataatgttggctgtcacgggcattgtacttttatctgatattgtttcctctaaattcagctttccagtgatgtttaaaatcttgtgaaaatgtttagatttttaacacagaccctgtcataaaatctgtacattagggtcaaaaggtaaaagtaacaaattctgccatattgtaaatttccagtgcaggctttaatttttttttttcattagtagcactgaaaaaatattactgcatgggtatgttctagttcagtttataaagttttaaaggcttatttgaggcatacctcactgttacgcacactggtaatttaaccatgcccctaagtattccttttctcctgcatttgatgcagcccaacaaagcttttgttttgaaataaatttgactaccctgtccatagctacagtagattatttgtggtttaaggctcctggtgtctcaggttccaaaggaaaagcttacatatttttcccttagtttgaatatatgattggttgggttaaaagataatgatctgtgtagtatttagataagctttatgctgcatcctgaaaaactcatggtgaacacagtcctttttccccatcactatggaccagcatttactctcactttgctcccttgggacaagagtttactgttaaatgttttcatttcacagagtctcaaggtgcaaataatttaaaagactgaattctaaactaattatggtactagagggccagttttatctttcattaagaattgcttgctgaattttaaagtttttttcatacaatttatcatagcatttaagtatctttctataacatagatactaacagttttgggagaatgccactggtaactggaaaggggagaaacagatctctcaggatgataaaaattagcactttacagactttcaagtagacctaaacttttaaacaaaagtactcaaggcttttaaggaagcagctctgtgattagctactgaccaagaccctcctatcactggtgtctaatccctatgttacagatgaagacacaggtttagtactttgcccatatagttaaattagtgacagagataggccataagcccacatttgtcttcagtcaaagctttcactcctgtccctgttccactcctgtatacctgaggtccccaacataaactttagatcaggcttagtggtcagcattcctagtacttggaaagttggtattttttacaacagatatatgtaaacatataaaaatttcaaaatgaatgaaaaacagtgactaaatgttccacttcacagttttctgctgaatttttttttttcaggtactggtaatattttagagtttgttaataatttatattgccaacctaccataaaagagattatgatggtatttttctatgaccctgagggtcttaagctattctgagtcagaatacagttgacccttgaacaacacgggtttgaactgtgtgggtccacttatacatggattttcttccacctctgccacccaagatagcaagaccaaccccttctcatcctcagcctattcaacatgaagatgacaaggatgaagaccttcatgatgatccacttccacttaatgaatagtaaatatattttctcttccttataatcttaacaaacattttctcttctctagcttactttattgtaagaatacagtatataatacatatacaaaatatgtgtcaatcgactatgttatccgtaagacttctggtcagcagtaggccatgagtagttaagttttggaggagtcaaagttagatgtggatttttgactacttagggggtctatgcccctaactcctgcattatttgaaggtcaaccgtatagtttctgagaacatgtcagatcagagcctaacttcttactcttgcagttctacctgaggacccgaaggtgaggtgctgtgaaccactccctccatcctcatcataatgcatgtgcgtattactttatttaccatcacctggagaagaaatctcagaatgagagttaaaatccaataatagttcttgggttcaaaataaatgaaaggacagaattctcacatggtttacctatggaggttcaccttatcatgatttaagtggtaagcacagagcagcactgacaacttactgtggttcactgcaaaccaaaacatgatattctttgtagacttagatttcagtgttctgacactatatcccttacaccgtgatttttttagcacccagaactaaattaaggtcttcctaaatactcttcataaaagtattctgacagccagttttccactgcatgtttatgactgcaaatttcataatgcttttaattttggtacactgagtgattctattttaaaaatatttatgcccagaaaactccagtgaccattggacagttaaaaaattttaatgacacgattttaaccaattcacttttgaatttagaccaatcagtaaaggagatcagtcctccttttgcttcagtaccttattttacaacagtgtaaatgaactgtaatgaaaacacccacatgaagagactgtcctgaaaactcctagtgtttccaacaacgagaccatgagctgagtcactgtggatgatttaaaattaataaataaataaaacttggaatgaaaaacctttcagtaacccctgcagttgtgaaaaggtaaaaacattctcaatgcaaaaggtgagtggttgacattaatttttttaagaaatca

SEQ ID NO: 448611 - DNA, 6519 bp, Homo sapiens
tttttaatgtgaccatcagaaaaattaaaattacagatgtgattacattatatgtctattggatggagccgttctagagtgtcagttcagctgggtaaaaggaaattcacaggaagaggcttctagaaatacaccagaatgtcatcatttataggaatgttttttgtttagttttattgttcgttctttttcaatttcatataaattattttcagacattaaaatcctttatgcttttagtttcagaaggtcaagataatttgatctttcacttttatactctgtaggaaactttagccttctcaatggctgtaaatacttcaatgaggtcatcaaaggagtagaattcatcctaaacaactactttcaaacatggtttctatcaccacctgaaacatgttcattatcagatttttatgctgtatcattatctttaaggtgcagaaaatagttctgatacagaaagtgctccttctccttcaccagttgaagctgtcaagcccagcgaggacagtcctgaaaatgctacttctcgaggaaacacagaacctgcggttgagcttgagcccaccacggaaactgcacccagtacatctccctccttagcagttccaagtacaaaaccagctgaagatgaaagtgtggagacccaggtgaatgacagcatcagtgctgagacagcagagcagatggatgtagatcagcaggagcacagtgctgaagagggttctgtttgtgatcccccacccgctaccaaagctgactctgtggacgttgaagtgagggtgccagaaaaccatgcatctaaagttgaaggtgataataccaaagaaagagacttggatagagccagtgagaaggtggaacctagagatgaagatttggtggtagctcagcaaataaatgcccaaaggcccgagccccagtcagacaatgattccagtgccacgtgcagcgctgatgaggatgtggatggagagccagagaggcagagaatgtttcctatggactcaaagccttcactgttaaaccccactggatctatactcgtctcatctccgttaaaaccaaatccactggatctgccacagcttcagcatcgagctgctgttatcccaccaatggtatcctgcaccccatgtaacataccaattggaaccccagtgagcggctatgctctctaccagcgacacattaaagcaatgcatgagtcagcactcctggaggagcagcggcagagacaagaacagatagatttggaatgtagaagttctacaagtccatgtggcacatccaagagtccaaacagagagtgggaagtccttcagcctgctccacatcaagtgataactaatctccctgaaggcgttcggcttccgacaactcgaccaaccaggccaccgccccctctcatcccgtcatccaaaaccacagtggcttcagaaaaaccatcttttataatgggaggctccatctcacagggaacaccaggcacttatttgacttctcataatcaggcttcctacactcaagaaacacccaagccgtcagtgggatctatctctcttggactgccacggcaacaggaatctgccaaatcagctactttgccctacatcaagcaggaagaattttctccccgaagccaaaactcacaacctgagggtctgttggtcagggcccaacatgaaggtgtagtcagaggtaccgcaggagccatacaagaaggaagtataactcggggaactccaaccagcaaaatttcagtggagagcattccatccctacggggctctatcactcagggcaccccggctctgccccagactggcataccaacagaggctttggtgaaggggtccatttcgagaatgcccattgaagacagcagtcctgagaaaggcagagaggaagctgcatccaaaggccatgttatttatgaaggcaaaagtggacatatcttgtcatatgataatattaagaatgcccgagaagggactaggagtccaagaacagctcatgaaatcagtttaaagagaagctatgaatcagtggaaggaaatataaagcaagggatgtcaatgagggagtctcctgtatcagcaccgttagaggggctgatatgccgagcattacccagggggagtcctcattctgacctcaaagaaaggactgtattgtctggctccataatgcaggggacaccaagagcaacaactgaaagctttgaagatggccttaaatatcccaaacaaattaaaagggaaagtcctcccatacgagcatttgaaggtgccattaccaaaggaaaaccatatgatggcatcaccaccatcaaagaaatggggcgttccattcatgagattccaaggcaagatattttaactcaggaaagtcggaaaactccagaagtggtccagagcacacggccgataattgagggttccatttcccagggcacaccaataaagtttgacaacaactcaggtcaatctgccatcaaacacaatgtcaaatccttaatcacggggcctagcaaactatcccgtggaatgcctccgctggaaattgtgccagagaacataaaagtggtagaacggggaaaatatgaggatgtgaaagcaggcgagaccgtgcgttcccggcacacgtcagtggtaagctctggcccctccgttcttaggtccacactgcatgaagctcccaaagcacaactgagccctgggatttatgatgacaccagtgcacggaggacccctgtgagttatcaaaacaccatgtccagaggctcacccatgatgaacagaacttctgatgttacaatttcttctaacaagtctaccaatcatgaaaggaaatcgacactgacccctacccagagggaaagtatcccagcgaagtctccagtgcctggggtggaccctgtcgtgagccacagtccgtttgatccccatcacagaggcagcactgcaggcgaggtttatcggagccacctgcccacgcacttggatccagccatgccttttcacagggctttggatcctgcagcggctgcttacctgtttcagagacagctttcaccaactccaggttacccaagtcagtatcagctttacgcaatggagaacacaagacagacaatcttaaatgattacattacctcacaacagatgcaagtgaacttgcgtccagatgtggccagaggactctccccaagagagcagccactgggtctcccatacccagcaacgagaggaatcattgacctgaccaatatgcctccaacaattttagtgcctcatccagggggaacaagcactcctcccatggacagaatcacttatattcctggtacacagattactttccctcccaggccgtacaactctgcttccatgtctccaggacacccaacacaccttgcagctgctgcaagtgctgagagggaacgggaacgggagcgggagaaggagcgggagcgggaacggattgctgcagcttcctccgacctctacctgcggccaggctcagaacagcctggccgacctggcagtcatggatatgttcgctccccttccccttcagtaagaactcaggagaccatgttgcaacagagacccagtgttttccaaggaaccaatggaaccagtgtaatcacacctttggatccaactgctcagctacgaatcatgccactgcctgctgggggcccttcaataagccaaggcctgccagcctcccgttacaacactgctgcggatgccctggctgctcttgtggatgctgcagcttctgcaccccagatggatgtgtccaaaacaaaagagagtaagcatgaagctgccaggttagaagaaaatttgagaagcaggtcagcagcagttagtgaacagcagcagctagagcagaaaaccctggaggtggagaagagatctgttcagtgtttatacacttcttcagcctttccaagtggcaagccccagcctcattcttcagtagtttattctgaggctgggaaagataaagggcctcctccaaaatccagatatgaggaagagctaaggaccagagggaagactaccattactgcagctaacttcatagacgtgatcatcacccggcaaattgcctcggacaaggatgcgagggaacgtggctctcaaagttcagactcttctagtagcttatcttctcacaggtatgaaacacctagcgatgctattgaggtgataagtcctgccagctcacctgcgccaccccaggagaaactgcagacctatcagccagaggttgttaaggcaaatcaagcggaaaatgatcctaccagacaatatgaaggaccattacatcactatcgaccacagcaggaatcaccatctccccaacaacagctgcccccttcttcacaggcagagggaatggggcaagtgcccaggacccatcggctgatcacacttgctgatcacatctgtcaaattatcacacaagattttgctagaaatcaagtttcctcgcagactccccagcagcctcctacttctacattccagaactcaccttctgctttggtatctacacctgtgaggactaaaacatcaaaccgttacagcccagaatcccaggctcagtctgtccatcatcaaagaccaggttcaagggtctctccagaaaatcttgtggacaaatccaggggaagtaggcctggaaaatccccagagaggagtcacgtctcttcggagccctacgagcccatctccccaccccaggttccggttgtgcatgagaaacaggacagcttgctgctcttgtctcagaggggcgcagagcctgcagagcagaggaatgatgcccgctcaccagggagtataagctacttgccttcattcttcaccaagcttgaaaatacatcacccatggttaaatcaaagaagcaggagatttttcgtaagttgaactcctctggtggaggtgactctgatatggcagctgctcagccaggaactgagatctttaatctgccagcagttactacgtcaggctcagttagctctagaggccattcttttgctgatcctgccagtaatcttgggctggaagacattatcaggaaggctctcatgggaagctttgatgacaaagttgaggatcatggagttgtcatgtcccagcctatgggagtagtgcctggtactgccaacacctcagttgtgaccagtggtgagacacgaagagaggaaggggacccatcacctcattcaggaggagtttgcaaaccaaagctgatcagcaagtcaaacagcaggaaatctaagtctcctatacctgggcaaggctacttaggaacggaacggccctcttcagtctcctctgtacattcagaaggggattaccataggcagacgccagggtgggcctgggaagacaggccctcttcaacaggctcaactcagtttccttataaccctctgactatgcggatgctcagcagtactccaccaacaccgattgcatgtgctccctctgcggtgaaccaagcagctcctcaccaacagaacaggatctgggagcgagagcctgccccactgctctcagcacagtacgagaccctgtcggatagtgatgactgaactgcacaaagtgaggggaacagggtgcaggagagggatctctagtttttgtggtttaatttttagtagcaggtcaaaaacctgccctcctgtgacttattccctgagacttttcaggagagccagcccacagatgatgaagaaatgatggaagttcatttggagagtcaaatgggaaaaaaacaaacaaaaaactgcctttgatacaggcaattcagtggactataataatagtggagggttgagatgtagagtttttaaaaagtgaacagttgctgttcttacatctgtaaagaaaaccataatgtctttaaatcactcttctgtaaatagatgacctttttgcagtgtatatccccttgctgtagtatctggtgtacttatgttcaaatcagcgcatcaactttgggggtgatttttaaaaatctttttgtctatctatctttttaaccctagccttctaaacaacctcatacagcccagttacataatgttggctgtcacgggcattgtacttttatctgatattgtttcctctaaattcagctttccagtgatgtttaaaatcttgtgaaaatgtttagatttttaacacagaccctgtcataaaatctgtacattagggtcaaaaggtaaaagtaacaaattctgccatattgtaaatttccagtgcaggctttaatttttttttttcattagtagcactgaaaaaatattactgcatgggtatgttctagttcagtttataaagttttaaaggcttatttgaggcatacctcactgttacgcacactggtaatttaaccatgcccctaagtattccttttctcctgcatttgatgcagcccaacaaagcttttgttttgaaataaatttgactaccctgtccata

SEQ ID NO: 448612 - DNA, 6990 bp, Homo sapiens
ggtgacatcgtcacagtgggcgagtgccggcctctgagcaagacagtgcgcttcaacgtgctcaaggtcaccaaggctgccggcaccaagaagcagttccagaagttctgaggctggacatcggcccgctccccacatagttcagcgtctgacgtcagacgctgaactatgccacgtgcagcgctgatgaggatgtggatggagagccagagaggcagagaatgtttcctatggactcaaagccttcactgttaaaccccactggatctatactcgtctcatctccgttaaaaccaaatccactggatctgccacagcttcagcatcgagctgctgttatcccaccaatggtatcctgcaccccatgtaacataccaattggaaccccagtgagcggctatgctctctaccagcgacacattaaagcaatgcatgagtcagcactcctggaggagcagcggcagagacaagaacagatagatttggaatgtagaagttctacaagtccatgtggcacatccaagagtccaaacagagagtgggaagtccttcagcctgctccacatcaagtgataactaatctccctgaaggcgttcggcttccgacaactcgaccaaccaggccaccgccccctctcatcccgtcatccaaaaccacagtggcttcagaaaaaccatcttttataatgggaggctccatctcacagggaacaccaggcacttatttgacttctcataatcaggcttcctacactcaagaaacacccaagccgtcagtgggatctatctctcttggactgccacggcaacaggaatctgccaaatcagctactttgccctacatcaagcaggaagaattttctccccgaagccaaaactcacaacctgagggtctgttggtcagggcccaacatgaaggtgtagtcagaggtaccgcaggagccatacaagaaggaagtataactcggggaactccaaccagcaaaatttcagtggagagcattccatccctacggggctctatcactcagggcaccccggctctgccccagactggcataccaacagaggctttggtgaaggggtccatttcgagaatgcccattgaagacagcagtcctgagaaaggcagagaggaagctgcatccaaaggccatgttatttatgaaggcaaaagtggacatatcttgtcatatgataatattaagaatgcccgagaagggactaggagtccaagaacagctcatgaaatcagtttaaagagaagctatgaatcagtggaaggaaatataaagcaagggatgtcaatgagggagtctcctgtatcagcaccgttagaggggctgatatgccgagcattacccagggggagtcctcattctgacctcaaagaaaggactgtattgtctggctccataatgcaggggacaccaagagcaacaactgaaagctttgaagatggccttaaatatcccaaacaaattaaaagggaaagtcctcccatacgagcatttgaaggtgccattaccaaaggaaaaccatatgatggcatcaccaccatcaaagaaatggggcgttccattcatgagattccaaggcaagatattttaactcaggaaagtcggaaaactccagaagtggtccagagcacacggccgataattgagggttccatttcccagggcacaccaataaagtttgacaacaactcaggtcaatctgccatcaaacacaatgtcaaatccttaatcacggggcctagcaaactatcccgtggaatgcctccgctggaaattgtgccagagaacataaaagtggtagaacggggaaaatatgaggatgtgaaagcaggcgagaccgtgcgttcccggcacacgtcagtggtaagctctggcccctccgttcttaggtccacactgcatgaagctcccaaagcacaactgagccctgggatttatgatgacaccagtgcacggaggacccctgtgagttatcaaaacaccatgtccagaggctcacccatgatgaacagaacttctgatgttacaatttcttctaacaagtctaccaatcatgaaaggaaatcgacactgacccctacccagagggaaagtatcccagcgaagtctccagtgcctggggtggaccctgtcgtgagccacagtccgtttgatccccatcacagaggcagcactgcaggcgaggtttatcggagccacctgcccacgcacttggatccagccatgccttttcacagggctttggatcctgcagcggctgcttacctgtttcagagacagctttcaccaactccaggttacccaagtcagtatcagctttacgcaatggagaacacaagacagacaatcttaaatgattacattacctcacaacagatgcaagtgaacttgcgtccagatgtggccagaggactctccccaagagagcagccactgggtctcccatacccagcaacgagaggaatcattgacctgaccaatatgcctccaacaattttagtgcctcatccagggggaacaagcactcctcccatggacagaatcacttatattcctggtacacagattactttccctcccaggccgtacaactctgcttccatgtctccaggacacccaacacaccttgcagctgctgcaagtgctgagagggaacgggaacgggagcgggagaaggagcgggagcgggaacggattgctgcagcttcctccgacctctacctgcggccaggctcagaacagcctggccgacctggcagtcatggatatgttcgctccccttccccttcagtaagaactcaggagaccatgttgcaacagagacccagtgttttccaaggaaccaatggaaccagtgtaatcacacctttggatccaactgctcagctacgaatcatgccactgcctgctgggggcccttcaataagccaaggcctgccagcctcccgttacaacactgctgcggatgccctggctgctcttgtggatgctgcagcttctgcaccccagatggatgtgtccaaaacaaaagagagtaagcatgaagctgccaggttagaagaaaatttgagaagcaggtcagcagcagttagtgaacagcagcagctagagcagaaaaccctggaggtggagaagagatctgttcagtgtttatacacttcttcagcctttccaagtggcaagccccagcctcattcttcagtagtttattctgaggctgggaaagataaagggcctcctccaaaatccagatatgaggaagagctaaggaccagagggaagactaccattactgcagctaacttcatagacgtgatcatcacccggcaaattgcctcggacaaggatgcgagggaacgtggctctcaaagttcagactcttctagtagcttatcttctcacaggtatgaaacacctagcgatgctattgaggtgataagtcctgccagctcacctgcgccaccccaggagaaactgcagacctatcagccagaggttgttaaggcaaatcaagcggaaaatgatcctaccagacaatatgaaggaccattacatcactatcgaccacagcaggaatcaccatctccccaacaacagctgcccccttcttcacaggcagagggaatggggcaagtgcccaggacccatcggctgatcacacttgctgatcacatctgtcaaattatcacacaagattttgctagaaatcaagtttcctcgcagactccccagcagcctcctacttctacattccagaactcaccttctgctttggtatctacacctgtgaggactaaaacatcaaaccgttacagcccagaatcccaggctcagtctgtccatcatcaaagaccaggttcaagggtctctccagaaaatcttgtggacaaatccaggggaagtaggcctggaaaatccccagagaggagtcacgtctcttcggagccctacgagcccatctccccaccccaggttccggttgtgcatgagaaacaggacagcttgctgctcttgtctcagaggggcgcagagcctgcagagcagaggaatgatgcccgctcaccagggagtataagctacttgccttcattcttcaccaagcttgaaaatacatcacccatggttaaatcaaagaagcaggagatttttcgtaagttgaactcctctggtggaggtgactctgatatggcagctgctcagccaggaactgagatctttaatctgccagcagttactacgtcaggctcagttagctctagaggccattcttttgctgatcctgccagtaatcttgggctggaagacattatcaggaaggctctcatgggaagctttgatgacaaagttgaggatcatggagttgtcatgtcccagcctatgggagtagtgcctggtactgccaacacctcagttgtgaccagtggtgagacacgaagagaggaaggggacccatcacctcattcaggaggagtttgcaaaccaaagctgatcagcaagtcaaacagcaggaaatctaagtctcctatacctgggcaaggctacttaggaacggaacggccctcttcagtctcctctgtacattcagaaggggattaccataggcagacgccagggtgggcctgggaagacaggccctcttcaacaggctcaactcagtttccttataaccctctgactatgcggatgctcagcagtactccaccaacaccgattgcatgtgctccctctgcggtgaaccaagcagctcctcaccaacagaacaggatctgggagcgagagcctgccccactgctctcagcacagtacgagaccctgtcggatagtgatgactgaactgcacaaagtgaggggaacagggtgcaggagagggatctctagtttttgtggtttaatttttagtagcaggtcaaaaacctgccctcctgtgacttattccctgagacttttcaggagagccagcccacagatgatgaagaaatgatggaagttcatttggagagtcaaatgggaaaaaaacaaacaaaaaactgcctttgatacaggcaattcagtggactataataatagtggagggttgagatgtagagtttttaaaaagtgaacagttgctgttcttacatctgtaaagaaaaccataatgtctttaaatcactcttctgtaaatagatgacctttttgcagtgtatatccccttgctgtagtatctggtgtacttatgttcaaatcagcgcatcaactttgggggtgatttttaaaaatctttttgtctatctatctttttaaccctagccttctaaacaacctcatacagcccagttacataatgttggctgtcacgggcattgtacttttatctgatattgtttcctctaaattcagctttccagtgatgtttaaaatcttgtgaaaatgtttagatttttaacacagaccctgtcataaaatctgtacattagggtcaaaaggtaaaagtaacaaattctgccatattgtaaatttccagtgcaggctttaatttttttttttcagtgctactaatgaaaaaaaaaactcgtgccgaattcggcacgagagaacaaggggtctgtggaaatcatgagaaaggacttgaatgacgcccgggacctgcatggccaggcagagtcagcagctgcagtgtggaagggacacgtgatggaccgtaggaagaaggcactgaccgactacaagaagctgcgggccttctttgtggaggaggaggagcatttcctgcaggaggctgagaaggaggaggggctccctgaggacgagctggctgaccccactgagcggttcaggtcactgctgcaggcggtctcggagctggagaagaagcatcgcaacctgggcctcagcatgctgctgcagtgatggcgccaacccgtggcagtcccagagctggaggcaggaggatggatcctcatctccatgggaagtgtcagcgtgtggctgccagggaagcgtggcaggcgcctggccttgggtccatctacatagttgcgtgtttcaacaatgtccatttatccttcaccccgaggcgtgttttgggggctgcaaacacctcccggtagaggctggacctgaggacccttcccacctgtgcccgtcccttcctgaagtcctagccacagcccatcctccatgagtcccggcagctctgggtcatgcccttccctggtcacccatctgcccctcacccgtcatccagggaccagaccctgcaccttccatgtgggcccacaaatccttggcaggtacctgaggtgcaccattgagtgtcggatttggggttagcatccagaaagaagaatgcgcatgacgctctgtgaaggctggaactcaggtcttcagggagagaaaggaagactggattgccccttgatgcctcctgaggaggcggcccccctcttgaggtgggcgtgggcccggcccagccttatccaagtcgctctgtccacctcccccttcctggcccccaccccactcctgtgcctcccaggagccctccctgtgttccacctgcctccgcagaaggaagcctctttctctgtttccctgggtgagggggctggcaggtggctaaccccatttagcatttccaggccctgccatggtgtctcatcttgctgttatctctagctctttccctcctcccatttcctttagtagttgaattttgcaaagcttgtagcagtagctcagttgcctgcagcatccttgtgtgtagataaattagtcgacagaaaatcagcactggggacaggattgcaaagtcggggaaatagatgcagacagttgttgagatttggggatagccgggcttgtgagcggtgcccatttccagatgaagcctttcagcccttttgagtccccggcccttggtgcgatgtttgtgagtttgacctgcccagcgtgtgggctggctcaatgctgaataaagtgggtttgtgtc

SEQ ID NO: 448613 - DNA, 10807 bp, Homo sapiens
gggttgagtcaagatggcggccaaggtggcgaagcagcagccgcggcggcggcggcggctggagtgagcgtccgactcgccgcgccgaacgaggtcccggtgtagggccgcgcgccgtggccgcgtcccactcctcaggccggggcgcacgtcggctcccacgcttagccagctcccggtggtttcctagaaacatgattgtttattggcattgatctcacagtctggtgaggacttctttactgataatgtcaagttcaggttatcctcccaaccaaggagcattcagcacagaacaaagtcgttatcctcctcactctgtccagtatacatttcccaacacccgccaccagcaggagttcgcagtccctgattatcgttcctctcatcttgaagtgagtcaggcatcacagcttttgcagcaacagcagcagcaacagcttcgaaggcgaccttccttgctttcagaatttcacccaggttctgacaggcctcaagaaaggagaactagttatgaaccgtttcatccaggcccatccccagtggatcatgattcactggaatcgaagcgaccacgtctggaacaggtttctgattctcattttcagcgtgtcagtgctgcggttttgcctttagtgcacccgctgccagaagggctgagggcttctgcagatgctaagaaggatccagcattcggaggcaaacatgaagctccatcctctccaatttcggggcaaccatgtggagatgatcaaaatgcttcaccttcaaaactctcaaaggaagagttaatacagagtatggatcgtgtagatcgagaaattgcaaaagtagaacagcagatccttaaactgaaaaagaaacaacaacagcttgaagaagaggcagctaaacctcctgagcctgagaagcccgtgtcccctcctcctgtggagcagaaacaccgcagtattgtccaaattatttatgatgagaatcggaaaaaagcagaagaagctcataaaatttttgaaggtcttggcccaaaagttgaactgccactgtataaccagccatcagataccaaggtgtaccatgagaacatcaagacaaaccaggtgatgaggaaaaaactcattttattttttaaaagaagaaatcatgcaagaaaacaaagggaacaaaaaatctgccagcgttatgatcagctcatggaggcatgggagaaaaaagtggacagaatagaaaataatcctcggaggaaagctaaagaaagcaaaacaagggaatactatgaaaagcagtttccagaaattcgaaaacaaagagaacagcaagaaagatttcagcgagttgggcagaggggagctggtctttcagccaccattgctaggagtgagcatgagatttctgaaattattgatgggctctctgagcaggagaataatgagaaacaaatgcggcagctctctgtgattccacctatgatgtttgatgcagaacaaagacgagtcaagttcattaacatgaatgggcttatggaggaccctatgaaagtgtataaagataggcagtttatgaatgtttggactgaccatgaaaaggagatctttaaggacaagtttatccagcatccaaaaaactttggactaattgcatcatacttggagaggaagagtgttcctgattgtgttttgtattactatttaaccaagaaaaatgagaattataaagccctcgtcagaaggaattatgggaaacgcagaggcagaaaccagcaaattgctcgaccctcgcaagaagaaaaagtagaagaaaaagaagaggataaagcagaaaaaacagaaaaaaaagaagaagaaaagaaagatgaagaggaaaaagatgaaaaagaagactccaaagaaaataccaaggaaaaggacaagatagatggtacagcagaagaaactgaggaaagagagcaagccacaccccgggggcgaaagactgccaacagtcagggccgccgtaagggccggatcaccaggtccatgacaaacgaagctgcagctgccagtgctgcagccgcagcggctactgaagagcccccaccacctctgccaccgccaccagaacccatttctacagagcctgtggagacctctcgatggacagaagaagaaatggaagttgctaaaaaaggtctagtagaacatggtcgtaactgggcagcaattgctaaaatggtgggaacgaaaagtgaagctcaatgtaaaaacttctattttaactataaaaggcgacacaatcttgacaacctcttacagcagcataaacagaaaacttcacgaaaacctcgtgaagagcgagatgtgtctcaatgtgaaagtgtcgcttccactgtttctgctcaggaggatgaagatattgaagcctccaatgaagaagaaaatccagaagacagcgaaggtgcagaaaatagttctgatacagaaagtgctccttctccttcaccagttgaagctgtcaagcccagcgaggacagtcctgaaaatgctacttctcgaggaaacacagaacctgcggttgagcttgagcccaccacggaaactgcacccagtacatctccctccttagcagttccaagtacaaaaccagctgaagatgaaagtgtggagacccaggtgaatgacagcatcagtgctgagacagcagagcagatggatgtagatcagcaggagcacagtgctgaagagggttctgtttgtgatcccccacccgctaccaaagctgactctgtggacgttgaagtgagggtgccagaaaaccatgcatctaaagttgaaggtgataataccaaagaaagagacttggatagagccagtgagaaggtggaacctagagatgaagatttggtggtagctcagcaaataaatgcccaaaggcccgagccccagtcagacaatgattccagtgccacgtgcagcgctgatgaggatgtggatggagagccagagaggcagagaatgtttcctatggactcaaagccttcactgttaaaccccactggatctatactcgtctcatctccgttaaaaccaaatccactggatctgccacagcttcagcatcgagctgctgttatcccaccaatggtatcctgcaccccatgtaacataccaattggaaccccagtgagcggctatgctctctaccagcgacacattaaagcaatgcatgagtcagcactcctggaggagcagcggcagagacaagaacagatagatttggaatgtagaagttctacaagtccatgtggcacatccaagagtccaaacagagagtgggaagtccttcagcctgctccacatcaagtgataactaatctccctgaaggcgttcggcttccgacaactcgaccaaccaggccaccgccccctctcatcccgtcatccaaaaccacagtggcttcagaaaaaccatcttttataatgggaggctccatctcacagggaacaccaggcacttatttgacttctcataatcaggcttcctacactcaagaaacacccaagccgtcagtgggatctatctctcttggactgccacggcaacaggaatctgccaaatcagctactttgccctacatcaagcaggaagaattttctccccgaagccaaaactcacaacctgagggtctgttggtcagggcccaacatgaaggtgtagtcagaggtaccgcaggagccatacaagaaggaagtataactcggggaactccaaccagcaaaatttcagtggagagcattccatccctacggggctctatcactcagggcaccccggctctgccccagactggcataccaacagaggctttggtgaaggggtccatttcgagaatgcccattgaagacagcagtcctgagaaaggcagagaggaagctgcatccaaaggccatgttatttatgaaggcaaaagtggacatatcttgtcatatgataatattaagaatgcccgagaagggactaggagtccaagaacagctcatgaaatcagtttaaagagaagctatgaatcagtggaaggaaatataaagcaagggatgtcaatgagggagtctcctgtatcagcaccgttagaggggctgatatgccgagcattacccagggggagtcctcattctgacctcaaagaaaggactgtattgtctggctccataatgcaggggacaccaagagcaacaactgaaagctttgaagatggccttaaatatcccaaacaaattaaaagggaaagtcctcccatacgagcatttgaaggtgccattaccaaaggaaaaccatatgatggcatcaccaccatcaaagaaatggggcgttccattcatgagattccaaggcaagatattttaactcaggaaagtcggaaaactccagaagtggtccagagcacacggccgataattgagggttccatttcccagggcacaccaataaagtttgacaacaactcaggtcaatctgccatcaaacacaatgtcaaatccttaatcacggggcctagcaaactatcccgtggaatgcctccgctggaaattgtgccagagaacataaaagtggtagaacggggaaaatatgaggatgtgaaagcaggcgagaccgtgcgttcccggcacacgtcagtggtaagctctggcccctccgttcttaggtccacactgcatgaagctcccaaagcacaactgagccctgggatttatgatgacaccagtgcacggaggacccctgtgagttatcaaaacaccatgtccagaggctcacccatgatgaacagaacttctgatgttacaatttcttctaacaagtctaccaatcatgaaaggaaatcgacactgacccctacccagagggaaagtatcccagcgaagtctccagtgcctggggtggaccctgtcgtgagccacagtccgtttgatccccatcacagaggcagcactgcaggcgaggtttatcggagccacctgcccacgcacttggatccagccatgccttttcacagggctttggatcctgcagcggctgcttacctgtttcagagacagctttcaccaactccaggttacccaagtcagtatcagctttacgcaatggagaacacaagacagacaatcttaaatgattacattacctcacaacagatgcaagtgaacttgcgtccagatgtggccagaggactctccccaagagagcagccactgggtctcccatacccagcaacgagaggaatcattgacctgaccaatatgcctccaacaattttagtgcctcatccagggggaacaagcactcctcccatggacagaatcacttatattcctggtacacagattactttccctcccaggccgtacaactctgcttccatgtctccaggacacccaacacaccttgcagctgctgcaagtgctgagagggaacgggaacgggagcgggagaaggagcgggagcgggaacggattgctgcagcttcctccgacctctacctgcggccaggctcagaacagcctggccgacctggcagtcatggatatgttcgctccccttccccttcagtaagaactcaggagaccatgttgcaacagagacccagtgttttccaaggaaccaatggaaccagtgtaatcacacctttggatccaactgctcagctacgaatcatgccactgcctgctgggggcccttcaataagccaaggcctgccagcctcccgttacaacactgctgcggatgccctggctgctcttgtggatgctgcagcttctgcaccccagatggatgtgtccaaaacaaaagagagtaagcatgaagctgccaggttagaagaaaatttgagaagcaggtcagcagcagttagtgaacagcagcagctagagcagaaaaccctggaggtggagaagagatctgttcagtgtttatacacttcttcagcctttccaagtggcaagccccagcctcattcttcagtagtttattctgaggctgggaaagataaagggcctcctccaaaatccagatatgaggaagagctaaggaccagagggaagactaccattactgcagctaacttcatagacgtgatcatcacccggcaaattgcctcggacaaggatgcgagggaacgtggctctcaaagttcagactcttctagtagcttatcttctcacaggtatgaaacacctagcgatgctattgaggtgataagtcctgccagctcacctgcgccaccccaggagaaactgcagacctatcagccagaggttgttaaggcaaatcaagcggaaaatgatcctaccagacaatatgaaggaccattacatcactatcgaccacagcaggaatcaccatctccccaacaacagctgcccccttcttcacaggcagagggaatggggcaagtgcccaggacccatcggctgatcacacttgctgatcacatctgtcaaattatcacacaagattttgctagaaatcaagtttcctcgcagactccccagcagcctcctacttctacattccagaactcaccttctgctttggtatctacacctgtgaggactaaaacatcaaaccgttacagcccagaatcccaggctcagtctgtccatcatcaaagaccaggttcaagggtctctccagaaaatcttgtggacaaatccaggggaagtaggcctggaaaatccccagagaggagtcacgtctcttcggagccctacgagcccatctccccaccccaggttccggttgtgcatgagaaacaggacagcttgctgctcttgtctcagaggggcgcagagcctgcagagcagaggaatgatgcccgctcaccagggagtataagctacttgccttcattcttcaccaagcttgaaaatacatcacccatggttaaatcaaagaagcaggagattcagctgctcagccaggaactgagatctttaatctgccagcagttactacgtcaggctcagttagctctagaggccattcttttgctgatcctgccagtaatcttgggctggaagacattatcaggaaggctctcatgggaagctttgatgacaaagttgaggatcatggagttgtcatgtcccagcctatgggagtagtgcctggtactgccaacacctcagttgtgaccagtggtgagacacgaagagaggaaggggacccatcacctcattcaggaggagtttgcaaaccaaagctgatcagcaagtcaaacagcaggaaatctaagtctcctatacctgggcaaggctacttaggaacggaacggccctcttcagtctcctctgtacattcagaaggggattaccataggcagacgccagggtgggcctgggaagacaggccctcttcaacaggctcaactcagtttccttataaccctctgactatgcggatgctcagcagtactccaccaacaccgattgcatgtgctccctctgcggtgaaccaagcagctcctcaccaacagaacaggatctgggagcgagagcctgccccactgctctcagcacagtacgagaccctgtcggatagtgatgactgaactgcacaaagtgaggggaacagggtgcaggagagggatctctagtttttgtggtttaatttttagtagcaggtcaaaaacctgccctcctgtgacttattccctgagacttttcaggagagccagcccacagatgatgaagaaatgatggaagttcatttggagagtcaaatgggaaaaaaacaaacaaaaaactgcctttgatacaggcaattcagtggactataataatagtggagggttgagatgtagagtttttaaaaagtgaacagttgctgttcttacatctgtaaagaaaaccataatgtctttaaatcactcttctgtaaatagatgacctttttgcagtgtatatccccttgctgtagtatctggtgtacttatgttcaaatcagcgcatcaactttgggggtgatttttaaaaatctttttgtctatctatctttttaaccctagccttctaaacaacctcatacagcccagttacataatgttggctgtcacgggcattgtacttttatctgatattgtttcctctaaattcagctttccagtgatgtttaaaatcttgtgaaaatgtttagatttttaacacagaccctgtcataaaatctgtacattagggtcaaaaggtaaaagtaacaaattctgccatattgtaaatttccagtgcaggctttaatttttttttttcattagtagcactgaaaaaatattactgcatgggtatgttctagttcagtttataaagttttaaaggcttatttgaggcatacctcactgttacgcacactggtaatttaaccatgcccctaagtattccttttctcctgcatttgatgcagcccaacaaagcttttgttttgaaataaatttgactaccctgtccatagctacagtagattatttgtggtttaaggctcctggtgtctcaggttccaaaggaaaagcttacatatttttcccttagtttgaatatatgattggttgggttaaaagataatgatctgtgtagtatttagataagctttatgctgcatcctgaaaaactcatggtgaacacagtcctttttccccatcactatggaccagcatttactctcactttgctcccttgggacaagagtttactgttaaatgttttcatttcacagagtctcaaggtgcaaataatttaaaagactgaattctaaactaattatggtactagagggccagttttatctttcattaagaattgcttgctgaattttaaagtttttttcatacaatttatcatagcatttaagtatctttctataacatagatactaacagttttgggagaatgccactggtaactggaaaggggagaaacagatctctcaggatgataaaaattagcactttacagactttcaagtagacctaaacttttaaacaaaagtactcaaggcttttaaggaagcagctctgtgattagctactgaccaagaccctcctatcactggtgtctaatccctatgttacagatgaagacacaggtttagtactttgcccatatagttaaattagtgacagagataggccataagcccacatttgtcttcagtcaaagctttcactcctgtccctgttccactcctgtatacctgaggtccccaacataaactttagatcaggcttagtggtcagcattcctagtacttggaaagttggtattttttacaacagatatatgtaaacatataaaaatttcaaaatgaatgaaaaacagtgactaaatgttccacttcacagttttctgctgaatttttttttttcaggtactggtaatattttagagtttgttaataatttatattgccaacctaccataaaagagattatgatggtatttttctatgaccctgagggtcttaagctattctgagtcagaatacagttgacccttgaacaacacgggtttgaactgtgtgggtccacttatacatggattttcttccacctctgccacccaagatagcaagaccaaccccttctcatcctcagcctattcaacatgaagatgacaaggatgaagaccttcatgatgatccacttccacttaatgaatagtaaatatattttctcttccttataatcttaacaaacattttctcttctctagcttactttattgtaagaatacagtatataatacatatacaaaatatgtgtcaatcgactatgttatccgtaagacttctggtcagcagtaggccatgagtagttaagttttggaggagtcaaagttagatgtggatttttgactacttagggggtctatgcccctaactcctgcattatttgaaggtcaaccgtatagtttctgagaacatgtcagatcagagcctaacttcttactcttgcagttctacctgaggacccgaaggtgaggtgctgtgaaccactccctccatcctcatcataatgcatgtgcgtattactttatttaccatcacctggagaagaaatctcagaatgagagttaaaatccaataatagttcttgggttcaaaataaatgaaaggacagaattctcacatggtttacctatggaggttcaccttatcatgatttaagtggtaagcacagagcagcactgacaacttactgtggttcactgcaaaccaaaacatgatattctttgtagacttagatttcagtgttctgacactatatcccttacaccgtgatttttttagcacccagaactaaattaaggtcttcctaaatactcttcataaaagtattctgacagccagttttccactgcatgtttatgactgcaaatttcataatgcttttaattttggtacactgagtgattctattttaaaaatatttatgcccagaaaactccagtgaccattggacagttaaaaaattttaatgacacgattttaaccaattcacttttgaatttagaccaatcagtaaaggagatcagtcctccttttgcttcagtaccttattttacaacagtgtaaatgaactgtaatgaaaacacccacatgaagagactgtcctgaaaactcctagtgtttccaacaacgagaccatgagctgagtcactgtggatgatttaaaattaataaataaataaaacttggaatgaaaaacctttcagtaacccctgcagttgtgaaaaggtaaaaacattctcaatgcaaaaggtgagtggttgacattaatttttttaagaaatca

SEQ ID NO: 448614 - DNA, 6004 bp, Homo sapiens
tagacattagaattgctattgctaatacatcaaggtctaaaataaatccaccttaatccttgtagctaagtaaaagttccatgtgcactagctcagcatgtgatttttctctactcttttgtacgtggtgtttagcaaatgtatttcagccaggacaaaactcagtgcctttctttcattctctcaatcagcagcggctgcttacctgtttcagagacagctttcaccaactccaggttacccaagtcagtatcagctttacgcaatggagaacacaagacagacaatcttaaatgattacattacctcacaacagatgcaagtgaacttgcgtccagatgtggccagaggactctccccaagagagcagccactgggtctcccatacccagcaacgagaggaatcattgacctgaccaatatgcctccaacaattttagtgcctcatccagggggaacaagcactcctcccatggacagaatcacttatattcctggtacacagattactttccctcccaggccgtacaactctgcttccatgtctccaggacacccaacacaccttgcagctgctgcaagtgctgagagggaacgggaacgggagcgggagaaggagcgggagcgggaacggattgctgcagcttcctccgacctctacctgcggccaggctcagaacagcctggccgacctggcagtcatggatatgttcgctccccttccccttcagtaagaactcaggagaccatgttgcaacagagacccagtgttttccaaggaaccaatggaaccagtgtaatcacacctttggatccaactgctcagctacgaatcatgccactgcctgctgggggcccttcaataagccaaggcctgccagcctcccgttacaacactgctgcggatgccctggctgctcttgtggatgctgcagcttctgcaccccagatggatgtgtccaaaacaaaagagagtaagcatgaagctgccaggttagaagaaaatttgagaagcaggtcagcagcagttagtgaacagcagcagctagagcagaaaaccctggaggtggagaagagatctgttcagtgtttatacacttcttcagcctttccaagtggcaagccccagcctcattcttcagtagtttattctgaggctgggaaagataaagggcctcctccaaaatccagatatgaggaagagctaaggaccagagggaagactaccattactgcagctaacttcatagacgtgatcatcacccggcaaattgcctcggacaaggatgcgagggaacgtggctctcaaagttcagactcttctagtagcttatcttctcacaggtatgaaacacctagcgatgctattgaggtgataagtcctgccagctcacctgcgccaccccaggagaaactgcagacctatcagccagaggttgttaaggcaaatcaagcggaaaatgatcctaccagacaatatgaaggaccattacatcactatcgaccacagcaggaatcaccatctccccaacaacagctgcccccttcttcacaggcagagggaatggggcaagtgcccaggacccatcggctgatcacacttgctgatcacatctgtcaaattatcacacaagattttgctagaaatcaagtttcctcgcagactccccagcagcctcctacttctacattccagaactcaccttctgctttggtatctacacctgtgaggactaaaacatcaaaccgttacagcccagaatcccaggctcagtctgtccatcatcaaagaccaggttcaagggtctctccagaaaatcttgtggacaaatccaggggaagtaggcctggaaaatccccagagaggagtcacgtctcttcggagccctacgagcccatctccccaccccaggttccggttgtgcatgagaaacaggacagcttgctgctcttgtctcagaggggcgcagagcctgcagagcagaggaatgatgcccgctcaccagggagtataagctacttgccttcattcttcaccaagcttgaaaatacatcacccatggttaaatcaaagaagcaggagatttttcgtaagttgaactcctctggtggaggtgactctgatatggcagctgctcagccaggaactgagatctttaatctgccagcagttactacgtcaggctcagttagctctagaggccattcttttgctgatcctgccagtaatcttgggctggaagacattatcaggaaggctctcatgggaagctttgatgacaaagttgaggatcatggagttgtcatgtcccagcctatgggagtagtgcctggtactgccaacacctcagttgtgaccagtggtgagacacgaagagaggaaggggacccatcacctcattcaggaggagtttgcaaaccaaagctgatcagcaagtcaaacagcaggaaatctaagtctcctatacctgggcaaggctacttaggaacggaacggccctcttcagtctcctctgtacattcagaaggggattaccataggcagacgccagggtgggcctgggaagacaggccctcttcaacaggctcaactcagtttccttataaccctctgactatgcggatgctcagcagtactccaccaacaccgattgcatgtgctccctctgcggtgaaccaagcagctcctcaccaacagaacaggatctgggagcgagagcctgccccactgctctcagcacagtacgagaccctgtcggatagtgatgactgaactgcacaaagtgaggggaacagggtgcaggagagggatctctagtttttgtggtttaatttttagtagcaggtcaaaaacctgccctcctgtgacttattccctgagacttttcaggagagccagcccacagatgatgaagaaatgatggaagttcatttggagagtcaaatgggaaaaaaacaaacaaaaaactgcctttgatacaggcaattcagtggactataataatagtggagggttgagatgtagagtttttaaaaagtgaacagttgctgttcttacatctgtaaagaaaaccataatgtctttaaatcactcttctgtaaatagatgacctttttgcagtgtatatccccttgctgtagtatctggtgtacttatgttcaaatcagcgcatcaactttgggggtgatttttaaaaatctttttgtctatctatctttttaaccctagccttctaaacaacctcatacagcccagttacataatgttggctgtcacgggcattgtacttttatctgatattgtttcctctaaattcagctttccagtgatgtttaaaatcttgtgaaaatgtttagatttttaacacagaccctgtcataaaatctgtacattagggtcaaaaggtaaaagtaacaaattctgccatattgtaaatttccagtgcaggctttaatttttttttttcattagtagcactgaaaaaatattactgcatgggtatgttctagttcagtttataaagttttaaaggcttatttgaggcatacctcactgttacgcacactggtaatttaaccatgcccctaagtattccttttctcctgcatttgatgcagcccaacaaagcttttgttttgaaataaatttgactaccctgtccatagctacagtagattatttgtggtttaaggctcctggtgtctcaggttccaaaggaaaagcttacatatttttcccttagtttgaatatatgattggttgggttaaaagataatgatctgtgtagtatttagataagctttatgctgcatcctgaaaaactcatggtgaacacagtcctttttccccatcactatggaccagcatttactctcactttgctcccttgggacaagagtttactgttaaatgttttcatttcacagagtctcaaggtgcaaataatttaaaagactgaattctaaactaattatggtactagagggccagttttatctttcattaagaattgcttgctgaattttaaagtttttttcatacaatttatcatagcatttaagtatctttctataacatagatactaacagttttgggagaatgccactggtaactggaaaggggagaaacagatctctcaggatgataaaaattagcactttacagactttcaagtagacctaaacttttaaacaaaagtactcaaggcttttaaggaagcagctctgtgattagctactgaccaagaccctcctatcactggtgtctaatccctatgttacagatgaagacacaggtttagtactttgcccatatagttaaattagtgacagagataggccataagcccacatttgtcttcagtcaaagctttcactcctgtccctgttccactcctgtatacctgaggtccccaacataaactttagatcaggcttagtggtcagcattcctagtacttggaaagttggtattttttacaacagatatatgtaaacatataaaaatttcaaaatgaatgaaaaacagtgactaaatgttccacttcacagttttctgctgaatttttttttttcaggtactggtaatattttagagtttgttaataatttatattgccaacctaccataaaagagattatgatggtatttttctatgaccctgagggtcttaagctattctgagtcagaatacagttgacccttgaacaacacgggtttgaactgtgtgggtccacttatacatggattttcttccacctctgccacccaagatagcaagaccaaccccttctcatcctcagcctattcaacatgaagatgacaaggatgaagaccttcatgatgatccacttccacttaatgaatagtaaatatattttctcttccttataatcttaacaaacattttctcttctctagcttactttattgtaagaatacagtatataatacatatacaaaatatgtgtcaatcgactatgttatccgtaagacttctggtcagcagtaggccatgagtagttaagttttggaggagtcaaagttagatgtggatttttgactacttagggggtctatgcccctaactcctgcattatttgaaggtcaaccgtatagtttctgagaacatgtcagatcagagcctaacttcttactcttgcagttctacctgaggacccgaaggtgaggtgctgtgaaccactccctccatcctcatcataatgcatgtgcgtattactttatttaccatcacctggagaagaaatctcagaatgagagttaaaatccaataatagttcttgggttcaaaataaatgaaaggacagaattctcacatggtttacctatggaggttcaccttatcatgatttaagtggtaagcacagagcagcactgacaacttactgtggttcactgcaaaccaaaacatgatattctttgtagacttagatttcagtgttctgacactatatcccttacaccgtgatttttttagcacccagaactaaattaaggtcttcctaaatactcttcataaaagtattctgacagccagttttccactgcatgtttatgactgcaaatttcataatgcttttaattttggtacactgagtgattctattttaaaaatatttatgcccagaaaactccagtgaccattggacagttaaaaaattttaatgacacgattttaaccaattcacttttgaatttagaccaatcagtaaaggagatcagtcctccttttgcttcagtaccttattttacaacagtgtaaatgaactgtaatgaaaacacccacatgaagagactgtcctgaaaactcctagtgtttccaacaacgagaccatgagctgagtcactgtggatgatttaaaattaataaataaataaaacttggaatgaaaaacctttcagtaacccctgcagttgtgaaaaggtaaaaacattctcaatgcaaaaggtgagtggttgacattaatttttttaagaaatca

SEQ ID NO: 448615 - DNA, 4269 bp, Homo sapiens
  misc_feature (53)..(53): n is a, c, g, or t
tggtgcatcggtgctgggtgatgctgttcagaggagtcccgtgcgtcagcatncaagacaggttcaagggtctctccagaaaatcttgtggacaaatccaggggaagtaggcctggaaaatccccagagaggagtcacgtctcttcggagccctacgagcccatctccccaccccaggttccggttgtgcatgagaaacaggacagcttgctgctcttgtctcagaggggcgcagagcctgcagagcagaggaatgatgcccgctcaccagggagtataagctacttgccttcattcttcaccaagcttgaaaatacatcacccatggttaaatcaaagaagcaggagatttttcgtaagttgaactcctctggtggaggtgactctgatatggcagctgctcagccaggaactgagatctttaatctgccagcagttactacgtcaggctcagttagctctagaggccattcttttgctgatcctgccagtaatcttgggctggaagacattatcaggaaggctctcatgggaagctttgatgacaaagttgaggatcatggagttgtcatgtcccagcctatgggagtagtgcctggtactgccaacacctcagttgtgaccagtggtgagacacgaagagaggaaggggacccatcacctcattcaggaggagtttgcaaaccaaagctgatcagcaagtcaaacagcaggaaatctaagtctcctatacctgggcaaggctacttaggaacggaacggccctcttcagtctcctctgtacattcagaaggggattaccataggcagacgccagggtgggcctgggaagacaggccctcttcaacaggctcaactcagtttccttataaccctctgactatgcggatgctcagcagtactccaccaacaccgattgcatgtgctccctctgcggtgaaccaagcagctcctcaccaacagaacaggatctgggagcgagagcctgccccactgctctcagcacagtacgagaccctgtcggatagtgatgactgaactgcacaaagtgaggggaacagggtgcaggagagggatctctagtttttgtggtttaatttttagtagcaggtcaaaaacctgccctcctgtgacttattccctgagacttttcaggagagccagcccacagatgatgaagaaatgatggaagttcatttggagagtcaaatgggaaaaaaacaaacaaaaaactgcctttgatacaggcaattcagtggactataataatagtggagggttgagatgtagagtttttaaaaagtgaacagttgctgttcttacatctgtaaagaaaaccataatgtctttaaatcactcttctgtaaatagatgacctttttgcagtgtatatccccttgctgtagtatctggtgtacttatgttcaaatcagcgcatcaactttgggggtgatttttaaaaatctttttgtctatctatctttttaaccctagccttctaaacaacctcatacagcccagttacataatgttggctgtcacgggcattgtacttttatctgatattgtttcctctaaattcagctttccagtgatgtttaaaatcttgtgaaaatgtttagatttttaacacagaccctgtcataaaatctgtacattagggtcaaaaggtaaaagtaacaaattctgccatattgtaaatttccagtgcaggctttaatttttttttttcattagtagcactgaaaaaatattactgcatgggtatgttctagttcagtttataaagttttaaaggcttatttgaggcatacctcactgttacgcacactggtaatttaaccatgcccctaagtattccttttctcctgcatttgatgcagcccaacaaagcttttgttttgaaataaatttgactaccctgtccatagctacagtagattatttgtggtttaaggctcctggtgtctcaggttccaaaggaaaagcttacatatttttcccttagtttgaatatatgattggttgggttaaaagataatgatctgtgtagtatttagataagctttatgctgcatcctgaaaaactcatggtgaacacagtcctttttccccatcactatggaccagcatttactctcactttgctcccttgggacaagagtttactgttaaatgttttcatttcacagagtctcaaggtgcaaataatttaaaagactgaattctaaactaattatggtactagagggccagttttatctttcattaagaattgcttgctgaattttaaagtttttttcatacaatttatcatagcatttaagtatctttctataacatagatactaacagttttgggagaatgccactggtaactggaaaggggagaaacagatctctcaggatgataaaaattagcactttacagactttcaagtagacctaaacttttaaacaaaagtactcaaggcttttaaggaagcagctctgtgattagctactgaccaagaccctcctatcactggtgtctaatccctatgttacagatgaagacacaggtttagtactttgcccatatagttaaattagtgacagagataggccataagcccacatttgtcttcagtcaaagctttcactcctgtccctgttccactcctgtatacctgaggtccccaacataaactttagatcaggcttagtggtcagcattcctagtacttggaaagttggtattttttacaacagatatatgtaaacatataaaaatttcaaaatgaatgaaaaacagtgactaaatgttccacttcacagttttctgctgaatttttttttttcaggtactggtaatattttagagtttgttaataatttatattgccaacctaccataaaagagattatgatggtatttttctatgaccctgagggtcttaagctattctgagtcagaatacagttgacccttgaacaacacgggtttgaactgtgtgggtccacttatacatggattttcttccacctctgccacccaagatagcaagaccaaccccttctcatcctcagcctattcaacatgaagatgacaaggatgaagaccttcatgatgatccacttccacttaatgaatagtaaatatattttctcttccttataatcttaacaaacattttctcttctctagcttactttattgtaagaatacagtatataatacatatacaaaatatgtgtcaatcgactatgttatccgtaagacttctggtcagcagtaggccatgagtagttaagttttggaggagtcaaagttagatgtggatttttgactacttagggggtctatgcccctaactcctgcattatttgaaggtcaaccgtatagtttctgagaacatgtcagatcagagcctaacttcttactcttgcagttctacctgaggacccgaaggtgaggtgctgtgaaccactccctccatcctcatcataatgcatgtgcgtattactttatttaccatcacctggagaagaaatctcagaatgagagttaaaatccaataatagttcttgggttcaaaataaatgaaaggacagaattctcacatggtttacctatggaggttcaccttatcatgatttaagtggtaagcacagagcagcactgacaacttactgtggttcactgcaaaccaaaacatgatattctttgtagacttagatttcagtgttctgacactatatcccttacaccgtgatttttttagcacccagaactaaattaaggtcttcctaaatactcttcataaaagtattctgacagccagttttccactgcatgtttatgactgcaaatttcataatgcttttaattttggtacactgagtgattctattttaaaaatatttatgcccagaaaactccagtgaccattggacagttaaaaaattttaatgacacgattttaaccaattcacttttgaatttagaccaatcagtaaaggagatcagtcctccttttgcttcagtaccttattttacaacagtgtaaatgaactgtaatgaaaacacccacatgaagagactgtcctgaaaactcctagtgtttccaacaacgagaccatgagctgagtcactgtggatgatttaaaattaataaataaataaaacttggaatgaaaaacctttcagtaacccctgcagttgtgaaaaggtaaaaacattctcaatgcaaaaggtgagtggttgacattaatttttttaagaaatca

SEQ ID NO: 448616 - DNA, 4275 bp, Homo sapiens
tggattaagatggtctctgggctgggtgcggtggctcacgcctgtaatcccagcactttgggaggccaaggcgggcggatcacctgaggttcggaattcgagatcagcctgaccaatatggtgaaaccccatctcctaaaaatacaaaaaattagcctggtgtggtggtgggtgcctgtagtcccagctacttgggagactgaggtaggagaatcccttgaatctgggaggcggaggttgcagtgagccaagatcgcgccactgcactccagcctgggtgcgacagagagagactctgtctccaaaaaaaaaggtctctgtgtggtgggtcctggtattgttctaggtcacttgccaagtgctgtgtgtattcagtgggctgatggggcaatgcatgtttgtttcctgattggcctttcagaaataagtggaaatgtttttgattctctttcaggctcagttagctctagaggccattcttttgctgatcctgccagtaatcttgggctggaagacattatcaggaaggctctcatgggaagctttgatgacaaagttgaggatcatggagttgtcatgtcccagcctatgggagtagtgcctggtactgccaacacctcagttgtgaccagtggtgagacacgaagagaggaaggggacccatcacctcattcaggaggagtttgcaaaccaaagctgatcagcaagtcaaacagcaggaaatctaagtctcctatacctgggcaaggctacttaggaacggaacggccctcttcagtctcctctgtacattcagaaggggattaccataggcagacgccagggtgggcctgggaagacaggccctcttcaacaggctcaactcagtttccttataaccctctgactatgcggatgctcagcagtactccaccaacaccgattgcatgtgctccctctgcggtgaaccaagcagctcctcaccaacagaacaggatctgggagcgagagcctgccccactgctctcagcacagtacgagaccctgtcggatagtgatgactgaactgcacaaagtgaggggaacagggtgcaggagagggatctctagtttttgtggtttaatttttagtagcaggtcaaaaacctgccctcctgtgacttattccctgagacttttcaggagagccagcccacagatgatgaagaaatgatggaagttcatttggagagtcaaatgggaaaaaaacaaacaaaaaactgcctttgatacaggcaattcagtggactataataatagtggagggttgagatgtagagtttttaaaaagtgaacagttgctgttcttacatctgtaaagaaaaccataatgtctttaaatcactcttctgtaaatagatgacctttttgcagtgtatatccccttgctgtagtatctggtgtacttatgttcaaatcagcgcatcaactttgggggtgatttttaaaaatctttttgtctatctatctttttaaccctagccttctaaacaacctcatacagcccagttacataatgttggctgtcacgggcattgtacttttatctgatattgtttcctctaaattcagctttccagtgatgtttaaaatcttgtgaaaatgtttagatttttaacacagaccctgtcataaaatctgtacattagggtcaaaaggtaaaagtaacaaattctgccatattgtaaatttccagtgcaggctttaatttttttttttcattagtagcactgaaaaaatattactgcatgggtatgttctagttcagtttataaagttttaaaggcttatttgaggcatacctcactgttacgcacactggtaatttaaccatgcccctaagtattccttttctcctgcatttgatgcagcccaacaaagcttttgttttgaaataaatttgactaccctgtccatagctacagtagattatttgtggtttaaggctcctggtgtctcaggttccaaaggaaaagcttacatatttttcccttagtttgaatatatgattggttgggttaaaagataatgatctgtgtagtatttagataagctttatgctgcatcctgaaaaactcatggtgaacacagtcctttttccccatcactatggaccagcatttactctcactttgctcccttgggacaagagtttactgttaaatgttttcatttcacagagtctcaaggtgcaaataatttaaaagactgaattctaaactaattatggtactagagggccagttttatctttcattaagaattgcttgctgaattttaaagtttttttcatacaatttatcatagcatttaagtatctttctataacatagatactaacagttttgggagaatgccactggtaactggaaaggggagaaacagatctctcaggatgataaaaattagcactttacagactttcaagtagacctaaacttttaaacaaaagtactcaaggcttttaaggaagcagctctgtgattagctactgaccaagaccctcctatcactggtgtctaatccctatgttacagatgaagacacaggtttagtactttgcccatatagttaaattagtgacagagataggccataagcccacatttgtcttcagtcaaagctttcactcctgtccctgttccactcctgtatacctgaggtccccaacataaactttagatcaggcttagtggtcagcattcctagtacttggaaagttggtattttttacaacagatatatgtaaacatataaaaatttcaaaatgaatgaaaaacagtgactaaatgttccacttcacagttttctgctgaatttttttttttcaggtactggtaatattttagagtttgttaataatttatattgccaacctaccataaaagagattatgatggtatttttctatgaccctgagggtcttaagctattctgagtcagaatacagttgacccttgaacaacacgggtttgaactgtgtgggtccacttatacatggattttcttccacctctgccacccaagatagcaagaccaaccccttctcatcctcagcctattcaacatgaagatgacaaggatgaagaccttcatgatgatccacttccacttaatgaatagtaaatatattttctcttccttataatcttaacaaacattttctcttctctagcttactttattgtaagaatacagtatataatacatatacaaaatatgtgtcaatcgactatgttatccgtaagacttctggtcagcagtaggccatgagtagttaagttttggaggagtcaaagttagatgtggatttttgactacttagggggtctatgcccctaactcctgcattatttgaaggtcaaccgtatagtttctgagaacatgtcagatcagagcctaacttcttactcttgcagttctacctgaggacccgaaggtgaggtgctgtgaaccactccctccatcctcatcataatgcatgtgcgtattactttatttaccatcacctggagaagaaatctcagaatgagagttaaaatccaataatagttcttgggttcaaaataaatgaaaggacagaattctcacatggtttacctatggaggttcaccttatcatgatttaagtggtaagcacagagcagcactgacaacttactgtggttcactgcaaaccaaaacatgatattctttgtagacttagatttcagtgttctgacactatatcccttacaccgtgatttttttagcacccagaactaaattaaggtcttcctaaatactcttcataaaagtattctgacagccagttttccactgcatgtttatgactgcaaatttcataatgcttttaattttggtacactgagtgattctattttaaaaatatttatgcccagaaaactccagtgaccattggacagttaaaaaattttaatgacacgattttaaccaattcacttttgaatttagaccaatcagtaaaggagatcagtcctccttttgcttcagtaccttattttacaacagtgtaaatgaactgtaatgaaaacacccacatgaagagactgtcctgaaaactcctagtgtttccaacaacgagaccatgagctgagtcactgtggatgatttaaaattaataaataaataaaacttggaatgaaaaacctttcagtaacccctgcagttgtgaaaaggtaaaaacattctcaatgcaaaaggtgagtggttgacattaatttttttaagaaatca

SEQ ID NO: 448617 - DNA, 5425 bp, Homo sapiens
gggttgagtcaagatggcggccaaggtggcgaagcagcagccgcggcggcggcggcggctggagtgagcgtccgactcgccgcgccgaacgaggtcccggtgtagggccgcgcgccgtggccgcgtcccactcctcaggccggggcgcacgtcggctcccacgcttagccagctcccggtggtttcctagaaacatgattgtttattggcattgatctcacagtctggtgaggacttctttactgataatgtcaagttcaggttatcctcccaaccaaggagcattcagcacagaacaaagtcgttatcctcctcactctgtccagtatacatttcccaacacccgccaccagcaggagttcgcagtccctgattatcgttcctctcatcttgaagtgagtcaggcatcacagcttttgcagcaacagcagcagcaacagcttcgaaggcgaccttccttgctttcagaatttcacccaggttctgacaggcctcaagaaaggagaactagttatgaaccgtttcatccaggcccatccccagtggatcatgattcactggaatcgaagcgaccacgtctggaacaggtttctgattctcattttcagcgtgtcagtgctgcggttttgcctttagtgcacccgctgccagaagggctgagggcttctgcagatgctaagaaggatccagcattcggaggcaaacatgaagctccatcctctccaatttcggggcaaccatgtggagatgatcaaaatgcttcaccttcaaaactctcaaaggaagagttaatacagagtatggatcgtgtagatcgagaaattgcaaaagtagaacagcagatccttaaactgaaaaagaaacaacaacagcttgaagaagaggcagctaaacctcctgagcctgagaagcccgtgtcccctcctcctgtggagcagaaacaccgcagtattgtccaaattatttatgatgagaatcggaaaaaagcagaagaagctcataaaatttttgaaggtcttggcccaaaagttgaactgccactgtataaccagccatcagataccaaggtgtaccatgagaacatcaagacaaaccaggtgatgaggaaaaaactcattttattttttaaaagaagaaatcatgcaagaaaacaaagggaacaaaaaatctgccagcgttatgatcagctcatggaggcatgggagaaaaaagtggacagaatagaaaataatcctcggaggaaagctaaagaaagcaaaacaagggaatactatgaaaagcagtttccagaaattcgaaaacaaagagaacagcaagaaagatttcagcgagttgggcagaggggagctggtctttcagccaccattgctaggagtgagcatgagatttctgaaattattgatgggctctctgagcaggagaataatgagaaacaaatgcggcagctctctgtgattccacctatgatgtttgatgcagaacaaagacgagtcaagttcattaacatgaatgggcttatggaggaccctatgaaagtgtataaagataggcagtttatgaatgtttggactgaccatgaaaaggagatctttaaggacaagtttatccagcatccaaaaaactttggactaattgcatcatacttggagaggaagagtgttcctgattgtgttttgtattactatttaaccaagaaaaatgagaattataaagccctcgtcagaaggaattatgggaaacgcagaggcagaaaccagcaaattgctcgaccctcgcaagaagaaaaagtagaagaaaaagaagaggataaagcagaaaaaacagaaaaaaaagaagaagaaaagaaagatgaagaggaaaaagatgaaaaagaagactccaaagaaaataccaaggaaaaggacaagatagatggtacagcagaagaaactgaggaaagagagcaagccacaccccgggggcgaaagactgccaacagtcagggccgccgtaagggccggatcaccaggtccatgacaaacgaagctgcagctgccagtgctgcagccgcagcggctactgaagagcccccaccacctctgccaccgccaccagaacccatttctacagagcctgtggagacctctcgatggacagaagaagaaatggaagttgctaaaaaaggtctagtagaacatggtcgtaactgggcagcaattgctaaaatggtgggaacgaaaagtgaagctcaatgtaaaaacttctattttaactataaaaggcgacacaatcttgacaacctcttacagcagcataaacagaaaacttcacgaaaacctcgtgaagagcgagatgtgtctcaatgtgaaagtgtcgcttccactgtttctgctcaggaggatgaagatattgaagcctccaatgaagaagaaaatccagaagacagcgaaggtgcagaaaatagttctgatacagaaagtgctccttctccttcaccagttgaagctgtcaagcccagcgaggacagtcctgaaaatgctacttctcgaggaaacacagaacctgcggttgagcttgagcccaccacggaaactgcacccagtacatctccctccttagcagttccaagtacaaaaccagctgaagatgaaagtgtggagacccaggtgaatgacagcatcagtgctgagacagcagagcagatggatgtagatcagcaggagcacagtgctgaagagggttctgtttgtgatcccccacccgctaccaaagctgactctgtggacgttgaagtgagggtgccagaaaaccatgcatctaaagttgaaggtgataataccaaagaaagagacttggatagagccagtgagaaggtggaacctagagatgaagatttggtggtagctcagcaaataaatgcccaaaggcccgagccccagtcagacaatgattccagtgccacgtgcagcgctgatgaggatgtggatggagagccagagaggcagagaatgtttcctatggactcaaagccttcactgttaaaccccactggatctatactcgtctcatctccgttaaaaccaaatccactggatctgccacagcttcagcatcgagctgctgttatcccaccaatggtatcctgcaccccatgtaacataccaattggaaccccagtgagcggctatgctctctaccagcgacacattaaagcaatgcatgagtcagcactcctggaggagcagcggcagagacaagaacagatagatttggaatgtagaagttctacaagtccatgtggcacatccaagagtccaaacagagagtgggaagtccttcagcctgctccacatcaagtgataactaatctccctgaaggcgttcggcttccgacaactcgaccaaccaggccaccgccccctctcatcccgtcatccaaaaccacagtggcttcagaaaaaccatcttttataatgggaggctccatctcacagggaacaccaggcacttatttgacttctcataatcaggcttcctacactcaagaaacacccaagccgtcagtgggatctatctctcttggactgccacggcaacaggaatctgccaaatcagctactttgccctacatcaagcaggaagaattttctccccgaagccaaaactcacaacctgagggtctgttggtcagggcccaacatgaaggtgtagtcagaggtaccgcaggagccatacaagaaggaagtataactcggggaactccaaccagcaaaatttcagtggagagcattccatccctacggggctctatcactcagggcaccccggctctgccccagactggcataccaacagaggctttggtgaaggggtccatttcgagaatgcccattgaagacagcagtcctgagaaaggcagagaggaagctgcatccaaaggccatgttatttatgaaggcaaaagtggacatatcttgtcatatgataatattaagaatgcccgagaagggactaggagtccaagaacagctcatgaaatcagtttaaagagaagctatgaatcagtggaaggaaatataaagcaagggatgtcaatgagggagtctcctgtatcagcaccgttagaggggctgatatgccgagcattacccagggggagtcctcattctgacctcaaagaaaggactgtattgtctggctccataatgcaggggacaccaagagcaacaactgaaagctttgaagatggccttaaatatcccaaacaaattaaaagggaaagtcctcccatacgagcatttgaaggtgccattaccaaaggaaaaccatatgatggcatcaccaccatcaaagaaatggggcgttccattcatgagattccaaggcaagatattttaactcaggaaagtcggaaaactccagaagtggtccagagcacacggccgataattgagggttccatttcccagggcacaccaataaagtttgacaacaactcaggtcaatctgccatcaaacacaatgtcaaatccttaatcacggggcctagcaaactatcccgtggaatgcctccgctggaaattgtgccagagaacataaaagtggtagaacggggaaaatatgaggatgtgaaagcaggcgagaccgtgcgttcccggcacacgtcagtggtaagctctggcccctccgttcttaggtccacactgcatgaagctcccaaagcacaactgagccctgggatttatgatgacaccagtgcacggaggacccctgtgagttatcaaaacaccatgtccagaggctcacccatgatgaacagaacttctgatgttacaatttcttctaacaagtctaccaatcatgaaaggaaatcgacactgacccctacccagagggaaagtatcccagcgaagtctccagtgcctggggtggaccctgtcgtgagccacagtccgtttgatccccatcacagaggcagcactgcaggcgaggtttatcggagccacctgcccacgcacttggatccagccatgccttttcacagggctttggatcctggtaaacacaaaatatagtgataatttatggcaaataaatatgccaccagtatgacttttcagctttctgttgttgtacaatatagtacaattgcaaatatcattaatgtacagctcagtgaattttcacaaactaaattctcccatgttaccagcacccagatcaagaaataaaatcttatcagcacccggtaaagaactaaaaagaatagtatatgaaaagctctcttatctgatggcacttggtgaaactagttgaaaaagtggattaatgtgaataattattttaaaatgacagaggcatacctaaacatgttaacttacagcataaatagacgttcatttaccagaactctgatctaatgccaaggctttttcataaacaagtg

SEQ ID NO: 448618 - DNA, 4083 bp, Homo sapiens
gggttgagtcaagatggcggccaaggtggcgaagcagcagccgcggcggcggcggcggctggagtgagcgtccgactcgccgcgccgaacgaggtcccggtgtagggccgcgcgccgtggccgcgtcccactcctcaggccggggcgcacgtcggctcccacgcttagccagctcccggtggtttcctagaaacatgattgtttattggcattgatctcacagtctggtgaggacttctttactgataatgtcaagttcaggttatcctcccaaccaaggagcattcagcacagaacaaagtcgttatcctcctcactctgtccagtatacatttcccaacacccgccaccagcaggagttcgcagtccctgattatcgttcctctcatcttgaagtgagtcaggcatcacagcttttgcagcaacagcagcagcaacagcttcgaaggcgaccttccttgctttcagaatttcacccaggttctgacaggcctcaagaaaggagaactagttatgaaccgtttcatccaggcccatccccagtggatcatgattcactggaatcgaagcgaccacgtctggaacaggtttctgattctcattttcagcgtgtcagtgctgcggttttgcctttagtgcacccgctgccagaagggctgagggcttctgcagatgctaagaaggatccagcattcggaggcaaacatgaagctccatcctctccaatttcggggcaaccatgtggagatgatcaaaatgcttcaccttcaaaactctcaaaggaagagttaatacagagtatggatcgtgtagatcgagaaattgcaaaagtagaacagcagatccttaaactgaaaaagaaacaacaacagcttgaagaagaggcagctaaacctcctgagcctgagaagcccgtgtcccctcctcctgtggagcagaaacaccgcagtattgtccaaattatttatgatgagaatcggaaaaaagcagaagaagctcataaaatttttgaaggtcttggcccaaaagttgaactgccactgtataaccagccatcagataccaaggtgtaccatgagaacatcaagacaaaccaggtgatgaggaaaaaactcattttattttttaaaagaagaaatcatgcaagaaaacaaagggaacaaaaaatctgccagcgttatgatcagctcatggaggcatgggagaaaaaagtggacagaatagaaaataatcctcggaggaaagctaaagaaagcaaaacaagggaatactatgaaaagcagtttccagaaattcgaaaacaaagagaacagcaagaaagatttcagcgagttgggcagaggggagctggtctttcagccaccattgctaggagtgagcatgagatttctgaaattattgatgggctctctgagcaggagaataatgagaaacaaatgcggcagctctctgtgattccacctatgatgtttgatgcagaacaaagacgagtcaagttcattaacatgaatgggcttatggaggaccctatgaaagtgtataaagataggcagtttatgaatgtttggactgaccatgaaaaggagatctttaaggacaagtttatccagcatccaaaaaactttggactaattgcatcatacttggagaggaagagtgttcctgattgtgttttgtattactatttaaccaagaaaaatgagaattataaagccctcgtcagaaggaattatgggaaacgcagaggcagaaaccagcaaattgctcgaccctcgcaagaagaaaaagtagaagaaaaagaagaggataaagcagaaaaaacagaaaaaaaagaagaagaaaagaaagatgaagaggaaaaagatgaaaaagaagactccaaagaaaataccaaggaaaaggacaagatagatggtacagcagaagaaactgaggaaagagagcaagccacaccccgggggcgaaagactgccaacagtcagggccgccgtaagggccggatcaccaggtccatgacaaacgaagctgcagctgccagtgctgcagccgcagcggctactgaagagcccccaccacctctgccaccgccaccagaacccatttctacagagcctgtggagacctctcgatggacagaagaagaaatggaagttgctaaaaaaggtctagtagaacatggtcgtaactgggcagcaattgctaaaatggtgggaacgaaaagtgaagctcaatgtaaaaacttctattttaactataaaaggcgacacaatcttgacaacctcttacagcagcataaacagaaaacttcacgaaaacctcgtgaagagcgagatgtgtctcaatgtgaaagtgtcgcttccactgtttctgctcaggaggatgaagatattgaagcctccaatgaagaagaaaatccagaagacagcgaaggtgcagaaaatagttctgatacagaaagtgctccttctccttcaccagttgaagctgtcaagcccagcgaggacagtcctgaaaatgctacttctcgaggaaacacagaacctgcggttgagcttgagcccaccacggaaactgcacccagtacatctccctccttagcagttccaagtacaaaaccagctgaagatgaaagtgtggagacccaggtgaatgacagcatcagtgctgagacagcagagcagatggatgtagatcagcaggagcacagtgctgaagagggttctgtttgtgatcccccacccgctaccaaagctgactctgtggacgttgaagtgagggtgccagaaaaccatgcatctaaagttgaaggtgataataccaaagaaagagacttggatagagccagtgagaaggtggaacctagagatgaagatttggtggtagctcagcaaataaatgcccaaaggcccgagccccagtcagacaatgattccagtgccacgtgcagcgctgatgaggatgtggatggagagccagagaggcagagaatgtttcctatggactcaaagccttcactgttaaaccccactggatctatactcgtctcatctccgttaaaaccaaatccactggatctgccacagcttcagcatcgagctgctgttatcccaccaatggtatcctgcaccccatgtaacataccaattggaaccccagtgagcggctatgctctctaccagcgacacattaaagcaatgcatgagtcagcactcctggaggagcagcggcagagacaagaacagatagatttggaatgtagaagttctacaagtccatgtggcacatccaagagtccaaacagagagtgggaagtccttcagcctgctccacatcaagtgataactaatctccctgaaggcgttcggcttccgacaactcgaccaaccaggccaccgccccctctcatcccgtcatccaaaaccacagtggcttcagaaaaaccatcttttataatgggaggctccatctcacagggaacaccaggcacttatttgacttctcataatcaggcttcctacactcaagaaacacccaagccgtcagtgggatctatctctcttggactgccacggcaacaggaatctgccaaatcagctactttgccctacatcaagcaggaagaattttctccccgaagccaaaactcacaacctgagggtctgttggtcagggcccaacatgaaggtgtagtcagaggtaccgcaggagccatacaagaaggaagtataactcggggaactccaaccagcaaaatttcagtggagagcattccatccctacggggctctatcactcagggcaccccggctctgcccctgaccaacagaccctcaggtcgtgagttttggcttcggggagaaaattcttcctgcttggaaatctccaatagagattacaatagagatctccaacatgatttcatgcctttagaggagaaatatttcctggtctaagtggaatattgtgcggatatggcttctggaaaaccttcattctaaagcagcgttatagttgaacatttcatttagaactctggacgtaccttcttcagcttgctgtaatccacattcactgagtagaact

SEQ ID NO: 448619 - DNA, 3605 bp, Homo sapiens
gggttgagtcaagatggcggccaaggtggcgaagcagcagccgcggcggcggcggcggctggagtgagcgtccgactcgccgcgccgaacgaggtcccggtgtagggccgcgcgccgtggccgcgtcccactcctcaggccggggcgcacgtcggctcccacgcttagccagctcccggtggtttcctagaaacatgattgtttattggcattgatctcacagtctggtgaggacttctttactgataatgtcaagttcaggttatcctcccaaccaaggagcattcagcacagaacaaagtcgttatcctcctcactctgtccagtatacatttcccaacacccgccaccagcaggagttcgcagtccctgattatcgttcctctcatcttgaagtgagtcaggcatcacagcttttgcagcaacagcagcagcaacagcttcgaaggcgaccttccttgctttcagaatttcacccaggttctgacaggcctcaagaaaggagaactagttatgaaccgtttcatccaggcccatccccagtggatcatgattcactggaatcgaagcgaccacgtctggaacaggtttctgattctcattttcagcgtgtcagtgctgcggttttgcctttagtgcacccgctgccagaagggctgagggcttctgcagatgctaagaaggatccagcattcggaggcaaacatgaagctccatcctctccaatttcggggcaaccatgtggagatgatcaaaatgcttcaccttcaaaactctcaaaggaagagttaatacagagtatggatcgtgtagatcgagaaattgcaaaagtagaacagcagatccttaaactgaaaaagaaacaacaacagcttgaagaagaggcagctaaacctcctgagcctgagaagcccgtgtcccctcctcctgtggagcagaaacaccgcagtattgtccaaattatttatgatgagaatcggaaaaaagcagaagaagctcataaaatttttgaaggtcttggcccaaaagttgaactgccactgtataaccagccatcagataccaaggtgtaccatgagaacatcaagacaaaccaggtgatgaggaaaaaactcattttattttttaaaagaagaaatcatgcaagaaaacaaagggaacaaaaaatctgccagcgttatgatcagctcatggaggcatgggagaaaaaagtggacagaatagaaaataatcctcggaggaaagctaaagaaagcaaaacaagggaatactatgaaaagcagtttccagaaattcgaaaacaaagagaacagcaagaaagatttcagcgagttgggcagaggggagctggtctttcagccaccattgctaggagtgagcatgagatttctgaaattattgatgggctctctgagcaggagaataatgagaaacaaatgcggcagctctctgtgattccacctatgatgtttgatgcagaacaaagacgagtcaagttcattaacatgaatgggcttatggaggaccctatgaaagtgtataaagataggcagtttatgaatgtttggactgaccatgaaaaggagatctttaaggacaagtttatccagcatccaaaaaactttggactaattgcatcatacttggagaggaagagtgttcctgattgtgttttgtattactatttaaccaagaaaaatgagaattataaagccctcgtcagaaggaattatgggaaacgcagaggcagaaaccagcaaattgctcgaccctcgcaagaagaaaaagtagaagaaaaagaagaggataaagcagaaaaaacagaaaaaaaagaagaagaaaagaaagatgaagaggaaaaagatgaaaaagaagactccaaagaaaataccaaggaaaaggacaagatagatggtacagcagaagaaactgaggaaagagagcaagccacaccccgggggcgaaagactgccaacagtcagggccgccgtaagggccggatcaccaggtccatgacaaacgaagctgcagctgccagtgctgcagccgcagcggctactgaagagcccccaccacctctgccaccgccaccagaacccatttctacagagcctgtggagacctctcgatggacagaagaagaaatggaagttgctaaaaaaggtctagtagaacatggtcgtaactgggcagcaattgctaaaatggtgggaacgaaaagtgaagctcaatgtaaaaacttctattttaactataaaaggcgacacaatcttgacaacctcttacagcagcataaacagaaaacttcacgaaaacctcgtgaagagcgagatgtgtctcaatgtgaaagtgtcgcttccactgtttctgctcaggaggatgaagatattgaagcctccaatgaagaagaaaatccagaagacagcgaaggtgcagaaaatagttctgatacagaaagtgctccttctccttcaccagttgaagctgtcaagcccagcgaggacagtcctgaaaatgctacttctcgaggaaacacagaacctgcggttgagcttgagcccaccacggaaactgcacccagtacatctccctccttagcagttccaagtacaaaaccagctgaagatgaaagtgtggagacccaggtgaatgacagcatcagtgctgagacagcagagcagatggatgtagatcagcaggagcacagtgctgaagagggttctgtttgtgatcccccacccgctaccaaagctgactctgtggacgttgaagtgagggtgccagaaaaccatgcatctaaagttgaaggtgataataccaaagaaagagacttggatagagccagtgagaaggtggaacctagagatgaagatttggtggtagctcagcaaataaatgcccaaaggcccgagccccagtcagacaatgattccagtgccacgtgcagcgctgatgaggatgtggatggagagccagagaggcagagaatgtttcctatggactcaaagccttcactgttaaaccccactggatctatactcgtctcatctccgttaaaaccaaatccactggatctgccacagcttcagcatcgagctgctgttatcccaccaatggtatcctgcaccccatgtaacataccaattggaaccccagtgagcggctatgctctctaccagcgacacattaaagcaatgcatgagtcagcactcctggaggagcagcggcagagacaagaacagatagatttggaatgtagaagttctacaagtccatgtggcacatccaagagtccaaacagagagtgggaaggtaggtagatagagctatcaccaagagaacttttatgaagggaaataaagctaaacccaaaagcagtgtccattgtgctttgtaagttgtcagcctcccaactgattattatatttgtcctaacagacacagttccttaaattgaccttaaactatgaagaaatgttagtattattaactactaaaggatgccagtaacatttttaatagcattctagttaatgtgaattttctgatattcatctttgtgctggaagacattataaataaagttatgctttatgttccgttca

SEQ ID NO: 448620 - DNA, 2452 bp, Homo sapiens
gggttgagtcaagatggcggccaaggtggcgaagcagcagccgcggcggcggcggcggctggagtgagcgtccgactcgccgcgccgaacgaggtcccggtgtagggccgcgcgccgtggccgcgtcccactcctcaggccggggcgcacgtcggctcccacgcttagccagctcccggtggtttcctagaaacatgattgtttattggcattgatctcacagtctggtgaggacttctttactgataatgtcaagttcaggttatcctcccaaccaaggagcattcagcacagaacaaagtcgttatcctcctcactctgtccagtatacatttcccaacacccgccaccagcaggagttcgcagtccctgattatcgttcctctcatcttgaagtgagtcaggcatcacagcttttgcagcaacagcagcagcaacagcttcgaaggcgaccttccttgctttcagaatttcacccaggttctgacaggcctcaagaaaggagaactagttatgaaccgtttcatccaggcccatccccagtggatcatgattcactggaatcgaagcgaccacgtctggaacaggtttctgattctcattttcagcgtgtcagtgctgcggttttgcctttagtgcacccgctgccagaagggctgagggcttctgcagatgctaagaaggatccagcattcggaggcaaacatgaagctccatcctctccaatttcggggcaaccatgtggagatgatcaaaatgcttcaccttcaaaactctcaaaggaagagttaatacagagtatggatcgtgtagatcgagaaattgcaaaagtagaacagcagatccttaaactgaaaaagaaacaacaacagcttgaagaagaggcagctaaacctcctgagcctgagaagcccgtgtcccctcctcctgtggagcagaaacaccgcagtattgtccaaattatttatgatgagaatcggaaaaaagcagaagaagctcataaaatttttgaaggtcttggcccaaaagttgaactgccactgtataaccagccatcagataccaaggtgtaccatgagaacatcaagacaaaccaggtgatgaggaaaaaactcattttattttttaaaagaagaaatcatgcaagaaaacaaagggaacaaaaaatctgccagcgttatgatcagctcatggaggcatgggagaaaaaagtggacagaatagaaaataatcctcggaggaaagctaaagaaagcaaaacaagggaatactatgaaaagcagtttccagaaattcgaaaacaaagagaacagcaagaaagatttcagcgagttgggcagaggggagctggtctttcagccaccattgctaggagtgagcatgagatttctgaaattattgatgggctctctgagcaggagaataatgagaaacaaatgcggcagctctctgtgattccacctatgatgtttgatgcagaacaaagacgagtcaagttcattaacatgaatgggcttatggaggaccctatgaaagtgtataaagataggcagtttatgaatgtttggactgaccatgaaaaggagatctttaaggacaagtttatccagcatccaaaaaactttggactaattgcatcatacttggagaggaagagtgttcctgattgtgttttgtattactatttaaccaagaaaaatgagaattataaagccctcgtcagaaggaattatgggaaacgcagaggcagaaaccagcaaattgctcgaccctcgcaagaagaaaaagtagaagaaaaagaagaggataaagcagaaaaaacagaaaaaaaagaagaagaaaagaaagatgaagaggaaaaagatgaaaaagaagactccaaagaaaataccaaggaaaaggacaagatagatggtacagcagaagaaactgaggaaagagagcaagccacaccccgggggcgaaagactgccaacagtcagggccgccgtaagggccggatcaccaggtccatgacaaacgaagctgcagctgccagtgctgcagccgcagcggctactgaagagcccccaccacctctgccaccgccaccagaacccatttctacagagcctgtggagacctctcgatggacagaagaagaaatggaagttgctaaaaaaggtctagtagaacatggtcgtaactgggcagcaattgctaaaatggtgggaacgaaaagtgaagctcaatgtaaaaacttctattttaactataaaaggcgacacaatcttgacaacctcttacagcagcataaacagaaaacttcacgaaaacctcgtgaagagcgagatgtgtctcaatgtgaaagtgtcgcttccactgtttctgctcaggaggatgaagatattgaagcctccaatgaagaagaaaatccagaagacagcgaaggtatctcaaaattttaaattta

SEQ ID NO: 448621 - DNA, 886 bp, Homo sapiens
  misc_feature (783)..(783): n is a, c, g, or t
  misc_feature (796)..(796): n is a, c, g, or t
  misc_feature (812)..(812): n is a, c, g, or t
tggattaagatggtctctgggctgggtgcggtggctcacgcctgtaatcccagcactttgggaggccaaggcgggcggatcacctgaggttcggaattcgagatcagcctgaccaatatggtgaaaccccatctcctaaaaatacaaaaaattagcctggtgtggtggtgggtgcctgtagtcccagctacttgggagactgaggtaggagaatcccttgaatctgggaggcggaggttgcagtgagccaagatcgcgccactgcactccagcctgggtgcgacagagagagactctgtctccaaaaaaaaaggtctctgtgtggtgggtcctggtattgttctaggtcacttgccaagtgctgtgtgtattcagtgggctgatggggcaatgcatgtttgtttcctgattggcctttcagaaataagtggaaatgtttttgattctctttcaggctcagttagctctagaggccattcttttgctgatcctgccagtaatcttgggctggaagacattatcaggaaggctctcatgggaagctttgatgacaaagttgaggatcatggagttgtcatgtcccagcctatgggagtagtgcctggtactgccaacacctcagttgtgaccagtggtgagacacgaagagaggaaggggacccatcacctcattcaggtacagctttcattttagtgcttttctgctgcttttccccaaaaaagccagtttatttcccaaattctgatgcatcactaagacatttcatttatgtctttatgtgntcagagtcacctnttagggtttccgttanttaaaaaaggtttttgaaaacctacccagacattataatatgaacagaaataaaatggaagaaaatttttaccc

SEQ ID NO: 448622 - DNA, 2584 bp, Homo sapiens
cgccgcctgtcggcttccggaagctcatctcaaaatgctgaactgctctttggaagtcgccggtgctgttgtagttggagtctgttcacgggcctgagcttcgaggccaggctcccgggtgtcgttaatgttcggggccgccgggcgccaaccgatcggagctccagcagccgggaacagctggcatttcagtagaaccatggaggagctggttcatgaccttgtctcagcattggaagagagctcagagcaagctcgaggtggatttgctgaaacaggagaccattctcgaagtatatcttgccctctgaaacgccaggcaaggaaaaggagagggagaaaacggaggtcgtataatgtgcatcacccgtgggagactggtcactgcttaagtgaaggctctgattctagtttagaagaaccaagcaaggactatagagagaatcacaataataataaaaaagatcacagtgactctgatgaccaaatgttagtagcaaagcgcaggccgtcatcaaacttaaataataatgttcgagggaaaagacctctatggcatgagtctgattttgctgtggacaatgttgggaatagaactctgcgcaggaggagaaaggtaaaacgcatggcagtagatctcccacaggacatctctaacaaacggacaatgacccagccacctgagggttgtagagatcaggacatggacagtgatagagcctaccagtatcaagaatttaccaagaacaaagtcaaaaaaagaaagttgaaaataatcagacaaggaccaaaaatccaagatgaaggagtagttttagaaagtgaggaaacgaaccagaccaataaggacaaaatggaatgtgaagagcaaaaagtctcagatgagctcatgagtgaaagtgattccagcagtctcagcagcactgatgctggattgtttaccaatgatgagggaagacaaggtgatgatgaacagagtgactggttctacgaaaaggaatcaggtggagcatgtggtatcactggagttgtgccctggtgggaaaaggaagatcctactgagctagacaaaaatgtaccagatcctgtctttgaaagtatcttaactggttcttttccccttatgtcacacccaagcagaagaggtttccaagctagactcagtcgccttcatggaatgtcttcaaagaatattaaaaaatctggagggactccaacttcaatggtacccattcctggcccagtgggtaacaagagaatggttcatttttccccggattctcatcaccatgaccattggtttagccctggggctaggacagagcatgaccagcatcagcttctgagagataatcgagctgaaagaggacacaagaaaaattgttctgtgagaacagccagcaggcaaacaagcatgcatttaggatccttatgcacgggagatatcaaacggagaagaaaagctgcacctttgcctggacctactactgcaggatttgtaggtgaaaatgcccagccaatcctagaaaataatattggaaaccgaatgcttcagaatatgggctggacgcctgggtcaggccttggacgagatggcaaggggatctctgagccaattcaagccatgcagaggccaaagggattaggacttggatttcctctaccaaaaagtacttccgcaactactacccccaatgcaggaaaatccgcctaagaaaagcaaagaagaaatgttttacagactttattcactatgtcccattgttctaaaatgataacatgacttctgtttttgaagcaaaaatctacattgcctcaaacacatcactctagcttccttactgcatacagtcctgccatagtgagagaaatgggatttcatcacaattcatggtgctaaaatgaaaacctctgcactttaatttttttcagtaatttccagctatttctaggtataaagagcagctcgtttctcttatttattttagtctcatgtgtcaatactttccgatgctttgcttaattcatgtatgtgtgcagtgctgcaatgcccagacaaacgtgagcacacccaccagtttctaaaatggaatagacaggaaaagattgtgttttatatcatccctatctattgtaacccaaaagacctaccatcgcatcagtgaagtccgaacacatctttgtttgaaaggcttgtcaatttcatattccttgaattggcttcttggtgaggattttctgacagagtgatacccatcaattttctatccttagacaatgtagtgtgaagttcacagttgacaaacaacaattaatgtttcccttggatgttttgacaaaaataaacctcatcgttgttatcaccagagtgccctctaccttactttaatgcagattttataaattttacctcatttagaacataaaataattattgaaagaaaaatgtattttttaaattcaccgtgattgaactgtaaattctattaatccagatgtacttctacctctgttttcccaaagattgatattatttttaagatcaactcaagtgtagtaaacggatttaaaattttaatcattg

SEQ ID NO: 448623 - DNA, 3239 bp, Homo sapiens
cgccgcctgtcggcttccggaagctcatctcaaaatgctgaactgctctttggaagtcgccggtgctgttgtagttggagtctgttcacgggcctgagcttcgaggccaggctcccgggtgtcgttaatgttcggggccgccgggcgccaaccgatcggagctccagcagccgggaacagctggcatttcagtagaaccatggaggagctggttcatgaccttgtctcagcattggaagagagctcagagcaagctcgaggtggatttgctgaaacaggagaccattctcgaagtatatcttgccctctgaaacgccaggcaaggaaaaggagagggagaaaacggaggtcgtataatgtgcatcacccgtgggagactggtcactgcttaagtgaaggctctgattctagtttagaagaaccaagcaaggactatagagagaatcacaataataataaaaaagatcacagtgactctgatgaccaaatgttagtagcaaagcgcaggccgtcatcaaacttaaataataatgttcgagggaaaagacctctatggcatgagtctgattttgctgtggacaatgttgggaatagaactctgcgcaggaggagaaaggtaaaacgcatggcagtagatctcccacaggacatctctaacaaacggacaatgacccagccacctgagggttgtagagatcaggacatggacagtgatagagcctaccagtatcaagaatttaccaagaacaaagtcaaaaaaagaaagttgaaaataatcagacaaggaccaaaaatccaagatgaaggagtagttttagaaagtgaggaaacgaaccagaccaataaggacaaaatggaatgtgaagagcaaaaagtctcagatgagctcatgagtgaaagtgattccagcagtctcagcagcactgatgctggattgtttaccaatgatgagggaagacaaggtgatgatgaacagagtgactggttctacgaaaaggaatcaggtggagcatgtggtatcactggagttgtgccctggtgggaaaaggaagatcctactgagctagacaaaaatgtaccagatcctgtctttgaaagtatcttaactggttcttttccccttatgtcacacccaagcagaagaggtttccaagctagactcagtcgccttcatggaatgtcttcaaagaatattaaaaaatctggagggactccaacttcaatggctacaaactggaccagtgagattcccctataaaccaaatcttctaatgctaataaattagttacgttttgaacatctggggaatgacattcgagggaacctggctcctgtcctcttccctggaggaatatcattgaagtgagagcctctttgatgaaaagatggggctgtttttgctggaggactggtattcttccttttagtcagaagtgaacctgactggggaggctttctagggatttaggttggcccagggtggatagaaactactgtaaattatatatttttctcttttatggttttttttttacattgaatccatttatgtatacttgctttgccaaaatgctaacaaagctagaaaattttaaacttccagatcgacaagtattccttaatgtttatattgtgactgattaagaattaatttttacatatctgactgttgtaaataaaaatcatgatgcattgacatttatggttcatttttagagaagtcttatataaccagcattatttaaaatatttgcattttactcagggtattttaacaagggctaagatgagtagtaggtaaggttgataatctttgctggagtttgtattttgttcagcttcctttctacttgggtaatctgcttgtattgcaaactcattgtattttatagtatagctttcattgtactgcaaaaatcatcctcgttttaaattagccacagtgataactagtctgcactagtagaatcatttaccttttaaattatctgctttgtctgatacctgaaacacatcaaaattattattttggtttagagcttaatgaaacatgtgaaagctggtatttttaacaaatgctgtgtgattctgaatcatattgtcatgtttaaaagtgagagctgcttgtacatctttagaatggcagaccatatgtgtcactgtgagtgtcagaaatacttgcatgagctcattttcaccaactggggggaaaatgtaatgtttctattgatggtataatttagacactataataagttcagccatttgagttcttcaaaatggttatattaaaatgatatttttattaagcttcaataatgaaaaacaatgtgatttaatatgtgtatttttatattattgtatggattaattgttaattcagcatttaatggctaacttaaatatgattggaaaagaaacttcaagttgccattgcttttacctaaagtttttaaagtctgaaagatttcagcaaatgcattaaacaggaatgtgtgacatcttcttttagattgcttgtctaatttggagagattaaaaatggtaaaatgcaactttgagtctctttacctttgcatatttaaaggtacaatagtgtggtgttggtaattgtaagtaagcttttctgtgctatgtctttggagtgaaaattcatgtttttttttctgaattacataaatgcttttgttttattttgtataatgactgtcttttagatctgaataagtcactttaaaaccttggcctatgaactttgccttatcaatcatgaatctagatgaatgctatctagttcttggttcagttttacctatttttatttttggttcactgcttgcttgagcatagctgggatttgtagcccattttctaggcttattgcaatctcactgtggtattttatagaagctattacaactgataggctagcttcatggtattgatgatacatggcttaaccatactaaaagctgctttccctctctaaattgtaaaaaggtgatgaagtttcacttgatggagacatactatatatgtgtgtttatcatggaactagtgcattaggccataagctgtttttctggtctatgttttttgtatttaaaactttactgaagacaatggactccttcgggttttctttctttcaaccctgaattgtccttgtttgaatttttaagtactgtaatttttttttttcaataaaatctctgacttgggcaaaaaaaaaaaaaat

SEQ ID NO: 448624 - DNA, 2206 bp, Homo sapiens
cgccgcctgtcggcttccggaagctcatctcaaaatgctgaactgctctttggaagtcgccggtgctgttgtagttggagtctgttcacgggcctgagcttcgaggccaggctcccgggtgtcgttaatgttcggggccgccgggcgccaaccgatcggagctccagcagccgggaacagctggcatttcagtagaaccatggaggagctggttcatgaccttgtctcagcattggaagagagctcagagcaagctcgaggtggatttgctgaaacaggagaccattctcgaagtatatcttgccctctgaaacgccaggcaaggaaaaggagagggagaaaacggaggtcgtataatgtgcatcacccgtgggagactggtcactgcttaagtgaaggctctgattctagtttagaagaaccaagcaaggactatagagagaatcacaataataataaaaaagatcacagtgactctgatgaccaaatgttagtagcaaagcgcaggccgtcatcaaacttaaataataatgttcgagggaaaagacctctatggcatgagtctgattttgctgtggacaatgttgggaatagaactctgcgcaggaggagaaaggtaaaacgcatggcagtagatctcccacaggacatctctaacaaacggacaatgacccagccacctgagggttgtagagatcaggacatggacagtgatagagcctaccagtatcaagaatttaccaagaacaaagtcaaaaaaagaaagttgaaaataatcagacaaggaccaaaaatccaagatgaaggagtagttttagaaagtgaggaaacgaaccagaccaataaggacaaaatggaatgtgaagagcaaaaagtctcagatgagctcatgagtgaaagtgattccagcagtctcagcagcactgatgctggattgtttaccaatgatgagggaagacaaggtgatgatgaacagagtgactggttctacgaaaaggaatcaggtggagcatgtggtatcactggagttgtgccctggtgggaaaaggaagatcctactgagctagacaaaaatgtaccagatcctgtctttgaaagtatcttaactggttcttttccccttatgtcacacccaagcagaagaggtttccaagctagactcagtcgccttcatggaatgtcttcaaagaatattaaaaaatctggagggactccaacttcaatggtacccattcctggcccagtgggtaacaagagaatggttcatttttccccggattctcatcaccatgaccattggtttagccctggggctaggacagagcatgaccaggtcactaataaggggattgtatcttcgtttggcctaagtccagcaatctgaaagttggaaggtggagaccaaggcttagagaagttaagtactttgcctaaagttacacaggttgtaaatggtaaagctattattggaacctagtgactttttagttactggcccagctgggattagaacccagctctatcctgtattattatttccaagacttttatttttgttggggttaattgctaatattctgtacaacttcgttttagcccagtcttgcatataatcatattttctgcataaataagataagctagagtttgagtgagcacatagtgaagaatattgactatttgtttttttctttccaattagttagggtaaagcaagtgtaaagggaagtggatggtaaggcattttgaggaggcaatcaaatatgtttttttctaattatatatttccaagccaataatttctttgaagaagaatgttttaagcgtgtttctttaccatgttaggccagtaggtacagagaaaataatattagctctttatgtcagcataggtaacaaagccttaaaaaattcacagctgaatgcaacagtgaaggccgttgacaagagaggttgcattacttcaaccagggctactgcagtgaaccaaaaaaagaactgagttctaggcttccatctccaggctacatcttaactgactaagagggcagtttagctgtccaggaagaactcgattgctaactctcactgataattttgcaacagtgacaataaagaatgaattttaaaaagaaaaacttgtctccctgaactattgaactccagaaaaagtagtacttacagtctttgctttaagagaaaccag

SEQ ID NO: 448625 - DNA, 1516 bp, Homo sapiens
cgccgcctgtcggcttccggaagctcatctcaaaatgctgaactgctctttggaagtcgccggtgctgttgtagttggagtctgttcacgggcctgagcttcgaggccaggctcccgggtgtcgttaatgttcggggccgccgggcgccaaccgatcggagctccagcagccgggaacagctggcatttcagtagaaccatggaggagctggttcatgaccttgtctcagcattggaagagagctcagagcaagctcgaggtggatttgctgaaacaggagaccattctcgaagtatatcttgccctctgaaacgccaggcaaggaaaaggagagggagaaaacggaggtcgtataatgtgcatcacccgtgggagactggtcactgcttaagtgaaggctctgattctagtttagaagaaccaagcaaggactatagagagaatcacaataataataaaaaagatcacagtgactctgatgaccaaatgttagtagcaaagcgcaggccgtcatcaaacttaaataataatgttcgagggaaaagacctctatggcatgagtctgattttgctgtggacaatgttgggaatagaactctgcgcaggaggagaaaggtaaaacgcatggcagtagatctcccacaggacatctctaacaaacggacaatgacccagccacctgagggttgtagagatcaggacatggacagtgatagagcctaccagtatcaagaatttaccaagaacaaagtcaaaaaaagaaagttgaaaataatcagacaaggaccaaaaatccaagatgaaggagtagttttagaaagtgaggaaacgaaccagaccaataaggacaaaatggaatgtgaagagcaaaaagtctcagatgagctcatgagtgaaagtgattccagcagtctcagcagcactgatgctggattgtttaccaatgatgagggaagacaaggtgatgatgaacagagtgactggttctacgaaaaggaatcaggtggagcatgtggtatcactggagttgtgccctggtgggaaaaggaagatcctactgagctagacaaaaatgtaccagatcctgtctttgaaagtatcttaactggttcttttccccttatgtcacacccaagcagaagaggtttccaagctagactcagtcgccttcatggaatgtcttcaaagaatattaaaaaatctggagggactccaacttcaatggtacccattcctggcccagtgggtaacaagagaatggttcatttttccccggattctcatcaccatgaccattggtttagccctggggctaggacagagcatgaccaggtaaggaccattgtaatccaaaaggaagttactcagcctctttcaagtatttaactgtctcccttcaggagagtagatcagctttatgagaaaaaatacaaatccccgctcattttaaaaggtgttaattatgtcaacgattaaatacactgaccaaataaatgcgtgatccttaatcagcat

SEQ ID NO: 448626 - DNA, 423 bp, Homo sapiens
tggggaatgagaattctgctctttgcctttcctcttgggatgtgagacttttaataatcttgaaaaatgtcatgaatagccacagaaactcttagttccttttctttaaatgtaaaaaccattatccacaaggtatacttttcttcctggtttaattcagcagtttttccaattgtacctaggttttttacttacagattttaatgtaattcttatatgagttattttttaatatacatctgcaggtcactaataaggggattgtatcttcgtttggcctaagtccagcaatctgaaagttggaaggtaagaagcacttcgcaccatattcacaagttctgtttttgatcagagttgacattattgagtcagaatccagaaagcaacctcacttgtgacactgataggagtccaagggaacag

SEQ ID NO: 448627 - DNA, 938 bp, Homo sapiens
cgccgcctgtcggcttccggaagctcatctcaaaatgctgaactgctctttggaagtcgccggtgctgttgtagttggagtctgttcacgggcctgagcttcgaggccaggctcccgggtgtcgttaatgttcggggccgccgggcgccaaccgatcggagctccagcagccgggaacagctggcatttcagtagaaccatggaggagctggttcatgaccttgtctcagcattggaagagagctcagagcaagctcgaggtggatttgctgaaacaggagaccattctcgaagtatatcttgccctctgaaacgccaggcaaggaaaaggagagggagaaaacggaggtcgtataatgtgcatcacccgtgggagactggtcactgcttaagtgaaggctctgattctagtttagaagaacaaagtcaaaaaaagaaagttgaaaataatcagacaaggaccaaaaatccaagatgaaggagtagttttagaaagtgaggaaacgaaccagaccaataaggacaaaatggaatgtgaagagcaaaaagtctcagatgagctcatgagtgaaaggtgacttttatattctctaaatataaaaatatttatctccagtgtttgtggttgaatgttttatattttaattaattctattttaaaataattataaattgtaataatgatagtgatattactgtttagctatggttatatttccttatactttatgatgtttagcacaaagcaaaattgcttgtttgatttacacaaagtcttttgattgtattataatgactcaattttcagctacaaggaggaaaggaaatggattttcagtggaaaagaatgtgcttttgaataacagcacgtttgtaactcagaattggatatataattatatgtttaattatagacctttagcttttggtactttata

SEQ ID NO: 448628 - DNA, 2359 bp, Homo sapiens
cgccgcctgtcggcttccggaagctcatctcaaaatgctgaactgctctttggaagtcgccggtgctgttgtagttggagtctgttcacgggcctgagcttcgaggccaggctcccgggtgtcgttaatgttcggggccgccgggcgccaaccgatcggagctccagcagccgggaacagctggcatttcagtagaaccatggaggagctggttcatgaccttgtctcagcattggaagagagctcagagcaagctcgaggtggatttgctgaaacaggagaccattctcgaagtatatcttgccctctgaaacgccaggcaaggaaaaggagagggagaaaacggaggtcgtataatgtgcatcacccgtgggagactggtcactgcttaagtgaaggctctgattctagtttagaagaaccaagcaaggactatagagagaatcacaataataataaaaaagatcacagtgactctgatgaccaaatgttagtagcaaagcgcaggccgtcatcaaacttaaataataatgttcgagggaaaagacctctatggcatgagtctgattttgctgtggacaatgttgggaatagaactctgcgcaggaggagaaaggtaaaacgcatggcagtagatctcccacaggacatctctaacaaacggacaatgacccagccacctgagggttgtagagatcaggacatggacagtgatagagcctaccagtatcaagaatttaccaagaacaaagtcaaaaaaagaaagttgaaaataatcagacaaggaccaaaaatccaagatgaaggagtagttttagaaagtgaggaaacgaaccagaccaataaggacaaaatggaatgtgaagagcaaaaagtctcagatgagctcatgagtgaaagtgattccagcagtctcagcagcactgatgctggattgtttaccaatgatgagggaagacaaggtgatgatgaacagagtgactggttctacgaaaaggaatcaggtggagcatgtggtatcactggagttgtgccctggtgggaaaaggaagatcctactgagctagacaaaaatgtaccagatcctgtctttgaaagtatcttaactggttcttttccccttatgtcacacccaagcagaagaggtttccaagctagactcagtcgccttcatggaatgtcttcaaagaatattaaaaaatctggagggactccaacttcaatggtacccattcctggcccagtgggtaacaagagaatggttcatttttccccggattctcatcaccatgaccattggtttagccctggggctaggacagagcatgaccagcatcagcttctgagagataatcgagctgaaagaggacacaagaaaaattgttctgtgagaacagccagcaggcaaacaagcatgcatttaggatccttatgcacgggagatatcaaacggagaagaaaagctgcacctttgcctggacctactactgcaggatttgtaggtgaaaatgcccagccaatcctagaaaataatattggaaaccgaatgcttcagaatatgggctggacgcctgggtcaggccttggacgagatggcaaggggatctctgagccaattcaagccatgcagaggccaaagggattaggacttggatttcctctaccaaaaagtacttccgcaactactacccccaatgcaggaaaatccgcctaagaaaagcaaagaagaaatgttttacagactttattcactatgtcccattgttctaaaatgataacatgacttctgtttttgaagcaaaaatctacattgcctcaaacacatcactctagcttccttactgcatacagtcctgccatagtgagagaaatgggatttcatcacaattcatggtgctaaaatgaaaacctctgcactttaatttttttcagtaatttccagctatttctaggtataaagagcagctcgtttctcttatttattttagtctcatgtgtcaatactttccgatgctttgcttaattcatgtatgtgtgcagtgctgcaatgcccagacaaacgtgagcacacccaccagtttctaaaatggaatagacaggaaaagattgtgttttatatcatccctatctattgtaacccaaaagacctaccatcgcatcagtgaagtccgaacacatctttgtttgaaaggcttgtcaatttcatattccttgaattggcttcttggtgaggattttctgacagagtgatacccatcaattttctatccttagacaatgtagtgtgaagttcacagttgacaaacaacaattaatgtttcccttggatgttttgacaaaaataaacctcatcgttgtt

SEQ ID NO: 448629 - DNA, 2033 bp, Homo sapiens
cgccgcctgtcggcttccggaagctcatctcaaaatgctgaactgctctttggaagtcgccggtgctgttgtagttggagtctgttcacgggcctgagcttcgaggccaggctcccgggtgtcgttaatgttcggggccgccgggcgccaaccgatcggagctccagcagccgggaacagctggcatttcagtagaaccatggaggagctggttcatgaccttgtctcagcattggaagagagctcagagcaagctcgaggtggatttgctgaaacaggagaccattctcgaagtatatcttgccctctgaaacgccaggcaaggaaaaggagagggagaaaacggaggtcgtataatgtgcatcacccgtgggagactggtcactgcttaagtgaaggctctgattctagtttagaagaacaaagtcaaaaaaagaaagttgaaaataatcagacaaggaccaaaaatccaagatgaaggagtagttttagaaagtgaggaaacgaaccagaccaataaggacaaaatggaatgtgaagagcaaaaagtctcagatgagctcatgagtgaaagtgattccagcagtctcagcagcactgatgctggattgtttaccaatgatgagggaagacaaggtgatgatgaacagagtgactggttctacgaaaaggaatcaggtggagcatgtggtatcactggagttgtgccctggtgggaaaaggaagatcctactgagctagacaaaaatgtaccagatcctgtctttgaaagtatcttaactggttcttttccccttatgtcacacccaagcagaagaggtttccaagctagactcagtcgccttcatggaatgtcttcaaagaatattaaaaaatctggagggactccaacttcaatggtacccattcctggcccagtgggtaacaagagaatggttcatttttccccggattctcatcaccatgaccattggtttagccctggggctaggacagagcatgaccagcatcagcttctgagagataatcgagctgaaagaggacacaagaaaaattgttctgtgagaacagccagcaggcaaacaagcatgcatttaggatccttatgcacgggagatatcaaacggagaagaaaagctgcacctttgcctggacctactactgcaggatttgtaggtgaaaatgcccagccaatcctagaaaataatattggaaaccgaatgcttcagaatatgggctggacgcctgggtcaggccttggacgagatggcaaggggatctctgagccaattcaagccatgcagaggccaaagggattaggacttggatttcctctaccaaaaagtacttccgcaactactacccccaatgcaggaaaatccgcctaagaaaagcaaagaagaaatgttttacagactttattcactatgtcccattgttctaaaatgataacatgacttctgtttttgaagcaaaaatctacattgcctcaaacacatcactctagcttccttactgcatacagtcctgccatagtgagagaaatgggatttcatcacaattcatggtgctaaaatgaaaacctctgcactttaatttttttcagtaatttccagctatttctaggtataaagagcagctcgtttctcttatttattttagtctcatgtgtcaatactttccgatgctttgcttaattcatgtatgtgtgcagtgctgcaatgcccagacaaacgtgagcacacccaccagtttctaaaatggaatagacaggaaaagattgtgttttatatcatccctatctattgtaacccaaaagacctaccatcgcatcagtgaagtccgaacacatctttgtttgaaaggcttgtcaatttcatattccttgaattggcttcttggtgaggattttctgacagagtgatacccatcaattttctatccttagacaatgtagtgtgaagttcacagttgacaaacaacaattaatgtttcccttggatgttttgacaaaaataaacctcatcgttgtt

SEQ ID NO: 448630 - DNA, 1264 bp, Homo sapiens
cgccgcctgtcggcttccggaagctcatctcaaaatgctgaactgctctttggaagtcgccggtgctgttgtagttggagtctgttcacgggcctgagcttcgaggccaggctcccgggtgtcgttaatgttcggggccgccgggcgccaaccgatcggagctccagcagccgggaacagctggcatttcagtagaaccatggaggagctggttcatgaccttgtctcagcattggaagagagctcagagcaagctcgaggtggatttgctgaaacaggagaccattctcgaagtatatcttgccctctgaaacgccaggcaaggaaaaggagagggagaaaacggaggtcgtataatgtgcatcacccgtgggagactggtcactgcttaagtgaaggctctgattctagtttagaagaaccaagcaaggactatagagagaatcacaataataataaaaaagatcacagtgactctgatgaccaaatgttagtagcaaagcgcaggccgtcatcaaacttaaataataatgttcgagggaaaagacctctatggcatgagtctgattttgctgtggacaatgttgggaatagaactctgcgcaggaggagaaaggtaaaacgcatggcagtagatctcccacaggacatctctaacaaacggacaatgacccagccacctgagggttgtagagatcaggacatggacagtgatagagcctaccagtatcaagaatttaccaagaacaaagtcaaaaaaagaaagttgaaaataatcagacaaggaccaaaaatccaagatgaaggagtagttttagaaagtgaggaaacgaaccagaccaataaggacaaaatggaatgtgaagagcaaaaagtctcagatgagctcatgagtgaaaggtgacttttatattctctaaatataaaaatatttatctccagtgtttgtggttgaatgttttatattttaattaattctattttaaaataattataaattgtaataatgatagtgatattactgtttagctatggttatatttccttatactttatgatgtttagcacaaagcaaaattgcttgtttgatttacacaaagtcttttgattgtattataatgactcaattttcagctacaaggaggaaaggaaatggattttcagtggaaaagaatgtgcttttgaataacagcacgtttgtaactcagaattggatatataattatatgtttaattatagacctttagcttttggtactttata

SEQ ID NO: 448631 - DNA, 1439 bp, Homo sapiens
ggtccctccgggctgcagccggcagcccacgtccagggagggcggagggaggaggagaggcgcggagaggagggaggggagaggggagggaggaaggcgagagaaagggagctgcttccatcccggacttcccagagcctgcctggagcgcgtactcagcggctctcgggtcccagcgtcccagccgcggcccgcgctcctccgccccgctcctcctcctcctcttcctcctcctcctcctctctaggcacccccgtcccctccttccagcggctgcagcccccagccccaactctccgcgcttactcctgggacgcgcgtcctcgccccatcctttgcttccttccttccttccttcttccttcctcccctggctcccgccctccctctccaggtcgccctcccggggcccgattgtctcggtgccccgctcccggcccgcgccctgccccgtctctcccttgcacttcctgagtcgcccgccgccgccgtcgcagactcgccgcgggagccccagcccaacccgagcccgacagccactgccccggctccagctccagccccacagcccgcggcgcccgcccgagggagccccggcgcccggggaaggctccagtgggctagcgcgccctcgcccagccccgcgccccagccctgcccggcccggcgaggaaggaccgggaagatgaacaacggcggcaaagccgagaaggagaacaccccgagcgaggccaaccttcaggaggaggaggtccggaccctatttgtcagtggccttcctctggatatcaaacctcgggagctctatctgcttttcagaccatttaagggctatgagggttctcttataaagctcacatctaaacagcctgtaggttttgtcagttttgacagtcgctcagaagcagaggctgcaaagaatgctttgaatggcatccgcttcgatcctgaaattccgcaaacactacgactagagtttgctaaggcaaacacgaagatggccaagaacaaactcgtagggactccaaaccccagtactcctctgcccaacactgtacctcagttcattgccagagagccatatgagctcacagtgcctgcactttaccccagtagccctgaagtgtgggccccgtaccctctgtacccagcggagttagcgcctgctctacctcctcctgctttcacctatcccgcttcactgcatgcccagtgtttctctcctgaggcaaagcccaacacacctgtcttttgtccacttctccagcaaattagatttgtctctgggaatgtgtttgtaacataccaacctactgcagaccagcagagggagctcccatgttgaatttgtttgttagctattttcccccctttcacaaaaactatttcttgacgacctttgagagatttcaataaaaattttaatcagagcaaaaatg

SEQ ID NO: 448632 - DNA, 1509 bp, Homo sapiens
ggtccctccgggctgcagccggcagcccacgtccagggagggcggagggaggaggagaggcgcggagaggagggaggggagaggggagggaggaaggcgagagaaagggagctgcttccatcccggacttcccagagcctgcctggagcgcgtactcagcggctctcgggtcccagcgtcccagccgcggcccgcgctcctccgccccgctcctcctcctcctcttcctcctcctcctcctctctaggcacccccgtcccctccttccagcggctgcagcccccagccccaactctccgcgcttactcctgggacgcgcgtcctcgccccatcctttgcttccttccttccttccttcttccttcctcccctggctcccgccctccctctccaggtcgccctcccggggcccgattgtctcggtgccccgctcccggcccgcgccctgccccgtctctcccttgcacttcctgagtcgcccgccgccgccgtcgcagactcgccgcgggagccccagcccaacccgagcccgacagccactgccccggctccagctccagccccacagcccgcggcgcccgcccgagggagccccggcgcccggggaaggctccagtgggctagcgcgccctcgcccagccccgcgccccagccctgcccggcccggcgaggaaggaccgggaagatgaacaacggcggcaaagccgagaaggagaacaccccgagcgaggccaaccttcaggaggaggaggtccggaccctatttgtcagtggccttcctctggatatcaaacctcgggagctctatctgcttttcagaccatttaagggctatgagggttctcttataaagctcacatctaaacagcctgtaggttttgtcagttttgacagtcgctcagaagcagaggctgcaaagaatgctttgaatggcatccgcttcgatcctgaaattccgcaaacactacgactagagtttgctaaggcaaacacgaagatggccaagaacaaactcgtagggactccaaaccccagtactcctctgcccaacactgtacctcagttcattgccagagagccatatgagctcacagtgcctgcactttaccccagtagccctgaagtgtgggccccgtaccctctgtacccagcggagttagcgcctgctctacctcctcctgctttcacctatcccgcttcactgcatgcccagatgcgctggctccctccctccgaggctacttctcagggctggaagtcccgtcagttctgctgaatactatgtcccaggtgtgtgatggcggctgcaatctgtcttgtgggtattaatgcaatcttcagtggtggctactgttctctagctgttctacaaaactggagcatgctggcttgaaaaacccttgcccagttttgatcccttcaagactttgtcacagcctctatcacacatctgtttttctcgaagaaaaaaatataattaataaaaatgttttactcttttacactgta

SEQ ID NO: 448633 - DNA, 801 bp, Homo sapiens
gcggccgcacttctggttgcgcggcccacactggccgccattgtggtggaggtcggagcgagtctcctgggcccgaaccggctgttggaagtgcgagggcaccgagagccacggtccggaccctatttgtcagtggccttcctctggatatcaaacctcgggagctctatctgcttttcagaccatttaagggctatgagggttctcttataaagctcacatctaaacagcctgtaggttttgtcagttttgacagtcgctcagaagcagaggctgcaaagaatgctttgaatggcatccgcttcgatcctgaaattccgcaaacactacgactagagtttgctaaggcaaacacgaagatggccaagaacaaactcgtagggactccaaaccccagtactcctctgcccaacactgtacctcagttcattgccagagagccatatgagctcacagtgcctgcactttaccccagtagccctgaagtgtgggccccgtaccctctgtacccagcggagttagcgcctgctctacctcctcctgctttcacctatcccgcttcactgcatgcccagtgtttctctcctgaggcaaagcccaacacacctgtcttttgtccacttctccagcaaattagatttgtctctgggaatgtgtttgtaacataccaacctactgcagaccagcagagggagctcccatgttgaatttgtttgttagctattttcccccctttcacaaaaactatttcttgacgacctttgagagatttcaataaaaattttaatcagagcaaaaatg

SEQ ID NO: 448634 - DNA, 1595 bp, Homo sapiens
ggtccctccgggctgcagccggcagcccacgtccagggagggcggagggaggaggagaggcgcggagaggagggaggggagaggggagggaggaaggcgagagaaagggagctgcttccatcccggacttcccagagcctgcctggagcgcgtactcagcggctctcgggtcccagcgtcccagccgcggcccgcgctcctccgccccgctcctcctcctcctcttcctcctcctcctcctctctaggcacccccgtcccctccttccagcggctgcagcccccagccccaactctccgcgcttactcctgggacgcgcgtcctcgccccatcctttgcttccttccttccttccttcttccttcctcccctggctcccgccctccctctccaggtcgccctcccggggcccgattgtctcggtgccccgctcccggcccgcgccctgccccgtctctcccttgcacttcctgagtcgcccgccgccgccgtcgcagactcgccgcgggagccccagcccaacccgagcccgacagccactgccccggctccagctccagccccacagcccgcggcgcccgcccgagggagccccggcgcccggggaaggctccagtgggctagcgcgccctcgcccagccccgcgccccagccctgcccggcccggcgaggaaggaccgggaagatgaacaacggcggcaaagccgagaaggagaacaccccgagcgaggccaaccttcaggaggaggaggtccggaccctatttgtcagtggccttcctctggatatcaaacctcgggagctctatctgcttttcagaccatttaagggctatgagggttctcttataaagctcacatctaaacagcctgtaggttttgtcagttttgacagtcgctcagaagcagaggctgcaaagaatgctttgaatggcatccgcttcgatcctgaaattccgcaaacactacgactagagtttgctaaggcaaacacgaagatggccaagaacaaactcgtagggactccaaaccccagtactcctctgcccaacactgtacctcagttcattgccagagagccatatgagctcacagtgcctgcactttaccccagtagccctgaagtgtgggccccgtaccctctgtacccagcggagttagcgcctgctctacctcctcctgctttcacctatcccgcttcactgcatgcccagctctgtgaaggtcagactgtgaggagaagccaccccttgagcgctccgtctcctgatagtgccagcctggcctggtttcctgtttgatgcgctggctccctccctccgaggctacttctcagggctggaagtcccgtcagttctgctgaatactatgtcccaggtgtgtgatggcggctgcaatctgtcttgtgggtattaatgcaatcttcagtggtggctactgttctctagctgttctacaaaactggagcatgctggcttgaaaaacccttgcccagttttgatcccttcaagactttgtcacagcctctatcacacatctgtttttctcgaagaaaaaaatataattaataaaaatgttttactcttttacactgta

SEQ ID NO: 448635 - DNA, 1471 bp, Homo sapiens
ggtccctccgggctgcagccggcagcccacgtccagggagggcggagggaggaggagaggcgcggagaggagggaggggagaggggagggaggaaggcgagagaaagggagctgcttccatcccggacttcccagagcctgcctggagcgcgtactcagcggctctcgggtcccagcgtcccagccgcggcccgcgctcctccgccccgctcctcctcctcctcttcctcctcctcctcctctctaggcacccccgtcccctccttccagcggctgcagcccccagccccaactctccgcgcttactcctgggacgcgcgtcctcgccccatcctttgcttccttccttccttccttcttccttcctcccctggctcccgccctccctctccaggtcgccctcccggggcccgattgtctcggtgccccgctcccggcccgcgccctgccccgtctctcccttgcacttcctgagtcgcccgccgccgccgtcgcagactcgccgcgggagccccagcccaacccgagcccgacagccactgccccggctccagctccagccccacagcccgcggcgcccgcccgagggagccccggcgcccggggaaggctccagtgggctagcgcgccctcgcccagccccgcgccccagccctgcccggcccggcgaggaaggaccgggaagatgaacaacggcggcaaagccgagaaggagaacaccccgagcgaggccaaccttcaggaggaggaggtccggaccctatttgtcagtggccttcctctggatatcaaacctcgggagctctatctgcttttcagaccatttaagggctatgagggttctcttataaagctcacatctaaacagcctgtaggttttgtcagttttgacagtcgctcagaagcagaggctgcaaagaatgctttgaatggcatccgcttcgatcctgaaattccgcaaacactacgactagagtttgctaaggcaaacacgaagatggccaagaacaaactcgtagggactccaaaccccagtactcctctgcccaacactgtacctcagttcattgccagagagccatatgagctcacagtgcctgcactttaccccagtagccctgaagtgtgggccccgtaccctctgtacccagcggagttagcgcctgctctacctcatgcgctggctccctccctccgaggctacttctcagggctggaagtcccgtcagttctgctgaatactatgtcccaggtgtgtgatggcggctgcaatctgtcttgtgggtattaatgcaatcttcagtggtggctactgttctctagctgttctacaaaactggagcatgctggcttgaaaaacccttgcccagttttgatcccttcaagactttgtcacagcctctatcacacatctgtttttctcgaagaaaaaaatataattaataaaaatgttttactcttttacactgta

SEQ ID NO: 448636 - DNA, 501 bp, Homo sapiens
atctttcttctctaagtagatgggaagcctgtaagaagagacttggaggcaaagcaaagggaatcagcacttaaccctcacccaaagggcccaagagaatctttagtaactggaggcagagcagactggagcctctacggggcatctccccatattggagaattcagtctttgttttggaaatcttataatgtctttggagaggctttaaataattttgtttttcttagcaatgttatgctctattttgagacatggattttttttttcttctagtgtttctctcctgaggcaaagcccaacacacctgtcttttgtccacttctccagcaaattagatttgtctctgggaatgtgtttgtaacataccaacctactgcagaccagcagagggagctcccatgttgaatttgtttgttagctattttcccccctttcacaaaaactatttcttgacgacctttgagagatttcaataaaaattttaatcagagcaaaaatg

SEQ ID NO: 448637 - DNA, 1683 bp, Homo sapiens
ttgggagccaagtggggtgtagggggacgtcttctttcaggactcttgaaattttcctggccatggaccgggaccagagcccagaaattataagcacatgtagttacagcctccccagattggagaaggaaatgcaagagagaacgtgacggaatttggagctatttttcccttctcttctgttttgggtggaatggccttgcctgtctttggctgtgagcttgagtcatcctcagtagagtcccaggtgctggtgcccaggtggagcttagagcttaacaaggaggaaaggcactggggctccagaggcccagacagctgcggtggctcctgctgtcacgctggcctccccttagaagaaagccacctgtccatgtcatgctatcacactgcggtgcacccaccaaccagtatgaggctgtgaggtctgcacatcacacctaaggctactaacgccgtaactgtccgtcatacctaaggctaatacggtgagcagctgcagcgtcctggggaggagatgggtaataggtaatcaaatagacataatagtttgggtggtgatagtattcagggaataaataataaggccaggtaagcagctcagtgttgtggtacggccagcacttctggtgccttctgcttcaagttagcaaagcaggcagggtccgcctgagaaggtaacatctcagcaaagacctagaacttcaccagctttatacggggtttctttttcagaacacattccactttagtgaggcttggaaaatatttaactcctgtaatcttaaagtaaatggactggaagtgcagcaggcttggctcccacgcagcactaaggaatcactgggagagtgtgcagggccctcctcagagacctttctctgttttcccagtgaggagacgcaagcctggttctgcaattctttccagctctggagtctgttatggttcccatctgagctctaaaggtaggggtgggcctgaagaccctccacactgtcagtcctgtggacgtggtgggtgcccctctagccaccactgtcctccggactgtgccacatcacaagcacttaccgagctcctctacaaaccacgtgacaaccaaatgcagtgaaaactgcagccccccaacctgctcctgcccattgtgttttctgtggatctgtctggagtccttggagactcctgagcatgtgcactggcagagctgcctgactcttccctggaagaagttcaaagagggtagccacgtgttcagaccaggccatggggtctgggggctccgcgactcctgagagcaattcctggccggactctggctcatgttactgcccccacctccccccgcccaggtaaacccgggggtgcagacaactgttgttgaggtcccaggagcgggttgtcccctatgctcctggggacatggaggagagggagggtcccaggatcccagtacttgtatgagtcgcactgattagctgaagcccagaggcttcttaatcatcctagaaatacagcctcccgggaaatgtggcctggctctgcagctctgggtggctcgtgctctccctcctgtgtggaggggtcctggagaggttgggtgagctgattgataggtttcatgtgcaaagatgattattttcctgttctcaagtaacccaacttttgctaggaaactagaat

SEQ ID NO: 448638 - DNA, 1194 bp, Homo sapiens
ttgggagccaagtggggtgtagggggacgtcttctttcaggactcttgaaattttcctggccatggaccgggaccagagcccagaaattataagcacatgtagttacagcctccccagattggagaaggaaatgcaagagagaacgtgacggaatttggagctatttttcccttctcttctgttttgggtggaatggccttgcctgtctttggctgtgagcttgagtcatcctcagtagagtcccaggtgctggtgcccaggtggagcttagagcttaacaaggaggaaaggcactggggctccagaggcccagacagctgcggtggctcctgctgtcacgctggcctccccttagaagaaagccacctgtccatgtcatgctatcacactgcggtgcacccaccaaccagtatgaggctgtgaggtctgcacatcacacctaaggctactaacgccgtaactgtccgtcatacctaaggctaatacggtgagcagctgcagcgtcctggggaggagatgggtaataggtaatcaaatagacataatagtttgggtggtgatagtattcagggaataaataataaggccaggtaagcagctcagtgttgtggtacggccagcacttctggtgccttctgcttcaagttagcaaagcaggcagggtccgcctgagaaggtaacatctcagcaaagacctagaacttcaccagctttatacggggtttctttttcagaacacattccactttagtgaggcttggaaaatatttaactcctgtaatcttaaagtaaatggactggaagtgcagcaggcttggctcccacgcagcactaaggaatcactgggagagtgtgcagggccctcctcagagacctttctctgttttcccagtgaggagacgcaagcctggttctgcaattctttccagctctggagtctgttatggttcccatctgagctctaaaggtcccaggtgtgtgatggcggctgcaatctgtcttgtgggtattaatgcaatcttcagtggtggctactgttctctagctgttctacaaaactggagcatgctggcttgaaaaacccttgcccagttttgatcccttcaagactttgtcacagcctctatcacacatctgtttttctcgaagaaaaaaatataattaataaaaatgttttactcttttacactgta

SEQ ID NO: 448639 - DNA, 721 bp, Homo sapiens
gtcacaggtcagatacaaattggacagatttggtgtgaacatttacaagctcatcccgtacgctatgtttcagtggtcacctaaatattctcatttcaggactttttaaaacacattttcccaaatctaacttgggacaaaatctaacttgggacatttaaataggttatcaataattatctgtttatggcctctttcggcacacaaataagcatctccctgtacaaaattctagtgtatgctgagctgattgattgccttctgcatacaccttttctacaacttctcaaacgtgtgtgacatgctggtaagatggcaggaaaaggagtgactgaataatacaatatagctgagatgtgtttcaagaaaacctctgggccagggtaggggtttgtgagcgggagccaaggacttgccccatgtttctaatcaaggtgagaccactgacacatgtggtcagcaaatatgttctatacacacatccgcacactgtcatctaacccatccgttctcccatccacagcatctccaggacaaagccatcgcaactagggaggggttgacacctgctctcctaacatgttttctttctgtttcaggcttgaaaaacccttgcccagttttgatcccttcaagactttgtcacagcctctatcacacatctgtttttctcgaagaaaaaaatataattaataaaaatgttttactcttttacactgta

SEQ ID NO: 448640 - DNA, 524 bp, Homo sapiens
gcggccgcacttctggttgcgcggcccacactggccgccattgtggtggaggtcggagcgagtctcctgggcccgaaccggctgttggaagtgcgagggcaccgagagccacggtacctgtgagggatctctttaacttcctcagatgggatgggggaaagatcagagggtgacacttcgggtgaccgatgcctgaactggggcttccgggggaaggctatagaaagacttggcgataagctctccgaccgtgactcctaccattacttttatttacttatcatagctttttaaaaaactttgaaattaataataattcccctgaaatatccacctgtggcagtggagcaatgaaagcacgtgcttaagtattctcgtccacacagttggcagtggctcctccgtacggaaagcagttgtgatagagtcacctcaagccctgcagcttctccacaacccgaatctggaatatgttgcgtggatattgcctttttgtaaaatattggaatccgttggcccaaagt

SEQ ID NO: 448641 - DNA, 739 bp, Homo sapiens
tgattctttgctaggtctttgcaccttcgtatttcaaaattctcagaccctagggtacaagtagccagatatcttcacaaatgtgcatccttttagtttttgttttccaggagatgcttggagcaaagtttagtccttggtgcctgtgacagacagggatttcctatggccttgggctgaccaaagctgctcagctcctggaggtggctgtttctggatcttgctgtgtgggggcctcaggtcccatgcctttcctctgcagggcctttggacagtcctccgggtctaggccacagcccttgggatgcaaccacagggacgtgggtgtagagtcctgcttgctgggcctgcagcctcctaatgcgccctcagcgaagagttcacatgcttttcttggaatgtccttcctcgctggcccccagaagcctcctcttacttgctccgccaagtcctcagtgcgttttcctggctgagagcttttcatgtcgcatatccaaggccattctgcagcagcctctggtcctcagctcagcagcagaggcctttgatctctttcggcgttgcctctcttggctctctgccctcagaacaggccggtcttcaagaccgaggcagccccaggtggaggttactgtgcaccgttaacgggtgatctttctccatcccactctatcacacatctgtttttctcgaagaaaaaaatataattaataaaaatgttttactcttttacactgta

SEQ ID NO: 448642 - DNA, 425 bp, Homo sapiens
gtcggcacccattggtcgagagaattatgagctcacagtgcctgcactttaccccagtagccctgaagtgtgggccccgtaccctctgtacccagcggagttagcgcctgctctacctcctcctgctttcacctatcccgcttcactgcatgcccagtgtttctctcctgaggcaaagcccaacacacctgtcttttgtccacttctccagcaaattagatttgtctctgggaatgtgtttgtaacataccaacctactgcagaccagcagagggagctcccatgttgaatttgtttgttagctattttcccccctttcacaaaaactactcggaccaatgttggtcgccttgagggtggttgttgcttgctggaaacaggcaagagtcgtgttggaagcatttctaatttctctcggacctacg

SEQ ID NO: 448643 - DNA, 877 bp, Homo sapiens
ggtgcgggcggccggcggggcgcgggcccggggcgcggcggtggaagaaggttcaggcatggcccgtgccccggacgcagccccacagtgtggcccggggagggtggatctcgggagcgtgtgtttttgtgtccacgcgcgtctgcgggccccaaattgcgtaactccaaggacttttcggagacttttgtccggaccctatttgtcagtggccttcctctggatatcaaacctcgggagctctatctgcttttcagaccatttaagggctatgagggttctcttataaagctcacatctaaacagcctgtaggttttgtcagttttgacagtcgctcagaagcagaggctgcaaagaatgctttgaatggcatccgcttcgatcctgaaattccgcaaacactacgactagagtttgctaaggcaaacacgaagatggccaagaacaaactcgtagggactccaaaccccagtactcctctgcccaacactgtacctcagttcattgccagagagccatatgagctcacagtgcctgcactttaccccagtagccctgaagtgtgggccccgtaccctctgtacccagcggagttagcgcctgctctacctcctcctgctttcacctatcccgcttcactgcatgcccagtgtttctctcctgaggcaaagcccaacacacctgtcttttgtccacttctccagcaaattagatttgtctctgggaatgtgtttgtaacataccaacctactgcagaccagcagagggagctcccatgttgaatttgtttgttagctattttcccccctttcacaaaaactatttcttgacgacctttgagagatttcaataaaaattttaatcagagcaaaaatg

SEQ ID NO: 448644 - DNA, 744 bp, Homo sapiens
tgcagtacagttgctgcctcttacttgtcctgttatctgacagcgttccttttcaggtccggaccctatttgtcagtggccttcctctggatatcaaacctcgggagctctatctgcttttcagaccatttaagggctatgagggttctcttataaagctcacatctaaacagcctgtaggttttgtcagttttgacagtcgctcagaagcagaggctgcaaagaatgctttgaatggcatccgcttcgatcctgaaattccgcaaacactacgactagagtttgctaaggcaaacacgaagatggccaagaacaaactcgtagggactccaaaccccagtactcctctgcccaacactgtacctcagttcattgccagagagccatatgagctcacagtgcctgcactttaccccagtagccctgaagtgtgggccccgtaccctctgtacccagcggagttagcgcctgctctacctcctcctgctttcacctatcccgcttcactgcatgcccagtgtttctctcctgaggcaaagcccaacacacctgtcttttgtccacttctccagcaaattagatttgtctctgggaatgtgtttgtaacataccaacctactgcagaccagcagagggagctcccatgttgaatttgtttgttagctattttcccccctttcacaaaaactatttcttgacgacctttgagagatttcaataaaaattttaatcagagcaaaaatg

SEQ ID NO: 448645 - DNA, 708 bp, Homo sapiens
tcctaaatttatttttccaggtccggaccctatttgtcagtggccttcctctggatatcaaacctcgggagctctatctgcttttcagaccatttaagggctatgagggttctcttataaagctcacatctaaacagcctgtaggttttgtcagttttgacagtcgctcagaagcagaggctgcaaagaatgctttgaatggcatccgcttcgatcctgaaattccgcaaacactacgactagagtttgctaaggcaaacacgaagatggccaagaacaaactcgtagggactccaaaccccagtactcctctgcccaacactgtacctcagttcattgccagagagccatatgagctcacagtgcctgcactttaccccagtagccctgaagtgtgggccccgtaccctctgtacccagcggagttagcgcctgctctacctcctcctgctttcacctatcccgcttcactgcatgcccagtgtttctctcctgaggcaaagcccaacacacctgtcttttgtccacttctccagcaaattagatttgtctctgggaatgtgtttgtaacataccaacctactgcagaccagcagagggagctcccatgttgaatttgtttgttagctattttcccccctttcacaaaaactatttcttgacgacctttgagagatttcaataaaaattttaatcagagcaaaaatg

SEQ ID NO: 448646 - DNA, 1469 bp, Homo sapiens
ggtccctccgggctgcagccggcagcccacgtccagggagggcggagggaggaggagaggcgcggagaggagggaggggagaggggagggaggaaggcgagagaaagggagctgcttccatcccggacttcccagagcctgcctggagcgcgtactcagcggctctcgggtcccagcgtcccagccgcggcccgcgctcctccgccccgctcctcctcctcctcttcctcctcctcctcctctctaggcacccccgtcccctccttccagcggctgcagcccccagccccaactctccgcgcttactcctgggacgcgcgtcctcgccccatcctttgcttccttccttccttccttcttccttcctcccctggctcccgccctccctctccaggtcgccctcccggggcccgattgtctcggtgccccgctcccggcccgcgccctgccccgtctctcccttgcacttcctgagtcgcccgccgccgccgtcgcagactcgccgcgggagccccagcccaacccgagcccgacagccactgccccggctccagctccagccccacagcccgcggcgcccgcccgagggagccccggcgcccggggaaggctccagtgggctagcgcgccctcgcccagccccgcgccccagccctgcccggcccggcgaggaaggaccgggaagatgaacaacggcggcaaagccgagaaggagaacaccccgagcgaggccaaccttcaggaggaggaggtccggaccctatttgtcagtggccttcctctggatatcaaacctcgggagctctatctgcttttcagaccatttaagggctatgagggttctcttataaagctcacatctaaacagcctgtaggttttgtcagttttgacagtcgctcagaagcagaggctgcaaagaatgctttgaatggcatccgcttcgatcctgaaattccgcaaacactacgactagagtttgctaaggcaaacacgaagatggccaagaacaaactcgtagggactccaaaccccagtactcctctgcccaacactgtacctcagttcattgccagagagccatatgagctcacagtgcctgcactttaccccagtagccctgaagtgtgggccccgtaccctctgtacccagcggagttagcgcctgctctacctcctcctgctttcacctatcccgcttcactgcatgcccagtgtttctctcctgaggcaaagcccaacacacctgtcttttgtccacttctccagcaaattagatttgtctctgggaatgtgtttgtaacataccaacctactgcagaccagcagagggagctcccatgttgaatttgtttgttagctattttcccccctttcacaaaaactatttcttgacgacctttgagagatttcaataaaaattttaatcagagcaaaaatgaactcaagtagactgcagcgttttgttttc

SEQ ID NO: 448647 - DNA, 1481 bp, Homo sapiens
ggtccctccgggctgcagccggcagcccacgtccagggagggcggagggaggaggagaggcgcggagaggagggaggggagaggggagggaggaaggcgagagaaagggagctgcttccatcccggacttcccagagcctgcctggagcgcgtactcagcggctctcgggtcccagcgtcccagccgcggcccgcgctcctccgccccgctcctcctcctcctcttcctcctcctcctcctctctaggcacccccgtcccctccttccagcggctgcagcccccagccccaactctccgcgcttactcctgggacgcgcgtcctcgccccatcctttgcttccttccttccttccttcttccttcctcccctggctcccgccctccctctccaggtcgccctcccggggcccgattgtctcggtgccccgctcccggcccgcgccctgccccgtctctcccttgcacttcctgagtcgcccgccgccgccgtcgcagactcgccgcgggagccccagcccaacccgagcccgacagccactgccccggctccagctccagccccacagcccgcggcgcccgcccgagggagccccggcgcccggggaaggctccagtgggctagcgcgccctcgcccagccccgcgccccagccctgcccggcccggcgaggaaggaccgggaagatgaacaacggcggcaaagccgagaaggagaacaccccgagcgaggccaaccttcaggaggaggaggtccggaccctatttgtcagtggccttcctctggatatcaaacctcgggagctctatctgcttttcagaccatttaagggctatgagggttctcttataaagctcacatctaaacagcctgtaggttttgtcagttttgacagtcgctcagaagcagaggctgcaaagaatgctttgaatggcatccgcttcgatcctgaaattccgcaaacactacgactagagtttgctaaggcaaacacgaagatggccaagaacaaactcgtagggactccaaaccccagtactcctctgcccaacactgtacctcagttcattgccagagagccatatgagctcacagtgcctgcactttaccccagtagccctgaagtgtgggccccgtaccctctgtacccagcggagttagcgcctgctctacctcctcctgctttcacctatcccgcttcactgcatgcccagtgtttctctcctgaggcaaagcccaacacacctgtcttttgtccacttctccagcaaattagatttgtctctgggaatgtgtttgtaacataccaacctactgcagaccagcagagggagctcccatgttgaatttgtttgttagctattttcccccctttcacaaaaactactcggaccaatgttggtcgccttgagggtggttgttgcttgctggaaacaggcaagagtcgtgttggaagcatttctaatttctctcggacctacg

SEQ ID NO: 448648 - DNA, 2280 bp, Homo sapiens
ggtccctccgggctgcagccggcagcccacgtccagggagggcggagggaggaggagaggcgcggagaggagggaggggagaggggagggaggaaggcgagagaaagggagctgcttccatcccggacttcccagagcctgcctggagcgcgtactcagcggctctcgggtcccagcgtcccagccgcggcccgcgctcctccgccccgctcctcctcctcctcttcctcctcctcctcctctctaggcacccccgtcccctccttccagcggctgcagcccccagccccaactctccgcgcttactcctgggacgcgcgtcctcgccccatcctttgcttccttccttccttccttcttccttcctcccctggctcccgccctccctctccaggtcgccctcccggggcccgattgtctcggtgccccgctcccggcccgcgccctgccccgtctctcccttgcacttcctgagtcgcccgccgccgccgtcgcagactcgccgcgggagccccagcccaacccgagcccgacagccactgccccggctccagctccagccccacagcccgcggcgcccgcccgagggagccccggcgcccggggaaggctccagtgggctagcgcgccctcgcccagccccgcgccccagccctgcccggcccggcgaggaaggaccgggaagatgaacaacggcggcaaagccgagaaggagaacaccccgagcgaggccaaccttcaggaggaggaggtccggaccctatttgtcagtggccttcctctggatatcaaacctcgggagctctatctgcttttcagaccatttaagggctatgagggttctcttataaagctcacatctaaacagcctgtaggttttgtcagttttgacagtcgctcagaagcagaggctgcaaagaatgctttgaatggcatccgcttcgatcctgaaattccgcaaacactacgactagagtttgctaaggcaaacacgaagatggccaagaacaaactcgtagggactccaaaccccagtactcctctgcccaacactgtacctcagttcattgccagagagccatatgagctcacagtgcctgcactttaccccagtagccctgaagtgtgggccccgtaccctctgtacccagcggagttagcgcctgctctacctcctcctgctttcacctatcccgcttcactgcatgcccaggtaattgatacccatcggccaggacttcactcacttcaccaccagtcctttcaaacttggttcccgagagcacaccatacaactaacacctatccagctaacagatccaccctcaagagattaatgatcccctctaaatcaagctgacactccttcaggactgacgaggatcgtctgacagcaatgatatcacccactgcctgatgtttgccccaaatgacacctctctcttccttaatgatctcacctcatatcgcacatgagagaccggggcaggtttatccacctggctcccagctagctagagggcatcaccagagtgtatacgtgtgtgccttgtgtggaagggctgcagaggaaggtgtgtgctaggagaaggggatatgtgcgtctgtgcgtgtttctgtgtgttgagagttttccactctcgtgtacggtgagaagaatctctgaccaaagggaaagcttccaggggggaaggctgtactttcttaaatatgttacaggaaagattaagggttccttctctccattttcaggaaaccctgtagaaaaggagatacaagatagtgtctaagatggaattacaggtcaaggtagagatctctattctgaccagctttctttcttagttaaaaatagcctgatttttataaacaaacttcctgtttctccgcaaagattactgtctacatactaacacttcctctccccttggagaaaatatttctcttagcttcgcttttagtgcaagtggtagtaatcagtgtaaagattcacctctggagatcaccactcattctttggcctgcaaagattgatgaccagtaacaaatagaaatgtttctctcctgaggcaaagcccaacacacctgtcttttgtccacttctccagcaaattagatttgtctctgggaatgtgtttgtaacataccaacctactgcagaccagcagagggagctcccatgttgaatttgtttgttagctattttcccccctttcacaaaaactatttcttgacgacctttgagagatttcaataaaaattttaatcagagcaaaaatg

SEQ ID NO: 448649 - DNA, 2220 bp, Homo sapiens
ggtccctccgggctgcagccggcagcccacgtccagggagggcggagggaggaggagaggcgcggagaggagggaggggagaggggagggaggaaggcgagagaaagggagctgcttccatcccggacttcccagagcctgcctggagcgcgtactcagcggctctcgggtcccagcgtcccagccgcggcccgcgctcctccgccccgctcctcctcctcctcttcctcctcctcctcctctctaggcacccccgtcccctccttccagcggctgcagcccccagccccaactctccgcgcttactcctgggacgcgcgtcctcgccccatcctttgcttccttccttccttccttcttccttcctcccctggctcccgccctccctctccaggtcgccctcccggggcccgattgtctcggtgccccgctcccggcccgcgccctgccccgtctctcccttgcacttcctgagtcgcccgccgccgccgtcgcagactcgccgcgggagccccagcccaacccgagcccgacagccactgccccggctccagctccagccccacagcccgcggcgcccgcccgagggagccccggcgcccggggaaggctccagtgggctagcgcgccctcgcccagccccgcgccccagccctgcccggcccggcgaggaaggaccgggaagatgaacaacggcggcaaagccgagaaggagaacaccccgagcgaggccaaccttcaggaggaggaggtccggaccctatttgtcagtggccttcctctggatatcaaacctcgggagctctatctgcttttcagaccatttaagggctatgagggttctcttataaagctcacatctaaacagcctgtaggttttgtcagttttgacagtcgctcagaagcagaggctgcaaagaatgctttgaatggcatccgcttcgatcctgaaattccgcaaacactacgactagagtttgctaaggcaaacacgaagatggccaagaacaaactcgtagggactccaaaccccagtactcctctgcccaacactgtacctcagttcattgccagagagccatatgagctcacagtgcctgcactttaccccagtagccctgaagtgtgggccccgtaccctctgtacccagcggagttagcgcctgctctacctcctcctgctttcacctatcccgcttcactgcatgcccaggtaattgatacccatcggccaggacttcactcacttcaccaccagtcctttcaaacttggttcccgagagcacaccatacaactaacacctatccagctaacagatccaccctcaagagattaatgatcccctctaaatcaagctgacactccttcaggactgacgaggatcgtctgacagcaatgatatcacccactgcctgatgtttgccccaaatgacacctctctcttccttaatgatctcacctcatatcgcacatgagagaccggggcaggtttatccacctggctcccagctagctagagggcatcaccagagtgtatacgtgtgtgccttgtgtggaagggctgcagaggaaggtgtgtgctaggagaaggggatatgtgcgtctgtgcgtgtttctgtgtgttgagagttttccactctcgtgtacggtgagaagaatctctgaccaaagggaaagcttccaggggggaaggctgtactttcttaaatatgttacaggaaagattaagggttccttctctccattttcaggaaaccctgtagaaaaggagatacaagatagtgtctaagatggaattacaggtcaaggtagagatctctattctgaccagctttctttcttagttaaaaatagcctgatttttataaacaaacttcctgtttctccgcaaagattactgtctacatactaacacttcctctccccttggagaaaatatttctcttagcttcgcttttagtgcaagtggtagtaatcagtgtaaagattcacctctggagatcaccactcattctttggcctgcaaagattgatgaccagtaacaaatagaaagtacgtacgtaggtttcatttgtctttctgcatgtgtaattcagcctttaaattttaaatttttaaaaattattaggctggacaggcagagttttcgtttgcctgttttgctcagtgtttgtttacaaggctgggtgaaataaacagcttcccagaaaacctcctt

SEQ ID NO: 448650 - DNA, 1741 bp, Homo sapiens
ggtccctccgggctgcagccggcagcccacgtccagggagggcggagggaggaggagaggcgcggagaggagggaggggagaggggagggaggaaggcgagagaaagggagctgcttccatcccggacttcccagagcctgcctggagcgcgtactcagcggctctcgggtcccagcgtcccagccgcggcccgcgctcctccgccccgctcctcctcctcctcttcctcctcctcctcctctctaggcacccccgtcccctccttccagcggctgcagcccccagccccaactctccgcgcttactcctgggacgcgcgtcctcgccccatcctttgcttccttccttccttccttcttccttcctcccctggctcccgccctccctctccaggtcgccctcccggggcccgattgtctcggtgccccgctcccggcccgcgccctgccccgtctctcccttgcacttcctgagtcgcccgccgccgccgtcgcagactcgccgcgggagccccagcccaacccgagcccgacagccactgccccggctccagctccagccccacagcccgcggcgcccgcccgagggagccccggcgcccggggaaggctccagtgggctagcgcgccctcgcccagccccgcgccccagccctgcccggcccggcgaggaaggaccgggaagatgaacaacggcggcaaagccgagaaggagaacaccccgagcgaggccaaccttcaggaggaggaggtccggaccctatttgtcagtggccttcctctggatatcaaacctcgggagctctatctgcttttcagaccatttaagggctatgagggttctcttataaagctcacatctaaacagcctgtaggttttgtcagttttgacagtcgctcagaagcagaggctgcaaagaatgctttgaatggcatccgcttcgatcctgaaattccgcaaacactacgactagagtttgctaaggcaaacacgaagatggccaagaacaaactcgtagggactccaaaccccagtactcctctgcccaacactgtacctcagttcattgccagagagccatatgagctcacagtgcctgcactttaccccagtagccctgaagtgtgggccccgtaccctctgtacccagcggagttagcgcctgctctacctcctcctgctttcacctatcccgcttcactgcatgcccaggaaaccctgtagaaaaggagatacaagatagtgtctaagatggaattacaggtcaaggtagagatctctattctgaccagctttctttcttagttaaaaatagcctgatttttataaacaaacttcctgtttctccgcaaagattactgtctacatactaacacttcctctccccttggagaaaatatttctcttagcttcgcttttagtgcaagtggtagtaatcagtgtaaagattcacctctggagatcaccactcattctttggcctgcaaagattgatgaccagtaacaaatagaaatgtttctctcctgaggcaaagcccaacacacctgtcttttgtccacttctccagcaaattagatttgtctctgggaatgtgtttgtaacataccaacctactgcagaccagcagagggagctcccatgttgaatttgtttgttagctattttcccccctttcacaaaaactatttcttgacgacctttgagagatttcaataaaaattttaatcagagcaaaaatg

SEQ ID NO: 448651 - DNA, 1963 bp, Homo sapiens
  misc_feature (1809)..(1809): n is a, c, g, or t
ggtccctccgggctgcagccggcagcccacgtccagggagggcggagggaggaggagaggcgcggagaggagggaggggagaggggagggaggaaggcgagagaaagggagctgcttccatcccggacttcccagagcctgcctggagcgcgtactcagcggctctcgggtcccagcgtcccagccgcggcccgcgctcctccgccccgctcctcctcctcctcttcctcctcctcctcctctctaggcacccccgtcccctccttccagcggctgcagcccccagccccaactctccgcgcttactcctgggacgcgcgtcctcgccccatcctttgcttccttccttccttccttcttccttcctcccctggctcccgccctccctctccaggtcgccctcccggggcccgattgtctcggtgccccgctcccggcccgcgccctgccccgtctctcccttgcacttcctgagtcgcccgccgccgccgtcgcagactcgccgcgggagccccagcccaacccgagcccgacagccactgccccggctccagctccagccccacagcccgcggcgcccgcccgagggagccccggcgcccggggaaggctccagtgggctagcgcgccctcgcccagccccgcgccccagccctgcccggcccggcgaggaaggaccgggaagatgaacaacggcggcaaagccgagaaggagaacaccccgagcgaggccaaccttcaggaggaggaggtccggaccctatttgtcagtggccttcctctggatatcaaacctcgggagctctatctgcttttcagaccatttaagggctatgagggttctcttataaagctcacatctaaacagcctgtaggttttgtcagttttgacagtcgctcagaagcagaggctgcaaagaatgctttgaatggcatccgcttcgatcctgaaattccgcaaacactacgactagagtttgctaaggcaaacacgaagatggccaagaacaaactcgtagggactccaaaccccagtactcctctgcccaacactgtacctcagttcattgccagagagccattaggtggagctaatgaacatggagagaggcagtgaagtgcagaagtgaagggtctggactcatgatcttgattgattcacatcctggctctgtgagagtcgttgggctggatatttaacctcgctgtgtctcagctttctcataagatgagctcacagtgcctgcactttaccccagtagccctgaagtgtgggccccgtaccctctgtacccagcggagttagcgcctgctctacctcctcctgctttcacctatcccgcttcactgcatgcccagatgcgctggctccctccctccgaggctacttctcagggctggaagtcccgtcagttctgctgaatactatgtcccaggtgtgtgatggcggctgcaatctgtcttgtgggtattaatgcaatcttcagtggtggctactgttctctagctgttctacaaaactggagcatgctggcttgaaaaacccttgcccagttttgatcccttcaagactttgtcacagcctctatcacacatctgtttttctcgaagaaaaaaatataattaataaaaatgttttactcttttacactgtataattgtaagaaatagcgtattatttgtgaatgcatggtctgaaatttctgtacagtttggagatattttcaaacgaaacgtaagagaagtcaacaataaaaccaagaaaagtgagtatttttataccaaacattttaagtatgctgggatggncgatcttacactggttcggactcacagtcattgtccttgactttctgaactgcttgtcacttcaacacaatatctatttatattcctctgaagtaagttgcatgtatgaggcatgtctccaaactattactcaacatatccgaatcgtattgcc

SEQ ID NO: 448652 - DNA, 1292 bp, Homo sapiens
  misc_feature (1060)..(1060): n is a, c, g, or t
  misc_feature (1222)..(1222): n is a, c, g, or t
  misc_feature (1253)..(1253): n is a, c, g, or t
ggtccctccgggctgcagccggcagcccacgtccagggagggcggagggaggaggagaggcgcggagaggagggaggggagaggggagggaggaaggcgagagaaagggagctgcttccatcccggacttcccagagcctgcctggagcgcgtactcagcggctctcgggtcccagcgtcccagccgcggcccgcgctcctccgccccgctcctcctcctcctcttcctcctcctcctcctctctaggcacccccgtcccctccttccagcggctgcagcccccagccccaactctccgcgcttactcctgggacgcgcgtcctcgccccatcctttgcttccttccttccttccttcttccttcctcccctggctcccgccctccctctccaggtcgccctcccggggcccgattgtctcggtgccccgctcccggcccgcgccctgccccgtctctcccttgcacttcctgagtcgcccgccgccgccgtcgcagactcgccgcgggagccccagcccaacccgagcccgacagccactgccccggctccagctccagccccacagcccgcggcgcccgcccgagggagccccggcgcccggggaaggctccagtgggctagcgcgccctcgcccagccccgcgccccagccctgcccggcccggcgaggaaggaccgggaagatgaacaacggcggcaaagccgagaaggagaacaccccgagcgaggccaaccttcaggaggaggaggtccggaccctatttgtcagtggccttcctctggatatcaaacctcgggagctctatctgcttttcagaccatttaagggctatgagggttctcttataaagctcacatctaaacagcctgtaggttttgtcagttttgacagtcgctcagaagcagaggctgcaaagaatgctttgaatggcatccgcttcgatcctgaaattccgcaaacactacgactagagtttgctaaggcaaacacgaagatggccaagaacaaactcgtagggactccaaaccccagtactcctctgcccaacacgtttgcnaacgcagagaggaagagcatttttactttttcctccatgtttgttctgcagcatttccattgatgcatgctattgtagacttcttaggttgaccttggccttgacctccaccactagctcatgacccaaaactgaagatgtgcatcagaaagggacagattnggtctttctgctgtaaaagatattctgcctnagtgcctgctaaaatgttgtgcatagtcctctctgcgtt

SEQ ID NO: 448653 - DNA, 1455 bp, Homo sapiens
ggtccctccgggctgcagccggcagcccacgtccagggagggcggagggaggaggagaggcgcggagaggagggaggggagaggggagggaggaaggcgagagaaagggagctgcttccatcccggacttcccagagcctgcctggagcgcgtactcagcggctctcgggtcccagcgtcccagccgcggcccgcgctcctccgccccgctcctcctcctcctcttcctcctcctcctcctctctaggcacccccgtcccctccttccagcggctgcagcccccagccccaactctccgcgcttactcctgggacgcgcgtcctcgccccatcctttgcttccttccttccttccttcttccttcctcccctggctcccgccctccctctccaggtcgccctcccggggcccgattgtctcggtgccccgctcccggcccgcgccctgccccgtctctcccttgcacttcctgagtcgcccgccgccgccgtcgcagactcgccgcgggagccccagcccaacccgagcccgacagccactgccccggctccagctccagccccacagcccgcggcgcccgcccgagggagccccggcgcccggggaaggctccagtgggctagcgcgccctcgcccagccccgcgccccagccctgcccggcccggcgaggaaggaccgggaagatgaacaacggcggcaaagccgagaaggagaacaccccgagcgaggccaaccttcaggaggaggaggtccggaccctatttgtcagtggccttcctctggatatcaaacctcgggagctctatctgcttttcagaccatttaagggctatgagggttctcttataaagctcacatctaaacagcctgtaggttttgtcagttttgacagtcgctcagaagcagaggctgcaaagaatgctttgaatggcatccgcttcgatcctgaaattccgcaaacactacgactagagtttgctaaggcaaacacgaagatggccaagaacaaactcgtagggactccaaaccccagtactcctctgcccaacactggctctattgcctacgacgaagcttactattgcagtgtccgattagtcgccctgcatctcttacgcgacagatcaggccactgacacgtcgctggagcgcgggaccctcggcacccagtaggatctaggaacacgattcacctacatcgcgctagcatccgtatgcacgcctgtcacgagcagagccgcaggcgattctactcgatgagagcgaagcgcccagaacacactttcgtatagcaaactctacaggaaattagaagtgtatcgttgagccagtacatatgtcaacagaacctacggtcacatgacacggccagggacgacggtgaggctcaccacgtgaattccagcgtttagacggagaggtccacaaccagtactggacaggagtagcatgt

SEQ ID NO: 448654 - DNA, 1029 bp, Homo sapiens
  misc_feature (875)..(875): n is a, c, g, or t
gtcacaggtcagatacaaattggacagatttggtgtgaacatttacaagctcatcccgtacgctatgtttcagtggtcacctaaatattctcatttcaggactttttaaaacacattttcccaaatctaacttgggacaaaatctaacttgggacatttaaataggttatcaataattatctgtttatggcctctttcggcacacaaataagcatctccctgtacaaaattctagtgtatgctgagctgattgattgccttctgcatacaccttttctacaacttctcaaacgtgtgtgacatgctggtaagatggcaggaaaaggagtgactgaataatacaatatagctgagatgtgtttcaagaaaacctctgggccagggtaggggtttgtgagcgggagccaaggacttgccccatgtttctaatcaaggtgagaccactgacacatgtggtcagcaaatatgttctatacacacatccgcacactgtcatctaacccatccgttctcccatccacagcatctccaggacaaagccatcgcaactagggaggggttgacacctgctctcctaacatgttttctttctgtttcaggcttgaaaaacccttgcccagttttgatcccttcaagactttgtcacagcctctatcacacatctgtttttctcgaagaaaaaaatataattaataaaaatgttttactcttttacactgtataattgtaagaaatagcgtattatttgtgaatgcatggtctgaaatttctgtacagtttggagatattttcaaacgaaacgtaagagaagtcaacaataaaaccaagaaaagtgagtatttttataccaaacattttaagtatgctgggatggncgatcttacactggttcggactcacagtcattgtccttgactttctgaactgcttgtcacttcaacacaatatctatttatattcctctgaagtaagttgcatgtatgaggcatgtctccaaactattactcaacatatccgaatcgtattgcc

SEQ ID NO: 448655 - DNA, 1201 bp, Homo sapiens
  misc_feature (1047)..(1047): n is a, c, g, or t
tgattctttgctaggtctttgcaccttcgtatttcaaaattctcagaccctagggtacaagtagccagatatcttcacaaatgtgcatccttttagtttttgttttccaggagatgcttggagcaaagtttagtccttggtgcctgtgacagacagggatttcctatggccttgggctgaccaaagctgctcagctcctggaggtggctgtttctggatcttgctgtgtgggggcctcaggtcccatgcctttcctctgcagggcctttggacagtcctccgggtctaggccacagcccttgggatgcaaccacagggacgtgggtgtagagtcctgcttgctgggcctgcagcctcctaatgcgccctcagcgaagagttcacatgcttttcttggaatgtccttcctcgctggcccccagaagcctcctcttacttgctccgccaagtcctcagtgcgttttcctggctgagagcttttcatgtcgcatatccaaggccattctgcagcagcctctggtcctcagctcagcagcagaggcctttgatctctttcggcgttgcctctcttggctctctgccctcagaacaggccggtcttcaagaccgaggcagccccaggtggaggttactgtgcaccgttaacgggtgatctttctccatcccagtcccaggtgtgtgatggcggctgcaatctgtcttgtgggtattaatgcaatcttcagtggtggctactgttctctagctgttctacaaaactggagcatgctggcttgaaaaacccttgcccagttttgatcccttcaagactttgtcacagcctctatcacacatctgtttttctcgaagaaaaaaatataattaataaaaatgttttactcttttacactgtataattgtaagaaatagcgtattatttgtgaatgcatggtctgaaatttctgtacagtttggagatattttcaaacgaaacgtaagagaagtcaacaataaaaccaagaaaagtgagtatttttataccaaacattttaagtatgctgggatggncgatcttacactggttcggactcacagtcattgtccttgactttctgaactgcttgtcacttcaacacaatatctatttatattcctctgaagtaagttgcatgtatgaggcatgtctccaaactattactcaacatatccgaatcgtattgcc

SEQ ID NO: 448656 - DNA, 515 bp, Homo sapiens
tctgtggcctacataaattcttaaagagaagacatccattgtgaagcagttgcgtgggttccagtgacagagatcctgggtttcatttgtatctgctcacctaatttttttccaaatcatttctcacagacccttcagcaatggctactagaaggacgaacaattgccctcctttggaagtacggctaatagaagccctagatccgaataagatccgaataagaatatgtaatggaccaggcgcagtgcctcacgcctgtcatcccagcactttgggaggctgaggcaggcggatcacttgatgccagaagtttgagaccagcccagccaacatggtgaaaccccgtctctactaaaaatacaaaaattacccaagcatggtggtgggcgcctgtaatcccagctactagggaggctgaggcaggagaatcgcttgaacccgggaggcagaggttgcagtgagccaagatcatgccactgtattttggcctgggcgacagagcaagactgtcgaa

SEQ ID NO: 448657 - DNA, 576 bp, Homo sapiens
  misc_feature (422)..(422): n is a, c, g, or t
aaagtgacaccctttaaccaacacaaaaaaagttcgggcacagtcccaggtgtgtgatggcggctgcaatctgtcttgtgggtattaatgcaatcttcagtggtggctactgttctctagctgttctacaaaactggagcatgctggcttgaaaaacccttgcccagttttgatcccttcaagactttgtcacagcctctatcacacatctgtttttctcgaagaaaaaaatataattaataaaaatgttttactcttttacactgtataattgtaagaaatagcgtattatttgtgaatgcatggtctgaaatttctgtacagtttggagatattttcaaacgaaacgtaagagaagtcaacaataaaaccaagaaaagtgagtatttttataccaaacattttaagtatgctgggatggncgatcttacactggttcggactcacagtcattgtccttgactttctgaactgcttgtcacttcaacacaatatctatttatattcctctgaagtaagttgcatgtatgaggcatgtctccaaactattactcaacatatccgaatcgtattgcc

SEQ ID NO: 448658 - DNA, 394 bp, Homo sapiens
tttcatgaaaaaaaaatagaaggaagagaaacacagataaatccatagattgattttttttaaaggccccaagaatgcaaacaggtgtgtgtgtgtgtgcacatgcacatgcatgtgtgtaatttgctttcccagataacttaggagacatttgtaggaggagttaggtaatcaataaagaacttatttttacatgaacaagatggtattactacagttacttttggctaaacttggtttttctttattttcagggctatgagggttctcttataaagctcacatctaaacaggtaagaatttcaaagtggcatataaagatcacttttttactttcctcaggaatattgctggggcttgacattctttttttattcccattagaatttgaggg

SEQ ID NO: 448659 - DNA, 576 bp, Homo sapiens
gagcttgcctgtgtgttcataatggtgtgtggaacgcctctcaggacaccgctctgatgcttttcagccccttggggaagaggccctcacaggctagtgtgagtgggtaccatcttggaacagtagggaagtggtagccaagcaggaccctccgtgagaatggggatatgctggggagccctggctcacggccttctcccatgtcttttcagatatgcgctggctccctccctccgaggctacttctcagggctggaagtcccgtcagttctgctgaatactatgtaagtactcgctttcctttggaatgtgcgaagcccctagaacacatctgtacatggtgggtgcgccatgaacgcagctctcctcctttctctgcacccacaccttatgcacctcctttgtccatctttgttaaactcacttgaactacatagcagtgcatcttttccgagaggaaattttcacctaggtacgggtgctagtctatttgagtctaacttaggaaaccagtacctggcctccccacttaaaaataagcagtcagtgctaatttctgtagaacagctgtcagaa

SEQ ID NO: 448660 - DNA, 1715 bp, Homo sapiens
ggtccctccgggctgcagccggcagcccacgtccagggagggcggagggaggaggagaggcgcggagaggagggaggggagaggggagggaggaaggcgagagaaagggagctgcttccatcccggacttcccagagcctgcctggagcgcgtactcagcggctctcgggtcccagcgtcccagccgcggcccgcgctcctccgccccgctcctcctcctcctcttcctcctcctcctcctctctaggcacccccgtcccctccttccagcggctgcagcccccagccccaactctccgcgcttactcctgggacgcgcgtcctcgccccatcctttgcttccttccttccttccttcttccttcctcccctggctcccgccctccctctccaggtcgccctcccggggcccgattgtctcggtgccccgctcccggcccgcgccctgccccgtctctcccttgcacttcctgagtcgcccgccgccgccgtcgcagactcgccgcgggagccccagcccaacccgagcccgacagccactgccccggctccagctccagccccacagcccgcggcgcccgcccgagggagccccggcgcccggggaaggctccagtgggctagcgcgccctcgcccagccccgcgccccagccctgcccggcccggcgaggaaggaccgggaagatgaacaacggcggcaaagccgagaaggagaacaccccgagcgaggccaaccttcaggaggaggaggtccggaccctatttgtcagtggccttcctctggatatcaaacctcgggagctctatctgcttttcagaccatttaagggctatgagggttctcttataaagctcacatctaaacagcctgtaggttttgtcagttttgacagtcgctcagaagcagaggctgcaaagaatgctttgaatggcatccgcttcgatcctgaaattccgcaaacactacgactagagtttgctaaggcaaacacgaagatggccaagaacaaactcgtagggactccaaaccccagtactcctctgcccaacactgtacctcagttcattgccagagagccatatgagctcacagtgcctgcactttaccccagtagccctgaagtgtgggccccgtaccctctgtacccagcggagttagcgcctgctctacctcctcctgctttcacctatcccgcttcactgcatgcccagatgcgctggctccctccctccgaggctacttctcagggctggaagtcccgtcagttctgctgaatactatacccttcagcaatggctactagaaggacgaacaattgccctcctttggaagtacggctaatagaagccctagatccgaataagatccgaataagaatatgtaatggaccaggcgcagtgcctcacgcctgtcatcccagcactttgggaggctgaggcaggcggatcacttgatgccagaagtttgagaccagcccagccaacatggtcccaggtgtgtgatggcggctgcaatctgtcttgtgggtattaatgcaatcttcagtggtggctactgttctctagctgttctacaaaactggagcatgctggcttgaaaaacccttgcccagttttgatcccttcaagactttgtcacagcctctatcacacatctgtttttctcgaagaaaaaaatataattaataaaaatgttttactcttttacactgta

SEQ ID NO: 448661 - DNA, 807 bp, Homo sapiens
tcagaacccaagttgtccaagagagatgtcgtgtacaaaacagttaagaccgtgaagagaggggggtttataatgtcagaaattgaggaaaagaaactaaggtggcctgaatgatccaggtccggaccctatttgtcagtggccttcctctggatatcaaacctcgggagctctatctgcttttcagaccatttaagggctatgagggttctcttataaagctcacatctaaacagcctgtaggttttgtcagttttgacagtcgctcagaagcagaggctgcaaagaatgctttgaatggcatccgcttcgatcctgaaattccgcaaacactacgactagagtttgctaaggcaaacacgaagatggccaagaacaaactcgtagggactccaaaccccagtactcctctgcccaacactgtacctcagttcattgccagagagccatatgagctcacagtgcctgcactttaccccagtagccctgaagtgtgggccccgtaccctctgtacccagcggagttagcgcctgctctacctcctcctgctttcacctatcccgcttcactgcatgcccagtgtttctctcctgaggcaaagcccaacacacctgtcttttgtccacttctccagcaaattagatttgtctctgggaatgtgtttgtaacataccaacctactgcagaccagcagagggagctcccatgttgaatttgtttgttagctattttcccccctttcacaaaaactatttcttgacgacctttgagagatttcaataaaaattttaatcagagcaaaaatg

SEQ ID NO: 448662 - DNA, 538 bp, Homo sapiens
cgaggcccaagaattcgggacgaggaaaagggcatccgcttcgatcctgaaattccgcaaacactacgactagagtttgctaaggcaaacacgaagatggccaagaacaaactcgtagggactccaaaccccagtactcctctgcccaacactgtacctcagttcattgccagagagccatatgagctcacagtgcctgcactttaccccagtagccctgaagtgtgggccccgtaccctctgtacccagcggagttagcgcctgctctacctcctcctgctttcacctatcccgcttcactgcatgcccagtgtttctctcctgaggcaaagcccaacacacctgtcttttgtccacttctccagcaaattagatttgtctctgggaatgtgtttgtaacataccaacctactgcagaccagcagagggagctcccatgttgaatttgtttgttagctattttcccccctttcacaaaaactatttcttgacgacctttgagagatttcaataaaaattttaatcagagcaaaaatg

SEQ ID NO: 448663 - DNA, 811 bp, Homo sapiens
cgccttcatgtcactctggagtgcgcctcgaccaggctgacgagagcctgaagacgggctgcacgctcgtccccaaccctgcaggcacctgtgcgagtgagaacgtgagggctgtgtgcgagagctggtcagagaggctggggcagggcttccttctcgcagtcacctgcaccgaaagcagaaccatgccatccactgtgcagctctcctccccgggcagccctccccctcctgtgtctcctgtgaaacaccgtcacgtcttggcctcgtcggggctcagcgccccaacccacacccaggccgcaccagtcacaccactgcgctccacactgacccagtgcacacagacccatcaccctctactgtgtgtttaggtgtccagccccccacctgccatgggggctctgtgtccccgccccgtcctttcccacctgtctcaggaaggcagctccaactctgctctttgcttagtgagcaagtggattcagatgcaccaggccatgagccgtgggtagatgcgctggctccctccctccgaggctacttctcagggctggaagtcccgtcagttctgctgaatactatgtcccaggtgtgtgatggcggctgcaatctgtcttgtgggtattaatgcaatcttcagtggtggctactgttctctagctgttctacaaaactggagcatgctggcttgaaaaacccttgcccagttttgatcccttcaagactttgtcacagcctctatcacacatctgtttttctcgaagaaaaaaatataattaataaaaatgttttactcttttacactgta

SEQ ID NO: 448664 - DNA, 1146 bp, Homo sapiens
gcggccgcacttctggttgcgcggcccacactggccgccattgtggtggaggtcggagcgagtctcctgggcccgaaccggctgttggaagtgcgagggcaccgagagccacggtctgtttttcccatggtaaaagaacaagaaagacagaacaaagaaggcagagcagaaaagttccatgttcctcctcactccatcttgcctagccaaaacaattgaacagtttcagatatctatttcaaagatttcagataagttctaaaatgttttcttttgttgtgacttcagccttgacttgcctctactcttaagcacacgtctaagcctgatcaaaaggacaatgtgggaatgcatgaaagaataatgtgtgcttttcaaaagataagccagatactggaagcagaaactctgaaggacaaagttaaaatctaaaggtagctgtcatcttatgatctaaggtccggaccctatttgtcagtggccttcctctggatatcaaacctcgggagctctatctgcttttcagaccatttaagggctatgagggttctcttataaagctcacatctaaacagcctgtaggttttgtcagttttgacagtcgctcagaagcagaggctgcaaagaatgctttgaatggcatccgcttcgatcctgaaattccgcaaacactacgactagagtttgctaaggcaaacacgaagatggccaagaacaaactcgtagggactccaaaccccagtactcctctgcccaacactgtacctcagttcattgccagagagccatatgagctcacagtgcctgcactttaccccagtagccctgaagtgtgggccccgtaccctctgtacccagcggagttagcgcctgctctacctcctcctgctttcacctatcccgcttcactgcatgcccagtgtttctctcctgaggcaaagcccaacacacctgtcttttgtccacttctccagcaaattagatttgtctctgggaatgtgtttgtaacataccaacctactgcagaccagcagagggagctcccatgttgaatttgtttgttagctattttcccccctttcacaaaaactatttcttgacgacctttgagagatttcaataaaaattttaatcagagcaaaaatg

SEQ ID NO: 448665 - DNA, 1640 bp, Homo sapiens
ggtccctccgggctgcagccggcagcccacgtccagggagggcggagggaggaggagaggcgcggagaggagggaggggagaggggagggaggaaggcgagagaaagggagctgcttccatcccggacttcccagagcctgcctggagcgcgtactcagcggctctcgggtcccagcgtcccagccgcggcccgcgctcctccgccccgctcctcctcctcctcttcctcctcctcctcctctctaggcacccccgtcccctccttccagcggctgcagcccccagccccaactctccgcgcttactcctgggacgcgcgtcctcgccccatcctttgcttccttccttccttccttcttccttcctcccctggctcccgccctccctctccaggtcgccctcccggggcccgattgtctcggtgccccgctcccggcccgcgccctgccccgtctctcccttgcacttcctgagtcgcccgccgccgccgtcgcagactcgccgcgggagccccagcccaacccgagcccgacagccactgccccggctccagctccagccccacagcccgcggcgcccgcccgagggagccccggcgcccggggaaggctccagtgggctagcgcgccctcgcccagccccgcgccccagccctgcccggcccggcgaggaaggaccgggaagatgaacaacggcggcaaagccgagaaggagaacaccccgagcgaggccaaccttcaggaggaggaggtccggaccctatttgtcagtggccttcctctggatatcaaacctcgggagctctatctgcttttcagaccatttaagggctatgagggttctcttataaagctcacatctaaacagcctgtaggttttgtcagttttgacagtcgctcagaagcagaggctgcaaagaatgctttgaatggcatccgcttcgatcctgaaattccgcaaacactacgactagagtttgctaaggcaaacacgaagatggccaagaacaaactcgtagggactccaaaccccagtactcctctgcccaacactgtacctcagttcattgccagagagccatatgagctcacagtgcctgcactttaccccagtagccctgaagtgtgggccccgtaccctctgtacccagcggagttagcgcctgctctacctcctcctgctttcacctatcccgcttcactgcatgcccagtgtttctctcctgaggcaaagcccaacacacctgtcttttgtccacttctccagcaaattagatttgtctctgggaatgtgtttgtaacataccaacctactgcagaccagcagagggagctcccatgttgaatttgtttgttagctattttcccccctttcacaaaaactatttcttgacgacctttgagagatttcaataaaaattttaatcagagcaaaaatgaacaaaacagaacacaaaaacacttttgcggcgccctcggcgccccgaaaaaagtttataaaccatcgggtgggggccggggccccatggtagtggacacgtggcccaagcggtcccaagaaaacccgcggccggccgggggtggtcccccccatataaaaaccgcggcggaaccgcggctcgttcgaacaccccagaggg

SEQ ID NO: 448666 - DNA, 1745 bp, Homo sapiens
ggtccctccgggctgcagccggcagcccacgtccagggagggcggagggaggaggagaggcgcggagaggagggaggggagaggggagggaggaaggcgagagaaagggagctgcttccatcccggacttcccagagcctgcctggagcgcgtactcagcggctctcgggtcccagcgtcccagccgcggcccgcgctcctccgccccgctcctcctcctcctcttcctcctcctcctcctctctaggcacccccgtcccctccttccagcggctgcagcccccagccccaactctccgcgcttactcctgggacgcgcgtcctcgccccatcctttgcttccttccttccttccttcttccttcctcccctggctcccgccctccctctccaggtcgccctcccggggcccgattgtctcggtgccccgctcccggcccgcgccctgccccgtctctcccttgcacttcctgagtcgcccgccgccgccgtcgcagactcgccgcgggagccccagcccaacccgagcccgacagccactgccccggctccagctccagccccacagcccgcggcgcccgcccgagggagccccggcgcccggggaaggctccagtgggctagcgcgccctcgcccagccccgcgccccagccctgcccggcccggcgaggaaggaccgggaagatgaacaacggcggcaaagccgagaaggagaacaccccgagcgaggccaaccttcaggaggaggaggtccggaccctatttgtcagtggccttcctctggatatcaaacctcgggagctctatctgcttttcagaccatttaagggctatgagggttctcttataaagctcacatctaaacagcctgtaggttttgtcagttttgacagtcgctcagaagcagaggctgcaaagaatgctttgaatggcatccgcttcgatcctgaaattccgcaaacactacgactagagtttgctaaggcaaacacgaagatggccaagaacaaactcgtagggactccaaaccccagtactcctctgcccaacactgtacctcagttcattgccagagagccatatgagctcacagtgcctgcactttaccccagtagccctgaagtgtgggccccgtaccctctgtacccagcggagttagcgcctgctctacctcctcctgctttcacctatcccgcttcactgcatgcccagtgtttctctcctgaggcaaagcccaacacacctgtcttttgtccacttctccagcaaattagatttgtctctgggaatgtgtttgtaacataccaacctactgcagaccagcagagggagctcccatgttgaatttgtttgttagctattttcccccctttcacaaaaactagacgagcactccctagggagtgctcgtctttggggagtaagggaatgcttctcattggaggagacacttgagctgactctggggcaaactctagacaagtggcagtgggtcagggagggcgttcgtggctgaggggatggtttgcattaagccacgcagcatgacaaggcctttcacaatacctgggataaagtgttgggcaaacgggagcaggcagtgatatgtatggggaaagtgagagacgagacagaactgcagttctgaaggattttccttccacgaagaataaaggagttaggactttatcttgaaggcagtaggtatccctgaagtactgtaagcaaaagacgagcactccct

SEQ ID NO: 448667 - DNA, 1817 bp, Homo sapiens
  misc_feature (1663)..(1663): n is a, c, g, or t
ggtccctccgggctgcagccggcagcccacgtccagggagggcggagggaggaggagaggcgcggagaggagggaggggagaggggagggaggaaggcgagagaaagggagctgcttccatcccggacttcccagagcctgcctggagcgcgtactcagcggctctcgggtcccagcgtcccagccgcggcccgcgctcctccgccccgctcctcctcctcctcttcctcctcctcctcctctctaggcacccccgtcccctccttccagcggctgcagcccccagccccaactctccgcgcttactcctgggacgcgcgtcctcgccccatcctttgcttccttccttccttccttcttccttcctcccctggctcccgccctccctctccaggtcgccctcccggggcccgattgtctcggtgccccgctcccggcccgcgccctgccccgtctctcccttgcacttcctgagtcgcccgccgccgccgtcgcagactcgccgcgggagccccagcccaacccgagcccgacagccactgccccggctccagctccagccccacagcccgcggcgcccgcccgagggagccccggcgcccggggaaggctccagtgggctagcgcgccctcgcccagccccgcgccccagccctgcccggcccggcgaggaaggaccgggaagatgaacaacggcggcaaagccgagaaggagaacaccccgagcgaggccaaccttcaggaggaggaggtccggaccctatttgtcagtggccttcctctggatatcaaacctcgggagctctatctgcttttcagaccatttaagggctatgagggttctcttataaagctcacatctaaacagcctgtaggttttgtcagttttgacagtcgctcagaagcagaggctgcaaagaatgctttgaatggcatccgcttcgatcctgaaattccgcaaacactacgactagagtttgctaaggcaaacacgaagatggccaagaacaaactcgtagggactccaaaccccagtactcctctgcccaacactgtacctcagttcattgccagagagccatatgagctcacagtgcctgcactttaccccagtagccctgaagtgtgggccccgtaccctctgtacccagcggagttagcgcctgctctacctcctcctgctttcacctatcccgcttcactgcatgcccagatgcgctggctccctccctccgaggctacttctcagggctggaagtcccgtcagttctgctgaatactatgtcccaggtgtgtgatggcggctgcaatctgtcttgtgggtattaatgcaatcttcagtggtggctactgttctctagctgttctacaaaactggagcatgctggcttgaaaaacccttgcccagttttgatcccttcaagactttgtcacagcctctatcacacatctgtttttctcgaagaaaaaaatataattaataaaaatgttttactcttttacactgtataattgtaagaaatagcgtattatttgtgaatgcatggtctgaaatttctgtacagtttggagatattttcaaacgaaacgtaagagaagtcaacaataaaaccaagaaaagtgagtatttttataccaaacattttaagtatgctgggatggncgatcttacactggttcggactcacagtcattgtccttgactttctgaactgcttgtcacttcaacacaatatctatttatattcctctgaagtaagttgcatgtatgaggcatgtctccaaactattactcaacatatccgaatcgtattgcc

SEQ ID NO: 448668 - DNA, 1496 bp, Homo sapiens
ggtccctccgggctgcagccggcagcccacgtccagggagggcggagggaggaggagaggcgcggagaggagggaggggagaggggagggaggaaggcgagagaaagggagctgcttccatcccggacttcccagagcctgcctggagcgcgtactcagcggctctcgggtcccagcgtcccagccgcggcccgcgctcctccgccccgctcctcctcctcctcttcctcctcctcctcctctctaggcacccccgtcccctccttccagcggctgcagcccccagccccaactctccgcgcttactcctgggacgcgcgtcctcgccccatcctttgcttccttccttccttccttcttccttcctcccctggctcccgccctccctctccaggtcgccctcccggggcccgattgtctcggtgccccgctcccggcccgcgccctgccccgtctctcccttgcacttcctgagtcgcccgccgccgccgtcgcagactcgccgcgggagccccagcccaacccgagcccgacagccactgccccggctccagctccagccccacagcccgcggcgcccgcccgagggagccccggcgcccggggaaggctccagtgggctagcgcgccctcgcccagccccgcgccccagccctgcccggcccggcgaggaaggaccgggaagatgaacaacggcggcaaagccgagaaggagaacaccccgagcgaggccaaccttcaggaggaggaggtccggaccctatttgtcagtggccttcctctggatatcaaacctcgggagctctatctgcttttcagaccatttaagggctatgagggttctcttataaagctcacatctaaacagcctgtaggttttgtcagttttgacagtcgctcagaagcagaggctgcaaagaatgctttgaatggcatccgcttcgatcctgaaattccgcaaacactacgactagagtttgctaaggcaaacacgaagatggccaagaacaaactcgtagggactccaaaccccagtactcctctgcccaacactgtacctcagttcattgccagagagccatatgagctcacagtgcctgcactttaccccagtagccctgaagtgtgggccccgtaccctctgtacccagcggagttagcgcctgctctacctcctcctgctttcacctatcccgcttcactgcatgcccaggaaaccctgtagaaaaggagatacaagatagtgtctaagatggaattacaggtcaagtgtttctctcctgaggcaaagcccaacacacctgtcttttgtccacttctccagcaaattagatttgtctctgggaatgtgtttgtaacataccaacctactgcagaccagcagagggagctcccatgttgaatttgtttgttagctattttcccccctttcacaaaaactatttcttgacgacctttgagagatttcaataaaaattttaatcagagcaaaaatg

SEQ ID NO: 448669 - DNA, 1669 bp, Homo sapiens
ggtccctccgggctgcagccggcagcccacgtccagggagggcggagggaggaggagaggcgcggagaggagggaggggagaggggagggaggaaggcgagagaaagggagctgcttccatcccggacttcccagagcctgcctggagcgcgtactcagcggctctcgggtcccagcgtcccagccgcggcccgcgctcctccgccccgctcctcctcctcctcttcctcctcctcctcctctctaggcacccccgtcccctccttccagcggctgcagcccccagccccaactctccgcgcttactcctgggacgcgcgtcctcgccccatcctttgcttccttccttccttccttcttccttcctcccctggctcccgccctccctctccaggtcgccctcccggggcccgattgtctcggtgccccgctcccggcccgcgccctgccccgtctctcccttgcacttcctgagtcgcccgccgccgccgtcgcagactcgccgcgggagccccagcccaacccgagcccgacagccactgccccggctccagctccagccccacagcccgcggcgcccgcccgagggagccccggcgcccggggaaggctccagtgggctagcgcgccctcgcccagccccgcgccccagccctgcccggcccggcgaggaaggaccgggaagatgaacaacggcggcaaagccgagaaggagaacaccccgagcgaggccaaccttcaggaggaggaggtccggaccctatttgtcagtggccttcctctggatatcaaacctcgggagctctatctgcttttcagaccatttaagggctatgagggttctcttataaagctcacatctaaacagcctgtaggttttgtcagttttgacagtcgctcagaagcagaggctgcaaagaatgctttgaatggcatccgcttcgatcctgaaattccgcaaacactacgactagagtttgctaaggcaaacacgaagatggccaagaacaaactcgtagggactccaaaccccagtactcctctgcccaacactgtacctcagttcattgccagagagccatatgagctcacagtgcctgcactttaccccagtagccctgaagtgtgggccccgtaccctctgtacccagcggagttagcgcctgctctacctcctcctgctttcacctatcccgcttcactgcatgcccagatgcgctggctccctccctccgaggctacttctcagggctggaagtcccgtcagttctgctgaatactatacccttcagcaatggctactagaaggacgaacaattgccctcctttggaagtacggctaatagaagccctagatccgaataagatccgaataagaatatgtaatggaccaggcgcagtgcctcacgcctgtcatcccagcactttgggaggctgaggcaggcggatcacttgatgccagaagtttgagaccagcccagccaacatggtgaaaccccgtctctactaaaaatacaaaaattacccaagcatggtggtgggcgcctgtaatcccagctactagggaggctgaggcaggagaatcgcttgaacccgggaggcagaggttgcagtgagccaagatcatgccactgtattttggcctgggcgacagagcaagactgtcgaa

SEQ ID NO: 448670 - DNA, 1308 bp, Homo sapiens
ggtccctccgggctgcagccggcagcccacgtccagggagggcggagggaggaggagaggcgcggagaggagggaggggagaggggagggaggaaggcgagagaaagggagctgcttccatcccggacttcccagagcctgcctggagcgcgtactcagcggctctcgggtcccagcgtcccagccgcggcccgcgctcctccgccccgctcctcctcctcctcttcctcctcctcctcctctctaggcacccccgtcccctccttccagcggctgcagcccccagccccaactctccgcgcttactcctgggacgcgcgtcctcgccccatcctttgcttccttccttccttccttcttccttcctcccctggctcccgccctccctctccaggtcgccctcccggggcccgattgtctcggtgccccgctcccggcccgcgccctgccccgtctctcccttgcacttcctgagtcgcccgccgccgccgtcgcagactcgccgcgggagccccagcccaacccgagcccgacagccactgccccggctccagctccagccccacagcccgcggcgcccgcccgagggagccccggcgcccggggaaggctccagtgggctagcgcgccctcgcccagccccgcgccccagccctgcccggcccggcgaggaaggaccgggaagatgaacaacggcggcaaagccgagaaggagaacaccccgagcgaggccaaccttcaggaggaggaggtccggaccctatttgtcagtggccttcctctggatatcaaacctcgggagctctatctgcttttcagaccatttaagggctatgagggttctcttataaagctcacatctaaacagcctgtaggttttgtcagttttgacagtcgctcagaagcagaggctgcaaagaatgctttgaatggcatccgcttcgatcctgaaattccgcaaacactacgactagagtttgctaaggcaaacacgaagatggccaagaacaaactcgtagggactccaaaccccagtactcctctgcccaacactgtacctcagttcattgccagagagccattgtttctctcctgaggcaaagcccaacacacctgtcttttgtccacttctccagcaaattagatttgtctctgggaatgtgtttgtaacataccaacctactgcagaccagcagagggagctcccatgttgaatttgtttgttagctattttcccccctttcacaaaaactatttcttgacgacctttgagagatttcaataaaaattttaatcagagcaaaaatg

SEQ ID NO: 448671 - DNA, 1119 bp, Homo sapiens
  misc_feature (965)..(965): n is a, c, g, or t
cgccttcatgtcactctggagtgcgcctcgaccaggctgacgagagcctgaagacgggctgcacgctcgtccccaaccctgcaggcacctgtgcgagtgagaacgtgagggctgtgtgcgagagctggtcagagaggctggggcagggcttccttctcgcagtcacctgcaccgaaagcagaaccatgccatccactgtgcagctctcctccccgggcagccctccccctcctgtgtctcctgtgaaacaccgtcacgtcttggcctcgtcggggctcagcgccccaacccacacccaggccgcaccagtcacaccactgcgctccacactgacccagtgcacacagacccatcaccctctactgtgtgtttaggtgtccagccccccacctgccatgggggctctgtgtccccgccccgtcctttcccacctgtctcaggaaggcagctccaactctgctctttgcttagtgagcaagtggattcagatgcaccaggccatgagccgtgggtagatgcgctggctccctccctccgaggctacttctcagggctggaagtcccgtcagttctgctgaatactatgtcccaggtgtgtgatggcggctgcaatctgtcttgtgggtattaatgcaatcttcagtggtggctactgttctctagctgttctacaaaactggagcatgctggcttgaaaaacccttgcccagttttgatcccttcaagactttgtcacagcctctatcacacatctgtttttctcgaagaaaaaaatataattaataaaaatgttttactcttttacactgtataattgtaagaaatagcgtattatttgtgaatgcatggtctgaaatttctgtacagtttggagatattttcaaacgaaacgtaagagaagtcaacaataaaaccaagaaaagtgagtatttttataccaaacattttaagtatgctgggatggncgatcttacactggttcggactcacagtcattgtccttgactttctgaactgcttgtcacttcaacacaatatctatttatattcctctgaagtaagttgcatgtatgaggcatgtctccaaactattactcaacatatccgaatcgtattgcc

SEQ ID NO: 448672 - DNA, 4875 bp, Homo sapiens
cgacattttaactgaactgcgggataaagtgaaatctttccgtgcagctctacgagaggaggaaattgttcctcgtctgataagacaacagtggagaaaggacgcatgctgtttcttagggacacggctgacttccagatatgaccatgtatttgtggcttaaactcttggcatttggctttgcctttctggacacagaagtatttgtgacagggcaaagcccaacaccttcccccactgatgcctaccttaatgcctctgaaacaaccactctgagcccttctggaagcgctgtcatttcaaccacaacaatagctactactccatctaagccaacatgtgatgaaaaatatgcaaacatcactgtggattacttatataacaaggaaactaaattatttacagcaaagctaaatgttaatgagaatgtggaatgtggaaacaatacttgcacaaacaatgaggtgcataaccttacagaatgtaaaaatgcgtctgtttccatatctcataattcatgtactgctcctgataagacattaatattagatgtgccaccaggggttgaaaagtttcagttacatgattgtacacaagttgaaaaagcagatactactatttgtttaaaatggaaaaatattgaaacctttacttgtgatacacagaatattacctacagatttcagtgtggtaatatgatatttgataataaagaaattaaattagaaaaccttgaacccgaacatgagtataagtgtgactcagaaatactctataataaccacaagtttactaacgcaagtaaaattattaaaacagattttgggagtccaggagagcctcagattattttttgtagaagtgaagctgcacatcaaggagtaattacctggaatccccctcaaagatcatttcataattttaccctctgttatataaaagagacagaaaaagattgcctcaatctggataaaaacctgatcaaatatgatttgcaaaatttaaaaccttatacgaaatatgttttatcattacatgcctacatcattgcaaaagtgcaacgtaatggaagtgctgcaatgtgtcatttcacaactaaaagtgctcctccaagccaggtctggaacatgactgtctccatgacatcagataatagtatgcatgtcaagtgtaggcctcccagggaccgtaatggcccccatgaacgttaccatttggaagttgaagctggaaatactctggttagaaatgagtcgcataagaattgcgatttccgtgtaaaagatcttcaatattcaacagactacacttttaaggcctattttcacaatggagactatcctggagaaccctttattttacatcattcaacatcttataattctaaggcactgatagcatttctggcatttctgattattgtgacatcaatagccctgcttgttgttctctacaaaatctatgatctacataagaaaagatcctgcaatttagatgaacagcaggagcttgttgaaagggatgatgaaaaacaactgatgaatgtggagccaatccatgcagatattttgttggaaacttataagaggaagattgctgatgaaggaagactttttctggctgaatttcagagcatcccgcgggtgttcagcaagtttcctataaaggaagctcgaaagccctttaaccagaataaaaaccgttatgttgacattcttccttatgattataaccgtgttgaactctctgaaataaacggagatgcagggtcaaactacataaatgccagctatattgatggtttcaaagaacccaggaaatacattgctgcacaaggtcccagggatgaaactgttgatgatttctggaggatgatttgggaacagaaagccacagttattgtcatggtcactcgatgtgaagaaggaaacaggaacaagtgtgcagaatactggccgtcaatggaagagggcactcgggcttttggagatgttgttgtaaagatcaaccagcacaaaagatgtccagattacatcattcagaaattgaacattgtaaataaaaaagaaaaagcaactggaagagaggtgactcacattcagttcaccagctggccagaccacggggtgcctgaggatcctcacttgctcctcaaactgagaaggagagtgaatgccttcagcaatttcttcagtggtcccattgtggtgcactgcagtgctggtgttgggcgcacaggaacctatatcggaattgatgccatgctagaaggcctggaagccgagaacaaagtggatgtttatggttatgttgtcaagctaaggcgacagagatgcctgatggttcaagtagaggcccagtacatcttgatccatcaggctttggtggaatacaatcagtttggagaaacagaagtgaatttgtctgaattacatccatatctacataacatgaagaaaagggatccacccagtgagccgtctccactagaggctgaattccagagacttccttcatataggagctggaggacacagcacattggaaatcaagaagaaaataaaagtaaaaacaggaattctaatgtcatcccatatgactataacagagtgccacttaaacatgagctggaaatgagtaaagagagtgagcatgattcagatgaatcctctgatgatgacagtgattcagaggaaccaagcaaatacatcaatgcatcttttataatgagctactggaaacctgaagtgatgattgctgctcagggaccactgaaggagaccattggtgacttttggcagatgatcttccaaagaaaagtcaaagttattgttatgctgacagaactgaaacatggagaccaggaaatctgtgctcagtactggggagaaggaaagcaaacatatggagatattgaagttgacctgaaagacacagacaaatcttcaacttatacccttcgtgtctttgaactgagacattccaagaggaaagactctcgaactgtgtaccagtaccaatatacaaactggagtgtggagcagcttcctgcagaacccaaggaattaatctctatgattcaggtcgtcaaacaaaaacttccccagaagaattcctctgaagggaacaagcatcacaagagtacacctctactcattcactgcagggatggatctcagcaaacgggaatattttgtgctttgttaaatctcttagaaagtgcggaaacagaagaggtagtggatatttttcaagtggtaaaagctctacgcaaagctaggccaggcatggtttccacattcgagcaatatcaattcctatatgacgtcattgccagcacctaccctgctcagaatggacaagtaaagaaaaacaaccatcaagaagataaaattgaatttgataatgaagtggacaaagtaaagcaggatgctaattgtgttaatccacttggtgccccagaaaagctccctgaagcaaaggaacaggctgaaggttctgaacccacgagtggcactgaggggccagaacattctgtcaatggtcctgcaagtccagctttaaatcaaggttcataggaaaagacataaatgaggaaactccaaacctcctgttagctgttatttctatttttgtagaagtaggaagtgaaaataggtatacagtggattaattaaatgcagcgaaccaatatttgtagaagggttatattttactactgtggaaaaatatttaagatagttttgccagaacagtttgtacagacgtatgcttattttaaaattttatctcttattcagtaaaaaacaacttctttgtaatcgttatgtgtgtatatgtatgtgtgtatgggtgtgtgtttgtgtgagagacagagaaagagagagaattctttcaagtgaatctaaaagcttttgcttttcctttgtttttatgaagaaaaaatacattttatattagaagtgttaacttagcttgaaggatctgtttttaaaaatcataaactgtgtgcagactcaataaaatcatgtacatttctgaaatgacctcaagatgtcctccttgttctactcatatatatctatcttatatagtttactattttacttctagagatagtacataaaggtggtatgtgtgtgtatgctactacaaaaaagttgttaactaaattaacattgggaaatcttatattccatatattagcatttagtccaatgtctttttaagcttatttaattaaaaaatttccagtgagcttatcatgctgtctttacatggggttttcaattttgcatgctcgattattccctgtacaatatttaaaatttattgcttgatacttttgacaacaaattaggttttgtacaattgaacttaaataaatgtcattaaaataaataaatgcaatatgtattaatattcattgtataaaaatagaagaatacaaacatatttgttaaatatttacatatgaaatttaatatagctatttttatggaatttttcattgatatgaaaaatatgatattgcatatgcatagttcccatgttaaatcccattcataactttcattaaagcatttactttgaatttctccaatgcttagaatgtttttaccaggaatggatgtcgctaatcataataaaattcaaccattatttttttcttgtttataatacattgtgttatatgttcaaatatgaaatgtgtatgcacctattgaaatatgtttaatgcatttattaacatttgcaggacacttttacaggccccaattatccaatagtctaataattgtttaagatctagaaaaaaaaaatcaagaatagtggtatttttcatgaagtaataaaaactcgttttggtgaatt

SEQ ID NO: 448673 - DNA, 852 bp, Homo sapiens
ggacgcgtgggtcgcggacgcgtgggcaagatgtcctccttgttctactcatatatatctatcttatatagtttactattttacttctagagatagtacataaaggtggtatgtgtgtgtatgctactacaaaaaagttgttaactaaattaacattgggaaatcttatattccatatattagcatttagtccaatgtctttttaagcttatttaattaaaaaatttccagtgagcttatcatgctgtctttacatggggttttcaattttgcatgctcgattattccctgtacaatatttaaaatttattgcttgatacttttgacaacaaattaggttttgtacaattgaacttaaataaatgtcattaaaataaataaatgcaatatgtattaatattcattgtataaaaatagaagaatacaaacatatttgttaaatatttacatatgaaatttaatatagctatttttatggaatttttcattgatatgaaaaatatgatattgcatatgcatagttcccatgttaaatcccattcataactttcattaaagcatttactttgaatttctccaatgcttagaatgtttttaccaggaatggatgtcgctaatcataataaaattcaaccattatttttttcttgtttataatacattgtgttatatgttcaaatatgaaatgtgtatgcacctattgaaatatgtttaatgcatttattaacatttgcaggacacttttacaggccccaattatccaatagtctaataattgtttaagatctagaaaaaaaaaatcaagaatagtggtatttttcatgaagtaataaaaactcgttttggtgaatt

SEQ ID NO: 448674 - DNA, 1138 bp, Homo sapiens
ctgcaaccctcgaatcgtcgactataccgcctaaataggcgagccccctgtatactatgtacgcctcctctcctctcttctccagactcgctcgctctaccgagcatctaccagttctccagactccgcctccatacttcttgtcttagtccttctccccctccctgcgatcctcagaaagttcttcaacacgcccatgaaattatccccgtcgggtattccagtgctttatgtgccttacaggcccgagcccttcacctctccacgagaaacggattccagggcaaagcccaacaccttcccccactggtaagaattaatatttatatttttactaattttattttcttgttgcaaagtttatatatttaactacaattttctattattaacactgaaattatttttaaggataaattttataatcatgagtgattcttgacattcacttgttcttaaactttctgcttatacgttatagagtttaataactacctaaacatgttattaaatttgtatatatattttgtgtataaatagtaacttttcccaaacttgacagtaaatcacacaacaggtttctactctcttttaatattttaagactataaaaaaatgcatttaaattagataacaaaattttatagtctgaaagcaggttaacagctgtctatgtatgttatagatatgtagataacagatttgcatatgtctatatttctttaagagtatgttgcttttttcaatggtatgcaaaacctttgagactattgagatatttttaaataataattttcaaattctactgaacacttcaatagtccttataaatgtcttaatcatgagataaatttaaaacacagagatctgcaaataaattcatacatagtacatacaaaataagagaaaaaattaaattgcagatggttaaatatcacatcacttaactgatgttactgaaaatgtattttcctgcataatcatatggttgacagtatgcattaagaaggtaagtaaaacaatgaagacaattttgatttaatatggtaatgcacaattccaactaacgtacattcaacagatcatgaaattgggttattaaaatgaatatttttgtcattaaataaaaattccgtcc

SEQ ID NO: 448675 - DNA, 938 bp, Homo sapiens
cgttgcaccctggactattatctgctatctgccatctaggcgtctgctctctcggtccaacttgctgtcgcgtctaccgtcctttgcatcgtgctctatcggtgtgtgctgtgactcgaccaaaccaggtcgctcgagctatccacaaccctccttcctctccgtcccatgtacagccgcctctcttcgtgcccccctctcctcgctcaatcaccaactcactgttctcgctcaccggcccatttagccacgcgttccaagccctccaaaagctctttccgaacgccaatggtaatttcaacgggggaaatcccagggactttttcggcactgaaggcccgaactttctcgctttcacgaaaaagggatcccagggcaaagcccaacaccttcccccactgatgcctaccttaatgcctctgaaacaaccactctgagcccttctggaagcgctgtcatttcaaccacaacaatagctactactccatctaagccaacatgtgatgaaaaatatgcaaacatcactgtggattacttatataacaaggaaactaaattatttacagcaaagctaaatgttaatgagaatgtggaatgtggaaacaatacttgcacaaacaatgaggtgcataaccttacagaatgtaaaaatgcgtctgtttccatatctcataattcatgtactgctcctgataagacattaatattagatgtgccaccaggggttgaaaagtttcagttacatgattgtacacaagttgaaaaagcagatactactatttgtttaaaatggaaaaatattgaaacctttacttgtgatacacagaatattacctacagatttcagtgtggtaatatgatatttgataataaagaaagatccgccaggcacccgccctctctggtatctcttcacgccagcgcggttataataaaac

SEQ ID NO: 448676 - DNA, 1201 bp, Homo sapiens
tggtgttggttatgtggatgtatacatttgttaaaaatgcattaaactgtatctcaaatgggtacattttaatgtaaattttacttcagacattttatttaaacatttatcagtttttctcagtttcaaatgactagttactggaagcaatgacaagtgctactcaatgactgctaaatttattggtgctatgaatgccagatttttagcacagcaaaatctacaaattccaggatttttaggtagtatctgggcaagaatatatatgaataatgtatatgaaaggaagagggggttcttagatatcttcaagtcagtggaatgcttaggtttcacagtgccaatctggtgtgacatttactttgttaaaggaatttactctaaaacaaattaaatgagcccagatgcatttctttaaattttattttgaattcatcatttgtcaaaatatggttatcaataatgcatgcttataatatgaagaatgctttatccatgtcttatttttcatattacataacattcttattcttttaacaggtccaggagagcctcagattattttttgtagaagtgaagctgcacatcaaggagtaattacctggaatccccctcaaagatcatttcataattttaccctctgttatataaaagagacaggtaatttgtgtagaatttaatttcatcagaaaagagaaatcaagaatttgaaagtactagaaatttttattgagccagtgagtcacaaagctctctgcttagagactgcataggcatagtatactccctgatcttagaattgcttccactcattcaaagctttccagccccagaaatgactaaaatccagaacattctaaatatttgcttgtccttcttggtcttagtttaaatctttgtgctccaaagcctagagacagaaaacctctggatgacaacactcatttctgtcttgcaagtattatgtaagtgatttgactcactttgactcatctttgaactcatcattcagcctcctaaacaaaccaacaaacaagcaaaccccttgtaaaacttgtttcagctaataatacagacaaaatgttgggtgaataaaaatgaacatgggcccatgtagccgctggggccagtttggtgtaatcttgggagcatagttctaagtttagaattagacttctgcagaagtaatgcaattaaaaaa

SEQ ID NO: 448677 - DNA, 1366 bp, Homo sapiens
agggcacgccgatacgtccgtaggactaccatctctcatccctccgataaatgcgatgcctaccgcgaccatcgcaacgctcctcgccttaccactctacatacataatgatcaaatcttccccaatactgtcctcccatatccgcatctattctcgtgtcttttcttcgtccttactcggtaggggatgctctctatcatttcattcttgttctactattcctgttcgtctatcgcgccggctttgacaaacgaactgtcaacaaaaaagttttacgtgatatatactcgcgggcaagaaatgcatcgctcccgccgcaacaactcgatacatgcctaagcaccaatcatgggactcaagcgtgtatctacgatctcacgtcatctcaatgaggactgccgatcggcataggaaatgcagaatcgctcacctcggggtgagaaagtttctgtgcacagattgttcccaaggtaataacgggtgatcctagcatctgttgtgaatgggaatatatttaacccttttatttctgagacactgggatattgcgtacagggttaagtgtggtaatatgatatttgataataaagaaattaaattagaaaaccttgaacccgaacatgagtataagtgtgactcagaaatactctataataaccacaagtttactaacgcaagtaaaattattaaaacagattttgggagtccaggagagcctcagattattttttgtagaagtgaagctgcacatcaaggagtaattacctggaatccccctcaaagatcatttcataattttaccctctgttatataaaagagacaggtaatttgtgtagaatttaatttcatcagaaaagagaaatcaagaatttgaaagtactagaaatttttattgagccagtgagtcacaaagctctctgcttagagactgcataggcatagtatactccctgatcttagaattgcttccactcattcaaagctttccagccccagaaatgactaaaatccagaacattctaaatatttgcttgtccttcttggtcttagtttaaatctttgtgctccaaagcctagagacagaaaacctctggatgacaacactcatttctgtcttgcaagtattatgtaagtgatttgactcactttgactcatctttgaactcatcattcagcctcctaaacaaaccaacaaacaagcaaaccccttgtaaaacttgtttcagctaataatacagacaaaatgttgggtgaataaaaatgaacatgggcccatgtagccgctggggccagtttggtgtaatcttgggagcatagttctaagtttagaattagacttctgcagaagtaatgcaattaaaaaa

SEQ ID NO: 448678 - DNA, 875 bp, Homo sapiens
  misc_feature (65)..(65): n is a, c, g, or t
tgtcttctattgcacttccccttaccaacagaaagaaaagtttagaaacactcaacaccttttgnacggcttgaacagcacctaccctgctcagaatggacaagtaaagaaaaacaaccatcaagaagataaaattgaatttgataatgaagtggacaaagtaaagcaggatgctaattgtgttaatccacttggtgccccagaaaagctccctgaagcaaaggaacaggctgaaggttctgaacccacgagtggcactgaggggccagaacattctgtcaatggtcctgcaagtccagctttaaatcaaggttcataggaaaagacataaatgaggaaactccaaacctcctgttagctgttatttctatttttgtagaagtaggacacgaaagtccgtctccactggatcaagtaaacgcatcgaatcaatttctgctcaacggatatctcccacctactgcccaacatcatttgcagacgctctcccccccccccgtctcagtcgcacttttcccaatcccaacaccctatcacgcaaactcagctcacctccctccctctgcgtcagcaccacataatattccacccctcccatacattaatgcctctacttacggttcctatcctgtggtccgtaaaaccaatgactctatacactacaccacctctcatctaaactctcctaccacgcccctatacttctaccccatatacacgtatccccttacttcctctctcactaaatcctacgaaacactcacctcttctctaatgtgtcctccagcccccacgaccccactagcccactaatccaccacagcaatacatgtatagatacctatatataatatcatatatacttagatcaccat

SEQ ID NO: 448679 - DNA, 963 bp, Homo sapiens
  misc_feature (586)..(586): n is a, c, g, or t
  misc_feature (598)..(598): n is a, c, g, or t
cttgtctatgtgcgctatagtcgtcatacgacacaccatatgtacggtagttagcgtattcaaagtgtcgatttaacacgtgatgtcttctgaaaatcgatcactgggtcggtctcgctctcttcatccatttagtcaggactaaacaataacactacaggcgcgcattacgcggaactaaattatcctgtggactctttaagtgatggaattcatcaactcccactcaaaacactctatatacaagacgctaatactcggcatgacagcgaaatgtcgcggcgggtgcacaaaagcactggagtatttaaaaagtgtgccgtcgggaaaaatgatagggggggaacaaagtggttcgtgtttaaagtacaattaagcaaaaacacataacaacccacaaaaggggtccgtacgacgcaccgtcggaataaatcaactcgatggtaaatcacaggggttttttatgtcgatagaaggtcctggcctcttcaaattgtccaaacgaaaggagtcccaggtggaaagcccacaaccttccccctttgaatgcataccataatgcctgtaaaacaaccactatgagccnttctggaagcgntgtcatttcaaccgcaacaatagctactactccatctaagccaacatgtgatgaaaaatatgcaaacatcactgtggattacttatataacaaggaaactaaattatttacagcaaagctaaatgttaatgagaatgtggaatgtggaaacaatacttgcacaaacaatgaggtgcataaccttacagaatgtaaaaatgcgtctgtttccatatctcataattcatgtactgctcctgataagacattaatattagatgtgccaccaggggttgaaaagtttcagttacatgattgtacacaagttgaaaaagcaggcggccgttccctgatttctgcgccctaccgctgacgcgtgtacaaaa

SEQ ID NO: 448680 - DNA, 933 bp, Homo sapiens
  misc_feature (548)..(548): n is a, c, g, or t
  misc_feature (560)..(560): n is a, c, g, or t
  misc_feature (885)..(885): n is a, c, g, or t
cttctcacgccgcttacttccccaccacgcgaatcatctgtatgagccatcgcacaaacacccgccgtactcctggactctcaaccttccaacagctgctctcacgcaaacattcataatgaccacctatcccaatcactcgccgcacacgttacccgccccaccacctaataactagttcgctacacgagcttatgcatccatcaccacgatacaatagcggccacgcttcctcctcacaccatgtcggcgttccctcaccaccggacgactaaacatatatacccgcactaaaaacacatccgtagatcaaaagcgaacgtagcttcacaacagtcaccatcaaccccctcactctaactccccccaaaatattcttctataagccttatggaagaactcacacagcgggcactcccaatgggttttttagaccataaaggccggagcctgtcacctgtccaaagcagggtataccatggaaaagccccaacaccttgccccagagaagcacaccttaatgcctatgaaacaaccactatgagccnttctggaagcgntgtcatttcaaccgcaacaatagctactactccatctaagccaacatgtgatgaaaaatatgcaaacatcactgtggattacttatataacaaggaaactaaattatttacagcaaagctaaatgttaatgagaatgtggaatgtggaaacaatacttgcacaaacaatgaggtgcataaccttacagaatgtaaaaatgcgtctgtttccatatctcataattcatgtactgctcctgataagacattaatattagatgtgccaccaggggttgaaaagtttcagttacatgattgtacacaagttgaaaaagcagtacagcancgcgccacgcccctccttctcctgctctactcccccctccctcaacat

SEQ ID NO: 448681 - DNA, 904 bp, Homo sapiens
cgtcaccgaagtaaagcttccatacgcttactatactcggtcacatattcctatcaagcgcacgaaacagcgtcaacaaccttcacatcagccctatccatcattctaccagataggacaactcaataatcatttccatacacagacccgcagcattcttatcgtcctccctctatgattgttgtgaatgccgcccattcctctcactcgctttgtcgccttataaccattttaccgataccaggcctgcccctcccaacccaccgactaacgctaaccgtggatgttgtaacaatatccgtccctaatctaccaacctgtcctcttacaggcacattaaccccacccccctaatcctccctaatgttcttcacaagccatctgagcaaatccaacgcggtaatcccatcctttctaggccataaggcacccgcctgctgctgtccacaaagggatcccagggcaaagcccaacaccttcccccactgatgcctaccttaatgcctctgaaacaaccactctgagcccttctggaagcgctgtcatttcaaccacaacaatagctactactccatctaagccaacatgtgatgaaaaatatgcaaacatcactgtggattacttatataacaaggaaactaaattatttacagcaaagctaaatgttaatgagaatgtggaatgtggaaacaatacttgcacaaacaatgaggtgcataaccttacagaatgtaaaaatgcgtctgtttccatatctcataattcatgtactgctcctgataagacattaatattagatgtgccaccaggggttgaaaagtttcagttacatgattgtacacaagttgaaaaagcaggcggcagtttctctgtcccgtactacaacgattgcgtgcacaaaaac

SEQ ID NO: 448682 - DNA, 918 bp, Homo sapiens
ctggtaagatgttaagggggctaaccgcgacgatattcgttcactacatttatattgttgtgaaaaccggtggattgaacttgtccttggccgaactacgtattgaatatcaatgaaagcattaaacctaaataaatcatagtcatagcgccatagccactcgggcgcctccctcgcgcgtcttatcttactgttctctctcttactatactcgtatgttcgtattcctatccttgcgttgggcgcgaggctgctccaagcggctgcctatatttacatggatgtatgttataaacaggtgggttggggaaatgtgtatggcagtgctttgcaccaacccaacaaagagcgataacgtcgacagttgtttacagatacgtgcagactcccgcaatctccatcatctaaatgatggattcggatcaggatacgacatgtgcgatgcgccaccccggggttgaaaagtttcagttacatgattgtacacaagttgaaaaagcagatactactatttgtttaaaatggaaaaatattgaaacctttacttgtgatacacagaatattacctacagatttcagtgtggtaatatgatatttgataataaagaaattaaattagaaaaccttgaacccgaacatgagtataagtgtgactcagaaatactctataataaccacaagtttactaacgcaagtaaaattattaaaacagattttgggagtccaggagagcctcagattattttttgtagaagtgaagctgcacatcaaggagtaattacctggaatccccctcaaagatcatttcataattttaccctctgttatataaaagagacagaaaaagattgcctcaatctggataaaaacctgatgcggcaggtttcctttctagtatcatctgagggttatgataat

SEQ ID NO: 448683 - DNA, 513 bp, Homo sapiens
atctcaatccttgccaaattctatgtcattagcataatttcagtggctttaactgacatgttaggaatgaatgagggcttaggatacacattatgaaatactaatcaagtttatttctgtatcttcttgtcaggggttgaaaagtttcagttacatgattgtacacaagttgaaaaagcagatactactatttgtttaaaatggaaaaatattgaaacctttacttgtgatacacagaatattacctacagatttcagtgtggtaagaatataacattgaccagagaatttttttttgtggcacaatgttgttctagatattatttaatcttactctctgccctttctctcttcctccctgcctctcttgttctccctctgtttgtcttttttctttcttgtctttttcttggtctgtggtatatttagagtcaaataattaaattacctatacaattcaaacaaattcacaaaataaatgaatacttttcatgaaaaataaatatctaaaaa

SEQ ID NO: 448684 - DNA, 5358 bp, Homo sapiens
cgacattttaactgaactgcgggataaagtgaaatctttccgtgcagctctacgagaggaggaaattgttcctcgtctgataagacaacagtggagaaaggacgcatgctgtttcttagggacacggctgacttccagatatgaccatgtatttgtggcttaaactcttggcatttggctttgcctttctggacacagaagtatttgtgacagggcaaagcccaacaccttcccccactggattgactacagcaaagatgcccagtgttccactttcaagtgaccccttacctactcacaccactgcattctcacccgcaagcacctttgaaagagaaaatgacttctcagagaccacaacttctcttagtccagacaatacttccacccaagtatccccggactctttggataatgctagtgcttttaataccacaggtgtttcatcagtacagacgcctcaccttcccacgcacgcagactcgcagacgccctctgctggaactgacacgcagacattcagcggctccgccgccaatgcaaaactcaaccctaccccaggcagcaatgctatctcagatgtcccaggagagaggagtacagccagcacctttcctacagacccagtttccccattgacaaccaccctcagccttgcacaccacagctctgctgccttacctgcacgcacctccaacaccaccatcacagcgaacacctcagatgcctaccttaatgcctctgaaacaaccactctgagcccttctggaagcgctgtcatttcaaccacaacaatagctactactccatctaagccaacatgtgatgaaaaatatgcaaacatcactgtggattacttatataacaaggaaactaaattatttacagcaaagctaaatgttaatgagaatgtggaatgtggaaacaatacttgcacaaacaatgaggtgcataaccttacagaatgtaaaaatgcgtctgtttccatatctcataattcatgtactgctcctgataagacattaatattagatgtgccaccaggggttgaaaagtttcagttacatgattgtacacaagttgaaaaagcagatactactatttgtttaaaatggaaaaatattgaaacctttacttgtgatacacagaatattacctacagatttcagtgtggtaatatgatatttgataataaagaaattaaattagaaaaccttgaacccgaacatgagtataagtgtgactcagaaatactctataataaccacaagtttactaacgcaagtaaaattattaaaacagattttgggagtccaggagagcctcagattattttttgtagaagtgaagctgcacatcaaggagtaattacctggaatccccctcaaagatcatttcataattttaccctctgttatataaaagagacagaaaaagattgcctcaatctggataaaaacctgatcaaatatgatttgcaaaatttaaaaccttatacgaaatatgttttatcattacatgcctacatcattgcaaaagtgcaacgtaatggaagtgctgcaatgtgtcatttcacaactaaaagtgctcctccaagccaggtctggaacatgactgtctccatgacatcagataatagtatgcatgtcaagtgtaggcctcccagggaccgtaatggcccccatgaacgttaccatttggaagttgaagctggaaatactctggttagaaatgagtcgcataagaattgcgatttccgtgtaaaagatcttcaatattcaacagactacacttttaaggcctattttcacaatggagactatcctggagaaccctttattttacatcattcaacatcttataattctaaggcactgatagcatttctggcatttctgattattgtgacatcaatagccctgcttgttgttctctacaaaatctatgatctacataagaaaagatcctgcaatttagatgaacagcaggagcttgttgaaagggatgatgaaaaacaactgatgaatgtggagccaatccatgcagatattttgttggaaacttataagaggaagattgctgatgaaggaagactttttctggctgaatttcagagcatcccgcgggtgttcagcaagtttcctataaaggaagctcgaaagccctttaaccagaataaaaaccgttatgttgacattcttccttatgattataaccgtgttgaactctctgaaataaacggagatgcagggtcaaactacataaatgccagctatattgatggtttcaaagaacccaggaaatacattgctgcacaaggtcccagggatgaaactgttgatgatttctggaggatgatttgggaacagaaagccacagttattgtcatggtcactcgatgtgaagaaggaaacaggaacaagtgtgcagaatactggccgtcaatggaagagggcactcgggcttttggagatgttgttgtaaagatcaaccagcacaaaagatgtccagattacatcattcagaaattgaacattgtaaataaaaaagaaaaagcaactggaagagaggtgactcacattcagttcaccagctggccagaccacggggtgcctgaggatcctcacttgctcctcaaactgagaaggagagtgaatgccttcagcaatttcttcagtggtcccattgtggtgcactgcagtgctggtgttgggcgcacaggaacctatatcggaattgatgccatgctagaaggcctggaagccgagaacaaagtggatgtttatggttatgttgtcaagctaaggcgacagagatgcctgatggttcaagtagaggcccagtacatcttgatccatcaggctttggtggaatacaatcagtttggagaaacagaagtgaatttgtctgaattacatccatatctacataacatgaagaaaagggatccacccagtgagccgtctccactagaggctgaattccagagacttccttcatataggagctggaggacacagcacattggaaatcaagaagaaaataaaagtaaaaacaggaattctaatgtcatcccatatgactataacagagtgccacttaaacatgagctggaaatgagtaaagagagtgagcatgattcagatgaatcctctgatgatgacagtgattcagaggaaccaagcaaatacatcaatgcatcttttataatgagctactggaaacctgaagtgatgattgctgctcagggaccactgaaggagaccattggtgacttttggcagatgatcttccaaagaaaagtcaaagttattgttatgctgacagaactgaaacatggagaccaggaaatctgtgctcagtactggggagaaggaaagcaaacatatggagatattgaagttgacctgaaagacacagacaaatcttcaacttatacccttcgtgtctttgaactgagacattccaagaggaaagactctcgaactgtgtaccagtaccaatatacaaactggagtgtggagcagcttcctgcagaacccaaggaattaatctctatgattcaggtcgtcaaacaaaaacttccccagaagaattcctctgaagggaacaagcatcacaagagtacacctctactcattcactgcagggatggatctcagcaaacgggaatattttgtgctttgttaaatctcttagaaagtgcggaaacagaagaggtagtggatatttttcaagtggtaaaagctctacgcaaagctaggccaggcatggtttccacattcgagcaatatcaattcctatatgacgtcattgccagcacctaccctgctcagaatggacaagtaaagaaaaacaaccatcaagaagataaaattgaatttgataatgaagtggacaaagtaaagcaggatgctaattgtgttaatccacttggtgccccagaaaagctccctgaagcaaaggaacaggctgaaggttctgaacccacgagtggcactgaggggccagaacattctgtcaatggtcctgcaagtccagctttaaatcaaggttcataggaaaagacataaatgaggaaactccaaacctcctgttagctgttatttctatttttgtagaagtaggaagtgaaaataggtatacagtggattaattaaatgcagcgaaccaatatttgtagaagggttatattttactactgtggaaaaatatttaagatagttttgccagaacagtttgtacagacgtatgcttattttaaaattttatctcttattcagtaaaaaacaacttctttgtaatcgttatgtgtgtatatgtatgtgtgtatgggtgtgtgtttgtgtgagagacagagaaagagagagaattctttcaagtgaatctaaaagcttttgcttttcctttgtttttatgaagaaaaaatacattttatattagaagtgttaacttagcttgaaggatctgtttttaaaaatcataaactgtgtgcagactcaataaaatcatgtacatttctgaaatgacctcaagatgtcctccttgttctactcatatatatctatcttatatagtttactattttacttctagagatagtacataaaggtggtatgtgtgtgtatgctactacaaaaaagttgttaactaaattaacattgggaaatcttatattccatatattagcatttagtccaatgtctttttaagcttatttaattaaaaaatttccagtgagcttatcatgctgtctttacatggggttttcaattttgcatgctcgattattccctgtacaatatttaaaatttattgcttgatacttttgacaacaaattaggttttgtacaattgaacttaaataaatgtcattaaaataaataaatgcaatatgtattaatattcattgtataaaaatagaagaatacaaacatatttgttaaatatttacatatgaaatttaatatagctatttttatggaatttttcattgatatgaaaaatatgatattgcatatgcatagttcccatgttaaatcccattcataactttcattaaagcatttactttgaatttctccaatgcttagaatgtttttaccaggaatggatgtcgctaatcataataaaattcaaccattatttttttcttgtttataatacattgtgttatatgttcaaatatgaaatgtgtatgcacctattgaaatatgtttaatgcatttattaacatttgcaggacacttttacaggccccaattatccaatagtctaataattgtttaagatctagaaaaaaaaaatcaagaatagtggtatttttcatgaagtaataaaaactcgttttggtgaatt

SEQ ID NO: 448685 - DNA, 4495 bp, Homo sapiens
  misc_feature (4400)..(4400): n is a, c, g, or t
cgacattttaactgaactgcgggataaagtgaaatctttccgtgcagctctacgagaggaggaaattgttcctcgtctgataagacaacagtggagaaaggacgcatgctgtttcttagggacacggctgacttccagatatgaccatgtatttgtggcttaaactcttggcatttggctttgcctttctggacacagaagtatttgtgacagggcaaagcccaacaccttcccccactggattgactacagcaaagatgcccagtgttccactttcaagtgaccccttacctactcacaccactgcattctcacccgcaagcacctttgaaagagaaaatgacttctcagagaccacaacttctcttagtccagacaatacttccacccaagtatccccggactctttggataatgctagtgcttttaataccacaggtgtttcatcagtacagacgcctcaccttcccacgcacgcagactcgcagacgccctctgctggaactgacacgcagacattcagcggctccgccgccaatgcaaaactcaaccctaccccaggcagcaatgctatctcagatgtcccaggagagaggagtacagccagcacctttcctacagacccagtttccccattgacaaccaccctcagccttgcacaccacagctctgctgccttacctgcacgcacctccaacaccaccatcacagcgaacacctcagatgcctaccttaatgcctctgaaacaaccactctgagcccttctggaagcgctgtcatttcaaccacaacaatagctactactccatctaagccaacatgtgatgaaaaatatgcaaacatcactgtggattacttatataacaaggaaactaaattatttacagcaaagctaaatgttaatgagaatgtggaatgtggaaacaatacttgcacaaacaatgaggtgcataaccttacagaatgtaaaaatgcgtctgtttccatatctcataattcatgtactgctcctgataagacattaatattagatgtgccaccaggggttgaaaagtttcagttacatgattgtacacaagttgaaaaagcagatactactatttgtttaaaatggaaaaatattgaaacctttacttgtgatacacagaatattacctacagatttcagtgtggtaatatgatatttgataataaagaaattaaattagaaaaccttgaacccgaacatgagtataagtgtgactcagaaatactctataataaccacaagtttactaacgcaagtaaaattattaaaacagattttgggagtccaggagagcctcagattattttttgtagaagtgaagctgcacatcaaggagtaattacctggaatccccctcaaagatcatttcataattttaccctctgttatataaaagagacagaaaaagattgcctcaatctggataaaaacctgatcaaatatgatttgcaaaatttaaaaccttatacgaaatatgttttatcattacatgcctacatcattgcaaaagtgcaacgtaatggaagtgctgcaatgtgtcatttcacaactaaaagtgctcctccaagccaggtctggaacatgactgtctccatgacatcagataatagtatgcatgtcaagtgtaggcctcccagggaccgtaatggcccccatgaacgttaccatttggaagttgaagctggaaatactctggttagaaatgagtcgcataagaattgcgatttccgtgtaaaagatcttcaatattcaacagactacacttttaaggcctattttcacaatggagactatcctggagaaccctttattttacatcattcaacatcttataattctaaggcactgatagcatttctggcatttctgattattgtgacatcaatagccctgcttgttgttctctacaaaatctatgatctacataagaaaagatcctgcaatttagatgaacagcaggagcttgttgaaagggatgatgaaaaacaactgatgaatgtggagccaatccatgcagatattttgttggaaacttataagaggaagattgctgatgaaggaagactttttctggctgaatttcagagcatcccgcgggtgttcagcaagtttcctataaaggaagctcgaaagccctttaaccagaataaaaaccgttatgttgacattcttccttatgattataaccgtgttgaactctctgaaataaacggagatgcagggtcaaactacataaatgccagctatattgatggtttcaaagaacccaggaaatacattgctgcacaaggtcccagggatgaaactgttgatgatttctggaggatgatttgggaacagaaagccacagttattgtcatggtcactcgatgtgaagaaggaaacaggaacaagtgtgcagaatactggccgtcaatggaagagggcactcgggcttttggagatgttgttgtaaagatcaaccagcacaaaagatgtccagattacatcattcagaaattgaacattgtaaataaaaaagaaaaagcaactggaagagaggtgactcacattcagttcaccagctggccagaccacggggtgcctgaggatcctcacttgctcctcaaactgagaaggagagtgaatgccttcagcaatttcttcagtggtcccattgtggtgcactgcagtgctggtgttgggcgcacaggaacctatatcggaattgatgccatgctagaaggcctggaagccgagaacaaagtggatgtttatggttatgttgtcaagctaaggcgacagagatgcctgatggttcaagtagaggcccagtacatcttgatccatcaggctttggtggaatacaatcagtttggagaaacagaagtgaatttgtctgaattacatccatatctacataacatgaagaaaagggatccacccagtgagccgtctccactagaggctgaattccagagacttccttcatataggagctggaggacacagcacattggaaatcaagaagaaaataaaagtaaaaacaggaattctaatgtcatcccatatgactataacagagtgccacttaaacatgagctggaaatgagtaaagagagtgagcatgattcagatgaatcctctgatgatgacagtgattcagaggaaccaagcaaatacatcaatgcatcttttataatgagctactggaaacctgaagtgatgattgctgctcagggaccactgaaggagaccattggtgacttttggcagatgatcttccaaagaaaagtcaaagttattgttatgctgacagaactgaaacatggagaccaggaaatctgtgctcagtactggggagaaggaaagcaaacatatggagatattgaagttgacctgaaagacacagacaaatcttcaacttatacccttcgtgtctttgaactgagacattccaagaggaaagactctcgaactgtgtaccagtaccaatatacaaactggagtgtggagcagcttcctgcagaacccaaggaattaatctctatgattcaggtcgtcaaacaaaaacttccccagaagaattcctctgaagggaacaagcatcacaagagtacacctctactcattcactgcagggatggatctcagcaaacgggaatattttgtgctttgttaaatctcttagaaagtgcggaaacagaagaggtagtggatatttttcaagtggtaaaagctctacgcaaagctaggccaggcatggtttccacattcgagcaatatcaattcctatatgacgtcattgccagcacctaccctgctcagaatggacaagtaaagaaaaacaaccatcaagaagataaaattgaatttgataatgaagtggacaaagtaaagcaggatgctaattgtgttaatccacttggtgccccagaaaagctccctgaagcaaaggaacaggctgaaggttctgaacccacgagtggcactgaggggccagaacattctgtcaatggtcctgcaagtccagctttaaatcaaggttcataggaaaagacataaatgaggaaactccaaacctcctgttagctgttatttctatttttgtagaagtaggaagtgaaaataggtatacagtggattaattaaatgcagcgaaccaatatttgtagaagggttatattttactactgtggaaaaatatttaagatagttttgccagaacagtttgtacagacgtatgcttattttaaaattttatctcttattcagtaaaaaacaacttctttgtaatcgttatgtgtgtatatgtatgtgtgtatgggtgtgtgtttgtgtgagagacagagaaagagagagaattctttcaagtgaatctaaaaggctttngcttttcctttgtttttattgagaaaaaattccttttaatattcttgttaactttacctggagggacttgttttatctaacttggttcagacttt

SEQ ID NO: 448686 - DNA, 5214 bp, Homo sapiens
cgacattttaactgaactgcgggataaagtgaaatctttccgtgcagctctacgagaggaggaaattgttcctcgtctgataagacaacagtggagaaaggacgcatgctgtttcttagggacacggctgacttccagatatgaccatgtatttgtggcttaaactcttggcatttggctttgcctttctggacacagaagtatttgtgacagggcaaagcccaacaccttcccccactggattgactacagcaaagatgcccagtgttccactttcaagtgaccccttacctactcacaccactgcattctcacccgcaagcacctttgaaagagaaaatgacttctcagagaccacaacttctcttagtccagacaatacttccacccaagtatccccggactctttggataatgctagtgcttttaataccacaggtgtttcatcagtacagacgcctcaccttcccacgcacgcagactcgcagacgccctctgctggaactgacacgcagacattcagcggctccgccgccaatgcaaaactcaaccctaccccaggcagcaatgctatctcagatgcctaccttaatgcctctgaaacaaccactctgagcccttctggaagcgctgtcatttcaaccacaacaatagctactactccatctaagccaacatgtgatgaaaaatatgcaaacatcactgtggattacttatataacaaggaaactaaattatttacagcaaagctaaatgttaatgagaatgtggaatgtggaaacaatacttgcacaaacaatgaggtgcataaccttacagaatgtaaaaatgcgtctgtttccatatctcataattcatgtactgctcctgataagacattaatattagatgtgccaccaggggttgaaaagtttcagttacatgattgtacacaagttgaaaaagcagatactactatttgtttaaaatggaaaaatattgaaacctttacttgtgatacacagaatattacctacagatttcagtgtggtaatatgatatttgataataaagaaattaaattagaaaaccttgaacccgaacatgagtataagtgtgactcagaaatactctataataaccacaagtttactaacgcaagtaaaattattaaaacagattttgggagtccaggagagcctcagattattttttgtagaagtgaagctgcacatcaaggagtaattacctggaatccccctcaaagatcatttcataattttaccctctgttatataaaagagacagaaaaagattgcctcaatctggataaaaacctgatcaaatatgatttgcaaaatttaaaaccttatacgaaatatgttttatcattacatgcctacatcattgcaaaagtgcaacgtaatggaagtgctgcaatgtgtcatttcacaactaaaagtgctcctccaagccaggtctggaacatgactgtctccatgacatcagataatagtatgcatgtcaagtgtaggcctcccagggaccgtaatggcccccatgaacgttaccatttggaagttgaagctggaaatactctggttagaaatgagtcgcataagaattgcgatttccgtgtaaaagatcttcaatattcaacagactacacttttaaggcctattttcacaatggagactatcctggagaaccctttattttacatcattcaacatcttataattctaaggcactgatagcatttctggcatttctgattattgtgacatcaatagccctgcttgttgttctctacaaaatctatgatctacataagaaaagatcctgcaatttagatgaacagcaggagcttgttgaaagggatgatgaaaaacaactgatgaatgtggagccaatccatgcagatattttgttggaaacttataagaggaagattgctgatgaaggaagactttttctggctgaatttcagagcatcccgcgggtgttcagcaagtttcctataaaggaagctcgaaagccctttaaccagaataaaaaccgttatgttgacattcttccttatgattataaccgtgttgaactctctgaaataaacggagatgcagggtcaaactacataaatgccagctatattgatggtttcaaagaacccaggaaatacattgctgcacaaggtcccagggatgaaactgttgatgatttctggaggatgatttgggaacagaaagccacagttattgtcatggtcactcgatgtgaagaaggaaacaggaacaagtgtgcagaatactggccgtcaatggaagagggcactcgggcttttggagatgttgttgtaaagatcaaccagcacaaaagatgtccagattacatcattcagaaattgaacattgtaaataaaaaagaaaaagcaactggaagagaggtgactcacattcagttcaccagctggccagaccacggggtgcctgaggatcctcacttgctcctcaaactgagaaggagagtgaatgccttcagcaatttcttcagtggtcccattgtggtgcactgcagtgctggtgttgggcgcacaggaacctatatcggaattgatgccatgctagaaggcctggaagccgagaacaaagtggatgtttatggttatgttgtcaagctaaggcgacagagatgcctgatggttcaagtagaggcccagtacatcttgatccatcaggctttggtggaatacaatcagtttggagaaacagaagtgaatttgtctgaattacatccatatctacataacatgaagaaaagggatccacccagtgagccgtctccactagaggctgaattccagagacttccttcatataggagctggaggacacagcacattggaaatcaagaagaaaataaaagtaaaaacaggaattctaatgtcatcccatatgactataacagagtgccacttaaacatgagctggaaatgagtaaagagagtgagcatgattcagatgaatcctctgatgatgacagtgattcagaggaaccaagcaaatacatcaatgcatcttttataatgagctactggaaacctgaagtgatgattgctgctcagggaccactgaaggagaccattggtgacttttggcagatgatcttccaaagaaaagtcaaagttattgttatgctgacagaactgaaacatggagaccaggaaatctgtgctcagtactggggagaaggaaagcaaacatatggagatattgaagttgacctgaaagacacagacaaatcttcaacttatacccttcgtgtctttgaactgagacattccaagaggaaagactctcgaactgtgtaccagtaccaatatacaaactggagtgtggagcagcttcctgcagaacccaaggaattaatctctatgattcaggtcgtcaaacaaaaacttccccagaagaattcctctgaagggaacaagcatcacaagagtacacctctactcattcactgcagggatggatctcagcaaacgggaatattttgtgctttgttaaatctcttagaaagtgcggaaacagaagaggtagtggatatttttcaagtggtaaaagctctacgcaaagctaggccaggcatggtttccacattcgagcaatatcaattcctatatgacgtcattgccagcacctaccctgctcagaatggacaagtaaagaaaaacaaccatcaagaagataaaattgaatttgataatgaagtggacaaagtaaagcaggatgctaattgtgttaatccacttggtgccccagaaaagctccctgaagcaaaggaacaggctgaaggttctgaacccacgagtggcactgaggggccagaacattctgtcaatggtcctgcaagtccagctttaaatcaaggttcataggaaaagacataaatgaggaaactccaaacctcctgttagctgttatttctatttttgtagaagtaggaagtgaaaataggtatacagtggattaattaaatgcagcgaaccaatatttgtagaagggttatattttactactgtggaaaaatatttaagatagttttgccagaacagtttgtacagacgtatgcttattttaaaattttatctcttattcagtaaaaaacaacttctttgtaatcgttatgtgtgtatatgtatgtgtgtatgggtgtgtgtttgtgtgagagacagagaaagagagagaattctttcaagtgaatctaaaagcttttgcttttcctttgtttttatgaagaaaaaatacattttatattagaagtgttaacttagcttgaaggatctgtttttaaaaatcataaactgtgtgcagactcaataaaatcatgtacatttctgaaatgacctcaagatgtcctccttgttctactcatatatatctatcttatatagtttactattttacttctagagatagtacataaaggtggtatgtgtgtgtatgctactacaaaaaagttgttaactaaattaacattgggaaatcttatattccatatattagcatttagtccaatgtctttttaagcttatttaattaaaaaatttccagtgagcttatcatgctgtctttacatggggttttcaattttgcatgctcgattattccctgtacaatatttaaaatttattgcttgatacttttgacaacaaattaggttttgtacaattgaacttaaataaatgtcattaaaataaataaatgcaatatgtattaatattcattgtataaaaatagaagaatacaaacatatttgttaaatatttacatatgaaatttaatatagctatttttatggaatttttcattgatatgaaaaatatgatattgcatatgcatagttcccatgttaaatcccattcataactttcattaaagcatttactttgaatttctccaatgcttagaatgtttttaccaggaatggatgtcgctaatcataataaaattcaaccattatttttttcttgtttataatacattgtgttatatgttcaaatatgaaatgtgtatgcacctattgaaatatgtttaatgcatttattaacatttgcaggacacttttacaggccccaattatccaatagtctaataattgtttaagatctagaaaaaaaaaatcaagaatagtggtatttttcatgaagtaataaaaactcgttttggtgaatt

SEQ ID NO: 448687 - DNA, 5094 bp, Homo sapiens
  misc_feature (94)..(94): n is a, c, g, or t
ccgcgcctacctccgcgcaccacggccagccagtagcgccgcgaacgtcgaagtatcgaccggcacacagacatttacaccgcactccacggantacgccgctgcatagccacagtgctccgtcactgcgcgtcactcgctctactatgacacaaacccggcgctcgctcaatgcaccacgaacactatcctcccgcatatctgcctcttcatccatcctccgtgtcaacctagtgttgtcgtctcctgacctacgcccaaccaccaccactggtctggttcataggtccatttcgaccaccggtcatccatagccctcgaaaatgttttcttccgatggccattggcaaaaatcgcgcgtgggaatatccagggagttgttttggccataaaggccggagcctgtcacctgtccaaagaaagggatcccagggcaaagcccaacaccttcccccactgatgcctaccttaatgcctctgaaacaaccactctgagcccttctggaagcgctgtcatttcaaccacaacaatagctactactccatctaagccaacatgtgatgaaaaatatgcaaacatcactgtggattacttatataacaaggaaactaaattatttacagcaaagctaaatgttaatgagaatgtggaatgtggaaacaatacttgcacaaacaatgaggtgcataaccttacagaatgtaaaaatgcgtctgtttccatatctcataattcatgtactgctcctgataagacattaatattagatgtgccaccaggggttgaaaagtttcagttacatgattgtacacaagttgaaaaagcagatactactatttgtttaaaatggaaaaatattgaaacctttacttgtgatacacagaatattacctacagatttcagtgtggtaatatgatatttgataataaagaaattaaattagaaaaccttgaacccgaacatgagtataagtgtgactcagaaatactctataataaccacaagtttactaacgcaagtaaaattattaaaacagattttgggagtccaggagagcctcagattattttttgtagaagtgaagctgcacatcaaggagtaattacctggaatccccctcaaagatcatttcataattttaccctctgttatataaaagagacagaaaaagattgcctcaatctggataaaaacctgatcaaatatgatttgcaaaatttaaaaccttatacgaaatatgttttatcattacatgcctacatcattgcaaaagtgcaacgtaatggaagtgctgcaatgtgtcatttcacaactaaaagtgctcctccaagccaggtctggaacatgactgtctccatgacatcagataatagtatgcatgtcaagtgtaggcctcccagggaccgtaatggcccccatgaacgttaccatttggaagttgaagctggaaatactctggttagaaatgagtcgcataagaattgcgatttccgtgtaaaagatcttcaatattcaacagactacacttttaaggcctattttcacaatggagactatcctggagaaccctttattttacatcattcaacatcttataattctaaggcactgatagcatttctggcatttctgattattgtgacatcaatagccctgcttgttgttctctacaaaatctatgatctacataagaaaagatcctgcaatttagatgaacagcaggagcttgttgaaagggatgatgaaaaacaactgatgaatgtggagccaatccatgcagatattttgttggaaacttataagaggaagattgctgatgaaggaagactttttctggctgaatttcagagcatcccgcgggtgttcagcaagtttcctataaaggaagctcgaaagccctttaaccagaataaaaaccgttatgttgacattcttccttatgattataaccgtgttgaactctctgaaataaacggagatgcagggtcaaactacataaatgccagctatattgatggtttcaaagaacccaggaaatacattgctgcacaaggtcccagggatgaaactgttgatgatttctggaggatgatttgggaacagaaagccacagttattgtcatggtcactcgatgtgaagaaggaaacaggaacaagtgtgcagaatactggccgtcaatggaagagggcactcgggcttttggagatgttgttgtaaagatcaaccagcacaaaagatgtccagattacatcattcagaaattgaacattgtaaataaaaaagaaaaagcaactggaagagaggtgactcacattcagttcaccagctggccagaccacggggtgcctgaggatcctcacttgctcctcaaactgagaaggagagtgaatgccttcagcaatttcttcagtggtcccattgtggtgcactgcagtgctggtgttgggcgcacaggaacctatatcggaattgatgccatgctagaaggcctggaagccgagaacaaagtggatgtttatggttatgttgtcaagctaaggcgacagagatgcctgatggttcaagtagaggcccagtacatcttgatccatcaggctttggtggaatacaatcagtttggagaaacagaagtgaatttgtctgaattacatccatatctacataacatgaagaaaagggatccacccagtgagccgtctccactagaggctgaattccagagacttccttcatataggagctggaggacacagcacattggaaatcaagaagaaaataaaagtaaaaacaggaattctaatgtcatcccatatgactataacagagtgccacttaaacatgagctggaaatgagtaaagagagtgagcatgattcagatgaatcctctgatgatgacagtgattcagaggaaccaagcaaatacatcaatgcatcttttataatgagctactggaaacctgaagtgatgattgctgctcagggaccactgaaggagaccattggtgacttttggcagatgatcttccaaagaaaagtcaaagttattgttatgctgacagaactgaaacatggagaccaggaaatctgtgctcagtactggggagaaggaaagcaaacatatggagatattgaagttgacctgaaagacacagacaaatcttcaacttatacccttcgtgtctttgaactgagacattccaagaggaaagactctcgaactgtgtaccagtaccaatatacaaactggagtgtggagcagcttcctgcagaacccaaggaattaatctctatgattcaggtcgtcaaacaaaaacttccccagaagaattcctctgaagggaacaagcatcacaagagtacacctctactcattcactgcagggatggatctcagcaaacgggaatattttgtgctttgttaaatctcttagaaagtgcggaaacagaagaggtagtggatatttttcaagtggtaaaagctctacgcaaagctaggccaggcatggtttccacattcgagcaatatcaattcctatatgacgtcattgccagcacctaccctgctcagaatggacaagtaaagaaaaacaaccatcaagaagataaaattgaatttgataatgaagtggacaaagtaaagcaggatgctaattgtgttaatccacttggtgccccagaaaagctccctgaagcaaaggaacaggctgaaggttctgaacccacgagtggcactgaggggccagaacattctgtcaatggtcctgcaagtccagctttaaatcaaggttcataggaaaagacataaatgaggaaactccaaacctcctgttagctgttatttctatttttgtagaagtaggaagtgaaaataggtatacagtggattaattaaatgcagcgaaccaatatttgtagaagggttatattttactactgtggaaaaatatttaagatagttttgccagaacagtttgtacagacgtatgcttattttaaaattttatctcttattcagtaaaaaacaacttctttgtaatcgttatgtgtgtatatgtatgtgtgtatgggtgtgtgtttgtgtgagagacagagaaagagagagaattctttcaagtgaatctaaaagcttttgcttttcctttgtttttatgaagaaaaaatacattttatattagaagtgttaacttagcttgaaggatctgtttttaaaaatcataaactgtgtgcagactcaataaaatcatgtacatttctgaaatgacctcaagatgtcctccttgttctactcatatatatctatcttatatagtttactattttacttctagagatagtacataaaggtggtatgtgtgtgtatgctactacaaaaaagttgttaactaaattaacattgggaaatcttatattccatatattagcatttagtccaatgtctttttaagcttatttaattaaaaaatttccagtgagcttatcatgctgtctttacatggggttttcaattttgcatgctcgattattccctgtacaatatttaaaatttattgcttgatacttttgacaacaaattaggttttgtacaattgaacttaaataaatgtcattaaaataaataaatgcaatatgtattaatattcattgtataaaaatagaagaatacaaacatatttgttaaatatttacatatgaaatttaatatagctatttttatggaatttttcattgatatgaaaaatatgatattgcatatgcatagttcccatgttaaatcccattcataactttcattaaagcatttactttgaatttctccaatgcttagaatgtttttaccaggaatggatgtcgctaatcataataaaattcaaccattatttttttcttgtttataatacattgtgttatatgttcaaatatgaaatgtgtatgcacctattgaaatatgtttaatgcatttattaacatttgcaggacacttttacaggccccaattatccaatagtctaataattgtttaagatctagaaaaaaaaaatcaagaatagtggtatttttcatgaagtaataaaaactcgttttggtgaatt

SEQ ID NO: 448688 - DNA, 5379 bp, Homo sapiens
  misc_feature (94)..(94): n is a, c, g, or t
ccgcgcctacctccgcgcaccacggccagccagtagcgccgcgaacgtcgaagtatcgaccggcacacagacatttacaccgcactccacggantacgccgctgcatagccacagtgctccgtcactgcgcgtcactcgctctactatgacacaaacccggcgctcgctcaatgcaccacgaacactatcctcccgcatatctgcctcttcatccatcctccgtgtcaacctagtgttgtcgtctcctgacctacgcccaaccaccaccactggtctggttcataggtccatttcgaccaccggtcatccatagccctcgaaaatgttttcttccgatggccattggcaaaaatcgcgcgtgggaatatccagggagttgttttggccataaaggccggagcctgtcacctgtccaaagaaagggatcccagggcaaagcccaacaccttcccccactggtgtttcatcagtacagacgcctcaccttcccacgcacgcagactcgcagacgccctctgctggaactgacacgcagacattcagcggctccgccgccaatgcaaaactcaaccctaccccaggcagcaatgctatctcagatgtcccaggagagaggagtacagccagcacctttcctacagacccagtttccccattgacaaccaccctcagccttgcacaccacagctctgctgccttacctgcacgcacctccaacaccaccatcacagcgaacacctcagatgcctaccttaatgcctctgaaacaaccactctgagcccttctggaagcgctgtcatttcaaccacaacaatagctactactccatctaagccaacatgtgatgaaaaatatgcaaacatcactgtggattacttatataacaaggaaactaaattatttacagcaaagctaaatgttaatgagaatgtggaatgtggaaacaatacttgcacaaacaatgaggtgcataaccttacagaatgtaaaaatgcgtctgtttccatatctcataattcatgtactgctcctgataagacattaatattagatgtgccaccaggggttgaaaagtttcagttacatgattgtacacaagttgaaaaagcagatactactatttgtttaaaatggaaaaatattgaaacctttacttgtgatacacagaatattacctacagatttcagtgtggtaatatgatatttgataataaagaaattaaattagaaaaccttgaacccgaacatgagtataagtgtgactcagaaatactctataataaccacaagtttactaacgcaagtaaaattattaaaacagattttgggagtccaggagagcctcagattattttttgtagaagtgaagctgcacatcaaggagtaattacctggaatccccctcaaagatcatttcataattttaccctctgttatataaaagagacagaaaaagattgcctcaatctggataaaaacctgatcaaatatgatttgcaaaatttaaaaccttatacgaaatatgttttatcattacatgcctacatcattgcaaaagtgcaacgtaatggaagtgctgcaatgtgtcatttcacaactaaaagtgctcctccaagccaggtctggaacatgactgtctccatgacatcagataatagtatgcatgtcaagtgtaggcctcccagggaccgtaatggcccccatgaacgttaccatttggaagttgaagctggaaatactctggttagaaatgagtcgcataagaattgcgatttccgtgtaaaagatcttcaatattcaacagactacacttttaaggcctattttcacaatggagactatcctggagaaccctttattttacatcattcaacatcttataattctaaggcactgatagcatttctggcatttctgattattgtgacatcaatagccctgcttgttgttctctacaaaatctatgatctacataagaaaagatcctgcaatttagatgaacagcaggagcttgttgaaagggatgatgaaaaacaactgatgaatgtggagccaatccatgcagatattttgttggaaacttataagaggaagattgctgatgaaggaagactttttctggctgaatttcagagcatcccgcgggtgttcagcaagtttcctataaaggaagctcgaaagccctttaaccagaataaaaaccgttatgttgacattcttccttatgattataaccgtgttgaactctctgaaataaacggagatgcagggtcaaactacataaatgccagctatattgatggtttcaaagaacccaggaaatacattgctgcacaaggtcccagggatgaaactgttgatgatttctggaggatgatttgggaacagaaagccacagttattgtcatggtcactcgatgtgaagaaggaaacaggaacaagtgtgcagaatactggccgtcaatggaagagggcactcgggcttttggagatgttgttgtaaagatcaaccagcacaaaagatgtccagattacatcattcagaaattgaacattgtaaataaaaaagaaaaagcaactggaagagaggtgactcacattcagttcaccagctggccagaccacggggtgcctgaggatcctcacttgctcctcaaactgagaaggagagtgaatgccttcagcaatttcttcagtggtcccattgtggtgcactgcagtgctggtgttgggcgcacaggaacctatatcggaattgatgccatgctagaaggcctggaagccgagaacaaagtggatgtttatggttatgttgtcaagctaaggcgacagagatgcctgatggttcaagtagaggcccagtacatcttgatccatcaggctttggtggaatacaatcagtttggagaaacagaagtgaatttgtctgaattacatccatatctacataacatgaagaaaagggatccacccagtgagccgtctccactagaggctgaattccagagacttccttcatataggagctggaggacacagcacattggaaatcaagaagaaaataaaagtaaaaacaggaattctaatgtcatcccatatgactataacagagtgccacttaaacatgagctggaaatgagtaaagagagtgagcatgattcagatgaatcctctgatgatgacagtgattcagaggaaccaagcaaatacatcaatgcatcttttataatgagctactggaaacctgaagtgatgattgctgctcagggaccactgaaggagaccattggtgacttttggcagatgatcttccaaagaaaagtcaaagttattgttatgctgacagaactgaaacatggagaccaggaaatctgtgctcagtactggggagaaggaaagcaaacatatggagatattgaagttgacctgaaagacacagacaaatcttcaacttatacccttcgtgtctttgaactgagacattccaagaggaaagactctcgaactgtgtaccagtaccaatatacaaactggagtgtggagcagcttcctgcagaacccaaggaattaatctctatgattcaggtcgtcaaacaaaaacttccccagaagaattcctctgaagggaacaagcatcacaagagtacacctctactcattcactgcagggatggatctcagcaaacgggaatattttgtgctttgttaaatctcttagaaagtgcggaaacagaagaggtagtggatatttttcaagtggtaaaagctctacgcaaagctaggccaggcatggtttccacattcgagcaatatcaattcctatatgacgtcattgccagcacctaccctgctcagaatggacaagtaaagaaaaacaaccatcaagaagataaaattgaatttgataatgaagtggacaaagtaaagcaggatgctaattgtgttaatccacttggtgccccagaaaagctccctgaagcaaaggaacaggctgaaggttctgaacccacgagtggcactgaggggccagaacattctgtcaatggtcctgcaagtccagctttaaatcaaggttcataggaaaagacataaatgaggaaactccaaacctcctgttagctgttatttctatttttgtagaagtaggaagtgaaaataggtatacagtggattaattaaatgcagcgaaccaatatttgtagaagggttatattttactactgtggaaaaatatttaagatagttttgccagaacagtttgtacagacgtatgcttattttaaaattttatctcttattcagtaaaaaacaacttctttgtaatcgttatgtgtgtatatgtatgtgtgtatgggtgtgtgtttgtgtgagagacagagaaagagagagaattctttcaagtgaatctaaaagcttttgcttttcctttgtttttatgaagaaaaaatacattttatattagaagtgttaacttagcttgaaggatctgtttttaaaaatcataaactgtgtgcagactcaataaaatcatgtacatttctgaaatgacctcaagatgtcctccttgttctactcatatatatctatcttatatagtttactattttacttctagagatagtacataaaggtggtatgtgtgtgtatgctactacaaaaaagttgttaactaaattaacattgggaaatcttatattccatatattagcatttagtccaatgtctttttaagcttatttaattaaaaaatttccagtgagcttatcatgctgtctttacatggggttttcaattttgcatgctcgattattccctgtacaatatttaaaatttattgcttgatacttttgacaacaaattaggttttgtacaattgaacttaaataaatgtcattaaaataaataaatgcaatatgtattaatattcattgtataaaaatagaagaatacaaacatatttgttaaatatttacatatgaaatttaatatagctatttttatggaatttttcattgatatgaaaaatatgatattgcatatgcatagttcccatgttaaatcccattcataactttcattaaagcatttactttgaatttctccaatgcttagaatgtttttaccaggaatggatgtcgctaatcataataaaattcaaccattatttttttcttgtttataatacattgtgttatatgttcaaatatgaaatgtgtatgcacctattgaaatatgtttaatgcatttattaacatttgcaggacacttttacaggccccaattatccaatagtctaataattgtttaagatctagaaaaaaaaaatcaagaatagtggtatttttcatgaagtaataaaaactcgttttggtgaatt

SEQ ID NO: 448689 - DNA, 5049 bp, Homo sapiens
  misc_feature (454)..(454): n is a, c, g, or t
  misc_feature (466)..(466): n is a, c, g, or t
cggggcagtagcaaacgcggcgggaaaggcgcaccgtttgctcgctccgatcgttaaaaaagggtgaggtcacctgtctcgcccggttacacagaatccggcaacgaccttcaacatatatcatcgttacttcgctccttcaccttactcatcaacttccccacctcacctattctccatcactcagcggcccgcgaccgttatcgcgtctcataacatcgaattcacaggcggcacctctaacccatttcccgctaaggcagtgtcgtcagtacaataacccctccacaattaaaaagaaggagaaatagcaagaaaccgcttgtgctgcgacatgcaaccgctgacgttttacggggctccgcctctcaatgcagaattaacctcgtccccaggccaggaatggtatttcagagcccaactttaaggcgtctggggcacccactatgagccnttctggaagcgntgtcatttcaaccgcaacaatagctactactccatctaagccaacatgtgatgaaaaatatgcaaacatcactgtggattacttatataacaaggaaactaaattatttacagcaaagctaaatgttaatgagaatgtggaatgtggaaacaatacttgcacaaacaatgaggtgcataaccttacagaatgtaaaaatgcgtctgtttccatatctcataattcatgtactgctcctgataagacattaatattagatgtgccaccaggggttgaaaagtttcagttacatgattgtacacaagttgaaaaagcagatactactatttgtttaaaatggaaaaatattgaaacctttacttgtgatacacagaatattacctacagatttcagtgtggtaatatgatatttgataataaagaaattaaattagaaaaccttgaacccgaacatgagtataagtgtgactcagaaatactctataataaccacaagtttactaacgcaagtaaaattattaaaacagattttgggagtccaggagagcctcagattattttttgtagaagtgaagctgcacatcaaggagtaattacctggaatccccctcaaagatcatttcataattttaccctctgttatataaaagagacagaaaaagattgcctcaatctggataaaaacctgatcaaatatgatttgcaaaatttaaaaccttatacgaaatatgttttatcattacatgcctacatcattgcaaaagtgcaacgtaatggaagtgctgcaatgtgtcatttcacaactaaaagtgctcctccaagccaggtctggaacatgactgtctccatgacatcagataatagtatgcatgtcaagtgtaggcctcccagggaccgtaatggcccccatgaacgttaccatttggaagttgaagctggaaatactctggttagaaatgagtcgcataagaattgcgatttccgtgtaaaagatcttcaatattcaacagactacacttttaaggcctattttcacaatggagactatcctggagaaccctttattttacatcattcaacatcttataattctaaggcactgatagcatttctggcatttctgattattgtgacatcaatagccctgcttgttgttctctacaaaatctatgatctacataagaaaagatcctgcaatttagatgaacagcaggagcttgttgaaagggatgatgaaaaacaactgatgaatgtggagccaatccatgcagatattttgttggaaacttataagaggaagattgctgatgaaggaagactttttctggctgaatttcagagcatcccgcgggtgttcagcaagtttcctataaaggaagctcgaaagccctttaaccagaataaaaaccgttatgttgacattcttccttatgattataaccgtgttgaactctctgaaataaacggagatgcagggtcaaactacataaatgccagctatattgatggtttcaaagaacccaggaaatacattgctgcacaaggtcccagggatgaaactgttgatgatttctggaggatgatttgggaacagaaagccacagttattgtcatggtcactcgatgtgaagaaggaaacaggaacaagtgtgcagaatactggccgtcaatggaagagggcactcgggcttttggagatgttgttgtaaagatcaaccagcacaaaagatgtccagattacatcattcagaaattgaacattgtaaataaaaaagaaaaagcaactggaagagaggtgactcacattcagttcaccagctggccagaccacggggtgcctgaggatcctcacttgctcctcaaactgagaaggagagtgaatgccttcagcaatttcttcagtggtcccattgtggtgcactgcagtgctggtgttgggcgcacaggaacctatatcggaattgatgccatgctagaaggcctggaagccgagaacaaagtggatgtttatggttatgttgtcaagctaaggcgacagagatgcctgatggttcaagtagaggcccagtacatcttgatccatcaggctttggtggaatacaatcagtttggagaaacagaagtgaatttgtctgaattacatccatatctacataacatgaagaaaagggatccacccagtgagccgtctccactagaggctgaattccagagacttccttcatataggagctggaggacacagcacattggaaatcaagaagaaaataaaagtaaaaacaggaattctaatgtcatcccatatgactataacagagtgccacttaaacatgagctggaaatgagtaaagagagtgagcatgattcagatgaatcctctgatgatgacagtgattcagaggaaccaagcaaatacatcaatgcatcttttataatgagctactggaaacctgaagtgatgattgctgctcagggaccactgaaggagaccattggtgacttttggcagatgatcttccaaagaaaagtcaaagttattgttatgctgacagaactgaaacatggagaccaggaaatctgtgctcagtactggggagaaggaaagcaaacatatggagatattgaagttgacctgaaagacacagacaaatcttcaacttatacccttcgtgtctttgaactgagacattccaagaggaaagactctcgaactgtgtaccagtaccaatatacaaactggagtgtggagcagcttcctgcagaacccaaggaattaatctctatgattcaggtcgtcaaacaaaaacttccccagaagaattcctctgaagggaacaagcatcacaagagtacacctctactcattcactgcagggatggatctcagcaaacgggaatattttgtgctttgttaaatctcttagaaagtgcggaaacagaagaggtagtggatatttttcaagtggtaaaagctctacgcaaagctaggccaggcatggtttccacattcgagcaatatcaattcctatatgacgtcattgccagcacctaccctgctcagaatggacaagtaaagaaaaacaaccatcaagaagataaaattgaatttgataatgaagtggacaaagtaaagcaggatgctaattgtgttaatccacttggtgccccagaaaagctccctgaagcaaaggaacaggctgaaggttctgaacccacgagtggcactgaggggccagaacattctgtcaatggtcctgcaagtccagctttaaatcaaggttcataggaaaagacataaatgaggaaactccaaacctcctgttagctgttatttctatttttgtagaagtaggaagtgaaaataggtatacagtggattaattaaatgcagcgaaccaatatttgtagaagggttatattttactactgtggaaaaatatttaagatagttttgccagaacagtttgtacagacgtatgcttattttaaaattttatctcttattcagtaaaaaacaacttctttgtaatcgttatgtgtgtatatgtatgtgtgtatgggtgtgtgtttgtgtgagagacagagaaagagagagaattctttcaagtgaatctaaaagcttttgcttttcctttgtttttatgaagaaaaaatacattttatattagaagtgttaacttagcttgaaggatctgtttttaaaaatcataaactgtgtgcagactcaataaaatcatgtacatttctgaaatgacctcaagatgtcctccttgttctactcatatatatctatcttatatagtttactattttacttctagagatagtacataaaggtggtatgtgtgtgtatgctactacaaaaaagttgttaactaaattaacattgggaaatcttatattccatatattagcatttagtccaatgtctttttaagcttatttaattaaaaaatttccagtgagcttatcatgctgtctttacatggggttttcaattttgcatgctcgattattccctgtacaatatttaaaatttattgcttgatacttttgacaacaaattaggttttgtacaattgaacttaaataaatgtcattaaaataaataaatgcaatatgtattaatattcattgtataaaaatagaagaatacaaacatatttgttaaatatttacatatgaaatttaatatagctatttttatggaatttttcattgatatgaaaaatatgatattgcatatgcatagttcccatgttaaatcccattcataactttcattaaagcatttactttgaatttctccaatgcttagaatgtttttaccaggaatggatgtcgctaatcataataaaattcaaccattatttttttcttgtttataatacattgtgttatatgttcaaatatgaaatgtgtatgcacctattgaaatatgtttaatgcatttattaacatttgcaggacacttttacaggccccaattatccaatagtctaataattgtttaagatctagaaaaaaaaaatcaagaatagtggtatttttcatgaagtaataaaaactcgttttggtgaatt

SEQ ID NO: 448690 - DNA, 4745 bp, Homo sapiens
cggtcaaggatgttatcggcgatatcggtatcgttgtcgtacctacactctacaatcgacggtcataggagtcggctgataggcttaagagcggtctgtcaatagtcttattagtagctaacatgaaactctgagcacaccggtctgcgcctattagtagggcattcttactccggctaccaaacgggaccacccatctagactcaaggcgtaactggatctgttcaagctgctgggtgtagctttaacacatagaggctaaattttttctggcaaggtgaaagtttaatgcggagatgaatggggacccaaattgtgcaaaagcgattaagggcaataccgtaacagaaggtaaaaaggcgtaaggtttccatatattataaatcatgggcctgctcgtgtgaaaacattaagattacaggtgccaccaggggttgaaaagtttcagttacatgattgtacacaagttgaaaaagcagatactactatttgtttaaaatggaaaaatattgaaacctttacttgtgatacacagaatattacctacagatttcagtgtggtaatatgatatttgataataaagaaattaaattagaaaaccttgaacccgaacatgagtataagtgtgactcagaaatactctataataaccacaagtttactaacgcaagtaaaattattaaaacagattttgggagtccaggagagcctcagattattttttgtagaagtgaagctgcacatcaaggagtaattacctggaatccccctcaaagatcatttcataattttaccctctgttatataaaagagacagaaaaagattgcctcaatctggataaaaacctgatcaaatatgatttgcaaaatttaaaaccttatacgaaatatgttttatcattacatgcctacatcattgcaaaagtgcaacgtaatggaagtgctgcaatgtgtcatttcacaactaaaagtgctcctccaagccaggtctggaacatgactgtctccatgacatcagataatagtatgcatgtcaagtgtaggcctcccagggaccgtaatggcccccatgaacgttaccatttggaagttgaagctggaaatactctggttagaaatgagtcgcataagaattgcgatttccgtgtaaaagatcttcaatattcaacagactacacttttaaggcctattttcacaatggagactatcctggagaaccctttattttacatcattcaacatcttataattctaaggcactgatagcatttctggcatttctgattattgtgacatcaatagccctgcttgttgttctctacaaaatctatgatctacataagaaaagatcctgcaatttagatgaacagcaggagcttgttgaaagggatgatgaaaaacaactgatgaatgtggagccaatccatgcagatattttgttggaaacttataagaggaagattgctgatgaaggaagactttttctggctgaatttcagagcatcccgcgggtgttcagcaagtttcctataaaggaagctcgaaagccctttaaccagaataaaaaccgttatgttgacattcttccttatgattataaccgtgttgaactctctgaaataaacggagatgcagggtcaaactacataaatgccagctatattgatggtttcaaagaacccaggaaatacattgctgcacaaggtcccagggatgaaactgttgatgatttctggaggatgatttgggaacagaaagccacagttattgtcatggtcactcgatgtgaagaaggaaacaggaacaagtgtgcagaatactggccgtcaatggaagagggcactcgggcttttggagatgttgttgtaaagatcaaccagcacaaaagatgtccagattacatcattcagaaattgaacattgtaaataaaaaagaaaaagcaactggaagagaggtgactcacattcagttcaccagctggccagaccacggggtgcctgaggatcctcacttgctcctcaaactgagaaggagagtgaatgccttcagcaatttcttcagtggtcccattgtggtgcactgcagtgctggtgttgggcgcacaggaacctatatcggaattgatgccatgctagaaggcctggaagccgagaacaaagtggatgtttatggttatgttgtcaagctaaggcgacagagatgcctgatggttcaagtagaggcccagtacatcttgatccatcaggctttggtggaatacaatcagtttggagaaacagaagtgaatttgtctgaattacatccatatctacataacatgaagaaaagggatccacccagtgagccgtctccactagaggctgaattccagagacttccttcatataggagctggaggacacagcacattggaaatcaagaagaaaataaaagtaaaaacaggaattctaatgtcatcccatatgactataacagagtgccacttaaacatgagctggaaatgagtaaagagagtgagcatgattcagatgaatcctctgatgatgacagtgattcagaggaaccaagcaaatacatcaatgcatcttttataatgagctactggaaacctgaagtgatgattgctgctcagggaccactgaaggagaccattggtgacttttggcagatgatcttccaaagaaaagtcaaagttattgttatgctgacagaactgaaacatggagaccaggaaatctgtgctcagtactggggagaaggaaagcaaacatatggagatattgaagttgacctgaaagacacagacaaatcttcaacttatacccttcgtgtctttgaactgagacattccaagaggaaagactctcgaactgtgtaccagtaccaatatacaaactggagtgtggagcagcttcctgcagaacccaaggaattaatctctatgattcaggtcgtcaaacaaaaacttccccagaagaattcctctgaagggaacaagcatcacaagagtacacctctactcattcactgcagggatggatctcagcaaacgggaatattttgtgctttgttaaatctcttagaaagtgcggaaacagaagaggtagtggatatttttcaagtggtaaaagctctacgcaaagctaggccaggcatggtttccacattcgagcaatatcaattcctatatgacgtcattgccagcacctaccctgctcagaatggacaagtaaagaaaaacaaccatcaagaagataaaattgaatttgataatgaagtggacaaagtaaagcaggatgctaattgtgttaatccacttggtgccccagaaaagctccctgaagcaaaggaacaggctgaaggttctgaacccacgagtggcactgaggggccagaacattctgtcaatggtcctgcaagtccagctttaaatcaaggttcataggaaaagacataaatgaggaaactccaaacctcctgttagctgttatttctatttttgtagaagtaggaagtgaaaataggtatacagtggattaattaaatgcagcgaaccaatatttgtagaagggttatattttactactgtggaaaaatatttaagatagttttgccagaacagtttgtacagacgtatgcttattttaaaattttatctcttattcagtaaaaaacaacttctttgtaatcgttatgtgtgtatatgtatgtgtgtatgggtgtgtgtttgtgtgagagacagagaaagagagagaattctttcaagtgaatctaaaagcttttgcttttcctttgtttttatgaagaaaaaatacattttatattagaagtgttaacttagcttgaaggatctgtttttaaaaatcataaactgtgtgcagactcaataaaatcatgtacatttctgaaatgacctcaagatgtcctccttgttctactcatatatatctatcttatatagtttactattttacttctagagatagtacataaaggtggtatgtgtgtgtatgctactacaaaaaagttgttaactaaattaacattgggaaatcttatattccatatattagcatttagtccaatgtctttttaagcttatttaattaaaaaatttccagtgagcttatcatgctgtctttacatggggttttcaattttgcatgctcgattattccctgtacaatatttaaaatttattgcttgatacttttgacaacaaattaggttttgtacaattgaacttaaataaatgtcattaaaataaataaatgcaatatgtattaatattcattgtataaaaatagaagaatacaaacatatttgttaaatatttacatatgaaatttaatatagctatttttatggaatttttcattgatatgaaaaatatgatattgcatatgcatagttcccatgttaaatcccattcataactttcattaaagcatttactttgaatttctccaatgcttagaatgtttttaccaggaatggatgtcgctaatcataataaaattcaaccattatttttttcttgtttataatacattgtgttatatgttcaaatatgaaatgtgtatgcacctattgaaatatgtttaatgcatttattaacatttgcaggacacttttacaggccccaattatccaatagtctaataattgtttaagatctagaaaaaaaaaatcaagaatagtggtatttttcatgaagtaataaaaactcgttttggtgaatt

SEQ ID NO: 448691 - DNA, 4587 bp, Homo sapiens
tggtgttggttatgtggatgtatacatttgttaaaaatgcattaaactgtatctcaaatgggtacattttaatgtaaattttacttcagacattttatttaaacatttatcagtttttctcagtttcaaatgactagttactggaagcaatgacaagtgctactcaatgactgctaaatttattggtgctatgaatgccagatttttagcacagcaaaatctacaaattccaggatttttaggtagtatctgggcaagaatatatatgaataatgtatatgaaaggaagagggggttcttagatatcttcaagtcagtggaatgcttaggtttcacagtgccaatctggtgtgacatttactttgttaaaggaatttactctaaaacaaattaaatgagcccagatgcatttctttaaattttattttgaattcatcatttgtcaaaatatggttatcaataatgcatgcttataatatgaagaatgctttatccatgtcttatttttcatattacataacattcttattcttttaacaggtccaggagagcctcagattattttttgtagaagtgaagctgcacatcaaggagtaattacctggaatccccctcaaagatcatttcataattttaccctctgttatataaaagagacagaaaaagattgcctcaatctggataaaaacctgatcaaatatgatttgcaaaatttaaaaccttatacgaaatatgttttatcattacatgcctacatcattgcaaaagtgcaacgtaatggaagtgctgcaatgtgtcatttcacaactaaaagtgctcctccaagccaggtctggaacatgactgtctccatgacatcagataatagtatgcatgtcaagtgtaggcctcccagggaccgtaatggcccccatgaacgttaccatttggaagttgaagctggaaatactctggttagaaatgagtcgcataagaattgcgatttccgtgtaaaagatcttcaatattcaacagactacacttttaaggcctattttcacaatggagactatcctggagaaccctttattttacatcattcaacatcttataattctaaggcactgatagcatttctggcatttctgattattgtgacatcaatagccctgcttgttgttctctacaaaatctatgatctacataagaaaagatcctgcaatttagatgaacagcaggagcttgttgaaagggatgatgaaaaacaactgatgaatgtggagccaatccatgcagatattttgttggaaacttataagaggaagattgctgatgaaggaagactttttctggctgaatttcagagcatcccgcgggtgttcagcaagtttcctataaaggaagctcgaaagccctttaaccagaataaaaaccgttatgttgacattcttccttatgattataaccgtgttgaactctctgaaataaacggagatgcagggtcaaactacataaatgccagctatattgatggtttcaaagaacccaggaaatacattgctgcacaaggtcccagggatgaaactgttgatgatttctggaggatgatttgggaacagaaagccacagttattgtcatggtcactcgatgtgaagaaggaaacaggaacaagtgtgcagaatactggccgtcaatggaagagggcactcgggcttttggagatgttgttgtaaagatcaaccagcacaaaagatgtccagattacatcattcagaaattgaacattgtaaataaaaaagaaaaagcaactggaagagaggtgactcacattcagttcaccagctggccagaccacggggtgcctgaggatcctcacttgctcctcaaactgagaaggagagtgaatgccttcagcaatttcttcagtggtcccattgtggtgcactgcagtgctggtgttgggcgcacaggaacctatatcggaattgatgccatgctagaaggcctggaagccgagaacaaagtggatgtttatggttatgttgtcaagctaaggcgacagagatgcctgatggttcaagtagaggcccagtacatcttgatccatcaggctttggtggaatacaatcagtttggagaaacagaagtgaatttgtctgaattacatccatatctacataacatgaagaaaagggatccacccagtgagccgtctccactagaggctgaattccagagacttccttcatataggagctggaggacacagcacattggaaatcaagaagaaaataaaagtaaaaacaggaattctaatgtcatcccatatgactataacagagtgccacttaaacatgagctggaaatgagtaaagagagtgagcatgattcagatgaatcctctgatgatgacagtgattcagaggaaccaagcaaatacatcaatgcatcttttataatgagctactggaaacctgaagtgatgattgctgctcagggaccactgaaggagaccattggtgacttttggcagatgatcttccaaagaaaagtcaaagttattgttatgctgacagaactgaaacatggagaccaggaaatctgtgctcagtactggggagaaggaaagcaaacatatggagatattgaagttgacctgaaagacacagacaaatcttcaacttatacccttcgtgtctttgaactgagacattccaagaggaaagactctcgaactgtgtaccagtaccaatatacaaactggagtgtggagcagcttcctgcagaacccaaggaattaatctctatgattcaggtcgtcaaacaaaaacttccccagaagaattcctctgaagggaacaagcatcacaagagtacacctctactcattcactgcagggatggatctcagcaaacgggaatattttgtgctttgttaaatctcttagaaagtgcggaaacagaagaggtagtggatatttttcaagtggtaaaagctctacgcaaagctaggccaggcatggtttccacattcgagcaatatcaattcctatatgacgtcattgccagcacctaccctgctcagaatggacaagtaaagaaaaacaaccatcaagaagataaaattgaatttgataatgaagtggacaaagtaaagcaggatgctaattgtgttaatccacttggtgccccagaaaagctccctgaagcaaaggaacaggctgaaggttctgaacccacgagtggcactgaggggccagaacattctgtcaatggtcctgcaagtccagctttaaatcaaggttcataggaaaagacataaatgaggaaactccaaacctcctgttagctgttatttctatttttgtagaagtaggaagtgaaaataggtatacagtggattaattaaatgcagcgaaccaatatttgtagaagggttatattttactactgtggaaaaatatttaagatagttttgccagaacagtttgtacagacgtatgcttattttaaaattttatctcttattcagtaaaaaacaacttctttgtaatcgttatgtgtgtatatgtatgtgtgtatgggtgtgtgtttgtgtgagagacagagaaagagagagaattctttcaagtgaatctaaaagcttttgcttttcctttgtttttatgaagaaaaaatacattttatattagaagtgttaacttagcttgaaggatctgtttttaaaaatcataaactgtgtgcagactcaataaaatcatgtacatttctgaaatgacctcaagatgtcctccttgttctactcatatatatctatcttatatagtttactattttacttctagagatagtacataaaggtggtatgtgtgtgtatgctactacaaaaaagttgttaactaaattaacattgggaaatcttatattccatatattagcatttagtccaatgtctttttaagcttatttaattaaaaaatttccagtgagcttatcatgctgtctttacatggggttttcaattttgcatgctcgattattccctgtacaatatttaaaatttattgcttgatacttttgacaacaaattaggttttgtacaattgaacttaaataaatgtcattaaaataaataaatgcaatatgtattaatattcattgtataaaaatagaagaatacaaacatatttgttaaatatttacatatgaaatttaatatagctatttttatggaatttttcattgatatgaaaaatatgatattgcatatgcatagttcccatgttaaatcccattcataactttcattaaagcatttactttgaatttctccaatgcttagaatgtttttaccaggaatggatgtcgctaatcataataaaattcaaccattatttttttcttgtttataatacattgtgttatatgttcaaatatgaaatgtgtatgcacctattgaaatatgtttaatgcatttattaacatttgcaggacacttttacaggccccaattatccaatagtctaataattgtttaagatctagaaaaaaaaaatcaagaatagtggtatttttcatgaagtaataaaaactcgttttggtgaatt

SEQ ID NO: 448692 - DNA, 3953 bp, Homo sapiens
ctctcccccccctgcctaaacaaccacccccacaatgcctcatcgccaccccatcctcccatatccccgcccaattcgccctcccgccgcaatagttttttccacccactgcccccattctcccacaaggtgaaccgcaatggaagcgacgccaaatgtgtcatttccccaatcacaaagggttcctccaagccaggtctggaacatgactgtctccatgacatcagataatagtatgcatgtcaagtgtaggcctcccagggaccgtaatggcccccatgaacgttaccatttggaagttgaagctggaaatactctggttagaaatgagtcgcataagaattgcgatttccgtgtaaaagatcttcaatattcaacagactacacttttaaggcctattttcacaatggagactatcctggagaaccctttattttacatcattcaacatcttataattctaaggcactgatagcatttctggcatttctgattattgtgacatcaatagccctgcttgttgttctctacaaaatctatgatctacataagaaaagatcctgcaatttagatgaacagcaggagcttgttgaaagggatgatgaaaaacaactgatgaatgtggagccaatccatgcagatattttgttggaaacttataagaggaagattgctgatgaaggaagactttttctggctgaatttcagagcatcccgcgggtgttcagcaagtttcctataaaggaagctcgaaagccctttaaccagaataaaaaccgttatgttgacattcttccttatgattataaccgtgttgaactctctgaaataaacggagatgcagggtcaaactacataaatgccagctatattgatggtttcaaagaacccaggaaatacattgctgcacaaggtcccagggatgaaactgttgatgatttctggaggatgatttgggaacagaaagccacagttattgtcatggtcactcgatgtgaagaaggaaacaggaacaagtgtgcagaatactggccgtcaatggaagagggcactcgggcttttggagatgttgttgtaaagatcaaccagcacaaaagatgtccagattacatcattcagaaattgaacattgtaaataaaaaagaaaaagcaactggaagagaggtgactcacattcagttcaccagctggccagaccacggggtgcctgaggatcctcacttgctcctcaaactgagaaggagagtgaatgccttcagcaatttcttcagtggtcccattgtggtgcactgcagtgctggtgttgggcgcacaggaacctatatcggaattgatgccatgctagaaggcctggaagccgagaacaaagtggatgtttatggttatgttgtcaagctaaggcgacagagatgcctgatggttcaagtagaggcccagtacatcttgatccatcaggctttggtggaatacaatcagtttggagaaacagaagtgaatttgtctgaattacatccatatctacataacatgaagaaaagggatccacccagtgagccgtctccactagaggctgaattccagagacttccttcatataggagctggaggacacagcacattggaaatcaagaagaaaataaaagtaaaaacaggaattctaatgtcatcccatatgactataacagagtgccacttaaacatgagctggaaatgagtaaagagagtgagcatgattcagatgaatcctctgatgatgacagtgattcagaggaaccaagcaaatacatcaatgcatcttttataatgagctactggaaacctgaagtgatgattgctgctcagggaccactgaaggagaccattggtgacttttggcagatgatcttccaaagaaaagtcaaagttattgttatgctgacagaactgaaacatggagaccaggaaatctgtgctcagtactggggagaaggaaagcaaacatatggagatattgaagttgacctgaaagacacagacaaatcttcaacttatacccttcgtgtctttgaactgagacattccaagaggaaagactctcgaactgtgtaccagtaccaatatacaaactggagtgtggagcagcttcctgcagaacccaaggaattaatctctatgattcaggtcgtcaaacaaaaacttccccagaagaattcctctgaagggaacaagcatcacaagagtacacctctactcattcactgcagggatggatctcagcaaacgggaatattttgtgctttgttaaatctcttagaaagtgcggaaacagaagaggtagtggatatttttcaagtggtaaaagctctacgcaaagctaggccaggcatggtttccacattcgagcaatatcaattcctatatgacgtcattgccagcacctaccctgctcagaatggacaagtaaagaaaaacaaccatcaagaagataaaattgaatttgataatgaagtggacaaagtaaagcaggatgctaattgtgttaatccacttggtgccccagaaaagctccctgaagcaaaggaacaggctgaaggttctgaacccacgagtggcactgaggggccagaacattctgtcaatggtcctgcaagtccagctttaaatcaaggttcataggaaaagacataaatgaggaaactccaaacctcctgttagctgttatttctatttttgtagaagtaggaagtgaaaataggtatacagtggattaattaaatgcagcgaaccaatatttgtagaagggttatattttactactgtggaaaaatatttaagatagttttgccagaacagtttgtacagacgtatgcttattttaaaattttatctcttattcagtaaaaaacaacttctttgtaatcgttatgtgtgtatatgtatgtgtgtatgggtgtgtgtttgtgtgagagacagagaaagagagagaattctttcaagtgaatctaaaagcttttgcttttcctttgtttttatgaagaaaaaatacattttatattagaagtgttaacttagcttgaaggatctgtttttaaaaatcataaactgtgtgcagactcaataaaatcatgtacatttctgaaatgacctcaagatgtcctccttgttctactcatatatatctatcttatatagtttactattttacttctagagatagtacataaaggtggtatgtgtgtgtatgctactacaaaaaagttgttaactaaattaacattgggaaatcttatattccatatattagcatttagtccaatgtctttttaagcttatttaattaaaaaatttccagtgagcttatcatgctgtctttacatggggttttcaattttgcatgctcgattattccctgtacaatatttaaaatttattgcttgatacttttgacaacaaattaggttttgtacaattgaacttaaataaatgtcattaaaataaataaatgcaatatgtattaatattcattgtataaaaatagaagaatacaaacatatttgttaaatatttacatatgaaatttaatatagctatttttatggaatttttcattgatatgaaaaatatgatattgcatatgcatagttcccatgttaaatcccattcataactttcattaaagcatttactttgaatttctccaatgcttagaatgtttttaccaggaatggatgtcgctaatcataataaaattcaaccattatttttttcttgtttataatacattgtgttatatgttcaaatatgaaatgtgtatgcacctattgaaatatgtttaatgcatttattaacatttgcaggacacttttacaggccccaattatccaatagtctaataattgtttaagatctagaaaaaaaaaatcaagaatagtggtatttttcatgaagtaataaaaactcgttttggtgaatt

SEQ ID NO: 448693 - DNA, 3989 bp, Homo sapiens
ctaaggaggaatagcgagtgcccgccgggctcactaaaaaactcccccctctaaacacaaagaaaataacatctcctctcttcgtatgcagccggtatgaacatgctctggaaggtttgtagcattgccggaccaagctttgtgtccagagccgcccccttgcgaacaggacagcacagaaaaggccttcacttgggctttttcacctcaaaggggcccttacacgccggttcgggaaaacgaccgttccccaggcgatccggataatagtatgcatgtcaagtgtaggcctcccagggaccgtaatggcccccatgaacgttaccatttggaagttgaagctggaaatactctggttagaaatgagtcgcataagaattgcgatttccgtgtaaaagatcttcaatattcaacagactacacttttaaggcctattttcacaatggagactatcctggagaaccctttattttacatcattcaacatcttataattctaaggcactgatagcatttctggcatttctgattattgtgacatcaatagccctgcttgttgttctctacaaaatctatgatctacataagaaaagatcctgcaatttagatgaacagcaggagcttgttgaaagggatgatgaaaaacaactgatgaatgtggagccaatccatgcagatattttgttggaaacttataagaggaagattgctgatgaaggaagactttttctggctgaatttcagagcatcccgcgggtgttcagcaagtttcctataaaggaagctcgaaagccctttaaccagaataaaaaccgttatgttgacattcttccttatgattataaccgtgttgaactctctgaaataaacggagatgcagggtcaaactacataaatgccagctatattgatggtttcaaagaacccaggaaatacattgctgcacaaggtcccagggatgaaactgttgatgatttctggaggatgatttgggaacagaaagccacagttattgtcatggtcactcgatgtgaagaaggaaacaggaacaagtgtgcagaatactggccgtcaatggaagagggcactcgggcttttggagatgttgttgtaaagatcaaccagcacaaaagatgtccagattacatcattcagaaattgaacattgtaaataaaaaagaaaaagcaactggaagagaggtgactcacattcagttcaccagctggccagaccacggggtgcctgaggatcctcacttgctcctcaaactgagaaggagagtgaatgccttcagcaatttcttcagtggtcccattgtggtgcactgcagtgctggtgttgggcgcacaggaacctatatcggaattgatgccatgctagaaggcctggaagccgagaacaaagtggatgtttatggttatgttgtcaagctaaggcgacagagatgcctgatggttcaagtagaggcccagtacatcttgatccatcaggctttggtggaatacaatcagtttggagaaacagaagtgaatttgtctgaattacatccatatctacataacatgaagaaaagggatccacccagtgagccgtctccactagaggctgaattccagagacttccttcatataggagctggaggacacagcacattggaaatcaagaagaaaataaaagtaaaaacaggaattctaatgtcatcccatatgactataacagagtgccacttaaacatgagctggaaatgagtaaagagagtgagcatgattcagatgaatcctctgatgatgacagtgattcagaggaaccaagcaaatacatcaatgcatcttttataatgagctactggaaacctgaagtgatgattgctgctcagggaccactgaaggagaccattggtgacttttggcagatgatcttccaaagaaaagtcaaagttattgttatgctgacagaactgaaacatggagaccaggaaatctgtgctcagtactggggagaaggaaagcaaacatatggagatattgaagttgacctgaaagacacagacaaatcttcaacttatacccttcgtgtctttgaactgagacattccaagaggaaagactctcgaactgtgtaccagtaccaatatacaaactggagtgtggagcagcttcctgcagaacccaaggaattaatctctatgattcaggtcgtcaaacaaaaacttccccagaagaattcctctgaagggaacaagcatcacaagagtacacctctactcattcactgcagggatggatctcagcaaacgggaatattttgtgctttgttaaatctcttagaaagtgcggaaacagaagaggtagtggatatttttcaagtggtaaaagctctacgcaaagctaggccaggcatggtttccacattcgagcaatatcaattcctatatgacgtcattgccagcacctaccctgctcagaatggacaagtaaagaaaaacaaccatcaagaagataaaattgaatttgataatgaagtggacaaagtaaagcaggatgctaattgtgttaatccacttggtgccccagaaaagctccctgaagcaaaggaacaggctgaaggttctgaacccacgagtggcactgaggggccagaacattctgtcaatggtcctgcaagtccagctttaaatcaaggttcataggaaaagacataaatgaggaaactccaaacctcctgttagctgttatttctatttttgtagaagtaggaagtgaaaataggtatacagtggattaattaaatgcagcgaaccaatatttgtagaagggttatattttactactgtggaaaaatatttaagatagttttgccagaacagtttgtacagacgtatgcttattttaaaattttatctcttattcagtaaaaaacaacttctttgtaatcgttatgtgtgtatatgtatgtgtgtatgggtgtgtgtttgtgtgagagacagagaaagagagagaattctttcaagtgaatctaaaagcttttgcttttcctttgtttttatgaagaaaaaatacattttatattagaagtgttaacttagcttgaaggatctgtttttaaaaatcataaactgtgtgcagactcaataaaatcatgtacatttctgaaatgacctcaagatgtcctccttgttctactcatatatatctatcttatatagtttactattttacttctagagatagtacataaaggtggtatgtgtgtgtatgctactacaaaaaagttgttaactaaattaacattgggaaatcttatattccatatattagcatttagtccaatgtctttttaagcttatttaattaaaaaatttccagtgagcttatcatgctgtctttacatggggttttcaattttgcatgctcgattattccctgtacaatatttaaaatttattgcttgatacttttgacaacaaattaggttttgtacaattgaacttaaataaatgtcattaaaataaataaatgcaatatgtattaatattcattgtataaaaatagaagaatacaaacatatttgttaaatatttacatatgaaatttaatatagctatttttatggaatttttcattgatatgaaaaatatgatattgcatatgcatagttcccatgttaaatcccattcataactttcattaaagcatttactttgaatttctccaatgcttagaatgtttttaccaggaatggatgtcgctaatcataataaaattcaaccattatttttttcttgtttataatacattgtgttatatgttcaaatatgaaatgtgtatgcacctattgaaatatgtttaatgcatttattaacatttgcaggacacttttacaggccccaattatccaatagtctaataattgtttaagatctagaaaaaaaaaatcaagaatagtggtatttttcatgaagtaataaaaactcgttttggtgaatt

SEQ ID NO: 448694 - DNA, 3360 bp, Homo sapiens
gtgttgacaatgctaccatgtgaaggcctaaggaatacaatgttcatcaaataattaatcagactttgctcacatatgaattagttctgtttgctggcctatcaagcagaagtattttaaacagttgtgagaatgacctttaccaaatcattttaaacacaaatccaaaaagcttccacccatgcaccccacttttatggtgtatgtttattttgggttttttttgcttgacagcatgcaagttcctagaaattttggttatacttttaaagaaagtattaccttacttaccttactgttaagttattgcttacagggtagtacatgcaagtcctgcacaatatcttaactactagttattgattagaaaggaaaacacaaccatggttgagaaaatatataagacacctgaggaaactatgaactcttttgagtagtttatgtttacacgaggagactttgtactggtactcccttccacttatttatgtttcatagtttgctttaaaaaaatcatctcaaagaaaatattatctcttgactagaaaaaagaaaaagcaactggaagagaggtgactcacattcagttcaccagctggccagaccacggggtgcctgaggatcctcacttgctcctcaaactgagaaggagagtgaatgccttcagcaatttcttcagtggtcccattgtggtgcactgcagtgctggtgttgggcgcacaggaacctatatcggaattgatgccatgctagaaggcctggaagccgagaacaaagtggatgtttatggttatgttgtcaagctaaggcgacagagatgcctgatggttcaagtagaggcccagtacatcttgatccatcaggctttggtggaatacaatcagtttggagaaacagaagtgaatttgtctgaattacatccatatctacataacatgaagaaaagggatccacccagtgagccgtctccactagaggctgaattccagagacttccttcatataggagctggaggacacagcacattggaaatcaagaagaaaataaaagtaaaaacaggaattctaatgtcatcccatatgactataacagagtgccacttaaacatgagctggaaatgagtaaagagagtgagcatgattcagatgaatcctctgatgatgacagtgattcagaggaaccaagcaaatacatcaatgcatcttttataatgagctactggaaacctgaagtgatgattgctgctcagggaccactgaaggagaccattggtgacttttggcagatgatcttccaaagaaaagtcaaagttattgttatgctgacagaactgaaacatggagaccaggaaatctgtgctcagtactggggagaaggaaagcaaacatatggagatattgaagttgacctgaaagacacagacaaatcttcaacttatacccttcgtgtctttgaactgagacattccaagaggaaagactctcgaactgtgtaccagtaccaatatacaaactggagtgtggagcagcttcctgcagaacccaaggaattaatctctatgattcaggtcgtcaaacaaaaacttccccagaagaattcctctgaagggaacaagcatcacaagagtacacctctactcattcactgcagggatggatctcagcaaacgggaatattttgtgctttgttaaatctcttagaaagtgcggaaacagaagaggtagtggatatttttcaagtggtaaaagctctacgcaaagctaggccaggcatggtttccacattcgagcaatatcaattcctatatgacgtcattgccagcacctaccctgctcagaatggacaagtaaagaaaaacaaccatcaagaagataaaattgaatttgataatgaagtggacaaagtaaagcaggatgctaattgtgttaatccacttggtgccccagaaaagctccctgaagcaaaggaacaggctgaaggttctgaacccacgagtggcactgaggggccagaacattctgtcaatggtcctgcaagtccagctttaaatcaaggttcataggaaaagacataaatgaggaaactccaaacctcctgttagctgttatttctatttttgtagaagtaggaagtgaaaataggtatacagtggattaattaaatgcagcgaaccaatatttgtagaagggttatattttactactgtggaaaaatatttaagatagttttgccagaacagtttgtacagacgtatgcttattttaaaattttatctcttattcagtaaaaaacaacttctttgtaatcgttatgtgtgtatatgtatgtgtgtatgggtgtgtgtttgtgtgagagacagagaaagagagagaattctttcaagtgaatctaaaagcttttgcttttcctttgtttttatgaagaaaaaatacattttatattagaagtgttaacttagcttgaaggatctgtttttaaaaatcataaactgtgtgcagactcaataaaatcatgtacatttctgaaatgacctcaagatgtcctccttgttctactcatatatatctatcttatatagtttactattttacttctagagatagtacataaaggtggtatgtgtgtgtatgctactacaaaaaagttgttaactaaattaacattgggaaatcttatattccatatattagcatttagtccaatgtctttttaagcttatttaattaaaaaatttccagtgagcttatcatgctgtctttacatggggttttcaattttgcatgctcgattattccctgtacaatatttaaaatttattgcttgatacttttgacaacaaattaggttttgtacaattgaacttaaataaatgtcattaaaataaataaatgcaatatgtattaatattcattgtataaaaatagaagaatacaaacatatttgttaaatatttacatatgaaatttaatatagctatttttatggaatttttcattgatatgaaaaatatgatattgcatatgcatagttcccatgttaaatcccattcataactttcattaaagcatttactttgaatttctccaatgcttagaatgtttttaccaggaatggatgtcgctaatcataataaaattcaaccattatttttttcttgtttataatacattgtgttatatgttcaaatatgaaatgtgtatgcacctattgaaatatgtttaatgcatttattaacatttgcaggacacttttacaggccccaattatccaatagtctaataattgtttaagatctagaaaaaaaaaatcaagaatagtggtatttttcatgaagtaataaaaactcgttttggtgaatt

SEQ ID NO: 448695 - DNA, 2557 bp, Homo sapiens
  misc_feature (32)..(32): n is a, c, g, or t
cgcggccgcggaacggctgcgagaagacgacngaaggcccagtacatcttgatccatcaggctttggtggaatacaatcagtttggagaaacagaagtgaatttgtctgaattacatccatatctacataacatgaagaaaagggatccacccagtgagccgtctccactagaggctgaattccagagacttccttcatataggagctggaggacacagcacattggaaatcaagaagaaaataaaagtaaaaacaggaattctaatgtcatcccatatgactataacagagtgccacttaaacatgagctggaaatgagtaaagagagtgagcatgattcagatgaatcctctgatgatgacagtgattcagaggaaccaagcaaatacatcaatgcatcttttataatgagctactggaaacctgaagtgatgattgctgctcagggaccactgaaggagaccattggtgacttttggcagatgatcttccaaagaaaagtcaaagttattgttatgctgacagaactgaaacatggagaccaggaaatctgtgctcagtactggggagaaggaaagcaaacatatggagatattgaagttgacctgaaagacacagacaaatcttcaacttatacccttcgtgtctttgaactgagacattccaagaggaaagactctcgaactgtgtaccagtaccaatatacaaactggagtgtggagcagcttcctgcagaacccaaggaattaatctctatgattcaggtcgtcaaacaaaaacttccccagaagaattcctctgaagggaacaagcatcacaagagtacacctctactcattcactgcagggatggatctcagcaaacgggaatattttgtgctttgttaaatctcttagaaagtgcggaaacagaagaggtagtggatatttttcaagtggtaaaagctctacgcaaagctaggccaggcatggtttccacattcgagcaatatcaattcctatatgacgtcattgccagcacctaccctgctcagaatggacaagtaaagaaaaacaaccatcaagaagataaaattgaatttgataatgaagtggacaaagtaaagcaggatgctaattgtgttaatccacttggtgccccagaaaagctccctgaagcaaaggaacaggctgaaggttctgaacccacgagtggcactgaggggccagaacattctgtcaatggtcctgcaagtccagctttaaatcaaggttcataggaaaagacataaatgaggaaactccaaacctcctgttagctgttatttctatttttgtagaagtaggaagtgaaaataggtatacagtggattaattaaatgcagcgaaccaatatttgtagaagggttatattttactactgtggaaaaatatttaagatagttttgccagaacagtttgtacagacgtatgcttattttaaaattttatctcttattcagtaaaaaacaacttctttgtaatcgttatgtgtgtatatgtatgtgtgtatgggtgtgtgtttgtgtgagagacagagaaagagagagaattctttcaagtgaatctaaaagcttttgcttttcctttgtttttatgaagaaaaaatacattttatattagaagtgttaacttagcttgaaggatctgtttttaaaaatcataaactgtgtgcagactcaataaaatcatgtacatttctgaaatgacctcaagatgtcctccttgttctactcatatatatctatcttatatagtttactattttacttctagagatagtacataaaggtggtatgtgtgtgtatgctactacaaaaaagttgttaactaaattaacattgggaaatcttatattccatatattagcatttagtccaatgtctttttaagcttatttaattaaaaaatttccagtgagcttatcatgctgtctttacatggggttttcaattttgcatgctcgattattccctgtacaatatttaaaatttattgcttgatacttttgacaacaaattaggttttgtacaattgaacttaaataaatgtcattaaaataaataaatgcaatatgtattaatattcattgtataaaaatagaagaatacaaacatatttgttaaatatttacatatgaaatttaatatagctatttttatggaatttttcattgatatgaaaaatatgatattgcatatgcatagttcccatgttaaatcccattcataactttcattaaagcatttactttgaatttctccaatgcttagaatgtttttaccaggaatggatgtcgctaatcataataaaattcaaccattatttttttcttgtttataatacattgtgttatatgttcaaatatgaaatgtgtatgcacctattgaaatatgtttaatgcatttattaacatttgcaggacacttttacaggccccaattatccaatagtctaataattgtttaagatctagaaaaaaaaaatcaagaatagtggtatttttcatgaagtaataaaaactcgttttggtgaatt

SEQ ID NO: 448696 - DNA, 1804 bp, Homo sapiens
gcaaaaaatatattctctctcttcctgtttttattctaatatcaccctttttggtgagaagtaggattattttctatcttttctttcttttatagggatggatctcagcaaacgggaatattttgtgctttgttaaatctcttagaaagtgcggaaacagaagaggtagtggatatttttcaagtggtaaaagctctacgcaaagctaggccaggcatggtttccacattcgagcaatatcaattcctatatgacgtcattgccagcacctaccctgctcagaatggacaagtaaagaaaaacaaccatcaagaagataaaattgaatttgataatgaagtggacaaagtaaagcaggatgctaattgtgttaatccacttggtgccccagaaaagctccctgaagcaaaggaacaggctgaaggttctgaacccacgagtggcactgaggggccagaacattctgtcaatggtcctgcaagtccagctttaaatcaaggttcataggaaaagacataaatgaggaaactccaaacctcctgttagctgttatttctatttttgtagaagtaggaagtgaaaataggtatacagtggattaattaaatgcagcgaaccaatatttgtagaagggttatattttactactgtggaaaaatatttaagatagttttgccagaacagtttgtacagacgtatgcttattttaaaattttatctcttattcagtaaaaaacaacttctttgtaatcgttatgtgtgtatatgtatgtgtgtatgggtgtgtgtttgtgtgagagacagagaaagagagagaattctttcaagtgaatctaaaagcttttgcttttcctttgtttttatgaagaaaaaatacattttatattagaagtgttaacttagcttgaaggatctgtttttaaaaatcataaactgtgtgcagactcaataaaatcatgtacatttctgaaatgacctcaagatgtcctccttgttctactcatatatatctatcttatatagtttactattttacttctagagatagtacataaaggtggtatgtgtgtgtatgctactacaaaaaagttgttaactaaattaacattgggaaatcttatattccatatattagcatttagtccaatgtctttttaagcttatttaattaaaaaatttccagtgagcttatcatgctgtctttacatggggttttcaattttgcatgctcgattattccctgtacaatatttaaaatttattgcttgatacttttgacaacaaattaggttttgtacaattgaacttaaataaatgtcattaaaataaataaatgcaatatgtattaatattcattgtataaaaatagaagaatacaaacatatttgttaaatatttacatatgaaatttaatatagctatttttatggaatttttcattgatatgaaaaatatgatattgcatatgcatagttcccatgttaaatcccattcataactttcattaaagcatttactttgaatttctccaatgcttagaatgtttttaccaggaatggatgtcgctaatcataataaaattcaaccattatttttttcttgtttataatacattgtgttatatgttcaaatatgaaatgtgtatgcacctattgaaatatgtttaatgcatttattaacatttgcaggacacttttacaggccccaattatccaatagtctaataattgtttaagatctagaaaaaaaaaatcaagaatagtggtatttttcatgaagtaataaaaactcgttttggtgaatt

SEQ ID NO: 448697 - DNA, 1795 bp, Homo sapiens
ggttgctccaaggtaaagttcaaaaagtatcctgcagtcaaccctttagcaccataaagaaactaaattatttagatgtttttatgagaacatatcaaaaagtacttttctgtcatccaatacttccacaaataaatcattagttcttgctaatcttcatctggcataaaaataatgacatcaactttcttcatgtaatttcccacttaattcctttactaggagcaatatcaattcctatatgacgtcattgccagcacctaccctgctcagaatggacaagtaaagaaaaacaaccatcaagaagataaaattgaatttgataatgaagtggacaaagtaaagcaggatgctaattgtgttaatccacttggtgccccagaaaagctccctgaagcaaaggaacaggctgaaggttctgaacccacgagtggcactgaggggccagaacattctgtcaatggtcctgcaagtccagctttaaatcaaggttcataggaaaagacataaatgaggaaactccaaacctcctgttagctgttatttctatttttgtagaagtaggaagtgaaaataggtatacagtggattaattaaatgcagcgaaccaatatttgtagaagggttatattttactactgtggaaaaatatttaagatagttttgccagaacagtttgtacagacgtatgcttattttaaaattttatctcttattcagtaaaaaacaacttctttgtaatcgttatgtgtgtatatgtatgtgtgtatgggtgtgtgtttgtgtgagagacagagaaagagagagaattctttcaagtgaatctaaaagcttttgcttttcctttgtttttatgaagaaaaaatacattttatattagaagtgttaacttagcttgaaggatctgtttttaaaaatcataaactgtgtgcagactcaataaaatcatgtacatttctgaaatgacctcaagatgtcctccttgttctactcatatatatctatcttatatagtttactattttacttctagagatagtacataaaggtggtatgtgtgtgtatgctactacaaaaaagttgttaactaaattaacattgggaaatcttatattccatatattagcatttagtccaatgtctttttaagcttatttaattaaaaaatttccagtgagcttatcatgctgtctttacatggggttttcaattttgcatgctcgattattccctgtacaatatttaaaatttattgcttgatacttttgacaacaaattaggttttgtacaattgaacttaaataaatgtcattaaaataaataaatgcaatatgtattaatattcattgtataaaaatagaagaatacaaacatatttgttaaatatttacatatgaaatttaatatagctatttttatggaatttttcattgatatgaaaaatatgatattgcatatgcatagttcccatgttaaatcccattcataactttcattaaagcatttactttgaatttctccaatgcttagaatgtttttaccaggaatggatgtcgctaatcataataaaattcaaccattatttttttcttgtttataatacattgtgttatatgttcaaatatgaaatgtgtatgcacctattgaaatatgtttaatgcatttattaacatttgcaggacacttttacaggccccaattatccaatagtctaataattgtttaagatctagaaaaaaaaaatcaagaatagtggtatttttcatgaagtaataaaaactcgttttggtgaatt

SEQ ID NO: 448698 - DNA, 1069 bp, Homo sapiens
cgacattttaactgaactgcgggataaagtgaaatctttccgtgcagctctacgagaggaggaaattgttcctcgtctgataagacaacagtggagaaaggacgcatgctgtttcttagggacacggctgacttccagatatgaccatgtatttgtggcttaaactcttggcatttggctttgcctttctggacacagaagtatttgtgacagggcaaagcccaacaccttcccccactggtaagaattaatatttatatttttactaattttattttcttgttgcaaagtttatatatttaactacaattttctattattaacactgaaattatttttaaggataaattttataatcatgagtgattcttgacattcacttgttcttaaactttctgcttatacgttatagagtttaataactacctaaacatgttattaaatttgtatatatattttgtgtataaatagtaacttttcccaaacttgacagtaaatcacacaacaggtttctactctcttttaatattttaagactataaaaaaatgcatttaaattagataacaaaattttatagtctgaaagcaggttaacagctgtctatgtatgttatagatatgtagataacagatttgcatatgtctatatttctttaagagtatgttgcttttttcaatggtatgcaaaacctttgagactattgagatatttttaaataataattttcaaattctactgaacacttcaatagtccttataaatgtcttaatcatgagataaatttaaaacacagagatctgcaaataaattcatacatagtacatacaaaataagagaaaaaattaaattgcagatggttaaatatcacatcacttaactgatgttactgaaaatgtattttcctgcataatcatatggttgacagtatgcattaagaaggtaagtaaaacaatgaagacaattttgatttaatatggtaatgcacaattccaactaacgtacattcaacagatcatgaaattgggttattaaaatgaatatttttgtcattaaataaaaattccgtcc

SEQ ID NO: 448699 - DNA, 1254 bp, Homo sapiens
atatttattgggcatcttgttaaaaaaaaaaaggcaccgttcctggcacaagtgatttgatggacaagataagcaaggcccttgctcttatggagtttactgttaagtgggaagatggaaaaaagaaggacgcatgctgtttcttagggacacggctgacttccagatatgaccatgtatttgtggcttaaactcttggcatttggctttgcctttctggacacagaagtatttgtgacagggcaaagcccaacaccttcccccactggtgtttcatcagtacagacgcctcaccttcccacgcacgcagactcgcagacgccctctgctggaactgacacgcagacattcagcggctccgccgccaatgcaaaactcaaccctaccccaggcagcaatgctatctcagatgtcccaggagagaggagtacagccagcacctttcctacagacccagtttccccattgacaaccaccctcagccttgcacaccacagctctgctgccttacctgcacgcacctccaacaccaccatcacagcgaacacctcagatgcctaccttaatgcctctgaaacaaccactctgagcccttctggaagcgctgtcatttcaaccacaacaatagctactactccatctaagccaacatgtgatgaaaaatatgcaaacatcactgtggattacttatataacaaggaaactaaattatttacagcaaagctaaatgttaatgagaatgtggaatgtggaaacaatacttgcacaaacaatgaggtgcataaccttacagaatgtaaaaatgcgtctgtttccatatctcataattcatgtactgctcctgataagacattaatattagatgtgccaccaggggttgaaaagtttcagttacatgattgtacacaagttgaaaaagcagatactactatttgtttaaaatggaaaaatattgaaacctttacttgtgatacacagaatattacctacagatttcagtgtggtaagaatataacattgaccagagaatttttttttgtggcacaatgttgttctagatattatttaatcttactctctgccctttctctcttcctccctgcctctcttgttctccctctgtttgtcttttttctttcttgtctttttcttggtctgtggtatatttagagtcaaataattaaattacctatacaattcaaacaaattcacaaaataaatgaatacttttcatgaaaaataaatatctaaaaa

SEQ ID NO: 448700 - DNA, 917 bp, Homo sapiens
cgagaacgcgcacaagcacgaccgcggcaccattcgccgtgcctaccctctatacccccccactaaccggtcgacgttcccgctttagaccgagacgcactactcagcagccattttagtttttctcgtgccctcgcgcgaacctcgctggaactacagttcttttctccccaagagggccgcgccttcgctctctccaaaaacgcattcccgggctagtctcaccccttcccccaagggggtttagtagtacaaaaccctccaccttccacaactccaaaatgccaaaccccctttggggatactgctagcccaccttccacggtctccgcccgccaatgcaaaactaaaccctaccccggcgggcaatgttatgtcagatgcctaccttaatgcctctgaaacaaccactctgagcccttctggaagcgctgtcatttcaaccacaacaatagctactactccatctaagccaacatgtgatgaaaaatatgcaaacatcactgtggattacttatataacaaggaaactaaattatttacagcaaagctaaatgttaatgagaatgtggaatgtggaaacaatacttgcacaaacaatgaggtgcataaccttacagaatgtaaaaatgcgtctgtttccatatctcataattcatgtactgctcctgataagacattaatattagatgtgccaccaggggttgaaaagtttcagttacatgattgtacacaagttgaaaaagcagatactactatttgtttaaaatggaaaaatattgaaacctttacttgtgatacacagaatattacctacagatttcagtgtggtaatatgatatttgataataaagaaagatccgccaggcacccgccctctctggtatctcttcacgccagcgcggttataataaaac

SEQ ID NO: 448701 - DNA, 1049 bp, Homo sapiens
atatttattgggcatcttgttaaaaaaaaaaaggcaccgttcctggcacaagtgatttgatggacaagataagcaaggcccttgctcttatggagtttactgttaagtgggaagatggaaaaaagaaggacgcatgctgtttcttagggacacggctgacttccagatatgaccatgtatttgtggcttaaactcttggcatttggctttgcctttctggacacagaagtatttgtgacagggcaaagcccaacaccttcccccactggattgactacagcaaagatgcccagtgttccactttcaagtgaccccttacctactcacaccactgcattctcacccgcaagcacctttgaaagagaaaatgacttctcagagaccacaacttctcttagtccagacaatacttccacccaagtatccccggactctttggataatgctagtgcttttaataccacaggtgtttcatcagtacagacgcctcaccttcccacgcacgcagactcgcagacgccctctgctggaactgacacgcagacattcagcggctccgccgccaatgcaaaactcaaccctaccccaggcagcaatgctatctcaggtttgcgggtcctttagacttgtgcaaatatgaaaagtacatgacgactacctgtatttaagaatggtgtgaggaaatctaaccacttattcaatgtgcagctattgctagttgatgaatttggaatttcagtcactcttaggaatatgaaaccacagaacaaatgtccttttaacagagatgaaataatagtgagaattgtgagactacagcaaaaatctgctcaggaggaaagagttattcagaatagtctattttttatatatttcaggcaattaccattctacagggaaaactttttgttagaagtaagaaataatatgcataaatctttacttaaagactttgtaccaacaaacaaaagggtgaagagtgattcctattatcagtgaagggcagtgagaaattgtaaccacaatgaaactgttatttaaagaatgag

SEQ ID NO: 448702 - DNA, 777 bp, Homo sapiens
cgacattttaactgaactgcgggataaagtgaaatctttccgtgcagctctacgagaggaggaaattgttcctcgtctgataagacaacagtggagaaaggacgcatgctgtttcttagggacacggctgacttccagatatgaccatgtatttgtggcttaaactcttggcatttggctttgcctttctggacacagaagtatttgtgacagggcaaagcccaacaccttcccccactggccatctgcaagctgaggagcaaggaagccaatccaagtcaccaaacctcaaaagtagggaagctgacagttcagccttcagttggtggccaaaggcccgagagcccctcacaaaccactggagtaagtccaagagtccaaaagctgaggaacttggagtctgatgttcaagagcaggaagcagccagcacgagagaaagatgaagaccagaagactcagcaagctcacttctcctaccttcttgtgcctgctttttctagccgtgctggcagttgcttggatgatgcccactcatattgggtgggggtgggggggttggggagggtctgcctcccccagtccactgactcaaatgttaatctcccttggcaatacgctcacaggcacacccaggaacaatactttgcatccttcaatccaatcaagttgacactcaatattaaccatcaaatactattataaggagaatgttgcatgattttccttctagtctgtttgtaattcacatctaatgaaagagtgagagtggacgataa

SEQ ID NO: 448703 - DNA, 363 bp, Homo sapiens
cccggactctttggataatgctagtgcttttaataccacaggttggcacacaaaagttgttaacttaaatatcagggaatgtcatttagaaaattctacagttatcagtacaacttgtctttaaattatttgcacagtttctaagtatgtgattttattcaagtgcagaaattgcaggaaattagtatctgtgaaatatagatcgactgaagtaattaatgcatgttgttagggagtggagagagaaaagaagggaagcaagatctccaaggacaatcaggaggggaaatttgttctagtatcctctgatctatacacactcgccatgattctcccgcttggcttcccgccacctggacagat

SEQ ID NO: 448704 - DNA, 1142 bp, Homo sapiens
  misc_feature (241)..(241): n is a, c, g, or t
  misc_feature (243)..(243): n is a, c, g, or t
  misc_feature (247)..(248): n is a, c, g, or t
  misc_feature (264)..(264): n is a, c, g, or t
  misc_feature (274)..(274): n is a, c, g, or t
  misc_feature (280)..(280): n is a, c, g, or t
  misc_feature (282)..(282): n is a, c, g, or t
ctcgcacgccgcacacgcccccacccacgccgcggccccgccccgccccgtttatttcggcgctccctctgctccgcctcgccgtttctcgatcgcccgccagaccccccacaccatccgcactcctgccggccaccaggtcgcgttataggccacgacccaactgcctggaaccccccaaaaggtttttcccccatcccgttgggatattccccggtgcgaagatccagtatctttttgncnatannggcccgagcccgtcanctgtccaganaaaggntnccagggcaaagcccaacaccttcccccactggtaagaattaatatttatatttttactaattttattttcttgttgcaaagtttatatatttaactacaattttctattattaacactgaaattatttttaaggataaattttataatcatgagtgattcttgacattcacttgttcttaaactttctgcttatacgttatagagtttaataactacctaaacatgttattaaatttgtatatatattttgtgtataaatagtaacttttcccaaacttgacagtaaatcacacaacaggtttctactctcttttaatattttaagactataaaaaaatgcatttaaattagataacaaaattttatagtctgaaagcaggttaacagctgtctatgtatgttatagatatgtagataacagatttgcatatgtctatatttctttaagagtatgttgcttttttcaatggtatgcaaaacctttgagactattgagatatttttaaataataattttcaaattctactgaacacttcaatagtccttataaatgtcttaatcatgagataaatttaaaacacagagatctgcaaataaattcatacatagtacatacaaaataagagaaaaaattaaattgcagatggttaaatatcacatcacttaactgatgttactgaaaatgtattttcctgcataatcatatggttgacagtatgcattaagaaggtaagtaaaacaatgaagacaattttgatttaatatggtaatgcacaattccaactaacgtacattcaacagatcatgaaattgggttattaaaatgaatatttttgtcattaaataaaaattccgtcc

SEQ ID NO: 448705 - DNA, 1130 bp, Homo sapiens
  misc_feature (229)..(229): n is a, c, g, or t
  misc_feature (231)..(231): n is a, c, g, or t
  misc_feature (235)..(236): n is a, c, g, or t
  misc_feature (252)..(252): n is a, c, g, or t
  misc_feature (262)..(262): n is a, c, g, or t
  misc_feature (268)..(268): n is a, c, g, or t
  misc_feature (270)..(270): n is a, c, g, or t
gtacctacgttctgtctgtgtcccaatcgcgcactttgcacggcgccatggcttgtactccctgctccctcgtccggcaatttcaggccagcatgccgggttggtcgtcctgatccttttcgtagcatgcgctctcgtaatggcctatgacctaccgctccaaacctctcaaatgttctttcggacccccttcgcatttacacccgcggtagatccagtatctttttgncnatannggcccgagcccgtcanctgtccaganaaaggntnccagggcaaagcccaacaccttcccccactggtaagaattaatatttatatttttactaattttattttcttgttgcaaagtttatatatttaactacaattttctattattaacactgaaattatttttaaggataaattttataatcatgagtgattcttgacattcacttgttcttaaactttctgcttatacgttatagagtttaataactacctaaacatgttattaaatttgtatatatattttgtgtataaatagtaacttttcccaaacttgacagtaaatcacacaacaggtttctactctcttttaatattttaagactataaaaaaatgcatttaaattagataacaaaattttatagtctgaaagcaggttaacagctgtctatgtatgttatagatatgtagataacagatttgcatatgtctatatttctttaagagtatgttgcttttttcaatggtatgcaaaacctttgagactattgagatatttttaaataataattttcaaattctactgaacacttcaatagtccttataaatgtcttaatcatgagataaatttaaaacacagagatctgcaaataaattcatacatagtacatacaaaataagagaaaaaattaaattgcagatggttaaatatcacatcacttaactgatgttactgaaaatgtattttcctgcataatcatatggttgacagtatgcattaagaaggtaagtaaaacaatgaagacaattttgatttaatatggtaatgcacaattccaactaacgtacattcaacagatcatgaaattgggttattaaaatgaatatttttgtcattaaataaaaattccgtcc

SEQ ID NO: 448706 - DNA, 745 bp, Homo sapiens
  misc_feature (1)..(1): n is a, c, g, or t
  misc_feature (17)..(17): n is a, c, g, or t
  misc_feature (38)..(38): n is a, c, g, or t
  misc_feature (59)..(59): n is a, c, g, or t
  misc_feature (707)..(707): n is a, c, g, or t
  misc_feature (717)..(717): n is a, c, g, or t
  misc_feature (719)..(719): n is a, c, g, or t
  misc_feature (729)..(729): n is a, c, g, or t
  misc_feature (731)..(731): n is a, c, g, or t
nttgcaattaacctacnaaaagtttcttcagcccctcntgcaaaggcaggaatgaaggngcatggtctttcccactaaagggtcctccaagccaggtctggaacatgactgtctccatgacatcagataatagtatgcatgtcaagtgtaggcctcccagggaccgtaatggcccccatgaacgttaccatttggaagttgaagctggaaatactctggttagaaatgagtcgcataagaattgcgatttccgtgtaaaagatcttcaatattcaacagactacacttttaaggcctattttcacaatggagactatcctggagaaccctttattttacatcattcaacatcttataattctaaggcactgatagcatttctggcatttctgattattgtgacatcaatagccctgcttgttgttctctacaaaatctatgatctacataagaaaagatcctgcaatttagatgaacagcaggagcttgttgaaagggatgatgaaaaacaactgatgaatgtggagccaatccatgcagatattttgttggaaacttataagaggaagattgctgatgaaggaagactttttctggctgaatttcagagcatcccgcgggtgttcagcaagtttcctataaaggaagctcgaaagccctttaaccagaataaaaaccgttatgttgacattcttccttatgattanaaccgtgttncnaatctgaaangncggtcagagcgttc

SEQ ID NO: 448707 - DNA, 926 bp, Homo sapiens
  misc_feature (429)..(429): n is a, c, g, or t
  misc_feature (441)..(441): n is a, c, g, or t
cgaggactgaagtattgtcgcgctacgtgaatgtcgccgctctcacatatagattgctggcgtatccatgcacatccgggctcatccgggtggctccggttgcggtccttgtccgcgcagttaacagtatataccgttgcacattactgaataatctacttcctctttgttttggtctccctcagtatggaaatgtctttcatcaggctttagggtaatcgtacctaccgacacgcgcacctctcactggttttccaaagcaccgcggaactttatatctgcgtgggttaaacatgtatatgtccgaatcaatagaaaggatgagcctgtcccactgtccaaaaatgagtattcccgattgcatggcgctgacaccttcccccacgtgatgcagccattaatgcctgttaaggcggccactatgagccnttctggaagcgntgtcatttcaaccgcaacaatagctactactccatctaagccaacatgtgatgaaaaatatgcaaacatcactgtggattacttatataacaaggaaactaaattatttacagcaaagctaaatgttaatgagaatgtggaatgtggaaacaatacttgcacaaacaatgaggtgcataaccttacagaatgtaaaaatgcgtctgtttccatatctcataattcatgtactgctcctgataagacattaatattagatgtgccaccaggggttgaaaagtttcagttacatgattgtacacaagttgaaaaagcagatactactatttgtttaaaatggaaaaatattgaaacctttacttgtgatacacagaatattacctacagatttcagtgtggtaatatgatatttgataataaagaaagatccgccaggcacccgccctctctggtatctcttcacgccagcgcggttataataaaac

SEQ ID NO: 448708 - DNA, 947 bp, Homo sapiens
cctacaagttgcataaccgcgctaaacccggaacgatgcacttacaatcagttagaaaaggtgcgtctacaccgccgactcctagcgacgctcgactactgcctcgttcgcagagcattatataggtggagaaatataatcaattgtcatatactataaccgcgaacacgccttactgacctcgacggtccgaattatagtacaactcataatacgatatataaacaaaaccttgtcttaatcgtctcttgactatcgatatcctcctctggtctccaacacacccagcgctaaatataaaaggatgaatataatacagatatggcgtggaattaaaacccagtcttgataccgagccattacggcacatcagtacagacgaggtaaatagtgttccataccaggaaaagagtttattaatcgcaattgtaatgtaacaggtgttttttaatatttggatgcatgcagtcatcgtctgtccaataagaaagcggccacaagagaaaaccacacacctatccacattaaagcctgacataataagtgtaagacctaccactatgagcccatatgggagagcgatcattccatccgcgacaagagtgatgattccatctaacccaacatggaatgaaaaatatgcaaacatcactgtggattacttatataacaaggaaactaaattatttacagcaaagctaaatgttaatgagaatgtggaatgtggaaacaatacttgcacaaacaatgaggtgcataaccttacagaatgtaaaaatgcgtctgtttccatatctcataattcatgtactgctcctgataagacattaatattagatgtgccaccaggggttgaaaagtttcagttacatgattgtacacaagttgaaaaagcaggcgccaagtcccggggtgtcccgtatcccaggcccaatactgaaaaaaat

SEQ ID NO: 448709 - DNA, 905 bp, Homo sapiens
cagtaacgatcgaatcgagagcaaagcgtacgtcggtaagtagttcggcatttctgcgcgtcgtcttgtacacgatgaggtgctagctatagtgatataatagtgatcattagctatatacaagtagtataatatgctttcgataatccgtttaagatggtcggcagccttaatggtttaacgtgaagatccataaccctgtgttatcggcgaattaaggtgtggagttctcggcttcaaaagttgattcccaattgcatggggatataacaaacggggtagtagaaaatgatggtggggaaataatgggcgtagctttttcagtttccggcaaaatgggattttagaataacgcccttcacacgtccacctgagatatcaactataagcatgtgaatgggaccactgagaggctttgtggaagggtggtcacgtattcttcaacaataggggatactccatctaagccgacaatgtgatgaaaaatatgcaaacatcactgtggattacttatataacaaggaaactaaattatttacagcaaagctaaatgttaatgagaatgtggaatgtggaaacaatacttgcacaaacaatgaggtgcataaccttacagaatgtaaaaatgcgtctgtttccatatctcataattcatgtactgctcctgataagacattaatattagatgtgccaccaggggttgaaaagtttcagttacatgattgtacacaagttgaaaaagcagatactactatttgtttaaaatggaaaaatattgaaacctttacttgtgatacacagaatattacctacagatttcagtgtggtaatatgatatttgataataaagtcagatgcgggcagtgattgggcttttgtttgttagtaggatgcctggtgaaaaa

SEQ ID NO: 448710 - DNA, 4536 bp, Homo sapiens
cgacattttaactgaactgcgggataaagtgaaatctttccgtgcagctctacgagaggaggaaattgttcctcgtctgataagacaacagtggagaaaggacgcatgctgtttcttagggacacggctgacttccagatatgaccatgtatttgtggcttaaactcttggcatttggctttgcctttctggacacagaagtatttgtgacagggcaaagcccaacaccttcccccactggattgactacagcaaagatgcccagtgttccactttcaagtgaccccttacctactcacaccactgcattctcacccgcaagcacctttgaaagagaaaatgacttctcagagaccacaacttctcttagtccagacaatacttccacccaagtatccccggactctttggataatgctagtgcttttaataccacaggtgtttcatcagtacagacgcctcaccttcccacgcacgcagactcgcagacgccctctgctggaactgacacgcagacattcagcggctccgccgccaatgcaaaactcaaccctaccccaggcagcaatgctatctcagatgtcccaggagagaggagtacagccagcacctttcctacagacccagtttccccattgacaaccaccctcagccttgcacaccacagctctgctgccttacctgcacgcacctccaacaccaccatcacagcgaacacctcagatgcctaccttaatgcctctgaaacaaccactctgagcccttctggaagcgctgtcatttcaaccacaacaatagctactactccatctaagccaacatgtgatgaaaaatatgcaaacatcactgtggattacttatataacaaggaaactaaattatttacagcaaagctaaatgttaatgagaatgtggaatgtggaaacaatacttgcacaaacaatgaggtgcataaccttacagaatgtaaaaatgcgtctgtttccatatctcataattcatgtactgctcctgataagacattaatattagatgtgccaccaggggttgaaaagtttcagttacatgattgtacacaagttgaaaaagcagatactactatttgtttaaaatggaaaaatattgaaacctttacttgtgatacacagaatattacctacagatttcagtgtggtaatatgatatttgataataaagaaattaaattagaaaaccttgaacccgaacatgagtataagtgtgactcagaaatactctataataaccacaagtttactaacgcaagtaaaattattaaaacagattttgggagtccaggagagcctcagattattttttgtagaagtgaagctgcacatcaaggagtaattacctggaatccccctcaaagatcatttcataattttaccctctgttatataaaagagacagaaaaagattgcctcaatctggataaaaacctgatcaaatatgatttgcaaaatttaaaaccttatacgaaatatgttttatcattacatgcctacatcattgcaaaagtgcaacgtaatggaagtgctgcaatgtgtcatttcacaactaaaagtgctcctccaagccaggtctggaacatgactgtctccatgacatcagataatagtatgcatgtcaagtgtaggcctcccagggaccgtaatggcccccatgaacgttaccatttggaagttgaagctggaaatactctggttagaaatgagtcgcataagaattgcgatttccgtgtaaaagatcttcaatattcaacagactacacttttaaggcctattttcacaatggagactatcctggagaaccctttattttacatcattcaacatcttataattctaaggcactgatagcatttctggcatttctgattattgtgacatcaatagccctgcttgttgttctctacaaaatctatgatctacataagaaaagatcctgcaatttagatgaacagcaggagcttgttgaaagggatgatgaaaaacaactgatgaatgtggagccaatccatgcagatattttgttggaaacttataagaggaagattgctgatgaaggaagactttttctggctgaatttcagagcatcccgcgggtgttcagcaagtttcctataaaggaagctcgaaagccctttaaccagaataaaaaccgttatgttgacattcttccttatgattataaccgtgttgaactctctgaaataaacggagatgcagggtcaaactacataaatgccagctatattgatggtttcaaagaacccaggaaatacattgctgcacaaggtcccagggatgaaactgttgatgatttctggaggatgatttgggaacagaaagccacagttattgtcatggtcactcgatgtgaagaaggaaacaggaacaagtgtgcagaatactggccgtcaatggaagagggcactcgggcttttggagatgttgttgtaaagatcaaccagcacaaaagatgtccagattacatcattcagaaattgaacattgtaaataaaaaagaaaaagcaactggaagagaggtgactcacattcagttcaccagctggccagaccacggggtgcctgaggatcctcacttgctcctcaaactgagaaggagagtgaatgccttcagcaatttcttcagtggtcccattgtggtgcactgcagtgctggtgttgggcgcacaggaacctatatcggaattgatgccatgctagaaggcctggaagccgagaacaaagtggatgtttatggttatgttgtcaagctaaggcgacagagatgcctgatggttcaagtagaggcccagtacatcttgatccatcaggctttggtggaatacaatcagtttggagaaacagaagtgaatttgtctgaattacatccatatctacataacatgaagaaaagggatccacccagtgagccgtctccactagaggctgaattccagagacttccttcatataggagctggaggacacagcacattggaaatcaagaagaaaataaaagtaaaaacaggaattctaatgtcatcccatatgactataacagagtgccacttaaacatgagctggaaatgagtaaagagagtgagcatgattcagatgaatcctctgatgatgacagtgattcagaggaaccaagcaaatacatcaatgcatcttttataatgagctactggaaacctgaagtgatgattgctgctcagggaccactgaaggagaccattggtgacttttggcagatgatcttccaaagaaaagtcaaagttattgttatgctgacagaactgaaacatggagaccaggaaatctgtgctcagtactggggagaaggaaagcaaacatatggagatattgaagttgacctgaaagacacagacaaatcttcaacttatacccttcgtgtctttgaactgagacattccaagaggaaagactctcgaactgtgtaccagtaccaatatacaaactggagtgtggagcagcttcctgcagaacccaaggaattaatctctatgattcaggtcgtcaaacaaaaacttccccagaagaattcctctgaagggaacaagcatcacaagagtacacctctactcattcactgcagggatggatctcagcaaacgggaatattttgtgctttgttaaatctcttagaaagtgcggaaacagaagaggtagtggatatttttcaagtggtaaaagctctacgcaaagctaggccaggcatggtttccacattcgagcaatatcaattcctatatgacgtcattgccagcacctaccctgctcagaatggacaagtaaagaaaaacaaccatcaagaagataaaattgaatttgataatgaagtggacaaagtaaagcaggatgctaattgtgttaatccacttggtgccccagaaaagctccctgaagcaaaggaacaggctgaaggttctgaacccacgagtggcactgaggggccagaacattctgtcaatggtcctgcaagtccagctttaaatcaaggttcataggaaaagacataaatgaggaaactccaaacctcctgttagctgttatttctatttttgtagaagtaggaagtgaaaataggtatacagtggattaattaaatgcagcgaaccaatatttgtagaagggttatattttactactgtggaaaaatatttaagatagttttgccagaacagtttgtacagacgtatgcttattttaaaattttatctcttattcagtaaaaaacaacttctttgtaatcgttatgtgtgtatatgtatgtgtgtatgggtgtgtgtttgtgtgagagacagagaaagagagagaattctttcaagtgaatctaaaagcttttgcttttcctttgtttttatgaagaaaaaatacattttatattagaagtgttaacttagcttgaaggatctgtttttaaaaatcataaactgtgtgcagactcaataaaatcatgtacatttctgaaatgacctcaag

SEQ ID NO: 448711 - DNA, 4905 bp, Homo sapiens
  misc_feature (4840)..(4841): n is a, c, g, or t
cgacattttaactgaactgcgggataaagtgaaatctttccgtgcagctctacgagaggaggaaattgttcctcgtctgataagacaacagtggagaaaggacgcatgctgtttcttagggacacggctgacttccagatatgaccatgtatttgtggcttaaactcttggcatttggctttgcctttctggacacagaagtatttgtgacagggcaaagcccaacaccttcccccactggattgactacagcaaagatgcccagtgttccactttcaagtgaccccttacctactcacaccactgcattctcacccgcaagcacctttgaaagagaaaatgacttctcagagaccacaacttctcttagtccagacaatacttccacccaagtatccccggactctttggataatgctagtgcttttaataccacaggtgtttcatcagtacagacgcctcaccttcccacgcacgcagactcgcagacgccctctgctggaactgacacgcagacattcagcggctccgccgccaatgcaaaactcaaccctaccccaggcagcaatgctatctcagatgtcccaggagagaggagtacagccagcacctttcctacagacccagtttccccattgacaaccaccctcagccttgcacaccacagctctgctgccttacctgcacgcacctccaacaccaccatcacagcgaacacctcagatgcctaccttaatgcctctgaaacaaccactctgagcccttctggaagcgctgtcatttcaaccacaacaatagctactactccatctaagccaacatgtgatgaaaaatatgcaaacatcactgtggattacttatataacaaggaaactaaattatttacagcaaagctaaatgttaatgagaatgtggaatgtggaaacaatacttgcacaaacaatgaggtgcataaccttacagaatgtaaaaatgcgtctgtttccatatctcataattcatgtactgctcctgataagacattaatattagatgtgccaccaggggttgaaaagtttcagttacatgattgtacacaagttgaaaaagcagatactactatttgtttaaaatggaaaaatattgaaacctttacttgtgatacacagaatattacctacagatttcagtgtggtaatatgatatttgataataaagaaattaaattagaaaaccttgaacccgaacatgagtataagtgtgactcagaaatactctataataaccacaagtttactaacgcaagtaaaattattaaaacagattttgggagtccaggagagcctcagattattttttgtagaagtgaagctgcacatcaaggagtaattacctggaatccccctcaaagatcatttcataattttaccctctgttatataaaagagacagaaaaagattgcctcaatctggataaaaacctgatcaaatatgatttgcaaaatttaaaaccttatacgaaatatgttttatcattacatgcctacatcattgcaaaagtgcaacgtaatggaagtgctgcaatgtgtcatttcacaactaaaagtgctcctccaagccaggtctggaacatgactgtctccatgacatcagataatagtatgcatgtcaagtgtaggcctcccagggaccgtaatggcccccatgaacgttaccatttggaagttgaagctggaaatactctggttagaaatgagtcgcataagaattgcgatttccgtgtaaaagatcttcaatattcaacagactacacttttaaggcctattttcacaatggagactatcctggagaaccctttattttacatcattcaacatcttataattctaaggcactgatagcatttctggcatttctgattattgtgacatcaatagccctgcttgttgttctctacaaaatctatgatctacataagaaaagatcctgcaatttagatgaacagcaggagcttgttgaaagggatgatgaaaaacaactgatgaatgtggagccaatccatgcagatattttgttggaaacttataagaggaagattgctgatgaaggaagactttttctggctgaatttcagagcatcccgcgggtgttcagcaagtttcctataaaggaagctcgaaagccctttaaccagaataaaaaccgttatgttgacattcttccttatgattataaccgtgttgaactctctgaaataaacggagatgcagggtcaaactacataaatgccagctatattgatggtttcaaagaacccaggaaatacattgctgcacaaggtcccagggatgaaactgttgatgatttctggaggatgatttgggaacagaaagccacagttattgtcatggtcactcgatgtgaagaaggaaacaggaacaagtgtgcagaatactggccgtcaatggaagagggcactcgggcttttggagatgttgttgtaaagatcaaccagcacaaaagatgtccagattacatcattcagaaattgaacattgtaaataaaaaagaaaaagcaactggaagagaggtgactcacattcagttcaccagctggccagaccacggggtgcctgaggatcctcacttgctcctcaaactgagaaggagagtgaatgccttcagcaatttcttcagtggtcccattgtggtgcactgcagtgctggtgttgggcgcacaggaacctatatcggaattgatgccatgctagaaggcctggaagccgagaacaaagtggatgtttatggttatgttgtcaagctaaggcgacagagatgcctgatggttcaagtagaggcccagtacatcttgatccatcaggctttggtggaatacaatcagtttggagaaacagaagtgaatttgtctgaattacatccatatctacataacatgaagaaaagggatccacccagtgagccgtctccactagaggctgaattccagagacttccttcatataggagctggaggacacagcacattggaaatcaagaagaaaataaaagtaaaaacaggaattctaatgtcatcccatatgactataacagagtgccacttaaacatgagctggaaatgagtaaagagagtgagcatgattcagatgaatcctctgatgatgacagtgattcagaggaaccaagcaaatacatcaatgcatcttttataatgagctactggaaacctgaagtgatgattgctgctcagggaccactgaaggagaccattggtgacttttggcagatgatcttccaaagaaaagtcaaagttattgttatgctgacagaactgaaacatggagaccaggaaatctgtgctcagtactggggagaaggaaagcaaacatatggagatattgaagttgacctgaaagacacagacaaatcttcaacttatacccttcgtgtctttgaactgagacattccaagaggaaagactctcgaactgtgtaccagtaccaatatacaaactggagtgtggagcagcttcctgcagaacccaaggaattaatctctatgattcaggtcgtcaaacaaaaacttccccagaagaattcctctgaagggaacaagcatcacaagagtacacctctactcattcactgcagggatggatctcagcaaacgggaatattttgtgctttgttaaatctcttagaaagtgcggaaacagaagaggtagtggatatttttcaagtggtaaaagctctacgcaaagctaggccaggcatggtttccacattcgagcaatatcaattcctatatgacgtcattgccagcacctaccctgctcagaatggacaagtaaagaaaaacaaccatcaagaagataaaattgaatttgataatgaagtggacaaagtaaagcaggatgctaattgtgttaatccacttggtgccccagaaaagctccctgaagcaaaggaacaggctgaaggttctgaacccacgagtggcactgaggggccagaacattctgtcaatggtcctgcaagtccagctttaaatcaaggttcataggaaaagacataaatgaggaaactccaaacctcctgttagctgttatttctatttttgtagaagtaggaagtgaaaataggtatacagtggattaattaaatgcagcgaaccaatatttgtagaagggttatattttactactgtggaaaaatatttaagatagttttgccagaacagtttgtacagacgtatgcttattttaaaattttatctcttattcagtaaaaaacaacttctttgtaatcgttatgtgtgtatatgtatgtgtgtatgggtgtgtgtttgtgtgagagacagagaaagagagagaattctttcaagtgaatctaaaagcttttgcttttcctttgtttttatgaagaaaaaatacattttatattagaagtgttaacttagcttgaaggatctgtttttaaaaatcataaactgtgtgcagactcaataaaatcatgtacatttctgaaatgacctcaagatgtcctccttgttctactcatatatatctatcttatatagtttactattttacttctagagatagtacataaaggtggtatgtgtgtgtatgctactacaaaaaagttgttaactaaattaacattgggaaatcttatattccatatattagcatttagtccaatgtctttttaagcttatttaattaaaaaatttccagtgagcttatcatgctgtctttacatggggttttcaattttgcatgctcgattattccctgtacaatatttaaataatggcattaagataatccattcaaaccnnaaagctcttttaaagctacctgtcggcccgcctggccaaaggaccttggactcgagcagcttaa

SEQ ID NO: 448712 - DNA, 5188 bp, Homo sapiens
atatttattgggcatcttgttaaaaaaaaaaaggcaccgttcctggcacaagtgatttgatggacaagataagcaaggcccttgctcttatggagtttactgttaagtgggaagatggaaaaaagaaggacgcatgctgtttcttagggacacggctgacttccagatatgaccatgtatttgtggcttaaactcttggcatttggctttgcctttctggacacagaagtatttgtgacagggcaaagcccaacaccttcccccactggtgtttcatcagtacagacgcctcaccttcccacgcacgcagactcgcagacgccctctgctggaactgacacgcagacattcagcggctccgccgccaatgcaaaactcaaccctaccccaggcagcaatgctatctcagatgtcccaggagagaggagtacagccagcacctttcctacagacccagtttccccattgacaaccaccctcagccttgcacaccacagctctgctgccttacctgcacgcacctccaacaccaccatcacagcgaacacctcagatgcctaccttaatgcctctgaaacaaccactctgagcccttctggaagcgctgtcatttcaaccacaacaatagctactactccatctaagccaacatgtgatgaaaaatatgcaaacatcactgtggattacttatataacaaggaaactaaattatttacagcaaagctaaatgttaatgagaatgtggaatgtggaaacaatacttgcacaaacaatgaggtgcataaccttacagaatgtaaaaatgcgtctgtttccatatctcataattcatgtactgctcctgataagacattaatattagatgtgccaccaggggttgaaaagtttcagttacatgattgtacacaagttgaaaaagcagatactactatttgtttaaaatggaaaaatattgaaacctttacttgtgatacacagaatattacctacagatttcagtgtggtaatatgatatttgataataaagaaattaaattagaaaaccttgaacccgaacatgagtataagtgtgactcagaaatactctataataaccacaagtttactaacgcaagtaaaattattaaaacagattttgggagtccaggagagcctcagattattttttgtagaagtgaagctgcacatcaaggagtaattacctggaatccccctcaaagatcatttcataattttaccctctgttatataaaagagacagaaaaagattgcctcaatctggataaaaacctgatcaaatatgatttgcaaaatttaaaaccttatacgaaatatgttttatcattacatgcctacatcattgcaaaagtgcaacgtaatggaagtgctgcaatgtgtcatttcacaactaaaagtgctcctccaagccaggtctggaacatgactgtctccatgacatcagataatagtatgcatgtcaagtgtaggcctcccagggaccgtaatggcccccatgaacgttaccatttggaagttgaagctggaaatactctggttagaaatgagtcgcataagaattgcgatttccgtgtaaaagatcttcaatattcaacagactacacttttaaggcctattttcacaatggagactatcctggagaaccctttattttacatcattcaacatcttataattctaaggcactgatagcatttctggcatttctgattattgtgacatcaatagccctgcttgttgttctctacaaaatctatgatctacataagaaaagatcctgcaatttagatgaacagcaggagcttgttgaaagggatgatgaaaaacaactgatgaatgtggagccaatccatgcagatattttgttggaaacttataagaggaagattgctgatgaaggaagactttttctggctgaatttcagagcatcccgcgggtgttcagcaagtttcctataaaggaagctcgaaagccctttaaccagaataaaaaccgttatgttgacattcttccttatgattataaccgtgttgaactctctgaaataaacggagatgcagggtcaaactacataaatgccagctatattgatggtttcaaagaacccaggaaatacattgctgcacaaggtcccagggatgaaactgttgatgatttctggaggatgatttgggaacagaaagccacagttattgtcatggtcactcgatgtgaagaaggaaacaggaacaagtgtgcagaatactggccgtcaatggaagagggcactcgggcttttggagatgttgttgtaaagatcaaccagcacaaaagatgtccagattacatcattcagaaattgaacattgtaaataaaaaagaaaaagcaactggaagagaggtgactcacattcagttcaccagctggccagaccacggggtgcctgaggatcctcacttgctcctcaaactgagaaggagagtgaatgccttcagcaatttcttcagtggtcccattgtggtgcactgcagtgctggtgttgggcgcacaggaacctatatcggaattgatgccatgctagaaggcctggaagccgagaacaaagtggatgtttatggttatgttgtcaagctaaggcgacagagatgcctgatggttcaagtagaggcccagtacatcttgatccatcaggctttggtggaatacaatcagtttggagaaacagaagtgaatttgtctgaattacatccatatctacataacatgaagaaaagggatccacccagtgagccgtctccactagaggctgaattccagagacttccttcatataggagctggaggacacagcacattggaaatcaagaagaaaataaaagtaaaaacaggaattctaatgtcatcccatatgactataacagagtgccacttaaacatgagctggaaatgagtaaagagagtgagcatgattcagatgaatcctctgatgatgacagtgattcagaggaaccaagcaaatacatcaatgcatcttttataatgagctactggaaacctgaagtgatgattgctgctcagggaccactgaaggagaccattggtgacttttggcagatgatcttccaaagaaaagtcaaagttattgttatgctgacagaactgaaacatggagaccaggaaatctgtgctcagtactggggagaaggaaagcaaacatatggagatattgaagttgacctgaaagacacagacaaatcttcaacttatacccttcgtgtctttgaactgagacattccaagaggaaagactctcgaactgtgtaccagtaccaatatacaaactggagtgtggagcagcttcctgcagaacccaaggaattaatctctatgattcaggtcgtcaaacaaaaacttccccagaagaattcctctgaagggaacaagcatcacaagagtacacctctactcattcactgcagggatggatctcagcaaacgggaatattttgtgctttgttaaatctcttagaaagtgcggaaacagaagaggtagtggatatttttcaagtggtaaaagctctacgcaaagctaggccaggcatggtttccacattcgagcaatatcaattcctatatgacgtcattgccagcacctaccctgctcagaatggacaagtaaagaaaaacaaccatcaagaagataaaattgaatttgataatgaagtggacaaagtaaagcaggatgctaattgtgttaatccacttggtgccccagaaaagctccctgaagcaaaggaacaggctgaaggttctgaacccacgagtggcactgaggggccagaacattctgtcaatggtcctgcaagtccagctttaaatcaaggttcataggaaaagacataaatgaggaaactccaaacctcctgttagctgttatttctatttttgtagaagtaggaagtgaaaataggtatacagtggattaattaaatgcagcgaaccaatatttgtagaagggttatattttactactgtggaaaaatatttaagatagttttgccagaacagtttgtacagacgtatgcttattttaaaattttatctcttattcagtaaaaaacaacttctttgtaatcgttatgtgtgtatatgtatgtgtgtatgggtgtgtgtttgtgtgagagacagagaaagagagagaattctttcaagtgaatctaaaagcttttgcttttcctttgtttttatgaagaaaaaatacattttatattagaagtgttaacttagcttgaaggatctgtttttaaaaatcataaactgtgtgcagactcaataaaatcatgtacatttctgaaatgacctcaagatgtcctccttgttctactcatatatatctatcttatatagtttactattttacttctagagatagtacataaaggtggtatgtgtgtgtatgctactacaaaaaagttgttaactaaattaacattgggaaatcttatattccatatattagcatttagtccaatgtctttttaagcttatttaattaaaaaatttccagtgagcttatcatgctgtctttacatggggttttcaattttgcatgctcgattattccctgtacaatatttaaaatttattgcttgatacttttgacaacaaattaggttttgtacaattgaacttaaataaatgtcattaaaataaataaatgcaatatgtattaatattcattgtataaaaatagaagaatacaaacatatttgttaaatatttacatatgaaatttaatatagctatttttatggaatttttcattgatatgaaaaatatgatattgcatatgcatagttcccatgttaaatcccattcataactttcattaaagcatttactttgaatttctccaatgcttagaatgtttttaccaggaatggatgtcgctaatcataataaaattcaaccattatttttttcttgtttataatacattgtgttatatgttcaaatatgaaatgtgtatgcacctattgaaatatgtttaatgcatttattaacatttgcaggacacttttacaggccccaattatccaatagtctaataattgtttaagatctagaaaaaaaaaatcaagaatagtggtatttttcatgaagtaataaaaactcgttttggtgaatt

SEQ ID NO: 448713 - DNA, 4940 bp, Homo sapiens
ttggtacagttctgtagaatgcatgtgtcgtggtatagcagaagtgcttgaagatttgtttctctgccttatctttagtaattgtgtttatgttggctatctggctattgcccttgcgtgacagacacaagtgacagtgctgatggcccttctgattgcagatgtcccaggagagaggagtacagccagcacctttcctacagacccagtttccccattgacaaccaccctcagccttgcacaccacagctctgctgccttacctgcacgcacctccaacaccaccatcacagcgaacacctcagatgcctaccttaatgcctctgaaacaaccactctgagcccttctggaagcgctgtcatttcaaccacaacaatagctactactccatctaagccaacatgtgatgaaaaatatgcaaacatcactgtggattacttatataacaaggaaactaaattatttacagcaaagctaaatgttaatgagaatgtggaatgtggaaacaatacttgcacaaacaatgaggtgcataaccttacagaatgtaaaaatgcgtctgtttccatatctcataattcatgtactgctcctgataagacattaatattagatgtgccaccaggggttgaaaagtttcagttacatgattgtacacaagttgaaaaagcagatactactatttgtttaaaatggaaaaatattgaaacctttacttgtgatacacagaatattacctacagatttcagtgtggtaatatgatatttgataataaagaaattaaattagaaaaccttgaacccgaacatgagtataagtgtgactcagaaatactctataataaccacaagtttactaacgcaagtaaaattattaaaacagattttgggagtccaggagagcctcagattattttttgtagaagtgaagctgcacatcaaggagtaattacctggaatccccctcaaagatcatttcataattttaccctctgttatataaaagagacagaaaaagattgcctcaatctggataaaaacctgatcaaatatgatttgcaaaatttaaaaccttatacgaaatatgttttatcattacatgcctacatcattgcaaaagtgcaacgtaatggaagtgctgcaatgtgtcatttcacaactaaaagtgctcctccaagccaggtctggaacatgactgtctccatgacatcagataatagtatgcatgtcaagtgtaggcctcccagggaccgtaatggcccccatgaacgttaccatttggaagttgaagctggaaatactctggttagaaatgagtcgcataagaattgcgatttccgtgtaaaagatcttcaatattcaacagactacacttttaaggcctattttcacaatggagactatcctggagaaccctttattttacatcattcaacatcttataattctaaggcactgatagcatttctggcatttctgattattgtgacatcaatagccctgcttgttgttctctacaaaatctatgatctacataagaaaagatcctgcaatttagatgaacagcaggagcttgttgaaagggatgatgaaaaacaactgatgaatgtggagccaatccatgcagatattttgttggaaacttataagaggaagattgctgatgaaggaagactttttctggctgaatttcagagcatcccgcgggtgttcagcaagtttcctataaaggaagctcgaaagccctttaaccagaataaaaaccgttatgttgacattcttccttatgattataaccgtgttgaactctctgaaataaacggagatgcagggtcaaactacataaatgccagctatattgatggtttcaaagaacccaggaaatacattgctgcacaaggtcccagggatgaaactgttgatgatttctggaggatgatttgggaacagaaagccacagttattgtcatggtcactcgatgtgaagaaggaaacaggaacaagtgtgcagaatactggccgtcaatggaagagggcactcgggcttttggagatgttgttgtaaagatcaaccagcacaaaagatgtccagattacatcattcagaaattgaacattgtaaataaaaaagaaaaagcaactggaagagaggtgactcacattcagttcaccagctggccagaccacggggtgcctgaggatcctcacttgctcctcaaactgagaaggagagtgaatgccttcagcaatttcttcagtggtcccattgtggtgcactgcagtgctggtgttgggcgcacaggaacctatatcggaattgatgccatgctagaaggcctggaagccgagaacaaagtggatgtttatggttatgttgtcaagctaaggcgacagagatgcctgatggttcaagtagaggcccagtacatcttgatccatcaggctttggtggaatacaatcagtttggagaaacagaagtgaatttgtctgaattacatccatatctacataacatgaagaaaagggatccacccagtgagccgtctccactagaggctgaattccagagacttccttcatataggagctggaggacacagcacattggaaatcaagaagaaaataaaagtaaaaacaggaattctaatgtcatcccatatgactataacagagtgccacttaaacatgagctggaaatgagtaaagagagtgagcatgattcagatgaatcctctgatgatgacagtgattcagaggaaccaagcaaatacatcaatgcatcttttataatgagctactggaaacctgaagtgatgattgctgctcagggaccactgaaggagaccattggtgacttttggcagatgatcttccaaagaaaagtcaaagttattgttatgctgacagaactgaaacatggagaccaggaaatctgtgctcagtactggggagaaggaaagcaaacatatggagatattgaagttgacctgaaagacacagacaaatcttcaacttatacccttcgtgtctttgaactgagacattccaagaggaaagactctcgaactgtgtaccagtaccaatatacaaactggagtgtggagcagcttcctgcagaacccaaggaattaatctctatgattcaggtcgtcaaacaaaaacttccccagaagaattcctctgaagggaacaagcatcacaagagtacacctctactcattcactgcagggatggatctcagcaaacgggaatattttgtgctttgttaaatctcttagaaagtgcggaaacagaagaggtagtggatatttttcaagtggtaaaagctctacgcaaagctaggccaggcatggtttccacattcgagcaatatcaattcctatatgacgtcattgccagcacctaccctgctcagaatggacaagtaaagaaaaacaaccatcaagaagataaaattgaatttgataatgaagtggacaaagtaaagcaggatgctaattgtgttaatccacttggtgccccagaaaagctccctgaagcaaaggaacaggctgaaggttctgaacccacgagtggcactgaggggccagaacattctgtcaatggtcctgcaagtccagctttaaatcaaggttcataggaaaagacataaatgaggaaactccaaacctcctgttagctgttatttctatttttgtagaagtaggaagtgaaaataggtatacagtggattaattaaatgcagcgaaccaatatttgtagaagggttatattttactactgtggaaaaatatttaagatagttttgccagaacagtttgtacagacgtatgcttattttaaaattttatctcttattcagtaaaaaacaacttctttgtaatcgttatgtgtgtatatgtatgtgtgtatgggtgtgtgtttgtgtgagagacagagaaagagagagaattctttcaagtgaatctaaaagcttttgcttttcctttgtttttatgaagaaaaaatacattttatattagaagtgttaacttagcttgaaggatctgtttttaaaaatcataaactgtgtgcagactcaataaaatcatgtacatttctgaaatgacctcaagatgtcctccttgttctactcatatatatctatcttatatagtttactattttacttctagagatagtacataaaggtggtatgtgtgtgtatgctactacaaaaaagttgttaactaaattaacattgggaaatcttatattccatatattagcatttagtccaatgtctttttaagcttatttaattaaaaaatttccagtgagcttatcatgctgtctttacatggggttttcaattttgcatgctcgattattccctgtacaatatttaaaatttattgcttgatacttttgacaacaaattaggttttgtacaattgaacttaaataaatgtcattaaaataaataaatgcaatatgtattaatattcattgtataaaaatagaagaatacaaacatatttgttaaatatttacatatgaaatttaatatagctatttttatggaatttttcattgatatgaaaaatatgatattgcatatgcatagttcccatgttaaatcccattcataactttcattaaagcatttactttgaatttctccaatgcttagaatgtttttaccaggaatggatgtcgctaatcataataaaattcaaccattatttttttcttgtttataatacattgtgttatatgttcaaatatgaaatgtgtatgcacctattgaaatatgtttaatgcatttattaacatttgcaggacacttttacaggccccaattatccaatagtctaataattgtttaagatctagaaaaaaaaaatcaagaatagtggtatttttcatgaagtaataaaaactcgttttggtgaatt

SEQ ID NO: 448714 - DNA, 4945 bp, Homo sapiens
  misc_feature (350)..(350): n is a, c, g, or t
  misc_feature (362)..(362): n is a, c, g, or t
ctcgcctcgccgcaaccgcacgcaaccggaactcacgacgctgcgttcgcatcacaagcgcgaagctcccccgccaaactcgcccccgcactcccgattctcctgctaacaatggtcccctctcatctttatatgatgtatatccgtgcgaaccccccccctcccccactggtgtgttcctcgccatgagccaccaccctcctccgtacccagatcccaaaaccccttttttggctctggcgcgcggacatacaacggcttcgcgaccaatatacgatcatctcctcccccggccggccatatttttcaagggcctccccttaagcgtttgagatacccactatgagccnttctggaagcgntgtcatttcaaccgcaacaatagctactactccatctaagccaacatgtgatgaaaaatatgcaaacatcactgtggattacttatataacaaggaaactaaattatttacagcaaagctaaatgttaatgagaatgtggaatgtggaaacaatacttgcacaaacaatgaggtgcataaccttacagaatgtaaaaatgcgtctgtttccatatctcataattcatgtactgctcctgataagacattaatattagatgtgccaccaggggttgaaaagtttcagttacatgattgtacacaagttgaaaaagcagatactactatttgtttaaaatggaaaaatattgaaacctttacttgtgatacacagaatattacctacagatttcagtgtggtaatatgatatttgataataaagaaattaaattagaaaaccttgaacccgaacatgagtataagtgtgactcagaaatactctataataaccacaagtttactaacgcaagtaaaattattaaaacagattttgggagtccaggagagcctcagattattttttgtagaagtgaagctgcacatcaaggagtaattacctggaatccccctcaaagatcatttcataattttaccctctgttatataaaagagacagaaaaagattgcctcaatctggataaaaacctgatcaaatatgatttgcaaaatttaaaaccttatacgaaatatgttttatcattacatgcctacatcattgcaaaagtgcaacgtaatggaagtgctgcaatgtgtcatttcacaactaaaagtgctcctccaagccaggtctggaacatgactgtctccatgacatcagataatagtatgcatgtcaagtgtaggcctcccagggaccgtaatggcccccatgaacgttaccatttggaagttgaagctggaaatactctggttagaaatgagtcgcataagaattgcgatttccgtgtaaaagatcttcaatattcaacagactacacttttaaggcctattttcacaatggagactatcctggagaaccctttattttacatcattcaacatcttataattctaaggcactgatagcatttctggcatttctgattattgtgacatcaatagccctgcttgttgttctctacaaaatctatgatctacataagaaaagatcctgcaatttagatgaacagcaggagcttgttgaaagggatgatgaaaaacaactgatgaatgtggagccaatccatgcagatattttgttggaaacttataagaggaagattgctgatgaaggaagactttttctggctgaatttcagagcatcccgcgggtgttcagcaagtttcctataaaggaagctcgaaagccctttaaccagaataaaaaccgttatgttgacattcttccttatgattataaccgtgttgaactctctgaaataaacggagatgcagggtcaaactacataaatgccagctatattgatggtttcaaagaacccaggaaatacattgctgcacaaggtcccagggatgaaactgttgatgatttctggaggatgatttgggaacagaaagccacagttattgtcatggtcactcgatgtgaagaaggaaacaggaacaagtgtgcagaatactggccgtcaatggaagagggcactcgggcttttggagatgttgttgtaaagatcaaccagcacaaaagatgtccagattacatcattcagaaattgaacattgtaaataaaaaagaaaaagcaactggaagagaggtgactcacattcagttcaccagctggccagaccacggggtgcctgaggatcctcacttgctcctcaaactgagaaggagagtgaatgccttcagcaatttcttcagtggtcccattgtggtgcactgcagtgctggtgttgggcgcacaggaacctatatcggaattgatgccatgctagaaggcctggaagccgagaacaaagtggatgtttatggttatgttgtcaagctaaggcgacagagatgcctgatggttcaagtagaggcccagtacatcttgatccatcaggctttggtggaatacaatcagtttggagaaacagaagtgaatttgtctgaattacatccatatctacataacatgaagaaaagggatccacccagtgagccgtctccactagaggctgaattccagagacttccttcatataggagctggaggacacagcacattggaaatcaagaagaaaataaaagtaaaaacaggaattctaatgtcatcccatatgactataacagagtgccacttaaacatgagctggaaatgagtaaagagagtgagcatgattcagatgaatcctctgatgatgacagtgattcagaggaaccaagcaaatacatcaatgcatcttttataatgagctactggaaacctgaagtgatgattgctgctcagggaccactgaaggagaccattggtgacttttggcagatgatcttccaaagaaaagtcaaagttattgttatgctgacagaactgaaacatggagaccaggaaatctgtgctcagtactggggagaaggaaagcaaacatatggagatattgaagttgacctgaaagacacagacaaatcttcaacttatacccttcgtgtctttgaactgagacattccaagaggaaagactctcgaactgtgtaccagtaccaatatacaaactggagtgtggagcagcttcctgcagaacccaaggaattaatctctatgattcaggtcgtcaaacaaaaacttccccagaagaattcctctgaagggaacaagcatcacaagagtacacctctactcattcactgcagggatggatctcagcaaacgggaatattttgtgctttgttaaatctcttagaaagtgcggaaacagaagaggtagtggatatttttcaagtggtaaaagctctacgcaaagctaggccaggcatggtttccacattcgagcaatatcaattcctatatgacgtcattgccagcacctaccctgctcagaatggacaagtaaagaaaaacaaccatcaagaagataaaattgaatttgataatgaagtggacaaagtaaagcaggatgctaattgtgttaatccacttggtgccccagaaaagctccctgaagcaaaggaacaggctgaaggttctgaacccacgagtggcactgaggggccagaacattctgtcaatggtcctgcaagtccagctttaaatcaaggttcataggaaaagacataaatgaggaaactccaaacctcctgttagctgttatttctatttttgtagaagtaggaagtgaaaataggtatacagtggattaattaaatgcagcgaaccaatatttgtagaagggttatattttactactgtggaaaaatatttaagatagttttgccagaacagtttgtacagacgtatgcttattttaaaattttatctcttattcagtaaaaaacaacttctttgtaatcgttatgtgtgtatatgtatgtgtgtatgggtgtgtgtttgtgtgagagacagagaaagagagagaattctttcaagtgaatctaaaagcttttgcttttcctttgtttttatgaagaaaaaatacattttatattagaagtgttaacttagcttgaaggatctgtttttaaaaatcataaactgtgtgcagactcaataaaatcatgtacatttctgaaatgacctcaagatgtcctccttgttctactcatatatatctatcttatatagtttactattttacttctagagatagtacataaaggtggtatgtgtgtgtatgctactacaaaaaagttgttaactaaattaacattgggaaatcttatattccatatattagcatttagtccaatgtctttttaagcttatttaattaaaaaatttccagtgagcttatcatgctgtctttacatggggttttcaattttgcatgctcgattattccctgtacaatatttaaaatttattgcttgatacttttgacaacaaattaggttttgtacaattgaacttaaataaatgtcattaaaataaataaatgcaatatgtattaatattcattgtataaaaatagaagaatacaaacatatttgttaaatatttacatatgaaatttaatatagctatttttatggaatttttcattgatatgaaaaatatgatattgcatatgcatagttcccatgttaaatcccattcataactttcattaaagcatttactttgaatttctccaatgcttagaatgtttttaccaggaatggatgtcgctaatcataataaaattcaaccattatttttttcttgtttataatacattgtgttatatgttcaaatatgaaatgtgtatgcacctattgaaatatgtttaatgcatttattaacatttgcaggacacttttacaggccccaattatccaatagtctaataattgtttaagatctagaaaaaaaaaatcaagaatagtggtatttttcatgaagtaataaaaactcgttttggtgaatt

SEQ ID NO: 448715 - DNA, 3981 bp, Homo sapiens
ttgtaagggaggcccccaagggaatcctggatcccccaagccatttaaatttccctgtgtaaaaaaaaacaggaaagatgccccattgggataagccggataaatatgtttgcaaatttaacccttatcgaatatgtttatcattcaacgcttcacattgcaaaagtccaccgtaatgaagggttcaatgggctatttccaacttaaaagtgtctccaagccaggtctggaacatgactgtctccatgacatcagataatagtatgcatgtcaagtgtaggcctcccagggaccgtaatggcccccatgaacgttaccatttggaagttgaagctggaaatactctggttagaaatgagtcgcataagaattgcgatttccgtgtaaaagatcttcaatattcaacagactacacttttaaggcctattttcacaatggagactatcctggagaaccctttattttacatcattcaacatcttataattctaaggcactgatagcatttctggcatttctgattattgtgacatcaatagccctgcttgttgttctctacaaaatctatgatctacataagaaaagatcctgcaatttagatgaacagcaggagcttgttgaaagggatgatgaaaaacaactgatgaatgtggagccaatccatgcagatattttgttggaaacttataagaggaagattgctgatgaaggaagactttttctggctgaatttcagagcatcccgcgggtgttcagcaagtttcctataaaggaagctcgaaagccctttaaccagaataaaaaccgttatgttgacattcttccttatgattataaccgtgttgaactctctgaaataaacggagatgcagggtcaaactacataaatgccagctatattgatggtttcaaagaacccaggaaatacattgctgcacaaggtcccagggatgaaactgttgatgatttctggaggatgatttgggaacagaaagccacagttattgtcatggtcactcgatgtgaagaaggaaacaggaacaagtgtgcagaatactggccgtcaatggaagagggcactcgggcttttggagatgttgttgtaaagatcaaccagcacaaaagatgtccagattacatcattcagaaattgaacattgtaaataaaaaagaaaaagcaactggaagagaggtgactcacattcagttcaccagctggccagaccacggggtgcctgaggatcctcacttgctcctcaaactgagaaggagagtgaatgccttcagcaatttcttcagtggtcccattgtggtgcactgcagtgctggtgttgggcgcacaggaacctatatcggaattgatgccatgctagaaggcctggaagccgagaacaaagtggatgtttatggttatgttgtcaagctaaggcgacagagatgcctgatggttcaagtagaggcccagtacatcttgatccatcaggctttggtggaatacaatcagtttggagaaacagaagtgaatttgtctgaattacatccatatctacataacatgaagaaaagggatccacccagtgagccgtctccactagaggctgaattccagagacttccttcatataggagctggaggacacagcacattggaaatcaagaagaaaataaaagtaaaaacaggaattctaatgtcatcccatatgactataacagagtgccacttaaacatgagctggaaatgagtaaagagagtgagcatgattcagatgaatcctctgatgatgacagtgattcagaggaaccaagcaaatacatcaatgcatcttttataatgagctactggaaacctgaagtgatgattgctgctcagggaccactgaaggagaccattggtgacttttggcagatgatcttccaaagaaaagtcaaagttattgttatgctgacagaactgaaacatggagaccaggaaatctgtgctcagtactggggagaaggaaagcaaacatatggagatattgaagttgacctgaaagacacagacaaatcttcaacttatacccttcgtgtctttgaactgagacattccaagaggaaagactctcgaactgtgtaccagtaccaatatacaaactggagtgtggagcagcttcctgcagaacccaaggaattaatctctatgattcaggtcgtcaaacaaaaacttccccagaagaattcctctgaagggaacaagcatcacaagagtacacctctactcattcactgcagggatggatctcagcaaacgggaatattttgtgctttgttaaatctcttagaaagtgcggaaacagaagaggtagtggatatttttcaagtggtaaaagctctacgcaaagctaggccaggcatggtttccacattcgagcaatatcaattcctatatgacgtcattgccagcacctaccctgctcagaatggacaagtaaagaaaaacaaccatcaagaagataaaattgaatttgataatgaagtggacaaagtaaagcaggatgctaattgtgttaatccacttggtgccccagaaaagctccctgaagcaaaggaacaggctgaaggttctgaacccacgagtggcactgaggggccagaacattctgtcaatggtcctgcaagtccagctttaaatcaaggttcataggaaaagacataaatgaggaaactccaaacctcctgttagctgttatttctatttttgtagaagtaggaagtgaaaataggtatacagtggattaattaaatgcagcgaaccaatatttgtagaagggttatattttactactgtggaaaaatatttaagatagttttgccagaacagtttgtacagacgtatgcttattttaaaattttatctcttattcagtaaaaaacaacttctttgtaatcgttatgtgtgtatatgtatgtgtgtatgggtgtgtgtttgtgtgagagacagagaaagagagagaattctttcaagtgaatctaaaagcttttgcttttcctttgtttttatgaagaaaaaatacattttatattagaagtgttaacttagcttgaaggatctgtttttaaaaatcataaactgtgtgcagactcaataaaatcatgtacatttctgaaatgacctcaagatgtcctccttgttctactcatatatatctatcttatatagtttactattttacttctagagatagtacataaaggtggtatgtgtgtgtatgctactacaaaaaagttgttaactaaattaacattgggaaatcttatattccatatattagcatttagtccaatgtctttttaagcttatttaattaaaaaatttccagtgagcttatcatgctgtctttacatggggttttcaattttgcatgctcgattattccctgtacaatatttaaaatttattgcttgatacttttgacaacaaattaggttttgtacaattgaacttaaataaatgtcattaaaataaataaatgcaatatgtattaatattcattgtataaaaatagaagaatacaaacatatttgttaaatatttacatatgaaatttaatatagctatttttatggaatttttcattgatatgaaaaatatgatattgcatatgcatagttcccatgttaaatcccattcataactttcattaaagcatttactttgaatttctccaatgcttagaatgtttttaccaggaatggatgtcgctaatcataataaaattcaaccattatttttttcttgtttataatacattgtgttatatgttcaaatatgaaatgtgtatgcacctattgaaatatgtttaatgcatttattaacatttgcaggacacttttacaggccccaattatccaatagtctaataattgtttaagatctagaaaaaaaaaatcaagaatagtggtatttttcatgaagtaataaaaactcgttttggtgaatt

SEQ ID NO: 448716 - DNA, 3852 bp, Homo sapiens
  misc_feature (1)..(1): n is a, c, g, or t
  misc_feature (17)..(17): n is a, c, g, or t
  misc_feature (38)..(38): n is a, c, g, or t
  misc_feature (59)..(59): n is a, c, g, or t
nttgcaattaacctacnaaaagtttcttcagcccctcntgcaaaggcaggaatgaaggngcatggtctttcccactaaagggtcctccaagccaggtctggaacatgactgtctccatgacatcagataatagtatgcatgtcaagtgtaggcctcccagggaccgtaatggcccccatgaacgttaccatttggaagttgaagctggaaatactctggttagaaatgagtcgcataagaattgcgatttccgtgtaaaagatcttcaatattcaacagactacacttttaaggcctattttcacaatggagactatcctggagaaccctttattttacatcattcaacatcttataattctaaggcactgatagcatttctggcatttctgattattgtgacatcaatagccctgcttgttgttctctacaaaatctatgatctacataagaaaagatcctgcaatttagatgaacagcaggagcttgttgaaagggatgatgaaaaacaactgatgaatgtggagccaatccatgcagatattttgttggaaacttataagaggaagattgctgatgaaggaagactttttctggctgaatttcagagcatcccgcgggtgttcagcaagtttcctataaaggaagctcgaaagccctttaaccagaataaaaaccgttatgttgacattcttccttatgattataaccgtgttgaactctctgaaataaacggagatgcagggtcaaactacataaatgccagctatattgatggtttcaaagaacccaggaaatacattgctgcacaaggtcccagggatgaaactgttgatgatttctggaggatgatttgggaacagaaagccacagttattgtcatggtcactcgatgtgaagaaggaaacaggaacaagtgtgcagaatactggccgtcaatggaagagggcactcgggcttttggagatgttgttgtaaagatcaaccagcacaaaagatgtccagattacatcattcagaaattgaacattgtaaataaaaaagaaaaagcaactggaagagaggtgactcacattcagttcaccagctggccagaccacggggtgcctgaggatcctcacttgctcctcaaactgagaaggagagtgaatgccttcagcaatttcttcagtggtcccattgtggtgcactgcagtgctggtgttgggcgcacaggaacctatatcggaattgatgccatgctagaaggcctggaagccgagaacaaagtggatgtttatggttatgttgtcaagctaaggcgacagagatgcctgatggttcaagtagaggcccagtacatcttgatccatcaggctttggtggaatacaatcagtttggagaaacagaagtgaatttgtctgaattacatccatatctacataacatgaagaaaagggatccacccagtgagccgtctccactagaggctgaattccagagacttccttcatataggagctggaggacacagcacattggaaatcaagaagaaaataaaagtaaaaacaggaattctaatgtcatcccatatgactataacagagtgccacttaaacatgagctggaaatgagtaaagagagtgagcatgattcagatgaatcctctgatgatgacagtgattcagaggaaccaagcaaatacatcaatgcatcttttataatgagctactggaaacctgaagtgatgattgctgctcagggaccactgaaggagaccattggtgacttttggcagatgatcttccaaagaaaagtcaaagttattgttatgctgacagaactgaaacatggagaccaggaaatctgtgctcagtactggggagaaggaaagcaaacatatggagatattgaagttgacctgaaagacacagacaaatcttcaacttatacccttcgtgtctttgaactgagacattccaagaggaaagactctcgaactgtgtaccagtaccaatatacaaactggagtgtggagcagcttcctgcagaacccaaggaattaatctctatgattcaggtcgtcaaacaaaaacttccccagaagaattcctctgaagggaacaagcatcacaagagtacacctctactcattcactgcagggatggatctcagcaaacgggaatattttgtgctttgttaaatctcttagaaagtgcggaaacagaagaggtagtggatatttttcaagtggtaaaagctctacgcaaagctaggccaggcatggtttccacattcgagcaatatcaattcctatatgacgtcattgccagcacctaccctgctcagaatggacaagtaaagaaaaacaaccatcaagaagataaaattgaatttgataatgaagtggacaaagtaaagcaggatgctaattgtgttaatccacttggtgccccagaaaagctccctgaagcaaaggaacaggctgaaggttctgaacccacgagtggcactgaggggccagaacattctgtcaatggtcctgcaagtccagctttaaatcaaggttcataggaaaagacataaatgaggaaactccaaacctcctgttagctgttatttctatttttgtagaagtaggaagtgaaaataggtatacagtggattaattaaatgcagcgaaccaatatttgtagaagggttatattttactactgtggaaaaatatttaagatagttttgccagaacagtttgtacagacgtatgcttattttaaaattttatctcttattcagtaaaaaacaacttctttgtaatcgttatgtgtgtatatgtatgtgtgtatgggtgtgtgtttgtgtgagagacagagaaagagagagaattctttcaagtgaatctaaaagcttttgcttttcctttgtttttatgaagaaaaaatacattttatattagaagtgttaacttagcttgaaggatctgtttttaaaaatcataaactgtgtgcagactcaataaaatcatgtacatttctgaaatgacctcaagatgtcctccttgttctactcatatatatctatcttatatagtttactattttacttctagagatagtacataaaggtggtatgtgtgtgtatgctactacaaaaaagttgttaactaaattaacattgggaaatcttatattccatatattagcatttagtccaatgtctttttaagcttatttaattaaaaaatttccagtgagcttatcatgctgtctttacatggggttttcaattttgcatgctcgattattccctgtacaatatttaaaatttattgcttgatacttttgacaacaaattaggttttgtacaattgaacttaaataaatgtcattaaaataaataaatgcaatatgtattaatattcattgtataaaaatagaagaatacaaacatatttgttaaatatttacatatgaaatttaatatagctatttttatggaatttttcattgatatgaaaaatatgatattgcatatgcatagttcccatgttaaatcccattcataactttcattaaagcatttactttgaatttctccaatgcttagaatgtttttaccaggaatggatgtcgctaatcataataaaattcaaccattatttttttcttgtttataatacattgtgttatatgttcaaatatgaaatgtgtatgcacctattgaaatatgtttaatgcatttattaacatttgcaggacacttttacaggccccaattatccaatagtctaataattgtttaagatctagaaaaaaaaaatcaagaatagtggtatttttcatgaagtaataaaaactcgttttggtgaatt

SEQ ID NO: 448717 - DNA, 3964 bp, Homo sapiens
cctggaggtggtgaacgaacaccgcacgtaaaaaaaaagcgggggaagggctgcccccatatgtataacgcacggtcgattgctttggaaaatgacaaccgaataggcaatcgttttttctgccggcgcctcattcgtgcaaaggtgacttataatataggtcccaaatgggccattcccaactaaaatgctcctcccaagccaggtggtgacacatggtgttctctagtgcaacaggttcgtggtaaggaggcaaagtgaaggcctctcagggcctgttagggccccccagggcgtaccaatttggagagttgaaactgaaaatactagggttaagaatagtctgcatcagaattgcaaattcgttgaaaaagatcttaaatttcgacagactccacttttaaggcctattttcacaatggagactatcctggagaaccctttattttacatcattcaacatcttataattctaaggcactgatagcatttctggcatttctgattattgtgacatcaatagccctgcttgttgttctctacaaaatctatgatctacataagaaaagatcctgcaatttagatgaacagcaggagcttgttgaaagggatgatgaaaaacaactgatgaatgtggagccaatccatgcagatattttgttggaaacttataagaggaagattgctgatgaaggaagactttttctggctgaatttcagagcatcccgcgggtgttcagcaagtttcctataaaggaagctcgaaagccctttaaccagaataaaaaccgttatgttgacattcttccttatgattataaccgtgttgaactctctgaaataaacggagatgcagggtcaaactacataaatgccagctatattgatggtttcaaagaacccaggaaatacattgctgcacaaggtcccagggatgaaactgttgatgatttctggaggatgatttgggaacagaaagccacagttattgtcatggtcactcgatgtgaagaaggaaacaggaacaagtgtgcagaatactggccgtcaatggaagagggcactcgggcttttggagatgttgttgtaaagatcaaccagcacaaaagatgtccagattacatcattcagaaattgaacattgtaaataaaaaagaaaaagcaactggaagagaggtgactcacattcagttcaccagctggccagaccacggggtgcctgaggatcctcacttgctcctcaaactgagaaggagagtgaatgccttcagcaatttcttcagtggtcccattgtggtgcactgcagtgctggtgttgggcgcacaggaacctatatcggaattgatgccatgctagaaggcctggaagccgagaacaaagtggatgtttatggttatgttgtcaagctaaggcgacagagatgcctgatggttcaagtagaggcccagtacatcttgatccatcaggctttggtggaatacaatcagtttggagaaacagaagtgaatttgtctgaattacatccatatctacataacatgaagaaaagggatccacccagtgagccgtctccactagaggctgaattccagagacttccttcatataggagctggaggacacagcacattggaaatcaagaagaaaataaaagtaaaaacaggaattctaatgtcatcccatatgactataacagagtgccacttaaacatgagctggaaatgagtaaagagagtgagcatgattcagatgaatcctctgatgatgacagtgattcagaggaaccaagcaaatacatcaatgcatcttttataatgagctactggaaacctgaagtgatgattgctgctcagggaccactgaaggagaccattggtgacttttggcagatgatcttccaaagaaaagtcaaagttattgttatgctgacagaactgaaacatggagaccaggaaatctgtgctcagtactggggagaaggaaagcaaacatatggagatattgaagttgacctgaaagacacagacaaatcttcaacttatacccttcgtgtctttgaactgagacattccaagaggaaagactctcgaactgtgtaccagtaccaatatacaaactggagtgtggagcagcttcctgcagaacccaaggaattaatctctatgattcaggtcgtcaaacaaaaacttccccagaagaattcctctgaagggaacaagcatcacaagagtacacctctactcattcactgcagggatggatctcagcaaacgggaatattttgtgctttgttaaatctcttagaaagtgcggaaacagaagaggtagtggatatttttcaagtggtaaaagctctacgcaaagctaggccaggcatggtttccacattcgagcaatatcaattcctatatgacgtcattgccagcacctaccctgctcagaatggacaagtaaagaaaaacaaccatcaagaagataaaattgaatttgataatgaagtggacaaagtaaagcaggatgctaattgtgttaatccacttggtgccccagaaaagctccctgaagcaaaggaacaggctgaaggttctgaacccacgagtggcactgaggggccagaacattctgtcaatggtcctgcaagtccagctttaaatcaaggttcataggaaaagacataaatgaggaaactccaaacctcctgttagctgttatttctatttttgtagaagtaggaagtgaaaataggtatacagtggattaattaaatgcagcgaaccaatatttgtagaagggttatattttactactgtggaaaaatatttaagatagttttgccagaacagtttgtacagacgtatgcttattttaaaattttatctcttattcagtaaaaaacaacttctttgtaatcgttatgtgtgtatatgtatgtgtgtatgggtgtgtgtttgtgtgagagacagagaaagagagagaattctttcaagtgaatctaaaagcttttgcttttcctttgtttttatgaagaaaaaatacattttatattagaagtgttaacttagcttgaaggatctgtttttaaaaatcataaactgtgtgcagactcaataaaatcatgtacatttctgaaatgacctcaagatgtcctccttgttctactcatatatatctatcttatatagtttactattttacttctagagatagtacataaaggtggtatgtgtgtgtatgctactacaaaaaagttgttaactaaattaacattgggaaatcttatattccatatattagcatttagtccaatgtctttttaagcttatttaattaaaaaatttccagtgagcttatcatgctgtctttacatggggttttcaattttgcatgctcgattattccctgtacaatatttaaaatttattgcttgatacttttgacaacaaattaggttttgtacaattgaacttaaataaatgtcattaaaataaataaatgcaatatgtattaatattcattgtataaaaatagaagaatacaaacatatttgttaaatatttacatatgaaatttaatatagctatttttatggaatttttcattgatatgaaaaatatgatattgcatatgcatagttcccatgttaaatcccattcataactttcattaaagcatttactttgaatttctccaatgcttagaatgtttttaccaggaatggatgtcgctaatcataataaaattcaaccattatttttttcttgtttataatacattgtgttatatgttcaaatatgaaatgtgtatgcacctattgaaatatgtttaatgcatttattaacatttgcaggacacttttacaggccccaattatccaatagtctaataattgtttaagatctagaaaaaaaaaatcaagaatagtggtatttttcatgaagtaataaaaactcgttttggtgaatt

SEQ ID NO: 448718 - DNA, 1708 bp, Homo sapiens
  misc_feature (94)..(94): n is a, c, g, or t
ccgcgcctacctccgcgcaccacggccagccagtagcgccgcgaacgtcgaagtatcgaccggcacacagacatttacaccgcactccacggantacgccgctgcatagccacagtgctccgtcactgcgcgtcactcgctctactatgacacaaacccggcgctcgctcaatgcaccacgaacactatcctcccgcatatctgcctcttcatccatcctccgtgtcaacctagtgttgtcgtctcctgacctacgcccaaccaccaccactggtctggttcataggtccatttcgaccaccggtcatccatagccctcgaaaatgttttcttccgatggccattggcaaaaatcgcgcgtgggaatatccagggagttgttttggccataaaggccggagcctgtcacctgtccaaagaaagggatcccagggcaaagcccaacaccttcccccactgatgcctaccttaatgcctctgaaacaaccactctgagcccttctggaagcgctgtcatttcaaccacaacaatagctactactccatctaagccaacatgtgatgaaaaatatgcaaacatcactgtggattacttatataacaaggaaactaaattatttacagcaaagctaaatgttaatgagaatgtggaatgtggaaacaatacttgcacaaacaatgaggtgcataaccttacagaatgtaaaaatgcgtctgtttccatatctcataattcatgtactgctcctgataagacattaatattagatgtgccaccaggggttgaaaagtttcagttacatgattgtacacaagttgaaaaagcagatactactatttgtttaaaatggaaaaatattgaaacctttacttgtgatacacagaatattacctacagatttcagtgtggtaatatgatatttgataataaagaaattaaattagaaaaccttgaacccgaacatgagtataagtgtgactcagaaatactctataataaccacaagtttactaacgcaagtaaaattattaaaacagattttgggagtccaggagagcctcagattattttttgtagaagtgaagctgcacatcaaggagtaattacctggaatccccctcaaagatcatttcataattttaccctctgttatataaaagagacaggtaatttgtgtagaatttaatttcatcagaaaagagaaatcaagaatttgaaagtactagaaatttttattgagccagtgagtcacaaagctctctgcttagagactgcataggcatagtatactccctgatcttagaattgcttccactcattcaaagctttccagccccagaaatgactaaaatccagaacattctaaatatttgcttgtccttcttggtcttagtttaaatctttgtgctccaaagcctagagacagaaaacctctggatgacaacactcatttctgtcttgcaagtattatgtaagtgatttgactcactttgactcatctttgaactcatcattcagcctcctaaacaaaccaacaaacaagcaaaccccttgtaaaacttgtttcagctaataatacagacaaaatgttgggtgaataaaaatgaacatgggcccatgtagccgctggggccagtttggtgtaatcttgggagcatagttctaagtttagaattagacttctgcagaagtaatgcaattaaaaaa

SEQ ID NO: 448719 - DNA, 920 bp, Homo sapiens
atatttattgggcatcttgttaaaaaaaaaaaggcaccgttcctggcacaagtgatttgatggacaagataagcaaggcccttgctcttatggagtttactgttaagtgggaagatggaaaaaagaaggacgcatgctgtttcttagggacacggctgacttccagatatgaccatgtatttgtggcttaaactcttggcatttggctttgcctttctggacacagaagtatttgtgacagggcaaagcccaacaccttcccccactggtgtttcatcagtacagacgcctcaccttcccacgcacgcagactcgcagacgccctctgctggaactgacacgcagacattcagcggctccgccgccaatgcaaaactcaaccctaccccaggcagcaatgctatctcagatgtcccaggagagaggagtacagccagcacctttcctacagacccagtttccccattgacaaccaccctcagccttgcacaccacagctctgctgccttacctgcacgcacctccaacaccaccatcacagcgaacacctcagatgcctaccttaatgcctctgaaacaaccactctgagcccttctggaagcgctgtcatttcaaccacaacaatagctactactccatctaagccaacatgtgatgaaaaatatgcaaacatcactgtggattacttatataacaaggaaactaaattatttacagcaaagctaaatgttaatgagaatgtggaatgtggaaacaatacttgcacaaacaatgaggtgcataaccttacagaatgtaaaaatgcgtctgtttccatatctcataattcatgtactgctcctgataagacattaatattagatgtgccaccaggtaaatatcaatttatttcttttaataaatttataaaaacagtaca

SEQ ID NO: 448720 - DNA, 1186 bp, Homo sapiens
  misc_feature (94)..(94): n is a, c, g, or t
ccgcgcctacctccgcgcaccacggccagccagtagcgccgcgaacgtcgaagtatcgaccggcacacagacatttacaccgcactccacggantacgccgctgcatagccacagtgctccgtcactgcgcgtcactcgctctactatgacacaaacccggcgctcgctcaatgcaccacgaacactatcctcccgcatatctgcctcttcatccatcctccgtgtcaacctagtgttgtcgtctcctgacctacgcccaaccaccaccactggtctggttcataggtccatttcgaccaccggtcatccatagccctcgaaaatgttttcttccgatggccattggcaaaaatcgcgcgtgggaatatccagggagttgttttggccataaaggccggagcctgtcacctgtccaaagaaagggatcccagggcaaagcccaacaccttcccccactggtgtttcatcagtacagacgcctcaccttcccacgcacgcagactcgcagacgccctctgctggaactgacacgcagacattcagcggctccgccgccaatgcaaaactcaaccctaccccaggcagcaatgctatctcagatgcctaccttaatgcctctgaaacaaccactctgagcccttctggaagcgctgtcatttcaaccacaacaataggtgatattaccctcagtcaggcagccacaccatccccatgtgcctggtgatgtgctctcacaagggccttccacccactctacctcgggctcctttctttaagttgcattaagtgtttgaatcctgagggtgatggaacagcaggaagatatttctctgcttagcagtgcaacagctgatgagatcaggatgtaattgttactgtcataattcatcagaaagcatgtgtgagaaacaaccacatctactagaactttttctcacaggggtttaggtcttagtaaggaaaagaacaagcccatcaaaggggctgtccattgcaagtggtgagcatcagacggctgatggcagagttcccgttaagcagtgagagggcgtggagataaaggaaagagaaactgaggaatggctgcagcaatggtggtatctgtgaatcagcaagtaagctgatcagagcttgcaagcccacaattctcctcaaattcttccaacccaaaaccaagatgagcag

SEQ ID NO: 448721 - DNA, 1792 bp, Homo sapiens
gggcacgagggggggctcgggctgggggcgcggcctgtgccggccgccccaccctccttgcataaaagccggagcccgcggggccggcgctctcagcccgtcggttcccgagcgccttcccggtgaccccgcagtgggtgtgtgaggggaggacggacagacccagacgccgccggaccaggaggacgctgacgaggcaccatgcgtgagatcgtgcacatccaggcgggccagtgcggcaaccagatcggcgccaagttttgggaggtcatcagtgatgagcatgggattgaccccactggcagttaccatggagacagtgatttgcagctggagagaatcaatgtttactacaatgaagccactggtaacaaatatgttcctcgggccatcctcgtggatctggagccaggcacgatggattcggttaggtctggaccattcggccagatcttcagaccagacaatttcgtgtttggccagagtggagccgggaataactgggccaagggccactacacagagggagccgagctggtcgactcggtcctggatgtggtgaggaaggagtcagagagctgtgactgtctccagggcttccagctgacccactctctggggggcggcacggggtccgggatgggcaccctgctcatcagcaagatccgggaagagtacccagaccgcatcatgaacaccttcagcgtcatgccctcacccaaggtgtcagacacggtggtggagccctacaacgccaccctctcggtccaccagctggtggaaaacacagatgaaacctactgcattgacaacgaggccctgtatgacatctgcttccgcaccctgaagctgaccacccccacctacggggacctcaaccacctggtgtcggccaccatgagcggggtcaccacctgcctgcgcttcccgggccagctgaacgcagacctgcgcaagctggcggtgaacatggtgcccttccctcgcctgcacttcttcatgcccggcttcgcgcccctgaccagccggggcagccagcagtaccgggcgctcacggtgcccgagctcacccagcagatgttcgactccaagaacatgatggccgcctgcgacccgcgccacggccgctacctgacggtggctgccatcttccggggccgcatgtccatgaaggaggtggacgagcagatgctcaacgtgcagaacaagaacagcagctacttcgtggagtggatccccaacaacgtgaagacggccgtgtgcgacatcccgccccgcggcctgaagatgtcggccaccttcatcggcaacagcacggccatccaggagctgttcaagcgcatctccgagcagttcacggccatgttccggcgcaaggccttcctgcactggtacacgggcgagggcatggacgagatggagttcaccgaggccgagagcaacatgaacgacctggtgtccgagtaccagcagtaccaggacgccacggccgacgaacaaggggagttcgaggaggaggagggcgaggacgaggcgtagatgcccccgcgagacgggttagggaaagcggaggaggaaagcgagggggtggggggcttcccgggacgataacctggcagtggaaggaaagaagcatggtctactttaggtgtgcgctgggtctctggtgctcttcactgttgcctgtcacttttttttccttttttgtaatattgatgacatcaatgtaacatttgagatatttctgaattactgttgtaatggctaaaatcacataaacgtttgtgtcgga

SEQ ID NO: 448722 - DNA, 326 bp, Homo sapiens
gagagagagagagagagagagagagagagagagagagagagagagagagagagagagagagagagaggcgtagatgcccccgcgagacgggttagggaaagcggaggaggaaagcgagggggtggggggcttcccgggacgataacctggcagtggaaggaaagaagcatggtctactttaggtgtgcgctgggtctctggtgctcttcactgttgcctgtcacttttttttccttttttgtaatattgatgacatcaatgtaacatttgagatatttctgaattactgttgtaatggctaaaatcacataaacgtttgtgtcgga

SEQ ID NO: 448723 - DNA, 2027 bp, Homo sapiens
gggcacgagggggggctcgggctgggggcgcggcctgtgccggccgccccaccctccttgcataaaagccggagcccgcggggccggcgctctcagcccgtcggttcccgagcgccttcccggtgaccccgcagtgggtgtgtgaggggaggacggacagacccagacgccgccggaccaggaggacgctgacgaggcaccatgcgtgagatcgtgcacatccaggcgggccagtgcggcaaccagatcggcgccaagttttgggaggtcatcagtgatgagcatgggattgaccccactggcagttaccatggagacagtgatttgcagctggagagaatcaatgtttactacaatgaagccactggtaacaaatatgttcctcgggccatcctcgtggatctggagccaggcacgatggattcggttaggtctggaccattcggccagatcttcagaccagacaatttcgtgtttggccagagtggagccgggaataactgggccaagggccactacacagagggagccgagctggtcgactcggtcctggatgtggtgaggaaggagtcagagagctgtgactgtctccagggcttccagctgacccactctctggggggcggcacggggtccgggatgggcaccctgctcatcagcaagatccgggaagagtacccagaccgcatcatgaacaccttcagcgtcatgccctcacccaaggtgtcagacacggtggtggagccctacaacgccaccctctcggtccaccagctggtggaaaacacagatgaaacctactgcattgacaacgaggccctgtatgacatctgcttccgcaccctgaagctgaccacccccacctacggggacctcaaccacctggtgtcggccaccatgagcggggtcaccacctgcctgcgcttcccgggccagctgaacgcagacctgcgcaagctggcggtgaacatggtgcccttccctcgcctgcacttcttcatgcccggcttcgcgcccctgaccagccggggcagccagcagtaccgggcgctcacggtgcccgagctcacccagcagatgttcgactccaagaacatgatggccgcctgcgacccgcgccacggccgctacctgacggtggctgccatcttccggggccgcatgtccatgaaggaggtggacgagcagatgctcaacgtgcagaacaagaacagcagctacttcgtggagtggatccccaacaacgtgaagacggccgtgtgcgacatcccgccccgcggcctgaagatgtcggccaccttcatcggcaacagcacggccatccaggagctgttcaagcgcatctccgagcagttcacggccatgttccggcgcaaggccttcctgcactggtacacgggcgagggcatggacgagatggagttcaccgaggccgagagcaacatgaacgacctggtgtccgagtaccagcagtaccaggacgccacggccgacgaacaaggggagttcgaggaggaggagggcgaggacgaggcgtagatgcccccgcgagacgggttagggaaagcggaggaggaaagcgagggggtggggggcttcccgggacgataacctggcagtggaaggaaagaagcatggtctactttaggtgtgcgctgggtctctggtgctcttcactgttgcctgtcacttttttttccttttttgtaatattgatgacatcaatgtaacatttgagatatttctgaattactgttgtaatggctaaaatcacataaacgtttgtgtcggaatggtgtcctctctttctcttcctttttctctttattaacgatttaaatgtaactttctgaacacattgcattgaattcttcctttaacaaaaagcaaaggcgtaggtaaaagctcaaatgaatttattctttcggtatggtaaaattgaaccaatcacagttaagatgagagatcaacctgagttttaaaatacctttaataaatattagtgaaaaaatgtctacttgaagcac

SEQ ID NO: 448724 - DNA, 1727 bp, Homo sapiens
gggcacgagggggggctcgggctgggggcgcggcctgtgccggccgccccaccctccttgcataaaagccggagcccgcggggccggcgctctcagcccgtcggttcccgagcgccttcccggtgaccccgcagtgggtgtgtgaggggaggacggacagacccagacgccgccggaccaggaggacgctgacgaggcaccatgcgtgagatcgtgcacatccaggcgggccagtgcggcaaccagatcggcgccaagttttgggaggtcatcagtgatgagcatgggattgaccccactggcagttaccatggagacagtgatttgcagctggagagaatcaatgtttactacaatgaagccactggtaacaaatatgttcctcgggccatcctcgtggatctggagccaggcacgatggattcggttaggtctggaccattcggccagatcttcagaccagacaatttcgtgtttggccagagtggagccgggaataactgggccaagggccactacacagagggagccgagctggtcgactcggtcctggatgtggtgaggaaggagtcagagagctgtgactgtctccagggcttccagctgacccactctctggggggcggcacggggtccgggatgggcaccctgctcatcagcaagatccgggaagagtacccagaccgcatcatgaacaccttcagcgtcatgccctcacccaaggtgtcagacacggtggtggagccctacaacgccaccctctcggtccaccagctggtggaaaacacagatgaaacctactgcattgacaacgaggccctgtatgacatctgcttccgcaccctgaagctgaccacccccacctacggggacctcaaccacctggtgtcggccaccatgagcggggtcaccacctgcctgcgcttcccgggccagctgaacgcagacctgcgcaagctggcggtgaacatggtgcccttccctcgcctgcacttcttcatgcccggcttcgcgcccctgaccagccggggcagccagcagtaccgggcgctcacggtgcccgagctcacccagcagatgttcgactccaagaacatgatggccgcctgcgacccgcgccacggccgctacctgacggtggctgccatcttccggggccgcatgtccatgaaggaggtggacgagcagatgctcaacgtgcagaacaagaacagcagctacttcgtggagtggatccccaacaacgtgaagacggccgtgtgcgacatcccgccccgcggcctgaagatgtcggccaccttcatcggcaacagcacggccatccaggagctgttcaagcgcatctccgagcagttcacggccatgttccggcgcaaggccttcctgcactggtacacgggcgagggcatggacgagatggagttcaccgaggccgagagcaacatgaacgacctggtgtccgagtaccagcagtaccaggacgccacggccgacgaacaaggggagttcgaggaggaggagggcgaggacgattaaaaacttctcagatcaatcgtgcatccttagtgaacttctgttgtcctcaagcatggtctttctacttgtaaactatggtgctcagttttgcctctgttagaaattcacactgttgatgtaatgatgtggaactcctctaaaaattacagtattgtctgtgaaggtatctatactaataaaaaagcatgtgt

SEQ ID NO: 448725 - DNA, 1766 bp, Homo sapiens
gggcacgagggggggctcgggctgggggcgcggcctgtgccggccgccccaccctccttgcataaaagccggagcccgcggggccggcgctctcagcccgtcggttcccgagcgccttcccggtgaccccgcagtgggtgtgtgaggggaggacggacagacccagacgccgccggaccaggaggacgctgacgaggcaccatgcgtgagatcgtgcacatccaggcgggccagtgcggcaaccagatcggcgccaagttttgggaggtcatcagtgatgagcatgggattgaccccactggcagttaccatggagacagtgatttgcagctggagagaatcaatgtttactacaatgaagccactggtaacaaatatgttcctcgggccatcctcgtggatctggagccaggcacgatggattcggttaggtctggaccattcggccagatcttcagaccagacaatttcgtgtttggccagagtggagccgggaataactgggccaagggccactacacagagggagccgagctggtcgactcggtcctggatgtggtgaggaaggagtcagagagctgtgactgtctccagggcttccagctgacccactctctggggggcggcacggggtccgggatgggcaccctgctcatcagcaagatccgggaagagtacccagaccgcatcatgaacaccttcagcgtcatgccctcacccaaggtgtcagacacggtggtggagccctacaacgccaccctctcggtccaccagctggtggaaaacacagatgaaacctactgcattgacaacgaggccctgtatgacatctgcttccgcaccctgaagctgaccacccccacctacggggacctcaaccacctggtgtcggccaccatgagcggggtcaccacctgcctgcgcttcccgggccagctgaacgcagacctgcgcaagctggcggtgaacatggtgcccttccctcgcctgcacttcttcatgcccggcttcgcgcccctgaccagccggggcagccagcagtaccgggcgctcacggtgcccgagctcacccagcagatgttcgactccaagaacatgatggccgcctgcgacccgcgccacggccgctacctgacggtggctgccatcttccggggccgcatgtccatgaaggaggtggacgagcagatgctcaacgtgcagaacaagaacagcagctacttcgtggagtggatccccaacaacgtgaagacggccgtgtgcgacatcccgccccgcggcctgaagatgtcggccaccttcatcggcaacagcacggccatccaggagctgttcaagcgcatctccgagcagttcacggccatgttccggcgcaaggccttcctgcactggtacacgggcgagggcatggacgagatggagttcaccgaggccgagagcaacatgaacgacctggtgtccgagtaccagcagtaccaggacgccacggccgacgaacaaggggagttcgaggaggaggagggcgaggacgattaaaaacttctcagatcaatcgtgcatccttagtgaacttctgttgtcctcaagcatggtctttctacttgtaaactatggtgctcagttttgcctctgttagaaattcacactgttgatgtaatgatgtggaactcctctaaaaattacagtattgtctgtgaaggtatctatactaataaaaaagcatgtgtcgagcaacgcacggacccaccaagaacagaaacaaaaaa

SEQ ID NO: 448726 - DNA, 1708 bp, Homo sapiens
ggaaatggcgccctagaaaagccaggatgctactccctccgccgatttgtaggacaaagcaggcaaagctctttcgtggaagctcggctctctcagtcccgaccgaggccattataactcaaattcacaacctccggggatgcgaaaacacccggccttactgaggaacaaaggttttgggaggtcatcagtgatgagcatgggattgaccccactggcagttaccatggagacagtgatttgcagctggagagaatcaatgtttactacaatgaagccactggtaacaaatatgttcctcgggccatcctcgtggatctggagccaggcacgatggattcggttaggtctggaccattcggccagatcttcagaccagacaatttcgtgtttggccagagtggagccgggaataactgggccaagggccactacacagagggagccgagctggtcgactcggtcctggatgtggtgaggaaggagtcagagagctgtgactgtctccagggcttccagctgacccactctctggggggcggcacggggtccgggatgggcaccctgctcatcagcaagatccgggaagagtacccagaccgcatcatgaacaccttcagcgtcatgccctcacccaaggtgtcagacacggtggtggagccctacaacgccaccctctcggtccaccagctggtggaaaacacagatgaaacctactgcattgacaacgaggccctgtatgacatctgcttccgcaccctgaagctgaccacccccacctacggggacctcaaccacctggtgtcggccaccatgagcggggtcaccacctgcctgcgcttcccgggccagctgaacgcagacctgcgcaagctggcggtgaacatggtgcccttccctcgcctgcacttcttcatgcccggcttcgcgcccctgaccagccggggcagccagcagtaccgggcgctcacggtgcccgagctcacccagcagatgttcgactccaagaacatgatggccgcctgcgacccgcgccacggccgctacctgacggtggctgccatcttccggggccgcatgtccatgaaggaggtggacgagcagatgctcaacgtgcagaacaagaacagcagctacttcgtggagtggatccccaacaacgtgaagacggccgtgtgcgacatcccgccccgcggcctgaagatgtcggccaccttcatcggcaacagcacggccatccaggagctgttcaagcgcatctccgagcagttcacggccatgttccggcgcaaggccttcctgcactggtacacgggcgagggcatggacgagatggagttcaccgaggccgagagcaacatgaacgacctggtgtccgagtaccagcagtaccaggacgccacggccgacgaacaaggggagttcgaggaggaggagggcgaggacgaggcgtagatgcccccgcgagacgggttagggaaagcggaggaggaaagcgagggggtggggggcttcccgggacgataacctggcagtggaaggaaagaagcatggtctactttaggtgtgcgctgggtctctggtgctcttcactgttgcctgtcacttttttttccttttttgtaatattgatgacatcaatgtaacatttgagatatttctgaattactgttgtaatggctaaaatcacataaacgtttgtgtcgga

SEQ ID NO: 448727 - DNA, 1982 bp, Homo sapiens
gggcacgagggggggctcgggctgggggcgcggcctgtgccggccgccccaccctccttgcataaaagccggagcccgcggggccggcgctctcagcccgtcggttcccgagcgccttcccggtgaccccgcagtgggtgtgtgaggggaggacggacagacccagacgccgccggaccaggaggacgctgacgaggcaccatgcgtgagatcgtgcacatccaggcgggccagtgcggcaaccagatcggcgccaagttttgggaggtcatcagtgatgagcatgggattgaccccactggcagttaccatggagacagtgatttgcagctggagagaatcaatgtttactacaatgaagccactggtaacaaatatgttcctcgggccatcctcgtggatctggagccaggcacgatggattcggttaggtctggaccattcggccagatcttcagaccagacaatttcgtgtttggccagagtggagccgggaataactgggccaagggccactacacagagggagccgagctggtcgactcggtcctggatgtggtgaggaaggagtcagagagctgtgactgtctccagggcttccagctgacccactctctggggggcggcacggggtccgggatgggcaccctgctcatcagcaagatccgggaagagtacccagaccgcatcatgaacaccttcagcgtcatgcccctctcggtccaccagctggtggaaaacacagatgaaacctactgcattgacaacgaggccctgtatgacatctgcttccgcaccctgaagctgaccacccccacctacggggacctcaaccacctggtgtcggccaccatgagcggggtcaccacctgcctgcgcttcccgggccagctgaacgcagacctgcgcaagctggcggtgaacatggtgcccttccctcgcctgcacttcttcatgcccggcttcgcgcccctgaccagccggggcagccagcagtaccgggcgctcacggtgcccgagctcacccagcagatgttcgactccaagaacatgatggccgcctgcgacccgcgccacggccgctacctgacggtggctgccatcttccggggccgcatgtccatgaaggaggtggacgagcagatgctcaacgtgcagaacaagaacagcagctacttcgtggagtggatccccaacaacgtgaagacggccgtgtgcgacatcccgccccgcggcctgaagatgtcggccaccttcatcggcaacagcacggccatccaggagctgttcaagcgcatctccgagcagttcacggccatgttccggcgcaaggccttcctgcactggtacacgggcgagggcatggacgagatggagttcaccgaggccgagagcaacatgaacgacctggtgtccgagtaccagcagtaccaggacgccacggccgacgaacaaggggagttcgaggaggaggagggcgaggacgaggcgtagatgcccccgcgagacgggttagggaaagcggaggaggaaagcgagggggtggggggcttcccgggacgataacctggcagtggaaggaaagaagcatggtctactttaggtgtgcgctgggtctctggtgctcttcactgttgcctgtcacttttttttccttttttgtaatattgatgacatcaatgtaacatttgagatatttctgaattactgttgtaatggctaaaatcacataaacgtttgtgtcggaatggtgtcctctctttctcttcctttttctctttattaacgatttaaatgtaactttctgaacacattgcattgaattcttcctttaacaaaaagcaaaggcgtaggtaaaagctcaaatgaatttattctttcggtatggtaaaattgaaccaatcacagttaagatgagagatcaacctgagttttaaaatacctttaataaatattagtgaaaaaatgtctacttgaagcac

SEQ ID NO: 448728 - DNA, 561 bp, Homo sapiens
gagagagagagagagagagagagagagagagagagagagagagagagagagagagagagagagagaggcgtagatgcccccgcgagacgggttagggaaagcggaggaggaaagcgagggggtggggggcttcccgggacgataacctggcagtggaaggaaagaagcatggtctactttaggtgtgcgctgggtctctggtgctcttcactgttgcctgtcacttttttttccttttttgtaatattgatgacatcaatgtaacatttgagatatttctgaattactgttgtaatggctaaaatcacataaacgtttgtgtcggaatggtgtcctctctttctcttcctttttctctttattaacgatttaaatgtaactttctgaacacattgcattgaattcttcctttaacaaaaagcaaaggcgtaggtaaaagctcaaatgaatttattctttcggtatggtaaaattgaaccaatcacagttaagatgagagatcaacctgagttttaaaatacctttaataaatattagtgaaaaaatgtctacttgaagcac

SEQ ID NO: 448729 - DNA, 400 bp, Homo sapiens
  misc_feature (16)..(16): n is a, c, g, or t
ttgtaaaaaaagaggntggtacggtccggaattcccgggatggttcccgagcgccttcccggtgaccccgcagtgggtgtgtgaggggaggacggacagacccagacgccgccggaccaggaggacgctgacgaggcaccatgcgtgagatcgtgcacatccaggcgggccagtgcggcaaccagatcggcgccaagttttgggaggtcatcagtgatgagcatgggtggaaggaaagaagcatggtctactttaggtgtgcgctgggtctctggtgctcttcactgttgcctgtcacttttttttccttttttgtaatattgatgacatcaatgtaacatttgagatatttctgaattactgttgtaatggctaaaatcacataaacgtttgtgtcgga

SEQ ID NO: 448730 - DNA, 868 bp, Homo sapiens
gctcacttgacacctagcagcgcctcatcctggactgaccttcgtgggaggagcctccatgcacattcgtggcgcacggacgaggtgtcagtgagggctgcggtatctgcaccatcgtctgctgcctcaaaattggagctggaagaagccctccgaaccatcctgcttatattgcttgtacgcgacggtcccagggaatggtgacgagctgaggacatacatgtggcgtgtccaaatatgagaggcgcctacaagtgatggaatccacagaagctctgagcaacatgaacgacctggtgtccgagtaccagcagtaccaggacgccacggccgacgaacaaggggagttcgaggaggaggagggcgaggacgaggcgtagatgcccccgcgagacgggttagggaaagcggaggaggaaagcgagggggtggggggcttcccgggacgataacctggcagtggaaggaaagaagcatggtctactttaggtgtgcgctgggtctctggtgctcttcactgttgcctgtcacttttttttccttttttgtaatattgatgacatcaatgtaacatttgagatatttctgaattactgttgtaatggctaaaatcacataaacgtttgtgtcggaatggtgtcctctctttctcttcctttttctctttattaacgatttaaatgtaactttctgaacacattgcattgaattcttcctttaacaaaaagcaaaggcgtaggtaaaagctcaaatgaatttattctttcggtatggtaaaattgaaccaatcacagttaagatgagagatcaacctgagttttaaaatacctttaataaatattagtgaaaaaatgtctacttgaagcac

SEQ ID NO: 448731 - DNA, 1731 bp, Homo sapiens
  misc_feature (16)..(16): n is a, c, g, or t
ttgtaaaaaaagaggntggtacggtccggaattcccgggatggttcccgagcgccttcccggtgaccccgcagtgggtgtgtgaggggaggacggacagacccagacgccgccggaccaggaggacgctgacgaggcaccatgcgtgagatcgtgcacatccaggcgggccagtgcggcaaccagatcggcgccaagttttgggaggtcatcagtgatgagcatgggattgaccccactggcagttaccatggagacagtgatttgcagctggagagaatcaatgtttactacaatgaagccactggtaacaaatatgttcctcgggccatcctcgtggatctggagccaggcacgatggattcggttaggtctggaccattcggccagatcttcagaccagacaatttcgtgtttggccagagtggagccgggaataactgggccaagggccactacacagagggagccgagctggtcgactcggtcctggatgtggtgaggaaggagtcagagagctgtgactgtctccagggcttccagctgacccactctctggggggcggcacggggtccgggatgggcaccctgctcatcagcaagatccgggaagagtacccagaccgcatcatgaacaccttcagcgtcatgccctcacccaaggtgtcagacacggtggtggagccctacaacgccaccctctcggtccaccagctggtggaaaacacagatgaaacctactgcattgacaacgaggccctgtatgacatctgcttccgcaccctgaagctgaccacccccacctacggggacctcaaccacctggtgtcggccaccatgagcggggtcaccacctgcctgcgcttcccgggccagctgaacgcagacctgcgcaagctggcggtgaacatggtgcccttccctcgcctgcacttcttcatgcccggcttcgcgcccctgaccagccggggcagccagcagtaccgggcgctcacggtgcccgagctcacccagcagatgttcgactccaagaacatgatggccgcctgcgacccgcgccacggccgctacctgacggtggctgccatcttccggggccgcatgtccatgaaggaggtggacgagcagatgctcaacgtgcagaacaagaacagcagctacttcgtggagtggatccccaacaacgtgaagacggccgtgtgcgacatcccgccccgcggcctgaagatgtcggccaccttcatcggcaacagcacggccatccaggagctgttcaagcgcatctccgagcagttcacggccatgttccggcgcaaggccttcctgcactggtacacgggcgagggcatggacgagatggagttcaccgaggccgagagcaacatgaacgacctggtgtccgagtaccagcagtaccaggacgccacggccgacgaacaaggggagttcgaggaggaggagggcgaggacgaggcgtagatgcccccgcgagacgggttagggaaagcggaggaggaaagcgagggggtggggggcttcccgggacgataacctggcagtggaaggaaagaagcatggtctactttaggtgtgcgctgggtctctggtgctcttcactgttgcctgtcacttttttttccttttttgtaatattgatgacatcaatgtaacatttgagatatttctgaattactgttgtaatggctaaaatcacataaacgtttgtgtcgga

SEQ ID NO: 448732 - DNA, 1340 bp, Homo sapiens
gggcacgagggggggctcgggctgggggcgcggcctgtgccggccgccccaccctccttgcataaaagccggagcccgcggggccggcgctctcagcccgtcggttcccgagcgccttcccggtgaccccgcagtgggtgtgtgaggggaggacggacagacccagacgccgccggaccaggaggacgctgacgaggcaccatgcgtgagatcgtgcacatccaggcgggccagtgcggcaaccagatcggcgccaagttttgggaggtcatcagtgatgagcatgggattgaccccactggcagttaccatggagacagtgatttgcagctggagagaatcaatgtttactacaatgaagccactggtaacaaatatgttcctcgggccatcctcgtggatctggagccaggcacgatggattcggttaggtctggaccattcggccagatcttcagaccagacaatttcgtgtttggccagagtggagccgggaataactgggccaagggccactacacagagggagccgagctggtcgactcggtcctggatgtggtgaggaaggagtcagagagctgtgactgtctccagggcttccagctgacccactctctggggggcggcacggggtccgggatgggcaccctgctcatcagcaagatccgggaagagtacccagaccgcatcatgaacaccttcagcgtcatgccctcacccaaggtgtcagacacggtggtggagccctacaacgccaccctctcggtccaccagctggtggaaaacacagatgaaacctactgcattgacaacgaggccctgtatgacatctgcttccgcaccctgaagctgaccacccccacctacggggacctcaaccacctggtgtcggccaccatgagcggggtcaccacctgcctgcgcttcccgggccagctgaacgcagacctgcgcaagctggcggtgaacatggtgcccttccctcgcctgcacttcttcatgcccggcttcgcgcccctgaccagccggggcagccagcagtaccgggcgctcacggtgcccgagctcacccagcagatgttcgactccaagaacatgatggccgcctgcgaccggccaggcgtactgaggggtggcatcttcgggcgctgtcatgagggggggcacgatgtcaggggggaacaaacgggtatttgggagggtcccaaaacggaaaagcgggggattgccccggcgaaattggcctctcgaaagcgacaggggaggctcgaagaggatcgcgggcatgacggggggaaagacggaaaaacggtacaagcgcaagaaaagtcacaatgggg

SEQ ID NO: 448733 - DNA, 1552 bp, Homo sapiens
gccctttgagaacctgatggtgggtctccctttgtttggggcaacatctgcatgatggcagcaggcgccaagcccttctctgcagaggtccttgcctgagggtctaagtcactgttgttccttgcaggtaacaaatatgttcctcgggccatcctcgtggatctggagccaggcacgatggattcggttaggtctggaccattcggccagatcttcagaccagacaatttcgtgtttggccagagtggagccgggaataactgggccaagggccactacacagagggagccgagctggtcgactcggtcctggatgtggtgaggaaggagtcagagagctgtgactgtctccagggcttccagctgacccactctctggggggcggcacggggtccgggatgggcaccctgctcatcagcaagatccgggaagagtacccagaccgcatcatgaacaccttcagcgtcatgccctcacccaaggtgtcagacacggtggtggagccctacaacgccaccctctcggtccaccagctggtggaaaacacagatgaaacctactgcattgacaacgaggccctgtatgacatctgcttccgcaccctgaagctgaccacccccacctacggggacctcaaccacctggtgtcggccaccatgagcggggtcaccacctgcctgcgcttcccgggccagctgaacgcagacctgcgcaagctggcggtgaacatggtgcccttccctcgcctgcacttcttcatgcccggcttcgcgcccctgaccagccggggcagccagcagtaccgggcgctcacggtgcccgagctcacccagcagatgttcgactccaagaacatgatggccgcctgcgacccgcgccacggccgctacctgacggtggctgccatcttccggggccgcatgtccatgaaggaggtggacgagcagatgctcaacgtgcagaacaagaacagcagctacttcgtggagtggatccccaacaacgtgaagacggccgtgtgcgacatcccgccccgcggcctgaagatgtcggccaccttcatcggcaacagcacggccatccaggagctgttcaagcgcatctccgagcagttcacggccatgttccggcgcaaggccttcctgcactggtacacgggcgagggcatggacgagatggagttcaccgaggccgagagcaacatgaacgacctggtgtccgagtaccagcagtaccaggacgccacggccgacgaacaaggggagttcgaggaggaggagggcgaggacgaggcgtagatgcccccgcgagacgggttagggaaagcggaggaggaaagcgagggggtggggggcttcccgggacgataacctggcagtggaaggaaagaagcatggtctactttaggtgtgcgctgggtctctggtgctcttcactgttgcctgtcacttttttttccttttttgtaatattgatgacatcaatgtaacatttgagatatttctgaattactgttgtaatggctaaaatcacataaacgtttgtgtcgga

SEQ ID NO: 448734 - DNA, 1964 bp, Homo sapiens
gggcacgagggggggctcgggctgggggcgcggcctgtgccggccgccccaccctccttgcataaaagccggagcccgcggggccggcgctctcagcccgtcggttcccgagcgccttcccggtgaccccgcagtgggtgtgtgaggggaggacggacagacccagacgccgccggaccaggaggacgctgacgaggcaccatgcgtgagatcgtgcacatccaggcgggccagtgcggcaaccagatcggcgccaagttttgggaggtcatcagtgatgagcatgggattgaccccactggcagttaccatggagacagtgatttgcagctggagagaatcaatgtttactacaatgaagccactggtaacaaatatgttcctcgggccatcctcgtggatctggagccaggcacgatggattcggttaggtctggaccattcggccagatcttcagaccagacaatttcgtgtttggccagagtggagccgggaataactgggccaagggccactacacagagggagccgagctggtcgactcggtcctggatgtggtgaggaaggagtcagagagctgtgactgtctccagggcttccagctgacccactctctggggggcggcacggggtccgggatgggcaccctgctcatcagcaagatccgggaagagtacccagaccgcatcatgaacaccttcagcgtcatgccctcacccaaggtgtcagacacggtggtggagccctacaacgccaccctctcggtccaccagctggtggaaaacacagatgaaacctactgcattgacctcaaccacctggtgtcggccaccatgagcggggtcaccacctgcctgcgcttcccgggccagctgaacgcagacctgcgcaagctggcggtgaacatggtgcccttccctcgcctgcacttcttcatgcccggcttcgcgcccctgaccagccggggcagccagcagtaccgggcgctcacggtgcccgagctcacccagcagatgttcgactccaagaacatgatggccgcctgcgacccgcgccacggccgctacctgacggtggctgccatcttccggggccgcatgtccatgaaggaggtggacgagcagatgctcaacgtgcagaacaagaacagcagctacttcgtggagtggatccccaacaacgtgaagacggccgtgtgcgacatcccgccccgcggcctgaagatgtcggccaccttcatcggcaacagcacggccatccaggagctgttcaagcgcatctccgagcagttcacggccatgttccggcgcaaggccttcctgcactggtacacgggcgagggcatggacgagatggagttcaccgaggccgagagcaacatgaacgacctggtgtccgagtaccagcagtaccaggacgccacggccgacgaacaaggggagttcgaggaggaggagggcgaggacgaggcgtagatgcccccgcgagacgggttagggaaagcggaggaggaaagcgagggggtggggggcttcccgggacgataacctggcagtggaaggaaagaagcatggtctactttaggtgtgcgctgggtctctggtgctcttcactgttgcctgtcacttttttttccttttttgtaatattgatgacatcaatgtaacatttgagatatttctgaattactgttgtaatggctaaaatcacataaacgtttgtgtcggaatggtgtcctctctttctcttcctttttctctttattaacgatttaaatgtaactttctgaacacattgcattgaattcttcctttaacaaaaagcaaaggcgtaggtaaaagctcaaatgaatttattctttcggtatggtaaaattgaaccaatcacagttaagatgagagatcaacctgagttttaaaatacctttaataaatattagtgaaaaaatgtctacttgaagcac

SEQ ID NO: 448735 - DNA, 381 bp, Homo sapiens
ctcaggtgatctgcccaccttgggcaatcccaaaatgttgggattacaggcatgagccaccacgcctggggaaggggcctcttttggtgaaaaggcaagggcactactcctattcattagtgttctacgcttacgacctaatcacctcccagaggacccacctcctcattccattgtattgggaattagtcttcaaaatatgaattttagggagacacaaacattcagaccctagcagggaccctggaaaggattctcattgtgcagagtatggataaacagtgatgctagggcagtttttccagggttgtcagaaagggctgaactagaagtttccccactgtgcctggagtgccctgggttggttgagtgtagggtttc

SEQ ID NO: 448736 - DNA, 1614 bp, Homo sapiens
cccccccccccccccacccccacccgccgcaccacaccggccagcaagaccccgcaaacttaggctaggtacgaggcctggtgttagcggtgcgacgaaggagtaggtggtgggatctcaccgtgggtccgattagccttttctctgccttgcttgcttgagcttcagcggaattcgaaatggctggcggtaaggctggaaaggactccggaaaggccaagacaaaggcggtttcccgctcgcagagagccggcttgcagttcccagtgggccgtattcatcgacacctaaaatctaggacgaccagtcatggacgtgtgggcgcgactgccgctgtgtacagcgcagccatcctggagtacctcaccgcagaggtacttgaactggcaggaaatgcatcaaaagacttaaaggtaaagcgtattacccctcgtcacttgcaacttgctattcgtggagatgaagaattggattctctcatcaaggctacaattgctggtggtggtgtcattccacacatccacaaatctctgattgggaagaaaggacaacagaagactgtctaaaggatgcctggattccttgttatctcaggactctaaatactctaacagctgtccagtgttggtgattccagtggactgtatctctgtgaaaaacacaattttgcctttttgtaattctatttgagcaagttggaagtttaattagctttccaaccaaccaaatttctgcattcgagtcttaaccatatttaagtgttactgtggcttcaaagaagctattgattctgaagtagtgggttttgattgagttgactgtttttaaaaaactgtttggattttaattgtgatgcagaagttatagtaacaaacatttggttttgtacagacattatttccactctggtggataagttcaataaaggtcatatcccaaaaaaaaaaaaaaaacagaaacaaaaaaaacacaaacaaagcaaaaaagaaaggaatactacatcatgcagaagcacgacgggagagaggccgggacggtcggccggaggcgcggccgcgcgcgagggccgcagcctgcgcgagcacatagatgatagccgatggaggtgagagtgcgcatcgcttaccttacacagcgagacgacgcaggcaggaatcgcaaggtgacactcacccgggtgtgggatgagagcagtgagcagctgaaggtggtggtgggtagcagacatagagggcgagcggtgaacactactattgggagtagacgggttcgagcgccgtcttctcggcgagcgtcatggaacatgccgtagtcctcgcatggtattcggtgtgcgatcgagtgagacttaagataggtgggcagagatagaagtgtgatctgggatcagagccgggctcacctggatgacgacgagcgaggagaacgaagacaaagacacggagaggaggaaaaactacgcagatcacgacgagcggtggagaccgagagccggaatgcggtggcagcgagcaagagggaacagagagatgcgcgcaacgacgagggagacgggaaccagtgcggtcaccatgactgccggggcgaatgaagcagcaggagacgaagcgaggc

SEQ ID NO: 448737 - DNA, 977 bp, Homo sapiens
agccattggtgggatgagcaatccgagttcccggatgagggaacattctgcagtataaagggagcagggaaggcgggagacagcgcagtttgaatcgcggtgcgacgaaggagtaggtggtgggatctcaccgtgggtccgattagccttttctctgccttgcttgcttgagcttcagcggaattcgaaatggctggcggtaaggctggaaaggactccggaaaggccaagacaaaggcggtttcccgctcgcagagagccggcttgcagttcccagtgggccgtattcatcgacacctaaaatctaggacgaccagtcatggacgtgtgggcgcgactgccgctgtgtacagcgcagccatcctggagtacctcaccgcagaggtacttgaactggcaggaaatgcatcaaaagacttaaaggtaaagcgtattacccctcgtcacttgcaacttgctattcgtggagatgaagaattggattctctcatcaaggctacaattgctggtggtggtgtcattccacacatccacaaatctctgattgggaagaaaggacaacagaagactgtctaaaggatgcctggattccttgttatctcaggactctaaatactctaacagctgtccagtgttggtgattccagtggactgtatctctgtgaaaaacacaattttgcctttttgtaattctatttgagcaagttggaagtttaattagctttccaaccaaccaaatttctgcattcgagtcttaaccatatttaagtgttactgtggcttcaaagaagctattgattctgaagtagtgggttttgattgagttgactgtttttaaaaaactgtttggattttaattgtgatgcagaagttatagtaacaaacatttggttttgtacagacattatttccactctggtggataagttcaataaaggtcatatcccaaaactagttgtgtattaaatttgcttggt

SEQ ID NO: 448738 - DNA, 879 bp, Homo sapiens
  misc_feature (843)..(843): n is a, c, g, or t
  misc_feature (845)..(845): n is a, c, g, or t
agccattggtgggatgagcaatccgagttcccggatgagggaacattctgcagtataaagggagcagggaaggcgggagacagcgcagtttgaatcgcggtgcgacgaaggagtaggtggtgggatctcaccgtgggtccgattagccttttctctgccttgcttgcttgagcttcagcggaattcgaaatggctggcggtaaggctggaaaggactccggaaaggccaagacaaaggcggtttcccgctcgcagagagccggcttgcagttcccagtgggccgtattcatcgacacctaaaatctaggacgaccagtcatggacgtgtgggcgcgactgccgctgtgtacagcgcagccatcctggagtacctcaccgcagaggtacttgaactggcaggaaatgcatcaaaagacttaaaggtaaagcgtattacccctcgtcacttgcaacttgctattcgtggagatgaagaattggattctctcatcaaggctacaattgctggtggtggtgtcattccacacatccacaaatctctgattgggaagaaaggacaacagaagactgtctaaaggatgcctggattccttgttatctcaggactctaaatactctaacagctgtccagtgttggtgattccagtggactgtatctctgtgaaaaacacaattttgcctttttgtaattctatttgagcaagttggaagtttaattagctttccaaccaaccaaatttctgcattcgagtcttaaccatatttaagtgttactgtggcttcaaagaagctattgattctgaagtagtgggttttgattgagttgactgtttttactgttngnttttattgggggccgttagaaccttggttttgtc

SEQ ID NO: 448739 - DNA, 498 bp, Homo sapiens
  misc_feature (415)..(415): n is a, c, g, or t
  misc_feature (419)..(419): n is a, c, g, or t
agccattggtgggatgagcaatccgagttcccggatgagggaacattctgcagtataaagggagcagggaaggcgggagacagcgcagtttgaatcgcggtgcgacgaaggagtaggtggtgggatctcaccgtgggtccgattagccttttctctgccttgcttgcttgagcttcagcggaattcgaaatggctggcggtaaggctggaaaggactccggaaaggccaagacaaaggcggtttcccgctcgcagagagccggcttgcagttcccagtgggccgtattcatcgacacctaaaatctaggacgaccagtcatggacgtgtgggcgcgactgccgctgtgtacagcgcagccatcctggagtacctcaccgcagagcttgaactggcaggaaatgcatcaaaaaggnaccntttttttttaaaaaaaactaaagggggggggggctcttttttaaaaaaaaaaaatgaagaattgcattctctgatcacg

SEQ ID NO: 448740 - DNA, 1647 bp, Homo sapiens
  misc_feature (957)..(957): n is a, c, g, or t
  misc_feature (959)..(959): n is a, c, g, or t
cccccccccccccccacccccacccgccgcaccacaccggccagcaagaccccgcaaacttaggctaggtacgaggcctggtgttagcggtgcgacgaaggagtaggtggtgggatctcaccgtgggtccgattagccttttctctgccttgcttgcttgagcttcagcggaattcgaaatggctggcggtaaggctggaaaggactccggaaaggccaagacaaaggcggtttcccgctcgcagagagccggcttgcagttcccagtgggccgtattcatcgacacctaaaatctaggacgaccagtcatggacgtgtgggcgcgactgccgctgtgtacagcgcagccatcctggagtacctcaccgcagaggtacttgaactggcaggaaatgcatcaaaagacttaaaggtaaagcgtattacccctcgtcacttgcaacttgctattcgtggagatgaagaattggattctctcatcaaggctacaattgctggtggtggtgtcattccacacatccacaaatctctgattgggaagaaaggacaacagaagactgtctaaaggatgcctggattccttgttatctcaggactctaaatactctaacagctgtccagtgttggtgattccagtggactgtatctctgtgaaaaacacaattttgcctttttgtaattctatttgagcaagttggaagtttaattagctttccaaccaaccaaatttctgcattcgagtcttaaccatatttaagtgttactgtggcttcaaagaagctattgattctgaagtagtgggttttgattgagttgactgtttttaaaaaactgtttggattttaattgtgatgcagaagttatagtaacaaacatttggttttgtacagacattatttccactctggtggataagttcaataaaggtcatatcccaaaaaaaaaaaaaaaaaaananaaaaaaaaaaaaagaaaaaaaaaaaaacagaaacaaaaaaaacacaaacaaagcaaaaaagaaaggaatactacatcatgcagaagcacgacgggagagaggccgggacggtcggccggaggcgcggccgcgcgcgagggccgcagcctgcgcgagcacatagatgatagccgatggaggtgagagtgcgcatcgcttaccttacacagcgagacgacgcaggcaggaatcgcaaggtgacactcacccgggtgtgggatgagagcagtgagcagctgaaggtggtggtgggtagcagacatagagggcgagcggtgaacactactattgggagtagacgggttcgagcgccgtcttctcggcgagcgtcatggaacatgccgtagtcctcgcatggtattcggtgtgcgatcgagtgagacttaagataggtgggcagagatagaagtgtgatctgggatcagagccgggctcacctggatgacgacgagcgaggagaacgaagacaaagacacggagaggaggaaaaactacgcagatcacgacgagcggtggagaccgagagccggaatgcggtggcagcgagcaagagggaacagagagatgcgcgcaacgacgagggagacgggaaccagtgcggtcaccatgactgccggggcgaatgaagcagcaggagacgaagcgaggc

SEQ ID NO: 448741 - DNA, 1009 bp, Homo sapiens
cccccccccccccccacccccacccgccgcaccacaccggccagcaagaccccgcaaacttaggctaggtacgaggcctggtgttagcggtgcgacgaaggagtaggtggtgggatctcaccgtgggtccgattagccttttctctgccttgcttgcttgagcttcagcggaattcgaaatggctggcggtaaggctggaaaggactccggaaaggccaagacaaaggcggtttcccgctcgcagagagccggcttgcagttcccagtgggccgtattcatcgacacctaaaatctaggacgaccagtcatggacgtgtgggcgcgactgccgctgtgtacagcgcagccatcctggagtacctcaccgcagaggtacttgaactggcaggaaatgcatcaaaagacttaaaggtaaagcgtattacccctcgtcacttgcaacttgctattcgtggagatgaagaattggattctctcatcaaggctacaattgctggtggtggtgtcattccacacatccacaaatctctgattgggaagaaaggacaacagaagactgtctaaaggatgcctggattccttgttatctcaggactctaaatactctaacagctgtccagtgttggtgattccagtggactgtatctctgtgaaaaacacaattttgcctttttgtaattctatttgagcaagttggaagtttaattagctttccaaccaaccaaatttctgcattcgagtcttaaccatatttaagtgttactgtggcttcaaagaagctattgattctgaagtagtgggttttgattgagttgactgtttttaaaaaactgtttggattttaattgtgatgcagaagttatagtaacaaacatttggttttgtacagacattatttccactctggtggataagttcaataaaggtcatatcccaaacaaaaaaaaaataagtagagatataggtgtgatgaatgtactagtagaagtagagcaagaaaaaaaagg

SEQ ID NO: 448742 - DNA, 984 bp, Homo sapiens
cccccccccccccccacccccacccgccgcaccacaccggccagcaagaccccgcaaacttaggctaggtacgaggcctggtgttagcggtgcgacgaaggagtaggtggtgggatctcaccgtgggtccgattagccttttctctgccttgcttgcttgagcttcagcggaattcgaaatggctggcggtaaggctggaaaggactccggaaaggccaagacaaaggcggtttcccgctcgcagagagccggcttgcagttcccagtgggccgtattcatcgacacctaaaatctaggacgaccagtcatggacgtgtgggcgcgactgccgctgtgtacagcgcagccatcctggagtacctcaccgcagaggtacttgaactggcaggaaatgcatcaaaagacttaaaggtaaagcgtattacccctcgtcacttgcaacttgctattcgtggagatgaagaattggattctctcatcaaggctacaattgctggtggtggtgtcattccacacatccacaaatctctgattgggaagaaaggacaacagaagactgtctaaaggatgcctggattccttgttatctcaggactctaaatactctaacagctgtccagtgttggtgattccagtggactgtatctctgtgaaaaacacaattttgcctttttgtaattctatttgagcaagttggaagtttaattagctttccaaccaaccaaatttctgcattcgagtcttaaccatatttaagtgttactgtggcttcaaagaagctattgattctgaagtagtgggttttgattgagttgactgtttttaaaaaactgtttggattttaattgtgatgcagaagttatagtaacaaacatttggttttgtacagacattatttccactctggtggataagtctaaggtctttccaaaaaaaaaaaccggggttattggggggaaaagtttaagggctggtggtttgc

SEQ ID NO: 448743 - DNA, 1051 bp, Homo sapiens
cccccccccccccccacccccacccgccgcaccacaccggccagcaagaccccgcaaacttaggctaggtacgaggcctggtgttagcggtgcgacgaaggagtaggtggtgggatctcaccgtgggtccgattagccttttctctgccttgcttgcttgagcttcagcggaattcgaaatggctggcggtaaggctggaaaggactccggaaaggccaagacaaaggcggtttcccgctcgcagagagccggcttgcagttcccagtgggccgtattcatcgacacctaaaatctaggacgaccagtcatggacgtgtgggcgcgactgccgctgtgtacagcgcagccatcctggagtacctcaccgcagaggtacttgaactggcaggaaatgcatcaaaagacttaaaggtaaagcgtattacccctcgtcacttgcaacttgctattcgtggagatgaagaattggattctctcatcaaggctacaattgctggtggtggtgtcattccacacatccacaaatctctgattgggaagaaaggacaacagaagactgtctaaaggatgcctggattccttgttatctcaggactctaaatactctaacagctgtccagtgttggtgattccagtggactgtatctctgtgaaaaacacaattttgcctttttgtaattctatttgagcaagttggaagtttaattagctttccaaccaaccaaatttctgcattcgagtcttaaccatatttaagtgttactgtggcttcaaagaagctattgattctgaagtagtgggttttgattgagttgactgtttttaaaaaactgtttggattttaattgtgatgcagaagttattacacccttggttggtcgactattccactctgggtaagttcatacggtcaatcccacttgaaaacaaaggggggccataacacccaggccaatttcctccaccttttccacggccctaggagttattacgccgcggtaacagtcgaacacaaccccccactctgttctgccccaaccaaccattac

SEQ ID NO: 448744 - DNA, 872 bp, Homo sapiens
cccccccccccccccacccccacccgccgcaccacaccggccagcaagaccccgcaaacttaggctaggtacgaggcctggtgttagcggtgcgacgaaggagtaggtggtgggatctcaccgtgggtccgattagccttttctctgccttgcttgcttgagcttcagcggaattcgaaatggctggcggtaaggctggaaaggactccggaaaggccaagacaaaggcggtttcccgctcgcagagagccggcttgcagttcccagtgggccgtattcatcgacacctaaaatctaggacgaccagtcatggacgtgtgggcgcgactgccgctgtgtacagcgcagccatcctggagtacctcaccgcagaggtacttgaactggcaggaaatgcatcaaaagacttaaaggtaaagcgtattacccctcgtcacttgcaacttgctattcgtggagatgaagaattggattctctcatcaaggctacaattgctggtggtggtgtcattccacacatccacaaatctctgattgggaagaaaggacaacagaagactgtctaaaggatgcctggattccttgttatctcaggactctaaatactctaacagctgtccagtgttggtgattccagtggactgtatctctgtgaaaaacacaattttgcctttttgtaattctatttgagcaagttggaagtttaattagctttccaaccaaccaaatttctgcattcgagtcttaaccatatttaagtgttactgtggcttcaaagaagctattgattctgaagtagtgggttttgattgagttgactgttttttttgtacagacattatttccactctgtgggataagttctggtcatt

SEQ ID NO: 448745 - DNA, 1511 bp, Homo sapiens
  misc_feature (821)..(821): n is a, c, g, or t
  misc_feature (823)..(823): n is a, c, g, or t
gcagttggtggggtggtatagagtggtatagggtggtatagggtggtatagagtggtatagggtggtatagcctataccgccaagacaaaggcggtttcccgctcgcagagagccggcttgcagttcccagtgggccgtattcatcgacacctaaaatctaggacgaccagtcatggacgtgtgggcgcgactgccgctgtgtacagcgcagccatcctggagtacctcaccgcagaggtacttgaactggcaggaaatgcatcaaaagacttaaaggtaaagcgtattacccctcgtcacttgcaacttgctattcgtggagatgaagaattggattctctcatcaaggctacaattgctggtggtggtgtcattccacacatccacaaatctctgattgggaagaaaggacaacagaagactgtctaaaggatgcctggattccttgttatctcaggactctaaatactctaacagctgtccagtgttggtgattccagtggactgtatctctgtgaaaaacacaattttgcctttttgtaattctatttgagcaagttggaagtttaattagctttccaaccaaccaaatttctgcattcgagtcttaaccatatttaagtgttactgtggcttcaaagaagctattgattctgaagtagtgggttttgattgagttgactgtttttaaaaaactgtttggattttaattgtgatgcagaagttatagtaacaaacatttggttttgtacagacattatttccactctggtggataagttcaataaaggtcatatcccaaaaaaaaaaaaaaaaaaananaaaaaaaaaaaaagaaaaaaaaaaaaacagaaacaaaaaaaacacaaacaaagcaaaaaagaaaggaatactacatcatgcagaagcacgacgggagagaggccgggacggtcggccggaggcgcggccgcgcgcgagggccgcagcctgcgcgagcacatagatgatagccgatggaggtgagagtgcgcatcgcttaccttacacagcgagacgacgcaggcaggaatcgcaaggtgacactcacccgggtgtgggatgagagcagtgagcagctgaaggtggtggtgggtagcagacatagagggcgagcggtgaacactactattgggagtagacgggttcgagcgccgtcttctcggcgagcgtcatggaacatgccgtagtcctcgcatggtattcggtgtgcgatcgagtgagacttaagataggtgggcagagatagaagtgtgatctgggatcagagccgggctcacctggatgacgacgagcgaggagaacgaagacaaagacacggagaggaggaaaaactacgcagatcacgacgagcggtggagaccgagagccggaatgcggtggcagcgagcaagagggaacagagagatgcgcgcaacgacgagggagacgggaaccagtgcggtcaccatgactgccggggcgaatgaagcagcaggagacgaagcgaggc

SEQ ID NO: 448746 - DNA, 1614 bp, Homo sapiens
  misc_feature (924)..(924): n is a, c, g, or t
  misc_feature (926)..(926): n is a, c, g, or t
agccattggtgggatgagcaatccgagttcccggatgagggaacattctgcagtataaagggagcagggaaggcgggagacagcgcagtttgaatcgcggtgcgacgaaggagtaggtggtgggatctcaccgtgggtccgattagccttttctctgccttgcttgcttgagcttcagcggaattcgaaatggctggcggtaaggctggaaaggactccggaaaggccaagacaaaggcggtttcccgctcgcagagagccggcttgcagttcccagtgggccgtattcatcgactgccgctgtgtacagcgcagccatcctggagtacctcaccgcagaggtacttgaactggcaggaaatgcatcaaaagacttaaaggtaaagcgtattacccctcgtcacttgcaacttgctattcgtggagatgaagaattggattctctcatcaaggctacaattgctggtggtggtgtcattccacacatccacaaatctctgattgggaagaaaggacaacagaagactgtctaaaggatgcctggattccttgttatctcaggactctaaatactctaacagctgtccagtgttggtgattccagtggactgtatctctgtgaaaaacacaattttgcctttttgtaattctatttgagcaagttggaagtttaattagctttccaaccaaccaaatttctgcattcgagtcttaaccatatttaagtgttactgtggcttcaaagaagctattgattctgaagtagtgggttttgattgagttgactgtttttaaaaaactgtttggattttaattgtgatgcagaagttatagtaacaaacatttggttttgtacagacattatttccactctggtggataagttcaataaaggtcatatcccaaaaaaaaaaaaaaaaaaananaaaaaaaaaaaaagaaaaaaaaaaaaacagaaacaaaaaaaacacaaacaaagcaaaaaagaaaggaatactacatcatgcagaagcacgacgggagagaggccgggacggtcggccggaggcgcggccgcgcgcgagggccgcagcctgcgcgagcacatagatgatagccgatggaggtgagagtgcgcatcgcttaccttacacagcgagacgacgcaggcaggaatcgcaaggtgacactcacccgggtgtgggatgagagcagtgagcagctgaaggtggtggtgggtagcagacatagagggcgagcggtgaacactactattgggagtagacgggttcgagcgccgtcttctcggcgagcgtcatggaacatgccgtagtcctcgcatggtattcggtgtgcgatcgagtgagacttaagataggtgggcagagatagaagtgtgatctgggatcagagccgggctcacctggatgacgacgagcgaggagaacgaagacaaagacacggagaggaggaaaaactacgcagatcacgacgagcggtggagaccgagagccggaatgcggtggcagcgagcaagagggaacagagagatgcgcgcaacgacgagggagacgggaaccagtgcggtcaccatgactgccggggcgaatgaagcagcaggagacgaagcgaggc

SEQ ID NO: 448747 - DNA, 1603 bp, Homo sapiens
  misc_feature (913)..(913): n is a, c, g, or t
  misc_feature (915)..(915): n is a, c, g, or t
agccattggtgggatgagcaatccgagttcccggatgagggaacattctgcagtataaagggagcagggaaggcgggagacagcgcagtttgaatcgcggtgcgacgaaggagtaggtggtgggatctcaccgtgggtccgattagccttttctctgccttgcttgcttgagcttcagcggaattcgaaatggctggcggtaaggctggaaaggactccggaaaggccaagacaaaggcggtttcccgctcgcagagagccggcttgcagttcccagtgggccgtattcatcgacacctaaaatctaggacgaccagtcatggacgtgtgggcgcgactgccgctgtgtacagcgcagccatcctggagtacctcaccgcagaggtacttgaactggcaggaaatgcatcaaaagacttaaaggtaaagcgtattacccctcgtcacttgcaacttgctattcgtggagatgaagaattggattctctcatcaaggctacaattgctggtggtggtgtcattccacacatccacaaatctctgattgggaagaaaggacaacagaagactgtctaaaggatgcctggattccttgttatctcaggactctaaatactctaacagctgtccagtgttggtgattccagtggactgtatctctgtgaaactttccaaccaaccaaatttctgcattcgagtcttaaccatatttaagtgttactgtggcttcaaagaagctattgattctgaagtagtgggttttgattgagttgactgtttttaaaaaactgtttggattttaattgtgatgcagaagttatagtaacaaacatttggttttgtacagacattatttccactctggtggataagttcaataaaggtcatatcccaaaaaaaaaaaaaaaaaaananaaaaaaaaaaaaagaaaaaaaaaaaaacagaaacaaaaaaaacacaaacaaagcaaaaaagaaaggaatactacatcatgcagaagcacgacgggagagaggccgggacggtcggccggaggcgcggccgcgcgcgagggccgcagcctgcgcgagcacatagatgatagccgatggaggtgagagtgcgcatcgcttaccttacacagcgagacgacgcaggcaggaatcgcaaggtgacactcacccgggtgtgggatgagagcagtgagcagctgaaggtggtggtgggtagcagacatagagggcgagcggtgaacactactattgggagtagacgggttcgagcgccgtcttctcggcgagcgtcatggaacatgccgtagtcctcgcatggtattcggtgtgcgatcgagtgagacttaagataggtgggcagagatagaagtgtgatctgggatcagagccgggctcacctggatgacgacgagcgaggagaacgaagacaaagacacggagaggaggaaaaactacgcagatcacgacgagcggtggagaccgagagccggaatgcggtggcagcgagcaagagggaacagagagatgcgcgcaacgacgagggagacgggaaccagtgcggtcaccatgactgccggggcgaatgaagcagcaggagacgaagcgaggc

SEQ ID NO: 448748 - DNA, 2265 bp, Homo sapiens
  misc_feature (1575)..(1575): n is a, c, g, or t
  misc_feature (1577)..(1577): n is a, c, g, or t
agccattggtgggatgagcaatccgagttcccggatgagggaacattctgcagtataaagggagcagggaaggcgggagacagcgcagtttgaatcgcggtgcgacgaaggagtaggtggtgggatctcaccgtgggtccgattagccttttctctgccttgcttgcttgagcttcagcggaattcgaaatggctggcggtaaggctggaaaggactccggaaaggccaagacaaaggcggtttcccgctcgcagagagccggcttgcaggtcagtagttgttcgtgcagtctgggagtcatgatgtttttctttgcatttccttttttgttattcatcgctctcgatgggcgttttgtgtatgcgtgggtgatgcggtgtcgcgacttgggctgcccatacgataaatatgggggggaggaatcacgtgtttcgatgtcgggacgcgttgctgcgcccgtgccccttgctttggcgcgcatataatttccccatctctagttctcatttttgtgcatttatgtttgtgtatgcttaaaatttaagttcccagtgggccgtattcatcgacacctaaaatctaggacgaccagtcatggacgtgtgggcgcgactgccgctgtgtacagcgcagccatcctggagtacctcaccgcagaggtaaatgggtgaacgcctataatccggagaaggtttggggggcggggaggcggcaagagggaaggaggaaagtgatgcaagaaaactcccaggccctgaacgcggcgagaggcctaagagaacgctagagggagctggtgttcaacaaggatcctactgagcttgagttctctgctcttggaattaaaattgcgtgccccctgtatatcttgccagtcagatagtgaggaacgattccagttggtagatctgcgtttgtgagggttttattctgttctctgaatcttggccaaaggaaagttggaaggcaactgacagattctgccttttaggtacttgaactggcaggaaatgcatcaaaagacttaaaggtaaagcgtattacccctcgtcacttgcaacttgctattcgtggagatgaagaattggattctctcatcaaggctacaattgctggtggtggtgtcattccacacatccacaaatctctgattgggaagaaaggacaacagaagactgtctaaaggatgcctggattccttgttatctcaggactctaaatactctaacagctgtccagtgttggtgattccagtggactgtatctctgtgaaaaacacaattttgcctttttgtaattctatttgagcaagttggaagtttaattagctttccaaccaaccaaatttctgcattcgagtcttaaccatatttaagtgttactgtggcttcaaagaagctattgattctgaagtagtgggttttgattgagttgactgtttttaaaaaactgtttggattttaattgtgatgcagaagttatagtaacaaacatttggttttgtacagacattatttccactctggtggataagttcaataaaggtcatatcccaaaaaaaaaaaaaaaaaaananaaaaaaaaaaaaagaaaaaaaaaaaaacagaaacaaaaaaaacacaaacaaagcaaaaaagaaaggaatactacatcatgcagaagcacgacgggagagaggccgggacggtcggccggaggcgcggccgcgcgcgagggccgcagcctgcgcgagcacatagatgatagccgatggaggtgagagtgcgcatcgcttaccttacacagcgagacgacgcaggcaggaatcgcaaggtgacactcacccgggtgtgggatgagagcagtgagcagctgaaggtggtggtgggtagcagacatagagggcgagcggtgaacactactattgggagtagacgggttcgagcgccgtcttctcggcgagcgtcatggaacatgccgtagtcctcgcatggtattcggtgtgcgatcgagtgagacttaagataggtgggcagagatagaagtgtgatctgggatcagagccgggctcacctggatgacgacgagcgaggagaacgaagacaaagacacggagaggaggaaaaactacgcagatcacgacgagcggtggagaccgagagccggaatgcggtggcagcgagcaagagggaacagagagatgcgcgcaacgacgagggagacgggaaccagtgcggtcaccatgactgccggggcgaatgaagcagcaggagacgaagcgaggc

SEQ ID NO: 448749 - DNA, 1498 bp, Homo sapiens
  misc_feature (808)..(808): n is a, c, g, or t
  misc_feature (810)..(810): n is a, c, g, or t
agccattggtgggatgagcaatccgagttcccggatgagggaacattctgcagtataaagggagcagggaaggcgggagacagcgcagtttgaatcgcggtgcgacgaaggagtaggtggtgggatctcaccgtgggtccgattagccttttctctgccttgcttgcttgagcttcagcggaattcgaaatggctggcggtaaggctggaaaggactccggaaaggccaagacaaaggcggtttcccgctcgcagagagccggcttgcagttcccagtgggccgtattcatcgacacctaaaatctaggacgaccagtcatggacgtgtgggcgcgactgccgctgtgtacagcgcagccatcctggagtacctcaccgcagaggtacttgaactggcaggaaatgcatcaaaagacttaaaggtaaagcgtattacccctcgtcacttgcaacttgctattcgtggagatgaagaattggattccagtggactgtatctctgtgaaaaacacaattttgcctttttgtaattctatttgagcaagttggaagtttaattagctttccaaccaaccaaatttctgcattcgagtcttaaccatatttaagtgttactgtggcttcaaagaagctattgattctgaagtagtgggttttgattgagttgactgtttttaaaaaactgtttggattttaattgtgatgcagaagttatagtaacaaacatttggttttgtacagacattatttccactctggtggataagttcaataaaggtcatatcccaaaaaaaaaaaaaaaaaaananaaaaaaaaaaaaagaaaaaaaaaaaaacagaaacaaaaaaaacacaaacaaagcaaaaaagaaaggaatactacatcatgcagaagcacgacgggagagaggccgggacggtcggccggaggcgcggccgcgcgcgagggccgcagcctgcgcgagcacatagatgatagccgatggaggtgagagtgcgcatcgcttaccttacacagcgagacgacgcaggcaggaatcgcaaggtgacactcacccgggtgtgggatgagagcagtgagcagctgaaggtggtggtgggtagcagacatagagggcgagcggtgaacactactattgggagtagacgggttcgagcgccgtcttctcggcgagcgtcatggaacatgccgtagtcctcgcatggtattcggtgtgcgatcgagtgagacttaagataggtgggcagagatagaagtgtgatctgggatcagagccgggctcacctggatgacgacgagcgaggagaacgaagacaaagacacggagaggaggaaaaactacgcagatcacgacgagcggtggagaccgagagccggaatgcggtggcagcgagcaagagggaacagagagatgcgcgcaacgacgagggagacgggaaccagtgcggtcaccatgactgccggggcgaatgaagcagcaggagacgaagcgaggc

SEQ ID NO: 448750 - DNA, 754 bp, Homo sapiens
  misc_feature (546)..(546): n is a, c, g, or t
agccattggtgggatgagcaatccgagttcccggatgagggaacattctgcagtataaagggagcagggaaggcgggagacagcgcagtttgaatcgcggtgcgacgaaggagtaggtggtgggatctcaccgtgggtccgattagccttttctctgccttgcttgcttgagcttcagcggaattcgaaatggctggcggtaaggctggaaaggactccggaaaggccaagacaaaggcggtttcccgctcgcagagagccggcttgcaggctcccagggggccgtctttaaagacacctaaaaactaggacaaccagtcatggacatctgaccgctactgccaacttttacaatacagtcatccaaggagaccaaaccggacaaagactttaacccccggcgcatgcaaaaaaagatttaaactgtcagagactcatccaaagtaagttatcaattccgatccccccccgataaagattccccctcttaaaaaccagactacaaccactaagtgggagagaagaaaaaaacctccctcccacagngccacaaacaccgcccaaacgagaaaaaacagagagtattaaaaagaatcgcaaataaaatagaccgttctcaaataaaataaaaagctcgaacaaacatcccaacctgagataatgtcaactaaaaccccaccctccacaaatcacccggtacaactctctctattctaataaatcacacctaatcaaaaacattaagcagggatac

SEQ ID NO: 448751 - DNA, 914 bp, Homo sapiens
  misc_feature (224)..(224): n is a, c, g, or t
  misc_feature (226)..(226): n is a, c, g, or t
acctttgttcacttgtttatctgctgaccttccctccactattgtcctatgaccctgctgaagtagtgggttttgattgagttgactgtttttaaaaaactgtttggattttaattgtgatgcagaagttatagtaacaaacatttggttttgtacagacattatttccactctggtggataagttcaataaaggtcatatcccaaaaaaaaaaaaaaaaaaananaaaaaaaaaaaaagaaaaaaaaaaaaacagaaacaaaaaaaacacaaacaaagcaaaaaagaaaggaatactacatcatgcagaagcacgacgggagagaggccgggacggtcggccggaggcgcggccgcgcgcgagggccgcagcctgcgcgagcacatagatgatagccgatggaggtgagagtgcgcatcgcttaccttacacagcgagacgacgcaggcaggaatcgcaaggtgacactcacccgggtgtgggatgagagcagtgagcagctgaaggtggtggtgggtagcagacatagagggcgagcggtgaacactactattgggagtagacgggttcgagcgccgtcttctcggcgagcgtcatggaacatgccgtagtcctcgcatggtattcggtgtgcgatcgagtgagacttaagataggtgggcagagatagaagtgtgatctgggatcagagccgggctcacctggatgacgacgagcgaggagaacgaagacaaagacacggagaggaggaaaaactacgcagatcacgacgagcggtggagaccgagagccggaatgcggtggcagcgagcaagagggaacagagagatgcgcgcaacgacgagggagacgggaaccagtgcggtcaccatgactgccggggcgaatgaagcagcaggagacgaagcgaggc

SEQ ID NO: 448752 - DNA, 421 bp, Homo sapiens
gaaagttggaaggcaactgacagattctgccttttaggtacttgaactggcaggaaatgcatcaaaagacttaaaggtaaagcgtattacccctcgtcacttgcaacttgctattcgtggagatgaagaattggattctctcatcaaggctacaattgctggtggtggtatgttaacttctaacattttaaaaaatttcttcagaggaaggaattttttgctgcttttaattagtttttccaggagaggaaatttaagtatattttcaatgatggaagtatggttgtatcatgaaatttgatttatatgtataactcaatgaatttttacttcatacttgagctgcatgtttttaaagatacctttcaagttgaacagtatacactttcttggtttcaaatactgtgattttttaaaaaat

SEQ ID NO: 448753 - DNA, 329 bp, Homo sapiens
ggtgcgacgaaggagtaggtggtgggatctcaccgtgggtccgattagccttttctctgccttgcttgcttgagcttcagcggaattcgaaatggtaaacttcgcagagacgctcgatgactccgcgggtttttgccggcgagagaaaaacccgttacacagagggatgggggtgaagtggcgacggttgggaacgcgcggagacaggatttagaagagtggggggaggtgttttgtcggctgctagcggagcagcctcggatctcgcggcgggcggcgacggttgggtggcgcgcgcagcgccgctgggggccggcgggcggaggcgc

SEQ ID NO: 448754 - DNA, 1074 bp, Homo sapiens
cccccccccccccccacccccacccgccgcaccacaccggccagcaagaccccgcaaacttaggctaggtacgaggcctggtgttagcggtgcgacgaaggagtaggtggtgggatctcaccgtgggtccgattagccttttctctgccttgcttgcttgagcttcagcggaattcgaaatggctggcggtaaggctggaaaggactccggaaaggccaagacaaaggcggtttcccgctcgcagagagccggcttgcagttcccagtgggccgtattcatcgacacctaaaatctaggacgaccagtcatggacgtgtgggcgcgactgccgctgtgtacagcgcagccatcctggagtacctcaccgcagaggtacttgaactggcaggaaatgcatcaaaagacttaaaggtaaagcgtattacccctcgtcacttgcaacttgctattcgtggagatgaagaattggattctctcatcaaggctacaattgctggtggtggtgtcattccacacatccacaaatctctgattgggaagaaaggacaacagaagactgtctaaaggatgcctggattccttgttatctcaggactctaaatactctaacagctgtccagtgttggtgattccagtggactgtatctctgtgaaaaacacaattttgcctttttgtaattctatttgagcaagttggaagtttaattagctttccaaccaaccaaatttctgcattcgagtcttaaccatatttaagtgttactgtggcttcaaagaagctattgattctgaagtagtgggttttgattgagttgactgtttttaaaaaactgtttggattttaattgtgatgcagaagttatagtaacaaacatttggttttgtacagacattatttccactctggtggataagttcaataaaggtcatatcccaaaacaaaaaaggggggcgcaaattcccacgggccattaccagcctcttgtaagggccaagggcgaataacagacgggggctacagcacggaagcatcgactggaccactgcgagacgacccacgccgaaattctgc

SEQ ID NO: 448755 - DNA, 1657 bp, Homo sapiens
  misc_feature (967)..(967): n is a, c, g, or t
  misc_feature (969)..(969): n is a, c, g, or t
agccattggtgggatgagcaatccgagttcccggatgagggaacattctgcagtataaagggagcagggaaggcgggagacagcgcagtttgaatcgcggtgcgacgaaggagtaggtggtgggatctcaccgtgggtccgattagccttttctctgccttgcttgcttgagcttcagcggaattcgaaatggctggcggtaaggctggaaaggactccggaaaggccaagacaaaggcggtttcccgctcgcagagagccggcttgcagttcccagtgggccgtattcatcgacacctaaaatctaggacgaccagtcatggacgtgtgggcgcgactgccgctgtgtacagcgcagccatcctggagtacctcaccgcagaggtacttgaactggcaggaaatgcatcaaaagacttaaaggtaaagcgtattacccctcgtcacttgcaacttgctattcgtggagatgaagaattggattctctcatcaaggctacaattgctggtggtggtgtcattccacacatccacaaatctctgattgggaagaaaggacaacagaagactgtctaaaggatgcctggattccttgttatctcaggactctaaatactctaacagctgtccagtgttggtgattccagtggactgtatctctgtgaaaaacacaattttgcctttttgtaattctatttgagcaagttggaagtttaattagctttccaaccaaccaaatttctgcattcgagtcttaaccatatttaagtgttactgtggcttcaaagaagctattgattctgaagtagtgggttttgattgagttgactgtttttaaaaaactgtttggattttaattgtgatgcagaagttatagtaacaaacatttggttttgtacagacattatttccactctggtggataagttcaataaaggtcatatcccaaaaaaaaaaaaaaaaaaananaaaaaaaaaaaaagaaaaaaaaaaaaacagaaacaaaaaaaacacaaacaaagcaaaaaagaaaggaatactacatcatgcagaagcacgacgggagagaggccgggacggtcggccggaggcgcggccgcgcgcgagggccgcagcctgcgcgagcacatagatgatagccgatggaggtgagagtgcgcatcgcttaccttacacagcgagacgacgcaggcaggaatcgcaaggtgacactcacccgggtgtgggatgagagcagtgagcagctgaaggtggtggtgggtagcagacatagagggcgagcggtgaacactactattgggagtagacgggttcgagcgccgtcttctcggcgagcgtcatggaacatgccgtagtcctcgcatggtattcggtgtgcgatcgagtgagacttaagataggtgggcagagatagaagtgtgatctgggatcagagccgggctcacctggatgacgacgagcgaggagaacgaagacaaagacacggagaggaggaaaaactacgcagatcacgacgagcggtggagaccgagagccggaatgcggtggcagcgagcaagagggaacagagagatgcgcgcaacgacgagggagacgggaaccagtgcggtcaccatgactgccggggcgaatgaagcagcaggagacgaagcgaggc

SEQ ID NO: 448756 - DNA, 955 bp, Homo sapiens
cccccccccccccccacccccacccgccgcaccacaccggccagcaagaccccgcaaacttaggctaggtacgaggcctggtgttagcggtgcgacgaaggagtaggtggtgggatctcaccgtgggtccgattagccttttctctgccttgcttgcttgagcttcagcggaattcgaaatggctggcggtaaggctggaaaggactccggaaaggccaagacaaaggcggtttcccgctcgcagagagccggcttgcagttcccagtgggccgtattcatcgacacctaaaatctaggacgaccagtcatggacgtgtgggcgcgactgccgctgtgtacagcgcagccatcctggagtacctcaccgcagaggtacttgaactggcaggaaatgcatcaaaagacttaaaggtaaagcgtattacccctcgtcacttgcaacttgctattcgtggagatgaagaattggattctctcatcaaggctacaattgctggtggtggtgtcattccacacatccacaaatctctgattgggaagaaaggacaacagaagactgtctaaaggatgcctggattccttgttatctcaggactctaaatactctaacagctgtccagtgttggtgattccagtggactgtatctctgtgaaaaacacaattttgcctttttgtaattctatttgagcaagttggaagtttaattagctttccaaccaaccaaatttctgcattcgagtcttaaccatatttaagtgttactgtggcttcaaagaagctattgattctgaagtagtgggttttgattgagttgactgtttttaaaaaactgtttggattttaattgtgatgcagaagttatagtaacaaacatttggttttgtacagacggatatgacctttattgaacttatccactatagtggaaataatgtctgtacaataccaagtc

SEQ ID NO: 448757 - DNA, 1642 bp, Homo sapiens
  misc_feature (952)..(952): n is a, c, g, or t
  misc_feature (954)..(954): n is a, c, g, or t
gcgcggcggggggcgaacgggcggggtcgcccctgcggcgcgccgcgggccggagaccccggcagggtgcggggacgcgctcgcggcgggacgcgccgcggtgggggatgggcgcgccgccttggtaattctatattctccgttcctcctccgctcgcgggcgtgtgcgcgccgcaggctggcggtaaggctggaaaggactccggaaaggccaagacaaaggcggtttcccgctcgcagagagccggcttgcagttcccagtgggccgtattcatcgacacctaaaatctaggacgaccagtcatggacgtgtgggcgcgactgccgctgtgtacagcgcagccatcctggagtacctcaccgcagaggtacttgaactggcaggaaatgcatcaaaagacttaaaggtaaagcgtattacccctcgtcacttgcaacttgctattcgtggagatgaagaattggattctctcatcaaggctacaattgctggtggtggtgtcattccacacatccacaaatctctgattgggaagaaaggacaacagaagactgtctaaaggatgcctggattccttgttatctcaggactctaaatactctaacagctgtccagtgttggtgattccagtggactgtatctctgtgaaaaacacaattttgcctttttgtaattctatttgagcaagttggaagtttaattagctttccaaccaaccaaatttctgcattcgagtcttaaccatatttaagtgttactgtggcttcaaagaagctattgattctgaagtagtgggttttgattgagttgactgtttttaaaaaactgtttggattttaattgtgatgcagaagttatagtaacaaacatttggttttgtacagacattatttccactctggtggataagttcaataaaggtcatatcccaaaaaaaaaaaaaaaaaaananaaaaaaaaaaaaagaaaaaaaaaaaaacagaaacaaaaaaaacacaaacaaagcaaaaaagaaaggaatactacatcatgcagaagcacgacgggagagaggccgggacggtcggccggaggcgcggccgcgcgcgagggccgcagcctgcgcgagcacatagatgatagccgatggaggtgagagtgcgcatcgcttaccttacacagcgagacgacgcaggcaggaatcgcaaggtgacactcacccgggtgtgggatgagagcagtgagcagctgaaggtggtggtgggtagcagacatagagggcgagcggtgaacactactattgggagtagacgggttcgagcgccgtcttctcggcgagcgtcatggaacatgccgtagtcctcgcatggtattcggtgtgcgatcgagtgagacttaagataggtgggcagagatagaagtgtgatctgggatcagagccgggctcacctggatgacgacgagcgaggagaacgaagacaaagacacggagaggaggaaaaactacgcagatcacgacgagcggtggagaccgagagccggaatgcggtggcagcgagcaagagggaacagagagatgcgcgcaacgacgagggagacgggaaccagtgcggtcaccatgactgccggggcgaatgaagcagcaggagacgaagcgaggc

SEQ ID NO: 448758 - DNA, 1933 bp, Homo sapiens
  misc_feature (1243)..(1243): n is a, c, g, or t
  misc_feature (1245)..(1245): n is a, c, g, or t
agccattggtgggatgagcaatccgagttcccggatgagggaacattctgcagtataaagggagcagggaaggcgggagacagcgcagtttgaatcgcggtgcgacgaaggagtaggtggtgggatctcaccgtgggtccgattagccttttctctgccttgcttgcttgagcttcagcggaattcgaaatggctggcggtaaggctggaaaggactccggaaaggccaagacaaaggcggtttcccgctcgcagagagccggcttgcaggtcagtagttgttcgtgcagtctgggagtcatgatgtttttctttgcatttccttttttgttattcatcgctctcgatgggcgttttgtgtatgcgtgggtgatgcggtgtcgcgacttgggctgcccatacgataaatatgggggggaggaatcacgtgtttcgatgtcgggacgcgttgctgcgcccgtgccccttgctttggcgcgcatataatttccccatctctagttctcatttttgtgcatttatgtttgtgtatgcttaaaatttaagttcccagtgggccgtattcatcgacacctaaaatctaggacgaccagtcatggacgtgtgggcgcgactgccgctgtgtacagcgcagccatcctggagtacctcaccgcagaggtacttgaactggcaggaaatgcatcaaaagacttaaaggtaaagcgtattacccctcgtcacttgcaacttgctattcgtggagatgaagaattggattctctcatcaaggctacaattgctggtggtggtgtcattccacacatccacaaatctctgattgggaagaaaggacaacagaagactgtctaaaggatgcctggattccttgttatctcaggactctaaatactctaacagctgtccagtgttggtgattccagtggactgtatctctgtgaaaaacacaattttgcctttttgtaattctatttgagcaagttggaagtttaattagctttccaaccaaccaaatttctgcattcgagtcttaaccatatttaagtgttactgtggcttcaaagaagctattgattctgaagtagtgggttttgattgagttgactgtttttaaaaaactgtttggattttaattgtgatgcagaagttatagtaacaaacatttggttttgtacagacattatttccactctggtggataagttcaataaaggtcatatcccaaaaaaaaaaaaaaaaaaananaaaaaaaaaaaaagaaaaaaaaaaaaacagaaacaaaaaaaacacaaacaaagcaaaaaagaaaggaatactacatcatgcagaagcacgacgggagagaggccgggacggtcggccggaggcgcggccgcgcgcgagggccgcagcctgcgcgagcacatagatgatagccgatggaggtgagagtgcgcatcgcttaccttacacagcgagacgacgcaggcaggaatcgcaaggtgacactcacccgggtgtgggatgagagcagtgagcagctgaaggtggtggtgggtagcagacatagagggcgagcggtgaacactactattgggagtagacgggttcgagcgccgtcttctcggcgagcgtcatggaacatgccgtagtcctcgcatggtattcggtgtgcgatcgagtgagacttaagataggtgggcagagatagaagtgtgatctgggatcagagccgggctcacctggatgacgacgagcgaggagaacgaagacaaagacacggagaggaggaaaaactacgcagatcacgacgagcggtggagaccgagagccggaatgcggtggcagcgagcaagagggaacagagagatgcgcgcaacgacgagggagacgggaaccagtgcggtcaccatgactgccggggcgaatgaagcagcaggagacgaagcgaggc

SEQ ID NO: 448759 - DNA, 1989 bp, Homo sapiens
  misc_feature (1299)..(1299): n is a, c, g, or t
  misc_feature (1301)..(1301): n is a, c, g, or t
agccattggtgggatgagcaatccgagttcccggatgagggaacattctgcagtataaagggagcagggaaggcgggagacagcgcagtttgaatcgcggtgcgacgaaggagtaggtggtgggatctcaccgtgggtccgattagccttttctctgccttgcttgcttgagcttcagcggaattcgaaatggctggcggtaaggctggaaaggactccggaaaggccaagacaaaggcggtttcccgctcgcagagagccggcttgcagttcccagtgggccgtattcatcgacacctaaaatctaggacgaccagtcatggacgtgtgggcgcgactgccgctgtgtacagcgcagccatcctggagtacctcaccgcagaggtaaatgggtgaacgcctataatccggagaaggtttggggggcggggaggcggcaagagggaaggaggaaagtgatgcaagaaaactcccaggccctgaacgcggcgagaggcctaagagaacgctagagggagctggtgttcaacaaggatcctactgagcttgagttctctgctcttggaattaaaattgcgtgccccctgtatatcttgccagtcagatagtgaggaacgattccagttggtagatctgcgtttgtgagggttttattctgttctctgaatcttggccaaaggaaagttggaaggcaactgacagattctgccttttaggtacttgaactggcaggaaatgcatcaaaagacttaaaggtaaagcgtattacccctcgtcacttgcaacttgctattcgtggagatgaagaattggattctctcatcaaggctacaattgctggtggtggtgtcattccacacatccacaaatctctgattgggaagaaaggacaacagaagactgtctaaaggatgcctggattccttgttatctcaggactctaaatactctaacagctgtccagtgttggtgattccagtggactgtatctctgtgaaaaacacaattttgcctttttgtaattctatttgagcaagttggaagtttaattagctttccaaccaaccaaatttctgcattcgagtcttaaccatatttaagtgttactgtggcttcaaagaagctattgattctgaagtagtgggttttgattgagttgactgtttttaaaaaactgtttggattttaattgtgatgcagaagttatagtaacaaacatttggttttgtacagacattatttccactctggtggataagttcaataaaggtcatatcccaaaaaaaaaaaaaaaaaaananaaaaaaaaaaaaagaaaaaaaaaaaaacagaaacaaaaaaaacacaaacaaagcaaaaaagaaaggaatactacatcatgcagaagcacgacgggagagaggccgggacggtcggccggaggcgcggccgcgcgcgagggccgcagcctgcgcgagcacatagatgatagccgatggaggtgagagtgcgcatcgcttaccttacacagcgagacgacgcaggcaggaatcgcaaggtgacactcacccgggtgtgggatgagagcagtgagcagctgaaggtggtggtgggtagcagacatagagggcgagcggtgaacactactattgggagtagacgggttcgagcgccgtcttctcggcgagcgtcatggaacatgccgtagtcctcgcatggtattcggtgtgcgatcgagtgagacttaagataggtgggcagagatagaagtgtgatctgggatcagagccgggctcacctggatgacgacgagcgaggagaacgaagacaaagacacggagaggaggaaaaactacgcagatcacgacgagcggtggagaccgagagccggaatgcggtggcagcgagcaagagggaacagagagatgcgcgcaacgacgagggagacgggaaccagtgcggtcaccatgactgccggggcgaatgaagcagcaggagacgaagcgaggc

SEQ ID NO: 448760 - DNA, 1596 bp, Homo sapiens
  misc_feature (906)..(906): n is a, c, g, or t
  misc_feature (908)..(908): n is a, c, g, or t
agccattggtgggatgagcaatccgagttcccggatgagggaacattctgcagtataaagggagcagggaaggcgggagacagcgcagtttgaatcgcggtgcgacgaaggagtaggtggtgggatctcaccgtgggtccgattagccttttctctgccttgcttgcttgagcttcagcggaattcgaaatggctggcggtaaggctggaaaggactccggaaaggccaagacaaaggcggtttcccgctcgcagagagccggcttgcagttcccagtgggccgtattcatcgacacctaaaatctaggacgaccagtcatggacgtgtgggcgcgactgccgctgtgtacagcgcagccatcctggagtacctcaccgcagagacttgcaacttgctattcgtggagatgaagaattggattctctcatcaaggctacaattgctggtggtggtgtcattccacacatccacaaatctctgattgggaagaaaggacaacagaagactgtctaaaggatgcctggattccttgttatctcaggactctaaatactctaacagctgtccagtgttggtgattccagtggactgtatctctgtgaaaaacacaattttgcctttttgtaattctatttgagcaagttggaagtttaattagctttccaaccaaccaaatttctgcattcgagtcttaaccatatttaagtgttactgtggcttcaaagaagctattgattctgaagtagtgggttttgattgagttgactgtttttaaaaaactgtttggattttaattgtgatgcagaagttatagtaacaaacatttggttttgtacagacattatttccactctggtggataagttcaataaaggtcatatcccaaaaaaaaaaaaaaaaaaananaaaaaaaaaaaaagaaaaaaaaaaaaacagaaacaaaaaaaacacaaacaaagcaaaaaagaaaggaatactacatcatgcagaagcacgacgggagagaggccgggacggtcggccggaggcgcggccgcgcgcgagggccgcagcctgcgcgagcacatagatgatagccgatggaggtgagagtgcgcatcgcttaccttacacagcgagacgacgcaggcaggaatcgcaaggtgacactcacccgggtgtgggatgagagcagtgagcagctgaaggtggtggtgggtagcagacatagagggcgagcggtgaacactactattgggagtagacgggttcgagcgccgtcttctcggcgagcgtcatggaacatgccgtagtcctcgcatggtattcggtgtgcgatcgagtgagacttaagataggtgggcagagatagaagtgtgatctgggatcagagccgggctcacctggatgacgacgagcgaggagaacgaagacaaagacacggagaggaggaaaaactacgcagatcacgacgagcggtggagaccgagagccggaatgcggtggcagcgagcaagagggaacagagagatgcgcgcaacgacgagggagacgggaaccagtgcggtcaccatgactgccggggcgaatgaagcagcaggagacgaagcgaggc

SEQ ID NO: 448761 - DNA, 596 bp, Homo sapiens
  misc_feature (531)..(531): n is a, c, g, or t
  misc_feature (536)..(536): n is a, c, g, or t
  misc_feature (571)..(571): n is a, c, g, or t
agccattggtgggatgagcaatccgagttcccggatgagggaacattctgcagtataaagggagcagggaaggcgggagacagcgcagtttgaatcgcggtgcgacgaaggagtaggtggtgggatctcaccgtgggtccgattagccttttctctgccttgcttgcttgagcttcagcggaattcgaaatggctggcggtaaggctggaaaggactccggaaaggccaagacaaaggcggtttcccgctcgcagagagccggcttgcagttcccagtgggccgtattcatcgacacctaaaatctaggacgaccagtcatggacgtgtgggcgcgactgccgctgtgtacagcgcagccatcctggagtacctcaccgcagaggtacttgaactggcaggaaatgcatcaaaagacttaaaggtaaagcgtattacccctcgtcacttgcaacttgctattcgtggagatgaagaattggattctctcatcaaggctacaattgctggtggtggtgtcattccacacatncacanatctctgattgggaaatactctacagctgtccatngtgtgagtccagtgaccgatctctg

SEQ ID NO: 448762 - DNA, 1119 bp, Homo sapiens
  misc_feature (429)..(429): n is a, c, g, or t
  misc_feature (431)..(431): n is a, c, g, or t
cgagctcgctacccaaatctctcattgcgcacccaactatctataaacctagccatggccatccccttatgagcgggcgcagtgattataggctttcgctctaagattaaaaatgccctagcccacttctcaccacaaggcacacctacacccctttatccccaatgagagatttaaatctctcattgcgaaatctctcttgcaaatctctcattgcgaaccatatttaagtgttactgtggcttcaaagaagctattgattctgaagtagtgggttttgattgagttgactgtttttaaaaaactgtttggattttaattgtgatgcagaagttatagtaacaaacatttggttttgtacagacattatttccactctggtggataagttcaataaaggtcatatcccaaaaaaaaaaaaaaaaaaananaaaaaaaaaaaaagaaaaaaaaaaaaacagaaacaaaaaaaacacaaacaaagcaaaaaagaaaggaatactacatcatgcagaagcacgacgggagagaggccgggacggtcggccggaggcgcggccgcgcgcgagggccgcagcctgcgcgagcacatagatgatagccgatggaggtgagagtgcgcatcgcttaccttacacagcgagacgacgcaggcaggaatcgcaaggtgacactcacccgggtgtgggatgagagcagtgagcagctgaaggtggtggtgggtagcagacatagagggcgagcggtgaacactactattgggagtagacgggttcgagcgccgtcttctcggcgagcgtcatggaacatgccgtagtcctcgcatggtattcggtgtgcgatcgagtgagacttaagataggtgggcagagatagaagtgtgatctgggatcagagccgggctcacctggatgacgacgagcgaggagaacgaagacaaagacacggagaggaggaaaaactacgcagatcacgacgagcggtggagaccgagagccggaatgcggtggcagcgagcaagagggaacagagagatgcgcgcaacgacgagggagacgggaaccagtgcggtcaccatgactgccggggcgaatgaagcagcaggagacgaagcgaggc

SEQ ID NO: 448763 - DNA, 3927 bp, Homo sapiens
gcgtcttcagtatttaatgtctctgtgttccacccgcctgggctagcacgtgggggagctgcggaagcgcggcgctgcgggccgggccgcggggcacagccgggggccggcggcggcgcgcggactccgcatcccgcaccccgatggtagccgaggagctggtgtaattacttcaagcctccaggatggcaatccagttccgttcgctcttccccttggcattgcctgggatgctggcgctcctcggctggtggtggtttttctctcgtaaaaaaggccatgtcagcagccatgatgagcagcaggtggaggctggtgctgtgcagctgagggctgaccctgccatcaaggaacctctccccgtggaagacgtctgtcccaaagtagtgtccacaccccccagtgtcacagagcctccagaaaaggaactgtccaccgtgagcaagctgcctgcagagcccccagcattgctccagacacacccaccttgccgaagatcagagtcctcgggcattcttcctaacaccacagacatgagattgcgaccaggaacacgcagagatgacagtacaaagctggagctagccctgacaggtggtgaagccaaatcgattcctctagagtgccccctttcatccccaaagggtgtactattctccagcaaatcagctgaggtgtgtaagcaagattcccccttcagcagggtgccaaggaaggtccagccaggctaccccgtagtccccgcagagaagcgtagctctggggagagggcaagagagacaggtggggccgaagggactggtgatgccgtgttgggggaaaaggtgcttgaagaagctctgttgtctcgggagcatgtcttggaattggagaacagcaagggccccagcctggcctctttagagggggaagaagataaggggaagagcagctcatcccaggtggtggggccagtgcaggaggaagagtatgtagcagagaagttgccaagtaggttcatcgagtcggctcacacagagctggcaaaggacgatgcggcgccagcacccccagtcgcagacgccaaagcccaggacagaggtgtcgagggagaactgggcaatgaggagagcttggatagaaatgaggagggcttggatagaaatgaggagggcttggatagaaatgaggagagcttggatagaaatgaggagggcttggatagaaatgaggagattaagcgggctgccttccagataatctcccaagtgatctcagaagcaaccgaacaggtgctggccaccacggttggcaaggttgcaggtcgtgtgtgtcaggccagtcagctccaagggcagaaggaagagagctgtgtcccagttcaccagaaaactgtcttgggcccagacactgcggagcctgccacagcagaggcagctgttgccccgccggatgctggcctccccttgccaggcctaccagcagagggctcaccaccaccaaagacctacgtgagctgcctgaagagccttctgtccagccccaccaaggacagtaagccaaatatctctgcacaccacatctccctggcctcctgcctggcactgaccacccccagtgaagagttgccggaccgggcaggcatcctggtggaagatgccacctgtgtcacctgcatgtcagacagcagccaaagtgtccctttggtggcttctccaggacactgctcagattctttcagcacttcagggcttgaagactcttgcacagagaccagctcgagccccagggacaaggccatcaccccgccactgccagaaagtactgtgcccttcagcaatggggtgctgaagggggagttgtcagacttgggggctgaggatggatggaccatggatgcggaagcagatcattcaggaggttctgacaggaacagcatggattccgtggatagctgttgcagtctcaagaagactgagagcttccaaaatgcccaggcaggctccaaccctaagaaggtcgacctcatcatctgggagatcgaggtgccaaagcacttagtcggtcggctaattggcaagcaggggcgctatgtgagttttctgaagcaaacatctggtgccaagatctacatttcaaccctgccttacacccagagcgtccagatctgccacatagaaggctctcaacatcatgtagacaaagcgctgaacttgattgggaagaagttcaaagagctgaacctcaccaatatctacgctcccccattgccttcactggcactgccttctctgccgatgacatcctggctcatgctgcctgatggcatcaccgtggaggtcattgtggtcaaccaggtcaatgccgggcacctgttcgtgcagcagcacacacaccctaccttccacgcgctgcgcagcctcgaccagcagatgtacctctgttactctcagcctggaatccccaccttgcccaccccagtggaaataacggtcatctgtgccgcccctggtgcggacggggcctggtggcgagcccaagtggttgcctcctacgaggagaccaacgaagtggagattcgatacgtggactacggcggatataagagggtgaaagtagacgtgctccggcaaatcaggtctgactttgtcaccctgccgtttcagggagcagaagtccttctggacagtgtgatgcccctgtcagacgatgaccagttttcaccggaagcagatgccgccatgagcgagatgacggggaatacagcactgcttgctcaggtgacaagttacagtccaactggtcttcctctgattcagctgtggagtgtggttggagatgaagtggtgttgataaaccggtccctggtggagcgaggccttgcccagtgggtagacagctactacacaagcctttgacccccatgctgcttcctgagagtctttttttgcactgttgaaattgggcttggcactcaagtcaaagatgaacatcggaataacaaacattgtcctctccagaaagtcctttctttctccatactgtagtcctattgagaagacatttcgtctctgagaaaaaaggatggaactatgggttctcttcgcaaagccaaaggatagtgtttaacaagccagctggcttatcctggttctcagctgtttaaaaaaaaaaaaaaaaaggaatagaaacagtttcaaccagattgtcctattccccctgttccattcccctcttcttccttctatctccttccccggcaaaaaccaaacaaactggcagacaggccagggatgtatgttgcttgcttgagagggtttcttttacttcaaaatctttcttcagggagcaagacatgaactgactaattggtatccactacttgtacagcttacataaatgagttgatgatatttaaccagtttttataaacttcatttaggtctctaaacacagactttttaaattgcaactgtaaatatgaaatggtcatcacatctgaccttggtcagtggggaggggaactggtatcctgccaagcctggttgtaatttgtaaccattttctatttgtgcaaactctgtaaatatgtgtttaaacaaatgtaatattttgtacaagatacactggagaacaaagggaactcaagattcttccagccacatgtcacctgtaggtagaagtaaactctgcagtgcagcttctgctcttggcccctctggccagggcccctgtggcttcctgcacactggacaggtgactgtatggtagagactgtgatctgggaactttttgctgtacaaatctgtttaaaaaaaaaaaaagtaactcattgaattaacttgcagtggtgtgtttgattcttttttagactggcttcagcattgtgcagtttaaaaataagtaagtaacttacataaatcttcaattgtatgaactgcaaaaaaa

SEQ ID NO: 448764 - DNA, 4058 bp, Homo sapiens
actgtgacttacacaggcccctgaggatgaaggtaacagtcctgtgagcactgaggctgggctgggaccaacacctgagccatggctccagcactctgattcctggcccagccatgctgctgagggtgcacagcccaggcctaccatcgcccccacccttggtggcagaaccgagcactacccagcaaggtgtaattacttcaagcctccaggatggcaatccagttccgttcgctcttccccttggcattgcctgggatgctggcgctcctcggctggtggtggtttttctctcgtaaaaaaggccatgtcagcagccatgatgagcagcaggtggaggctggtgctgtgcagctgagggctgaccctgccatcaaggaacctctccccgtggaagacgtctgtcccaaagtagtgtccacaccccccagtgtcacagagcctccagaaaaggaactgtccaccgtgagcaagctgcctgcagagcccccagcattgctccagacacacccaccttgccgaagatcagagtcctcgggcattcttcctaacaccacagacatgagattgcgaccaggaacacgcagagatgacagtacaaagctggagctagccctgacaggtggtgaagccaaatcgattcctctagagtgccccctttcatccccaaagggtgtactattctccagcaaatcagctgaggtgtgtaagcaagattcccccttcagcagggtgccaaggaaggtccagccaggctaccccgtagtccccgcagagaagcgtagctctggggagagggcaagagagacaggtggggccgaagggactggtgatgccgtgttgggggaaaaggtgcttgaagaagctctgttgtctcgggagcatgtcttggaattggagaacagcaagggccccagcctggcctctttagagggggaagaagataaggggaagagcagctcatcccaggtggtggggccagtgcaggaggaagagtatgtagcagagaagttgccaagtaggttcatcgagtcggctcacacagagctggcaaaggacgatgcggcgccagcacccccagtcgcagacgccaaagcccaggacagaggtgtcgagggagaactgggcaatgaggagagcttggatagaaatgaggagggcttggatagaaatgaggagggcttggatagaaatgaggagagcttggatagaaatgaggagggcttggatagaaatgaggagattaagcgggctgccttccagataatctcccaagtgatctcagaagcaaccgaacaggtgctggccaccacggttggcaaggttgcaggtcgtgtgtgtcaggccagtcagctccaagggcagaaggaagagagctgtgtcccagttcaccagaaaactgtcttgggcccagacactgcggagcctgccacagcagaggcagctgttgccccgccggatgctggcctccccttgccaggcctaccagcagagggctcaccaccaccaaagacctacgtgagctgcctgaagagccttctgtccagccccaccaaggacagtaagccaaatatctctgcacaccacatctccctggcctcctgcctggcactgaccacccccagtgaagagttgccggaccgggcaggcatcctggtggaagatgccacctgtgtcacctgcatgtcagacagcagccaaagtgtccctttggtggcttctccaggacactgctcagattctttcagcacttcagggcttgaagactcttgcacagagaccagctcgagccccagggacaaggccatcaccccgccactgccagaaagtactgtgcccttcagcaatggggtgctgaagggggagttgtcagacttgggggctgaggatggatggaccatggatgcggaagcagatcattcaggagttgcagctccacccccgggaaagcggggcactttgataacgaggtgtcctgggtttttcgagtgctgaccccagcgtagacagttcagaccgctaacttacaggttctgacaggaacagcatggattccgtggatagctgttgcagtctcaagaagactgagagcttccaaaatgcccaggcaggctccaaccctaagaaggtcgacctcatcatctgggagatcgaggtgccaaagcacttagtcggtcggctaattggcaagcaggggcgctatgtgagttttctgaagcaaacatctggtgccaagatctacatttcaaccctgccttacacccagagcgtccagatctgccacatagaaggctctcaacatcatgtagacaaagcgctgaacttgattgggaagaagttcaaagagctgaacctcaccaatatctacgctcccccattgccttcactggcactgccttctctgccgatgacatcctggctcatgctgcctgatggcatcaccgtggaggtcattgtggtcaaccaggtcaatgccgggcacctgttcgtgcagcagcacacacaccctaccttccacgcgctgcgcagcctcgaccagcagatgtacctctgttactctcagcctggaatccccaccttgcccaccccagtggaaataacggtcatctgtgccgcccctggtgcggacggggcctggtggcgagcccaagtggttgcctcctacgaggagaccaacgaagtggagattcgatacgtggactacggcggatataagagggtgaaagtagacgtgctccggcaaatcaggtctgactttgtcaccctgccgtttcagggagcagaagtccttctggacagtgtgatgcccctgtcagacgatgaccagttttcaccggaagcagatgccgccatgagcgagatgacggggaatacagcactgcttgctcaggtgacaagttacagtccaactggtcttcctctgattcagctgtggagtgtggttggagatgaagtggtgttgataaaccggtccctggtggagcgaggccttgcccagtgggtagacagctactacacaagcctttgacccccatgctgcttcctgagagtctttttttgcactgttgaaattgggcttggcactcaagtcaaagatgaacatcggaataacaaacattgtcctctccagaaagtcctttctttctccatactgtagtcctattgagaagacatttcgtctctgagaaaaaaggatggaactatgggttctcttcgcaaagccaaaggatagtgtttaacaagccagctggcttatcctggttctcagctgtttaaaaaaaaaaaaaaaaaggaatagaaacagtttcaaccagattgtcctattccccctgttccattcccctcttcttccttctatctccttccccggcaaaaaccaaacaaactggcagacaggccagggatgtatgttgcttgcttgagagggtttcttttacttcaaaatctttcttcagggagcaagacatgaactgactaattggtatccactacttgtacagcttacataaatgagttgatgatatttaaccagtttttataaacttcatttaggtctctaaacacagactttttaaattgcaactgtaaatatgaaatggtcatcacatctgaccttggtcagtggggaggggaactggtatcctgccaagcctggttgtaatttgtaaccattttctatttgtgcaaactctgtaaatatgtgtttaaacaaatgtaatattttgtacaagatacactggagaacaaagggaactcaagattcttccagccacatgtcacctgtaggtagaagtaaactctgcagtgcagcttctgctcttggcccctctggccagggcccctgtggcttcctgcacactggacaggtgactgtatggtagagactgtgatctgggaactttttgctgtacaaatctgtttaaaaaaaaaaaaagtaactcattgaattaacttgcagtggtgtgtttgattcttttttagactggcttcagcattgtgcagtttaaaaataagtaagtaacttacataaatcttcaattgtatgaactgcaaaaaaa

SEQ ID NO: 448765 - DNA, 3787 bp, Homo sapiens
gcgtcttcagtatttaatgtctctgtgttccacccgcctgggctagcacgtgggggagctgcggaagcgcggcgctgcgggccgggccgcggggcacagccgggggccggcggcggcgcgcggactccgcatcccgcaccccgatggtagccgaggagctggtgtaattacttcaagcctccaggatggcaatccagttccgttcgctcttccccttggcattgcctgggatgctggcgctcctcggctggtggtggtttttctctcgtaaaaaaggccatgtcagcagccatgatgagcagcaggtggaggctggtgctgtgcagctgagggctgaccctgccatcaaggaacctctccccgtggaagacgtctgtcccaaagtagtgtccacaccccccagtgtcacagagcctccagaaaaggaactgtccaccgtgagcaagctgcctgcagagcccccagcattgctccagacacacccaccttgccgaagatcagagtcctcgggcattcttcctaacaccacagacatgagattgcgaccaggaacacgcagagatgacagtacaaagctggagctagccctgacaggtggtgaagccaaatcgattcctctagagtgccccctttcatccccaaagggtgtactattctccagcaaatcagctgaggtgtgtaagcaagattcccccttcagcagggtgccaaggaaggtccagccaggctaccccgtagtccccgcagagaagcgtagctctggggagagggcaagagagacaggtggggccgaagggactggtgatgccgtgttgggggaaaaggtgcttgaagaagctctgttgtctcgggagcatgtcttggaattggagaacagcaagggccccagcctggcctctttagagggggaagaagataaggggaagagcagctcatcccaggtggtggggccagtgcaggaggaagagtatgtagcagagaagttgccaagtaggttcatcgagtcggctcacacagagctggcaaaggacgatgcggcgccagcacccccagtcgcagacgccaaagcccaggacagaggtgtcgagggagaactgggcaatgaggagagcttggatagaaatgaggagggcttggatagaaatgaggagggcttggatagaaatgaggagagcttggatagaaatgaggagggcttggatagaaatgaggagattaagcgggctgccttccagataatctcccaagtgatctcagaagcaaccgaacaggtgctggccaccacggttggcaaggttgcaggtcgtgtgtgtcaggccagtcagctccaagggcagaaggaagagagctgtgtcccagttcaccagaaaactgtcttgggcccagacactgcggagcctgccacagcagaggcagctgttgccccgccggatgctggcctccccttgccaggcctaccagcagagggctcaccaccaccaaagacctacgtgagctgcctgaagagccttctgtccagccccaccaaggacagtaagccaaatatctctgcacaccacatctccctggcctcctgcctggcactgaccacccccagtgaagagttgccggaccgggcaggcatcctggtggaagatgccacctgtgtcacctgcatgtcagacagcagccaaagtgtccctttggtggcttctccaggacactgctcagattctttcagcacttcagggcttgaagactcttgcacagagaccagctcgagccccagggacaaggccatcaccccgccactgccagaaagtactgtgcccttcagcaatggggtgctgaagggggagttgtcagacttgggggctgaggatggatggaccatggatgcggaagcagatcattcaggaggttctgacaggaacagcatggattccgtggatagctgttgcagtctcaagaagactgagagcttccaaaatgcccaggcaggctccaaccctaagaaggtcgacctcatcatctgggagatcgaggtgccaaagcacttagtcggtcggctaattggcaagcaggggcgctatgtgagttttctgaagcaaacatctggtgccaagatctacatttcaaccctgccttacacccagagcgtccagatctgccacatagaaggctctcaacatcatgtagacaaagcgctgaacttgattgggaagaagttcaaagagctgaacctcaccaatatctacgctcccccattgccttcactggcactgccttctctgccgatgacatcctggctcatgctgcctgatggcatcaccgtggaggtcattgtggtcaaccaggtcaatgccgggcacctgttcgtgcagcagcacacacaccctaccttccacgcgctgcgcagcctcgaccagcagatgtacctctgttactctcagcctggaatccccaccttgcccaccccagtggaaataacggtcatctgtgccgcccctggtgcggacggggcctggtggcgagcccaagtggttgcctcctacgaggagaccaacgaagtggagattcgatacgtggactacggcggatataagagggtgaaagtagacgtgctccggcaaatcaggtctgactttgtcaccctgccgtttcagggagcagaagtccttctggacagtgtgatgcccctgtcagacgatgaccagttttcaccggaagcagatgccgccatgagcgagatgacggggaatacagcactgcttgctcaggtgacaagttacagtccaactggtcttcctctgattcagctgtggagtgtggttggagatgaagtggtgttgataaaccggtccctggtggagcgaggccttgcccagtgggtagacagctactacacaagcctttgacccccatgctgcttcctgagagtctttttttgcactgttgaaattgggcttggcactcaagtcaaagatgaacatcggaataacaaacattgtcctctccagaaagtcctttctttctccatactgtagtcctattgagaagacatttcgtctctgagaaaaaaggatggaactatgggttctcttcgcaaagccaaaggatagtgtttaacaagccagctggcttatcctggttctcagctgtttaaaaaaaaaaaaaaaaaggaatagaaacagtttcaaccagattgtcctattccccctgttccattcccctcttcttccttctatctccttccccggcaaaaaccaaacaaactggcagacaggccagggatgtatgttgcttgcttgagagggtttcttttacttcaaaatctttcttcagggagcaagacatgaactgactaattggtatccactacttgtacagcttacataaatgagttgatgatatttaaccattttctatttgtgcaaactctgtaaatatgtgtttaaacaaatgtaatattttgtacaagatacactggagaacaaagggaactcaagattcttccagccacatgtcacctgtaggtagaagtaaactctgcagtgcagcttctgctcttggcccctctggccagggcccctgtggcttcctgcacactggacaggtgactgtatggtagagactgtgatctgggaactttttgctgtacaaatctgtttaaaaaaaaaaaaagtaactcattgaattaacttgcagtggtgtgtttgattcttttttagactggcttcagcattgtgcagtttaaaaataagtaagtaacttacataaatcttcaattgtatgaactgcaaaaaaa

SEQ ID NO: 448766 - DNA, 4809 bp, Homo sapiens
actgtgacttacacaggcccctgaggatgaaggtaacagtcctgtgagcactgaggctgggctgggaccaacacctgagccatggctccagcactctgattcctggcccagccatgctgctgagggtgcacagcccaggcctaccatcgcccccacccttggtggcagaaccgagcactacccagcaaggtgtaattacttcaagcctccaggatggcaatccagttccgttcgctcttccccttggcattgcctgggatgctggcgctcctcggctggtggtggtttttctctcgtaaaaaaggccatgtcagcagccatgatgagcagcaggtggaggctggtgctgtgcagctgagggctgaccctgccatcaaggaacctctccccgtggaagacgtctgtcccaaagtagtgtccacaccccccagtgtcacagagcctccagaaaaggaactgtccaccgtgagcaagctgcctgcagagcccccagcattgctccagacacacccaccttgccgaagatcagagtcctcgggcattcttcctaacaccacagacatgagattgcgaccaggaacacgcagagatgacagtacaaagctggagctagccctgacaggtggtgaagccaaatcgattcctctagagtgccccctttcatccccaaagggtgtactattctccagcaaatcagctgaggtgtgtaagcaagattcccccttcagcagggtgccaaggaaggtccagccaggctaccccgtagtccccgcagagaagcgtagctctggggagagggcaagagagacaggtggggccgaagggactggtgatgccgtgttgggggaaaaggtgcttgaagaagctctgttgtctcgggagcatgtcttggaattggagaacagcaagggccccagcctggcctctttagagggggaagaagataaggggaagagcagctcatcccaggtggtggggccagtgcaggaggaagagtatgtagcagagaagttgccaagtaggttcatcgagtcggctcacacagagctggcaaaggacgatgcggcgccagcacccccagtcgcagacgccaaagcccaggacagaggtgtcgagggagaactgggcaatgaggagagcttggatagaaatgaggagggcttggatagaaatgaggagggcttggatagaaatgaggagagcttggatagaaatgaggagggcttggatagaaatgaggagattaagcgggctgccttccagataatctcccaagtgatctcagaagcaaccgaacaggtgctggccaccacggttggcaaggttgcaggtcgtgtgtgtcaggccagtcagctccaagggcagaaggaagagagctgtgtcccagttcaccagaaaactgtcttgggcccagacactgcggagcctgccacagcagaggcagctgttgccccgccggatgctggcctccccttgccaggcctaccagcagagggctcaccaccaccaaagacctacgtgagctgcctgaagagccttctgtccagccccaccaaggacagtaagccaaatatctctgcacaccacatctccctggcctcctgcctggcactgaccacccccagtgaagagttgccggaccgggcaggcatcctggtggaagatgccacctgtgtcacctgcatgtcagacagcagccaaagtgtccctttggtggcttctccaggacactgctcagattctttcagcacttcagggcttgaagactcttgcacagagaccagctcgagccccagggacaaggccatcaccccgccactgccagaaagtactgtgcccttcagcaatggggtgctgaagggggagttgtcagacttgggggctgaggatggatggaccatggatgcggaagcagatcattcaggagttgcagctccacccccgggaaagcggggcactttgataacgaggtgtcctgggtttttcgagtgctgaccccagcgtagacagttcagaccgctaacttacaggttctgacaggaacagcatggattccgtggatagctgttgcagtctcaagaagactgagagcttccaaaatgcccaggcaggctccaaccctaagaaggtcgacctcatcatctgggagatcgaggtgccaaagcacttagtcggtcggctaattggcaagcaggggcgctatgtgagttttctgaagcaaacatctggtgccaagatctacatttcaaccctgccttacacccagagcgtccagatctgccacatagaaggctctcaacatcatgtagacaaagcgctgaacttgattgggaagaagttcaaagagctgaacctcaccaatatctacgctcccccattgccttcactggcactgccttctctgccgatgacatcctggctcatgctgcctgatggcatcaccgtggaggtcattgtggtcaaccaggtcaatgccgggcacctgttcgtgcagcagcacacacaccctaccttccacgcgctgcgcagcctcgaccagcagatgtacctctgttactctcagcctggaatccccaccttgcccaccccagtggaaataacggtcatctgtgccgcccctggtgcggacggggcctggtggcgagcccaagtggttgcctcctacgaggagaccaacgaagtggagattcgatacgtggactacggcggatataagagggtgaaagtagacgtgctccggcaaatcaggtctgactttgtcaccctgccgtttcagggagcagaagtccttctggacagtgtgatgcccctgtcagacgatgaccagttttcaccggaagcagatgccgccatgagcgagatgacggggaatacagcactgcttgctcaggtgacaagttacagtccaactggtcttcctctgattcagctgtggagtgtggttggagatgaagtggtgttgataaaccggtccctggtggagcgaggccttgcccagtgggtagacagctactacacaagcctttgacccccatgctgcttcctgagagtctttttttgcactgttgaaattgggcttggcactcaagtcaaagatgaacatcggaataacaaacattgtcctcctttttctgttccaggatcaaatcccagctaccacactgcatttagtcatcaaatcaccctagttttctctggtctctgatatttcctcagtcttttcttgtttttttgtttgtttgattgtttgttttttgtttttttttttttcatgaccctgacagttttgaagagtctggtcaggtaccctataaaaattttcccagtctgaggtttatctgatgttttcccctcataattaggctcaaattaggggtgttttgaaagactaccctagaggtgatgtgtccttcttatcatatcatatcaggggtttttgataggtagccacatgccattactggagatgttaaccttcatcacttagttccggtagtgcttgcttaatttctcccctataaagttactatttttccttcttcatattttatgctttagaagcagagcactaagtctacccaaccttcaaggagaagggggaaagggaactcagccgcatctcccggaaaggggaacagccacatttattatttgaaattctcctgtatggaagatttgcccattattcctcacttatctctttattcaaacatttatttatttatatcagtacaaactcatggataattatatcatactttgtgtaataatccaaatactacgttatttattttattgttcaatttgttccagctttggctggtgggagctctttcaggttggctcctatattcctttgatatacccgtatcctttttttgagcactatcttactctctgccactacaagatgctgtacgctcaccttgtatttttccttccccagtgctagaatcagccatttctccaaggactctggctcctcttgttggagaatgatattagaaaccaagatttgtgccctgagtgttctaattgctagcaaggtgtcattgactctaggccctctcagttaacatagctaagaaatgcatgatttgtgtgaactaaccaatatatatacacatatctataaatatttatatatctatccatctgtatctacattaaactaaacatgagtttgtactaatacactgccacagggctcactgagtcacatttttaaaagatcgctccaaaaatattttataaaacaacagcaacaaaaagggataactaactgttccaagagtggaggcagtgagaccagtttaggctgttgtcatctaggcaagagatgatataggtttgaattaggatggtaacaaacaacaaggaggagatggagctgattccagacagactttgaagatacagctggtaggatttgatggtagtttggatatgaagtaggggtaggagaatgaggggaaatagaaggatgaaggacaactcatggattggaggtctgaaggaaatgtgtgcactgtgatgccatttgctgaggtggggaatactagggaaggcgcagctttggaggggaggatacagacatcaaaagttctgtttttatcttgctaagtttgagaagctctttagacaaggtgacaagtcaaatgagcgggcacacctaggagtgtggagctcctgcgaggagtctggactagagatataaattatagtgttatcagcatacagatggtaattgaagccagggggctagatgtgataacccagggagaaggcaagagtgatgacaaaaaaaaa

SEQ ID NO: 448767 - DNA, 3284 bp, Homo sapiens
actgtgacttacacaggcccctgaggatgaaggtaacagtcctgtgagcactgaggctgggctgggaccaacacctgagccatggctccagcactctgattcctggcccagccatgctgctgagggtgcacagcccaggcctaccatcgcccccacccttggtggcagaaccgagcactacccagcaaggtgtaattacttcaagcctccaggatggcaatccagttccgttcgctcttccccttggcattgcctgggatgctggcgctcctcggctggtggtggtttttctctcgtaaaaaaggccatgtcagcagccatgatgagcagcaggtggaggctggtgctgtgcagctgagggctgaccctgccatcaaggaacctctccccgtggaagacgtctgtcccaaagtagtgtccacaccccccagtgtcacagagcctccagaaaaggaactgtccaccgtgagcaagctgcctgcagagcccccagcattgctccagacacacccaccttgccgaagatcagagtcctcgggcattcttcctaacaccacagacatgagattgcgaccaggaacacgcagagatgacagtacaaagctggagctagccctgacaggtggtgaagccaaatcgattcctctagagtgccccctttcatccccaaagggtgtactattctccagcaaatcagctgaggtgtgtaagcaagattcccccttcagcagggtgccaaggaaggtccagccaggctaccccgtagtccccgcagagaagcgtagctctggggagagggcaagagagacaggtggggccgaagggactggtgatgccgtgttgggggaaaaggtgcttgaagaagctctgttgtctcgggagcatgtcttggaattggagaacagcaagggccccagcctggcctctttagagggggaagaagataaggggaagagcagctcatcccaggtggtggggccagtgcaggaggaagagtatgtagcagagaagttgccaagtaggttcatcgagtcggctcacacagagctggcaaaggacgatgcggcgccagcacccccagtcgcagacgccaaagcccaggacagaggtgtcgagggagaactgggcaatgaggagagcttggatagaaatgaggagggcttggatagaaatgaggagggcttggatagaaatgaggagagcttggatagaaatgaggagggcttggatagaaatgaggagattaagcgggctgccttccagataatctcccaagtgatctcagaagcaaccgaacaggtgctggccaccacggttggcaaggttgcaggtcgtgtgtgtcaggccagtcagctccaagggcagaaggaagagagctgtgtcccagttcaccagaaaactgtcttgggcccagacactgcggagcctgccacagcagaggcagctgttgccccgccggatgctggcctccccttgccaggcctaccagcagagggctcaccaccaccaaagacctacgtgagctgcctgaagagccttctgtccagccccaccaaggacagtaagccaaatatctctgcacaccacatctccctggcctcctgcctggcactgaccacccccagtgaagagttgccggaccgggcaggcatcctggtggaagatgccacctgtgtcacctgcatgtcagacagcagccaaagtgtccctttggtggcttctccaggacactgctcagattctttcagcacttcagggcttgaagactcttgcacagagaccagctcgagccccagggacaaggccatcaccccgccactgccagaaagtactgtgcccttcagcaatggggtgctgaagggggagttgtcagacttgggggctgaggatggatggaccatggatgcggaagcagatcattcaggagttgcagctccacccccgggaaagcggggcactttgataacgaggtgtcctgggtttttcgagtgctgaccccagcgtagacagttcagaccgctaacttacaggttctgacaggaacagcatggattccgtggatagctgttgcagtctcaagaagactgagagcttccaaaatgcccaggcaggctccaaccctaagaaggtcgacctcatcatctgggagatcgaggtgccaaagcacttagtcggtcggctaattggcaagcaggggcgctatgtgagttttctgaagcaaacatctggtgccaagatctacatttcaaccctgccttacacccagagcgtccagatctgccacatagaaggctctcaacatcatgtagacaaagcgctgaacttgattgggaagaagttcaaagagctgaacctcaccaatatctacgctcccccattgccttcactggcactgccttctctgccgatgacatcctggctcatgctgcctgatggcatcaccgtggaggtcattgtggtcaaccaggtcaatgccgggcacctgttcgtgcagcagcacacacaccctaccttccacgcgctgcgcagcctcgaccagcagatgtacctctgttactctcagcctggaatccccaccttgcccaccccagtggaaataacggtcatctgtgccgcccctggtgcggacggggcctggtggcgagcccaagtggttgcctcctacgaggagaccaacgaagtggagattcgatacgtggactacggcggatataagagggtgaaagtagacgtgctccggcaaatcaggtctgactttgtcaccctgccgtttcagggagcagaagtccttctggacagtgtgatgcccctgtcagacgatgaccagttttcaccggaagcagatgccgccatgagcgagatgacggggaatacagcactgcttgctcaggtgacaagttacagtccaactggtcttcctctgattcagctgtggagtgtggttggagatgaagtggtgttgataaaccggtccctggtggagcgaggccttgcccagtgggtagacagctactacacaagccatatatagacaccaccatagacatagagtgtcattagagaagtagttttctaatcgcacattgtgtgcaaaattgcgcgcctcttggcactacaagtcctaagatgacaccattcaggaacaacacaaccagtgcgtcctctcccagcaagtccctatcatctatcgtccatagcatgtaagtcctattgacgagaagtgttctgtctctagagacaaaaatggattggaacatagtacgttcatactgggcaaatgacca

SEQ ID NO: 448768 - DNA, 2924 bp, Homo sapiens
actgtgacttacacaggcccctgaggatgaaggtaacagtcctgtgagcactgaggctgggctgggaccaacacctgagccatggctccagcactctgattcctggcccagccatgctgctgagggtgcacagcccaggcctaccatcgcccccacccttggtggcagaaccgagcactacccagcaaggtgtaattacttcaagcctccaggatggcaatccagttccgttcgctcttccccttggcattgcctgggatgctggcgctcctcggctggtggtggtttttctctcgtaaaaaaggccatgtcagcagccatgatgagcagcaggtggaggctggtgctgtgcagctgagggctgaccctgccatcaaggaacctctccccgtggaagacgtctgtcccaaagtagtgtccacaccccccagtgtcacagagcctccagaaaaggaactgtccaccgtgagcaagctgcctgcagagcccccagcattgctccagacacacccaccttgccgaagatcagagtcctcgggcattcttcctaacaccacagacatgagattgcgaccaggaacacgcagagatgacagtacaaagctggagctagccctgacaggtggtgaagccaaatcgattcctctagagtgccccctttcatccccaaagggtgtactattctccagcaaatcagctgaggtgtgtaagcaagattcccccttcagcagggtgccaaggaaggtccagccaggctaccccgtagtccccgcagagaagcgtagctctggggagagggcaagagagacaggtggggccgaagggactggtgatgccgtgttgggggaaaaggtgcttgaagaagctctgttgtctcgggagcatgtcttggaattggagaacagcaagggccccagcctggcctctttagagggggaagaagataaggggaagagcagctcatcccaggtggtggggccagtgcaggaggaagagtatgtagcagagaagttgccaagtaggttcatcgagtcggctcacacagagctggcaaaggacgatgcggcgccagcacccccagtcgcagacgccaaagcccaggacagaggtgtcgagggagaactgggcaatgaggagagcttggatagaaatgaggagggcttggatagaaatgaggagggcttggatagaaatgaggagagcttggatagaaatgaggagggcttggatagaaatgaggagattaagcgggctgccttccagataatctcccaagtgatctcagaagcaaccgaacaggtgctggccaccacggttggcaaggttgcaggtcgtgtgtgtcaggccagtcagctccaagggcagaaggaagagagctgtgtcccagttcaccagaaaactgtcttgggcccagacactgcggagcctgccacagcagaggcagctgttgccccgccggatgctggcctccccttgccaggcctaccagcagagggctcaccaccaccaaagacctacgtgagctgcctgaagagccttctgtccagccccaccaaggacagtaagccaaatatctctgcacaccacatctccctggcctcctgcctggcactgaccacccccagtgaagagttgccggaccgggcaggcatcctggtggaagatgccacctgtgtcacctgcatgtcagacagcagccaaagtgtccctttggtggcttctccaggacactgctcagattctttcagcacttcagggcttgaagactcttgcacagagaccagctcgagccccagggacaaggccatcaccccgccactgccagaaagtactgtgcccttcagcaatggggtgctgaagggggagttgtcagacttgggggctgaggatggatggaccatggatgcggaagcagatcattcaggagttgcagctccacccccgggaaagcggggcactttgataacgaggtgtcctgggtttttcgagtgctgaccccagcgtagacagttcagaccgctaacttacaggttctgacaggaacagcatggattccgtggatagctgttgcagtctcaagaagactgagagcttccaaaatgcccaggcaggctccaaccctaagaaggtcgacctcatcatctgggagatcgaggtgccaaagcacttagtcggtcggctaattggcaagcaggggcgctatgtgagttttctgaagcaaacatctggtgccaagatctacatttcaaccctgccttacacccagagcgtccagatctgccacatagaaggctctcaacatcatgtagacaaagcgctgaacttgattgggaagaagttcaaagagctgaacctcaccaatatctacgctcccccattgccttcactggcactgccttctctgccgatgacatcctggctcatgctgcctgatggcatcaccgtggaggtcattgtggtcaaccaggtcaatgccgggcacctgttcgtgcagcagcacacacaccctaccttccacgcgctgcgcagcctcgaccagcagatgtacctctgttactctcagcctggaatccccaccttgcccaccccagtggaaataacggtcatctgtgccgcccctggtgcggacggggcctggtggcgagcccaagtggttgcctcctacgaggagaccaacgaagtggagattcgatacgtggactacggcggatataagagggtgaaagtagacgtgctccggcaaatcagctgactttgtcaccctgccgtttaaggggacaaaattccttttgggaaagggtgaatgccccctgtaaaaacaatgaaccatttttttatccggaagacttatgccgccattaaaccaaattaactggggaattccatctattggtttggcttaggtgtacatagttatcattact

SEQ ID NO: 448769 - DNA, 2852 bp, Homo sapiens
actgtgacttacacaggcccctgaggatgaaggtaacagtcctgtgagcactgaggctgggctgggaccaacacctgagccatggctccagcactctgattcctggcccagccatgctgctgagggtgcacagcccaggcctaccatcgcccccacccttggtggcagaaccgagcactacccagcaaggtgtaattacttcaagcctccaggatggcaatccagttccgttcgctcttccccttggcattgcctgggatgctggcgctcctcggctggtggtggtttttctctcgtaaaaaaggccatgtcagcagccatgatgagcagcaggtggaggctggtgctgtgcagctgagggctgaccctgccatcaaggaacctctccccgtggaagacgtctgtcccaaagtagtgtccacaccccccagtgtcacagagcctccagaaaaggaactgtccaccgtgagcaagctgcctgcagagcccccagcattgctccagacacacccaccttgccgaagatcagagtcctcgggcattcttcctaacaccacagacatgagattgcgaccaggaacacgcagagatgacagtacaaagctggagctagccctgacaggtggtgaagccaaatcgattcctctagagtgccccctttcatccccaaagggtgtactattctccagcaaatcagctgaggtgtgtaagcaagattcccccttcagcagggtgccaaggaaggtccagccaggctaccccgtagtccccgcagagaagcgtagctctggggagagggcaagagagacaggtggggccgaagggactggtgatgccgtgttgggggaaaaggtgcttgaagaagctctgttgtctcgggagcatgtcttggaattggagaacagcaagggccccagcctggcctctttagagggggaagaagataaggggaagagcagctcatcccaggtggtggggccagtgcaggaggaagagtatgtagcagagaagttgccaagtaggttcatcgagtcggctcacacagagctggcaaaggacgatgcggcgccagcacccccagtcgcagacgccaaagcccaggacagaggtgtcgagggagaactgggcaatgaggagagcttggatagaaatgaggagggcttggatagaaatgaggagggcttggatagaaatgaggagagcttggatagaaatgaggagggcttggatagaaatgaggagattaagcgggctgccttccagataatctcccaagtgatctcagaagcaaccgaacaggtgctggccaccacggttggcaaggttgcaggtcgtgtgtgtcaggccagtcagctccaagggcagaaggaagagagctgtgtcccagttcaccagaaaactgtcttgggcccagacactgcggagcctgccacagcagaggcagctgttgccccgccggatgctggcctccccttgccaggcctaccagcagagggctcaccaccaccaaagacctacgtgagctgcctgaagagccttctgtccagccccaccaaggacagtaagccaaatatctctgcacaccacatctccctggcctcctgcctggcactgaccacccccagtgaagagttgccggaccgggcaggcatcctggtggaagatgccacctgtgtcacctgcatgtcagacagcagccaaagtgtccctttggtggcttctccaggacactgctcagattctttcagcacttcagggcttgaagactcttgcacagagaccagctcgagccccagggacaaggccatcaccccgccactgccagaaagtactgtgcccttcagcaatggggtgctgaagggggagttgtcagacttgggggctgaggatggatggaccatggatgcggaagcagatcattcaggaggttctgacaggaacagcatggattccgtggatagctgttgcagtctcaagaagactgagagcttccaaaatgcccaggcaggctccaaccctaagaaggtcgacctcatcatctgggagatcgaggtgccaaaggaaacgcttcttgaaatcgagatccgcgacgtatgtgaggtacatggcagggcgcggcatcatggtgacgtttctctgagaggcgatcacatctggtgccaagatctacatttcaaccctgccttacacccagagcgtccagatctgccacatagaaggctctcaacatcatgtagacaaagcgctgaacttgattgggaagaagttcaaagagctgaacctcaccaatatctacgctcccccattgccttcactggcactgccttctctgccgatgacatcctggctcatgctgcctgatggcatcaccgtggaggtcattgtggtcaaccaggtcaatgccgggcacctgttcgtgcagcagcacacacaccctaccttccacgcgctgcgcagcctcgaccagcagatgtacctctgttactctcagcctggaatccccaccttgcccaccccagtggaaataacggtcatctgtgccgcccctggtgcggacggggcctggtggcgagcccaagtggttgcctcctacgaggagaccaacgaagtggagattcgatacgtggactacggcggatataagagggtgaaagtagacgtgctccggcaaatcagctgactttgtcaccctgccgtttaaggggacaaaattccttttgggaaagggtgaatgccccctgtaaaaacaatgaaccatttttttatccggaagacttatgccgccattaaaccaaattaactggggaattccatctattggtttggcttaggtgtacatagttatcattact

SEQ ID NO: 448770 - DNA, 734 bp, Homo sapiens
gcgtcttcagtatttaatgtctctgtgttccacccgcctgggctagcacgtgggggagctgcggaagcgcggcgctgcgggccgggccgcggggcacagccgggggccggcggcggcgcgcggactccgcatcccgcaccccgatggtagccgaggagctggtgtaattacttcaagcctccaggatggcaatccagttccgttcgctcttccccttggcattgcctgggatgctggcgctcctcggctggtggtggtttttctctcgtaaaaaaggccatgtcagcagccatgatgagcagcaggtggaggctggtgctgtgcagctgagggctgaccctgccatcaaggaacctctccccgtggaagacgtctgtcccaaagtagtgtccacaccccccagtgtcacagagcctccagaaaaggaactgtccaccgtgagcaagctgcctgcagagcccccagcattgctccagacacacccaccttgccgaagatcagagtcctcgggcattcttcctaacaccacagacatgactttccaaaaaaaaaaaaaaaaaaaaaaaaaaaaaaaaaaaaaaaaaacgtggggggtattttatgtgtggggggggggagaagaaggtttaagagggggaatgggccaatgtgtgtttttggaggaccagttttttgtaaggggggaaaatggggggccccaaagagaaggggaaaatgaaaagggggtagtgttg

SEQ ID NO: 448771 - DNA, 457 bp, Homo sapiens
ggtgggggacagtcctagacaggacctcacaaccccactgtgagctaatttgggatctctagggtacccacatgaagtcatagcttactgtgacttacacaggcccctgaggatgaaggtaacagtcctgtgagcactgaggctgggctgggaccaacacctgagccatggctccagcactctgattcctggcccagccatgctgctgagggtgcacagcccaggcctaccatcgcccccacccttggtggcagaaccgagcactacccagcaaggtaggtgttggcggctgcagcatgtatccagccctcctgttcattggggccttctgggaacaccctttagagctgcattgtccagtaggtagctgccagctgcaggtggagagttcaagttaacctaaagtagaattcagtgccctagtcacactggtcacatttcaagtgctcagtaacct

SEQ ID NO: 448772 - DNA, 440 bp, Homo sapiens
tgagcttcctgagtggtcgctgtcaccttggcagaaagcctcagccattttctttctgtgcagttgcagctccacccccgggaaagcggggcactttgataacgaggtgtcctgggtttttcgagtgctgaccccagcgtagacagttcagaccgctaacttacaggtcagcagctcctgaccctgcttctgcaggcaccctggggtgttttcatttatctcatggagagaggccacgaatatcccgagtggctctctgacttgtttgtcctggagccattccctcccatttcagctccgggtaggttgggaatctttattgggaattttaccactttcagcagcatctagtttgtaccacacgctacattttgtcacctccaagatgctgttaagacactactgtttttatgtaccttggaaagaaaaaagtgctgcca

SEQ ID NO: 448773 - DNA, 519 bp, Homo sapiens
cttcccttgagtgccaggtatgggtgtgagtgttttgaatggtttttatttccttttaatcatgtgcttgttcccatgtcttcacctgctttccttctccagaagctcttacagggtaagtgcccaaagaacggccacagctttgaatacttgtgggaggcttgagcttcctgagtggtcgctgtcaccttggcagaaagcctcagccattttctttctgtgcagttgcagctccacccccgggaaagcggggcactttgataacgaggtgtcctgggtttttcgagtgctgaccccagcgtagacagttcagaccgctaacttacaggtcagcagctcctgaccctgcttctgcaggcaccctggggtgttttcatttatctcatggagagaggccacgaatatcccgagtggctctctgacttgtttgtcctggagccattccctcccatttcagctccgggtaggttgggaatctttattgggaattttaccactttcagcagcatctagtttgta

SEQ ID NO: 448774 - DNA, 3964 bp, Homo sapiens
  misc_feature (44)..(44): n is a, c, g, or t
ccacgagatatgttatatgtactgatacctcggtgtataattcnagtacgatggcttgttgtctaccgcgctatttactatggcacgtgggggagctgcggaagcgcggcgctgcgggccgggccgcggggcacagccgggggccggcggcggcgcgcggactccgcatcccgcaccccgatggtagccgaggagctggtgtaattacttcaagcctccaggatggcaatccagttccgttcgctcttccccttggcattgcctgggatgctggcgctcctcggctggtggtggtttttctctcgtaaaaaaggccatgtcagcagccatgatgagcagcaggtggaggctggtgctgtgcagctgagggctgaccctgccatcaaggaacctctccccgtggaagacgtctgtcccaaagtagtgtccacaccccccagtgtcacagagcctccagaaaaggaactgtccaccgtgagcaagctgcctgcagagcccccagcattgctccagacacacccaccttgccgaagatcagagtcctcgggcattcttcctaacaccacagacatgagattgcgaccaggaacacgcagagatgacagtacaaagctggagctagccctgacaggtggtgaagccaaatcgattcctctagagtgccccctttcatccccaaagggtgtactattctccagcaaatcagctgaggtgtgtaagcaagattcccccttcagcagggtgccaaggaaggtccagccaggctaccccgtagtccccgcagagaagcgtagctctggggagagggcaagagagacaggtggggccgaagggactggtgatgccgtgttgggggaaaaggtgcttgaagaagctctgttgtctcgggagcatgtcttggaattggagaacagcaagggccccagcctggcctctttagagggggaagaagataaggggaagagcagctcatcccaggtggtggggccagtgcaggaggaagagtatgtagcagagaagttgccaagtaggttcatcgagtcggctcacacagagctggcaaaggacgatgcggcgccagcacccccagtcgcagacgccaaagcccaggacagaggtgtcgagggagaactgggcaatgaggagagcttggatagaaatgaggagggcttggatagaaatgaggagggcttggatagaaatgaggagagcttggatagaaatgaggagggcttggatagaaatgaggagattaagcgggctgccttccagataatctcccaagtgatctcagaagcaaccgaacaggtgctggccaccacggttggcaaggttgcaggtcgtgtgtgtcaggccagtcagctccaagggcagaaggaagagagctgtgtcccagttcaccagaaaactgtcttgggcccagacactgcggagcctgccacagcagaggcagctgttgccccgccggatgctggcctccccttgccaggcctaccagcagagggctcaccaccaccaaagacctacgtgagctgcctgaagagccttctgtccagccccaccaaggacagtaagccaaatatctctgcacaccacatctccctggcctcctgcctggcactgaccacccccagtgaagagttgccggaccgggcaggcatcctggtggaagatgccacctgtgtcacctgcatgtcagacagcagccaaagtgtccctttggtggcttctccaggacactgctcagattctttcagcacttcagggcttgaagactcttgcacagagaccagctcgagccccagggacaaggccatcaccccgccactgccagaaagtactgtgcccttcagcaatggggtgctgaagggggagttgtcagacttgggggctgaggatggatggaccatggatgcggaagcagatcattcaggaggttctgacaggaacagcatggattccgtggatagctgttgcagtctcaagaagactgagagcttccaaaatgcccaggcaggctccaaccctaagaaggtcgacctcatcatctgggagatcgaggtgccaaagcacttagtcggtcggctaattggcaagcaggggcgctatgtgagttttctgaagcaaacatctggtgccaagatctacatttcaaccctgccttacacccagagcgtccagatctgccacatagaaggctctcaacatcatgtagacaaagcgctgaacttgattgggaagaagttcaaagagctgaacctcaccaatatctacgctcccccattgccttcactggcactgccttctctgccgatgacatcctggctcatgctgcctgatggcatcaccgtggaggtcattgtggtcaaccaggtcaatgccgggcacctgttcgtgcagcagcacacacaccctaccttccacgcgctgcgcagcctcgaccagcagatgtacctctgttactctcagcctggaatccccaccttgcccaccccagtggaaataacggtcatctgtgccgcccctggtgcggacggggcctggtggcgagcccaagtggttgcctcctacgaggagaccaacgaagtggagattcgatacgtggactacggcggatataagagggtgaaagtagacgtgctccggcaaatcaggtctgactttgtcaccctgccgtttcagggagcagaagtccttctggacagtgtgatgcccctgtcagacgatgaccagttttcaccggaagcagatgccgccatgagcgagatgacggggaatacagcactgcttgctcaggtgacaagttacagtccaactggtcttcctctgattcagctgtggagtgtggttggagatgaagtggtgttgataaaccggtccctggtggagcgaggccttgcccagtgggtagacagctactacacaagcctttgacccccatgctgcttcctgagagtctttttttgcactgttgaaattgggcttggcactcaagtcaaagatgaacatcggaataacaaacattgtcctctccagaaagtcctttctttctccatactgtagtcctattgagaagacatttcgtctctgagaaaaaaggatggaactatgggttctcttcgcaaagccaaaggatagtgtttaacaagccagctggcttatcctggttctcagctgtttaaaaaaaaaaaaaaaaaggaatagaaacagtttcaaccagattgtcctattccccctgttccattcccctcttcttccttctatctccttccccggcaaaaaccaaacaaactggcagacaggccagggatgtatgttgcttgcttgagagggtttcttttacttcaaaatctttcttcagggagcaagacatgaactgactaattggtatccactacttgtacagcttacataaatgagttgatgatatttaaccagtttttataaacttcatttaggtctctaaacacagactttttaaattgcaactgtaaatatgaaatggtcatcacatctgaccttggtcagtggggaggggaactggtatcctgccaagcctggttgtaatttgtaaccattttctatttgtgcaaactctgtaaatatgtgtttaaacaaatgtaatattttgtacaagatacactggagaacaaagggaactcaagattcttccagccacatgtcacctgtaggtagaagtaaactctgcagtgcagcttctgctcttggcccctctggccagggcccctgtggcttcctgcacactggacaggtgactgtatggtagagactgtgatctgggaactttttgctgtacaaatctgtttaaaaaaaaaaaaagtaactcattgaattaacttgcagtggtgtgtttgattcttttttagactggcttcagcattgtgcagtttaaaaataagtaagtaacttacataaatcttcaattgtatgaactgcaaaaaaa

SEQ ID NO: 448775 - DNA, 3934 bp, Homo sapiens
actgtgacttacacaggcccctgaggatgaaggtaacagtcctgtgagcactgaggctgggctgggaccaacacctgagccatggctccagcactctgattcctggcccagccatgctgctgagggtgcacagcccaggcctaccatcgcccccacccttggtggcagaaccgagcactacccagcaaggtgtaattacttcaagcctccaggatggcaatccagttccgttcgctcttccccttggcattgcctgggatgctggcgctcctcggctggtggtggtttttctctcgtaaaaaaggccatgtcagcagccatgatgagcagcaggtggaggctggtgctgtgcagctgagggctgaccctgccatcaaggaacctctccccgtggaagacgtctgtcccaaagtagtgtccacaccccccagtgtcacagagcctccagaaaaggaactgtccaccgtgagcaagctgcctgcagagcccccagcattgctccagacacacccaccttgccgaagatcagagtcctcgggcattcttcctaacaccacagacatgagattgcgaccaggaacacgcagagatgacagtacaaagctggagctagccctgacaggtggtgaagccaaatcgattcctctagagtgccccctttcatccccaaagggtgtactattctccagcaaatcagctgaggtgtgtaagcaagattcccccttcagcagggtgccaaggaaggtccagccaggctaccccgtagtccccgcagagaagcgtagctctggggagagggcaagagagacaggtggggccgaagggactggtgatgccgtgttgggggaaaaggtgcttgaagaagctctgttgtctcgggagcatgtcttggaattggagaacagcaagggccccagcctggcctctttagagggggaagaagataaggggaagagcagctcatcccaggtggtggggccagtgcaggaggaagagtatgtagcagagaagttgccaagtaggttcatcgagtcggctcacacagagctggcaaaggacgatgcggcgccagcacccccagtcgcagacgccaaagcccaggacagaggtgtcgagggagaactgggcaatgaggagagcttggatagaaatgaggagggcttggatagaaatgaggagggcttggatagaaatgaggagggcttggatagaaatgaggagattaagcgggctgccttccagataatctcccaagtgatctcagaagcaaccgaacaggtgctggccaccacggttggcaaggttgcaggtcgtgtgtgtcaggccagtcagctccaagggcagaaggaagagagctgtgtcccagttcaccagaaaactgtcttgggcccagacactgcggagcctgccacagcagaggcagctgttgccccgccggatgctggcctccccttgccaggcctaccagcagagggctcaccaccaccaaagacctacgtgagctgcctgaagagccttctgtccagccccaccaaggacagtaagccaaatatctctgcacaccacatctccctggcctcctgcctggcactgaccacccccagtgaagagttgccggaccgggcaggcatcctggtggaagatgccacctgtgtcacctgcatgtcagacagcagccaaagtgtccctttggtggcttctccaggacactgctcagattctttcagcacttcagggcttgaagactcttgcacagagaccagctcgagccccagggacaaggccatcaccccgccactgccagaaagtactgtgcccttcagcaatggggtgctgaagggggagttgtcagacttgggggctgaggatggatggaccatggatgcggaagcagatcattcaggaggttctgacaggaacagcatggattccgtggatagctgttgcagtctcaagaagactgagagcttccaaaatgcccaggcaggctccaaccctaagaaggtcgacctcatcatctgggagatcgaggtgccaaagcacttagtcggtcggctaattggcaagcaggggcgctatgtgagttttctgaagcaaacatctggtgccaagatctacatttcaaccctgccttacacccagagcgtccagatctgccacatagaaggctctcaacatcatgtagacaaagcgctgaacttgattgggaagaagttcaaagagctgaacctcaccaatatctacgctcccccattgccttcactggcactgccttctctgccgatgacatcctggctcatgctgcctgatggcatcaccgtggaggtcattgtggtcaaccaggtcaatgccgggcacctgttcgtgcagcagcacacacaccctaccttccacgcgctgcgcagcctcgaccagcagatgtacctctgttactctcagcctggaatccccaccttgcccaccccagtggaaataacggtcatctgtgccgcccctggtgcggacggggcctggtggcgagcccaagtggttgcctcctacgaggagaccaacgaagtggagattcgatacgtggactacggcggatataagagggtgaaagtagacgtgctccggcaaatcaggtctgactttgtcaccctgccgtttcagggagcagaagtccttctggacagtgtgatgcccctgtcagacgatgaccagttttcaccggaagcagatgccgccatgagcgagatgacggggaatacagcactgcttgctcaggtgacaagttacagtccaactggtcttcctctgattcagctgtggagtgtggttggagatgaagtggtgttgataaaccggtccctggtggagcgaggccttgcccagtgggtagacagctactacacaagcctttgacccccatgctgcttcctgagagtctttttttgcactgttgaaattgggcttggcactcaagtcaaagatgaacatcggaataacaaacattgtcctctccagaaagtcctttctttctccatactgtagtcctattgagaagacatttcgtctctgagaaaaaaggatggaactatgggttctcttcgcaaagccaaaggatagtgtttaacaagccagctggcttatcctggttctcagctgtttaaaaaaaaaaaaaaaaaggaatagaaacagtttcaaccagattgtcctattccccctgttccattcccctcttcttccttctatctccttccccggcaaaaaccaaacaaactggcagacaggccagggatgtatgttgcttgcttgagagggtttcttttacttcaaaatctttcttcagggagcaagacatgaactgactaattggtatccactacttgtacagcttacataaatgagttgatgatatttaaccagtttttataaacttcatttaggtctctaaacacagactttttaaattgcaactgtaaatatgaaatggtcatcacatctgaccttggtcagtggggaggggaactggtatcctgccaagcctggttgtaatttgtaaccattttctatttgtgcaaactctgtaaatatgtgtttaaacaaatgtaatattttgtacaagatacactggagaacaaagggaactcaagattcttccagccacatgtcacctgtaggtagaagtaaactctgcagtgcagcttctgctcttggcccctctggccagggcccctgtggcttcctgcacactggacaggtgactgtatggtagagactgtgatctgggaactttttgctgtacaaatctgtttaaaaaaaaaaaaagtaactcattgaattaacttgcagtggtgtgtttgattcttttttagactggcttcagcattgtgcagtttaaaaataagtaagtaacttacataaatcttcaattgtatgaactgcaaaaaaa

SEQ ID NO: 448776 - DNA, 3907 bp, Homo sapiens
actgtgacttacacaggcccctgaggatgaaggtaacagtcctgtgagcactgaggctgggctgggaccaacacctgagccatggctccagcactctgattcctggcccagccatgctgctgagggtgcacagcccaggcctaccatcgcccccacccttggtggcagaaccgagcactacccagcaaggtgtaattacttcaagcctccaggatggcaatccagttccgttcgctcttccccttggcattgcctgggatgctggcgctcctcggctggtggtggtttttctctcgtaaaaaaggccatgtcagcagccatgatgagcagcaggtggaggctggtgctgtgcagctgagggctgaccctgccatcaaggaacctctccccgtggaagacgtctgtcccaaagtagtgtccacaccccccagtgtcacagagcctccagaaaaggaactgtccaccgtgagcaagctgcctgcagagcccccagcattgctccagacacacccaccttgccgaagatcagagtcctcgggcattcttcctaacaccacagacatgagattgcgaccaggaacacgcagagatgacagtacaaagctggagctagccctgacaggtggtgaagccaaatcgattcctctagagtgccccctttcatccccaaagggtgtactattctccagcaaatcagctgaggtgtgtaagcaagattcccccttcagcagggtgccaaggaaggtccagccaggctaccccgtagtccccgcagagaagcgtagctctggggagagggcaagagagacaggtggggccgaagggactggtgatgccgtgttgggggaaaaggtgcttgaagaagctctgttgtctcgggagcatgtcttggaattggagaacagcaagggccccagcctggcctctttagagggggaagaagataaggggaagagcagctcatcccaggtggtggggccagtgcaggaggaagagtatgtagcagagaagttgccaagtaggttcatcgagtcggctcacacagagctggcaaaggacgatgcggcgccagcacccccagtcgcagacgccaaagcccaggacagaggtgtcgagggagaactgggcaatgaggagagcttggatagaaatgaggagggcttggatagaaatgaggagggcttggatagaaatgaggagagcttggatagaaatgaggagggcttggatagaaatgaggagattaagcgggctgccttccagataatctcccaagtgatctcagaagcaaccgaacaggtgctggccaccacggttggcaaggttgcaggtcgtgtgtgtcaggccagtcagctccaagggcagaaggaagagagctgtgtcccagttcaccagaaaactgtcttgggcccagacactgcggagcctgccacagcagaggcagctgttgccccgccggatgctggcctccccttgccaggcctaccagcagagggctcaccaccaccaaagacctacgtgagctgcctgaagagccttctgtccagccccaccaaggacagtaagccaaatatctctgcacaccacatctccctggcctcctgcctggcactgaccacccccagtgaagagttgccggaccgggcaggcatcctggtggaagatgccacctgtgtcacctgcatgtcagacagcagccaaagtgtccctttggtggcttctccaggacactgctcagattctttcagcacttcagggcttgaagactcttgcacagagaccagctcgagccccagggacaaggccatcaccccgccactgccagaaagtactgtgcccttcagcaatggggtgctgaagggggagttgtcagacttgggggctgaggatggatggaccatggatgcggaagcagatcattcaggagttgcagctccacccccgggaaagcggggcactttgataacgaggtgtcctgggtttttcgagtgctgaccccagcgtagacagttcagaccgctaacttacaggttctgacaggaacagcatggattccgtggatagctgttgcagtctcaagaagactgagagcttccaaaatgcccaggcaggctccaaccctaagaaggtcgacctcatcatctgggagatcgaggtgccaaagcacttagtcggtcggctaattggcaagcaggggcgctatgtgagttttctgaagcaaacatctggtgccaagatctacatttcaaccctgccttacacccagagcgtccagatctgccacatagaaggctctcaacatcatgtagacaaagcgctgaacttgattgggaagaagttcaaagagctgaacctcaccaatatctacgctcccccattgccttcactggcactgccttctctgccgatgacatcctggctcatgctgcctgatggcatcaccgtggaggtcattgtggtcaaccaggtcaatgccgggcacctgttcgtgcagcagcacacacaccctaccttccacgcgctgcgcagcctcgaccagcagatgtacctctgttactctcagcctggaatccccaccttgcccaccccagtggaaagtctgactttgtcaccctgccgtttcagggagcagaagtccttctggacagtgtgatgcccctgtcagacgatgaccagttttcaccggaagcagatgccgccatgagcgagatgacggggaatacagcactgcttgctcaggtgacaagttacagtccaactggtcttcctctgattcagctgtggagtgtggttggagatgaagtggtgttgataaaccggtccctggtggagcgaggccttgcccagtgggtagacagctactacacaagcctttgacccccatgctgcttcctgagagtctttttttgcactgttgaaattgggcttggcactcaagtcaaagatgaacatcggaataacaaacattgtcctctccagaaagtcctttctttctccatactgtagtcctattgagaagacatttcgtctctgagaaaaaaggatggaactatgggttctcttcgcaaagccaaaggatagtgtttaacaagccagctggcttatcctggttctcagctgtttaaaaaaaaaaaaaaaaaggaatagaaacagtttcaaccagattgtcctattccccctgttccattcccctcttcttccttctatctccttccccggcaaaaaccaaacaaactggcagacaggccagggatgtatgttgcttgcttgagagggtttcttttacttcaaaatctttcttcagggagcaagacatgaactgactaattggtatccactacttgtacagcttacataaatgagttgatgatatttaaccagtttttataaacttcatttaggtctctaaacacagactttttaaattgcaactgtaaatatgaaatggtcatcacatctgaccttggtcagtggggaggggaactggtatcctgccaagcctggttgtaatttgtaaccattttctatttgtgcaaactctgtaaatatgtgtttaaacaaatgtaatattttgtacaagatacactggagaacaaagggaactcaagattcttccagccacatgtcacctgtaggtagaagtaaactctgcagtgcagcttctgctcttggcccctctggccagggcccctgtggcttcctgcacactggacaggtgactgtatggtagagactgtgatctgggaactttttgctgtacaaatctgtttaaaaaaaaaaaaagtaactcattgaattaacttgcagtggtgtgtttgattcttttttagactggcttcagcattgtgcagtttaaaaataagtaagtaacttacataaatcttcaattgtatgaactgcaaaaaaa

SEQ ID NO: 448777 - DNA, 3030 bp, Homo sapiens
actgtgacttacacaggcccctgaggatgaaggtaacagtcctgtgagcactgaggctgggctgggaccaacacctgagccatggctccagcactctgattcctggcccagccatgctgctgagggtgcacagcccaggcctaccatcgcccccacccttggtggcagaaccgagcactacccagcaaggtgtaattacttcaagcctccaggatggcaatccagttccgttcgctcttccccttggcattgcctgggatgctggcgctcctcggctggtggtggtttttctctcgtaaaaaaggccatgtcagcagccatgatgagcagcaggtggaggctggtgctgtgcagctgagggctgaccctgccatcaaggaacctctccccgtggaagacgtctgtcccaaagtagtgtccacaccccccagtgtcacagagcctccagaaaaggaactgtccaccgtgagcaagctgcctgcagagcccccagcattgctccagacacacccaccttgccgaagatcagagtcctcgggcattcttcctaacaccacagacatgagattgcgaccaggaacacgcagagatgacagtacaaagctggagctagccctgacaggtggtgaagccaaatcgattcctctagagtgccccctttcatccccaaagggtgtactattctccagcaaatcagctgaggtgtgtaagcaagattcccccttcagcagggtgccaaggaaggtccagccaggctaccccgtagtccccgcagagaagcgtagctctggggagagggcaagagagacaggtggggccgaagggactggtgatgccgtgttgggggaaaaggtgcttgaagaagctctgttgtctcgggagcatgtcttggaattggagaacagcaagggccccagcctggcctctttagagggggaagaagataaggggaagagcagctcatcccaggtggtggggccagtgcaggaggaagagtatgtagcagagaagttgccaagtaggttcatcgagtcggctcacacagagctggcaaaggacgatgcggcgccagcacccccagtcgcagacgccaaagcccaggacagaggtgtcgagggagaactgggcaatgaggagagcttggatagaaatgaggagggcttggatagaaatgaggagggcttggatagaaatgaggagagcttggatagaaatgaggagggcttggatagaaatgaggagattaagcgggctgccttccagataatctcccaagtgatctcagaagcaaccgaacaggtgctggccaccacggttggcaaggttgcaggtcgtgtgtgtcaggccagtcagctccaagggcagaaggaagagagctgtgtcccagttcaccagaaaactgtcttgggcccagacactgcggagcctgccacagcagaggcagctgttgccccgccggatgctggcctccccttgccaggcctaccagcagagggctcaccaccaccaaagacctacgtgagctgcctgaagagccttctgtccagccccaccaaggacagtaagccaaatatctctgcacaccacatctccctggcctcctgcctggcactgaccacccccagtgaagagttgccggaccgggcaggcatcctggtggaagatgccacctgtgtcacctgcatgtcagacagcagccaaagtgtccctttggtggcttctccaggacactgctcagattctttcagcacttcagggcttgaagactcttgcacagagaccagctcgagccccagggacaaggccatcaccccgccactgccagaaagtactgtgcccttcagcaatggggtgctgaagggggagttgtcagacttgggggctgaggatggatggaccatggatgcggaagcagatcattcaggagttgcagctccacccccgggaaagcggggcactttgataacgaggtgtcctgggtttttcgagtgctgaccccagcgtagacagttcagaccgctaacttacaggttctgacaggaacagcatggattccgtggatagctgttgcagtctcaagaagactgagagcttccaaaatgcccaggcaggctccaaccctaagaaggtcgacctcatcatctgggagatcgaggtgccaaagcacttagtcggtcggctaattggcaagcaggggcgctatgtgagttttctgaagcaaacatctggtgccaagatctacatttcaaccctgccttacacccagagcgtccagatctgccacatagaaggctctcaacatcatgtagacaaagcgctgaacttgattgggaagaagttcaaagagctgaacctcaccaatatctacgctcccccattgccttcactggcactgccttctctgccgatgacatcctggctcatgctgcctgatggcatcaccgtggaggtcattgtggtcaaccaggtcaatgccgggcacctgttcgtgcagcagcacacacaccctaccttccacgcgctgcgcagcctcgaccagcagatgtacctctgttactctcagcctggaatccccaccttgcccaccccagtggaaataacggtcatctgtgccgcccctggtgcggacggggcctggtggcgagcccaagtggttgcctcctacgaggagaccaacgaagtggagattcgatacgtggactacggcggatataagagggtgaaagtagacgtgctccggcaaatcaggtctgactttgtcaccctgccgtttcagggagcagaagtccttctggacagtgtgatgcccctgtcagacgatgaccagttttcaccggaagcagatgccgccatgagcgagatgacggggaatacagcactgcttgctcaggtgacaagttacagtccaactggtcttcctctgattcagctgtggagtgtggttggagatgaaactggcttcagcattgtgcagtttaaaaataagtaagtaacttacataaatcttcaattgtatgaactgcaaaaaaa

SEQ ID NO: 448778 - DNA, 2744 bp, Homo sapiens
actgtgacttacacaggcccctgaggatgaaggtaacagtcctgtgagcactgaggctgggctgggaccaacacctgagccatggctccagcactctgattcctggcccagccatgctgctgagggtgcacagcccaggcctaccatcgcccccacccttggtggcagaaccgagcactacccagcaaggtgtaattacttcaagcctccaggatggcaatccagttccgttcgctcttccccttggcattgcctgggatgctggcgctcctcggctggtggtggtttttctctcgtaaaaaaggccatgtcagcagccatgatgagcagcaggtggaggctggtgctgtgcagctgagggctgaccctgccatcaaggaacctctccccgtggaagacgtctgtcccaaagtagtgtccacaccccccagtgtcacagagcctccagaaaaggaactgtccaccgtgagcaagctgcctgcagagcccccagcattgctccagacacacccaccttgccgaagatcagagtcctcgggcattcttcctaacaccacagacatgagattgcgaccaggaacacgcagagatgacagtacaaagctggagctagccctgacaggtggtgaagccaaatcgattcctctagagtgccccctttcatccccaaagggtgtactattctccagcaaatcagctgaggtgtgtaagcaagattcccccttcagcagggtgccaaggaaggtccagccaggctaccccgtagtccccgcagagaagcgtagctctggggagagggcaagagagacaggtggggccgaagggactggtgatgccgtgttgggggaaaaggtgcttgaagaagctctgttgtctcgggagcatgtcttggaattggagaacagcaagggccccagcctggcctctttagagggggaagaagataaggggaagagcagctcatcccaggtggtggggccagtgcaggaggaagagtatgtagcagagaagttgccaagtaggttcatcgagtcggctcacacagagctggcaaaggacgatgcggcgccagcacccccagtcgcagacgccaaagcccaggacagaggtgtcgagggagaactgggcaatgaggagagcttggatagaaatgaggagggcttggatagaaatgaggagggcttggatagaaatgaggagagcttggatagaaatgaggagggcttggatagaaatgaggagattaagcgggctgccttccagataatctcccaagtgatctcagaagcaaccgaacaggtgctggccaccacggttggcaaggttgcaggtcgtgtgtgtcaggccagtcagctccaagggcagaaggaagagagctgtgtcccagttcaccagaaaactgtcttgggcccagacactgcggagcctgccacagcagaggcagctgttgccccgccggatgctggcctccccttgccaggcctaccagcagagggctcaccaccaccaaagacctacgtgagctgcctgaagagccttctgtccagccccaccaaggacagtaagccaaatatctctgcacaccacatctccctggcctcctgcctggcactgaccacccccagtgaagagttgccggaccgggcaggcatcctggtggaagatgccacctgtgtcacctgcatgtcagacagcagccaaagtgtccctttggtggcttctccaggacactgctcagattctttcagcacttcagggcttgaagactcttgcacagagaccagctcgagccccagggacaaggccatcaccccgccactgccagaaagtactgtgcccttcagcaatggggtgctgaagggggagttgtcagacttgggggctgaggatggatggaccatggatgcggaagcagatcattcaggaggttctgacaggaacagcatggattccgtggatagctgttgcagtctcaagaagactgagagcttccaaaatgcccaggcaggctccaaccctaagaaggtcgacctcatcatctgggagatcgaggtgccaaagcacttagtcggtcggctaattggcaagcaggggcgctatgtgagttttctgaagcaaacatctggtgccaagatctacatttcaaccctgccttacacccagagcgtccagatctgccacatagaaggctctcaacatcatgtagacaaagcgctgaacttgattgggaagaagttcaaagagctgaacctcaccaatatctacgctcccccattgccttcactggcactgccttctctgccgatgacatcctgggtgagcgtgctactgggtgatccggacttcttgccactttcccccaaacctaccccaaacaagaaactccccagacctcaggctaagaaggccaagtgcacatgagtgcctgcgccctctcttctctggcctctgctggtcggttctgctatgggactgtgttctggggacagggcttaggtggtgatagcgctggcaggaaaccagaggcctcttggtccccacatgggaggactacttttcctggctctgccccctgggcaccttttaagttttctaggcgtttgcttagaaaggatggtgtagttcggacaggagattgggtgtgtccagggtcgccgttcaccacctgagacctgggtgggactagaatcatgggtttggatggcgcttgttctttcttctggttgagtcaggccttaacagtg

SEQ ID NO: 448779 - DNA, 766 bp, Homo sapiens
  misc_feature (766)..(766): n is a, c, g, or t
gcgtcttcagtatttaatgtctctgtgttccacccgcctgggctagcacgtgggggagctgcggaagcgcggcgctgcgggccgggccgcggggcacagccgggggccggcggcggcgcgcggactccgcatcccgcaccccgatggtagccgaggagctggtgtaattacttcaagcctccaggatggcaatccagttccgttcgctcttccccttggcattgcctgggatgctggcgctcctcggctggtggtggtttttctctcgtaaaaaaggccatgtcagcagccatgatgagcagcaggtggaggctggtgctgtgcagctgagggctgaccctgccatcaaggaacctctccccgtggaagacgtctgtcccaaagtagtgtccacaccccccagtgtcacagagcctccagaaaaggaactgtccaccgtgagcaagctgcctgcagagcccccagcattgctccagacacacccaccttgccgaagatcagagtcctcgggcattcttcctaacaccacagacatgactttccaaaaaaaaaaaaaaaaaaaaaaaaaaaaaaaaaaaaaaaaaaccgggagggcacaaaagggggggggggaaaaaaagggagaaaagggggcaggggacaaaacgggagaccgagaccaaaattcaggggcaaaaggggggaaaaaggagggacccaaaaaaggcgagcagaaaacacgaaaaacccgggacaccgcgtagaaaacccaacaaagagagaccan

SEQ ID NO: 448780 - DNA, 991 bp, Homo sapiens
agagacaagactaggtcttacagatctgtcacactccatttctttctgcttttgaatatgccatagattaaaatattttctgatcataactgcataaatgttgacctttaaacagtttattctagttccaattctgtgggaagcatataggatttaaatctttaaaaaaatcacagcagtgttttcagttactaatatataattaagataatttcttttttttttaaattagtttgttctgtcagtcaaaaccaagggagaagattgttcccaagtggcatgaaaagccctacgagtggaatcaggttgatccaaagctggtcatggagcaggccgaccgtgagagcagcagagggaagaacacctttctctaccagctccacaaactggttgtgctcggcacctgagcatgtccacaggtggcctccagcacacccctcaggaagctgtggaggctggattccaggctccctccgcagactgactttcctctgtgtctgggtgttacagtctgtgcccactgcatcctaaaggccttttctttcttcttttctctttgggtgatagtcagagagtggtgtttttgttcaggtgggaaggattggaaactctagtcttttctagaaacagaaaatcactgtattaaatattttggaaagattgttctgaaagaagtctgtttggataaagagctgtattttgctttaaatttattaaggtaaatataagtagttaatcttagatgtaaggttccagaatgtgcttacatattctgttctgttacagtgatttaaaccagtagtataggaaaaaacttaaaaaacaaaaaaaccatgtagtattttctgatttttttttccatgagggaaaatatctaatttttataagactaagttgagttatacttcttggttcacattttggaaatcagagattacagattacatggccatagcttatctgtgttaaaacaataaaagcattaaatgaa

SEQ ID NO: 448781 - DNA, 1224 bp, Homo sapiens
gtgtgtttggattgagaaggagagcatcaactctgtcattatcagtgacgcccctgaagaccttcaccagagaatgctggttgcagcttccctttccatcaatgcgactggatctacgatgctgctgagagaaacctctctgatgcctcatatccctggcctcccggctctcctcagcatgttattcgcaccggtgatagagttaaggattgatcagaatggcaagtactatactggagtcctttgtggtttggggtggaatccagctacaggggcttccatactgcccgagcacgacatggagcttgcgtttgacgttcaattcagcgtggaggatgtcgtcgaggttaatattctcagggctgctattaacaagctagtctgtgatggaccaaatggatgcaagtgtcttgggccagagagagttgcgcagcttcaagacattgcccgtcagaagcttttaggtttgttctgtcagtcaaaaccaagggagaagattgttcccaagtggcatgaaaagccctacgagtggaatcaggttgatccaaagctggtcatggagcaggccgaccgtgagagcagcagagggaagaacacctttctctaccagctccacaaactggttgtgctcggcacctgagcatgtccacaggtggcctccagcacacccctcaggaagctgtggaggctggattccaggctccctccgcagactgactttcctctgtgtctgggtgttacagtctgtgcccactgcatcctaaaggccttttctttcttcttttctctttgggtgatagtcagagagtggtgtttttgttcaggtgggaaggattggaaactctagtcttttctagaaacagaaaatcactgtattaaatattttggaaagattgttctgaaagaagtctgtttggataaagagctgtattttgctttaaatttattaaggtaaatataagtagttaatcttagatgtaaggttccagaatgtgcttacatattctgttctgttacagtgatttaaaccagtagtataggaaaaaacttaaaaaacaaaaaaaccatgtagtattttctgatttttttttccatgagggaaaatatctaatttttataagactaagttgagttatacttcttggttcacattttggaaatcagagattacagattacatggccatagcttatctgtgttaaaacaataaaagcattaaatgaa

SEQ ID NO: 448782 - DNA, 937 bp, Homo sapiens
agagacaagactaggtcttacagatctgtcacactccatttctttctgcttttgaatatgccatagattaaaatattttctgatcataactgcataaatgttgacctttaaacagtttattctagttccaattctgtgggaagcatataggatttaaatctttaaaaaaatcacagcagtgttttcagttactaatatataattaagataatttcttttttttttaaattagtttgttctgtcagtcaaaaccaagggagaagattgttcccaagtggcatgaacgtgagagcagcagagggaagaacacctttctctaccagctccacaaactggttgtgctcggcacctgagcatgtccacaggtggcctccagcacacccctcaggaagctgtggaggctggattccaggctccctccgcagactgactttcctctgtgtctgggtgttacagtctgtgcccactgcatcctaaaggccttttctttcttcttttctctttgggtgatagtcagagagtggtgtttttgttcaggtgggaaggattggaaactctagtcttttctagaaacagaaaatcactgtattaaatattttggaaagattgttctgaaagaagtctgtttggataaagagctgtattttgctttaaatttattaaggtaaatataagtagttaatcttagatgtaaggttccagaatgtgcttacatattctgttctgttacagtgatttaaaccagtagtataggaaaaaacttaaaaaacaaaaaaaccatgtagtattttctgatttttttttccatgagggaaaatatctaatttttataagactaagttgagttatacttcttggttcacattttggaaatcagagattacagattacatggccatagcttatctgtgttaaaacaataaaagcattaaatgaa

SEQ ID NO: 448783 - DNA, 2294 bp, Homo sapiens
ggtggctgttctagaggatcccaggggctcgcagtcatcgcgatagaggaattcagcattatcccggaggctcccatgaggagcagccaggtctctgcctgggggcttgaagctcaagaagatgaggacccatcctataagtggagagaggaacacagactctcagcaactcagcagagtgagttaagggatgtgtgtgactatgcgattgagacgatgccctcttttcccaaggaaggttctgcagatgtggagcccaatcaggaaagccttgtggctgaggcctgtgacactccggaacactgggaggcagtaccccagagcctagcaggccgacaagcaaggactctagctcccccagagctctgggcctgccccattcagagtgagcatctagacatggccccattttccagtgacctgggaagcgaagaagaggaggtggaatttgggccaggacttacttctttgacatggggatctggacaggcagaagaagaagaggaaacctcttcagataactctggtcagaccagatattattctccctgcgaagagcatcctgcagagaccaaccagaatgaaggcgctgaaagtgggactatcaggcagggggaagagctgccatctgaggagctgcaggaaagtcaagggctcttgcatccccaggaggtccaagttctggaggagcagggacagcaggaagcaggatttcggggggaaggaactctgagggaggatgtttgtgccgatgggctattaggggaggaacagatgatagagcaggttaatgatgaaaagggagaacagaagcaaaaacaggaacaggtacaagatgtgatgcttgggagacaaggagaaagaatggggctcactggggagccagagggtctgaatgacggtgagtgggagcaggaggatatggagaggaaggctcagggtcagggaggtccagaacagggagaagagaggaagagggagctgcaggtgccagaagagaacagggcggactctcaggacgaaaagagtcaaacctttttgggaaaatcagaggaagtaactggaaagcaagaagatcatggtataaaggagaaaggggtcccagtcagcgggcaggaggcgaaagagccagagagttgggatgggggcaggctgggggcagtgggaagagcgaggagcagggaagaggagaatgagcatcatgggccttcaatgcccgctctgatagcccctgaggactctcctcactgtgacctgtttccaggtgcctcatatctcgtgactcagattcccgggactcagacagagtccagggctgaggaactgtcccccgcagctctgtctcccttgctagagcccatcagatgctctcaccagcccatttctctactgggctcctttttgactgaggagtcacctgacaaggaaaaacttctatcagtactttgatatgtcacagtttcatgtttatccagttcaatgtatttttaaatttttccttgagacttctttgactgatagattattgtgaagtgtgtttttaaatttccaaatgtttagggattttcatatctttcttatgctgatttccaattggattccctacaatgatttctggttttcatctgctctggatgattactatctcttttaaatttgttgtggcgagttttagggcctaggacagctctatcttgccatgtgtttcgtcagcactcaaaaaaaatatgtgtattctgctgttactgtgtggaatattctgtaaatgccaaatagattcttttggttaatggcattttgagttgttttatattcttgttgattttcttttttttcctctttttaaaaacatgaaatgcttcacaaaattttgtgtaatctatattcaagaaccattttaatcttgttggcatcattctgattttagaaagtgctgccaaagccaacactccttgctgattttctgtctagttctatcaattattgaaaaaggcatgaggaaatttctaactataattgtggattcatctatatctcctttcagttttctttttttaaaaaaaatcaatgaaaatttattaaattaagcataaagttactttcacatttatctacaaccacagtgaatacagttcttggcatgaagacaccacaacctttagaatttaaagcctcctcacctgcaagattacatatataaaactcccactattgtttctctaagagtggattagttcaccaagttaaaagttatatgatctagaatataataaaatggaaatgatttactcata

SEQ ID NO: 448784 - DNA, 2312 bp, Homo sapiens
gattcagccctgatggaggctgaggaggcccagcatggagcctctcctcccatctctgccatagaggaattcagcattatcccggaggctcccatgaggagcagccaggtctctgcctgggggcttgaagctcaagaagatgaggacccatcctataagtggagagaggaacacagactctcagcaactcagcagagtgagttaagggatgtgtgtgactatgcgattgagacgatgccctcttttcccaaggaaggttctgcagatgtggagcccaatcaggaaagccttgtggctgaggcctgtgacactccggaacactgggaggcagtaccccagagcctagcaggccgacaagcaaggactctagctcccccagagctctgggcctgccccattcagagtgagcatctagacatggccccattttccagtgacctgggaagcgaagaagaggaggtggaatttgggccaggacttacttctttgacatggggatctggacaggcagaagaagaagaggaaacctcttcagataactctggtcagaccagatattattctccctgcgaagagcatcctgcagagaccaaccagaatgaaggcgctgaaagtgggactatcaggcagggggaagagctgccatctgaggagctgcaggaaagtcaagggctcttgcatccccaggaggtccaagttctggaggagcagggacagcaggaagcaggatttcggggggaaggaactctgagggaggatgtttgtgccgatgggctattaggggaggaacagatgatagagcaggttaatgatgaaaagggagaacagaagcaaaaacaggaacaggtacaagatgtgatgcttgggagacaaggagaaagaatggggctcactggggagccagagggtctgaatgacggtgagtgggagcaggaggatatggagaggaaggctcagggtcagggaggtccagaacagggagaagagaggaagagggagctgcaggtgccagaagagaacagggcggactctcaggacgaaaagagtcaaacctttttgggaaaatcagaggaagtaactggaaagcaagaagatcatggtataaaggagaaaggggtcccagtcagcgggcaggaggcgaaagagccagagagttgggatgggggcaggctgggggcagtgggaagagcgaggagcagggaagaggagaatgagcatcatgggccttcaatgcccgctctgatagcccctgaggactctcctcactgtgacctgtttccaggtgcctcatatctcgtgactcagattcccgggactcagacagagtccagggctgaggaactgtcccccgcagctctgtctcccttgctagagcccatcagatgctctcaccagcccatttctctactgggctcctttttgactgaggagtcacctgacaaggaaaaacttctatcagtactttgatatgtcacagtttcatgtttatccagttcaatgtatttttaaatttttccttgagacttctttgactgatagattattgtgaagtgtgtttttaaatttccaaatgtttagggattttcatatctttcttatgctgatttccaattggattccctacaatgatttctggttttcatctgctctggatgattactatctcttttaaatttgttgtggcgagttttagggcctaggacagctctatcttgccatgtgtttcgtcagcactcaaaaaaaatatgtgtattctgctgttactgtgtggaatattctgtaaatgccaaatagattcttttggttaatggcattttgagttgttttatattcttgttgattttcttttttttcctctttttaaaaacatgaaatgcttcacaaaattttgtgtaatctatattcaagaaccattttaatcttgttggcatcattctgattttagaaagtgctgccaaagccaacactccttgctgattttctgtctagttctatcaattattgaaaaaggcatgaggaaatttctaactataattgtggattcatctatatctcctttcagttttctttttttaaaaaaaatcaatgaaaatttattaaattaagcataaagttactttcacatttatctacaaccacagtgaatacagttcttggcatgaagacaccacaacctttagaatttaaagcctcctcacctgcaagattacatatataaaactcccactattgtttctctaagagtggattagttcaccaagttaaaagttatatgatctagaatataataaaatggaaatgatttactcata

SEQ ID NO: 448785 - DNA, 2315 bp, Homo sapiens
ggtggctgttctagaggatcccaggggctcgcagtcatcgcgatagaggaattcagcattatcccggaggctcccatgaggagcagccaggtctctgcctgggggcttgaagctcaagaagatgaggacccatcctataagtggagagaggaacacagactctcagcaactcagcagagtgagttaagggatgtgtgtgactatgcgattgagacgatgccctcttttcccaaggaaggttctgcagatgtggagcccaatcaggaaagccttgtggctgaggcctgtgacactccggaacactgggaggcagtaccccagagcctagcaggccgacaagcaaggactctagctcccccagagctctgggcctgccccattcagagtgagcatctagacatggccccattttccagtgacctgggaagcgaagaagaggaggtggaatttgggccaggacttacttctttgacatggggatctggacaggcagaagaagaagaggaaacctcttcagataactctggtcagaccagatattattctccctgcgaagagcatcctgcagagaccaaccagaatgaaggcgctgaaagtgggactatcaggcagggggaagagctgccatctgaggagctgcaggaaagtcaagggctcttgcatccccaggaggtccaagttctggaggagcagggacagcaggaagcaggatttcggggggaaggaactctgagggaggatgtttgtgccgatgggctattaggggaggaacagatgatagagcaggttaatgatgaaaagggagaacagaagcaaaaacaggaacaggtacaagatgtgatgcttgggagacaaggagaaagaatggggctcactggggagccagagggtctgaatgacggtgagtgggagcaggaggatatggagaggaaggctcagggtcagggaggtccagaacagggagaagagaggaagagggagctgcaggtgccagaagagaacagggcggactctcaggacgaaaagagtcaaacctttttgggaaaatcagaggaagtaactggaaagcaagaagatcatggtataaaggagaaaggggtcccagtcagcgggcaggaggcgaaagagccagagagttgggatgggggcaggctgggggcagtgggaagagcgaggagcagggaagaggagaatgagcatcatgggccttcaatgcccgctctgatagcccctgaggactctcctcactgtgacctgtttccaggtgcctcatatctcgtgactcagattcccgggactcagacagagtccagggctgaggaactgtcccccgcagctctgtctcccttgctagagcccatcagatgctctcaccagcccatttctctactgggctcctttttgactgaggagtcacctgacaaggaaaaacttctatcagtactttgatatgtcacagtttcatgtttatccagttcaatgtatttttaaatttttccttgagacttctttgactgatagattattgtgaagtgtgtttttaaatttccaaatgtttagggattttcatatctttcttatgctgatttccaattggattccctacaatgatttctggttttcatctgctctggatgattactatctcttttaaatttgttgtggcgagttttagggcctaggacagctctatcttgccatgtgtttcgtcagcactcaaaaaaaatatgtgtattctgctgttactgtgtggaatattctgtaaatgccaaatagattcttttggttaatggcattttgagttgttttatattcttgttgattttcttttttttcctctttttaaaaacatgaaatgcttcacaaaattttgtgtaatctatattcaagaaccattttaatcttgttggcatcattctgattttagaaagtgctgccaaagccaacactccttgctgattttctgtctagttctatcaattattgaaaaaggcatgaggaaatttctaactataattgtggattcatctatatctcctttcagttttctttttttaaaaaaaatcaatgaaaatttattaaattaagcataaagttactttcacatttatctacaaccacagtgaatacagttcttggcatgaagacaccacaacctttagaatttaaagcctcctcacctgcaagattacatatataaaactcccactattgtttctctaagagtggattagttcaccaagttaaataaagcccagaataaaggatggagtgtggagaaaaagaaagaaaaaacattgcggcgcagttatccg

SEQ ID NO: 448786 - DNA, 211 bp, Homo sapiens
gcgccgcagctatggagtgtcccgggagacggcgggcatgacggctacaggatgggcgcgaacaatggcaaacagtacggcagtgagggcaaaggcagctcgagcatctcatcagcctctcagagtgctgggattacagtcatgagccactacactgggctgagcatctttttgtgtgcttgttttatatgctgtctttggaggatacctc

SEQ ID NO: 448787 - DNA, 4142 bp, Homo sapiens
gcgccgcagctatggagtgtcccgggagacggcgggcatgacggctacaggatgggcgcgaacaatggcaaacagtacggcagtgagggcaaaggcagctcgagcatctcatctgacgtgagttcaagtacagatcacacgcccactaaagcccagaagaatgtggctaccagcgaagactccgacctgagcatgcgcacactgagcacgcccagcccagccctgatatgtccaccgaatctcccaggatttcagaatggaaggggctcgtccacctcctcgtcctccatcaccggggagacggtggccatggtgcactccccgcccccgacccgcctcacacacccgctcatccggctcgcctccagaccccagaaggagcaggccagcatagaccggctcccggaccactccatggtgcagatcttctccttcctgcccaccaaccagctgtgccgctgcgcgcgagtgtgccgccgctggtacaacctggcctgggacccgcggctctggaggactatccgcctgacgggcgagaccatcaacgtggaccgcgccctcaaggtgctgacccgcagactctgccaggacacccccaacgtgtgtctcatgctggaaaccgtaactgtcagtggctgcaggcggctcacagaccgagggctgtacaccatcgcccagtgctgccccgaactgaggcgactggaagtctcaggctgttacaatatctccaacgaggccgtctttgatgtggtgtccctctgccctaatctggagcacctggatgtgtcaggatgctccaaagtgacctgcatcagcttgacccgggaggcctccattaaactgtcacccttgcatggcaaacagatttccatccgctacctggacatgacggactgcttcgtgctggaggacgaaggcctgcacaccatcgcggcgcactgcacgcagctcacccacctctacctgcgccgctgcgtccgcctgaccgacgaaggcctgcgctacctggtgatctactgcgcctccatcaaggagctgagcgtcagcgactgccgcttcgtcagcgacttcggcctgcgggagatcgccaagctggagtcccgcctgcggtacctgagcatcgcgcactgcggccgggtcaccgacgtgggcatccgctacgtggccaagtactgcagcaagctgcgctacctcaacgcgaggggctgcgagggcatcacggaccacggtgtggagtacctcgccaagaactgcaccaaactcaaatccctggatatcggcaaatgccctttggtatccgacacgggcctggagtgcctggccctgaactgcttcaacctcaagcggctcagcctcaagtcctgcgagagcatcaccggccagggcttgcagatcgtggccgccaactgctttgacctccagacgctgaatgtccaggactgcgaggtctccgtggaggccctgcgctttgtcaaacgccactgcaagcgctgcgtcatcgagcacaccaacccggctttcttctgaagggacagagttcatccggcgttgtattcacacaaacctgaacaaagcaaatttttttaaaagcagcgtatgtaagcaccgacacccactcaaaacagctctttcttccgggaaggttattaggaatctggcctttatttttcctcatttctcatgggcaacagaggccaaagaaacgaagcaagacaaacagcaaacaggcattttggtcaggtcatttgtaggcagtttctcttctcacaaaagatgtacttaagcaggctgatcgctgttccttgagcaaggcgcttactctcctccgctcaggcccccaaggccgccctttccctcgcacacaggccccacccccacagttccacgccccccccccaaggccacaccctccctccctagagcagcagcgaggatccatcatcagaatcacagtgctctccagacctcctctctaaactgcttcattgacctaagtcactctcttcaatcccacacccatggacattcttgtcaactcaataccatagcactttgcataggcaaaatacttttcaggcctttttaaaaaattcattacagcaaacagctggggaaggacatgcagtcctcccccagctctgtcaatgactatgaccttggccaaagcacttcactgctctgggctgcagcttccagcactgaatcagaggccacacagcccaaagattagcttcatgtccattatagcattgagggagcagagatacccatacacagaagcaccttggcatagagcacccaggcatcgacctcttccaggagaactgattctgtggatggatgtgatttcaggagattgtgcagtgccagcatcagtgcataaagggtcctgtatgtcctttggctgcaaatcacccacttccctgtgtttcagtgggagaatttcctctcccacctcctcacatcctcttttgccaggctggatgctgtcgtctctgtacacaaatactttctgcattcccccctccacaccatcctagcgaggcaccagcacacctaatcacagcaaagcccagatccccccatcagttgcttttactcagtgttttcaaataggagtaaaggcccttgcaatttttaattaacaagcaaggcccaagggaacacatgtcctcaaaagtttttctgatccctcgccttgcacacctggcatgcatcaggcacatctgtcctacagctggcagagacagatgcctcggttctttgtcattcagattgcatttgacctcttctcatctatttatttctttatacatccagacttcatcacatgaagcctattggggttaagtttgtaagtgtttaattgtgcaaattgccaccctgtgtacctcctccatgtctgtctgcgtgttttccaccaaagaatgcaaagcagacttccaggtgtttaaattctgttcactcaacaatgccagatgaatggaagagggaacacactgagatgacttagactctggtccaccaaccagacccttggaaaggaatactaaaatcattacaaggtatggattttaaatggatgaaacttcaaattatcttatttggatagaagtctatattctagcctcatttgcatgaagtcagatagccagaagaaattccattgctggttttcacgaaattcacttgtcttttgctaataaacacatggccctttcccagattattctctagccaagccccacctttgttacgttgaaatccctcatttattttcttctcaaaatgcccattatccaaatgcagaacctctgcatctccaagccagttatgctgaatttgtcaaacttagacacccttgacaactgcactcctactgtaggctcctgtgcatactgtcgtcttctgtgggggatggagaggttagtgtgatgaggtggtgtctgcccaggaggtttctttcaaacatcatggcctcccatccaatcaacatcatcaaattacatgtgtaatcaaggctctgtgccatgggggaaatgaatcatttagctaggccaggatctagtgaaagccacagagtttaaaaccatgaaagaagttgaaggcagcattcctcagctctgtgacttgtgaccctatttgaagtttcaggatttgggtgtcacaaaggattgtccctaatccttggccctggggtcttccgagtgagctggtttaatactctgagaatgagcagggagatccagagaatgaatccctgaccgcatcacctaaactgtcttccaaacatgagacaaagctgactgttcacactgattgcccagcacataccgtcttgccagtttcttcttttctcccagtctcctgttcatccattctgttctcccttggggtgggaatctatgatggaggttactggggaaacagctcagcagatttttggagaccaaaccaaaggtctcactaggaaatttatctgttttaaaacattgcttccttcctggctctgctaaattgaatgctcattgtttgttgttgttgttttttaattctaatgttcaaatcactgcgtgctgtatgaatctagaaagccttaatttactaccaagaaataaagcaatatgttcgtaaaaaaaaca

SEQ ID NO: 448788 - DNA, 398 bp, Homo sapiens
atggttccatcccactttgactcacactgagcttagtcaactgaaattcttgcctctctcccaccttgtatttagtttttcattttagcccaaatatagtactttatgtggattcctggtgaatttttaacatccaagttttattctagtctccctgatctttttggatccagcacgtgtcacccaagccattggctcttcaacttcacgtcacccatacattttgtgaggaagccatcgatattttcccatgtaaaccatattaaaatgttttatatggcaaggatcaaatactagtctccacccacaaggctgatatagattatccagcctgttttaagggaagtcatgtttctttttaccacttatatttatgtcttcctcctcattagaattga

SEQ ID NO: 448789 - DNA, 684 bp, Homo sapiens
catctagatggaagctggggcttccttcctttcagatattggtgctaacatgaagctgaccaaagaattgatgggatctgcacactgtaaagccggtttcaggatggctgagctgacggtcaagaaagaagagaagatatgagccgcctgcattttggggtggtggcagtgaaatttagacttgtgatttggtatgacaatatatggctttttgtgattgttaacattaatgaaaacaagaaaaattagttgctcaaaagttgaaaaatggattcataaactttttattagagtaaggcaaaagaacatattaaaatagaggtaaattagaaatgtcaataagaacccatggacattttttataaggagactttatctgttctgtccctacagtgatttatgctcttggatatttttgctgtcatcctgacaaattctagttggaatatggaacaagcttatttgtagacctagtgcctgtggcttctaaagcaattttctgaaaagagaaaccactgcctgttggaagaatagttgattccatacctcaagctagggaaaaaaaatcagaattagtctgtgaattctagatgttgagagaaagcagggtttcattagggcatcggagagtcacaagtccataggatgcaaaaaggaagatgaaataaaattgcctgaaaaacg

SEQ ID NO: 448790 - DNA, 644 bp, Homo sapiens
cgttgtggcaggggtttttggaacagatatccagggcgacgaggaggctgggggcgcagagcagcgcgccgcacagcgcggccagcaggcgggggcgcggcatgctgcggggacgcgggcgctggaatgggcacgctgggctgctcagaccccgcggggttctggcgccttctcctctgggacccgccaacatgggccgcgttcgcaccaaaaccgtgaagaaggcggcccgggtcatcatagaaaagtactacacgcgcctgggcaacgacttccacacgaacaagcgcgtgtgcgaggagatcgccattatccccagcaaaaagctccgcaacaagatagcaggttatgtcacgcatctgatgaagcgaattcagagaggcccagtaagaggtatctccatcaagctgcaggaggaggagagagaaaggagagacaattatgttcctgaggtctcagccttggatcaggagattattgaagtagatcctgacactaaggaaatgctgaagcttttggacttcggcagtctgtccaaccttcaggtcactcagcctacagttgggatgaatttcaaaacgcctcggggacctgtttgaattttttctgtagtgctgtattattttcaataaatctgggacaac

SEQ ID NO: 448791 - DNA, 520 bp, Homo sapiens
  misc_feature (3)..(3): n is a, c, g, or t
aanaaaaaaccttccttgcgaattcggcacgagccaacatgggccgcgttcgcaccaaaaccgtgaagaaggcggcccgggtcatcatagaaaagtactacacgcgcctgggcaacgacttccacacgaacaagcgcgtgtgcgaggagatcgccattatccccagcaaaaagctccgcaacaagatagcaggttatgtcacgcatctgatgaagcgaattcagagaggcccagtaagaggtatctccatcaagctgcaggaggaggagagagaaaggagagacaattatgttcctgaggtctcagccttggatcaggagattattgaagtagatcctgacactaaggaaatgctgaagcttttggacttcggcagtctgtccaaccttcaggtcactcagcctacagttgggatgaatttcaaaacgcctcggggacctgtttgaattttttctgtagtgctgtattattttcaataaatctgggacaaccacggtggcggggggggggtgtggggggg

SEQ ID NO: 448792 - DNA, 825 bp, Homo sapiens
cgttgtggcaggggtttttggaacagatatccagggcgacgaggaggctgggggcgcagagcagcgcgccgcacagcgcggccagcaggcgggggcgcggcatgctgcggggacgcgggcgctggaatgggcacgctgggctgctcagaccccgcggggttctggcgccttctcctctgggacccgccaacatgggccgcgttcgcaccaaaaccgtgaagaaggcggcccgggtcatcatagaaaagtactacacgcgcctgggcaacgacttccacacgaacaagcgcgtgtgcgaggagatcgccattatccccagcaaaaagctccgcaacaagatagcaggttatgtcacgcatctgatgaagcgaattcagagaggcccagtaagaggtatctccatcaagctgcaggaggaggagagagaaaggagagacaattatgttcctgaggtctcagccttggatcaggagattattgaagtagatcctgacactaaggaaatgctgaagcttttggacttcggcagtctgtccaaccttcaggtcactcagcctacagttgggatgaatttcaaaacgcctcggggacctgtttgaattttttctgtagtgctgtattattttcaataaatctgggacaacaaaacacacaacaacccacacacacacaaaaaaacacacaaacaaaaaagaacaacacgtcgcgggggctcttatgggggggggaacacacggttctaaacaggcacagtggccacaagtgttcctctgacccccgtttttgtcacagggggaaatgccgggccccctatggagggcgcaa

SEQ ID NO: 448793 - DNA, 261 bp, Homo sapiens
gggggagagagagagagagagagactgcaggaggaggagagagaaaggagagacaattatgttcctgaggtctcagccttggatcaggagattattgaagtagatcctgacactaaggaaatgctgaagcttttggacttcggcagtctgtccaaccttcaggtcactcagcctacagttgggatgaatttcaaaacgcctcggggacctgtttgaattttttctgtagtgctgtattattttcaataaatctgggacaac

SEQ ID NO: 448794 - DNA, 245 bp, Homo sapiens
aatgtgactgaaatgatgatctaagagaaaggagagacaattatgttcctgaggtctcagccttggatcaggagattattgaagtagatcctgacactaaggaaatgctgaagcttttggacttcggcagtctgtccaaccttcaggtcactcagcctacagttgggatgaatttcaaaacgcctcggggacctgtttgaattttttctgtagtgctgtattattttcaataaatctgggacaac

SEQ ID NO: 448795 - DNA, 421 bp, Homo sapiens
gcgtgacataacctgctatcttgttgcggagctttttgctggggataatggcgatctcctcgcacacgcgcttgttcgtgtggaagtcgttgcccaggcgcgtgtagtacttttctatgatgacccgggccgccttcttcacggttttggtgcgaacgcggcccatgttggcgggtccttggtactgcaggaggaggagagagaaaggagagacaattatgttcctgaggtctcagccttggatcaggagattattgaagtagatcctgacactaaggaaatgctgaagcttttggacttcggcagtctgtccaaccttcaggtcactcagcctacagttgggatgaatttcaaaacgcctcggggacctgtttgaattttttctgtagtgctgtattattttcaataaatctgggacaac

SEQ ID NO: 448796 - DNA, 291 bp, Homo sapiens
gtctatcggaaggccctggtgatcaccaattcagccagaaaatcctccacggtcctgcaggaggaggagagagaaaggagagacaattatgttcctgaggtctcagccttggatcaggagattattgaagtagatcctgacactaaggaaatgctgaagcttttggacttcggcagtctgtccaaccttcaggtcactcagcctacagttgggatgaatttcaaaacgcctcggggacctgtttgaattttttctgtagtgctgtattattttcaataaatctgggacaac

SEQ ID NO: 448797 - DNA, 591 bp, Homo sapiens
agaggtacaatcccccggaacactatgccatgttacccagcttatcggaccatataggaagttgtacgctgcagtaccgtcggaatccgggtagcctactactactaaattcgcggccgctcgacaggacccgccaacatgggccgcgttcgcaccaaaaccgtgaagaaggcggcccgggtcatcatagaaaagtactacacgcgcctgggcaacgacttccacacgaacaagcgcgtgtgcgaggagatcgccattatccccagcaaaaagctccgcaacaagatagcaggttatgtcacgcatctgatgaagcgaattcagagaggcccagtaagaggtatctccatcaagctgcaggaggaggagagagaaaggagagacaattatgttcctgaggtctcagccttggatcaggagattattgaagtagatcctgacactaaggaaatgctgaagcttttggacttcggcagtctgtccaaccttcaggtcactcagcctacagttgggatgaatttcaaaacgcctcggggacctgtttgaattttttctgtagtgctgtattattttcaataaatctgggacaac

SEQ ID NO: 448798 - DNA, 500 bp, Homo sapiens
tccccccaccccaccccccaccctagctagacgaggctggtgtagcaatgggccgcgttcgcaccaaaaccgtgaagaaggcggcccgggtcatcatagaaaagtactacacgcgcctgggcaacgacttccacacgaacaagcgcgtgtgcgaggagatcgccattatccccagcaaaaagctccgcaacaagatagcaggttatgtcacgcatctgatgaagcgaattcagagaggcccagtaagaggtatctccatcaagctgcaggaggaggagagagaaaggagagacaattatgttcctgaggtctcagccttggatcaggagattattgaagtagatcctgacactaaggaaatgctgaagcttttggacttcggcagtctgtccaaccttcaggtcactcagcctacagttgggatgaatttcaaaacgcctcggggacctgtttgaattttttctgtagtgctgtattattttcaataaatctgggacaac

SEQ ID NO: 448799 - DNA, 509 bp, Homo sapiens
caggagtggctgcagctgactatgtattcctgaactggagccccagacccgccaacatgggccgcgttcgcaccaaaaccgtgaagaaggcggcccgggtcatcatagaaaagtactacacgcgcctgggcaacgacttccacacgaacaagcgcgtgtgcgaggagatcgccattatccccagcaaaaagctccgcaacaagatagcaggttatgtcacgcatctgatgaagcgaattcagagaggcccagtaagaggtatctccatcaagctgcaggaggaggagagagaaaggagagacaattatgttcctgaggtctcagccttggatcaggagattattgaagtagatcctgacactaaggaaatgctgaagcttttggacttcggcagtctgtccaaccttcaggtcactcagcctacagttgggatgaatttcaaaacgcctcggggacctgtttgaattttttctgtagtgctgtattattttcaataaatctgggacaac

SEQ ID NO: 448800 - DNA, 628 bp, Homo sapiens
acataaaaccctcattcacacgagaaaacaccctcatgttcatacacctatcccccattctcctcctatccctcaaccccgacatcattaccgggttttcctcttaaaaaaaaaaaaaaaaaaaaaaaaaaaaaaaaaaaaaaaaaaaaaaaacttttaccaaggacccgccaacatgggccgcgttcgcaccaaaaccgtgaagaaggcggcccgggtcatcatagaaaagtactacacgcgcctgggcaacgacttccacacgaacaagcgcgtgtgcgaggagatcgccattatccccagcaaaaagctccgcaacaagatagcaggttatgtcacgcatctgatgaagcgaattcagagaggcccagtaagaggtatctccatcaagctgcaggaggaggagagagaaaggagagacaattatgttcctgaggtctcagccttggatcaggagattattgaagtagatcctgacactaaggaaatgctgaagcttttggacttcggcagtctgtccaaccttcaggtcactcagcctacagttgggatgaatttcaaaacgcctcggggacctgtttgaattttttctgtagtgctgtattattttcaataaatctgggacaac

SEQ ID NO: 448801 - DNA, 722 bp, Homo sapiens
cggtgacagaaaagcagccgaggcggcgcaccgcatcagtacgcgcgcttgggaccccgctggagcccccgagagctcacacacgagcaggccgccagtcgcaatccgccaaaattcacgcggggggaaatcctgctgtgggtgcaagggcgcaatagcccaatcgccgttttcgcgttagagaaccacgcgaataaaagtgtgctagtccgaaaatcccgaaaaaaaaaaaaagggcggccgctcgcgatctagaactagtcgccaacatgggccgcgttcgcaccaaaaccgtgaagaaggcggcccgggtcatcatagaaaagtactacacgcgcctgggcaacgacttccacacgaacaagcgcgtgtgcgaggagatcgccattatccccagcaaaaagctccgcaacaagatagcaggttatgtcacgcatctgatgaagcgaattcagagaggcccagtaagaggtatctccatcaagctgcaggaggaggagagagaaaggagagacaattatgttcctgaggtctcagccttggatcaggagattattgaagtagatcctgacactaaggaaatgctgaagcttttggacttcggcagtctgtccaaccttcaggtcactcagcctacagttgggatgaatttcaaaacgcctcggggacctgtttgaattttttctgtagtgctgtattattttcaataaatctgggacaac

SEQ ID NO: 448802 - DNA, 722 bp, Homo sapiens; identical to SEQ ID NO: 448801

SEQ ID NO: 448803 - DNA, 250 bp, Homo sapiens
tttttcactgtgaaggagagagagagagacaagacagacgaggtgttgctcactgcaggtctcagccttggatcaggagattattgaagtagatcctgacactaaggaaatgctgaagcttttggacttcggcagtctgtccaaccttcaggtcactcagcctacagttgggatgaatttcaaaacgcctcggggacctgtttgaattttttctgtagtgctgtattattttcaataaatctgggacaac

SEQ ID NO: 448804 - DNA, 719 bp, Homo sapiens
  misc_feature (5)..(5): n is a, c, g, or t
  misc_feature (25)..(26): n is a, c, g, or t
  misc_feature (390)..(390): n is a, c, g, or t
ggtantctgaatcaaggacccgccnnctgggccgcgttcgcaccaaaaccgtgaagaaggcggcccgggtcatcatagaaaagtactacacgcgcctgggcaacgacttccacacgaacaagcgcgtgtgcgaggagatcgccattatccccagcaaaaagctccgcaacaagatagcaggttatgtcacgcatctgatgaagcgaattcagagaggcccagtaagaggtatctccatcaagattccaaagccctggcccaaggggggcacggggcacggagagagaaacggaccgacggaaccccaaaaacaaaaaaacgttttttttaaaaaaccttttttgggctttttttataccccaccctcttgaaaaggttcttccagccctntgcgggcaacaccttttttttccccaaaaaaaaggggggccggggggggcaaaaccgcggcaacttttacttgacagtacgaattcccgtttttggggggcaaaaaagccaaaaacccctaaagcgacaatggctgaaagggcccccccttttttatcttttcatcattggagcggcaacctttccgggacaaaagaggtaccctaggggtttcacccaaaaccccttccagggttccaaacctttcccaaaaggccaccataacccaaggttagggggaacttggaaactctttccaaaaccgggccccattttcccggggctaggga

SEQ ID NO: 448805 - DNA, 569 bp, Homo sapiens
  misc_feature (553)..(553): n is a, c, g, or t
gctggggttaattcggcacggagggccgacgggaggcgcggtcgcgccgaggcaccggaaggaagtgagacggcgtcgagaaaaaaccggggccgcgttcgcaccaaaaccgtgaagaaggcggcccgggtcatcatagaaaagtactacacgcgcctgggcaacgacttccacacgaacaagcgcgtgtgcgaggagatcgccattatccccagcaaaaagctccgcaacaagatagcaggttatgtcacgcatctgatgaagcgaattcagagaggcccagtaagaggtatctccatcaagctgcaggaggaggagagagaaaggagagacaattatgttcctgaggtctcagccttggatcaggagattattgaagtagatcctgacactaaggaaatgctgaagcttttggacttcggcagtctgtccaaccttcaggtcactcagcctacagttgggatgaatttcaaaacgcctcggggacctgtttgaattttttctgtagtgctgtattattttcaataaatctgggacaacgcaaaaaaacaanaaaaaaaaaacctccg

SEQ ID NO: 448806 - DNA, 1164 bp, Homo sapiens
  misc_feature (769)..(769): n is a, c, g, or t
cggtgacagaaaagcagccgaggcggcgcaccgcatcagtacgcgcgcttgggaccccgctggagcccccgagagctcacacacgagcaggccgccagtcgcaatccgccaaaattcacgcggggggaaatcctgctgtgggtgcaagggcgcaatagcccaatcgccgttttcgcgttagagaaccacgcgaataaaagtgtgctagtccgaaaatcccgaaaaaaaaaaaaagggcggccgctcgcgatctagaactagtcgccaacatgggccgcgttcgcaccaaaaccgtgaagaaggcggcccgggtcatcatagaaaagtactacacgcgcctgggcaacgacttccacacgaacaagcgcgtgtgcgaggagatcgccattatccccagcaaaaagctccgcaacaagatagcaggttatgtcacgcatctgatgaagcgaattcagagaggcccagtaagaggtatctccatcaagctgcaggaggaggagagagaaaggagagacaattatgttcctgaggtctcagccttggatcaggagattattgaagtagatcctgacactaaggaaatgctgaagcttttggacttcggcagtctgtccaaccttcaggtcactcagcctacagttgggatgaatttcaaaacgcctcggggacctgtttgaattttttctgtagtgctgtattattttcaataaatctgggacaacaaaaaaaaaaaaaaaaaaaaaaaaaaaaaaaaaaaaaaaaaaagccngggggccttttttgggggggggaaaaacaaggggctctacacaaggcggccatggtggccacctcgtgttccctagacccccgttttttggtgacacagcgggaacaaaccgcgggagggcccccaaatataggagggcgcggataaaattccgataacaccgcgggtgttccctttttatttcttctcgtcactacacccgccgaccaacacagccgccccgagcccgcgcgcgccacagcgtcgtgggggcctacacccatgtgttgtcccacaccaactgttgagtcgggagagaaacagtcttacacactcgttggtcccgctataaaccactattacgccaccaacaccagacgactagtcctccgcacgctctccctcttctcacctca

SEQ ID NO: 448807 - DNA, 532 bp, Homo sapiens
tatgtgcgaggcctgggtggcgcgccaacatgggccgcgttcgcaccaaaaccgtgaagaaggcggcccgggtcatcatagaaaagtactacacgcgcctgggcaacgacttccacacgaacaagcgcgtgtgcgaggagatcgccattatccccagcaaaaagctccgcaacaagatagcaggttatgtcacgcatctgatgaagcgaattcagagaggcccagtaagaggtatctccatcaagctgcaggaggaggagagagaaaggagagacaattatgttcctgaggtctcagccttggatcaggagattattgaagtagatcctgacactaaggaaatgctgaagcttttggacttcggcagtctgtccaaccttcaggtcactcagcctacagttgggatgaatttcaaaacgcctcggggacctgtttgaattttttctgtagtgctgtattattttcaataaatctgggacaacaaaaaaaaaacataaccccacctccccccccaattacataaccactactt

SEQ ID NO: 448808 - DNA, 279 bp, Homo sapiens
ggagagacctcaggaacataattgtctctcctttctctctccatcaagctgcaggaggaggagagagaaaggagagacctcaggaacgtctcagccttggatcaggagattattgaagtagatcctgacactaaggaaatgctgaagcttttggacttcggcagtctgtccaaccttcaggtcactcagcctacagttgggatgaatttcaaaacgcctcggggacctgtttgaattttttctgtagtgctgtattattttcaataaatctgggacaac

SEQ ID NO: 448809 - DNA, 482 bp, Homo sapiens
tatgtgcgaggcctgggtggcgcgccaacatgggccgcgttcgcaccaaaaccgtgaagaaggcggcccgggtcatcatagaaaagtactacacgcgcctgggcaacgacttccacacgaacaagcgcgtgtgcgaggagatcgccattatccccagcaaaaagctccgcaacaagatagcaggttatgtcacgcatctgatgaagcgaattcagagaggcccagtaagaggtatctccatcaagctgcaggaggaggagagagaaaggagagacaattatgttcctgaggtctcagccttggatcaggagattattgaagtagatcctgacactaaggaaatgctgaagcttttggacttcggcagtctgtccaaccttcaggtcactcagcctacagttgggatgaatttcaaaacgcctcggggacctgtttgaattttttctgtagtgctgtattattttcaataaatctgggacaac

SEQ ID NO: 448810 - DNA, 509 bp, Homo sapiens; identical to SEQ ID NO: 448799

SEQ ID NO: 448811 - DNA, 532 bp, Homo sapiens
gcccgccaacatgggccgcgttcgcaccaaaaccgtgaagaaggcggcccgggtcatcatagaaaagtactacacgcgcctgggccgcgttcgcaccaaaaccgtgaagaaggcggcccgggtcatcatagaaaagtactacacgcgcctgggcaacgacttccacacgaacaagcgcgtgtgcgaggagatcgccattatccccagcaaaaagctccgcaacaagatagcaggttatgtcacgcatctgatgaagcgaattcagagaggcccagtaagaggtatctccatcaagctgcaggaggaggagagagaaaggagagacaattatgttcctgaggtctcagccttggatcaggagattattgaagtagatcctgacactaaggaaatgctgaagcttttggacttcggcagtctgtccaaccttcaggtcactcagcctacagttgggatgaatttcaaaacgcctcggggacctgtttgaattttttctgtagtgctgtattattttcaataaatctgggacaac

SEQ ID NO: 448812 - DNA, 453 bp, Homo sapiens
ttttttttttgttgtcccagatttattgaaaataatacagcactacagaaaaaattcaaacaggtccccgaggagatcgccattatccccagcaaaaagctccgcaacaagatagcaggttatgtcacgcatctgatgaagcgaattcagagaggcccagtaagaggtatctccatcaagctgcaggaggaggagagagaaaggagagacaattatgttcctgaggtctcagccttggatcaggagattattgaagtagatcctgacactaaggaaatgctgaagcttttggacttcggcagtctgtccaaccttcaggtcactcagcctacagttgggatgaatttcaaaacgcctcggggacctgtttgaattttttctgtagtgctgtattattttcaataaatctgggacaacagaagataaataccttgctaatctatatagacatgt

SEQ ID NO: 448813 - DNA, 840 bp, Homo sapiens
  misc_feature (41)..(41): n is a, c, g, or t
caaattacggctaggtagcgaggcttgggttgcgcaaggancgccaacatgggccgcgttcgcaccaaaaccgtgaagaaggcggcccgggtcatcatagaaaagtactacacgcgcctgggcaacgacttccacacgaacaagcgcgtgtgcgaggagatcgccattatccccagcaaaaagctccgcaacaagatagcaggttatgtcacgcatctgatgaagcgaattcagagaggcccagtaagaggtatctccatcaagctgcaggaggaggagagagaaaggagagacaattatgttcctgaggtctcagccttggatcaggagattattgaagtagatcctgacactaaggaaatgctgaagcttttggacttcggcagtctgtccaaccttcaggtcactcagcctacagttgggatgaatttcaaaacgcctcggggacctgtttgaattttttctgtagtgctgtattattttcaataaatctgggacaacaaaaaaaaaaacaaaaaaaaaaaaaaaaaaaaaaaaaaaaaaaaaaaaaaaagaaaaaaaaaaaaaaaaaaaaaaaaaaaaaaaaagaaggggcgggcgccgacgtaaaaaaatgaactccgccggaggagcacccccacaaactgccctgcccgccacatttttttatgagaagaggcggccctaccactttatggggacttttatataaaagcacagcgccgcgcgctgcgttaaaaccaccgagcgtggggcaaaaaaaacctgcggccagcgagctcgttttaggaggaccgcccccctcgggggggggggacaaacacgtggcgaaccccccag

SEQ ID NO: 448814 - DNA, 458 bp, Homo sapiens
agaggtacaatcccccggaacactatgccatgttacccagcttatcggaccatataggaagttgtacgctgcagtaccgtcggaatccgggtagcctactactactaaattcgcggccgctcgactatccccagcaaaaagctccgcttaagatagcaggttatgtcacgcatctgatgaagcgaattcagagaggcccagtaagaggtatctccatcaagctgcaggaggaggagagagaaaggagagacaattatgttcctgaggtctcagccttggatcaggagattattgaagtagatcctgacactaaggaaatgctgaagcttttggacttcggcagtctgtccaaccttcaggtcactcagcctacagttgggatgaatttcaaaacgcctcggggacctgtttgaattttttctgtagtgctgtattattttcaataaatctgggacaac

SEQ ID NO: 448815 - DNA, 523 bp, Homo sapiens
gggggagagagagagagagagagagagagagagagagagagagagagagagagagcaaggacccgccaacatgggccgcgttcgcaccaaaaccgtgaagaaggcggcccgggtcatcatagaaaagtactacacgcgcctgggcaacgacttccacacgaacaagcgcgtgtgcgaggagatcgccattatccccagcaaaaagctccgcaacaagatagcaggttatgtcacgcatctgatgaagcgaattcagagaggcccagtaagaggtatctccatcaagctgcaggaggaggagagagaaaggagagacaattatgttcctgaggtctcagccttggatcaggagattattgaagtagatcctgacactaaggaaatgctgaagcttttggacttcggcagtctgtccaaccttcaggtcactcagcctacagttgggatgaatttcaaaacgcctcggggacctgtttgaattttttctgtagtgctgtattattttcaataaatctgggacaac

SEQ ID NO: 448816 - DNA, 809 bp, Homo sapiens
  misc_feature (3)..(3): n is a, c, g, or t
  misc_feature (662)..(662): n is a, c, g, or t
  misc_feature (706)..(707): n is a, c, g, or t
  misc_feature (709)..(709): n is a, c, g, or t
  misc_feature (712)..(712): n is a, c, g, or t
  misc_feature (718)..(718): n is a, c, g, or t
aanaaaaaaccttccttgcgaattcggcacgagccaacatgggccgcgttcgcaccaaaaccgtgaagaaggcggcccgggtcatcatagaaaagtactacacgcgcctgggcaacgacttccacacgaacaagcgcgtgtgcgaggagatcgccattatccccagcaaaaagctccgcaacaagatagcaggttatgtcacgcatctgatgaagcgaattcagagaggcccagtaagaggtatctccatcaagctgcaggaggaggagagagaaaggagagacaattatgttcctgaggtctcagccttggatcaggagattattgaagtagatcctgacactaaggaaatgctgaagcttttggacttcggcagtctgtccaaccttcaggtcactcagcctacagttgggatgaatttcaaaacgcctcggggacctgtttgaattttttctgtagtgctgtattattttcaataaatctgggacaacaaaaaaaaaaaaaaaaaaaaaaaaaaaaaaaaaaaaaaaaaaaaaaaccccggggacccattggcgggggggggaaaaaggggtttggaaggggcccggggccaaaggtgtgttcccgggacccagttttcttggcacaagggggcaaaaccggcgcggggcccccaaaanggggagcgcggaataaattcgaaaaccccgggtacccggttagnncncgnaaaagncacgtcacatatgcacctacacagacacatgaagcaggtccacatatactcaaacacgccaataccatcagcgtaataaacatctcacaca

SEQ ID NO: 448817 - DNA, 927 bp, Homo sapiens
  misc_feature (3)..(3): n is a, c, g, or t
  misc_feature (729)..(729): n is a, c, g, or t
aanaaaaaaccttccttgcgaattcggcacgagccaacatgggccgcgttcgcaccaaaaccgtgaagaaggcggcccgggtcatcatagaaaagtactacacgcgcctgggcaacgacttccacacgaacaagcgcgtgtgcgaggagatcgccattatccccagcaaaaagctccgcaacaagatagcaggttatgtcacgcatctgatgaagcgaattcagagaggcccagtaagaggtatctccatcaagctgcaggaggaggagagagaaaggagagacaattatgttcctgaggtctcagccttggatcaggagattattgaagtagatcctgacactaaggaaatgctgaagcttttggacttcggcagtctgtccaaccttcaggtcactcagcctacagttgggatgaatttcaaaacgcctcggggacctgtttgaattttttctgtagtgctgtattattttcaataaatctgggacaacaaaaaaaaaaaaaaaaaaaaaaaaaaaaaaaaaaaaaaaaaaaaaaacgaggggggaaatatggcggggggggaaaaaaggggtttaaaagggggcgggggcagggggttgagggacacgtttttgtggtcaccgagagggggatacacggcgcgggaccccccataaggggaggagggcgtaaaaattctgcgaaagcggggggttctcgtgtttttatgactctgtgctaaatacnaaaataataatacgagaataagagtagaaagaataggggggtgtaaactaatgagtaaaacaaaaatgtgatgtgcgacaagaatgaacataatcatattcatataaactaagcacgagagacaagctatagatgataatacataatagtgactataataatgattaatattaagaagaataagagaactagtagata

SEQ ID NO: 448818 - DNA, 710 bp, Homo sapiens
  misc_feature (3)..(3): n is a, c, g, or t
  misc_feature (571)..(572): n is a, c, g, or t
  misc_feature (614)..(614): n is a, c, g, or t
  misc_feature (648)..(648): n is a, c, g, or t
aanaaaaaaccttccttgcgaattcggcacgagccaacatgggccgcgttcgcaccaaaaccgtgaagaaggcggcccgggtcatcatagaaaagtactacacgcgcctgggcaacgacttccacacgaacaagcgcgtgtgcgaggagatcgccattatccccagcaaaaagctccgcaacaagatagcaggttatgtcacgcatctgatgaagcgaattcagagaggcccagtaagaggtatctccatcaagctgcaggaggaggagagagaaaggagagacaattatgttcctgaggtctcagccttggatcaggagattattgaagtagatcctgacactaaggaaatgctgaagcttttggacttcggcagtctgtccaaccttcaggtcactcagcctacagttgggatgaatttcaaaacgcctcggggacctgtttgaattttttctgtagtgctgtattattttcaataaatctgggacaacaaaaaaaaaaaaaaaaaaaaaaaaaaacgcgggggcttttatggggggggggggaaaaagggggaaaagaaagggggccnnggggcacaaagggtgtgtccccggacccacagttttgtgggncacaaggggggaaaactcggcggggatcccccanatgagggaggcgggaaaaaattccgaaaaacccgtggtaacccgggatagaagaagagggac

SEQ ID NO: 448819 - DNA, 1206 bp, Homo sapiens
  misc_feature (3)..(3): n is a, c, g, or t
aanaaaaaaccttccttgcgaattcggcacgagccaacatgggccgcgttcgcaccaaaaccgtgaagaaggcggcccgggtcatcatagaaaagtactacacgcgcctgggcaacgacttccacacgaacaagcgcgtgtgcgaggagatcgccattatccccagcaaaaagctccgcaacaagatagcaggttatgtcacgcatctgatgaagcgaattcagagaggcccagtaagaggtatctccatcaagctgcaggaggaggagagagaaaggagagacaattatgttcctgaggtctcagccttggatcaggagattattgaagtagatcctgacactaaggaaatgctgaagcttttggacttcggcagtctgtccaaccttcaggtcactcagcctacagttgggatgaatttcaaaacgcctcggggacctgtttgaattttttctgtagtgctgtattattttcaataaatctgggacaacaaaaaaaaaaaaaaaaaaaaaaaaaaacgggggaaaaaattctccccgcgggaaaaccctctgcgggaagagagaaaccccgaaagggtggcgcgggggaaaccccggggccccgtcaaaatgtgtattggggggggaaaggggggtctggggaaaaaagaacttggggaaaaggtattgggagggggaaaatggaaaaaacgttttttacccctggggtggtgcgggttaatcctatggtgttccccaacccaaaaggggaactataaaggtccagtcgttgggggaacagcgcggccgggaaacatcgggggggccggaacaagcgcatattattcaaaccatggtgtgcccacaaaggtggggacgaacccaaacgtcactacaaagagtgtggcgacgcgggctagaaaactgggtccgctgttgggtgcagaacatccccctgggttctgtgctgccacccggcgcggcacatgaggcagcgaaacggcgagggggaacacaaggtgttcaccgcagaaaacacttgggcaccaaatgcggccaacgaaacaccgtggaaaacccaccggcgtgtgtgcaaccacgggggcacccatgatgatatgagggacgctcccccacaaaagatgtgacccgcgagcaatacaaccacagagacgaacccccgagcacacgaagtacacgcacagtttgaggcgtccggaaacga

SEQ ID NO: 448820 - DNA, 697 bp, Homo sapiens
  misc_feature (3)..(3): n is a, c, g, or t
aanaaaaaaccttccttgcgaattcggcacgagccaacatgggccgcgttcgcaccaaaaccgtgaagaaggcggcccgggtcatcatagaaaagtactacacgcgcctgggcaacgacttccacacgaacaagcgcgtgtgcgaggagatcgccattatccccagcaaaaagctccgcaacaagatagcaggttatgtcacgcatctgatgaagcgaattcagagaggcccagtaagaggtatctccatcaagctgcaggaggaggagagagaaaggagagacaattatgttcctgaggtctcagccttggatcaggagattattgaagtagatcctgacactaaggaaatgctgaagcttttggacttcggcagtctgtccaaccttcaggtcactcagcctacagttgggatgaatttcaaaacgcctcggggacctgtttgaattttttctgtagtgctgtattattttcaataaatctgggacaacaaaaaaaaaaacaaaaaaaaaaaaaattcggggggatttaatgggggggggggaaaaaaggggtaatggaaaggggccatgggccatagcggtgtttccgggacccaggttttttggtccaagggggaaaatctggggggtccccctaatggggagtcgtataaatcggaaaagccgggtaaccggattaggccggggggaaaagc

SEQ ID NO: 448821 - DNA, 672 bp, Homo sapiens
  misc_feature (3)..(3): n is a, c, g, or t
aanaaaaaaccttccttgcgaattcggcacgagccaacatgggccgcgttcgcaccaaaaccgtgaagaaggcggcccgggtcatcatagaaaagtactacacgcgcctgggcaacgacttccacacgaacaagcgcgtgtgcgaggagatcgccattatccccagcaaaaagctccgcaacaagatagcaggttatgtcacgcatctgatgaagcgaattcagagaggcccagtaagaggtatctccatcaagctgcaggaggaggagagagaaaggagagacaattatgttcctgaggtctcagccttggatcaggagattattgaagtagatcctgacactaaggaaatgctgaagcttttggacttcggcagtctgtccaaccttcaggtcactcagcctacagttgggatgaatttcaaaacgcctcggggacctgtttgaattttttctgtagtgctgtattattttcaataaatctgggacaacaaaacacacaacaacccacacacacacaaaaaaacacacaaacaaaaaagaacaacacgtcgcgggggctcttatgggggggggaacacacggttctaaacaggcacagtggccacaagtgttcctctgacccccgtttttgtcacagggggaaatgccgggccccctatggagggcgcaa

SEQ ID NO: 448822 - DNA, 732 bp, Homo sapiens
  misc_feature (3)..(3): n is a, c, g, or t
  misc_feature (593)..(594): n is a, c, g, or t
  misc_feature (636)..(636): n is a, c, g, or t
  misc_feature (670)..(670): n is a, c, g, or t
aanaaaaaaccttccttgcgaattcggcacgagccaacatgggccgcgttcgcaccaaaaccgtgaagaaggcggcccgggtcatcatagaaaagtactacacgcgcctgggcaacgacttccacacgaacaagcgcgtgtgcgaggagatcgccattatccccagcaaaaagctccgcaacaagatagcaggttatgtcacgcatctgatgaagcgaattcagagaggcccagtaagaggtatctccatcaagctgcaggaggaggagagagaaaggagagacaattatgttcctgaggtctcagccttggatcaggagattattgaagtagatcctgacactaaggaaatgctgaagcttttggacttcggcagtctgtccaaccttcaggtcactcagcctacagttgggatgaatttcaaaacgcctcggggacctgtttgaattttttctgtagtgctgtattattttcaataaatctgggacaacaaaaaaaaaaaaaaaaaaaaaaaaaaaaaaaaaaaaaaaaaaaaaaaaccgcgggggcttttatggggggggggggaaaaagggggaaaagaaagggggccnnggggcacaaagggtgtgtccccggacccacagttttgtgggncacaaggggggaaaactcggcggggatcccccanatgagggaggcgggaaaaaattccgaaaaacccgtggtaacccgggatagaagaagagggac

SEQ ID NO: 448823 - DNA, 761 bp, Homo sapiens
  misc_feature (3)..(3): n is a, c, g, or t
aanaaaaaaccttccttgcgaattcggcacgagccaacatgggccgcgttcgcaccaaaaccgtgaagaaggcggcccgggtcatcatagaaaagtactacacgcgcctgggcaacgacttccacacgaacaagcgcgtgtgcgaggagatcgccattatccccagcaaaaagctccgcaacaagatagcaggttatgtcacgcatctgatgaagcgaattcagagaggcccagtaagaggtatctccatcaagctgcaggaggaggagagagaaaggagagacaattatgttcctgaggtctcagccttggatcaggagattattgaagtagatcctgacactaaggaaatgctgaagcttttggacttcggcagtctgtccaaccttcaggtcactcagcctacagttgggatgaatttcaaaacgcctcggggacctgtttgaattttttctgtagtgctgtattattttcaataaatctgggacaacaaaaaaaaaattgcagtggaacaagctaaatgctgtattcattccaaatgaaaagaactagactggtgattgtactgtaggataaggggaaggcgggctgaggttatccttgaagggtgtcaaggggtagggaggagaagagagttatctacaagcataacctctaatttcatcagaatcagcgtatcagaagctgtgaacttagattggtatacagatgaggagcgtggtccttgaaccttttgggcgatttattccgggcggggcctg

SEQ ID NO: 448824 - DNA, 820 bp, Homo sapiens
  misc_feature (3)..(3): n is a, c, g, or t
aanaaaaaaccttccttgcgaattcggcacgagccaacatgggccgcgttcgcaccaaaaccgtgaagaaggcggcccgggtcatcatagaaaagtactacacgcgcctgggcaacgacttccacacgaacaagcgcgtgtgcgaggagatcgccattatccccagcaaaaagctccgcaacaagatagcaggttatgtcacgcatctgatgaagcgaattcagagaggcccagtaagaggtatctccatcaagctgcaggaggaggagagagaaaggagagacaattatgttcctgaggtctcagccttggatcaggagattattgaagtagatcctgacactaaggaaatgctgaagcttttggacttcggcagtctgtccaaccttcaggtcactcagcctacagttgggatgaatttcaaaacgcctcggggacctgtttgaattttttctgtagtgctgtattattttcaataaatctgggacaacaaaaaaaaaaaaaaaaaaaaaaaaaaaaaaaaaaaacaaaacaaaaacaaaaaaaaaaaaaaaaaaaaaaaaaaaagaaggggcgggcgccgacgtaaaaaaatgaactccgccggaggagcacccccacaaactgccctgcccgccacatttttttatgagaagaggcggccctaccactttatggggacttttatataaaagcacagcgccgcgcgctgcgttaaaaccaccgagcgtggggcaaaaaaaacctgcggccagcgagctcgttttaggaggaccgcccccctcgggggggggggacaaacacgtggcgaaccccccag

SEQ ID NO: 448825 - DNA, 1297 bp, Homo sapiens
  misc_feature (3)..(3): n is a, c, g, or t
aanaaaaaaccttccttgcgaattcggcacgagccaacatgggccgcgttcgcaccaaaaccgtgaagaaggcggcccgggtcatcatagaaaagtactacacgcgcctgggcaacgacttccacacgaacaagcgcgtgtgcgaggagatcgccattatccccagcaaaaagctccgcaacaagatagcaggttatgtcacgcatctgatgaagcgaattcagagaggcccagtaagaggtatctccatcaagctgcaggaggaggagagagaaaggagagacaattatgttcctgaggtctcagccttggatcaggagattattgaagtagatcctgacactaaggaaatgctgaagcttttggacttcggcagtctgtccaaccttcaggtcactcagcctacagttgggatgaatttcaaaacgcctcggggacctgtttgaattttttctgtagtgctgtattattttcaataaatctgggacaacaaaaaaaaaaaaaaaaaaaaaaaaaaaaaaaaaaaaaaaaaaagtttgcgcggcccacgtggcccagagaaaaggtcctccagacacaattggcgttggggcgggcgcggggccaccaccgttgtctgagaacaagagacggcagggagagacacggttgacctcagagaagacaccgcggtcccaggactgcggctcgggtacatccatacaaagaaaaaaatgcccggggcataacgacgacttttgtgcgaaagaaacactgcataatggcggtacttcaggagcccaaggagggaggccttaaaacaacgggtgctgcactacgcagcacgtgagtaagaatatgttgccctgcccgctgcggggtggaaatgagcattgtcatccgaacccttggagccacaggcagctcctcacctggcccgggaattcatgatcaaaagccgccgtaaggaagggcctcagtgaaggatgtgagcatcagcaaattcttcgatgatcctatgttgctggaaacttgccaaacaaggatgtagtgctcaattaccccatgtgagtgcgtggactcctgggagctccatgctcactacagtgggcttgcactcctgtacttgaaggctgagactcatatgacgttggccttcgagtaggcagaagagtgtctggaagctgctgtagcatcttgcaacaacgtcagcgaagctccaaaccagagccccagtgagagaggaccctcggcctcctgcttcttctgtgcctctgccgggctcattccaggaaagacaggagttggggctcccaga

SEQ ID NO: 448826 - DNA, 534 bp, Homo sapiens
  misc_feature (3)..(3): n is a, c, g, or t
aanaaaaaaccttccttgcgaattcggcacgagccaacatgggccgcgttcgcaccaaaaccgtgaagaaggcggcccgggtcatcatagaaaagtactacacgcgcctgggcaacgacttccacacgaacaagcgcgtgtgcgaggagatcgccattatccccagcaaaaagctccgcaacaagatagcaggttatgtcacgcatctgatgaagcgaattcagagaggcccagtaagaggtatctccatcaagctgcaggaggaggagagagaaaggagagacaattatgttcctgaggtctcagccttggatcaggagattattgaagtagatcctgacactaaggaaatgctgaagcttttggacttcggcagtctgtccaaccttcaggtcactcagcctacagttgggatgaatttcaaaacgcctcggggacctgtttgaattttttctgtagtgctgtattattttcaataaatctgggacaacaaaagtcgacgcggccgcgaatttagtagtagtaggcggcagc

SEQ ID NO: 448827 - DNA, 694 bp, Homo sapiens
  misc_feature (3)..(3): n is a, c, g, or t
  misc_feature (502)..(502): n is a, c, g, or t
aanaaaaaaccttccttgcgaattcggcacgagccaacatgggccgcgttcgcaccaaaaccgtgaagaaggcggcccgggtcatcatagaaaagtactacacgcgcctgggcaacgacttccacacgaacaagcgcgtgtgcgaggagatcgccattatccccagcaaaaagctccgcaacaagatagcaggttatgtcacgcatctgatgaagcgaattcagagaggcccagtaagaggtatctccatcaagctgcaggaggaggagagagaaaggagagacaattatgttcctgaggtctcagccttggatcaggagattattgaagtagatcctgacactaaggaaatgctgaagcttttggacttcggcagtctgtccaaccttcaggtcactcagcctacagttgggatgaatttcaaaacgcctcggggacctgtttgaattttttctgtagtgctgtattattttcaataaatctgggacaacaaaaaaaaaanaaaaaaaaaaaattcggggggatttaatgggggggggggaaaaaaggggtaatggaaaggggccatgggccatagcggtgtttccgggacccaggttttttggtccaagggggaaaatctggggggtccccctaatggggagtcgtataaatcggaaaagccgggtaaccggattaggccggggggaaaagc

SEQ ID NO: 448828 - DNA, 863 bp, Homo sapiens
  misc_feature (3)..(3): n is a, c, g, or t
  misc_feature (502)..(502): n is a, c, g, or t
aanaaaaaaccttccttgcgaattcggcacgagccaacatgggccgcgttcgcaccaaaaccgtgaagaaggcggcccgggtcatcatagaaaagtactacacgcgcctgggcaacgacttccacacgaacaagcgcgtgtgcgaggagatcgccattatccccagcaaaaagctccgcaacaagatagcaggttatgtcacgcatctgatgaagcgaattcagagaggcccagtaagaggtatctccatcaagctgcaggaggaggagagagaaaggagagacaattatgttcctgaggtctcagccttggatcaggagattattgaagtagatcctgacactaaggaaatgctgaagcttttggacttcggcagtctgtccaaccttcaggtcactcagcctacagttgggatgaatttcaaaacgcctcggggacctgtttgaattttttctgtagtgctgtattattttcaataaatctgggacaacaaaaaaaaaanaaaaaaaaaaaaaaaaaaaaaaaaaaaaaaaaaaaaaaacaaaaaaaaaaacaaacaagaaaaaaatagaaaaaaaaaaaaaaaaaaaaaaaaaaaaaaaaaaaaaaagaaggggcgggcgccgacgtaaaaaaatgaactccgccggaggagcacccccacaaactgccctgcccgccacatttttttatgagaagaggcggccctaccactttatggggacttttatataaaagcacagcgccgcgcgctgcgttaaaaccaccgagcgtggggcaaaaaaaacctgcggccagcgagctcgttttaggaggaccgcccccctcgggggggggggacaaacacgtggcgaaccccccag

SEQ ID NO: 448829 - DNA, 634 bp, Homo sapiens
  misc_feature (3)..(3): n is a, c, g, or t
aanaaaaaaccttccttgcgaattcggcacgagccaacatgggccgcgttcgcaccaaaaccgtgaagaaggcggcccgggtcatcatagaaaagtactacacgcgcctgggcaacgacttccacacgaacaagcgcgtgtgcgaggagatcgccattatccccagcaaaaagctccgcaacaagatagcaggttatgtcacgcatctgatgaagcgaattcagagaggcccagtaagaggtatctccatcaagctgcaggaggaggagagagaaaggagagacaattatgttcctgaggtctcagccttggatcaggagattattgaagtagatcctgacactaaggaaatgctgaagcttttggacttcggcagtctgtccaaccttcaggtcactcagcctacagttgggatgaatttcaaaacgcctcggggacctgtttgaattttttctgtagtgctgtattattttcaataaatctgggacaacaaaaatagaaaaaaaaaaaaggccccgcgcggtgaggttgtctagtccacgctcggagccatgccgtccaagggtccgttgcagtcggtgcaggtcttcggacgcaagaagacagcgacgttgtggcgcactgaaacgcggca

SEQ ID NO: 448830 - DNA, 520 bp, Homo sapiens
  misc_feature (3)..(3): n is a, c, g, or t
  misc_feature (504)..(504): n is a, c, g, or t
aanaaaaaaccttccttgcgaattcggcacgagccaacatgggccgcgttcgcaccaaaaccgtgaagaaggcggcccgggtcatcatagaaaagtactacacgcgcctgggcaacgacttccacacgaacaagcgcgtgtgcgaggagatcgccattatccccagcaaaaagctccgcaacaagatagcaggttatgtcacgcatctgatgaagcgaattcagagaggcccagtaagaggtatctccatcaagctgcaggaggaggagagagaaaggagagacaattatgttcctgaggtctcagccttggatcaggagattattgaagtagatcctgacactaaggaaatgctgaagcttttggacttcggcagtctgtccaaccttcaggtcactcagcctacagttgggatgaatttcaaaacgcctcggggacctgtttgaattttttctgtagtgctgtattattttcaataaatctgggacaacgcaaaaaaacaanaaaaaaaaaacctccg

SEQ ID NO: 448831 - DNA, 708 bp, Homo sapiens
  misc_feature (3)..(3): n is a, c, g, or t
aanaaaaaaccttccttgcgaattcggcacgagccaacatgggccgcgttcgcaccaaaaccgtgaagaaggcggcccgggtcatcatagaaaagtactacacgcgcctgggcaacgacttccacacgaacaagcgcgtgtgcgaggagatcgccattatccccagcaaaaagctccgcaacaagatagcaggttatgtcacgcatctgatgaagcgaattcagagaggcccagtaagaggtatctccatcaagctgcaggaggaggagagagaaaggagagacaattatgttcctgaggtctcagccttggatcaggagattattgaagtagatcctgacactaaggaaatgctgaagcttttggacttcggcagtctgtccaaccttcaggtcactcagcctacagttgggatgaatttcaaaacgcctcggggacctgtttgaattttttctgtagtgctgtattattttcaataaatctgggacaacttatacggaatctacagcgcgtgtacgaggtgatcgccattatccccagcaaaaagctccgcaacaagatagcaggttatgtcacgcatctgatgaagcgaattcagagaggcccagtaagaggtatctccatcaagctgcaggaggaggagggagaaaggagagacaattatgttcctgaggtctcagccttggatcaggagattattgacgcaca

SEQ ID NO: 448832 - DNA, 1260 bp, Homo sapiens
  misc_feature (3)..(3): n is a, c, g, or t
aanaaaaaaccttccttgcgaattcggcacgagccaacatgggccgcgttcgcaccaaaaccgtgaagaaggcggcccgggtcatcatagaaaagtactacacgcgcctgggcaacgacttccacacgaacaagcgcgtgtgcgaggagatcgccattatccccagcaaaaagctccgcaacaagatagcaggttatgtcacgcatctgatgaagcgaattcagagaggcccagtaagaggtatctccatcaagctgcaggaggaggagagagaaaggagagacaattatgttcctgaggtctcagccttggatcaggagattattgaagtagatcctgacactaaggaaatgctgaagcttttggacttcggcagtctgtccaaccttcaggtcactcagcctacagttgggatgaatttcaaaacgcctcggggacctgtttgaattttttctgtagtgctgtattattttcaataaatctgggacaacaaaaaaaaaaaaaaaaaaaaaaaaaaaaaaaaaaaaaaaaaaaaaaagaaaaaaaaaaaaaaaaaaaaaaaaaaaaaaaaacgggggaaaaaattctccccgcgggaaaaccctctgcgggaagagagaaaccccgaaagggtggcgcgggggaaaccccggggccccgtcaaaatgtgtattggggggggaaaggggggtctggggaaaaaagaacttggggaaaaggtattgggagggggaaaatggaaaaaacgttttttacccctggggtggtgcgggttaatcctatggtgttccccaacccaaaaggggaactataaaggtccagtcgttgggggaacagcgcggccgggaaacatcgggggggccggaacaagcgcatattattcaaaccatggtgtgcccacaaaggtggggacgaacccaaacgtcactacaaagagtgtggcgacgcgggctagaaaactgggtccgctgttgggtgcagaacatccccctgggttctgtgctgccacccggcgcggcacatgaggcagcgaaacggcgagggggaacacaaggtgttcaccgcagaaaacacttgggcaccaaatgcggccaacgaaacaccgtggaaaacccaccggcgtgtgtgcaaccacgggggcacccatgatgatatgagggacgctcccccacaaaagatgtgacccgcgagcaatacaaccacagagacgaacccccgagcacacgaagtacacgcacagtttgaggcgtccggaaacga

SEQ ID NO: 448833 - DNA, 502 bp, Homo sapiens
  misc_feature (3)..(3): n is a, c, g, or t
aanaaaaaaccttccttgcgaattcggcacgagccaacatgggccgcgttcgcaccaaaaccgtgaagaaggcggcccgggtcatcatagaaaagtactacacgcgcctgggcaacgacttccacacgaacaagcgcgtgtgcgaggagatcgccattatccccagcaaaaagctccgcaacaagatagcaggttatgtcacgcatctgatgaagcgaattcagagaggcccagtaagaggtatctccatcaagctgcaggaggaggagagagaaaggagagacaattatgttcctgaggtctcagccttggatcaggagattattgaagtagatcctgacactaaggaaatgctgaagcttttggacttcggcagtctgtccaaccttcaggtcactcagcctacagttgggatgaatttcaaaacgcctcggggacctgtttgaattttttcttcagctgggttttcatatctgccgttttttttttctcttgtttcgtt

SEQ ID NO: 448834 - DNA, 1957 bp, Homo sapiens
  misc_feature (3)..(3): n is a, c, g, or t
aanaaaaaaccttccttgcgaattcggcacgagccaacatgggccgcgttcgcaccaaaaccgtgaagaaggcggcccgggtcatcatagaaaagtactacacgcgcctgggcaacgacttccacacgaacaagcgcgtgtgcgaggagatcgccattatccccagcaaaaagctccgcaacaagatagcaggttatgtcacgcatctgatgaagcgaattcagagaggcccagtaagaggtatctccatcaagctgcaggaggaggagagagaaaggagagacaattatgttcctgaggtctcagccttggatcaggagattattgaagtagatcctgacactaaggaaatgctgaagcttttggtaagtgtttgctggattcctaaagtggtattttcctggtcaaaaaccatcagtaggtcttattatccaaggtcacccagctagtaagtggcagagttgggaatcccatctaaacttgtagccactaaactggactgctttcataaggggtgtagcggaagttgtgtgcattgagttagttcgccacaagatcatgattcccaaatctagtggcttccaggacaccttttctctcttggctgcttctgttcttggttttatagctggcttacgttgccccctttgtgtcagccctggctgaatctgcctgcttttcttctgtgaaggcattcctttggtgtctccatgctaaccactcagaaatgagctttggtccatttccaggtacatacaaggcactacttaggtagttcacgagtatcttcattgcactttgatgttttttctatggcttatcttagtccttttgcatacttgggtgaaagcatgggcttcatgggcggttggtgattttgaacaacttcatttttcctatttttatggtcattaaatgtttaagacactcaaaaaggtagtagcaaaatgaactcacatgtactttcccagcttcagaaaaacatcaccagtacagctacagccccgctgtgggtcttttcttcctgaaataaccactgcgctgaatgcagcatttttgttgaaactaaaatgggtttctgaggaccaaataggacatggagttccaggtataagttgggcccttggcttcttgccctgcctaccagcctgaacttgtttgagggcagggtctgctcttgcctccctcccttctgcttgatgccttgtgtacttgggcccttcacaaatgttgattagattagtaatagctcttacccagggctggtcctggaaagcaagtggcactgtgtattctcaaagggacagagttttgctttagaggacatttggcaatgtccagacacatttttcgttctcatagccaggggatacctgctaacttctaaggggtagaggccaaggatgttgctaaactttctgcaatacacagtacagctgcctataacaaagaatgtccagcccaggatgtctacgttgccaagattgagaaacggtgttttagagtgattgataggaaggggttgtgaaaacagatacaaatggcatggtacattgggtaaaagtcatagagttgtaaatggggataccacatggtcaggtgtgtgttgaaggaagatcactctggaaaagtgggaggcattgagaaccctgttggctcttaaagggtccttcaggtcgcctctggacccccttgagagtgctgtggctctaggggcctgtgttttcttctggggtccactcacagatctcaccagtaactgctcactgaatccattttctcgttccaggacttcggcagtctgtccaaccttcaggtcactcagcctacagttgggatgaatttcaaaacgcctcggggacctgtttgaattttttctgtagtgctgtattattttcaataaatctgggacaacgcagcggcgcttataaaaaaaaaataaaagacggaaaagtca

SEQ ID NO: 448835 - DNA, 504 bp, Homo sapiens
  misc_feature (3)..(3): n is a, c, g, or t
  misc_feature (379)..(379): n is a, c, g, or t
  misc_feature (398)..(398): n is a, c, g, or t
  misc_feature (434)..(434): n is a, c, g, or t
  misc_feature (439)..(439): n is a, c, g, or t
  misc_feature (448)..(449): n is a, c, g, or t
  misc_feature (467)..(467): n is a, c, g, or t
  misc_feature (474)..(474): n is a, c, g, or t
  misc_feature (476)..(476): n is a, c, g, or t
  misc_feature (479)..(479): n is a, c, g, or t
  misc_feature (483)..(484): n is a, c, g, or t
  misc_feature (498)..(498): n is a, c, g, or t
  misc_feature (500)..(500): n is a, c, g, or t
aanaaaaaaccttccttgcgaattcggcacgagccaacatgggccgcgttcgcaccaaaaccgtgaagaaggcggcccgggtcatcatagaaaagtactacacgcgcctgggcaacgacttccacacgaacaagcgcgtgtgcgaggagatcgccattatccccagcaaaaagctccgcaacaagatagcaggttatgtcacgcatctgatgaagcgaattcagagaggcccagtaagaggtatctccatcaagctgcaggaggaggagagagaaaggagagacaattatgttcctgaggtctcagccttggatcaggagattattgaagtagatcctgacactaaggaaatgctgaagcttttggactccgccagtcngtccaactttcaggtcagncaccgtccagatggaatgaatttccaaacgccttgnggccnagtttgaanngtttttagtgtggtgtangacagtngncantgtnncacagtagcaggantnaggt

SEQ ID NO: 448836 - DNA, 2424 bp, Homo sapiens
  misc_feature (3)..(3): n is a, c, g, or t
aanaaaaaaccttccttgcgaattcggcacgagccaacatgggccgcgttcgcaccaaaaccgtgaagaaggcggcccgggtcatcatagaaaagtactacacgcgcctgggcaacgacttccacacgaacaagcgcgtgtgcgaggagatcgccattatccccagcaaaaagctccgcaacaagatagcaggttatgtcacgcatctgatgaagcgaattcagagaggcccagtaagaggtatctccatcaagctgcaggaggaggagagagaaaggagagacaattatgttcctgagggtaaactttctggatatttgggcttctggctaatcctcaaatgataaagctatgggttcttggcttccaaagggacctcagctgaatctgagacctttaatccatacattccataaccagctgtgggtgcccataggccccctaccagtttcttagcctccattctgctcttctggaaccagttaagtctattccatatttcatgagagcccttaatgttgatttgatgactgctgtcgtggctcgattgtttgcccctaatatagtattctttggtgtaaacacagacttcaagtgttctgaatactgaatgagggcatgggaaggtaaggccagaagaacaggtcatcggggtctgtaatactgtaagagactgctcaccttgtgagaggaatgctatccttgtgcagctcctcttccccatatttaagaacctggggagaggaggaggagaggtgagtgataatctcattgattggtattttgaccctacctcgtttccttgtaggtctcagccttggatcaggagattattgaagtagatcctgacactaaggaaatgctgaagcttttggtaagtgtttgctggattcctaaagtggtattttcctggtcaaaaaccatcagtaggtcttattatccaaggtcacccagctagtaagtggcagagttgggaatcccatctaaacttgtagccactaaactggactgctttcataaggggtgtagcggaagttgtgtgcattgagttagttcgccacaagatcatgattcccaaatctagtggcttccaggacaccttttctctcttggctgcttctgttcttggttttatagctggcttacgttgccccctttgtgtcagccctggctgaatctgcctgcttttcttctgtgaaggcattcctttggtgtctccatgctaaccactcagaaatgagctttggtccatttccaggtacatacaaggcactacttaggtagttcacgagtatcttcattgcactttgatgttttttctatggcttatcttagtccttttgcatacttgggtgaaagcatgggcttcatgggcggttggtgattttgaacaacttcatttttcctatttttatggtcattaaatgtttaagacactcaaaaaggtagtagcaaaatgaactcacatgtactttcccagcttcagaaaaacatcaccagtacagctacagccccgctgtgggtcttttcttcctgaaataaccactgcgctgaatgcagcatttttgttgaaactaaaatgggtttctgaggaccaaataggacatggagttccaggtataagttgggcccttggcttcttgccctgcctaccagcctgaacttgtttgagggcagggtctgctcttgcctccctcccttctgcttgatgccttgtgtacttgggcccttcacaaatgttgattagattagtaatagctcttacccagggctggtcctggaaagcaagtggcactgtgtattctcaaagggacagagttttgctttagaggacatttggcaatgtccagacacatttttcgttctcatagccaggggatacctgctaacttctaaggggtagaggccaaggatgttgctaaactttctgcaatacacagtacagctgcctataacaaagaatgtccagcccaggatgtctacgttgccaagattgagaaacggtgttttagagtgattgataggaaggggttgtgaaaacagatacaaatggcatggtacattgggtaaaagtcatagagttgtaaatggggataccacatggtcaggtgtgtgttgaaggaagatcactctggaaaagtgggaggcattgagaaccctgttggctcttaaagggtccttcaggtcgcctctggacccccttgagagtgctgtggctctaggggcctgtgttttcttctggggtccactcacagatctcaccagtaactgctcactgaatccattttctcgttccaggacttcggcagtctgtccaaccttcaggtcactcagcctacagttgggatgaatttcaaaacgcctcggggacctgtttgaattttttctgtagtgctgtattattttcaataaatctgggacaac

SEQ ID NO: 448837 - DNA, 328 bp, Homo sapiens
  misc_feature (3)..(3): n is a, c, g, or t
aanaaaaaaccttccttgcgaattcggcacgagccaacatgggccgcgttcgcaccaaaaccgtgaagaaggcggcccgggtcatcatagaaaagtactacacgcgcctgggcaacgacttccacacgaacaagcgcgtgtgcgaggagatcgccattatccccagcaaaaagctccgcaacaagatagcaggttatgtcacgcatctgatgaagcgaattcagagaggcccagtaagaggtatctccatcaagctgcaggaggaggagagagaaaggagagacaattatgttcctgaggacttcccaacatagggaccgaatgttca

SEQ ID NO: 448838 - DNA, 731 bp, Homo sapiens
  misc_feature (3)..(3): n is a, c, g, or t
  misc_feature (402)..(402): n is a, c, g, or t
aanaaaaaaccttccttgcgaattcggcacgagccaacatgggccgcgttcgcaccaaaaccgtgaagaaggcggcccgggtcatcatagaaaagtactacacgcgcctgggcaacgacttccacacgaacaagcgcgtgtgcgaggagatcgccattatccccagcaaaaagctccgcaacaagatagcaggttatgtcacgcatctgatgaagcgaattcagagaggcccagtaagaggtatctccatcaagattccaaagccctggcccaaggggggcacggggcacggagagagaaacggaccgacggaaccccaaaaacaaaaaaacgttttttttaaaaaaccttttttgggctttttttataccccaccctcttgaaaaggttcttccagccctntgcgggcaacaccttttttttccccaaaaaaaaggggggccggggggggcaaaaccgcggcaacttttacttgacagtacgaattcccgtttttggggggcaaaaaagccaaaaacccctaaagcgacaatggctgaaagggcccccccttttttatcttttcatcattggagcggcaacctttccgggacaaaagaggtaccctaggggtttcacccaaaaccccttccagggttccaaacctttcccaaaaggccaccataacccaaggttagggggaacttggaaactctttccaaaaccgggccccattttcccggggctaggga

SEQ ID NO: 448839 - DNA, 491 bp, Homo sapiens
  misc_feature (3)..(3): n is a, c, g, or t
aanaaaaaaccttccttgcgaattcggcacgagccaacatgggccgcgttcgcaccaaaaccgtgaagaaggcggcccgggtcatcatagaaaagtactacacgcgcctgggcaacgacttccacacgaacaagcgcgtgtgcgaggagatcgccattatccccagcaaaaagctccgcaacaagatagcaggttatgtcacgcatctgatgaagcgaattcagagaggcccagtaagaggtatctccatcaagctgcaggaggaggagagagaaaggagagacaattatgttcctgaggtctcagccttggatcaggagattattgaagtagatcctgacactaaggaaatgctgaagcttttggacttcggcagtctgtccaaccttcaggtcactcagcctacagttgggatgaatttcaaaacgcctcggggacctgtttgaattttttctgtagtgctgtattattttcaataaatctgggacaac

SEQ ID NO: 448840 - DNA, 504 bp, Homo sapiens
  misc_feature (7)..(7): n is a, c, g, or t
aaaactnaggctaggtacgaggctgggtgttgaatcggccgaggcgccaacatgggccgcgttcgcaccaaaaccgtgaagaaggcggcccgggtcatcatagaaaagtactacacgcgcctgggcaacgacttccacacgaacaagcgcgtgtgcgaggagatcgccattatccccagcaaaaagctccgcaacaagatagcaggttatgtcacgcatctgatgaagcgaattcagagaggcccagtaagaggtatctccatcaagctgcaggaggaggagagagaaaggagagacaattatgttcctgaggtctcagccttggatcaggagattattgaagtagatcctgacactaaggaaatgctgaagcttttggacttcggcagtctgtccaaccttcaggtcactcagcctacagttgggatgaatttcaaaacgcctcggggacctgtttgaattttttctgtagtgctgtattattttcaataaatctgggacaac

SEQ ID NO: 448841 - DNA, 710 bp, Homo sapiens
  misc_feature (7)..(7): n is a, c, g, or t
aaaactnaggctaggtacgaggctgggtgttgaatcggccgaggcgccaacatgggccgcgttcgcaccaaaaccgtgaagaaggcggcccgggtcatcatagaaaagtactacacgcgcctgggcaacgacttccacacgaacaagcgcgtgtgcgaggagatcgccattatccccagcaaaaagctccgcaacaagatagcaggttatgtcacgcatctgatgaagcgaattcagagaggcccagtaagaggtatctccatcaagctgcaggaggaggagagagaaaggagagacaattatgttcctgaggtctcagccttggatcaggagattattgaagtagatcctgacactaaggaaatgctgaagcttttggacttcggcagtctgtccaaccttcaggtcactcagcctacagttgggatgaatttcaaaacgcctcggggacctgtttgaattttttctgtagtgctgtattattttcaataaatctgggacaacaaaaaaaaaaacaaaaaaaaaaaaaattcggggggatttaatgggggggggggaaaaaaggggtaatggaaaggggccatgggccatagcggtgtttccgggacccaggttttttggtccaagggggaaaatctggggggtccccctaatggggagtcgtataaatcggaaaagccgggtaaccggattaggccggggggaaaagc

SEQ ID NO: 448842 - DNA, 512 bp, Homo sapiens
gcggccgcctactactactactactgctcgaattcaagcttctaacgatgtacggggacatgggccgcgttcgcaccaaaaccgtgaagaaggcggcccgggtcatcatagaaaagtactacacgcgcctgggcaacgacttccacacgaacaagcgcgtgtgcgaggagatcgccattatccccagcaaaaagctccgcaacaagatagcaggttatgtcacgcatctgatgaagcgaattcagagaggcccagtaagaggtatctccatcaagctgcaggaggaggagagagaaaggagagacaattatgttcctgaggtctcagccttggatcaggagattattgaagtagatcctgacactaaggaaatgctgaagcttttggacttcggcagtctgtccaaccttcaggtcactcagcctacagttgggatgaatttcaaaacgcctcggggacctgtttgaattttttctgtagtgctgtattattttcaataaatctgggacaac

SEQ ID NO: 448843 - DNA, 536 bp, Homo sapiens
  misc_feature (1)..(1): n is a, c, g, or t
  misc_feature (78)..(78): n is a, c, g, or t
nccccgccacacccccccccccccacccccacccccacccgcccaaccccaactaggctaggtacgaggcgggtgtgngcaacatgggccgcgttcgcaccaaaaccgtgaagaaggcggcccgggtcatcatagaaaagtactacacgcgcctgggcaacgacttccacacgaacaagcgcgtgtgcgaggagatcgccattatccccagcaaaaagctccgcaacaagatagcaggttatgtcacgcatctgatgaagcgaattcagagaggcccagtaagaggtatctccatcaagctgcaggaggaggagagagaaaggagagacaattatgttcctgaggtctcagccttggatcaggagattattgaagtagatcctgacactaaggaaatgctgaagcttttggacttcggcagtctgtccaaccttcaggtcactcagcctacagttgggatgaatttcaaaacgcctcggggacctgtttgaattttttctgtagtgctgtattattttcaataaatctgggacaac

SEQ ID NO: 448844 - DNA, 564 bp, Homo sapiens
tcccgagtaggctcagagcgaccgtggccgggcggaagcggctttctggcctaagctttaacaggcttcgcctgtgcttcctgtttcctcttttaccaaggacccgccaacatgggccgcgttcgcaccaaaaccgtgaagaaggcggcccgggtcatcatagaaaagtactacacgcgcctgggcaacgacttccacacgaacaagcgcgtgtgcgaggagatcgccattatccccagcaaaaagctccgcaacaagatagcaggttatgtcacgcatctgatgaagcgaattcagagaggcccagtaagaggtatctccatcaagctgcaggaggaggagagagaaaggagagacaattatgttcctgaggtctcagccttggatcaggagattattgaagtagatcctgacactaaggaaatgctgaagcttttggacttcggcagtctgtccaaccttcaggtcactcagcctacagttgggatgaatttcaaaacgcctcggggacctgtttgaattttttctgtagtgctgtattattttcaataaatctgggacaac

SEQ ID NO: 448845 - DNA, 720 bp, Homo sapiens
caggagtggctgcagctgactatgtattcctgaactggagccccagacccgccaacatgggccgcgttcgcaccaaaaccgtgaagaaggcggcccgggtcatcatagaaaagtactacacgcgcctgggcaacgacttccacacgaacaagcgcgtgtgcgaggagatcgccattatccccagcaaaaagctccgcaacaagatagcaggttatgtcacgcatctgatgaagcgaattcagagaggcccagtaagaggtatctccatcaagctgcaggaggaggagagagaaaggagagacaattatgttcctgaggtctcagccttggatcaggagattattgaagtagatcctgacactaaggaaatgctgaagcttttggacttcggcagtctgtccaaccttcaggtcactcagcctacagttgggatgaatttcaaaacgcctcggggacctgtttgaattttttctgtagtgctgtattattttcaataaatctgggacaacaaaaaaaaaaaaaaaaaaaaaaaaaagaaaaaaaagagaagaaaaaaaaaaaaccgcggggaattaattttgtgggggggggaaaaaaagtgtataatagtggggggtgggtatggtgttcacgaccccgttttttgtaaaaaggggggaagaagcgggggccccaaagagggggcggaatatatatggaaaagcgggggtcctcgttaaa

SEQ ID NO: 448846 - DNA, 575 bp, Homo sapiens
agaggtacaatcccccggaacactatgccatgttacccagcttatcggaccatataggaagttgtacgctgcagtaccgtcggaatccgggtagcctactactactaaattcgcggccgctcgacggccgcgttcgcaccaaaaccgtgaagaaggcggcccgggtcatcatagaaaagtactacacgcgcctgggcaacgacttccacacgaacaagcgcgtgtgcgaggagatcgccattatccccagcaaaaagctccgcaacaagatagcaggttatgtcacgcatctgatgaagcgaattcagagaggcccagtaagaggtatctccatcaagctgcaggaggaggagagagaaaggagagacaattatgttcctgaggtctcagccttggatcaggagattattgaagtagatcctgacactaaggaaatgctgaagcttttggacttcggcagtctgtccaaccttcaggtcactcagcctacagttgggatgaatttcaaaacgcctcggggacctgtttgaattttttctgtagtgctgtattattttcaataaatctgggacaac

SEQ ID NO: 448847 - DNA, 542 bp, Homo sapiens
caacagaagattacgaggcaggtaccggttttgtatttcaggacgcagggcgggtgtggaatagaaattgacataggcccggcggctgacatggccgcgttcgcaccaaaaccgtgaagaaggcggcccgggtcatcatagaaaagtactacacgcgcctgggcaacgacttccacacgaacaagcgcgtgtgcgaggagatcgccattatccccagcaaaaagctccgcaacaagatagcaggttatgtcacgcatctgatgaagcgaattcagagaggcccagtaagaggtatctccatcaagctgcaggaggaggagagagaaaggagagacaattatgttcctgaggtctcagccttggatcaggagattattgaagtagatcctgacactaaggaaatgctgaagcttttggacttcggcagtctgtccaaccttcaggtcactcagcctacagttgggatgaatttcaaaacgcctcggggacctgtttgaattttttctgtagtgctgtattattttcaataaatctgggacaac

SEQ ID NO: 448848 - DNA, 886 bp, Homo sapiens
  misc_feature (1)..(1): n is a, c, g, or t
  misc_feature (78)..(78): n is a, c, g, or t
  misc_feature (645)..(645): n is a, c, g, or t
  misc_feature (650)..(650): n is a, c, g, or t
  misc_feature (663)..(663): n is a, c, g, or t
  misc_feature (668)..(668): n is a, c, g, or t
  misc_feature (670)..(670): n is a, c, g, or t
nccccgccacacccccccccccccacccccacccccacccgcccaaccccaactaggctaggtacgaggcgggtgtgngcaacatgggccgcgttcgcaccaaaaccgtgaagaaggcggcccgggtcatcatagaaaagtactacacgcgcctgggcaacgacttccacacgaacaagcgcgtgtgcgaggagatcgccattatccccagcaaaaagctccgcaacaagatagcaggttatgtcacgcatctgatgaagcgaattcagagaggcccagtaagaggtatctccatcaagctgcaggaggaggagagagaaaggagagacaattatgttcctgaggtctcagccttggatcaggagattattgaagtagatcctgacactaaggaaatgctgaagcttttggacttcggcagtctgtccaaccttcaggtcactcagcctacagttgggatgaatttcaaaacgcctcggggacctgtttgaattttttctgtagtgctgtattattttcaataaatctgggacaacaaaaaaaaaaaaaaaaaaaaaaaaaaaaaaaaaaaaaaaaaaaggggggggggggaaaaagagattccccgggggggccaaagttaaggggaaccacaggtttttgtgnacaangggggcccataanggacncncgataaaagccaagcgcgaggccggacgtacaacaagcgtggacagggaacacaggccagcggggaaccagggggagagaacccaaatccggggggtgggacaaatgggacaaatacctacgaaattaaaaggctaaggaactttaacttaaggggcaaagggttaacaacgcaattgctggtttgaaaaattggaaggactagattgaaattacg

SEQ ID NO: 448849 - DNA, 492 bp, Homo sapiens
cgagagcgggtgttgacttcgtcacgctggccggccaacatgggccgcgttcgcaccaaaaccgtgaagaaggcggcccgggtcatcatagaaaagtactacacgcgcctgggcaacgacttccacacgaacaagcgcgtgtgcgaggagatcgccattatccccagcaaaaagctccgcaacaagatagcaggttatgtcacgcatctgatgaagcgaattcagagaggcccagtaagaggtatctccatcaagctgcaggaggaggagagagaaaggagagacaattatgttcctgaggtctcagccttggatcaggagattattgaagtagatcctgacactaaggaaatgctgaagcttttggacttcggcagtctgtccaaccttcaggtcactcagcctacagttgggatgaatttcaaaacgcctcggggacctgtttgaattttttctgtagtgctgtattattttcaataaatctgggacaac

SEQ ID NO: 448850 - DNA, 536 bp, Homo sapiens; identical to SEQ ID NO: 448843
  misc_feature (1)..(1): n is a, c, g, or t
  misc_feature (78)..(78): n is a, c, g, or t

SEQ ID NO: 448851 - DNA, 803 bp, Homo sapiens
  misc_feature (562)..(562): n is a, c, g, or t
  misc_feature (567)..(567): n is a, c, g, or t
  misc_feature (580)..(580): n is a, c, g, or t
  misc_feature (585)..(585): n is a, c, g, or t
  misc_feature (587)..(587): n is a, c, g, or t
tagggatacgcgaccacgccgtcggacccgccaacatgggccgcgttcgcaccaaaaccgtgaagaaggcggcccgggtcatcatagaaaagtactacacgcgcctgggcaacgacttccacacgaacaagcgcgtgtgcgaggagatcgccattatccccagcaaaaagctccgcaacaagatagcaggttatgtcacgcatctgatgaagcgaattcagagaggcccagtaagaggtatctccatcaagctgcaggaggaggagagagaaaggagagacaattatgttcctgaggtctcagccttggatcaggagattattgaagtagatcctgacactaaggaaatgctgaagcttttggacttcggcagtctgtccaaccttcaggtcactcagcctacagttgggatgaatttcaaaacgcctcggggacctgtttgaattttttctgtagtgctgtattattttcaataaatctgggacaacaaaaaaaaaaaaaaaaaaaaaaaaaaagattccccgggggggccaaagttaaggggaaccacaggtttttgtgnacaangggggcccataanggacncncgataaaagccaagcgcgaggccggacgtacaacaagcgtggacagggaacacaggccagcggggaaccagggggagagaacccaaatccggggggtgggacaaatgggacaaatacctacgaaattaaaaggctaaggaactttaacttaaggggcaaagggttaacaacgcaattgctggtttgaaaaattggaaggactagattgaaattacg

SEQ ID NO: 448852 - DNA, 501 bp, Homo sapiens
  misc_feature (41)..(41): n is a, c, g, or t
caaattacggctaggtagcgaggcttgggttgcgcaaggancgccaacatgggccgcgttcgcaccaaaaccgtgaagaaggcggcccgggtcatcatagaaaagtactacacgcgcctgggcaacgacttccacacgaacaagcgcgtgtgcgaggagatcgccattatccccagcaaaaagctccgcaacaagatagcaggttatgtcacgcatctgatgaagcgaattcagagaggcccagtaagaggtatctccatcaagctgcaggaggaggagagagaaaggagagacaattatgttcctgaggtctcagccttggatcaggagattattgaagtagatcctgacactaaggaaatgctgaagcttttggacttcggcagtctgtccaaccttcaggtcactcagcctacagttgggatgaatttcaaaacgcctcggggacctgtttgaattttttctgtagtgctgtattattttcaataaatctgggacaac

SEQ ID NO: 448853 - DNA, 927 bp, Homo sapiens
  misc_feature (927)..(927): n is a, c, g, or t
cgagagcgggtgttgacttcgtcacgctggccggccaacatgggccgcgttcgcaccaaaaccgtgaagaaggcggcccgggtcatcatagaaaagtactacacgcgcctgggcaacgacttccacacgaacaagcgcgtgtgcgaggagatcgccattatccccagcaaaaagctccgcaacaagatagcaggttatgtcacgcatctgatgaagcgaattcagagaggcccagtaagaggtatctccatcaagctgcaggaggaggagagagaaaggagagacaattatgttcctgaggtctcagccttggatcaggagattattgaagtagatcctgacactaaggaaatgctgaagcttttggacttcggcagtctgtccaaccttcaggtcactcagcctacagttgggatgaatttcaaaacgcctcggggacctgtttgaattttttctgtagtgctgtattattttcaataaatctgggacaacaaaaaaaaaaaaaaaaaaaaaaaaaaaaaaaaaaaaaaaaaaagaaaaaaaaaaaaaaaaaaaaaaaaaaaaaaaaaaaaaaaaaaaaaaacaaacaaaaaaaggggggggggggcagtcataataaaacgccgcaccgcaggcggcagccaaagacgacgacccccaaacgaacgatttaataacgcagagacgagcggcaccagcaggagggaggacagacaaaataacaaccgggcgcgcccgcgagaaaaagtagcaggaggaaaagaaagcacagcgtaggtaggcagaggcaaccacaccatcggggggggcgcaccaagaagcgacgccacccgcaagaggaaccggcgacagaggataaaccaacaacggagcgaaggtgcaaacaccgcaggatctgagcggagaagacgcgacggagtaaaagan

SEQ ID NO: 448854 - DNA, 883 bp, Homo sapiens
gggggagagagagagagagagagagagagagagagagagagagagagagagagagcaaggacccgccaacatgggccgcgttcgcaccaaaaccgtgaagaaggcggcccgggtcatcatagaaaagtactacacgcgcctgggcaacgacttccacacgaacaagcgcgtgtgcgaggagatcgccattatccccagcaaaaagctccgcaacaagatagcaggttatgtcacgcatctgatgaagcgaattcagagaggcccagtaagaggtatctccatcaagctgcaggaggaggagagagaaaggagagacaattatgttcctgaggtctcagccttggatcaggagattattgaagtagatcctgacactaaggaaatgctgaagcttttggacttcggcagtctgtccaaccttcaggtcactcagcctacagttgggatgaatttcaaaacgcctcggggacctgtttgaattttttctgtagtgctgtattattttcaataaatctgggacaacaaaaaaaaaaaaaaaaaaaaaaaaaaaaaaaaaaaaaaaaaaaaaaaaaaaaaaaaaaaaaaaaaaaaaaaaaaaaaaaaaaaaaaaaaaggggggggggcagataatatacaacgggggggggcacaatttattagcgaacacatagttgtttgataggaggagacagcaagaggggggaatttataaagagaaggcggggcggataaaaaacaggtaggtagagaaaacagagtgtggtagtttgcgaagagccccttgtggtggggaatatgggggacccaacgagtagtatagcgcaggaataatatggggtgttgtggccgctgttggtggagagtgcttttttaaatcggcaag

SEQ ID NO: 448855 - DNA, 844 bp, Homo sapiens
  misc_feature (3)..(3): n is a, c, g, or t
  misc_feature (603)..(603): n is a, c, g, or t
  misc_feature (608)..(608): n is a, c, g, or t
  misc_feature (621)..(621): n is a, c, g, or t
  misc_feature (626)..(626): n is a, c, g, or t
  misc_feature (628)..(628): n is a, c, g, or t
aanaaaaaaccttccttgcgaattcggcacgagccaacatgggccgcgttcgcaccaaaaccgtgaagaaggcggcccgggtcatcatagaaaagtactacacgcgcctgggcaacgacttccacacgaacaagcgcgtgtgcgaggagatcgccattatccccagcaaaaagctccgcaacaagatagcaggttatgtcacgcatctgatgaagcgaattcagagaggcccagtaagaggtatctccatcaagctgcaggaggaggagagagaaaggagagacaattatgttcctgaggtctcagccttggatcaggagattattgaagtagatcctgacactaaggaaatgctgaagcttttggacttcggcagtctgtccaaccttcaggtcactcagcctacagttgggatgaatttcaaaacgcctcggggacctgtttgaattttttctgtagtgctgtattattttcaataaatctgggacaacaaaaaaaaaaaaaaaaaaaaaaaaaaaaaaaaaaaaaaaaaaaaaaagggggggggggaaaaagagattccccgggggggccaaagttaaggggaaccacaggtttttgtgnacaangggggcccataanggacncncgataaaagccaagcgcgaggccggacgtacaacaagcgtggacagggaacacaggccagcggggaaccagggggagagaacccaaatccggggggtgggacaaatgggacaaatacctacgaaattaaaaggctaaggaactttaacttaaggggcaaagggttaacaacgcaattgctggtttgaaaaattggaaggactagattgaaattacg

SEQ ID NO: 448856 - DNA, 818 bp, Homo sapiens
  misc_feature (3)..(3): n is a, c, g, or t
aanaaaaaaccttccttgcgaattcggcacgagccaacatgggccgcgttcgcaccaaaaccgtgaagaaggcggcccgggtcatcatagaaaagtactacacgcgcctgggcaacgacttccacacgaacaagcgcgtgtgcgaggagatcgccattatccccagcaaaaagctccgcaacaagatagcaggttatgtcacgcatctgatgaagcgaattcagagaggcccagtaagaggtatctccatcaagctgcaggaggaggagagagaaaggagagacaattatgttcctgaggtctcagccttggatcaggagattattgaagtagatcctgacactaaggaaatgctgaagcttttggacttcggcagtctgtccaaccttcaggtcactcagcctacagttgggatgaatttcaaaacgcctcggggacctgtttgaattttttctgtagtgctgtattattttcaataaatctgggacaacaaaaaaaaaaaaaaaaaaaaaaaaaaaaaaaaaaaaaaaaaaaaaaaaaaaaaaaaaaaaaaaaaaaaaaaaaagaaggggcgggcgccgacgtaaaaaaatgaactccgccggaggagcacccccacaaactgccctgcccgccacatttttttatgagaagaggcggccctaccactttatggggacttttatataaaagcacagcgccgcgcgctgcgttaaaaccaccgagcgtggggcaaaaaaaacctgcggccagcgagctcgttttaggaggaccgcccccctcgggggggggggacaaacacgtggcgaaccccccag

SEQ ID NO: 448857 - DNA, 699 bp, Homo sapiens
  misc_feature (3)..(3): n is a, c, g, or t
aanaaaaaaccttccttgcgaattcggcacgagccaacatgggccgcgttcgcaccaaaaccgtgaagaaggcggcccgggtcatcatagaaaagtactacacgcgcctgggcaacgacttccacacgaacaagcgcgtgtgcgaggagatcgccattatccccagcaaaaagctccgcaacaagatagcaggttatgtcacgcatctgatgaagcgaattcagagaggcccagtaagaggtatctccatcaagctgcaggaggaggagagagaaaggagagacaattatgttcctgaggtctcagccttggatcaggagattattgaagtagatcctgacactaaggaaatgctgaagcttttggacttcggcagtctgtccaaccttcaggtcactcagcctacagttgggatgaatttcaaaacgcctcggggacctgtttgaattttttctgtagtgctgtattattttcaataaatctgggacaacaaaaaaaaaaaaaaaaaaaaaaaaaaacttcggggggatttaatgggggggggggaaaaaaggggtaatggaaaggggccatgggccatagcggtgtttccgggacccaggttttttggtccaagggggaaaatctggggggtccccctaatggggagtcgtataaatcggaaaagccgggtaaccggattaggccggggggaaaagc

SEQ ID NO: 448858 - DNA, 819 bp, Homo sapiens
  misc_feature (3)..(3): n is a, c, g, or t
  misc_feature (537)..(537): n is a, c, g, or t
  misc_feature (550)..(550): n is a, c, g, or t
  misc_feature (612)..(612): n is a, c, g, or t
  misc_feature (618)..(618): n is a, c, g, or t
  misc_feature (672)..(672): n is a, c, g, or t
  misc_feature (716)..(717): n is a, c, g, or t
  misc_feature (719)..(719): n is a, c, g, or t
  misc_feature (722)..(722): n is a, c, g, or t
  misc_feature (728)..(728): n is a, c, g, or t
aanaaaaaaccttccttgcgaattcggcacgagccaacatgggccgcgttcgcaccaaaaccgtgaagaaggcggcccgggtcatcatagaaaagtactacacgcgcctgggcaacgacttccacacgaacaagcgcgtgtgcgaggagatcgccattatccccagcaaaaagctccgcaacaagatagcaggttatgtcacgcatctgatgaagcgaattcagagaggcccagtaagaggtatctccatcaagctgcaggaggaggagagagaaaggagagacaattatgttcctgaggtctcagccttggatcaggagattattgaagtagatcctgacactaaggaaatgctgaagcttttggacttcggcagtctgtccaaccttcaggtcactcagcctacagttgggatgaatttcaaaacgcctcggggacctgtttgaattttttctgtagtgctgtattattttcaataaatctgggacaacaaaaaaaaaaaaaaaaaaaaaaaaaaaaaaaaaaaaaaaaaaagancggggggcatctnaatagtgggggggggggaaaaagagagaggaaagagaaaggggcacaagtgggccaaaaggnggtccngggacccagttttcttggcacaagggggcaaaaccggcgcggggcccccaaaanggggagcgcggaataaattcgaaaaccccgggtacccggttagnncncgnaaaagncacgtcacatatgcacctacacagacacatgaagcaggtccacatatactcaaacacgccaataccatcagcgtaataaacatctcacaca

SEQ ID NO: 448859 - DNA, 491 bp, Homo sapiens; identical to SEQ ID NO: 448839
  misc_feature (3)..(3): n is a, c, g, or t

SEQ ID NO: 448860 - DNA, 1204 bp, Homo sapiens
  misc_feature (3)..(3): n is a, c, g, or t
aanaaaaaaccttccttgcgaattcggcacgagccaacatgggccgcgttcgcaccaaaaccgtgaagaaggcggcccgggtcatcatagaaaagtactacacgcgcctgggcaacgacttccacacgaacaagcgcgtgtgcgaggagatcgccattatccccagcaaaaagctccgcaacaagatagcaggttatgtcacgcatctgatgaagcgaattcagagaggcccagtaagaggtatctccatcaagctgcaggaggaggagagagaaaggagagacaattatgttcctgaggtctcagccttggatcaggagattattgaagtagatcctgacactaaggaaatgctgaagcttttggacttcggcagtctgtccaaccttcaggtcactcagcctacagttgggatgaatttcaaaacgcctcggggacctgtttgaattttttctgtagtgctgtattattttcaataaatctgggacaacaaaaaaaaaaaacaaaaaaaaaaaaagaaaaaaaaacaaaacaaaaacaaggaggggcggcgcgcgcgcctccagagagatatctctccccgcgcggagggcgcccaccgagttcagccgctcttccccccggtctttttgtggtgtgcacagagaggggcgcccccctctaagggagggagagctgctctatatatatatacacgcctctaggagcacgcgggcgccgcgcgcgctgttttcacacacagcgtgcgcggcgcgctggggggcgaacaaatcgcggggtcacccgggcggggaactatctctggtgcgagagaggaggacacccccttttaaatctgtgcgggggggggggggcgagaacccacatgagggtgggggcaacacacacatatctccccaatacgcgagagagatatatataagacgagccctcctcaagagggggtgacacatatatgttaatacacaccgtctttcaaaggcgcggtgtcatatatcacggtgggtcgtgttctacacacacccctgcgccgcgctgcaccatatagttgtgcccctgcgccggtcgctgcctgatgaaaacacgaatgttttgttgtcgcgcctccaaatcccgagaggacatattatattaagatctctcctggatcagggacaaaatcaatcttctctttctttgtctcccccccacggcgggaggggcc

SEQ ID NO: 448861 - DNA, 1265 bp, Homo sapiens
  misc_feature (3)..(3): n is a, c, g, or t
aanaaaaaaccttccttgcgaattcggcacgagccaacatgggccgcgttcgcaccaaaaccgtgaagaaggcggcccgggtcatcatagaaaagtactacacgcgcctgggcaacgacttccacacgaacaagcgcgtgtgcgaggagatcgccattatccccagcaaaaagctccgcaacaagatagcaggttatgtcacgcatctgatgaagcgaattcagagaggcccagtaagaggtatctccatcaagctgcaggaggaggagagagaaaggagagacaattatgttcctgaggtctcagccttggatcaggagattattgaagtagatcctgacactaaggaaatgctgaagcttttggacttcggcagtctgtccaaccttcaggtcactcagcctacagttgggatgaatttcaaaacgcctcggggacctgtttgaattttttctgtagtgctgtattattttcaataaatctgggacaacaaaaaaaaaaacaaaaaaaaaaaaaaaaaaaaaaaaaaaaaaaaaaaaaaaagaaaaaaaaaaaaaaaaaaaaaaaaaaaaaaaaacgggggaaaaaattctccccgcgggaaaaccctctgcgggaagagagaaaccccgaaagggtggcgcgggggaaaccccggggccccgtcaaaatgtgtattggggggggaaaggggggtctggggaaaaaagaacttggggaaaaggtattgggagggggaaaatggaaaaaacgttttttacccctggggtggtgcgggttaatcctatggtgttccccaacccaaaaggggaactataaaggtccagtcgttgggggaacagcgcggccgggaaacatcgggggggccggaacaagcgcatattattcaaaccatggtgtgcccacaaaggtggggacgaacccaaacgtcactacaaagagtgtggcgacgcgggctagaaaactgggtccgctgttgggtgcagaacatccccctgggttctgtgctgccacccggcgcggcacatgaggcagcgaaacggcgagggggaacacaaggtgttcaccgcagaaaacacttgggcaccaaatgcggccaacgaaacaccgtggaaaacccaccggcgtgtgtgcaaccacgggggcacccatgatgatatgagggacgctcccccacaaaagatgtgacccgcgagcaatacaaccacagagacgaacccccgagcacacgaagtacacgcacagtttgaggcgtccggaaacga

SEQ ID NO: 448862 - DNA, 1270 bp, Homo sapiens
  misc_feature (3)..(3): n is a, c, g, or t
aanaaaaaaccttccttgcgaattcggcacgagccaacatgggccgcgttcgcaccaaaaccgtgaagaaggcggcccgggtcatcatagaaaagtactacacgcgcctgggcaacgacttccacacgaacaagcgcgtgtgcgaggagatcgccattatccccagcaaaaagctccgcaacaagatagcaggttatgtcacgcatctgatgaagcgaattcagagaggcccagtaagaggtatctccatcaagctgcaggaggaggagagagaaaggagagacaattatgttcctgaggtctcagccttggatcaggagattattgaagtagatcctgacactaaggaaatgctgaagcttttggacttcggcagtctgtccaaccttcaggtcactcagcctacagttgggatgaatttcaaaacgcctcggggacctgtttgaattttttctgtagtgctgtattattttcaataaatctgggacaacaaaaaaaaaaaaaaaaaaaaaaaaaaaaaaaaaaaaaaaaaaagaaaaaaaaaaaaaaaaaaaaaaaaaaaaaaaaaaaaaaaaaaaaaaacgggggaaaaaattctccccgcgggaaaaccctctgcgggaagagagaaaccccgaaagggtggcgcgggggaaaccccggggccccgtcaaaatgtgtattggggggggaaaggggggtctggggaaaaaagaacttggggaaaaggtattgggagggggaaaatggaaaaaacgttttttacccctggggtggtgcgggttaatcctatggtgttccccaacccaaaaggggaactataaaggtccagtcgttgggggaacagcgcggccgggaaacatcgggggggccggaacaagcgcatattattcaaaccatggtgtgcccacaaaggtggggacgaacccaaacgtcactacaaagagtgtggcgacgcgggctagaaaactgggtccgctgttgggtgcagaacatccccctgggttctgtgctgccacccggcgcggcacatgaggcagcgaaacggcgagggggaacacaaggtgttcaccgcagaaaacacttgggcaccaaatgcggccaacgaaacaccgtggaaaacccaccggcgtgtgtgcaaccacgggggcacccatgatgatatgagggacgctcccccacaaaagatgtgacccgcgagcaatacaaccacagagacgaacccccgagcacacgaagtacacgcacagtttgaggcgtccggaaacga

SEQ ID NO: 448863 - DNA, 1250 bp, Homo sapiens
  misc_feature (3)..(3): n is a, c, g, or t
aanaaaaaaccttccttgcgaattcggcacgagccaacatgggccgcgttcgcaccaaaaccgtgaagaaggcggcccgggtcatcatagaaaagtactacacgcgcctgggcaacgacttccacacgaacaagcgcgtgtgcgaggagatcgccattatccccagcaaaaagctccgcaacaagatagcaggttatgtcacgcatctgatgaagcgaattcagagaggcccagtaagaggtatctccatcaagctgcaggaggaggagagagaaaggagagacaattatgttcctgaggtctcagccttggatcaggagattattgaagtagatcctgacactaaggaaatgctgaagcttttggacttcggcagtctgtccaaccttcaggtcactcagcctacagttgggatgaatttcaaaacgcctcggggacctgtttgaattttttctgtagtgctgtattattttcaataaatctgggacaacaaaaaaaaaaaaaaaaaaaaaaaaaaaaaaaaaaaaaaaaaaagaaaaaaaaaaaaaaaaaaaaaaaaaaacgggggaaaaaattctccccgcgggaaaaccctctgcgggaagagagaaaccccgaaagggtggcgcgggggaaaccccggggccccgtcaaaatgtgtattggggggggaaaggggggtctggggaaaaaagaacttggggaaaaggtattgggagggggaaaatggaaaaaacgttttttacccctggggtggtgcgggttaatcctatggtgttccccaacccaaaaggggaactataaaggtccagtcgttgggggaacagcgcggccgggaaacatcgggggggccggaacaagcgcatattattcaaaccatggtgtgcccacaaaggtggggacgaacccaaacgtcactacaaagagtgtggcgacgcgggctagaaaactgggtccgctgttgggtgcagaacatccccctgggttctgtgctgccacccggcgcggcacatgaggcagcgaaacggcgagggggaacacaaggtgttcaccgcagaaaacacttgggcaccaaatgcggccaacgaaacaccgtggaaaacccaccggcgtgtgtgcaaccacgggggcacccatgatgatatgagggacgctcccccacaaaagatgtgacccgcgagcaatacaaccacagagacgaacccccgagcacacgaagtacacgcacagtttgaggcgtccggaaacga

SEQ ID NO: 448864 - DNA, 811 bp, Homo sapiens
  misc_feature (3)..(3): n is a, c, g, or t
aanaaaaaaccttccttgcgaattcggcacgagccaacatgggccgcgttcgcaccaaaaccgtgaagaaggcggcccgggtcatcatagaaaagtactacacgcgcctgggcaacgacttccacacgaacaagcgcgtgtgcgaggagatcgccattatccccagcaaaaagctccgcaacaagatagcaggttatgtcacgcatctgatgaagcgaattcagagaggcccagtaagaggtatctccatcaagctgcaggaggaggagagagaaaggagagacaattatgttcctgaggtctcagccttggatcaggagattattgaagtagatcctgacactaaggaaatgctgaagcttttggacttcggcagtctgtccaaccttcaggtcactcagcctacagttgggatgaatttcaaaacgcctcggggacctgtttgaattttttctgtagtgctgtattattttcaataaatctgggacaacaaccacaaaacacccaccacatccctgagcgcattccattgcttcgggtctgcacgacaacaagcggcgatcatgtcgcagtgtgccactgtgtgtgtcaatacgcgttgtatcatcctgagacccccagctttatttttgtatcccaaggtgggtaataatcctgcccgggaccacaccccaacatatgcggagcccggttattaaacgttgccgaataacccgagggtcttaccttggcatttacgtaagcctccgtacacagcacgtcataggcgtactgtcagaccactcactacgacacatacagactacagcag

SEQ ID NO: 448865 - DNA, 821 bp, Homo sapiens
  misc_feature (3)..(3): n is a, c, g, or t
aanaaaaaaccttccttgcgaattcggcacgagccaacatgggccgcgttcgcaccaaaaccgtgaagaaggcggcccgggtcatcatagaaaagtactacacgcgcctgggcaacgacttccacacgaacaagcgcgtgtgcgaggagatcgccattatccccagcaaaaagctccgcaacaagatagcaggttatgtcacgcatctgatgaagcgaattcagagaggcccagtaagaggtatctccatcaagctgcaggaggaggagagagaaaggagagacaattatgttcctgaggtctcagccttggatcaggagattattgaagtagatcctgacactaaggaaatgctgaagcttttggacttcggcagtctgtccaaccttcaggtcactcagcctacagttgggatgaatttcaaaacgcctcggggacctgtttgaattttttctgtagtgctgtattattttcaataaatctgggacaacaaaaaaaaaaaaaaaaaaaaaaaaaaaaaaaaaaaaaaaaaaaaaaaaccaaaaaaaaaaaaaaaaaaaaaaaaaaagaaggggcgggcgccgacgtaaaaaaatgaactccgccggaggagcacccccacaaactgccctgcccgccacatttttttatgagaagaggcggccctaccactttatggggacttttatataaaagcacagcgccgcgcgctgcgttaaaaccaccgagcgtggggcaaaaaaaacctgcggccagcgagctcgttttaggaggaccgcccccctcgggggggggggacaaacacgtggcgaaccccccag

SEQ ID NO: 448866 - DNA, 668 bp, Homo sapiens
  misc_feature (3)..(3): n is a, c, g, or t
aanaaaaaaccttccttgcgaattcggcacgagccaacatgggccgcgttcgcaccaaaaccgtgaagaaggcggcccgggtcatcatagaaaagtactacacgcgcctgggcaacgacttccacacgaacaagcgcgtgtgcgaggagatcgccattatccccagcaaaaagctccgcaacaagatagcaggttatgtcacgcatctgatgaagcgaattcagagaggcccagtaagaggtatctccatcaagctgcaggaggaggagagagaaaggagagacaattatgttcctgaggtctcagccttggatcaggagattattgaagtagatcctgacactaaggaaatgctgaagcttttggacttcggcagtctgtccaaccttcaggtcactcagcctacagttgggatgaatttcaaaacgcctcggggacctgtttgaattttttctgtagtgctgtattattttcaataaatctgggacaactaaaatcacctatgagactcagatctccccacggccccaacctgaaagtgtcagctgtatccttcaagagcccaagaggaatctcgccttcttccagctgaggaaggtgtggggccaggtctggcacagcatccagaccctgaaggaagattgcaaccggctgcagcagggacagcg

SEQ ID NO: 448867 - DNA, 491 bp, Homo sapiens; identical to SEQ ID NO: 448839
  misc_feature (3)..(3): n is a, c, g, or t

SEQ ID NO: 448868 - DNA, 1915 bp, Homo sapiens
  misc_feature (3)..(3): n is a, c, g, or t
aanaaaaaaccttccttgcgaattcggcacgagccaacatgggccgcgttcgcaccaaaaccgtgaagaaggcggcccgggtcatcatagaaaagtactacacgcgcctgggcaacgacttccacacgaacaagcgcgtgtgcgaggagatcgccattatccccagcaaaaagctccgcaacaagatagcaggttatgtcacgcatctgatgaagcgaattcagagaggcccagtaagaggtatctccatcaagctgcaggaggaggagagagaaaggagagacaattatgttcctgaggtctcagccttggatcaggagattattgaagtagatcctgacactaaggaaatgctgaagcttttggtaagtgtttgctggattcctaaagtggtattttcctggtcaaaaaccatcagtaggtcttattatccaaggtcacccagctagtaagtggcagagttgggaatcccatctaaacttgtagccactaaactggactgctttcataaggggtgtagcggaagttgtgtgcattgagttagttcgccacaagatcatgattcccaaatctagtggcttccaggacaccttttctctcttggctgcttctgttcttggttttatagctggcttacgttgccccctttgtgtcagccctggctgaatctgcctgcttttcttctgtgaaggcattcctttggtgtctccatgctaaccactcagaaatgagctttggtccatttccaggtacatacaaggcactacttaggtagttcacgagtatcttcattgcactttgatgttttttctatggcttatcttagtccttttgcatacttgggtgaaagcatgggcttcatgggcggttggtgattttgaacaacttcatttttcctatttttatggtcattaaatgtttaagacactcaaaaaggtagtagcaaaatgaactcacatgtactttcccagcttcagaaaaacatcaccagtacagctacagccccgctgtgggtcttttcttcctgaaataaccactgcgctgaatgcagcatttttgttgaaactaaaatgggtttctgaggaccaaataggacatggagttccaggtataagttgggcccttggcttcttgccctgcctaccagcctgaacttgtttgagggcagggtctgctcttgcctccctcccttctgcttgatgccttgtgtacttgggcccttcacaaatgttgattagattagtaatagctcttacccagggctggtcctggaaagcaagtggcactgtgtattctcaaagggacagagttttgctttagaggacatttggcaatgtccagacacatttttcgttctcatagccaggggatacctgctaacttctaaggggtagaggccaaggatgttgctaaactttctgcaatacacagtacagctgcctataacaaagaatgtccagcccaggatgtctacgttgccaagattgagaaacggtgttttagagtgattgataggaaggggttgtgaaaacagatacaaatggcatggtacattgggtaaaagtcatagagttgtaaatggggataccacatggtcaggtgtgtgttgaaggaagatcactctggaaaagtgggaggcattgagaaccctgttggctcttaaagggtccttcaggtcgcctctggacccccttgagagtgctgtggctctaggggcctgtgttttcttctggggtccactcacagatctcaccagtaactgctcactgaatccattttctcgttccaggacttcggcagtctgtccaaccttcaggtcactcagcctacagttgggatgaatttcaaaacgcctcggggacctgtttgaattttttctgtagtgctgtattattttcaataaatctgggacaac

SEQ ID NO: 448869 - DNA, 445 bp, Homo sapiens
  misc_feature (3)..(3): n is a, c, g, or t
aanaaaaaaccttccttgcgaattcggcacgagccaacatgggccgcgttcgcaccaaaaccgtgaagaaggcggcccgggtcatcatagaaaagtactacacgcgcctgggcaacgacttccacacgaacaagcgcgtgtgcgaggagatcgccattatccccagcaaaaagctccgcaacaagatagcaggttatgtcacgcatctgatgaagcgaattcagagaggcccagtaagaggtatctccatcaagctgcaggaggaggagagagaaaggagagacaattatgttcctgaggtctcagccttggatcaggagattattgaagtagatcctgacactaaggaaatgctgaagcttttggacttcggcagtctgtccaaccttcaggtccccgaggcgttttgaaaatcatcccaactgtaggctgagtgaccgtcgac

SEQ ID NO: 448870 - DNA, 1000 bp, Homo sapiens
  misc_feature (3)..(3): n is a, c, g, or t
aanaaaaaaccttccttgcgaattcggcacgagccaacatgggccgcgttcgcaccaaaaccgtgaagaaggcggcccgggtcatcatagaaaagtactacacgcgcctgggcaacgacttccacacgaacaagcgcgtgtgcgaggagatcgccattatccccagcaaaaagctccgcaacaagatagcaggttatgtcacgcatctgatgaagcgaattcagagaggcccagtaagaggtatctccatcaagctgcaggaggaggagagagaaaggagagacaattatgttcctgagggtaaactttctggatatttgggcttctggctaatcctcaaatgataaagctatgggttcttggcttccaaagggacctcagctgaatctgagacctttaatccatacattccataaccagctgtgggtgcccataggccccctaccagtttcttagcctccattctgctcttctggaaccagttaagtctattccatatttcatgagagcccttaatgttgatttgatgactgctgtcgtggctcgattgtttgcccctaatatagtattctttggtgtaaacacagacttcaagtgttctgaatactgaatgagggcatgggaaggtaaggccagaagaacaggtcatcggggtctgtaatactgtaagagactgctcaccttgtgagaggaatgctatccttgtgcagctcctcttccccatatttaagaacctggggagaggaggaggagaggtgagtgataatctcattgattggtattttgaccctacctcgtttccttgtaggtctcagccttggatcaggagattattgaagtagatcctgacactaaggaaatgctgaagcttttggacttcggcagtctgtccaaccttcaggtcactcagcctacagttgggatgaatttcaaaacgcctcggggacctgtttgaattttttctgtagtgctgtattattttcaataaatctgggacaac

SEQ ID NO: 448871 - DNA, 1252 bp, Homo sapiens
  misc_feature (3)..(3): n is a, c, g, or t
aanaaaaaaccttccttgcgaattcggcacgagccaacatgggccgcgttcgcaccaaaaccgtgaagaaggcggcccgggtcatcatagaaaagtactacacgcgcctgggcaacgacttccacacgaacaagcgcgtgtgcgaggagatcgccattatccccagcaaaaagctccgcaacaagatagcaggttatgtcacgcatctgatgaagcgaattcagagaggcccagtaagaggtatctccatcaaggtctcagccttggatcaggagattattgaagtagatcctgacactaaggaaatgctgaagcttttggacttcggcagtctgtccaaccttcaggtcactcagcctacagttgggatgaatttcaaaacgcctcggggacctgtttgaattttttctgtagtgctgtattattttcaataaatctgggacaacaaaaaaaaaaaaaaaaaaaaaaaaaaaaaaaaaaaaaaaaaaagtttgcgcggcccacgtggcccagagaaaaggtcctccagacacaattggcgttggggcgggcgcggggccaccaccgttgtctgagaacaagagacggcagggagagacacggttgacctcagagaagacaccgcggtcccaggactgcggctcgggtacatccatacaaagaaaaaaatgcccggggcataacgacgacttttgtgcgaaagaaacactgcataatggcggtacttcaggagcccaaggagggaggccttaaaacaacgggtgctgcactacgcagcacgtgagtaagaatatgttgccctgcccgctgcggggtggaaatgagcattgtcatccgaacccttggagccacaggcagctcctcacctggcccgggaattcatgatcaaaagccgccgtaaggaagggcctcagtgaaggatgtgagcatcagcaaattcttcgatgatcctatgttgctggaaacttgccaaacaaggatgtagtgctcaattaccccatgtgagtgcgtggactcctgggagctccatgctcactacagtgggcttgcactcctgtacttgaaggctgagactcatatgacgttggccttcgagtaggcagaagagtgtctggaagctgctgtagcatcttgcaacaacgtcagcgaagctccaaaccagagccccagtgagagaggaccctcggcctcctgcttcttctgtgcctctgccgggctcattccaggaaagacaggagttggggctcccaga

SEQ ID NO: 448872 - DNA, 1505 bp, Homo sapiens
actctagagatccccctgctcccatcaaaataagtaaaagaaatataggaatattccagtcaatctctgaaatgtttatgaaaaacaggttaatatgttgtatttttttccttgtatcaagatgcaaaacataatttgcaaaattttataattgaaataaaacttggtatgctgttttataataaattagcaatatactttaaaaaaaatccagtttctcctataacatgatgtaaattaaatattcaggaatatttcaggtctgaaatctgctgctgaacttgttagacatttttgaaaggaaaattaggttagcgtacaatttatcataaatatatgaggtaaaatttgcaaaactttccacagtactttcttgaattataatactgaatgttttctgttccgatagagaaaagtgaagcaaatatgtgaggaatgaagtgatctagtgcaagttggtaattccagctaatgggagagaatgtaaatgtgcaaaggtacatattaagcttagggatttttgaatttttacgtcagtttatattttaattcttactgtacttggcatgcgcaataaagcagcacatgtaaaaaaaaaatacacagtgcaaggactttattataaaggttggatgtagttttccttagaaatttaggtgagagattttggccttttttattggataaattgggccagaaaggcagggtagatttcgaagcactggttctgttgaagttaagtttattaagcctgggaacattaaaagctaatttataaaagcaatactttttaatatgaaaacttactgcaaagtttgtttatacttttgcctaaaaaggaaattggatgggatactgtggcaaatcataaaaaaccagataattgaactttgaagttatagaaaatcagagaggggtaagtttatagggcattttgttctgatggttcaaccagaggtctgggaaatagcactgttggcccaaacagaacaggcttttagaagataaaagcgacaagaaggaatctggtgaattttagtcatcccagctttttagtcttaaccacagttctcactctcttaaatggtacctcaaaaagctggagcctctctgccatgattatgcttctacaaatttcttttataaagagactcaaagctaatgatagcttaaaagaaaagttaatgccttctcattggaaatgtataatcaaataagtagttaagggcttttggtattaaagatattctgaagctctgaaatgctagaaaaaaatttggaatggagtatatgcctgaaaaggttttggattcagaaagaaaaaggatggttagtttaatcagtgattctttttaaactcttcaaatatcatgaacaagatactaaattgtacctaaggatttgtatttctttacaatttgttctaaatatctgtttaatgactagttgatatttgtgcatgttatttaataaagagttatatttttatagaaaaaaaagtgaaa

SEQ ID NO: 448873 - DNA, 1687 bp, Homo sapiens
gggggcgacgctgtcctgggagcgaggaggctgtggtgagagacggaccgagaccggagatgttttcaagcccggctccggcggctttacaggcggctgcagcggcgacgaagacaacgacagcgacggctacgccgaagcactcgttccgggggtgaagcctcctgcgccggccttgcctcggatccaggatgagaagactgataaaagaagaagctagctgaacagctgtaaaatgcccaaatctgggttcacaaaaccaattcagagtgaaaattctgacagtgacagcaatatggtagagaaaccatatggaagaaagagtaaagacaagattgcatcctacagcaaaactccaaaaattgaacgaagtgatgtgagcaaggagatgaaagagaaatcatccatgaaacgtaaacttccttttactattagcccatcaagaaatgaagaacgagattcagacacagattcagatccaggacatacaagtgaaaattggggggagagacttatatcttcttacaggacatactcagagaaagaaggtccagaaaagaagaagacaaaaaaggaagctggaaataagaaatccacaccagttagcattctttttggttatccactctctgagcgaaaacagatggcacttcttatgcagatgacagcaagagacaacagtccagattccacaccaaatcatccatcacaaacaacgcctgcccaaaagaaaactcccagttcttcatctcgacagaaagataaagttaataaaagaaatgaacgtggtgaaactcctttacacatggctgctattcgaggagatgtgaaacaagttaaagaattaataagtttaggggcaaatgtgaatgtgaaagattttgcaggttggacaccactgcatgaagcttgcaatgttggatattacgatgttgctaagatacttatagcagctggagcagatgttaacacacaaggattagatgatgacactccactccatgattctgctagtagtgggcacagagatatagtaaagctgttacttcgtcacggtggaaatccatttcaagctaataaacatggggagcgtccagtggatgtagcagaaacagaggagttggagttgctactaaaaagagaggtgcctttatctgatgatgatgaaagttacacagattccgaagaggctcaatctgtaaatccttctagtgttgatgaaaatattgactctgaaacagagaaagactctctcatctgtgaaagtaaacagatacttcccagtaaaacacctcttccatctgcccttgatgagtatgagttcaaagatgatgatgatgaagaaattaataagatgattgatgataggcatattcttaggaaagaacaacgaaaagaaaatgaacctgaagcagaaaaaactcatttatttgcaaaacaggagaaagccttctatcctaaatcatttaaaagtaaaaaacaaaagccatctagggtcttatattcaagtactgaaagttctgatgaagaagctcttcagaataaaaagatttctacttcatgttccgtcatccctgaaacatcaaattctgatatgcaaaccaaaaaggaatatgtagtttcaggtgaacacaaacagaaaggcaaagttaaaagaaaattgaaaaatcagaataaaaataaagag

SEQ ID NO: 448874 - DNA, 1116 bp, Homo sapiens
  misc_feature (983)..(983): n is a, c, g, or t
  misc_feature (1006)..(1006): n is a, c, g, or t
  misc_feature (1016)..(1016): n is a, c, g, or t
gggggcgacgctgtcctgggagcgaggaggctgtggtgagagacggaccgagaccggagatgttttcaagcccggctccggcggctttacaggcggctgcagcggcgacgaagacaacgacagcgacggctacgccgaagcactcgttccgggggtgaagcctcctgcgccggccttgcctcggatccaggatgagaagactgataaaagaagaagctagctgaacagctgtaaaatgcccaaatctgggttcacaaaaccaattcagagtgaaaattctgacagtgacagcaatatggtagagaaaccatatggaagaaagagaaagaaggtccagaaaagaagaagacaaaaaaggaagctggaaataagaaatccacaccagttagcattctttttggttatccactctctgagcgaaaacagatggcacttcttatgcagatgacagcaagagacaacagtccagattccacaccaaatcatccatcacaaacaacgcctgcccaaaagaaaactcccagttcttcatctcgacagaaagataaagttaataaaagaaatgaacgtggtgaaactcctttacacatggctgctattcgaggagatgtgaaacaagttaaagaattaataagtttaggggcaaatgtgaatgtgaaagattttgcaggttggacaccactgcatgaagcttgcaatgttggatattacgatgttgctaagatacttatagcagctggagcagatgttaacacacaaggattagatgatgacactccactccatgattctgctagtagtgggcacagagatatagtaaagctgttacttcgtcacggtggaaatccatttcaagctaataaacatggggagcgtccagtggatgtagcagaaacagaggagttggagttgctactaaaaagagaggtgcctttatctgatgatgatgaaagttacacagatccaggatgagaagactgatnaaagaagaagctagctgaacagntgtaaaatgnccaaatctgggttcacaaaacaattcagagtgaaaattctgacagtgacagcatatggtagagaaaccatttggaagaaagagtaagacaagatggatcg

SEQ ID NO: 448875 - DNA, 270 bp, Homo sapiens
caaaagtgcctcttctatatctacacaacacccgacaagctatattcgcatcacacagaaaaatgccataaagaaggtgagaagagcaaaaatactgctgctattaaaaaaactgacgacagagagaaaagtagagaaaagatggataggaaacatgacaaagaaaagcctgaaaaagagaggcatctagcagaaagcaaagaaaagcacttgatggagaaaaaaaataaacaatcagataatagtgaatacagtaaatcagaaaaaggc

SEQ ID NO: 448876 - DNA, 9002 bp, Homo sapiens
gggggcgacgctgtcctgggagcgaggaggctgtggtgagagacggaccgagaccggagatgttttcaagcccggctccggcggctttacaggcggctgcagcggcgacgaagacaacgacagcgacggctacgccgaagcactcgttccgggggtgaagcctcctgcgccggccttgcctcggatccaggatgagaagactgataaaagaagaagctagctgaacagctgtaaaatgcccaaatctgggttcacaaaaccaattcagagtgaaaattctgacagtgacagcaatatggtagagaaaccatatggaagaaagagtaaagacaagattgcatcctacagcaaaactccaaaaattgaacgaagtgatgtgagcaaggagatgaaagagaaatcatccatgaaacgtaaacttccttttactattagcccatcaagaaatgaagaacgagattcagacacagagaaagaaggtccagaaaagaagaagacaaaaaaggaagctggaaataagaaatccacaccagttagcattctttttggttatccactctctgagcgaaaacagatggcacttcttatgcagatgacagcaagagacaacagtccagattccacaccaaatcatccatcacaaacaacgcctgcccaaaagaaaactcccagttcttcatctcgacagaaagataaagttaataaaagaaatgaacgtggtgaaactcctttacacatggctgctattcgaggagatgtgaaacaagttaaagaattaataagtttaggggcaaatgtgaatgtgaaagattttgcaggttggacaccactgcatgaagcttgcaatgttggatattacgatgttgctaagatacttatagcagctggagcagatgttaacacacaaggattagatgatgacactccactccatgattctgctagtagtgggcacagagatatagtaaagctgttacttcgtcacggtggaaatccatttcaagctaataaacatggggagcgtccagtggatgtagcagaaacagaggagttggagttgctactaaaaagagaggtgcctttatctgatgatgatgaaagttacacagattccgaagaggctcaatctgtaaatccttctagtgttgatgaaaatattgactctgaaacagagaaagactctctcatctgtgaaagtaaacagatacttcccagtaaaacacctcttccatctgcccttgatgagtatgagttcaaagatgatgatgatgaagaaattaataagatgattgatgataggcatattcttaggaaagaacaacgaaaagaaaatgaacctgaagcagaaaaaactcatttatttgcaaaacaggagaaagccttctatcctaaatcatttaaaagtaaaaaacaaaagccatctagggtcttatattcaagtactgaaagttctgatgaagaagctcttcagaataaaaagatttctacttcatgttccgtcatccctgaaacatcaaattctgatatgcaaaccaaaaaggaatatgtagtttcaggtgaacacaaacagaaaggcaaagttaaaagaaaattgaaaaatcagaataaaaataaagagaaccaagagctaaagcaagaaaaggaaggaaaagaaaatacaagaataacaaacttgacagtaaatactggactagattgttcagaaaagaccagagaggaggggaactttaggaaatcttttagcccaaaagatgatacttcattacatttatttcatatttccactggtaaatctcccaaacattcttgtggattaagtgaaaaacagtcaacaccactaaaacaagaacatactaaaacatgtttatcaccaggaagttctgaaatgtcattacagcctgatcttgttcggtatgataatacagaatctgaattcttgccagaaagttcaagtgtaaaatcttgtaagcataaggaaaaaagcaaacatcagaaagatttccacttagaatttggtgaaaaatcaaatgccaaaataaaggatgaagatcatagtccaacatttgaaaattcagattgcacactgaaaaaaatggataaagaaggtaaaacattaaaaaaacataaattgaagcataaagagagggaaaaagaaaagcataaaaaagaaattgaaggtgaaaaggaaaaatacaaaactaaggatagtgccaaagaactgcagaggagtgtggaatttgatagagaattttggaaagagaatttttttaaaagtgatgaaactgaagatctctttttaaatatggaacatgaatccttaacattagaaaaaaaatcaaaattggaaaaaaacatcaaagatgataaatcaaccaaggaaaagcatgtgtcaaaagagaggaactttaaagaggaacgagacaagattaaaaaggaaagcgagaaatcttttagggaggaaaaaataaaagatctaaaagaagagagagaaaacatacccacagataaagactcagaatttacttctttgggtatgagtgccattgaggaatctatagggcttcatttagtggaaaaggaaatagacattgaaaaacaagaaaagcatataaaggaaagtaaagaaaaacctgagaagcgatctcaaattaaagaaaaggacattgagaagatggaaagaaaaacctttgaaaaagaaaagaagataaaacatgagcataagtcagaaaaagacaaattagatcttagtgaatgtgttgataaaataaaagaaaaggacaagctatattcgcatcacacagaaaaatgccataaagaaggtgagaagagcaaaaatactgctgctattaaaaaaactgacgacagagagaaaagtagagaaaagatggataggaaacatgacaaagaaaagcctgaaaaagagaggcatctagcagaaagcaaagaaaagcacttgatggagaaaaaaaataaacaatcagataatagtgaatacagtaaatcagaaaaaggcaaaaataaagaaaaagacagggagctagataaaaaggaaaaatctagagataaagaaagtataaatataactaactccaaacacatacaggaagaaaaaaaatcaagtatagtagacggtaataaagcacaacatgaaaaacccttatcccttaaagaaaaaacaaaagatgaacctttgaaaactccagatggaaaagaaaaagataaaaaagataaagatatagatagatacaaagaacgagacaaacataaagataaaattcaaataaatagcttactcaaactaaaatctgaagcagataagcctaaacctaagtcatcaccagcatcaaaagatacccgacctaaagaaaagaggttagtgaatgatgatttaatgcagacaagttttgaacgaatgctaagccttaaagacctagaaatagaacagtggcacaaaaaacataaggaaaaaattaagcaaaaagaaaaggaacggttgagaaaccgaaactgtttagaacttaaaataaaagataaagaaaaaacaaagcatacaccaactgaatccaaaaataaagaacttactaggtcaaagagttcagaagtgactgatgcatataccaaggagaaacaacctaaagatgctgtaagtaacagatcacaatctgttgacaccaaaaatgtaatgactttagggaagtcatcttttgtttcagataatagcttaaacaggtctcctagatcagaaaatgaaaagccgggtctcagctccagatctgtatccatgatttctgttgctagttcagaagattcctgccatactacagtgacaaccccaaggcctccagttgagtatgactctgactttatgttagagagttcagaatcccaaatgtccttttcccagtcaccttttttgtcaattgccaaatctcctgctcttcatgaaagggaattggacagcctggctgacttgccggagcggattaaaccaccatatgcaaacagactttcaacatcccatcttaggtcatcttctgtagaagatgttaaactaattataagcgaggggagacctaccatagaagttcgaagatgtagcatgccttctgtcatttgtgaacataccaaacaattccaaacaatatcagaagagagcaatcaaggtagcttattaactgtgccaggagatactagtccttctcccaaacctgaggtattctcaaatgtgcctgaaagagacctttcaaatgtatctaacatacattccagttttgcaacttctccaactggagcttcaaacagcaagtatgtttcagctgatagaaatctcatcaagaatactgccccagtgaacactgtaatggacagtccagtgcatttagagccatctagtcaggttggtgtgatccagaataaatcatgggagatgcctgttgatagactagagacattaagcaccagagactttatctgcccaaattctaacatacctgatcaagaatcctctcttcagagtttttgtaattctgaaaataaggtattgaaagaaaatgctgattttttatccctgcgccagactgaactgccaggaaactcttgtgctcaggatccggcatcctttatgcctccacagcagccttgctctttccccagccaatcactttcagatgctgaatcgatttctaaacatatgtctttgtcatatgttgctaatcaagagccaggtattttacaacaaaaaaatgcagttcagattattagttctgctttagatactgataatgaatctacaaaagatacagaaaatacttttgtcctaggagatgttcaaaaaacagatgcctttgtcccagtgtactctgacagcactattcaagaagcatcaccaaactttgagaaagcttatactttacctgtgttaccatcagaaaaggactttaatggaagtgatgcctctacccagctaaatacacattatgcatttagcaaactaacttacaagtcttccagtggccatgaagttgagaatagcacaactgatactcaggtcatttcacatgaaaaagaaaacaaactggagagtttggttttaactcatttgagtaggtgtgattctgatttatgtgaaatgaatgcagggatgccaaaaggaaacctaaatgaacaagatccaaaacattgtcctgaaagtgaaaagtgtttgctttccatagaagatgaggaatctcaacaaagcattttatcaagtctggaaaaccattcacagcagtcaactcaaccagaaatgcataaatatggtcagttagttaaagtagaattagaagaaaatgccgaagatgataaaactgaaaaccaaatccctcaaagaatgactagaaacaaagcaaatacaatggcaaatcaaagcaaacagattcttgctagctgtacactattatcagaaaaagacagtgaatcctcatctcctagaggaagaataagattaactgaagatgacgatcctcaaattcaccatccacggaaaaggaaagtgtcacgtgtacctcagcctgtgcaagtgagtccctctttactacaagcaaaagagaaaactcagcaatctctggcagccattgtagattctctaaaactagatgagattcagccatacagttcagagagagcaaatccatattttgaatacttgcacataaggaaaaaaatagaagaaaaacgcaaattactgtgtagtgtgattcctcaagcacctcagtactatgacgaatatgtaacatttaacggatcatatctcctggatggaaaccccttaagcaagatttgtattcccacaattacaccaccaccttcactgtcagatccacttaaagagctttttcgacaacaggaagttgtaaggatgaaactacgtttgcaacacagtattgaaagggaaaaactcattgtatccaacgaacaagaagttttgcgagttcattacagagctgcaagaacattggcaaatcaaacactgccatttagtgcttgtactgttttgctggatgccgaagtatacaatgtaccattggactctcagtctgatgacagtaaaacttctgtgagggatcgctttaatgcaagacaattcatgtcttggttacaagatgtggatgataaatttgacaaattaaagacctgtcttttaatgaggcaacaacatgaagctgcggctttaaatgctgtccagaggttagaatggcagctcaaactccaggaacttgatcctgccacctataaatctatcagcatttacgaaatccaggagttttatgttccccttgttgatgttaacgacgactttgaattgactcctatatagcagtcagtacttcctgatggtattgtcctaaactggtgatgctcaagcattatactgtggaatactgccttttgacaaaaatactcatgcctttacaattgttagtaaagttcgattatagttggttatgtagtaaacactgtcattttataaaaaatgagaattattttggatcttagatccaaacacagtttctaatagaaaactattatttatattgggaaaggtaactattgcattagagcatgttggcagactggtaggtatttaaaaagttgagaatctgctaacagcgctggaagttgttagcgctctaagtaataagataaccactagtattcaaatctctttcaggttttattaaaaaatatatatcaataaactaaaaggttcaattcctaccaaatagtttctaatgtgggagaaaaacttggcacaaaatttcttcagtttattatctgtaaattgtacagttttctttttgaaagttttaatattgtcttcctttttaataacttattttatacatattgtgcagatgtaaatcttgtaattaatggtcaaactgtataaagggattggtagtcaaaacatgtacaaagaaatacctgtaaaactgttttgtctcatgttttattggaccaaagttgtggtttgtatggagtgtagtagtagtgtgtacaggtagaaaacttttaaatacagcatgcaggtgtttcagttagcttgttttcatcaccataactgcaaagatgtggcttagttgtattgcatgcttcctataatttaactctccataattgatgcctgcagtagtgtaaggcatttcatactagtctcctctagtagacctgtgacttactgtgttggacatattatttagacttagtcatacaaagaaacttagctcttttttcatctcacagtaaagcctatttccccaggaaaaaaataaatgcctttgaatgaaaattctgaaattgtaaatgtctattttaatattcacctatgaaagaatctgtgaatatatgtaaatacgtttaataaattttattggtcatgttaaatcattgtaaaacttttttacattgcttaatgttttaagcttaatagcctttgcacttttaaaataaaaaccaagtatgcaaatcaaagatatttggtagtcaaaataagtaaaagaaatataggaatattccagtcaatctctgaaatgtttatgaaaaacaggttaatatgttgtatttttttccttgtatcaagatgcaaaacataatttgcaaaattttataattgaaataaaacttggtatgctgttttataataaattagcaatatactttaaaaaaaatccagtttctcctataacatgatgtaaattaaatattcaggaatatttcaggtctgaaatctgctgctgaacttgttagacatttttgaaaggaaaattaggttagcgtacaatttatcataaatatatgaggtaaaatttgcaaaactttccacagtactttcttgaattataatactgaatgttttctgttccgatagagaaaagtgaagcaaatatgtgaggaatgaagtgatctagtgcaagttggtaattccagctaatgggagagaatgtaaatgtgcaaaggtacatattaagcttagggatttttgaatttttacgtcagtttatattttaattcttactgtacttggcatgcgcaataaagcagcacatgtaaaaaaaaaatacacagtgcaaggactttattataaaggttggatgtagttttccttagaaatttaggtgagagattttggccttttttattggataaattgggccagaaaggcagggtagatttcgaagcactggttctgttgaagttaagtttattaagcctgggaacattaaaagctaatttataaaagcaatactttttaatatgaaaacttactgcaaagtttgtttatacttttgcctaaaaaggaaattggatgggatactgtggcaaatcataaaaaaccagataattgaactttgaagttatagaaaatcagagaggggtaagtttatagggcattttgttctgatggttcaaccagaggtctgggaaatagcactgttggcccaaacagaacaggcttttagaagataaaagcgacaagaaggaatctggtgaattttagtcatcccagctttttagtcttaaccacagttctcactctcttaaatggtacctcaaaaagctggagcctctctgccatgattatgcttctacaaatttcttttataaagagactcaaagctaatgatagcttaaaagaaaagttaatgccttctcattggaaatgtataatcaaataagtagttaagggcttttggtattaaagatattctgaagctctgaaatgctagaaaaaaatttggaatggagtatatgcctgaaaaggttttggattcagaaagaaaaaggatggttagtttaatcagtgattctttttaaactcttcaaatatcatgaacaagatactaaattgtacctaaggatttgtatttctttacaatttgttctaaatatctgtttaatgactagttgatatttgtgcatgttatttaataaagagttatatttttatagaaaaaaaagtgaaa

SEQ ID NO: 448877 - DNA, 8854 bp, Homo sapiens
gggggcgacgctgtcctgggagcgaggaggctgtggtgagagacggaccgagaccggagatgttttcaagcccggctccggcggctttacaggcggctgcagcggcgacgaagacaacgacagcgacggctacgccgaagcactcgttccgggggtgaagcctcctgcgccggccttgcctcggatccaggatgagaagactgataaaagaagaagctagctgaacagctgtaaaatgcccaaatctgggttcacaaaaccaattcagagtgaaaattctgacagtgacagcaatatggtagagaaaccatatggaagaaagagaaagaaggtccagaaaagaagaagacaaaaaaggaagctggaaataagaaatccacaccagttagcattctttttggttatccactctctgagcgaaaacagatggcacttcttatgcagatgacagcaagagacaacagtccagattccacaccaaatcatccatcacaaacaacgcctgcccaaaagaaaactcccagttcttcatctcgacagaaagataaagttaataaaagaaatgaacgtggtgaaactcctttacacatggctgctattcgaggagatgtgaaacaagttaaagaattaataagtttaggggcaaatgtgaatgtgaaagattttgcaggttggacaccactgcatgaagcttgcaatgttggatattacgatgttgctaagatacttatagcagctggagcagatgttaacacacaaggattagatgatgacactccactccatgattctgctagtagtgggcacagagatatagtaaagctgttacttcgtcacggtggaaatccatttcaagctaataaacatggggagcgtccagtggatgtagcagaaacagaggagttggagttgctactaaaaagagaggtgcctttatctgatgatgatgaaagttacacagattccgaagaggctcaatctgtaaatccttctagtgttgatgaaaatattgactctgaaacagagaaagactctctcatctgtgaaagtaaacagatacttcccagtaaaacacctcttccatctgcccttgatgagtatgagttcaaagatgatgatgatgaagaaattaataagatgattgatgataggcatattcttaggaaagaacaacgaaaagaaaatgaacctgaagcagaaaaaactcatttatttgcaaaacaggagaaagccttctatcctaaatcatttaaaagtaaaaaacaaaagccatctagggtcttatattcaagtactgaaagttctgatgaagaagctcttcagaataaaaagatttctacttcatgttccgtcatccctgaaacatcaaattctgatatgcaaaccaaaaaggaatatgtagtttcaggtgaacacaaacagaaaggcaaagttaaaagaaaattgaaaaatcagaataaaaataaagagaaccaagagctaaagcaagaaaaggaaggaaaagaaaatacaagaataacaaacttgacagtaaatactggactagattgttcagaaaagaccagagaggaggggaactttaggaaatcttttagcccaaaagatgatacttcattacatttatttcatatttccactggtaaatctcccaaacattcttgtggattaagtgaaaaacagtcaacaccactaaaacaagaacatactaaaacatgtttatcaccaggaagttctgaaatgtcattacagcctgatcttgttcggtatgataatacagaatctgaattcttgccagaaagttcaagtgtaaaatcttgtaagcataaggaaaaaagcaaacatcagaaagatttccacttagaatttggtgaaaaatcaaatgccaaaataaaggatgaagatcatagtccaacatttgaaaattcagattgcacactgaaaaaaatggataaagaaggtaaaacattaaaaaaacataaattgaagcataaagagagggaaaaagaaaagcataaaaaagaaattgaaggtgaaaaggaaaaatacaaaactaaggatagtgccaaagaactgcagaggagtgtggaatttgatagagaattttggaaagagaatttttttaaaagtgatgaaactgaagatctctttttaaatatggaacatgaatccttaacattagaaaaaaaatcaaaattggaaaaaaacatcaaagatgataaatcaaccaaggaaaagcatgtgtcaaaagagaggaactttaaagaggaacgagacaagattaaaaaggaaagcgagaaatcttttagggaggaaaaaataaaagatctaaaagaagagagagaaaacatacccacagataaagactcagaatttacttctttgggtatgagtgccattgaggaatctatagggcttcatttagtggaaaaggaaatagacattgaaaaacaagaaaagcatataaaggaaagtaaagaaaaacctgagaagcgatctcaaattaaagaaaaggacattgagaagatggaaagaaaaacctttgaaaaagaaaagaagataaaacatgagcataagtcagaaaaagacaaattagatcttagtgaatgtgttgataaaataaaagaaaaggacaagctatattcgcatcacacagaaaaatgccataaagaaggtgagaagagcaaaaatactgctgctattaaaaaaactgacgacagagagaaaagtagagaaaagatggataggaaacatgacaaagaaaagcctgaaaaagagaggcatctagcagaaagcaaagaaaagcacttgatggagaaaaaaaataaacaatcagataatagtgaatacagtaaatcagaaaaaggcaaaaataaagaaaaagacagggagctagataaaaaggaaaaatctagagataaagaaagtataaatataactaactccaaacacatacaggaagaaaaaaaatcaagtatagtagacggtaataaagcacaacatgaaaaacccttatcccttaaagaaaaaacaaaagatgaacctttgaaaactccagatggaaaagaaaaagataaaaaagataaagatatagatagatacaaagaacgagacaaacataaagataaaattcaaataaatagcttactcaaactaaaatctgaagcagataagcctaaacctaagtcatcaccagcatcaaaagatacccgacctaaagaaaagaggttagtgaatgatgatttaatgcagacaagttttgaacgaatgctaagccttaaagacctagaaatagaacagtggcacaaaaaacataaggaaaaaattaagcaaaaagaaaaggaacggttgagaaaccgaaactgtttagaacttaaaataaaagataaagaaaaaacaaagcatacaccaactgaatccaaaaataaagaacttactaggtcaaagagttcagaagtgactgatgcatataccaaggagaaacaacctaaagatgctgtaagtaacagatcacaatctgttgacaccaaaaatgtaatgactttagggaagtcatcttttgtttcagataatagcttaaacaggtctcctagatcagaaaatgaaaagccgggtctcagctccagatctgtatccatgatttctgttgctagttcagaagattcctgccatactacagtgacaaccccaaggcctccagttgagtatgactctgactttatgttagagagttcagaatcccaaatgtccttttcccagtcaccttttttgtcaattgccaaatctcctgctcttcatgaaagggaattggacagcctggctgacttgccggagcggattaaaccaccatatgcaaacagactttcaacatcccatcttaggtcatcttctgtagaagatgttaaactaattataagcgaggggagacctaccatagaagttcgaagatgtagcatgccttctgtcatttgtgaacataccaaacaattccaaacaatatcagaagagagcaatcaaggtagcttattaactgtgccaggagatactagtccttctcccaaacctgaggtattctcaaatgtgcctgaaagagacctttcaaatgtatctaacatacattccagttttgcaacttctccaactggagcttcaaacagcaagtatgtttcagctgatagaaatctcatcaagaatactgccccagtgaacactgtaatggacagtccagtgcatttagagccatctagtcaggttggtgtgatccagaataaatcatgggagatgcctgttgatagactagagacattaagcaccagagactttatctgcccaaattctaacatacctgatcaagaatcctctcttcagagtttttgtaattctgaaaataaggtattgaaagaaaatgctgattttttatccctgcgccagactgaactgccaggaaactcttgtgctcaggatccggcatcctttatgcctccacagcagccttgctctttccccagccaatcactttcagatgctgaatcgatttctaaacatatgtctttgtcatatgttgctaatcaagagccaggtattttacaacaaaaaaatgcagttcagattattagttctgctttagatactgataatgaatctacaaaagatacagaaaatacttttgtcctaggagatgttcaaaaaacagatgcctttgtcccagtgtactctgacagcactattcaagaagcatcaccaaactttgagaaagcttatactttacctgtgttaccatcagaaaaggactttaatggaagtgatgcctctacccagctaaatacacattatgcatttagcaaactaacttacaagtcttccagtggccatgaagttgagaatagcacaactgatactcaggtcatttcacatgaaaaagaaaacaaactggagagtttggttttaactcatttgagtaggtgtgattctgatttatgtgaaatgaatgcagggatgccaaaaggaaacctaaatgaacaagatccaaaacattgtcctgaaagtgaaaagtgtttgctttccatagaagatgaggaatctcaacaaagcattttatcaagtctggaaaaccattcacagcagtcaactcaaccagaaatgcataaatatggtcagttagttaaagtagaattagaagaaaatgccgaagatgataaaactgaaaaccaaatccctcaaagaatgactagaaacaaagcaaatacaatggcaaatcaaagcaaacagattcttgctagctgtacactattatcagaaaaagacagtgaatcctcatctcctagaggaagaataagattaactgaagatgacgatcctcaaattcaccatccacggaaaaggaaagtgtcacgtgtacctcagcctgtgcaagtgagtccctctttactacaagcaaaagagaaaactcagcaatctctggcagccattgtagattctctaaaactagatgagattcagccatacagttcagagagagcaaatccatattttgaatacttgcacataaggaaaaaaatagaagaaaaacgcaaattactgtgtagtgtgattcctcaagcacctcagtactatgacgaatatgtaacatttaacggatcatatctcctggatggaaaccccttaagcaagatttgtattcccacaattacaccaccaccttcactgtcagatccacttaaagagctttttcgacaacaggaagttgtaaggatgaaactacgtttgcaacacagtattgaaagggaaaaactcattgtatccaacgaacaagaagttttgcgagttcattacagagctgcaagaacattggcaaatcaaacactgccatttagtgcttgtactgttttgctggatgccgaagtatacaatgtaccattggactctcagtctgatgacagtaaaacttctgtgagggatcgctttaatgcaagacaattcatgtcttggttacaagatgtggatgataaatttgacaaattaaagacctgtcttttaatgaggcaacaacatgaagctgcggctttaaatgctgtccagaggttagaatggcagctcaaactccaggaacttgatcctgccacctataaatctatcagcatttacgaaatccaggagttttatgttccccttgttgatgttaacgacgactttgaattgactcctatatagcagtcagtacttcctgatggtattgtcctaaactggtgatgctcaagcattatactgtggaatactgccttttgacaaaaatactcatgcctttacaattgttagtaaagttcgattatagttggttatgtagtaaacactgtcattttataaaaaatgagaattattttggatcttagatccaaacacagtttctaatagaaaactattatttatattgggaaaggtaactattgcattagagcatgttggcagactggtaggtatttaaaaagttgagaatctgctaacagcgctggaagttgttagcgctctaagtaataagataaccactagtattcaaatctctttcaggttttattaaaaaatatatatcaataaactaaaaggttcaattcctaccaaatagtttctaatgtgggagaaaaacttggcacaaaatttcttcagtttattatctgtaaattgtacagttttctttttgaaagttttaatattgtcttcctttttaataacttattttatacatattgtgcagatgtaaatcttgtaattaatggtcaaactgtataaagggattggtagtcaaaacatgtacaaagaaatacctgtaaaactgttttgtctcatgttttattggaccaaagttgtggtttgtatggagtgtagtagtagtgtgtacaggtagaaaacttttaaatacagcatgcaggtgtttcagttagcttgttttcatcaccataactgcaaagatgtggcttagttgtattgcatgcttcctataatttaactctccataattgatgcctgcagtagtgtaaggcatttcatactagtctcctctagtagacctgtgacttactgtgttggacatattatttagacttagtcatacaaagaaacttagctcttttttcatctcacagtaaagcctatttccccaggaaaaaaataaatgcctttgaatgaaaattctgaaattgtaaatgtctattttaatattcacctatgaaagaatctgtgaatatatgtaaatacgtttaataaattttattggtcatgttaaatcattgtaaaacttttttacattgcttaatgttttaagcttaatagcctttgcacttttaaaataaaaaccaagtatgcaaatcaaagatatttggtagtcaaaataagtaaaagaaatataggaatattccagtcaatctctgaaatgtttatgaaaaacaggttaatatgttgtatttttttccttgtatcaagatgcaaaacataatttgcaaaattttataattgaaataaaacttggtatgctgttttataataaattagcaatatactttaaaaaaaatccagtttctcctataacatgatgtaaattaaatattcaggaatatttcaggtctgaaatctgctgctgaacttgttagacatttttgaaaggaaaattaggttagcgtacaatttatcataaatatatgaggtaaaatttgcaaaactttccacagtactttcttgaattataatactgaatgttttctgttccgatagagaaaagtgaagcaaatatgtgaggaatgaagtgatctagtgcaagttggtaattccagctaatgggagagaatgtaaatgtgcaaaggtacatattaagcttagggatttttgaatttttacgtcagtttatattttaattcttactgtacttggcatgcgcaataaagcagcacatgtaaaaaaaaaatacacagtgcaaggactttattataaaggttggatgtagttttccttagaaatttaggtgagagattttggccttttttattggataaattgggccagaaaggcagggtagatttcgaagcactggttctgttgaagttaagtttattaagcctgggaacattaaaagctaatttataaaagcaatactttttaatatgaaaacttactgcaaagtttgtttatacttttgcctaaaaaggaaattggatgggatactgtggcaaatcataaaaaaccagataattgaactttgaagttatagaaaatcagagaggggtaagtttatagggcattttgttctgatggttcaaccagaggtctgggaaatagcactgttggcccaaacagaacaggcttttagaagataaaagcgacaagaaggaatctggtgaattttagtcatcccagctttttagtcttaaccacagttctcactctcttaaatggtacctcaaaaagctggagcctctctgccatgattatgcttctacaaatttcttttataaagagactcaaagctaatgatagcttaaaagaaaagttaatgccttctcattggaaatgtataatcaaataagtagttaagggcttttggtattaaagatattctgaagctctgaaatgctagaaaaaaatttggaatggagtatatgcctgaaaaggttttggattcagaaagaaaaaggatggttagtttaatcagtgattctttttaaactcttcaaatatcatgaacaagatactaaattgtacctaaggatttgtatttctttacaatttgttctaaatatctgtttaatgactagttgatatttgtgcatgttatttaataaagagttatatttttatagaaaaaaaagtgaaa

SEQ ID NO: 448878 - DNA, 8849 bp, Homo sapiens
gggggcgacgctgtcctgggagcgaggaggctgtggtgagagacggaccgagaccggagatgttttcaagcccggctccggcggctttacaggcggctgcagcggcgacgaagacaacgacagcgacggctacgccgaagcactcgttccgggggtgaagcctcctgcgccggccttgcctcggatccaggatgagaagactgataaaagaagaagctagctgaacagctgtaaaatgcccaaatctgggttcacaaaaccaattcagagtgaaaattctgacagtgacagcaatatggtagagaaaccatatggaagaaagagtaaagacaagattgcatcctacagcaaaactccaaaaattgaacgaagtgatgtgagcaaggagatgaaagagaaatcatccatgaaacgtaaacttccttttactattagcccatcaagaaatgaagaacgagattcagacacagagaaagaaggtccagaaaagaagaagacaaaaaaggaagctggaaataagaaatccacaccagttagcattctttttggttatccactctctgagcgaaaacagatggcacttcttatgcagatgacagcaagagacaacagtccagattccacaccaaatcatccatcacaaacaacgcctgcccaaaagaaaactcccagttcttcatctcgacagaaagataaagttaataaaagaaatgaacgtggtgaaactcctttacacatggctgctattcgaggagatgtgaaacaagttaaagaattaataagtttaggggcaaatgtgaatgtgaaagattttgcaggttggacaccactgcatgaagcttgcaatgttggatattacgatgttgctaagatacttatagcagctggagcagatgttaacacacaaggattagatgatgacactccactccatgattctgctagtagtgggcacagagatatagtaaagctgttacttcgtcacggtggaaatccatttcaagctaataaacatggggagcgtccagtggatgtagcagaaacagaggagttggagttgctactaaaaagagaggtgcctttatctgatgatgatgaaagttacacagattccgaagaggctcaatctgtaaatccttctagtgttgatgaaaatattgactctgaaacagagaaagactctctcatctgtgaaagtaaacagatacttcccagtaaaacacctcttccatctgcccttgatgagtatgagttcaaagatgatgatgatgaagaaattaataagatgattgatgataggcatattcttaggaaagaacaacgaaaagaaaatgaacctgaagcagaaaaaactcatttatttgcaaaacaggagaaagccttctatcctaaatcatttaaaagtaaaaaacaaaagccatctagggtcttatattcaagtactgaaagttctgatgaagaagctcttcagaataaaaagatttctacttcatgttccgtcatccctgaaacatcaaattctgatatgcaaaccaaaaaggaatatgtagtttcaggtgaacacaaacagaaaggcaaagttaaaagaaaattgaaaaatcagaataaaaataaagagaaccaagagctaaagcaagaaaaggaaggaaaagaaaatacaagaataacaaacttgacagtaaatactggactagattgttcagaaaagaccagagaggaggggaactttaggaaatcttttagcccaaaagatgatacttcattacatttatttcatatttccactggtaaatctcccaaacattcttgtggattaagtgaaaaacagtcaacaccactaaaacaagaacatactaaaacatgtttatcaccaggaagttctgaaatgtcattacagcctgatcttgttcggtatgataatacagaatctgaattcttgccagaaagttcaagtgtaaaatcttgtaagcataaggaaaaaagcaaacatcagaaagatttccacttagaatttggtgaaaaatcaaatgccaaaataaaggatgaagatcatagtccaacatttgaaaattcagattgcacactgaaaaaaatggataaagaaggtaaaacattaaaaaaacataaattgaagcataaagagagggaaaaagaaaagcataaaaaagaaattgaaggtgaaaaggaaaaatacaaaactaaggatagtgccaaagaactgcagaggagtgtggaatttgatagagaattttggaaagagaatttttttaaaagtgatgaaactgaagatctctttttaaatatggaacatgaatccttaacattagaaaaaaaatcaaaattggaaaaaaacatcaaagatgataaatcaaccaaggaaaagcatgtgtcaaaagagaggaactttaaagaggaacgagacaagattaaaaaggaaagcgagaatttacttctttgggtatgagtgccattgaggaatctatagggcttcatttagtggaaaaggaaatagacattgaaaaacaagaaaagcatataaaggaaagtaaagaaaaacctgagaagcgatctcaaattaaagaaaaggacattgagaagatggaaagaaaaacctttgaaaaaggacaagctatattcgcatcacacagaaaaatgccataaagaaggtgagaagagcaaaaatactgctgctattaaaaaaactgacgacagagagaaaagtagagaaaagatggataggaaacatgacaaagaaaagcctgaaaaagagaggcatctagcagaaagcaaagaaaagcacttgatggagaaaaaaaataaacaatcagataatagtgaatacagtaaatcagaaaaaggcaaaaataaagaaaaagacagggagctagataaaaaggaaaaatctagagataaagaaagtataaatataactaactccaaacacatacaggaagaaaaaaaatcaagtatagtagacggtaataaagcacaacatgaaaaacccttatcccttaaagaaaaaacaaaagatgaacctttgaaaactccagatggaaaagaaaaagataaaaaagataaagatatagatagatacaaagaacgagacaaacataaagataaaattcaaataaatagcttactcaaactaaaatctgaagcagataagcctaaacctaagtcatcaccagcatcaaaagatacccgacctaaagaaaagaggttagtgaatgatgatttaatgcagacaagttttgaacgaatgctaagccttaaagacctagaaatagaacagtggcacaaaaaacataaggaaaaaattaagcaaaaagaaaaggaacggttgagaaaccgaaactgtttagaacttaaaataaaagataaagaaaaaacaaagcatacaccaactgaatccaaaaataaagaacttactaggtcaaagagttcagaagtgactgatgcatataccaaggagaaacaacctaaagatgctgtaagtaacagatcacaatctgttgacaccaaaaatgtaatgactttagggaagtcatcttttgtttcagataatagcttaaacaggtctcctagatcagaaaatgaaaagccgggtctcagctccagatctgtatccatgatttctgttgctagttcagaagattcctgccatactacagtgacaaccccaaggcctccagttgagtatgactctgactttatgttagagagttcagaatcccaaatgtccttttcccagtcaccttttttgtcaattgccaaatctcctgctcttcatgaaagggaattggacagcctggctgacttgccggagcggattaaaccaccatatgcaaacagactttcaacatcccatcttaggtcatcttctgtagaagatgttaaactaattataagcgaggggagacctaccatagaagttcgaagatgtagcatgccttctgtcatttgtgaacataccaaacaattccaaacaatatcagaagagagcaatcaaggtagcttattaactgtgccaggagatactagtccttctcccaaacctgaggtattctcaaatgtgcctgaaagagacctttcaaatgtatctaacatacattccagttttgcaacttctccaactggagcttcaaacagcaagtatgtttcagctgatagaaatctcatcaagaatactgccccagtgaacactgtaatggacagtccagtgcatttagagccatctagtcaggttggtgtgatccagaataaatcatgggagatgcctgttgatagactagagacattaagcaccagagactttatctgcccaaattctaacatacctgatcaagaatcctctcttcagagtttttgtaattctgaaaataaggtattgaaagaaaatgctgattttttatccctgcgccagactgaactgccaggaaactcttgtgctcaggatccggcatcctttatgcctccacagcagccttgctctttccccagccaatcactttcagatgctgaatcgatttctaaacatatgtctttgtcatatgttgctaatcaagagccaggtattttacaacaaaaaaatgcagttcagattattagttctgctttagatactgataatgaatctacaaaagatacagaaaatacttttgtcctaggagatgttcaaaaaacagatgcctttgtcccagtgtactctgacagcactattcaagaagcatcaccaaactttgagaaagcttatactttacctgtgttaccatcagaaaaggactttaatggaagtgatgcctctacccagctaaatacacattatgcatttagcaaactaacttacaagtcttccagtggccatgaagttgagaatagcacaactgatactcaggtcatttcacatgaaaaagaaaacaaactggagagtttggttttaactcatttgagtaggtgtgattctgatttatgtgaaatgaatgcagggatgccaaaaggaaacctaaatgaacaagatccaaaacattgtcctgaaagtgaaaagtgtttgctttccatagaagatgaggaatctcaacaaagcattttatcaagtctggaaaaccattcacagcagtcaactcaaccagaaatgcataaatatggtcagttagttaaagtagaattagaagaaaatgccgaagatgataaaactgaaaaccaaatccctcaaagaatgactagaaacaaagcaaatacaatggcaaatcaaagcaaacagattcttgctagctgtacactattatcagaaaaagacagtgaatcctcatctcctagaggaagaataagattaactgaagatgacgatcctcaaattcaccatccacggaaaaggaaagtgtcacgtgtacctcagcctgtgcaagtgagtccctctttactacaagcaaaagagaaaactcagcaatctctggcagccattgtagattctctaaaactagatgagattcagccatacagttcagagagagcaaatccatattttgaatacttgcacataaggaaaaaaatagaagaaaaacgcaaattactgtgtagtgtgattcctcaagcacctcagtactatgacgaatatgtaacatttaacggatcatatctcctggatggaaaccccttaagcaagatttgtattcccacaattacaccaccaccttcactgtcagatccacttaaagagctttttcgacaacaggaagttgtaaggatgaaactacgtttgcaacacagtattgaaagggaaaaactcattgtatccaacgaacaagaagttttgcgagttcattacagagctgcaagaacattggcaaatcaaacactgccatttagtgcttgtactgttttgctggatgccgaagtatacaatgtaccattggactctcagtctgatgacagtaaaacttctgtgagggatcgctttaatgcaagacaattcatgtcttggttacaagatgtggatgataaatttgacaaattaaagacctgtcttttaatgaggcaacaacatgaagctgcggctttaaatgctgtccagaggttagaatggcagctcaaactccaggaacttgatcctgccacctataaatctatcagcatttacgaaatccaggagttttatgttccccttgttgatgttaacgacgactttgaattgactcctatatagcagtcagtacttcctgatggtattgtcctaaactggtgatgctcaagcattatactgtggaatactgccttttgacaaaaatactcatgcctttacaattgttagtaaagttcgattatagttggttatgtagtaaacactgtcattttataaaaaatgagaattattttggatcttagatccaaacacagtttctaatagaaaactattatttatattgggaaaggtaactattgcattagagcatgttggcagactggtaggtatttaaaaagttgagaatctgctaacagcgctggaagttgttagcgctctaagtaataagataaccactagtattcaaatctctttcaggttttattaaaaaatatatatcaataaactaaaaggttcaattcctaccaaatagtttctaatgtgggagaaaaacttggcacaaaatttcttcagtttattatctgtaaattgtacagttttctttttgaaagttttaatattgtcttcctttttaataacttattttatacatattgtgcagatgtaaatcttgtaattaatggtcaaactgtataaagggattggtagtcaaaacatgtacaaagaaatacctgtaaaactgttttgtctcatgttttattggaccaaagttgtggtttgtatggagtgtagtagtagtgtgtacaggtagaaaacttttaaatacagcatgcaggtgtttcagttagcttgttttcatcaccataactgcaaagatgtggcttagttgtattgcatgcttcctataatttaactctccataattgatgcctgcagtagtgtaaggcatttcatactagtctcctctagtagacctgtgacttactgtgttggacatattatttagacttagtcatacaaagaaacttagctcttttttcatctcacagtaaagcctatttccccaggaaaaaaataaatgcctttgaatgaaaattctgaaattgtaaatgtctattttaatattcacctatgaaagaatctgtgaatatatgtaaatacgtttaataaattttattggtcatgttaaatcattgtaaaacttttttacattgcttaatgttttaagcttaatagcctttgcacttttaaaataaaaaccaagtatgcaaatcaaagatatttggtagtcaaaataagtaaaagaaatataggaatattccagtcaatctctgaaatgtttatgaaaaacaggttaatatgttgtatttttttccttgtatcaagatgcaaaacataatttgcaaaattttataattgaaataaaacttggtatgctgttttataataaattagcaatatactttaaaaaaaatccagtttctcctataacatgatgtaaattaaatattcaggaatatttcaggtctgaaatctgctgctgaacttgttagacatttttgaaaggaaaattaggttagcgtacaatttatcataaatatatgaggtaaaatttgcaaaactttccacagtactttcttgaattataatactgaatgttttctgttccgatagagaaaagtgaagcaaatatgtgaggaatgaagtgatctagtgcaagttggtaattccagctaatgggagagaatgtaaatgtgcaaaggtacatattaagcttagggatttttgaatttttacgtcagtttatattttaattcttactgtacttggcatgcgcaataaagcagcacatgtaaaaaaaaaatacacagtgcaaggactttattataaaggttggatgtagttttccttagaaatttaggtgagagattttggccttttttattggataaattgggccagaaaggcagggtagatttcgaagcactggttctgttgaagttaagtttattaagcctgggaacattaaaagctaatttataaaagcaatactttttaatatgaaaacttactgcaaagtttgtttatacttttgcctaaaaaggaaattggatgggatactgtggcaaatcataaaaaaccagataattgaactttgaagttatagaaaatcagagaggggtaagtttatagggcattttgttctgatggttcaaccagaggtctgggaaatagcactgttggcccaaacagaacaggcttttagaagataaaagcgacaagaaggaatctggtgaattttagtcatcccagctttttagtcttaaccacagttctcactctcttaaatggtacctcaaaaagctggagcctctctgccatgattatgcttctacaaatttcttttataaagagactcaaagctaatgatagcttaaaagaaaagttaatgccttctcattggaaatgtataatcaaataagtagttaagggcttttggtattaaagatattctgaagctctgaaatgctagaaaaaaatttggaatggagtatatgcctgaaaaggttttggattcagaaagaaaaaggatggttagtttaatcagtgattctttttaaactcttcaaatatcatgaacaagatactaaattgtacctaaggatttgtatttctttacaatttgttctaaatatctgtttaatgactagttgatatttgtgcatgttatttaataaagagttatatttttatagaaaaaaaagtgaaa

SEQ ID NO: 448879 - DNA, 6367 bp, Homo sapiens
atgatgtgattgtggttttaatgaaaacagcattcttgggacaatggatatctcaaactctgcagatgacctgagatgcttgtttaccaaaaaaaagacaaattagatcttagtgaatgtgttgataaaataaaagaaaaggacaagctatattcgcatcacacagaaaaatgccataaagaaggtgagaagagcaaaaatactgctgctattaaaaaaactgacgacagagagaaaagtagagaaaagatggataggaaacatgacaaagaaaagcctgaaaaagagaggcatctagcagaaagcaaagaaaagcacttgatggagaaaaaaaataaacaatcagataatagtgaatacagtaaatcagaaaaaggcaaaaataaagaaaaagacagggagctagataaaaaggaaaaatctagagataaagaaagtataaatataactaactccaaacacatacaggaagaaaaaaaatcaagtatagtagacggtaataaagcacaacatgaaaaacccttatcccttaaagaaaaaacaaaagatgaacctttgaaaactccagatggaaaagaaaaagataaaaaagataaagatatagatagatacaaagaacgagacaaacataaagataaaattcaaataaatagcttactcaaactaaaatctgaagcagataagcctaaacctaagtcatcaccagcatcaaaagatacccgacctaaagaaaagaggttagtgaatgatgatttaatgcagacaagttttgaacgaatgctaagccttaaagacctagaaatagaacagtggcacaaaaaacataaggaaaaaattaagcaaaaagaaaaggaacggttgagaaaccgaaactgtttagaacttaaaataaaagataaagaaaaaacaaagcatacaccaactgaatccaaaaataaagaacttactaggtcaaagagttcagaagtgactgatgcatataccaaggagaaacaacctaaagatgctgtaagtaacagatcacaatctgttgacaccaaaaatgtaatgactttagggaagtcatcttttgtttcagataatagcttaaacaggtctcctagatcagaaaatgaaaagccgggtctcagctccagatctgtatccatgatttctgttgctagttcagaagattcctgccatactacagtgacaaccccaaggcctccagttgagtatgactctgactttatgttagagagttcagaatcccaaatgtccttttcccagtcaccttttttgtcaattgccaaatctcctgctcttcatgaaagggaattggacagcctggctgacttgccggagcggattaaaccaccatatgcaaacagactttcaacatcccatcttaggtcatcttctgtagaagatgttaaactaattataagcgaggggagacctaccatagaagttcgaagatgtagcatgccttctgtcatttgtgaacataccaaacaattccaaacaatatcagaagagagcaatcaaggtagcttattaactgtgccaggagatactagtccttctcccaaacctgaggtattctcaaatgtgcctgaaagagacctttcaaatgtatctaacatacattccagttttgcaacttctccaactggagcttcaaacagcaagtatgtttcagctgatagaaatctcatcaagaatactgccccagtgaacactgtaatggacagtccagtgcatttagagccatctagtcaggttggtgtgatccagaataaatcatgggagatgcctgttgatagactagagacattaagcaccagagactttatctgcccaaattctaacatacctgatcaagaatcctctcttcagagtttttgtaattctgaaaataaggtattgaaagaaaatgctgattttttatccctgcgccagactgaactgccaggaaactcttgtgctcaggatccggcatcctttatgcctccacagcagccttgctctttccccagccaatcactttcagatgctgaatcgatttctaaacatatgtctttgtcatatgttgctaatcaagagccaggtattttacaacaaaaaaatgcagttcagattattagttctgctttagatactgataatgaatctacaaaagatacagaaaatacttttgtcctaggagatgttcaaaaaacagatgcctttgtcccagtgtactctgacagcactattcaagaagcatcaccaaactttgagaaagcttatactttacctgtgttaccatcagaaaaggactttaatggaagtgatgcctctacccagctaaatacacattatgcatttagcaaactaacttacaagtcttccagtggccatgaagttgagaatagcacaactgatactcaggtcatttcacatgaaaaagaaaacaaactggagagtttggttttaactcatttgagtaggtgtgattctgatttatgtgaaatgaatgcagggatgccaaaaggaaacctaaatgaacaagatccaaaacattgtcctgaaagtgaaaagtgtttgctttccatagaagatgaggaatctcaacaaagcattttatcaagtctggaaaaccattcacagcagtcaactcaaccagaaatgcataaatatggtcagttagttaaagtagaattagaagaaaatgccgaagatgataaaactgaaaaccaaatccctcaaagaatgactagaaacaaagcaaatacaatggcaaatcaaagcaaacagattcttgctagctgtacactattatcagaaaaagacagtgaatcctcatctcctagaggaagaataagattaactgaagatgacgatcctcaaattcaccatccacggaaaaggaaagtgtcacgtgtacctcagcctgtgcaagtgagtccctctttactacaagcaaaagagaaaactcagcaatctctggcagccattgtagattctctaaaactagatgagattcagccatacagttcagagagagcaaatccatattttgaatacttgcacataaggaaaaaaatagaagaaaaacgcaaattactgtgtagtgtgattcctcaagcacctcagtactatgacgaatatgtaacatttaacggatcatatctcctggatggaaaccccttaagcaagatttgtattcccacaattacaccaccaccttcactgtcagatccacttaaagagctttttcgacaacaggaagttgtaaggatgaaactacgtttgcaacacagtattgaaagggaaaaactcattgtatccaacgaacaagaagttttgcgagttcattacagagctgcaagaacattggcaaatcaaacactgccatttagtgcttgtactgttttgctggatgccgaagtatacaatgtaccattggactctcagtctgatgacagtaaaacttctgtgagggatcgctttaatgcaagacaattcatgtcttggttacaagatgtggatgataaatttgacaaattaaagacctgtcttttaatgaggcaacaacatgaagctgcggctttaaatgctgtccagaggttagaatggcagctcaaactccaggaacttgatcctgccacctataaatctatcagcatttacgaaatccaggagttttatgttccccttgttgatgttaacgacgactttgaattgactcctatatagcagtcagtacttcctgatggtattgtcctaaactggtgatgctcaagcattatactgtggaatactgccttttgacaaaaatactcatgcctttacaattgttagtaaagttcgattatagttggttatgtagtaaacactgtcattttataaaaaatgagaattattttggatcttagatccaaacacagtttctaatagaaaactattatttatattgggaaaggtaactattgcattagagcatgttggcagactggtaggtatttaaaaagttgagaatctgctaacagcgctggaagttgttagcgctctaagtaataagataaccactagtattcaaatctctttcaggttttattaaaaaatatatatcaataaactaaaaggttcaattcctaccaaatagtttctaatgtgggagaaaaacttggcacaaaatttcttcagtttattatctgtaaattgtacagttttctttttgaaagttttaatattgtcttcctttttaataacttattttatacatattgtgcagatgtaaatcttgtaattaatggtcaaactgtataaagggattggtagtcaaaacatgtacaaagaaatacctgtaaaactgttttgtctcatgttttattggaccaaagttgtggtttgtatggagtgtagtagtagtgtgtacaggtagaaaacttttaaatacagcatgcaggtgtttcagttagcttgttttcatcaccataactgcaaagatgtggcttagttgtattgcatgcttcctataatttaactctccataattgatgcctgcagtagtgtaaggcatttcatactagtctcctctagtagacctgtgacttactgtgttggacatattatttagacttagtcatacaaagaaacttagctcttttttcatctcacagtaaagcctatttccccaggaaaaaaataaatgcctttgaatgaaaattctgaaattgtaaatgtctattttaatattcacctatgaaagaatctgtgaatatatgtaaatacgtttaataaattttattggtcatgttaaatcattgtaaaacttttttacattgcttaatgttttaagcttaatagcctttgcacttttaaaataaaaaccaagtatgcaaatcaaagatatttggtagtcaaaataagtaaaagaaatataggaatattccagtcaatctctgaaatgtttatgaaaaacaggttaatatgttgtatttttttccttgtatcaagatgcaaaacataatttgcaaaattttataattgaaataaaacttggtatgctgttttataataaattagcaatatactttaaaaaaaatccagtttctcctataacatgatgtaaattaaatattcaggaatatttcaggtctgaaatctgctgctgaacttgttagacatttttgaaaggaaaattaggttagcgtacaatttatcataaatatatgaggtaaaatttgcaaaactttccacagtactttcttgaattataatactgaatgttttctgttccgatagagaaaagtgaagcaaatatgtgaggaatgaagtgatctagtgcaagttggtaattccagctaatgggagagaatgtaaatgtgcaaaggtacatattaagcttagggatttttgaatttttacgtcagtttatattttaattcttactgtacttggcatgcgcaataaagcagcacatgtaaaaaaaaaatacacagtgcaaggactttattataaaggttggatgtagttttccttagaaatttaggtgagagattttggccttttttattggataaattgggccagaaaggcagggtagatttcgaagcactggttctgttgaagttaagtttattaagcctgggaacattaaaagctaatttataaaagcaatactttttaatatgaaaacttactgcaaagtttgtttatacttttgcctaaaaaggaaattggatgggatactgtggcaaatcataaaaaaccagataattgaactttgaagttatagaaaatcagagaggggtaagtttatagggcattttgttctgatggttcaaccagaggtctgggaaatagcactgttggcccaaacagaacaggcttttagaagataaaagcgacaagaaggaatctggtgaattttagtcatcccagctttttagtcttaaccacagttctcactctcttaaatggtacctcaaaaagctggagcctctctgccatgattatgcttctacaaatttcttttataaagagactcaaagctaatgatagcttaaaagaaaagttaatgccttctcattggaaatgtataatcaaataagtagttaagggcttttggtattaaagatattctgaagctctgaaatgctagaaaaaaatttggaatggagtatatgcctgaaaaggttttggattcagaaagaaaaaggatggttagtttaatcagtgattctttttaaactcttcaaatatcatgaacaagatactaaattgtacctaaggatttgtatttctttacaatttgttctaaatatctgtttaatgactagttgatatttgtgcatgttatttaataaagagttatatttttatagaaaaaaaagtgaaa

SEQ ID NO: 448880 - DNA, 5901 bp, Homo sapiens
gggggcgacgctgtcctgggagcgaggaggctgtggtgagagacggaccgagaccggagatgttttcaagcccggctccggcggctttacaggcggctgcagcggcgacgaagacaacgacagcgacggctacgccgaagcactcgttccgggggtgaagcctcctgcgccggccttgcctcggatccaggatgagaagactgataaaagaagaagctagctgaacagctgtaaaatgcccaaatctgggttcacaaaaccaattcagagtgaaaattctgacagtgacagcaatatggtagagaaaccatatggaagaaagagtaaagacaagattgcatcctacagcaaaactccaaaaattgaacgaagtgatgtgagcaaggagatgaaagagaaatcatccatgaaacgtaaacttccttttactattagcccatcaagaaatgaagaacgagattcagacacagagaaagaaggtccagaaaagaagaagacaaaaaaggaagctggaaataagaaatccacaccagttagcattctttttggttatccactctctgagcgaaaacagatggcacttcttatgcagatgacagcaagagacaacagtccagattccacaccaaatcatccatcacaaacaacgcctgcccaaaagaaaactcccagttcttcatctcgacagaaagataaagttaataaaagaaatgaacgtggtgaaactcctttacacatggctgctattcgaggagatgtgaaacaagttaaagaattaataagtttaggggcaaatgtgaatgtgaaagattttgcaggttggacaccactgcatgaagcttgcaatgttggatattacgatgttgctaagatacttatagcagctggagcagatgttaacacacaaggattagatgatgacactccactccatgattctgctagtagtgggcacagagatatagtaaagctgttacttcgtcacggtggaaatccatttcaagctaataaacatggggagcgtccagtggatgtagcagaaacagaggagttggagttgctactaaaaagagaggtgcctttatctgatgatgatgaaagttacacagattccgaagaggctcaatctgtaaatccttctagtgttgatgaaaatattgactctgaaacagagaaagactctctcatctgtgaaagtaaacagatacttcccagtaaaacacctcttccatctgcccttgatgagtatgagttcaaagatgatgatgatgaagaaattaataagatgattgatgataggcatattcttaggaaagaacaacgaaaagaaaatgaacctgaagcagaaaaaactcatttatttgcaaaacaggagaaagccttctatcctaaatcatttaaaagtaaaaaacaaaagccatctagggtcttatattcaagtactgaaagttctgatgaagaagctcttcagaataaaaagatttctacttcatgttccgtcatccctgaaacatcaaattctgatatgcaaaccaaaaaggaatatgtagtttcaggtgaacacaaacagaaaggcaaagttaaaagaaaattgaaaaatcagaataaaaataaagagaaccaagagctaaagcaagaaaaggaaggaaaagaaaatacaagaataacaaacttgacagtaaatactggactagattgttcagaaaagaccagagaggaggggaactttaggaaatcttttagcccaaaagatgatacttcattacatttatttcatatttccactggtaaatctcccaaacattcttgtggattaagtgaaaaacagtcaacaccactaaaacaagaacatactaaaacatgtttatcaccaggaagttctgaaatgtcattacagcctgatcttgttcggtatgataatacagaatctgaattcttgccagaaagttcaagtgtaaaatcttgtaagcataaggaaaaaagcaaacatcagaaagatttccacttagaatttggtgaaaaatcaaatgccaaaataaaggatgaagatcatagtccaacatttgaaaattcagattgcacactgaaaaaaatggataaagaaggtaaaacattaaaaaaacataaattgaagcataaagagagggaaaaagaaaagcataaaaaagaaattgaaggtgaaaaggaaaaatacaaaactaaggatagtgccaaagaactgcagaggagtgtggaatttgatagagaattttggaaagagaatttttttaaaagtgatgaaactgaagatctctttttaaatatggaacatgaatccttaacattagaaaaaaaatcaaaattggaaaaaaacatcaaagatgataaatcaaccaaggaaaagcatgtgtcaaaagagaggaactttaaagaggaacgagacaagattaaaaaggaaagcgagaaatcttttagggaggaaaaaataaaagatctaaaagaagagagagaaaacatacccacagataaagactcagaatttacttctttgggtatgagtgccattgaggaatctatagggcttcatttagtggaaaaggaaatagacattgaaaaacaagaaaagcatataaaggaaagtaaagaaaaacctgagaagcgatctcaaattaaagaaaaggacattgagaagatggaaagaaaaacctttgaaaaagaaaagaagataaaacatgagcataagtcagaaaaagacaaattagatcttagtgaatgtgttgataaaataaaagaaaaggacaagctatattcgcatcacacagaaaaatgccataaagaaggtgagaagagcaaaaatactgctgctattaaaaaaactgacgacagagagaaaagtagagaaaagatggataggaaacatgacaaagaaaagcctgaaaaagagaggcatctagcagaaagcaaagaaaagcacttgatggagaaaaaaaataaacaatcagataatagtgaatacagtaaatcagaaaaaggcaaaaataaagaaaaagacagggagctagataaaaaggaaaaatctagagataaagaaagtataaatataactaactccaaacacatacaggaagaaaaaaaatcaagtatagtagacggtaataaagcacaacatgaaaaacccttatcccttaaagaaaaaacaaaagatgaacctttgaaaactccagatggaaaagaaaaagataaaaaagataaagatatagatagatacaaagaacgagacaaacataaagataaaattcaaataaatagcttactcaaactaaaatctgaagcagataagcctaaacctaagtcatcaccagcatcaaaagatacccgacctaaagaaaagaggttagtgaatgatgatttaatgcagacaagttttgaacgaatgctaagccttaaagacctagaaatagaacagtggcacaaaaaacataaggaaaaaattaagcaaaaagaaaaggaacggttgagaaaccgaaactgtttagaacttaaaataaaagataaagaaaaaacaaagcatacaccaactgaatccaaaaataaagaacttactaggtcaaagagttcagaagtgactgatgcatataccaaggagaaacaacctaaagatgctgtaagtaacagatcacaatctgttgacaccaaaaatgtaatgactttagggaagtcatcttttgtttcagataatagcttaaacaggtctcctagatcagaaaatgaaaagccgggtctcagctccagatctgtatccatgatttctgttgctagttcagaagattcctgccatactacagtgacaaccccaaggcctccagttgagtatgactctgactttatgttagagagttcagaatcccaaatgtccttttcccagtcaccttttttgtcaattgccaaatctcctgctcttcatgaaagggaattggacagcctggctgacttgccggagcggattaaaccaccatatgcaaacagactttcaacatcccatcttaggtcatcttctgtagaagatgttaaactaattataagcgaggggagacctaccatagaagttcgaagatgtagcatgccttctgtcatttgtgaacataccaaacaattccaaacaatatcagaagagagcaatcaaggtagcttattaactgtgccaggagatactagtccttctcccaaacctgaggtattctcaaatgtgcctgaaagagacctttcaaatgtatctaacatacattccagttttgcaacttctccaactggagcttcaaacagcaagtatgtttcagctgatagaaatctcatcaagaatactgccccagtgaacactgtaatggacagtccagtgcatttagagccatctagtcaggttggtgtgatccagaataaatcatgggagatgcctgttgatagactagagacattaagcaccagagactttatctgcccaaattctaacatacctgatcaagaatcctctcttcagagtttttgtaattctgaaaataaggtattgaaagaaaatgctgattttttatccctgcgccagactgaactgccaggaaactcttgtgctcaggatccggcatcctttatgcctccacagcagccttgctctttccccagccaatcactttcagatgctgaatcgatttctaaacatatgtctttgtcatatgttgctaatcaagagccaggtattttacaacaaaaaaatgcagttcagattattagttctgctttagatactgataatgaatctacaaaagatacagaaaatacttttgtcctaggagatgttcaaaaaacagatgcctttgtcccagtgtactctgacagcactattcaagaagcatcaccaaactttgagaaagcttatactttacctgtgttaccatcagaaaaggactttaatggaagtgatgcctctacccagctaaatacacattatgcatttagcaaactaacttacaagtcttccagtggccatgaagttgagaatagcacaactgatactcaggtcatttcacatgaaaaagaaaacaaactggagagtttggttttaactcatttgagtaggtgtgattctgatttatgtgaaatgaatgcagggatgccaaaaggaaacctaaatgaacaagatccaaaacattgtcctgaaagtgaaaagtgtttgctttccatagaagatgaggaatctcaacaaagcattttatcaagtctggaaaaccattcacagcagtcaactcaaccagaaatgcataaatatggtcagttagttaaagtagaattagaagaaaatgccgaagatgataaaactgaaaaccaaatccctcaaagaatgactagaaacaaagcaaatacaatggcaaatcaaagcaaacagattcttgctagctgtacactattatcagaaaaagacagtgaatcctcatctcctagaggaagaataagattaactgaagatgacgatcctcaaattcaccatccacggaaaaggaaagtgtcacgtgtacctcagcctgtgcaagtgagtccctctttactacaagcaaaagagaaaactcagcaatctctggcagccattgtagattctctaaaactagatgagattcagccatacagttcagagagagcaaatccatattttgaatacttgcacataaggaaaaaaatagaagaaaaacgcaaattactgtgtagtgtgattcctcaagcacctcagtactatgacgaatatgtaacatttaacggatcatatctcctggatggaaaccccttaagcaagatttgtattcccacagtaagtaacatcatcacttgctatacacctgtaacactgcccaatagaagtataatgctagccacatacgt

SEQ ID NO: 448881 - DNA, 3013 bp, Homo sapiens
gggggcgacgctgtcctgggagcgaggaggctgtggtgagagacggaccgagaccggagatgttttcaagcccggctccggcggctttacaggcggctgcagcggcgacgaagacaacgacagcgacggctacgccgaagcactcgttccgggggtgaagcctcctgcgccggccttgcctcggatccaggatgagaagactgataaaagaagaagctagctgaacagctgtaaaatgcccaaatctgggttcacaaaaccaattcagagtgaaaattctgacagtgacagcaatatggtagagaaaccatatggaagaaagagtaaagacaagattgcatcctacagcaaaactccaaaaattgaacgaagtgatgtgagcaaggagatgaaagagaaatcatccatgaaacgtaaacttccttttactattagcccatcaagaaatgaagaacgagattcagacacagagaaagaaggtccagaaaagaagaagacaaaaaaggaagctggaaataagaaatccacaccagttagcattctttttggttatccactctctgagcgaaaacagatggcacttcttatgcagatgacagcaagagacaacagtccagattccacaccaaatcatccatcacaaacaacgcctgcccaaaagaaaactcccagttcttcatctcgacagaaagataaagttaataaaagaaatgaacgtggtgaaactcctttacacatggctgctattcgaggagatgtgaaacaagttaaagaattaataagtttaggggcaaatgtgaatgtgaaagattttgcaggttggacaccactgcatgaagcttgcaatgttggatattacgatgttgctaagatacttatagcagctggagcagatgttaacacacaaggattagatgatgacactccactccatgattctgctagtagtgggcacagagatatagtaaagctgttacttcgtcacggtggaaatccatttcaagctaataaacatggggagcgtccagtggatgtagcagaaacagaggagttggagttgctactaaaaagagaggtgcctttatctgatgatgatgaaagttacacagattccgaagaggctcaatctgtaaatccttctagtgttgatgaaaatattgactctgaaacagagaaagactctctcatctgtgaaagtaaacagatacttcccagtaaaacacctcttccatctgcccttgatgagtatgagttcaaagatgatgatgatgaagaaattaataagatgattgatgataggcatattcttaggaaagaacaacgaaaagaaaatgaacctgaagcagaaaaaactcatttatttgcaaaacaggagaaagccttctatcctaaatcatttaaaagtaaaaaacaaaagccatctagggtcttatattcaagtactgaaagttctgatgaagaagctcttcagaataaaaagatttctacttcatgttccgtcatccctgaaacatcaaattctgatatgcaaaccaaaaaggaatatgtagtttcaggtgaacacaaacagaaaggcaaagttaaaagaaaattgaaaaatcagaataaaaataaagagaaccaagagctaaagcaagaaaaggaaggaaaagaaaatacaagaataacaaacttgacagtaaatactggactagattgttcagaaaagaccagagaggaggggaactttaggaaatcttttagcccaaaagatgatacttcattacatttatttcatatttccactggtaaatctcccaaacattcttgtggattaagtgaaaaacagtcaacaccactaaaacaagaacatactaaaacatgtttatcaccaggaagttctgaaatgtcattacagcctgatcttgttcggtatgataatacagaatctgaattcttgccagaaagttcaagtgtaaaatcttgtaagcataaggaaaaaagcaaacatcagaaagatttccacttagaatttggtgaaaaatcaaatgccaaaataaaggatgaagatcatagtccaacatttgaaaattcagattgcacactgaaaaaaatggataaagaaggtaaaacattaaaaaaacataaattgaagcataaagagagggaaaaagaaaagcataaaaaagaaattgaaggtgaaaaggaaaaatacaaaactaaggatagtgccaaagaactgcagaggagtgtggaatttgatagagaattttggaaagagaatttttttaaaagtgatgaaactgaagatctctttttaaatatggaacatgaatccttaacattagaaaaaaaatcaaaattggaaaaaaacatcaaagatgataaatcaaccaaggaaaagcatgtgtcaaaagagaggaactttaaagaggaacgagacaagattaaaaaggaaagcgagaaatcttttagggaggaaaaaataaaagatctaaaagaagagagagaaaacatacccacagataaagactcagaatttacttctttgggtatgagtgccattgaggaatctatagggcttcatttagtggaaaaggaaatagacattgaaaaacaagaaaagcatataaaggaaagtaaagaaaaacctgagaagcgatctcaaattaaagaaaaggacattgagaagatggaaagaaaaacctttgaaaaagaaaagaagataaaacatgagcataagtcagaaaaagacaaattagatcttagtgaatgtgttgataaaataaaagaaaaggacaagctatattcgcatcacacagaaaaatgccataaagaaggtgagaagagcaaaaatactgctgctattaaaaaaactgacgacagagagaaaagtagagaaaagatggataggaaacatgacaaagaaaagcctgaaaaagagaggcatctagcagaaagcaaagaaaagcacttgatggagaaaaaaaataaacaatcagataatagtgaatacagtaaatcagaaaaaggc

SEQ ID NO: 448882 - DNA, 1264 bp, Homo sapiens
  misc_feature (1131)..(1131): n is a, c, g, or t
  misc_feature (1154)..(1154): n is a, c, g, or t
  misc_feature (1164)..(1164): n is a, c, g, or t
gggggcgacgctgtcctgggagcgaggaggctgtggtgagagacggaccgagaccggagatgttttcaagcccggctccggcggctttacaggcggctgcagcggcgacgaagacaacgacagcgacggctacgccgaagcactcgttccgggggtgaagcctcctgcgccggccttgcctcggatccaggatgagaagactgataaaagaagaagctagctgaacagctgtaaaatgcccaaatctgggttcacaaaaccaattcagagtgaaaattctgacagtgacagcaatatggtagagaaaccatatggaagaaagagtaaagacaagattgcatcctacagcaaaactccaaaaattgaacgaagtgatgtgagcaaggagatgaaagagaaatcatccatgaaacgtaaacttccttttactattagcccatcaagaaatgaagaacgagattcagacacagagaaagaaggtccagaaaagaagaagacaaaaaaggaagctggaaataagaaatccacaccagttagcattctttttggttatccactctctgagcgaaaacagatggcacttcttatgcagatgacagcaagagacaacagtccagattccacaccaaatcatccatcacaaacaacgcctgcccaaaagaaaactcccagttcttcatctcgacagaaagataaagttaataaaagaaatgaacgtggtgaaactcctttacacatggctgctattcgaggagatgtgaaacaagttaaagaattaataagtttaggggcaaatgtgaatgtgaaagattttgcaggttggacaccactgcatgaagcttgcaatgttggatattacgatgttgctaagatacttatagcagctggagcagatgttaacacacaaggattagatgatgacactccactccatgattctgctagtagtgggcacagagatatagtaaagctgttacttcgtcacggtggaaatccatttcaagctaataaacatggggagcgtccagtggatgtagcagaaacagaggagttggagttgctactaaaaagagaggtgcctttatctgatgatgatgaaagttacacagatccaggatgagaagactgatnaaagaagaagctagctgaacagntgtaaaatgnccaaatctgggttcacaaaacaattcagagtgaaaattctgacagtgacagcatatggtagagaaaccatttggaagaaagagtaagacaagatggatcg

SEQ ID NO: 448883 - DNA, 742 bp, Homo sapiens
gagcgaaaacagatggcacttcttatgcagatgacagcaagagacaacagtccaggtgatacctaccatcattgagttaatgtgtatccctagttttcctcaggcaactgtagtctcgtcttaacaattattttaactacttttaatttttattctttcttggatttaatcagaattacttgtaagtcagtggtaattttatgattatttgtgtgacagtttatcatctgtatcctctgctaaagtagaagctatacaagagtagggctctttacaccatgtgtaatccatgttttattaagatctaaatttttttataaggaaaaatgtcagcagtatattaacagtcattttatatttcatgtcacatttccagctaaggtgttgtgccacatgtatgtatgtttatttatatactgtgttctccaaaaataattgatgatgacttaccagcaggacaaaaacaaaaagggaacaaaccaaacaacatggtaatttataaaagggagctaaaaaggtagataaaatccaggcaactggcctgagatagttattactattcacatcctggcagctaaaagtacaaaagaaaatttttgagttacatagttctcattgactgattcaagaaagtaaatcacttttgtctggagaaaatttcttttggccctgaattcaaagcaattttatgtaagactctgggttacgtaacagtccatgttgaaatgcattgaaaaagata

SEQ ID NO: 448884 - DNA, 555 bp, Homo sapiens
tatgtattgtataagctatatctttttctcagaaaaaaaaattatttttctggcagttgtgttttgtttgacccacaccacattttcttttttttattctagattccgaagaggctcaatctgtaaatccttctagtgttgatgaaaatattgactctgaaacagagaaagactctctcatctgtgaaagtaaacagatacttcccagtaaaacacctcttccatctgcccttgatgagtatgagttcaaagatgatgatgatgaagaaattaataagatgattgatgataggcatattcttaggaaagaacaacgaaaagaaaatgaacctgaagcagaaaaaactcatttatttgcaaaacaggagaaagccttctatcctaaatcatttaaaagtaaaaaacaaaagccatctagggtcttatattcaagtactgaaagttctgatgaagaagctcttcagaataaaaagatttctacttcatgttccgtcatccctgaaacatcaaattctgatatgcaaaccaaaaaggaatatgtagtttcaggtgaac

SEQ ID NO: 448885 - DNA, 9071 bp, Homo sapiens
gggggcgacgctgtcctgggagcgaggaggctgtggtgagagacggaccgagaccggagatgttttcaagcccggctccggcggctttacaggcggctgcagcggcgacgaagacaacgacagcgacggctacgccgaagcactcgttccgggggtgaagcctcctgcgccggccttgcctcggatccaggatgagaagactgataaaagaagaagctagctgaacagctgtaaaatgcccaaatctgggttcacaaaaccaattcagagtgaaaattctgacagtgacagcaatatggtagagaaaccatatggaagaaagagtaaagacaagattgcatcctacagcaaaactccaaaaattgaacgaagtgatgtgagcaaggagatgaaagagaaatcatccatgaaacgtaaacttccttttactattagcccatcaagaaatgaagaacgagattcagacacagattcagatccaggacatacaagtgaaaattggggggagagacttatatcttcttacaggacatactcagagaaagaaggtccagaaaagaagaagacaaaaaaggaagctggaaataagaaatccacaccagttagcattctttttggttatccactctctgagcgaaaacagatggcacttcttatgcagatgacagcaagagacaacagtccagattccacaccaaatcatccatcacaaacaacgcctgcccaaaagaaaactcccagttcttcatctcgacagaaagataaagttaataaaagaaatgaacgtggtgaaactcctttacacatggctgctattcgaggagatgtgaaacaagttaaagaattaataagtttaggggcaaatgtgaatgtgaaagattttgcaggttggacaccactgcatgaagcttgcaatgttggatattacgatgttgctaagatacttatagcagctggagcagatgttaacacacaaggattagatgatgacactccactccatgattctgctagtagtgggcacagagatatagtaaagctgttacttcgtcacggtggaaatccatttcaagctaataaacatggggagcgtccagtggatgtagcagaaacagaggagttggagttgctactaaaaagagaggtgcctttatctgatgatgatgaaagttacacagattccgaagaggctcaatctgtaaatccttctagtgttgatgaaaatattgactctgaaacagagaaagactctctcatctgtgaaagtaaacagatacttcccagtaaaacacctcttccatctgcccttgatgagtatgagttcaaagatgatgatgatgaagaaattaataagatgattgatgataggcatattcttaggaaagaacaacgaaaagaaaatgaacctgaagcagaaaaaactcatttatttgcaaaacaggagaaagccttctatcctaaatcatttaaaagtaaaaaacaaaagccatctagggtcttatattcaagtactgaaagttctgatgaagaagctcttcagaataaaaagatttctacttcatgttccgtcatccctgaaacatcaaattctgatatgcaaaccaaaaaggaatatgtagtttcaggtgaacacaaacagaaaggcaaagttaaaagaaaattgaaaaatcagaataaaaataaagagaaccaagagctaaagcaagaaaaggaaggaaaagaaaatacaagaataacaaacttgacagtaaatactggactagattgttcagaaaagaccagagaggaggggaactttaggaaatcttttagcccaaaagatgatacttcattacatttatttcatatttccactggtaaatctcccaaacattcttgtggattaagtgaaaaacagtcaacaccactaaaacaagaacatactaaaacatgtttatcaccaggaagttctgaaatgtcattacagcctgatcttgttcggtatgataatacagaatctgaattcttgccagaaagttcaagtgtaaaatcttgtaagcataaggaaaaaagcaaacatcagaaagatttccacttagaatttggtgaaaaatcaaatgccaaaataaaggatgaagatcatagtccaacatttgaaaattcagattgcacactgaaaaaaatggataaagaaggtaaaacattaaaaaaacataaattgaagcataaagagagggaaaaagaaaagcataaaaaagaaattgaaggtgaaaaggaaaaatacaaaactaaggatagtgccaaagaactgcagaggagtgtggaatttgatagagaattttggaaagagaatttttttaaaagtgatgaaactgaagatctctttttaaatatggaacatgaatccttaacattagaaaaaaaatcaaaattggaaaaaaacatcaaagatgataaatcaaccaaggaaaagcatgtgtcaaaagagaggaactttaaagaggaacgagacaagattaaaaaggaaagcgagaaatcttttagggaggaaaaaataaaagatctaaaagaagagagagaaaacatacccacagataaagactcagaatttacttctttgggtatgagtgccattgaggaatctatagggcttcatttagtggaaaaggaaatagacattgaaaaacaagaaaagcatataaaggaaagtaaagaaaaacctgagaagcgatctcaaattaaagaaaaggacattgagaagatggaaagaaaaacctttgaaaaagaaaagaagataaaacatgagcataagtcagaaaaagacaaattagatcttagtgaatgtgttgataaaataaaagaaaaggacaagctatattcgcatcacacagaaaaatgccataaagaaggtgagaagagcaaaaatactgctgctattaaaaaaactgacgacagagagaaaagtagagaaaagatggataggaaacatgacaaagaaaagcctgaaaaagagaggcatctagcagaaagcaaagaaaagcacttgatggagaaaaaaaataaacaatcagataatagtgaatacagtaaatcagaaaaaggcaaaaataaagaaaaagacagggagctagataaaaaggaaaaatctagagataaagaaagtataaatataactaactccaaacacatacaggaagaaaaaaaatcaagtatagtagacggtaataaagcacaacatgaaaaacccttatcccttaaagaaaaaacaaaagatgaacctttgaaaactccagatggaaaagaaaaagataaaaaagataaagatatagatagatacaaagaacgagacaaacataaagataaaattcaaataaatagcttactcaaactaaaatctgaagcagataagcctaaacctaagtcatcaccagcatcaaaagatacccgacctaaagaaaagaggttagtgaatgatgatttaatgcagacaagttttgaacgaatgctaagccttaaagacctagaaatagaacagtggcacaaaaaacataaggaaaaaattaagcaaaaagaaaaggaacggttgagaaaccgaaactgtttagaacttaaaataaaagataaagaaaaaacaaagcatacaccaactgaatccaaaaataaagaacttactaggtcaaagagttcagaagtgactgatgcatataccaaggagaaacaacctaaagatgctgtaagtaacagatcacaatctgttgacaccaaaaatgtaatgactttagggaagtcatcttttgtttcagataatagcttaaacaggtctcctagatcagaaaatgaaaagccgggtctcagctccagatctgtatccatgatttctgttgctagttcagaagattcctgccatactacagtgacaaccccaaggcctccagttgagtatgactctgactttatgttagagagttcagaatcccaaatgtccttttcccagtcaccttttttgtcaattgccaaatctcctgctcttcatgaaagggaattggacagcctggctgacttgccggagcggattaaaccaccatatgcaaacagactttcaacatcccatcttaggtcatcttctgtagaagatgttaaactaattataagcgaggggagacctaccatagaagttcgaagatgtagcatgccttctgtcatttgtgaacataccaaacaattccaaacaatatcagaagagagcaatcaaggtagcttattaactgtgccaggagatactagtccttctcccaaacctgaggtattctcaaatgtgcctgaaagagacctttcaaatgtatctaacatacattccagttttgcaacttctccaactggagcttcaaacagcaagtatgtttcagctgatagaaatctcatcaagaatactgccccagtgaacactgtaatggacagtccagtgcatttagagccatctagtcaggttggtgtgatccagaataaatcatgggagatgcctgttgatagactagagacattaagcaccagagactttatctgcccaaattctaacatacctgatcaagaatcctctcttcagagtttttgtaattctgaaaataaggtattgaaagaaaatgctgattttttatccctgcgccagactgaactgccaggaaactcttgtgctcaggatccggcatcctttatgcctccacagcagccttgctctttccccagccaatcactttcagatgctgaatcgatttctaaacatatgtctttgtcatatgttgctaatcaagagccaggtattttacaacaaaaaaatgcagttcagattattagttctgctttagatactgataatgaatctacaaaagatacagaaaatacttttgtcctaggagatgttcaaaaaacagatgcctttgtcccagtgtactctgacagcactattcaagaagcatcaccaaactttgagaaagcttatactttacctgtgttaccatcagaaaaggactttaatggaagtgatgcctctacccagctaaatacacattatgcatttagcaaactaacttacaagtcttccagtggccatgaagttgagaatagcacaactgatactcaggtcatttcacatgaaaaagaaaacaaactggagagtttggttttaactcatttgagtaggtgtgattctgatttatgtgaaatgaatgcagggatgccaaaaggaaacctaaatgaacaagatccaaaacattgtcctgaaagtgaaaagtgtttgctttccatagaagatgaggaatctcaacaaagcattttatcaagtctggaaaaccattcacagcagtcaactcaaccagaaatgcataaatatggtcagttagttaaagtagaattagaagaaaatgccgaagatgataaaactgaaaaccaaatccctcaaagaatgactagaaacaaagcaaatacaatggcaaatcaaagcaaacagattcttgctagctgtacactattatcagaaaaagacagtgaatcctcatctcctagaggaagaataagattaactgaagatgacgatcctcaaattcaccatccacggaaaaggaaagtgtcacgtgtacctcagcctgtgcaagtgagtccctctttactacaagcaaaagagaaaactcagcaatctctggcagccattgtagattctctaaaactagatgagattcagccatacagttcagagagagcaaatccatattttgaatacttgcacataaggaaaaaaatagaagaaaaacgcaaattactgtgtagtgtgattcctcaagcacctcagtactatgacgaatatgtaacatttaacggatcatatctcctggatggaaaccccttaagcaagatttgtattcccacaattacaccaccaccttcactgtcagatccacttaaagagctttttcgacaacaggaagttgtaaggatgaaactacgtttgcaacacagtattgaaagggaaaaactcattgtatccaacgaacaagaagttttgcgagttcattacagagctgcaagaacattggcaaatcaaacactgccatttagtgcttgtactgttttgctggatgccgaagtatacaatgtaccattggactctcagtctgatgacagtaaaacttctgtgagggatcgctttaatgcaagacaattcatgtcttggttacaagatgtggatgataaatttgacaaattaaagacctgtcttttaatgaggcaacaacatgaagctgcggctttaaatgctgtccagaggttagaatggcagctcaaactccaggaacttgatcctgccacctataaatctatcagcatttacgaaatccaggagttttatgttccccttgttgatgttaacgacgactttgaattgactcctatatagcagtcagtacttcctgatggtattgtcctaaactggtgatgctcaagcattatactgtggaatactgccttttgacaaaaatactcatgcctttacaattgttagtaaagttcgattatagttggttatgtagtaaacactgtcattttataaaaaatgagaattattttggatcttagatccaaacacagtttctaatagaaaactattatttatattgggaaaggtaactattgcattagagcatgttggcagactggtaggtatttaaaaagttgagaatctgctaacagcgctggaagttgttagcgctctaagtaataagataaccactagtattcaaatctctttcaggttttattaaaaaatatatatcaataaactaaaaggttcaattcctaccaaatagtttctaatgtgggagaaaaacttggcacaaaatttcttcagtttattatctgtaaattgtacagttttctttttgaaagttttaatattgtcttcctttttaataacttattttatacatattgtgcagatgtaaatcttgtaattaatggtcaaactgtataaagggattggtagtcaaaacatgtacaaagaaatacctgtaaaactgttttgtctcatgttttattggaccaaagttgtggtttgtatggagtgtagtagtagtgtgtacaggtagaaaacttttaaatacagcatgcaggtgtttcagttagcttgttttcatcaccataactgcaaagatgtggcttagttgtattgcatgcttcctataatttaactctccataattgatgcctgcagtagtgtaaggcatttcatactagtctcctctagtagacctgtgacttactgtgttggacatattatttagacttagtcatacaaagaaacttagctcttttttcatctcacagtaaagcctatttccccaggaaaaaaataaatgcctttgaatgaaaattctgaaattgtaaatgtctattttaatattcacctatgaaagaatctgtgaatatatgtaaatacgtttaataaattttattggtcatgttaaatcattgtaaaacttttttacattgcttaatgttttaagcttaatagcctttgcacttttaaaataaaaaccaagtatgcaaatcaaagatatttggtagtcaaaataagtaaaagaaatataggaatattccagtcaatctctgaaatgtttatgaaaaacaggttaatatgttgtatttttttccttgtatcaagatgcaaaacataatttgcaaaattttataattgaaataaaacttggtatgctgttttataataaattagcaatatactttaaaaaaaatccagtttctcctataacatgatgtaaattaaatattcaggaatatttcaggtctgaaatctgctgctgaacttgttagacatttttgaaaggaaaattaggttagcgtacaatttatcataaatatatgaggtaaaatttgcaaaactttccacagtactttcttgaattataatactgaatgttttctgttccgatagagaaaagtgaagcaaatatgtgaggaatgaagtgatctagtgcaagttggtaattccagctaatgggagagaatgtaaatgtgcaaaggtacatattaagcttagggatttttgaatttttacgtcagtttatattttaattcttactgtacttggcatgcgcaataaagcagcacatgtaaaaaaaaaatacacagtgcaaggactttattataaaggttggatgtagttttccttagaaatttaggtgagagattttggccttttttattggataaattgggccagaaaggcagggtagatttcgaagcactggttctgttgaagttaagtttattaagcctgggaacattaaaagctaatttataaaagcaatactttttaatatgaaaacttactgcaaagtttgtttatacttttgcctaaaaaggaaattggatgggatactgtggcaaatcataaaaaaccagataattgaactttgaagttatagaaaatcagagaggggtaagtttatagggcattttgttctgatggttcaaccagaggtctgggaaatagcactgttggcccaaacagaacaggcttttagaagataaaagcgacaagaaggaatctggtgaattttagtcatcccagctttttagtcttaaccacagttctcactctcttaaatggtacctcaaaaagctggagcctctctgccatgattatgcttctacaaatttcttttataaagagactcaaagctaatgatagcttaaaagaaaagttaatgccttctcattggaaatgtataatcaaataagtagttaagggcttttggtattaaagatattctgaagctctgaaatgctagaaaaaaatttggaatggagtatatgcctgaaaaggttttggattcagaaagaaaaaggatggttagtttaatcagtgattctttttaaactcttcaaatatcatgaacaagatactaaattgtacctaaggatttgtatttctttacaatttgttctaaatatctgtttaatgactagttgatatttgtgcatgttatttaataaagagttatatttttatagaaaaaaaagtgaaa

SEQ ID NO: 448886 - DNA, 8519 bp, Homo sapiens
  misc_feature (77)..(77): n is a, c, g, or t
  misc_feature (92)..(92): n is a, c, g, or t
  misc_feature (105)..(105): n is a, c, g, or t
cctgaatagaagtgcatctgttttcgctcagagagtggataccaaaaagaatgctaactggtgtggatttcttattnccagcttcctttttngtcttcttctttngcaaatgacagcaagagacaacagtccagattccacaccaaatcatccatcacaaacaacgcctgcccaaaagaaaactcccagttcttcatctcgacagaaagataaagttaataaaagaaatgaacgtggtgaaactcctttacacatggctgctattcgaggagatgtgaaacaagttaaagaattaataagtttaggggcaaatgtgaatgtgaaagattttgcaggttggacaccactgcatgaagcttgcaatgttggatattacgatgttgctaagatacttatagcagctggagcagatgttaacacacaaggattagatgatgacactccactccatgattctgctagtagtgggcacagagatatagtaaagctgttacttcgtcacggtggaaatccatttcaagctaataaacatggggagcgtccagtggatgtagcagaaacagaggagttggagttgctactaaaaagagaggtgcctttatctgatgatgatgaaagttacacagattccgaagaggctcaatctgtaaatccttctagtgttgatgaaaatattgactctgaaacagagaaagactctctcatctgtgaaagtaaacagatacttcccagtaaaacacctcttccatctgcccttgatgagtatgagttcaaagatgatgatgatgaagaaattaataagatgattgatgataggcatattcttaggaaagaacaacgaaaagaaaatgaacctgaagcagaaaaaactcatttatttgcaaaacaggagaaagccttctatcctaaatcatttaaaagtaaaaaacaaaagccatctagggtcttatattcaagtactgaaagttctgatgaagaagctcttcagaataaaaagatttctacttcatgttccgtcatccctgaaacatcaaattctgatatgcaaaccaaaaaggaatatgtagtttcaggtgaacacaaacagaaaggcaaagttaaaagaaaattgaaaaatcagaataaaaataaagagaaccaagagctaaagcaagaaaaggaaggaaaagaaaatacaagaataacaaacttgacagtaaatactggactagattgttcagaaaagaccagagaggaggggaactttaggaaatcttttagcccaaaagatgatacttcattacatttatttcatatttccactggtaaatctcccaaacattcttgtggattaagtgaaaaacagtcaacaccactaaaacaagaacatactaaaacatgtttatcaccaggaagttctgaaatgtcattacagcctgatcttgttcggtatgataatacagaatctgaattcttgccagaaagttcaagtgtaaaatcttgtaagcataaggaaaaaagcaaacatcagaaagatttccacttagaatttggtgaaaaatcaaatgccaaaataaaggatgaagatcatagtccaacatttgaaaattcagattgcacactgaaaaaaatggataaagaaggtaaaacattaaaaaaacataaattgaagcataaagagagggaaaaagaaaagcataaaaaagaaattgaaggtgaaaaggaaaaatacaaaactaaggatagtgccaaagaactgcagaggagtgtggaatttgatagagaattttggaaagagaatttttttaaaagtgatgaaactgaagatctctttttaaatatggaacatgaatccttaacattagaaaaaaaatcaaaattggaaaaaaacatcaaagatgataaatcaaccaaggaaaagcatgtgtcaaaagagaggaactttaaagaggaacgagacaagattaaaaaggaaagcgagaaatcttttagggaggaaaaaataaaagatctaaaagaagagagagaaaacatacccacagataaagactcagaatttacttctttgggtatgagtgccattgaggaatctatagggcttcatttagtggaaaaggaaatagacattgaaaaacaagaaaagcatataaaggaaagtaaagaaaaacctgagaagcgatctcaaattaaagaaaaggacattgagaagatggaaagaaaaacctttgaaaaagaaaagaagataaaacatgagcataagtcagaaaaagacaaattagatcttagtgaatgtgttgataaaataaaagaaaaggacaagctatattcgcatcacacagaaaaatgccataaagaaggtgagaagagcaaaaatactgctgctattaaaaaaactgacgacagagagaaaagtagagaaaagatggataggaaacatgacaaagaaaagcctgaaaaagagaggcatctagcagaaagcaaagaaaagcacttgatggagaaaaaaaataaacaatcagataatagtgaatacagtaaatcagaaaaaggcaaaaataaagaaaaagacagggagctagataaaaaggaaaaatctagagataaagaaagtataaatataactaactccaaacacatacaggaagaaaaaaaatcaagtatagtagacggtaataaagcacaacatgaaaaacccttatcccttaaagaaaaaacaaaagatgaacctttgaaaactccagatggaaaagaaaaagataaaaaagataaagatatagatagatacaaagaacgagacaaacataaagataaaattcaaataaatagcttactcaaactaaaatctgaagcagataagcctaaacctaagtcatcaccagcatcaaaagatacccgacctaaagaaaagaggttagtgaatgatgatttaatgcagacaagttttgaacgaatgctaagccttaaagacctagaaatagaacagtggcacaaaaaacataaggaaaaaattaagcaaaaagaaaaggaacggttgagaaaccgaaactgtttagaacttaaaataaaagataaagaaaaaacaaagcatacaccaactgaatccaaaaataaagaacttactaggtcaaagagttcagaagtgactgatgcatataccaaggagaaacaacctaaagatgctgtaagtaacagatcacaatctgttgacaccaaaaatgtaatgactttagggaagtcatcttttgtttcagataatagcttaaacaggtctcctagatcagaaaatgaaaagccgggtctcagctccagatctgtatccatgatttctgttgctagttcagaagattcctgccatactacagtgacaaccccaaggcctccagttgagtatgactctgactttatgttagagagttcagaatcccaaatgtccttttcccagtcaccttttttgtcaattgccaaatctcctgctcttcatgaaagggaattggacagcctggctgacttgccggagcggattaaaccaccatatgcaaacagactttcaacatcccatcttaggtcatcttctgtagaagatgttaaactaattataagcgaggggagacctaccatagaagttcgaagatgtagcatgccttctgtcatttgtgaacataccaaacaattccaaacaatatcagaagagagcaatcaaggtagcttattaactgtgccaggagatactagtccttctcccaaacctgaggtattctcaaatgtgcctgaaagagacctttcaaatgtatctaacatacattccagttttgcaacttctccaactggagcttcaaacagcaagtatgtttcagctgatagaaatctcatcaagaatactgccccagtgaacactgtaatggacagtccagtgcatttagagccatctagtcaggttggtgtgatccagaataaatcatgggagatgcctgttgatagactagagacattaagcaccagagactttatctgcccaaattctaacatacctgatcaagaatcctctcttcagagtttttgtaattctgaaaataaggtattgaaagaaaatgctgattttttatccctgcgccagactgaactgccaggaaactcttgtgctcaggatccggcatcctttatgcctccacagcagccttgctctttccccagccaatcactttcagatgctgaatcgatttctaaacatatgtctttgtcatatgttgctaatcaagagccaggtattttacaacaaaaaaatgcagttcagattattagttctgctttagatactgataatgaatctacaaaagatacagaaaatacttttgtcctaggagatgttcaaaaaacagatgcctttgtcccagtgtactctgacagcactattcaagaagcatcaccaaactttgagaaagcttatactttacctgtgttaccatcagaaaaggactttaatggaagtgatgcctctacccagctaaatacacattatgcatttagcaaactaacttacaagtcttccagtggccatgaagttgagaatagcacaactgatactcaggtcatttcacatgaaaaagaaaacaaactggagagtttggttttaactcatttgagtaggtgtgattctgatttatgtgaaatgaatgcagggatgccaaaaggaaacctaaatgaacaagatccaaaacattgtcctgaaagtgaaaagtgtttgctttccatagaagatgaggaatctcaacaaagcattttatcaagtctggaaaaccattcacagcagtcaactcaaccagaaatgcataaatatggtcagttagttaaagtagaattagaagaaaatgccgaagatgataaaactgaaaaccaaatccctcaaagaatgactagaaacaaagcaaatacaatggcaaatcaaagcaaacagattcttgctagctgtacactattatcagaaaaagacagtgaatcctcatctcctagaggaagaataagattaactgaagatgacgatcctcaaattcaccatccacggaaaaggaaagtgtcacgtgtacctcagcctgtgcaagtgagtccctctttactacaagcaaaagagaaaactcagcaatctctggcagccattgtagattctctaaaactagatgagattcagccatacagttcagagagagcaaatccatattttgaatacttgcacataaggaaaaaaatagaagaaaaacgcaaattactgtgtagtgtgattcctcaagcacctcagtactatgacgaatatgtaacatttaacggatcatatctcctggatggaaaccccttaagcaagatttgtattcccacaattacaccaccaccttcactgtcagatccacttaaagagctttttcgacaacaggaagttgtaaggatgaaactacgtttgcaacacagtattgaaagggaaaaactcattgtatccaacgaacaagaagttttgcgagttcattacagagctgcaagaacattggcaaatcaaacactgccatttagtgcttgtactgttttgctggatgccgaagtatacaatgtaccattggactctcagtctgatgacagtaaaacttctgtgagggatcgctttaatgcaagacaattcatgtcttggttacaagatgtggatgataaatttgacaaattaaagacctgtcttttaatgaggcaacaacatgaagctgcggctttaaatgctgtccagaggttagaatggcagctcaaactccaggaacttgatcctgccacctataaatctatcagcatttacgaaatccaggagttttatgttccccttgttgatgttaacgacgactttgaattgactcctatatagcagtcagtacttcctgatggtattgtcctaaactggtgatgctcaagcattatactgtggaatactgccttttgacaaaaatactcatgcctttacaattgttagtaaagttcgattatagttggttatgtagtaaacactgtcattttataaaaaatgagaattattttggatcttagatccaaacacagtttctaatagaaaactattatttatattgggaaaggtaactattgcattagagcatgttggcagactggtaggtatttaaaaagttgagaatctgctaacagcgctggaagttgttagcgctctaagtaataagataaccactagtattcaaatctctttcaggttttattaaaaaatatatatcaataaactaaaaggttcaattcctaccaaatagtttctaatgtgggagaaaaacttggcacaaaatttcttcagtttattatctgtaaattgtacagttttctttttgaaagttttaatattgtcttcctttttaataacttattttatacatattgtgcagatgtaaatcttgtaattaatggtcaaactgtataaagggattggtagtcaaaacatgtacaaagaaatacctgtaaaactgttttgtctcatgttttattggaccaaagttgtggtttgtatggagtgtagtagtagtgtgtacaggtagaaaacttttaaatacagcatgcaggtgtttcagttagcttgttttcatcaccataactgcaaagatgtggcttagttgtattgcatgcttcctataatttaactctccataattgatgcctgcagtagtgtaaggcatttcatactagtctcctctagtagacctgtgacttactgtgttggacatattatttagacttagtcatacaaagaaacttagctcttttttcatctcacagtaaagcctatttccccaggaaaaaaataaatgcctttgaatgaaaattctgaaattgtaaatgtctattttaatattcacctatgaaagaatctgtgaatatatgtaaatacgtttaataaattttattggtcatgttaaatcattgtaaaacttttttacattgcttaatgttttaagcttaatagcctttgcacttttaaaataaaaaccaagtatgcaaatcaaagatatttggtagtcaaaataagtaaaagaaatataggaatattccagtcaatctctgaaatgtttatgaaaaacaggttaatatgttgtatttttttccttgtatcaagatgcaaaacataatttgcaaaattttataattgaaataaaacttggtatgctgttttataataaattagcaatatactttaaaaaaaatccagtttctcctataacatgatgtaaattaaatattcaggaatatttcaggtctgaaatctgctgctgaacttgttagacatttttgaaaggaaaattaggttagcgtacaatttatcataaatatatgaggtaaaatttgcaaaactttccacagtactttcttgaattataatactgaatgttttctgttccgatagagaaaagtgaagcaaatatgtgaggaatgaagtgatctagtgcaagttggtaattccagctaatgggagagaatgtaaatgtgcaaaggtacatattaagcttagggatttttgaatttttacgtcagtttatattttaattcttactgtacttggcatgcgcaataaagcagcacatgtaaaaaaaaaatacacagtgcaaggactttattataaaggttggatgtagttttccttagaaatttaggtgagagattttggccttttttattggataaattgggccagaaaggcagggtagatttcgaagcactggttctgttgaagttaagtttattaagcctgggaacattaaaagctaatttataaaagcaatactttttaatatgaaaacttactgcaaagtttgtttatacttttgcctaaaaaggaaattggatgggatactgtggcaaatcataaaaaaccagataattgaactttgaagttatagaaaatcagagaggggtaagtttatagggcattttgttctgatggttcaaccagaggtctgggaaatagcactgttggcccaaacagaacaggcttttagaagataaaagcgacaagaaggaatctggtgaattttagtcatcccagctttttagtcttaaccacagttctcactctcttaaatggtacctcaaaaagctggagcctctctgccatgattatgcttctacaaatttcttttataaagagactcaaagctaatgatagcttaaaagaaaagttaatgccttctcattggaaatgtataatcaaataagtagttaagggcttttggtattaaagatattctgaagctctgaaatgctagaaaaaaatttggaatggagtatatgcctgaaaaggttttggattcagaaagaaaaaggatggttagtttaatcagtgattctttttaaactcttcaaatatcatgaacaagatactaaattgtacctaaggatttgtatttctttacaatttgttctaaatatctgtttaatgactagttgatatttgtgcatgttatttaataaagagttatatttttatagaaaaaaaagtgaaa

SEQ ID NO: 448887 - DNA, 6259 bp, Homo sapiens
caaaagtgcctcttctatatctacacaacacccgacaagctatattcgcatcacacagaaaaatgccataaagaaggtgagaagagcaaaaatactgctgctattaaaaaaactgacgacagagagaaaagtagagaaaagatggataggaaacatgacaaagaaaagcctgaaaaagagaggcatctagcagaaagcaaagaaaagcacttgatggagaaaaaaaataaacaatcagataatagtgaatacagtaaatcagaaaaaggcaaaaataaagaaaaagacagggagctagataaaaaggaaaaatctagagataaagaaagtataaatataactaactccaaacacatacaggaagaaaaaaaatcaagtatagtagacggtaataaagcacaacatgaaaaacccttatcccttaaagaaaaaacaaaagatgaacctttgaaaactccagatggaaaagaaaaagataaaaaagataaagatatagatagatacaaagaacgagacaaacataaagataaaattcaaataaatagcttactcaaactaaaatctgaagcagataagcctaaacctaagtcatcaccagcatcaaaagatacccgacctaaagaaaagaggttagtgaatgatgatttaatgcagacaagttttgaacgaatgctaagccttaaagacctagaaatagaacagtggcacaaaaaacataaggaaaaaattaagcaaaaagaaaaggaacggttgagaaaccgaaactgtttagaacttaaaataaaagataaagaaaaaacaaagcatacaccaactgaatccaaaaataaagaacttactaggtcaaagagttcagaagtgactgatgcatataccaaggagaaacaacctaaagatgctgtaagtaacagatcacaatctgttgacaccaaaaatgtaatgactttagggaagtcatcttttgtttcagataatagcttaaacaggtctcctagatcagaaaatgaaaagccgggtctcagctccagatctgtatccatgatttctgttgctagttcagaagattcctgccatactacagtgacaaccccaaggcctccagttgagtatgactctgactttatgttagagagttcagaatcccaaatgtccttttcccagtcaccttttttgtcaattgccaaatctcctgctcttcatgaaagggaattggacagcctggctgacttgccggagcggattaaaccaccatatgcaaacagactttcaacatcccatcttaggtcatcttctgtagaagatgttaaactaattataagcgaggggagacctaccatagaagttcgaagatgtagcatgccttctgtcatttgtgaacataccaaacaattccaaacaatatcagaagagagcaatcaaggtagcttattaactgtgccaggagatactagtccttctcccaaacctgaggtattctcaaatgtgcctgaaagagacctttcaaatgtatctaacatacattccagttttgcaacttctccaactggagcttcaaacagcaagtatgtttcagctgatagaaatctcatcaagaatactgccccagtgaacactgtaatggacagtccagtgcatttagagccatctagtcaggttggtgtgatccagaataaatcatgggagatgcctgttgatagactagagacattaagcaccagagactttatctgcccaaattctaacatacctgatcaagaatcctctcttcagagtttttgtaattctgaaaataaggtattgaaagaaaatgctgattttttatccctgcgccagactgaactgccaggaaactcttgtgctcaggatccggcatcctttatgcctccacagcagccttgctctttccccagccaatcactttcagatgctgaatcgatttctaaacatatgtctttgtcatatgttgctaatcaagagccaggtattttacaacaaaaaaatgcagttcagattattagttctgctttagatactgataatgaatctacaaaagatacagaaaatacttttgtcctaggagatgttcaaaaaacagatgcctttgtcccagtgtactctgacagcactattcaagaagcatcaccaaactttgagaaagcttatactttacctgtgttaccatcagaaaaggactttaatggaagtgatgcctctacccagctaaatacacattatgcatttagcaaactaacttacaagtcttccagtggccatgaagttgagaatagcacaactgatactcaggtcatttcacatgaaaaagaaaacaaactggagagtttggttttaactcatttgagtaggtgtgattctgatttatgtgaaatgaatgcagggatgccaaaaggaaacctaaatgaacaagatccaaaacattgtcctgaaagtgaaaagtgtttgctttccatagaagatgaggaatctcaacaaagcattttatcaagtctggaaaaccattcacagcagtcaactcaaccagaaatgcataaatatggtcagttagttaaagtagaattagaagaaaatgccgaagatgataaaactgaaaaccaaatccctcaaagaatgactagaaacaaagcaaatacaatggcaaatcaaagcaaacagattcttgctagctgtacactattatcagaaaaagacagtgaatcctcatctcctagaggaagaataagattaactgaagatgacgatcctcaaattcaccatccacggaaaaggaaagtgtcacgtgtacctcagcctgtgcaagtgagtccctctttactacaagcaaaagagaaaactcagcaatctctggcagccattgtagattctctaaaactagatgagattcagccatacagttcagagagagcaaatccatattttgaatacttgcacataaggaaaaaaatagaagaaaaacgcaaattactgtgtagtgtgattcctcaagcacctcagtactatgacgaatatgtaacatttaacggatcatatctcctggatggaaaccccttaagcaagatttgtattcccacaattacaccaccaccttcactgtcagatccacttaaagagctttttcgacaacaggaagttgtaaggatgaaactacgtttgcaacacagtattgaaagggaaaaactcattgtatccaacgaacaagaagttttgcgagttcattacagagctgcaagaacattggcaaatcaaacactgccatttagtgcttgtactgttttgctggatgccgaagtatacaatgtaccattggactctcagtctgatgacagtaaaacttctgtgagggatcgctttaatgcaagacaattcatgtcttggttacaagatgtggatgataaatttgacaaattaaagacctgtcttttaatgaggcaacaacatgaagctgcggctttaaatgctgtccagaggttagaatggcagctcaaactccaggaacttgatcctgccacctataaatctatcagcatttacgaaatccaggagttttatgttccccttgttgatgttaacgacgactttgaattgactcctatatagcagtcagtacttcctgatggtattgtcctaaactggtgatgctcaagcattatactgtggaatactgccttttgacaaaaatactcatgcctttacaattgttagtaaagttcgattatagttggttatgtagtaaacactgtcattttataaaaaatgagaattattttggatcttagatccaaacacagtttctaatagaaaactattatttatattgggaaaggtaactattgcattagagcatgttggcagactggtaggtatttaaaaagttgagaatctgctaacagcgctggaagttgttagcgctctaagtaataagataaccactagtattcaaatctctttcaggttttattaaaaaatatatatcaataaactaaaaggttcaattcctaccaaatagtttctaatgtgggagaaaaacttggcacaaaatttcttcagtttattatctgtaaattgtacagttttctttttgaaagttttaatattgtcttcctttttaataacttattttatacatattgtgcagatgtaaatcttgtaattaatggtcaaactgtataaagggattggtagtcaaaacatgtacaaagaaatacctgtaaaactgttttgtctcatgttttattggaccaaagttgtggtttgtatggagtgtagtagtagtgtgtacaggtagaaaacttttaaatacagcatgcaggtgtttcagttagcttgttttcatcaccataactgcaaagatgtggcttagttgtattgcatgcttcctataatttaactctccataattgatgcctgcagtagtgtaaggcatttcatactagtctcctctagtagacctgtgacttactgtgttggacatattatttagacttagtcatacaaagaaacttagctcttttttcatctcacagtaaagcctatttccccaggaaaaaaataaatgcctttgaatgaaaattctgaaattgtaaatgtctattttaatattcacctatgaaagaatctgtgaatatatgtaaatacgtttaataaattttattggtcatgttaaatcattgtaaaacttttttacattgcttaatgttttaagcttaatagcctttgcacttttaaaataaaaaccaagtatgcaaatcaaagatatttggtagtcaaaataagtaaaagaaatataggaatattccagtcaatctctgaaatgtttatgaaaaacaggttaatatgttgtatttttttccttgtatcaagatgcaaaacataatttgcaaaattttataattgaaataaaacttggtatgctgttttataataaattagcaatatactttaaaaaaaatccagtttctcctataacatgatgtaaattaaatattcaggaatatttcaggtctgaaatctgctgctgaacttgttagacatttttgaaaggaaaattaggttagcgtacaatttatcataaatatatgaggtaaaatttgcaaaactttccacagtactttcttgaattataatactgaatgttttctgttccgatagagaaaagtgaagcaaatatgtgaggaatgaagtgatctagtgcaagttggtaattccagctaatgggagagaatgtaaatgtgcaaaggtacatattaagcttagggatttttgaatttttacgtcagtttatattttaattcttactgtacttggcatgcgcaataaagcagcacatgtaaaaaaaaaatacacagtgcaaggactttattataaaggttggatgtagttttccttagaaatttaggtgagagattttggccttttttattggataaattgggccagaaaggcagggtagatttcgaagcactggttctgttgaagttaagtttattaagcctgggaacattaaaagctaatttataaaagcaatactttttaatatgaaaacttactgcaaagtttgtttatacttttgcctaaaaaggaaattggatgggatactgtggcaaatcataaaaaaccagataattgaactttgaagttatagaaaatcagagaggggtaagtttatagggcattttgttctgatggttcaaccagaggtctgggaaatagcactgttggcccaaacagaacaggcttttagaagataaaagcgacaagaaggaatctggtgaattttagtcatcccagctttttagtcttaaccacagttctcactctcttaaatggtacctcaaaaagctggagcctctctgccatgattatgcttctacaaatttcttttataaagagactcaaagctaatgatagcttaaaagaaaagttaatgccttctcattggaaatgtataatcaaataagtagttaagggcttttggtattaaagatattctgaagctctgaaatgctagaaaaaaatttggaatggagtatatgcctgaaaaggttttggattcagaaagaaaaaggatggttagtttaatcagtgattctttttaaactcttcaaatatcatgaacaagatactaaattgtacctaaggatttgtatttctttacaatttgttctaaatatctgtttaatgactagttgatatttgtgcatgttatttaataaagagttatatttttatagaaaaaaaagtgaaa

SEQ ID NO: 448888 - DNA, 2610 bp, Homo sapiens
gggggcgacgctgtcctgggagcgaggaggctgtggtgagagacggaccgagaccggagatgttttcaagcccggctccggcggctttacaggcggctgcagcggcgacgaagacaacgacagcgacggctacgccgaagcactcgttccgggggtgaagcctcctgcgccggccttgcctcggatccaggatgagaagactgataaaagaagaagctagctgaacagctgtaaaatgcccaaatctgggttcacaaaaccaattcagagtgaaaattctgacagtgacagcaatatggtagagaaaccatatggaagaaagagtaaagacaagattgcatcctacagcaaaactccaaaaattgaacgaagtgatgtgagcaaggagatgaaagagaaatcatccatgaaacgtaaacttccttttactattagcccatcaagaaatgaagaacgagattcagacacagagaaagaaggtccagaaaagaagaagacaaaaaaggaagctggaaataagaaatccacaccagttagcattctttttggttatccactctctgagcgaaaacagatggcacttcttatgcagatgacagcaagagacaacagtccagattccacaccaaatcatccatcacaaacaacgcctgcccaaaagaaaactcccagttcttcatctcgacagaaagataaagttaataaaagaaatgaacgtggtgaaactcctttacacatggctgctattcgaggagatgtgaaacaagttaaagaattaataagtttaggggcaaatgtgaatgtgaaagattttgcaggttggacaccactgcatgaagcttgcaatgttggatattacgatgttgctaagatacttatagcagctggagcagatgttaacacacaaggattagatgatgacactccactccatgattctgctagtagtgggcacagagatatagtaaagctgttacttcgtcacggtggaaatccatttcaagctaataaacatggggagcgtccagtggatgtagcagaaacagaggagttggagttgctactaaaaagagaggtgcctttatctgatgatgatgaaagttacacagattccgaagaggctcaatctgtaaatccttctagtgttgatgaaaatattgactctgaaacagagaaagactctctcatctgtgaaagtaaacagatacttcccagtaaaacacctcttccatctgcccttgatgagtatgagttcaaagatgatgatgatgaagaaattaataagatgattgatgataggcatattcttaggaaagaacaacgaaaagaaaatgaacctgaagcagaaaaaactcatttatttgcaaaacaggagaaagccttctatcctaaatcatttaaaagtaaaaaacaaaagccatctagggtcttatattcaagtactgaaagttctgatgaagaagctcttcagaataaaaagatttctacttcatgttccgtcatccctgaaacatcaaattctgatatgcaaaccaaaaaggaatatgtagtttcaggtgaacacaaacagaaaggcaaagttaaaagaaaattgaaaaatcagaataaaaataaagagaaccaagagctaaagcaagaaaaggaaggaaaagaaaatacaagaataacaaacttgacagtaaatactggactagattgttcagaaaagaccagagaggaggggaactttaggaaatcttttagcccaaaagatgatacttcattacatttatttcatatttccactggtaaatctcccaaacattcttgtggattaagtgaaaaacagtcaacaccactaaaacaagaacatactaaaacatgtttatcaccaggaagttctgaaatgtcattacagcctgatcttgttcggtatgataatacagaatctgaattcttgccagaaagttcaagtgtaaaatcttgtaagcataaggaaaaaagcaaacatcagaaagatttccacttagaatttggtgaaaaatcaaatgccaaaataaaggatgaagatcatagtccaacatttgaaaattcagattgcacactgaaaaaaatggataaagaaggtaaaacattaaaaaaacataaattgaagcataaagagagggaaaaagaaaagcataaaaaagaaattgaaggtgaaaaggaaaaatacaaaactaaggatagtgccaaagaactgcagaggagtgtggaatttgatagagaattttggaaagagaatttttttaaaagtgatgaaactgaagatctctttttaaatatggaacatgaatccttaacattagaaaaaaaatcaaaattggaaaaaaacatcaaagatgataaatcaaccaaggaaaagcatgtgtcaaaagagaggaactttaaagaggaacgagacaagattaaaaaggaaagcgagaaatcttttagggaggaaaaaataaaagatctaaaagaagagagagaaaacatacccacagataaagactcagaatttacttctttgggtatgagtgccattgaggaatctatagggcttcatttagtggaaaaggaaatagacattgaaaaacaagaaaagcatat

SEQ ID NO: 448889 - DNA, 2933 bp, Homo sapiens
tcctggcctcgggacagcctgcacagctgcctagcctgtggagacgggacagccctgtcccactcactctttcccctgccgctcctgccggcagctccaaccatgggaggccgcgtctttctcgcattctgtgtctggctgactctgccgggagctgaaacccaggactccaggggctgtgcccggtggtgccctcagaactcctcgtgtgtcaatgccaccgcctgtcgctgcaatccagggttcagctctttttctgagatcatcaccaccccgacggagacttgtgacgacatcaacgagtgtgcaacaccgtcgaaagtgtcatgcggaaaattctcggactgctggaacacagaggggagctacgactgcgtgtgcagcccgggatatgagcctgtttctggggcaaaaacattcaagaatgagagcgagaacacctgtcaagatgtggacgagtgcagctccgggcagcatcagtgtgacagctccaccgtctgcttcaacaccgtgggttcatacagctgccgctgccgcccaggctggaagcccagacacggaatcccgaataaccaaaaggacactgtctgtgaagatatgactttctccacctggaccccgccccctggagtccacagccagacgctttcccgattcttcgacaaagtccaggacctgggcagagactccaagacaagctcagccgaggtcaccatccagaatgtcatcaaattggtggatgaactgatggaagctcctggagacgtagaggccctggcgccacctgtccggcacctcatagccacccagctgctctcaaaccttgaagatatcatgaggatcctggccaagagcctgcctaaaggccccttcacctacatttccccttcgaacacagagctgaccctgatgatccaggagcggggggacaagaacgtcactatgggtcagagcagcgcacgcatgaagctgaattgggctgtggcagctggagccgaggatccaggccccgccgtggcgggcatcctctccatccagaacatgacgacattgctggccaatgcctccttgaacctgcattccaagaagcaagccgaactggaggagatatatgaaagcagcatccgtggtgtccaactcagacgcctctctgccgtcaactccatctttctgagccacaacaacaccaaggaactcaactcccccatccttttcgccttctcccaccttgagtcctccgatggggaggcgggaagagaccctcctgccaaggacgtgatgcctgggccacggcaggagctgctctgtgccttctggaagagtgacagcgacaggggagggcactgggccaccgagggctgccaggtgctgggcagcaagaacggcagcaccacctgccaatgcagccacctgagcagctttgcgatccttatggctcattatgacgtggaggactggaagctgaccctgatcaccagggtgggactggcgctgtcactcttctgcctgctgctgtgcatcctcactttcctgctggtgcggcccatccagggctcgcgcaccaccatacacctgcacctctgcatctgcctcttcgtgggctccaccatcttcctggccggcatcgagaacgaaggcggccaggtggggctgcgctgccgcctggtggccgggctgctgcactactgtttcctggccgccttctgctggatgagcctcgaaggcctggagctctactttcttgtggtgcgcgtgttccaaggccagggcctgagtacgcgctggctctgcctgatcggctatggcgtgcccctgctcatcgtgggcgtctcggctgccatctacagcaagggctacggccgccccagatactgctggttggactttgagcagggcttcctctggagcttcttgggacctgtgaccttcatcattttgtgcaatgctgtcattttcgtgactaccgtctggaagctcactcagaagttttctgaaatcaatccagacatgaagaaattaaagaaggcgagggcgctgaccatcacggccatcgcgcagctcttcctgttgggctgcacctgggtctttggcctgttcatcttcgacgatcggagcttggtgctgacctatgtgtttaccatcctcaactgcctgcagggcgccttcctctacctgctgcactgcctgctcaacaagaaggttcgggaagaataccggaagtgggcctgcctagttgctggggggagcaagtactcagaattcacctccaccacgtctggcactggccacaatcagacccgggccctcagggcatcagagtccggcatatgaaggcgcatggttctggacggcccagcagctcctgtggccacagcagctttgtacacgaagaccatccatcctcccttcgtccaccactctactccctccaccctccctccctgatcccgtgtgccaccaggagggagtggcagctatagtctggcaccaaagtccaggacacccagtggggtggagtcggagccactggtcctgctgctggctgcctctctgctccaccttgtgacccagggtggggacaggggctggcccagggctgcaatgcagcatgttgccctggcacctgtggccagtactcgggacagactaagggcgcttgtcccatcctggacttttcctctcatgtctttgctgcagaactgaagagactaggcgctggggctcagcttccctcttaagctaagactgatgtcagaggccccatggcgaggccccttggggccactgcctgaggctcacggtacagaggcctgccctgcctggccgggcaggaggttctcactgttgtgaaggttgtagacgttgtgtaatgtgtttttatctgttaaaatttttcagtgttgacacttaaaattaaacacatgcatacagaa

SEQ ID NO: 448890 - DNA, 376 bp, Homo sapiens
aaaagctacccgcctgagttgagtgtgtccagatgtagtctcgtaacttctcatctgacacatctttgccaacttccttctgcagctgtgttcgccagacaaacgctttcccgattcttcgacaaagtccaggacctgggcagagactccaagacaagctcagccgaggtcaccatccaggtaagggcaggatgctgggggaccccaggacagtgtagaatcagctagcggaggcttccatgtggccagagagagtgcccaacccaagcaggggcctctagtcagagacacacatgcgcataacatacacacaccacatacagtatgtgcacaaacatacacacccggacacgtgaagacacacgcatgcacacac

SEQ ID NO: 448891 - DNA, 510 bp, Homo sapiens
gctcagggggaccccaggcaacagctgatgactcactgggaggaaggcgtttcaccatattcataacctgctcatctgcacggggcccacctgctgtgcccaggcctctccacgcttccataacccagcgtccaccactccaaggggggcactaatgccaggaggaatgagctgggggcacagacaggagacaggaccctctccaggctgggacaggacctgacccccttcttcctgtcctcagatgtggacgagtgcagctccgggcagcatcagtgtgacagctccaccgtctgcttcaacaccgtgggttcatacagctgccgctgccgcccaggctggaagcccagacacggaatcccgaataaccaaaaggacactgtctgtgaagatatgactttctccacctggaccccgccccctggagtccacagccaggtgagtggcccccacagggacgaggcggcgggaactccatccacacagcactgcatccgtctccttgttcta

SEQ ID NO: 448892 - DNA, 401 bp, Homo sapiens
ttttttttttttttttttttttgagagtcttgctctgttgcccaggctggcgtgcagtggcgggatctcagctcactgcaacctctgccttctgtgttcaagcgattctcctgcctcagcctcccaaagtgctgggattacaggcatgagccactatgcctggccacctctcccactcttatgtcaacctcacaagggtaggtacttgtgtgtgccctgttcactgctgtgtctccaaacctgttacattcagtaggcgctcggtcaatactcatctagtaaaaagcagccctcttagactcagcccaagcccaggaccactcaaggacagagatggaagcttgaaccccattcagcagggcccacaggtctctgtccctggtggaaggacaagggatgag

SEQ ID NO: 448893 - DNA, 3418 bp, Homo sapiens
tcctggcctcgggacagcctgcacagctgcctagcctgtggagacgggacagccctgtcccactcactctttcccctgccgctcctgccggcagctccaaccatgggaggccgcgtctttctcgcattctgtgtctggctgactctgccgggagctgaaacccaggactccaggggctgtgcccggtggtgccctcagaactcctcgtgtgtcaatgccaccgcctgtcgctgcaatccagggttcagctctttttctgagatcatcaccaccccgacggagacttgtgacgacatcaacgagtgtgcaacaccgtcgaaagtgtcatgcggaaaattctcggactgctggaacacagaggggagctacgactgcgtgtgcagcccgggatatgagcctgtttctggggcaaaaacattcaagaatgagagcgagaacacctgtcaagatgtggacgaatgtcagcagaacccaaggctctgtaaaagctacggcacctgcgtcaacacccttggcagctatacctgccagtgcctgcctggcttcaagttcatacctgaggatccgaaggtctgcacagatgtggacgagtgcagctccgggcagcatcagtgtgacagctccaccgtctgcttcaacaccgtgggttcatacagctgccgctgccgcccaggctggaagcccagacacggaatcccgaataaccaaaaggacactgtctgtgaagatatgactttctccacctggaccccgccccctggagtccacagccagacgctttcccgattcttcgacaaagtccaggacctgggcagagactccaagacaagctcagccgaggtcaccatccagaatgtcatcaaattggtggatgaactgatggaagctcctggagacgtagaggccctggcgccacctgtccggcacctcatagccacccagctgctctcaaaccttgaagatatcatgaggatcctggccaagagcctgcctaaaggccccttcacctacatttccccttcgaacacagagctgaccctgatgatccaggagcggggggacaagaacgtcactatgggtcagagcagcgcacgcatgaagctgaattgggctgtggcagctggagccgaggatccaggccccgccgtggcgggcatcctctccatccagaacatgacgacattgctggccaatgcctccttgaacctgcattccaagaagcaagccgaactggaggagatatatgaaagcagcatccgtggtgtccaactcagacgcctctctgccgtcaactccatctttctgagccacaacaacaccaaggaactcaactcccccatccttttcgccttctcccaccttgagtcctccgatggggaggcgggaagagaccctcctgccaaggacgtgatgcctgggccacggcaggagctgctctgtgccttctggaagagtgacagcgacaggggagggcactgggccaccgagggctgccaggtgctgggcagcaagaacggcagcaccacctgccaatgcagccacctgagcagctttgcgatccttatggctcattatgacgtggaggactggaagctgaccctgatcaccagggtgggactggcgctgtcactcttctgcctgctgctgtgcatcctcactttcctgctggtgcggcccatccagggctcgcgcaccaccatacacctgcacctctgcatctgcctcttcgtgggctccaccatcttcctggccggcatcgagaacgaaggcggccaggtggggctgcgctgccgcctggtggccgggctgctgcactactgtttcctggccgccttctgctggatgagcctcgaaggcctggagctctactttcttgtggtgcgcgtgttccaaggccagggcctgagtacgcgctggctctgcctgatcggctatggcgtgcccctgctcatcgtgggcgtctcggctgccatctacagcaagggctacggccgccccagatactgctggttggactttgagcagggcttcctctggagcttcttgggacctgtgaccttcatcattttgtgcaatgctgtcattttcgtgactaccgtctggaagctcactcagaagttttctgaaatcaatccagacatgaagaaattaaagaaggcgagggcgctgaccatcacggccatcgcgcagctcttcctgttgggctgcacctgggtctttggcctgttcatcttcgacgatcggagcttggtgctgacctatgtgtttaccatcctcaactgcctgcagggcgccttcctctacctgctgcactgcctgctcaacaagaaggttcgggaagaataccggaagtgggcctgcctagttgctggggggagcaagtactcagaattcacctccaccacgtctggcactggccacaatcagacccgggccctcagggcatcagagtccggcatatgaaggcgcatggttctggacggcccagcagctcctgtggccacagcagctttgtacacgaagaccatccatcctcccttcgtccaccactctactccctccaccctccctccctgatcccgtgtgccaccaggagggagtggcagctatagtctggcaccaaagtccaggacacccagtggggtggagtcggagccactggtcctgctgctggctgcctctctgctccaccttgtgacccagggtggggacaggggctggcccagggctgcaatgcagcatgttgccctggcacctgtggccagtactcgggacagactaagggcgcttgtcccatcctggacttttcctctcatgtctttgctgcagaactgaagagactaggcgctggggctcagcttccctcttaagctaagactgatgtcagaggccccatggcgaggccccttggggccactgcctgaggctcacggtacagaggcctgccctgcctggccgggcaggaggttctcactgttgtgaaggttgtagacgttgtgtaatgtgtttttatctgttaaaatttttcagtgttgacacttaaaattaaacacatgcatacagaaaaaaaaaaaaaaaaacaaccaaaaaaaaaaaaaaaaaaaaaaaaaaaaaaaaaaaaaaaaaaaaaaaaaaaggggggggggggaaaaaaaaaatcccccgaggggggcgccaacaatatagccaggaccccggttttttttgaaaagagggggccccaataaggggagcgggattatataaacagcacaggacgggggcgagaggataaacacaggcgggtggagcagaaacactgggtacttgggcattcttggggaagaacacaacatctgtcgggcggggacattggcggcaacactctcacagaatataagggcgggggaaacaaaaacttaggcgcgtagcgcggacc

SEQ ID NO: 448894 - DNA, 3082 bp, Homo sapiens
gctcagggggaccccaggcaacagctgatgactcactgggaggaaggcgtttcaccatattcataacctgctcatctgcacggggcccacctgctgtgcccaggcctctccacgcttccataacccagcgtccaccactccaaggggggcactaatgccaggaggaatgagctgggggcacagacaggagacaggaccctctccaggctgggacaggacctgacccccttcttcctgtcctcagatgtggacgagtgcagctccgggcagcatcagtgtgacagctccaccgtctgcttcaacaccgtgggttcatacagctgccgctgccgcccaggctggaagcccagacacggaatcccgaataaccaaaaggacactgtctgtgaagatatgactttctccacctggaccccgccccctggagtccacagccagacgctttcccgattcttcgacaaagtccaggacctgggcagagactccaagacaagctcagccgaggtcaccatccagaatgtcatcaaattggtggatgaactgatggaagctcctggagacgtagaggccctggcgccacctgtccggcacctcatagccacccagctgctctcaaaccttgaagatatcatgaggatcctggccaagagcctgcctaaaggccccttcacctacatttccccttcgaacacagagctgaccctgatgatccaggagcggggggacaagaacgtcactatgggtcagagcagcgcacgcatgaagctgaattgggctgtggcagctggagccgaggatccaggccccgccgtggcgggcatcctctccatccagaacatgacgacattgctggccaatgcctccttgaacctgcattccaagaagcaagccgaactggaggagatatatgaaagcagcatccgtggtgtccaactcagacgcctctctgccgtcaactccatctttctgagccacaacaacaccaaggaactcaactcccccatccttttcgccttctcccaccttgagtcctccgatggggaggcgggaagagaccctcctgccaaggacgtgatgcctgggccacggcaggagctgctctgtgccttctggaagagtgacagcgacaggggagggcactgggccaccgagggctgccaggtgctgggcagcaagaacggcagcaccacctgccaatgcagccacctgagcagctttgcgatccttatggctcattatgacgtggaggactggaagctgaccctgatcaccagggtgggactggcgctgtcactcttctgcctgctgctgtgcatcctcactttcctgctggtgcggcccatccagggctcgcgcaccaccatacacctgcacctctgcatctgcctcttcgtgggctccaccatcttcctggccggcatcgagaacgaaggcggccaggtggggctgcgctgccgcctggtggccgggctgctgcactactgtttcctggccgccttctgctggatgagcctcgaaggcctggagctctactttcttgtggtgcgcgtgttccaaggccagggcctgagtacgcgctggctctgcctgatcggctatggcgtgcccctgctcatcgtgggcgtctcggctgccatctacagcaagggctacggccgccccagatactgctggttggactttgagcagggcttcctctggagcttcttgggacctgtgaccttcatcattttgtgcaatgctgtcattttcgtgactaccgtctggaagctcactcagaagttttctgaaatcaatccagacatgaagaaattaaagaaggcgagggcgctgaccatcacggccatcgcgcagctcttcctgttgggctgcacctgggtctttggcctgttcatcttcgacgatcggagcttggtgctgacctatgtgtttaccatcctcaactgcctgcagggcgccttcctctacctgctgcactgcctgctcaacaagaaggttcgggaagaataccggaagtgggcctgcctagttgctggggggagcaagtactcagaattcacctccaccacgtctggcactggccacaatcagacccgggccctcagggcatcagagtccggcatatgaaggcgcatggttctggacggcccagcagctcctgtggccacagcagctttgtacacgaagaccatccatcctcccttcgtccaccactctactccctccaccctccctccctgatcccgtgtgccaccaggagggagtggcagctatagtctggcaccaaagtccaggacacccagtggggtggagtcggagccactggtcctgctgctggctgcctctctgctccaccttgtgacccagggtggggacaggggctggcccagggctgcaatgcagcatgttgccctggcacctgtggccagtactcgggacagactaagggcgcttgtcccatcctggacttttcctctcatgtctttgctgcagaactgaagagactaggcgctggggctcagcttccctcttaagctaagactgatgtcagaggccccatggcgaggccccttggggccactgcctgaggctcacggtacagaggcctgccctgcctggccgggcaggaggttctcactgttgtgaaggttgtagacgttgtgtaatgtgtttttatctgttaaaatttttcagtgttgacacttaaaattaaacacatgcatacagaaaaaaaaaaaaaaaaacaaccaaaaaaaaaaaaaaaaaaaaaaaaaaaaaaaaaaaaaaaaaaaaaaaaaaaggggggggggggaaaaaaaaaatcccccgaggggggcgccaacaatatagccaggaccccggttttttttgaaaagagggggccccaataaggggagcgggattatataaacagcacaggacgggggcgagaggataaacacaggcgggtggagcagaaacactgggtacttgggcattcttggggaagaacacaacatctgtcgggcggggacattggcggcaacactctcacagaatataagggcgggggaaacaaaaacttaggcgcgtagcgcggacc

SEQ ID NO: 448895 - DNA, 2547 bp, Homo sapiens
atttccttactttatttatttaatttaattaattaatttatttattttaagacagagtctcactctgtcgtccaggctggagtgcagtggcacgttctcggctcactgcaatctctgcctcccaggttcaagtgattctcctgcctcagcctcccaagtagatgggattacaggcatgcgccaccacacctcgctgattttgtatttttagtagagacggggtttctccatgttggtcaggttggtctcaaactcccgacctcaggtgatctgcccgccttggcctctcaaagtactgcgattacaggcatgagccactatgcctggccacctctcccactcttatgtcaacctcacaagggtaggtacttgtgtgtgccctgttcactgctgtgtctccaaacctgttacattcagtaggcgctcggtcaatactcatctagtaaaaagcagccctcttagactcagcccaagcccaggacctaagagtgagctccaggccaacctttctgaccacccccatctgcccacaggacgtgatgcctgggccacggcaggagctgctctgtgccttctggaagagtgacagcgacaggggagggcactgggccaccgagggctgccaggtgctgggcagcaagaacggcagcaccacctgccaatgcagccacctgagcagctttgcgatccttatggctcattatgacgtggaggactggaagctgaccctgatcaccagggtgggactggcgctgtcactcttctgcctgctgctgtgcatcctcactttcctgctggtgcggcccatccagggctcgcgcaccaccatacacctgcacctctgcatctgcctcttcgtgggctccaccatcttcctggccggcatcgagaacgaaggcggccaggtggggctgcgctgccgcctggtggccgggctgctgcactactgtttcctggccgccttctgctggatgagcctcgaaggcctggagctctactttcttgtggtgcgcgtgttccaaggccagggcctgagtacgcgctggctctgcctgatcggctatggcgtgcccctgctcatcgtgggcgtctcggctgccatctacagcaagggctacggccgccccagatactgctggttggactttgagcagggcttcctctggagcttcttgggacctgtgaccttcatcattttgtgcaatgctgtcattttcgtgactaccgtctggaagctcactcagaagttttctgaaatcaatccagacatgaagaaattaaagaaggcgagggcgctgaccatcacggccatcgcgcagctcttcctgttgggctgcacctgggtctttggcctgttcatcttcgacgatcggagcttggtgctgacctatgtgtttaccatcctcaactgcctgcagggcgccttcctctacctgctgcactgcctgctcaacaagaaggttcgggaagaataccggaagtgggcctgcctagttgctggggggagcaagtactcagaattcacctccaccacgtctggcactggccacaatcagacccgggccctcagggcatcagagtccggcatatgaaggcgcatggttctggacggcccagcagctcctgtggccacagcagctttgtacacgaagaccatccatcctcccttcgtccaccactctactccctccaccctccctccctgatcccgtgtgccaccaggagggagtggcagctatagtctggcaccaaagtccaggacacccagtggggtggagtcggagccactggtcctgctgctggctgcctctctgctccaccttgtgacccagggtggggacaggggctggcccagggctgcaatgcagcatgttgccctggcacctgtggccagtactcgggacagactaagggcgcttgtcccatcctggacttttcctctcatgtctttgctgcagaactgaagagactaggcgctggggctcagcttccctcttaagctaagactgatgtcagaggccccatggcgaggccccttggggccactgcctgaggctcacggtacagaggcctgccctgcctggccgggcaggaggttctcactgttgtgaaggttgtagacgttgtgtaatgtgtttttatctgttaaaatttttcagtgttgacacttaaaattaaacacatgcatacagaaaaaaaaaaaaaaaaacaaccaaaaaaaaaaaaaaaaaaaaaaaaaaaaaaaaaaaaaaaaaaaaaaaaaaaggggggggggggaaaaaaaaaatcccccgaggggggcgccaacaatatagccaggaccccggttttttttgaaaagagggggccccaataaggggagcgggattatataaacagcacaggacgggggcgagaggataaacacaggcgggtggagcagaaacactgggtacttgggcattcttggggaagaacacaacatctgtcgggcggggacattggcggcaacactctcacagaatataagggcgggggaaacaaaaacttaggcgcgtagcgcggacc

SEQ ID NO: 448896 - DNA, 1128 bp, Homo sapiens
  misc_feature (17)..(18): n is a, c, g, or t
  misc_feature (39)..(39): n is a, c, g, or t
ggagaggtctagagganncccctacatgctcgtacatgnaggttcgggaagaataccggaagtgggcctgcctagttgctggggggagcaagtactcagaattcacctccaccacgtctggcactggccacaatcagacccgggccctcagggcatcagagtccggcatatgaaggcgcatggttctggacggcccagcagctcctgtggccacagcagctttgtacacgaagaccatccatcctcccttcgtccaccactctactccctccaccctccctccctgatcccgtgtgccaccaggagggagtggcagctatagtctggcaccaaagtccaggacacccagtggggtggagtcggagccactggtcctgctgctggctgcctctctgctccaccttgtgacccagggtggggacaggggctggcccagggctgcaatgcagcatgttgccctggcacctgtggccagtactcgggacagactaagggcgcttgtcccatcctggacttttcctctcatgtctttgctgcagaactgaagagactaggcgctggggctcagcttccctcttaagctaagactgatgtcagaggccccatggcgaggccccttggggccactgcctgaggctcacggtacagaggcctgccctgcctggccgggcaggaggttctcactgttgtgaaggttgtagacgttgtgtaatgtgtttttatctgttaaaatttttcagtgttgacacttaaaattaaacacatgcatacagaaaaaaaaaaaaaaaaacaaccaaaaaaaaaaaaaaaaaaaaaaaaaaaaaaaaaaaaaaaaaaaaaaaaaaaggggggggggggaaaaaaaaaatcccccgaggggggcgccaacaatatagccaggaccccggttttttttgaaaagagggggccccaataaggggagcgggattatataaacagcacaggacgggggcgagaggataaacacaggcgggtggagcagaaacactgggtacttgggcattcttggggaagaacacaacatctgtcgggcggggacattggcggcaacactctcacagaatataagggcgggggaaacaaaaacttaggcgcgtagcgcggacc

SEQ ID NO: 448897 - DNA, 1218 bp, Homo sapiens
ccttgatctccctgtgtccccttcctgctttgagctagggggctgactctgcctcccaggacacaagtctccaaagtgcctgtgagggcgggccctccgcaccctctgccctctgcctgctcaacaagaaggttcgggaagaataccggaagtgggcctgcctagttgctggggggagcaagtactcagaattcacctccaccacgtctggcactggccacaatcagacccgggccctcagggcatcagagtccggcatatgaaggcgcatggttctggacggcccagcagctcctgtggccacagcagctttgtacacgaagaccatccatcctcccttcgtccaccactctactccctccaccctccctccctgatcccgtgtgccaccaggagggagtggcagctatagtctggcaccaaagtccaggacacccagtggggtggagtcggagccactggtcctgctgctggctgcctctctgctccaccttgtgacccagggtggggacaggggctggcccagggctgcaatgcagcatgttgccctggcacctgtggccagtactcgggacagactaagggcgcttgtcccatcctggacttttcctctcatgtctttgctgcagaactgaagagactaggcgctggggctcagcttccctcttaagctaagactgatgtcagaggccccatggcgaggccccttggggccactgcctgaggctcacggtacagaggcctgccctgcctggccgggcaggaggttctcactgttgtgaaggttgtagacgttgtgtaatgtgtttttatctgttaaaatttttcagtgttgacacttaaaattaaacacatgcatacagaaaaaaaaaaaaaaaaacaaccaaaaaaaaaaaaaaaaaaaaaaaaaaaaaaaaaaaaaaaaaaaaaaaaaaaggggggggggggaaaaaaaaaatcccccgaggggggcgccaacaatatagccaggaccccggttttttttgaaaagagggggccccaataaggggagcgggattatataaacagcacaggacgggggcgagaggataaacacaggcgggtggagcagaaacactgggtacttgggcattcttggggaagaacacaacatctgtcgggcggggacattggcggcaacactctcacagaatataagggcgggggaaacaaaaacttaggcgcgtagcgcggacc

SEQ ID NO: 448898 - DNA, 1195 bp, Homo sapiens
tcctggcctcgggacagcctgcacagctgcctagcctgtggagacgggacagccctgtcccactcactctttcccctgccgctcctgccggcagctccaaccatgggaggccgcgtctttctcgcattctgtgtctggctgactctgccgggagctgaaacccaggactccaggggctgtgcccggtggtgccctcagaactcctcgtgtgtcaatgccaccgcctgtcgctgcaatccagggttcagctctttttctgagatcatcaccaccccgacggagacttgtgacgacatcaacgagtgtgcaacaccgtcgaaagtgtcatgcggaaaattctcggactgctggaacacagaggggagctacgactgcgtgtgcagcccgggatatgagcctgtttctggggcaaaaacattcaagaatgagagcgagaacacctgtcaagatgtggacgaatgtcagcagaacccaaggctctgtaaaagctacggcacctgcgtcaacacccttggcagctatacctgccagtgcctgcctggcttcaagttcatacctgaggatccgaaggtctgcacagatgtgaatgaatgcacctccggacaaaacccgtgccacagctccacccactgcctcaacaacgtgggcagctatcagtgccgctgccgcccgggctggcaaccgattccggggtcccccaatggcccaaacaataccgtctgtgaagatgtggacgagtgcagctccgggcagcatcagtgtgacagctccaccgtctgcttcaacaccgtgggttcatacagctgccgctgccgcccaggctggaagcccagacacggaatcccgaataaccaaaaggacactgtctgtgaagatatgactttctccacctggaccccgccccctggagtccacagccagacgctttcccgattcttcgacaaagtccaggacctgggcagagactccaagacaagctcagccgaggtcaccatccaggtaagggcaggatgctgggggaccccaggacagtgtagaatcagctagcggaggcttccatgtggccagagagagtgcccaacccaagcaggggcctctagtcagagacacacatgcgcataacatacacacaccacatacagtatgtgcacaaacatacacacccggacacgtgaagacacacgcatgcacacac

SEQ ID NO: 448899 - DNA, 1279 bp, Homo sapiens
tcctggcctcgggacagcctgcacagctgcctagcctgtggagacgggacagccctgtcccactcactctttcccctgccgctcctgccggcagctccaaccatgggaggccgcgtctttctcgcattctgtgtctggctgactctgccgggagctgaaacccaggactccaggggctgtgcccggtggtgccctcagaactcctcgtgtgtcaatgccaccgcctgtcgctgcaatccagggttcagctctttttctgagatcatcaccaccccgacggagacttgtgacgacatcaacgagtgtgcaacaccgtcgaaagtgtcatgcggaaaattctcggactgctggaacacagaggggagctacgactgcgtgtgcagcccgggatatgagcctgtttctggggcaaaaacattcaagaatgagagcgagaacacctgtcaagatgtggacgaatgtcagcagaacccaaggctctgtaaaagctacggcacctgcgtcaacacccttggcagctatacctgccagtgcctgcctggcttcaagttcatacctgaggatccgaaggtctgcacagatgtgaatgaatgcacctccggacaaaacccgtgccacagctccacccactgcctcaacaacgtgggcagctatcagtgccgctgccgcccgggctggcaaccgattccggggtcccccaatggcccaaacaataccgtctgtgaagatgtggacgagtgcagctccgggcagcatcagtgtgacagctccaccgtctgcttcaacaccgtgggttcatacagctgccgctgccgcccaggctggaagcccagacacggaatcccgaataaccaaaaggacactgtctgtgaaggtatgacctggccctagaagctccccacccccagcacacacactgacaagcggcctaatgagccgcttgtcttgttccctacagatatgactttctccacctggaccccgccccctggagtccacagccagacgctttcccgattcttcgacaaagtccaggacctgggcagagactccaagacaagctcagccgaggtcaccatccaggtaagggcaggatgctgggggaccccaggacagtgtagaatcagctagcggaggcttccatgtggccagagagagtgcccaacccaagcaggggcctctagtcagagacacacatgcgcataacatacacacaccacatacagtatgtgcacaaacatacacacccggacacgtgaagacacacgcatgcacacac

SEQ ID NO: 448900 - DNA, 1077 bp, Homo sapiens
tcctggcctcgggacagcctgcacagctgcctagcctgtggagacgggacagccctgtcccactcactctttcccctgccgctcctgccggcagctccaaccatgggaggccgcgtctttctcgcattctgtgtctggctgactctgccgggagctgaaacccaggactccaggggctgtgcccggtggtgccctcagaactcctcgtgtgtcaatgccaccgcctgtcgctgcaatccagggttcagctctttttctgagatcatcaccaccccgacggagacttgtgacgacatcaacgagtgtgcaacaccgtcgaaagtgtcatgcggaaaattctcggactgctggaacacagaggggagctacgactgcgtgtgcagcccgggatatgagcctgtttctggggcaaaaacattcaagaatgagagcgagaacacctgtcaagatgtggacgaatgtcagcagaacccaaggctctgtaaaagctacggcacctgcgtcaacacccttggcagctatacctgccagtgcctgcctggcttcaagttcatacctgaggatccgaaggtctgcacagatgtgaatgaatgcacctccggacaaaacccgtgccacagctccacccactgcctcaacaacgtgggcagctatcagtgccgctgccgcccgggctggcaaccgattccggggtcccccaatggcccaaacaataccgtctgtgaagatgtggacgagtgcagctccgggcagcatcagtgtgacagctccaccgtctgcttcaacaccgtgggttcatacagctgccgctgccgcccaggctggaagcccagacacggaatcccgaataaccaaaaggacactgtctgtgaaggtatgacctggccctagaagctccccacccccagcacacacactgacaagcggcctaatgagccgcttgtcttgttccctacagatatgactttctccacctggaccccgccccctggagtccacagccaggtgagtggcccccacagggacgaggcggcgggaactccatccacacagcactgcatccgtctccttgttcta

SEQ ID NO: 448901 - DNA, 287 bp, Homo sapiens
cccagggaaagagagggctcgcgcacgagaaactcagcgccctgccccatctcccccagtgccccctttttgtgtattcccttacccctcaccttctgaccgtgctccctgctcttgcaggctgtgcccggtggtgccctcagaactcctcgtgtgtcaatgccaccgcctgtcgctgcaatccagggttcagctctttttctgagatcatcaccaccccgacggagacttgtgacggtacagaggcttgagggcagcgcaggggacatccgcgattatgaggcatt

SEQ ID NO: 448902 - DNA, 638 bp, Homo sapiens
gtgaggggcatgaagctggaggtgaggtgggggcccacgctgcaaccccgctcctcgcagggcgctgaccatcacggccatcgcgcagctcttcctgttgggctgcacctgggtctttggcctgttcatcttcgacgatcggagcttggtgctgacctatgtgtttaccatcctcaactgcctgcagggcgccttcctctacctgctgcactgcctgctcaacaagaaggtgggggcctgggcacagtggcgcacgcctgtcatcctcccacctatttgggaggctgaggtgggaggattgcttgagcccagaagttggagaccagcctgggcaacataaccagatgctgtctttacaaaaaaattcaaagatagccagggtgaggcgcctgtaatcccaacagtttgggaggccgaggtgggcagatcacctgaggtcagtaattcaagaccagcctggccaacatggtgaaaccctgtctctactaaaaatacaaaaattagccaggcatggtggcacacgcctgtagtcccagctacttgggaggctgaggcaggagaatcatttgaaccaggagtgcagtgggccaagatggcaccattgcactccagcctgggtgacagtgagacttgtctcc

SEQ ID NO: 448903 - DNA, 3212 bp, Homo sapiens
tcctggcctcgggacagcctgcacagctgcctagcctgtggagacgggacagccctgtcccactcactctttcccctgccgctcctgccggcagctccaaccatgggaggccgcgtctttctcgcattctgtgtctggctgactctgccgggagctgaaacccaggactccaggggctgtgcccggtggtgccctcagaactcctcgtgtgtcaatgccaccgcctgtcgctgcaatccagggttcagctctttttctgagatcatcaccaccccgacggagacttgtgacgacatcaacgagtgtgcaacaccgtcgaaagtgtcatgcggaaaattctcggactgctggaacacagaggggagctacgactgcgtgtgcagcccgggatatgagcctgtttctggggcaaaaacattcaagaatgagagcgagaacacctgtcaagatgtggacgaatgtcagcagaacccaaggctctgtaaaagctacggcacctgcgtcaacacccttggcagctatacctgccagtgcctgcctggcttcaagttcatacctgaggatccgaaggtctgcacagatgtgaatgaatgcacctccggacaaaacccgtgccacagctccacccactgcctcaacaacgtgggcagctatcagtgccgctgccgcccgggctggcaaccgattccggggtcccccaatggcccaaacaataccgtctgtgaagatgtggacgagtgcagctccgggcagcatcagtgtgacagctccaccgtctgcttcaacaccgtgggttcatacagctgccgctgccgcccaggctggaagcccagacacggaatcccgaataaccaaaaggacactgtctgtgaagatatgactttctccacctggaccccgccccctggagtccacagccagacgctttcccgattcttcgacaaagtccaggacctgggcagagactccaagacaagctcagccgaggtcaccatccagaatgtcatcaaattggtggatgaactgatggaagctcctggagacgtagaggccctggcgccacctgtccggcacctcatagccacccagctgctctcaaaccttgaagatatcatgaggatcctggccaagagcctgcctaaaggccccttcacctacatttccccttcgaacacagagctgaccctgatgatccaggagcggggggacaagaacgtcactatgggtcagagcagcgcacgcatgaagctgaattgggctgtggcagctggagccgaggatccaggccccgccgtggcgggcatcctctccatccagaacatgacgacattgctggccaatgcctccttgaacctgcattccaagaagcaagccgaactggaggagatatatgaaagcagcatccgtggtgtccaactcagacgcctctctgccgtcaactccatctttctgagccacaacaacaccaaggaactcaactcccccatccttttcgccttctcccaccttgagtcctccgatggggaggcgggaagagaccctcctgccaaggacgtgatgcctgggccacggcaggagctgctctgtgccttctggaagagtgacagcgacaggggagggcactgggccaccgagggctgccaggtgctgggcagcaagaacggcagcaccacctgccaatgcagccacctgagcagctttgcgatccttatggctcattatgacgtggaggactggaagctgaccctgatcaccagggtgggactggcgctgtcactcttctgcctgctgctgtgcatcctcactttcctgctggtgcggcccatccagggctcgcgcaccaccatacacctgcacctctgcatctgcctcttcgtgggctccaccatcttcctggccggcatcgagaacgaaggcggccaggtggggctgcgctgccgcctggtggccgggctgctgcactactgtttcctggccgccttctgctggatgagcctcgaaggcctggagctctactttcttgtggtgcgcgtgttccaaggccagggcctgagtacgcgctggctctgcctgatcggctatggcgtgcccctgctcatcgtgggcgtctcggctgccatctacagcaagggctacggccgccccagatactgctggttggactttgagcagggcttcctctggagcttcttgggacctgtgaccttcatcattttgtgcaatgctgtcattttcgtgactaccgtctggaagctcactcagaagttttctgaaatcaatccagacatgaagaaattaaagaaggcgagggcgctgaccatcacggccatcgcgcagctcttcctgttgggctgcacctgggtctttggcctgttcatcttcgacgatcggagcttggtgctgacctatgtgtttaccatcctcaactgcctgcagggcgccttcctctacctgctgcactgcctgctcaacaagaaggttcgggaagaataccggaagtgggcctgcctagttgctggggggagcaagtactcagaattcacctccaccacgtctggcactggccacaatcagacccgggccctcagggcatcagagtccggcatatgaaggcgcatggttctggacggcccagcagctcctgtggccacagcagctttgtacacgaagaccatccatcctcccttcgtccaccactctactccctccaccctccctccctgatcccgtgtgccaccaggagggagtggcagctatagtctggcaccaaagtccaggacacccagtggggtggagtcggagccactggtcctgctgctggctgcctctctgctccaccttgtgacccagggtggggacaggggctggcccagggctgcaatgcagcatgttgccctggcacctgtggccagtactcgggacagactaagggcgcttgtcccatcctggacttttcctctcatgtctttgctgcagaactgaagagactaggcgctggggctcagcttccctcttaagctaagactgatgtcagaggccccatggcgaggccccttggggccactgcctgaggctcacggtacagaggcctgccctgcctggccgggcaggaggttctcactgttgtgaaggttgtagacgttgtgtaatgtgtttttatctgttaaaatttttcagtgttgacacttaaaattaaacacatgcatacagaa

SEQ ID NO: 448904 - DNA, 3286 bp, Homo sapiens
tcctggcctcgggacagcctgcacagctgcctagcctgtggagacgggacagccctgtcccactcactctttcccctgccgctcctgccggcagctccaaccatgggaggccgcgtctttctcgcattctgtgtctggctgactctgccgggagctgaaacccaggactccaggggctgtgcccggtggtgccctcagaactcctcgtgtgtcaatgccaccgcctgtcgctgcaatccagggttcagctctttttctgagatcatcaccaccccgacggagacttgtgacgacatcaacgagtgtgcaacaccgtcgaaagtgtcatgcggaaaattctcggactgctggaacacagaggggagctacgactgcgtgtgcagcccgggatatgagcctgtttctggggcaaaaacattcaagaatgagagcgagaacacctgtcaagatgtggacgagtgcagctccgggcagcatcagtgtgacagctccaccgtctgcttcaacaccgtgggttcatacagctgccgctgccgcccaggctggaagcccagacacggaatcccgaataaccaaaaggacactgtctgtgaagatatgactttctccacctggaccccgccccctggagtccacagccagacgctttcccgattcttcgacaaagtccaggacctgggcagagactccaagacaagctcagccgaggtcaccatccagaatgtcatcaaattggtggatgaactgatggaagctcctggagacgtagaggccctggcgccacctgtccggcacctcatagccacccagctgctctcaaaccttgaagatatcatgaggatcctggccaagagcctgcctaaaggccccttcacctacatttccccttcgaacacagagctgaccctgatgatccaggagcggggggacaagaacgtcactatgggtcagagcagcgcacgcatgaagctgaattgggctgtggcagctggagccgaggatccaggccccgccgtggcgggcatcctctccatccagaacatgacgacattgctggccaatgcctccttgaacctgcattccaagaagcaagccgaactggaggagatatatgaaagcagcatccgtggtgtccaactcagacgcctctctgccgtcaactccatctttctgagccacaacaacaccaaggaactcaactcccccatccttttcgccttctcccaccttgagtcctccgatggggaggcgggaagagaccctcctgccaaggacgtgatgcctgggccacggcaggagctgctctgtgccttctggaagagtgacagcgacaggggagggcactgggccaccgagggctgccaggtgctgggcagcaagaacggcagcaccacctgccaatgcagccacctgagcagctttgcgatccttatggctcattatgacgtggaggactggaagctgaccctgatcaccagggtgggactggcgctgtcactcttctgcctgctgctgtgcatcctcactttcctgctggtgcggcccatccagggctcgcgcaccaccatacacctgcacctctgcatctgcctcttcgtgggctccaccatcttcctggccggcatcgagaacgaaggcggccaggtggggctgcgctgccgcctggtggccgggctgctgcactactgtttcctggccgccttctgctggatgagcctcgaaggcctggagctctactttcttgtggtgcgcgtgttccaaggccagggcctgagtacgcgctggctctgcctgatcggctatggcgtgcccctgctcatcgtgggcgtctcggctgccatctacagcaagggctacggccgccccagatactgctggttggactttgagcagggcttcctctggagcttcttgggacctgtgaccttcatcattttgtgcaatgctgtcattttcgtgactaccgtctggaagctcactcagaagttttctgaaatcaatccagacatgaagaaattaaagaaggcgagggcgctgaccatcacggccatcgcgcagctcttcctgttgggctgcacctgggtctttggcctgttcatcttcgacgatcggagcttggtgctgacctatgtgtttaccatcctcaactgcctgcagggcgccttcctctacctgctgcactgcctgctcaacaagaaggttcgggaagaataccggaagtgggcctgcctagttgctggggggagcaagtactcagaattcacctccaccacgtctggcactggccacaatcagacccgggccctcagggcatcagagtccggcatatgaaggcgcatggttctggacggcccagcagctcctgtggccacagcagctttgtacacgaagaccatccatcctcccttcgtccaccactctactccctccaccctccctccctgatcccgtgtgccaccaggagggagtggcagctatagtctggcaccaaagtccaggacacccagtggggtggagtcggagccactggtcctgctgctggctgcctctctgctccaccttgtgacccagggtggggacaggggctggcccagggctgcaatgcagcatgttgccctggcacctgtggccagtactcgggacagactaagggcgcttgtcccatcctggacttttcctctcatgtctttgctgcagaactgaagagactaggcgctggggctcagcttccctcttaagctaagactgatgtcagaggccccatggcgaggccccttggggccactgcctgaggctcacggtacagaggcctgccctgcctggccgggcaggaggttctcactgttgtgaaggttgtagacgttgtgtaatgtgtttttatctgttaaaatttttcagtgttgacacttaaaattaaacacatgcatacagaaaaaaaaaaaaaaaaacaaccaaaaaaaaaaaaaaaaaaaaaaaaaaaaaaaaaaaaaaaaaaaaaaaaaaaggggggggggggaaaaaaaaaatcccccgaggggggcgccaacaatatagccaggaccccggttttttttgaaaagagggggccccaataaggggagcgggattatataaacagcacaggacgggggcgagaggataaacacaggcgggtggagcagaaacactgggtacttgggcattcttggggaagaacacaacatctgtcgggcggggacattggcggcaacactctcacagaatataagggcgggggaaacaaaaacttaggcgcgtagcgcggacc

SEQ ID NO: 448905 - DNA, 3615 bp, Homo sapiens
ccaaaatgctgggattacaggcgtgagccactgcacccggccgccatggggtttaaatttctacaaagagactggggatggggatgtggagcttcctgtccatccctcacctcagcactgttcactgtgtccaaatctaagatgccagccagagaactaagatcaagtgtggtcttcaggaatggcttgctccagctgcagcatagcctgtgcagtgcaacttaagattttttccaaaagatactaagcagcaggccccatgttggggagtcaggatgggggtctctgccctgacagaactcacatctttgggaggtgactccctgtcctgttgtgttccagacatcaacgagtgtgcaacaccgtcgaaagtgtcatgcggaaaattctcggactgctggaacacagaggggagctacgactgcgtgtgcagcccgggatatgagcctgtttctggggcaaaaacattcaagaatgagagcgagaacacctgtcaagatgtggacgaatgtcagcagaacccaaggctctgtaaaagctacggcacctgcgtcaacacccttggcagctatacctgccagtgcctgcctggcttcaagttcatacctgaggatccgaaggtctgcacagatgtgaatgaatgcacctccggacaaaacccgtgccacagctccacccactgcctcaacaacgtgggcagctatcagtgccgctgccgcccgggctggcaaccgattccggggtcccccaatggcccaaacaataccgtctgtgaagatgtggacgagtgcagctccgggcagcatcagtgtgacagctccaccgtctgcttcaacaccgtgggttcatacagctgccgctgccgcccaggctggaagcccagacacggaatcccgaataaccaaaaggacactgtctgtgaagatatgactttctccacctggaccccgccccctggagtccacagccagacgctttcccgattcttcgacaaagtccaggacctgggcagagactccaagacaagctcagccgaggtcaccatccagaatgtcatcaaattggtggatgaactgatggaagctcctggagacgtagaggccctggcgccacctgtccggcacctcatagccacccagctgctctcaaaccttgaagatatcatgaggatcctggccaagagcctgcctaaaggccccttcacctacatttccccttcgaacacagagctgaccctgatgatccaggagcggggggacaagaacgtcactatgggtcagagcagcgcacgcatgaagctgaattgggctgtggcagctggagccgaggatccaggccccgccgtggcgggcatcctctccatccagaacatgacgacattgctggccaatgcctccttgaacctgcattccaagaagcaagccgaactggaggagatatatgaaagcagcatccgtggtgtccaactcagacgcctctctgccgtcaactccatctttctgagccacaacaacaccaaggaactcaactcccccatccttttcgccttctcccaccttgagtcctccgatggggaggcgggaagagaccctcctgccaaggacgtgatgcctgggccacggcaggagctgctctgtgccttctggaagagtgacagcgacaggggagggcactgggccaccgagggctgccaggtgctgggcagcaagaacggcagcaccacctgccaatgcagccacctgagcagctttgcgatccttatggctcattatgacgtggaggactggaagctgaccctgatcaccagggtgggactggcgctgtcactcttctgcctgctgctgtgcatcctcactttcctgctggtgcggcccatccagggctcgcgcaccaccatacacctgcacctctgcatctgcctcttcgtgggctccaccatcttcctggccggcatcgagaacgaaggcggccaggtggggctgcgctgccgcctggtggccgggctgctgcactactgtttcctggccgccttctgctggatgagcctcgaaggcctggagctctactttcttgtggtgcgcgtgttccaaggccagggcctgagtacgcgctggctctgcctgatcggctatggcgtgcccctgctcatcgtgggcgtctcggctgccatctacagcaagggctacggccgccccagatactgctggttggactttgagcagggcttcctctggagcttcttgggacctgtgaccttcatcattttgtgcaatgctgtcattttcgtgactaccgtctggaagctcactcagaagttttctgaaatcaatccagacatgaagaaattaaagaaggcgagggcgctgaccatcacggccatcgcgcagctcttcctgttgggctgcacctgggtctttggcctgttcatcttcgacgatcggagcttggtgctgacctatgtgtttaccatcctcaactgcctgcagggcgccttcctctacctgctgcactgcctgctcaacaagaaggttcgggaagaataccggaagtgggcctgcctagttgctggggggagcaagtactcagaattcacctccaccacgtctggcactggccacaatcagacccgggccctcagggcatcagagtccggcatatgaaggcgcatggttctggacggcccagcagctcctgtggccacagcagctttgtacacgaagaccatccatcctcccttcgtccaccactctactccctccaccctccctccctgatcccgtgtgccaccaggagggagtggcagctatagtctggcaccaaagtccaggacacccagtggggtggagtcggagccactggtcctgctgctggctgcctctctgctccaccttgtgacccagggtggggacaggggctggcccagggctgcaatgcagcatgttgccctggcacctgtggccagtactcgggacagactaagggcgcttgtcccatcctggacttttcctctcatgtctttgctgcagaactgaagagactaggcgctggggctcagcttccctcttaagctaagactgatgtcagaggccccatggcgaggccccttggggccactgcctgaggctcacggtacagaggcctgccctgcctggccgggcaggaggttctcactgttgtgaaggttgtagacgttgtgtaatgtgtttttatctgttaaaatttttcagtgttgacacttaaaattaaacacatgcatacagaaaaaaaaaaaaaaaaacaaccaaaaaaaaaaaaaaaaaaaaaaaaaaaaaaaaaaaaaaaaaaaaaaaaaaaggggggggggggaaaaaaaaaatcccccgaggggggcgccaacaatatagccaggaccccggttttttttgaaaagagggggccccaataaggggagcgggattatataaacagcacaggacgggggcgagaggataaacacaggcgggtggagcagaaacactgggtacttgggcattcttggggaagaacacaacatctgtcgggcggggacattggcggcaacactctcacagaatataagggcgggggaaacaaaaacttaggcgcgtagcgcggacc

SEQ ID NO: 448906 - DNA, 2948 bp, Homo sapiens
gtcccagctactcagaaagctgaggtgggaggatcgcttgagtctgggaggtggaggttgcagtgagctgattatgccactgcactcaagcctgggcaacagactgagaccctgtctcaaaaaaagaaagaaaaaagaacaggaaatcaaaacagagcctggcaggcagcccgtgcccaaccagtgttaagcgctgtgattcatacgtgcatgcaggcaaatactcaatccgtcgcttgttttctggttactgcatcatctcagtgattcccttgtgcctgtgggtctccagtgtgtcccctggtagggggtgacatccaggtccttcaggcaacccctgtggtctgatgctccagcgattctgtcacccgccaccccctagaatgtcatcaaattggtggatgaactgatggaagctcctggagacgtagaggccctggcgccacctgtccggcacctcatagccacccagctgctctcaaaccttgaagatatcatgaggatcctggccaagagcctgcctaaaggccccttcacctacatttccccttcgaacacagagctgaccctgatgatccaggagcggggggacaagaacgtcactatgggtcagagcagcgcacgcatgaagctgaattgggctgtggcagctggagccgaggatccaggccccgccgtggcgggcatcctctccatccagaacatgacgacattgctggccaatgcctccttgaacctgcattccaagaagcaagccgaactggaggagatatatgaaagcagcatccgtggtgtccaactcagacgcctctctgccgtcaactccatctttctgagccacaacaacaccaaggaactcaactcccccatccttttcgccttctcccaccttgagtcctccgatggggaggcgggaagagaccctcctgccaaggacgtgatgcctgggccacggcaggagctgctctgtgccttctggaagagtgacagcgacaggggagggcactgggccaccgagggctgccaggtgctgggcagcaagaacggcagcaccacctgccaatgcagccacctgagcagctttgcgatccttatggctcattatgacgtggaggactggaagctgaccctgatcaccagggtgggactggcgctgtcactcttctgcctgctgctgtgcatcctcactttcctgctggtgcggcccatccagggctcgcgcaccaccatacacctgcacctctgcatctgcctcttcgtgggctccaccatcttcctggccggcatcgagaacgaaggcggccaggtggggctgcgctgccgcctggtggccgggctgctgcactactgtttcctggccgccttctgctggatgagcctcgaaggcctggagctctactttcttgtggtgcgcgtgttccaaggccagggcctgagtacgcgctggctctgcctgatcggctatggcgtgcccctgctcatcgtgggcgtctcggctgccatctacagcaagggctacggccgccccagatactgctggttggactttgagcagggcttcctctggagcttcttgggacctgtgaccttcatcattttgtgcaatgctgtcattttcgtgactaccgtctggaagctcactcagaagttttctgaaatcaatccagacatgaagaaattaaagaaggcgagggcgctgaccatcacggccatcgcgcagctcttcctgttgggctgcacctgggtctttggcctgttcatcttcgacgatcggagcttggtgctgacctatgtgtttaccatcctcaactgcctgcagggcgccttcctctacctgctgcactgcctgctcaacaagaaggttcgggaagaataccggaagtgggcctgcctagttgctggggggagcaagtactcagaattcacctccaccacgtctggcactggccacaatcagacccgggccctcagggcatcagagtccggcatatgaaggcgcatggttctggacggcccagcagctcctgtggccacagcagctttgtacacgaagaccatccatcctcccttcgtccaccactctactccctccaccctccctccctgatcccgtgtgccaccaggagggagtggcagctatagtctggcaccaaagtccaggacacccagtggggtggagtcggagccactggtcctgctgctggctgcctctctgctccaccttgtgacccagggtggggacaggggctggcccagggctgcaatgcagcatgttgccctggcacctgtggccagtactcgggacagactaagggcgcttgtcccatcctggacttttcctctcatgtctttgctgcagaactgaagagactaggcgctggggctcagcttccctcttaagctaagactgatgtcagaggccccatggcgaggccccttggggccactgcctgaggctcacggtacagaggcctgccctgcctggccgggcaggaggttctcactgttgtgaaggttgtagacgttgtgtaatgtgtttttatctgttaaaatttttcagtgttgacacttaaaattaaacacatgcatacagaaaaaaaaaaaaaaaaacaaccaaaaaaaaaaaaaaaaaaaaaaaaaaaaaaaaaaaaaaaaaaaaaaaaaaaggggggggggggaaaaaaaaaatcccccgaggggggcgccaacaatatagccaggaccccggttttttttgaaaagagggggccccaataaggggagcgggattatataaacagcacaggacgggggcgagaggataaacacaggcgggtggagcagaaacactgggtacttgggcattcttggggaagaacacaacatctgtcgggcggggacattggcggcaacactctcacagaatataagggcgggggaaacaaaaacttaggcgcgtagcgcggacc

SEQ ID NO: 448907 - DNA, 1349 bp, Homo sapiens
tcctggcctcgggacagcctgcacagctgcctagcctgtggagacgggacagccctgtcccactcactctttcccctgccgctcctgccggcagctccaaccatgggaggccgcgtctttctcgcattctgtgtctggctgactctgccgggagctgaaacccaggactccaggggctgtgcccggtggtgccctcagaactcctcgtgtgtcaatgccaccgcctgtcgctgcaatccagggttcagctctttttctgagatcatcaccaccccgacggagacttgtgacgacatcaacgagtgtgcaacaccgtcgaaagtgtcatgcggaaaattctcggactgctggaacacagaggggagctacgactgcgtgtgcagcccgggatatgagcctgtttctggggcaaaaacattcaagaatgagagcgagaacacctgtcaagatgtggacgagtgcagctccgggcagcatcagtgtgacagctccaccgtctgcttcaacaccgtgggttcatacagctgccgctgccgcccaggctggaagcccagacacggaatcccgaataaccaaaaggacactgtctgtgaagatatgactttctccacctggaccccgccccctggagtccacagccagacgctttcccgattcttcgacaaagtccaggacctgggcagagactccaagacaagctcagccgaggtcaccatccagaatgtcatcaaattggtggatgaactgatggaagctcctggagacgtagaggccctggcgccacctgtccggcacctcatagccacccagctgctctcaaaccttgaagatatcatgaggatcctggccaagagcctgcctaaaggccccttcacctacatttccccttcgaacacagagctgaccctgatgatccaggagcggggggacaagaacgtcactatgggtcagagcagcgcacgcatgaagctgaattgggctgtggcagctggagccgaggatccaggccccgccgtggcgggcatcctctccatccagaacatgacgacattgctggccaatgcctccttgaacctgcattccaagaagcaagccgaactggaggagatatatgaaagcagcatccgtggtgtccaactcagacgcctctctgccgtcaactccatctttctgagccacaacaacaccaaggaactcaactcccccatccttttcgccttctcccaccttgagtcctccgatggggaggcgggaagagaccctcctgccaaggacgtgatgcctgggccacggcaggagctgctctgtgccttctggaagagtacgtcctcatcccgggtcctctaagt

SEQ ID NO: 448908 - DNA, 1386 bp, Homo sapiens
tcctggcctcgggacagcctgcacagctgcctagcctgtggagacgggacagccctgtcccactcactctttcccctgccgctcctgccggcagctccaaccatgggaggccgcgtctttctcgcattctgtgtctggctgactctgccgggagctgaaacccaggactccaggggctgtgcccggtggtgccctcagaactcctcgtgtgtcaatgccaccgcctgtcgctgcaatccagggttcagctctttttctgagatcatcaccaccccgacggagacttgtgacgacatcaacgagtgtgcaacaccgtcgaaagtgtcatgcggaaaattctcggactgctggaacacagaggggagctacgactgcgtgtgcagcccgggatatgagcctgtttctggggcaaaaacattcaagaatgagagcgagaacacctgtcaagatgtggacgagtgcagctccgggcagcatcagtgtgacagctccaccgtctgcttcaacaccgtgggttcatacagctgccgctgccgcccaggctggaagcccagacacggaatcccgaataaccaaaaggacactgtctgtgaagatatgactttctccacctggaccccgccccctggagtccacagccagacgctttcccgattcttcgacaaagtccaggacctgggcagagactccaagacaagctcagccgaggtcaccatccagaatgtcatcaaattggtggatgaactgatggaagctcctggagacgtagaggccctggcgccacctgtccggcacctcatagccacccagctgctctcaaaccttgaagatatcatgaggatcctggccaagagcctgcctaaaggccccttcacctacatttccccttcgaacacagagctgaccctgatgatccaggagcggggggacaagaacgtcactatgggtcagagcagcgcacgcatgaagctgaattgggctgtggcagctggagccgaggatccaggccccgccgtggcgggcatcctctccatccagaacatgacgacattgctggccaatgcctccttgaacctgcattccaagaagcaagccgaactggaggagatatatgaaagcagcatccgtggtgtccaactcagacgcctctctgccgtcaactccatctttctgagccacaacaacaccaaggaactcaactcccccatccttttcgccttctcccaccttgagtcctccgatggggaggcgggaagagaccctcctgccaagctggccgggcaggaggttctcactgttgtgaaggttgtagacgttgtgtaatgtgtttttatctgttaaaatttttcagtgttgacacttaaaattaaacacatgcatacagaa

SEQ ID NO: 448909 - DNA, 1148 bp, Homo sapiens
tcctggcctcgggacagcctgcacagctgcctagcctgtggagacgggacagccctgtcccactcactctttcccctgccgctcctgccggcagctccaaccatgggaggccgcgtctttctcgcattctgtgtctggctgactctgccgggagctgaaacccaggactccaggggctgtgcccggtggtgccctcagaactcctcgtgtgtcaatgccaccgcctgtcgctgcaatccagggttcagctctttttctgagatcatcaccaccccgacggagacttgtgacgacatcaacgagtgtgcaacaccgtcgaaagtgtcatgcggaaaattctcggactgctggaacacagaggggagctacgactgcgtgtgcagcccgggatatgagcctgtttctggggcaaaaacattcaagaatgagagcgagaacacctgtcaagatgtggacgaatgtcagcagaacccaaggctctgtaaaagctacggcacctgcgtcaacacccttggcagctatacctgccagtgcctgcctggcttcaagttcatacctgaggatccgaaggtctgcacagatgtgaatgaatgcacctccggacaaaacccgtgccacagctccacccactgcctcaacaacgtgggcagctatcagtgccgctgccgcccgggctggcaaccgattccggggtcccccaatggcccaaacaataccgtctgtgaagatgtggacgagtgcagctccgggcagcatcagtgtgacagctccaccgtctgcttcaacaccgtgggttcatacagctgccgctgccgcccaggctggaagcccagacacggaatcccgaataaccaaaaggacactgtctgtgaagacgctttcccgattcttcgacaaagtccaggacctgggcagagactccaagacaagctcagccgaggtcaccatccaggtaagggcaggatgctgggggaccccaggacagtgtagaatcagctagcggaggcttccatgtggccagagagagtgcccaacccaagcaggggcctctagtcagagacacacatgcgcataacatacacacaccacatacagtatgtgcacaaacatacacacccggacacgtgaagacacacgcatgcacacac

SEQ ID NO: 448910 - DNA, 428 bp, Homo sapiens
cctggtagggggtgacatccaggtccttcaggcaacccctgtggtctgatgctccagcgattctgtcacccgccaccccctagaatgtcatcaaattggtggatgaactgatggaagctcctggagacgtagaggccctggcgccacctgtccggcacctcatagccacccagctgctctcaaaccttgaagatatcatgaggatcctggccaagagcctgcctaaaggccccttcacctacatttccccttcgaacacaggtgaggccttggcctggcctgccctgccccaaccctgggccccacctggtacctggggtccctaatcacaactgcccctctcccctcagagctgaccctgatgatccaggagcggggggacaagaacgtcactatgggtcagagcagcgcacgcatgaagctgaatt

SEQ ID NO: 448911 - DNA, 444 bp, Homo sapiens
aaccgaatgggcggaggcgggggcgtgccgacgggagggcggccgcggcgcggggctcccttcctcgtgctcggcgttgagctcctgcagccgccgccgctgcagtggtcgtccctgccctccccggccccggggtgcaccccgcaaggtgaggccacccctctgctccctgcctcccggttccttcccgttcgccgaggtcccctcccggtcccggccctgtcctgagcagtcagtgcctgggaccccagcggccgtgatggcagggctggggtggggggctccgctgtcggggccgggcctggaggactccccagcacctgaactagagtgatgtcaggttcccggggcgcagtgaccgttagctggtgcagctggggtgttttccgcgaagcgattgtccgggggcatgagtgcggtagtgagggcgggggcgtaatgggg

SEQ ID NO: 448912 - DNA, 1330 bp, Homo sapiens
aaccgaatgggcggaggcgggggcgtgccgacgggagggcggccgcggcgcggggctcccttcctcgtgctcggcgttgagctcctgcagccgccgccgctgcagtggtcgtccctgccctccccggccccggggtgcaccccgcaaggcaacaagcccagagtccggagtatccgctttgcggcaggccacgatgcagaaggatcccacagccacgtccactttgatgagaagctgcatgactcggtggtcatggtcacccaggagagtgacagcagctttctggtcaaggttggcttcctgaagatcctgcacaggtatgagattaccttcactctgcccccagtgcacaggctgagcaaggatgtccgcgaggcacctgtccccagcctgcacctcaagctcctcagcgtggtgcccgtccctgaaggttatagtgtcaagtgtgagtactcggcgcacaaagagggcgtcctcaaagaggagatactgctagcctgcgaaggtggcactggcacctgtgtgcgcgtgacggtgcaggcccgcgtcatgggtgagagcgtgaggctcctggttggaggagggatgcacaagctcgactgcgagggtttctgtcctcctcagggaaccaaggctgaacaagggatccttgcccggctcaggggttctcaacctccttggcagaccggcaccacggcacgcccatgctgctggatggtgtcaagtgtgtgggcgccgagctggaatacgactcagagcacagcgactggcacggctttgactgaggcccgaggccccgcctgccccgggcccctcagccttaaaccccgccttgtccccccgacatgctgcgtgatggtgtggcttcctcgcccctctctggggtgggtgtgggggtggagtggccttgcccacgcctctcacctctgccttcatttgtgctgccaccctgcccctccctcgtcctcctctcccacttcctcctctctgtgtgcctcagtctcctgccggaagaaatgggttgagcccgaaaggaggctgtctgaggaagggagagggagggcctggggtgggtcccccactccccaccccaagccacagggactcccaccagggtctgggagaggacggagctggctctgtggcgtcgtggccccattactgctgccttgcttcagccacctctcctgcccctccctagtccccactgctgtccaccatgagtaggagggaggtgcagtccccagcccccacccctcaggtctgtgttacttggtttttaagcgactggttgggatagaaccctaaagaaataaacttccagtggata

SEQ ID NO: 448913 - DNA, 1304 bp, Homo sapiens
aaccgaatgggcggaggcgggggcgtgccgacgggagggcggccgcggcgcggggctcccttcctcgtgctcggcgttgagctcctgcagccgccgccgctgcagtggtcgtccctgccctccccggccccggggtgcaccccgcaaggctcccgctggtgtccctggagcatgggaggctgctgagcgtgagtggcggtgtctggcaggagctgcgtggcagggagggcgtccatggctgcagccaacaagggcaacaagcccagagtccggagtatccgctttgcggcaggccacgatgcagaaggatcccacagccacgtccactttgatgagaagctgcatgactcggtggtcatggtcacccaggagagtgacagcagctttctggtcaaggttggcttcctgaagatcctgcacaggtatgagattaccttcactctgcccccagtgcacaggctgagcaaggatgtccgcgaggcacctgtccccagcctgcacctcaagctcctcagcgtggtgcccgtccctgaaggttatagtgtcaagtgtgagtactcggcgcacaaagagggcgtcctcaaagaggagatactgctagcctgcgaaggtggcactggcacctgtgtgcgcgtgacggtgcaggcccgcgtcatggaccggcaccacggcacgcccatgctgctggatggtgtcaagtgtgtgggcgccgagctggaatacgactcagagcacagcgactggcacggctttgactgaggcccgaggccccgcctgccccgggcccctcagccttaaaccccgccttgtccccccgacatgctgcgtgatggtgtggcttcctcgcccctctctggggtgggtgtgggggtggagtggccttgcccacgcctctcacctctgccttcatttgtgctgccaccctgcccctccctcgtcctcctctcccacttcctcctctctgtgtgcctcagtctcctgccggaagaaatgggttgagcccgaaaggaggctgtctgaggaagggagagggagggcctggggtgggtcccccactccccaccccaagccacagggactcccaccagggtctgggagaggacggagctggctctgtggcgtcgtggccccattactgctgccttgcttcagccacctctcctgcccctccctagtccccactgctgtccaccatgagtaggagggaggtgcagtccccagcccccacccctcaggtctgtgttacttggtttttaagcgactggttgggatagaaccctaaagaaataaacttccagtggata

SEQ ID NO: 448914 - DNA, 1379 bp, Homo sapiens
aaccgaatgggcggaggcgggggcgtgccgacgggagggcggccgcggcgcggggctcccttcctcgtgctcggcgttgagctcctgcagccgccgccgctgcagtggtcgtccctgccctccccggccccggggtgcaccccgcaaggctcccgctggtgtccctggagcatgggaggctgctgagcgtgagtggcggtgtctggcaggagctgcgtggcagggagggcgtccatggctgcagccaacaagggtaagtgccttcctggcgtggtaggacttgcacaagctcttccggtgggccctggtaggagggccattgctgcaggcaacaagcccagagtccggagtatccgctttgcggcaggccacgatgcagaaggatcccacagccacgtccactttgatgagaagctgcatgactcggtggtcatggtcacccaggagagtgacagcagctttctggtcaaggttggcttcctgaagatcctgcacaggtatgagattaccttcactctgcccccagtgcacaggctgagcaaggatgtccgcgaggcacctgtccccagcctgcacctcaagctcctcagcgtggtgcccgtccctgaaggttatagtgtcaagtgtgagtactcggcgcacaaagagggcgtcctcaaagaggagatactgctagcctgcgaaggtggcactggcacctgtgtgcgcgtgacggtgcaggcccgcgtcatggaccggcaccacggcacgcccatgctgctggatggtgtcaagtgtgtgggcgccgagctggaatacgactcagagcacagcgactggcacggctttgactgaggcccgaggccccgcctgccccgggcccctcagccttaaaccccgccttgtccccccgacatgctgcgtgatggtgtggcttcctcgcccctctctggggtgggtgtgggggtggagtggccttgcccacgcctctcacctctgccttcatttgtgctgccaccctgcccctccctcgtcctcctctcccacttcctcctctctgtgtgcctcagtctcctgccggaagaaatgggttgagcccgaaaggaggctgtctgaggaagggagagggagggcctggggtgggtcccccactccccaccccaagccacagggactcccaccagggtctgggagaggacggagctggctctgtggcgtcgtggccccattactgctgccttgcttcagccacctctcctgcccctccctagtccccactgctgtccaccatgagtaggagggaggtgcagtccccagcccccacccctcaggtctgtgttacttggtttttaagcgactggttgggatagaaccctaaagaaataaacttccagtggata

SEQ ID NO: 448915 - DNA, 1022 bp, Homo sapiens
  misc_feature (26)..(26): n is a, c, g, or t
  misc_feature (33)..(33): n is a, c, g, or t
  misc_feature (943)..(943): n is a, c, g, or t
  misc_feature (947)..(947): n is a, c, g, or t
  misc_feature (954)..(954): n is a, c, g, or t
  misc_feature (961)..(961): n is a, c, g, or t
  misc_feature (964)..(964): n is a, c, g, or t
  misc_feature (971)..(971): n is a, c, g, or t
  misc_feature (975)..(975): n is a, c, g, or t
cccaacccaaccttacggctaggtangaggctnggtgttgaatcggccgaggctctgaccagcaccatggcggttggcaagaacaagcgccttacgaaaggcggcaaaaagggagccaagaagaaagtggttgatccattttctaagaaagattggtatgatgtgaaagcacctgctatgttcaatataagaaatattggaaagacgctcgtcaccaggacccaaggaaccaaaattgcatctgatggtctcaagggtcgtgtgtttgaagtgagtcttgctgatttgcagaatgatgaagttgcatttagaaaattcaagctgattactgaagatgttcagggtaaaaactgcctgactaacttccatggcatggatcttacccgtgacaaaatgtgttccatggtcaaaaaatggcagacaatgattgaagctcacgttgatgtcaagactaccgatggttacttgcttcgtctgttctgtgttggttttactaaaaaacgcaacaatcagatacggaagacctcttatgctcagcaccaacaggtccgccaaatccggaagaagatgatggaaatcatgacccgagaggtgcagacaaatgacttgaaagaagtggtcaataaattgattccagacagcattggaaaagacatagaaaaggcttgccaatctatttatcctctccatgatgtcttcgttagaaaagtaaaaatgctgaagaagcccaagtttgaattgggaaagctcatggagcttcatggtgaaggcagtagttctgggaaaagccactggggacgagacaggtgctaaagttgaacgagctgatggatattgaaccaccaggtccaagaatctgtttaaagttcagacttcaaatagtggcaataaaagggtattgtggaaactcgggacctaattcgggggcggacaaaagagtctnacangccaggncaaacgngtntgaccantttnttcaggggaaactgcggtcccaaagaggggaaactcaaaccgtcgta

SEQ ID NO: 448916 - DNA, 1095 bp, Homo sapiens
  misc_feature (898)..(898): n is a, c, g, or t
ttaacgggctaggtgcgaggcctggtggtgctgaccagcaccatggcggttggcaagaacaagcgccttacgaaaggcggcaaaaagggagccaagaagaaagtggttgatccattttctaagaaagattggtatgatgtgaaagcacctgctatgttcaatataagaaatattggaaagacgctcgtcaccaggacccaaggaaccaaaattgcatctgatggtctcaagggtcgtgtgtttgaagtgagtcttgctgatttgcagaatgatgaagttgcatttagaaaattcaagctgattactgaagatgttcagggtaaaaactgcctgactaacttccatggcatggatcttacccgtgacaaaatgtgttccatggtcaaaaaatggcagacaatgattgaagctcacgttgatgtcaagactaccgatggttacttgcttcgtctgttctgtgttggttttactaaaaaacgcaacaatcagatacggaagacctcttatgctcagcaccaacaggtccgccaaatccggaagaagatgatggaaatcatgacccgagaggtgcagacaaatgacttgaaagaagtggtcaataaattgattccagacagcattggaaaagacatagaaaaggcttgccaatctatttatcctctccatgatgtcttcgttagaaaagtaaaaatgctgaagaagcccaagtttgaattgggaaagctcatggagcttcatggtgaaggcagtagttctgggaaaagccactggggacgagacaggtgctaaagttgaacgagctgatggatattgaaccaccaggtccaagaatctgtttaaagttcagacttcaaatagtggcaataaaagggtattgtggaaattacagggcgactgngcgaaaacaaaaaaaaagaaaaaccggagaattacagagggaaaaagataaaagggaagagcaaggcagccactttcaagggaataggcacatggagcaaaacacgacgtaaaaagacgacgacaacaagagaaaaaaaaaagagatacaggagagacaaacaaagcgatacagaaaacaaccaatacccactaaga

SEQ ID NO: 448917 - DNA, 881 bp, Homo sapiens
cggacgcgtgggtcgacccacgcgtccgctgaccagcaccatggcggttggcaagaacaagcgccttacgaaaggcggcaaaaagggagccaagaagaaagtggttgatccattttctaagaaagattggtatgatgtgaaagcacctgctatgttcaatataagaaatattggaaagacgctcgtcaccaggacccaaggaaccaaaattgcatctgatggtctcaagggtcgtgtgtttgaagtgagtcttgctgatttgcagaatgatgaagttgcatttagaaaattcaagctgattactgaagatgttcagggtaaaaactgcctgactaacttccatggcatggatcttacccgtgacaaaatgtgttccatggtcaaaaaatggcagacaatgattgaagctcacgttgatgtcaagactaccgatggttacttgcttcgtctgttctgtgttggttttactaaaaaacgcaacaatcagatacggaagacctcttatgctcagcaccaacaggtccgccaaatccggaagaagatgatggaaatcatgacccgagaggtgcagacaaatgacttgaaagaagtggtcaataaattgattccagacagcattggaaaagacatagaaaaggcttgccaatctatttatcctctccatgatgtcttcgttagaaaagtaaaaatgctgaagaagcccaagtttgaattgggaaagctcatggagcttcatggtgaaggcagtagttctgggaaaagccactggggacgagacaggtgctaaagttgaacgagctgatggatattgaaccaccaggtccaagaatctgtttaaagttcagacttcaaatagtggcaataaaagggtattgtggaaa

SEQ ID NO: 448918 - DNA, 1188 bp, Homo sapiens
cggacgcgtgggtcgacccacgcgtccgctgaccagcaccatggcggttggcaagaacaagcgccttacgaaaggcggcaaaaagggagccaagaagaaagtggttgatccattttctaagaaagattggtatgatgtgaaagcacctgctatgttcaatataagaaatattggaaagacgctcgtcaccaggacccaaggaaccaaaattgcatctgatggtctcaagggtcgtgtgtttgaagtgagtcttgctgatttgcagaatgatgaagttgcatttagaaaattcaagctgattactgaagatgttcagggtaaaaactgcctgactaacttccatggcatggatcttacccgtgacaaaatgtgttccatggtcaaaaaatggcagacaatgattgaagctcacgttgatgtcaagactaccgatggttacttgcttcgtctgttctgtgttggttttactaaaaaacgcaacaatcagatacggaagacctcttatgctcagcaccaacaggtccgccaaatccggaagaagatgatggaaatcatgacccgagaggtgcagacaaatgacttgaaagaagtggtcaataaattgattccagacagcattggaaaagacatagaaaaggcttgccaatctatttatcctctccatgatgtcttcgttagaaaagtaaaaatgctgaagaagcccaagtttgaattgggaaagctcatggagcttcatggtgaaggcagtagttctgggaaaagccactggggacgagacaggtgctaaagttgaacgagctgatggatattgaaccaccaggtccaagaatctgtttaaagttcagacttcaaatagtggcaataaaagggtattgtggaaagacacccaccaacacaaaaacaacacaaaaacccgcgggcgacaacaattctggcgggcggcgaaaagaagatatacacaaggcacggagcgtgaaacaggttcatgcacccccctttgttcaacagcggggaatcgcgcgcccccctagaggggggtcacaaatagaagacgggcatcagaatattgagaacactaatgcagacacaacacgacacagcaccggacaccacagccaacgcgacaagcacagacgcgacgcataccagaccagcatcacgacacgcacagaccactaccgtcccaac

SEQ ID NO: 448919 - DNA, 1024 bp, Homo sapiens
  misc_feature (916)..(916): n is a, c, g, or t
  misc_feature (936)..(937): n is a, c, g, or t
tcccccccccaccgcgccaacccatagcgctaaggtactgaggcctcgagtgttgatcgacagcaccatggcggttggcaagaacaagcgccttacgaaaggcggcaaaaagggagccaagaagaaagtggttgatccattttctaagaaagattggtatgatgtgaaagcacctgctatgttcaatataagaaatattggaaagacgctcgtcaccaggacccaaggaaccaaaattgcatctgatggtctcaagggtcgtgtgtttgaagtgagtcttgctgatttgcagaatgatgaagttgcatttagaaaattcaagctgattactgaagatgttcagggtaaaaactgcctgactaacttccatggcatggatcttacccgtgacaaaatgtgttccatggtcaaaaaatggcagacaatgattgaagctcacgttgatgtcaagactaccgatggttacttgcttcgtctgttctgtgttggttttactaaaaaacgcaacaatcagatacggaagacctcttatgctcagcaccaacaggtccgccaaatccggaagaagatgatggaaatcatgacccgagaggtgcagacaaatgacttgaaagaagtggtcaataaattgattccagacagcattggaaaagacatagaaaaggcttgccaatctatttatcctctccatgatgtcttcgttagaaaagtaaaaatgctgaagaagcccaagtttgaattgggaaagctcatggagcttcatggtgaaggcagtagttctgggaaaagccactggggacgagacaggtgctaaagttgaacgagctgatggatattgaaccaccaggtccaagaatctgtttaaagttcagacttcaaatagtggcaataaaagggtattgtggaaatagtgganaagggtttgggacaaaaaannggggctaattccgggggcataggtactttgaggcaggggataaagagggggaaagagggaagtgtgagtttgggtgacactaaagtg

SEQ ID NO: 448920 - DNA, 1068 bp, Homo sapiens
  misc_feature (26)..(26): n is a, c, g, or t
  misc_feature (33)..(33): n is a, c, g, or t
cccaacccaaccttacggctaggtangaggctnggtgttgaatcggccgaggctctgaccagcaccatggcggttggcaagaacaagcgccttacgaaaggcggcaaaaagggagccaagaagaaagtggttgatccattttctaagaaagattggtatgatgtgaaagcacctgctatgttcaatataagaaatattggaaagacgctcgtcaccaggacccaaggaaccaaaattgcatctgatggtctcaagggtcgtgtgtttgaagtgagtcttgctgatttgcagaatgatgaagttgcatttagaaaattcaagctgattactgaagatgttcagggtaaaaactgcctgactaacttccatggcatggatcttacccgtgacaaaatgtgttccatggtcaaaaaatggcagacaatgattgaagctcacgttgatgtcaagactaccgatggttacttgcttcgtctgttctgtgttggttttactaaaaaacgcaacaatcagatacggaagacctcttatgctcagcaccaacaggtccgccaaatccggaagaagatgatggaaatcatgacccgagaggtgcagacaaatgacttgaaagaagtggtcaataaattgattccagacagcattggaaaagacatagaaaaggcttgccaatctatttatcctctccatgatgtcttcgttagaaaagtaaaaatgctgaagaagcccaagtttgaattgggaaagctcatggagcttcatggtgaaggcagtagttctgggaaaagccactggggacgagacaggtgctaaagttgaacgagctgatggatattgaaccaccaggtccaagaatctgtttaaagttcagacttcaaatagtggcaataaaagggtattgtggaaagtgaatggtaacaacaaaacacaacagcccacggcatctatgacgggctggggcaaagcgacagcaagggcaagggcacaacggacgcgcaccgatctgcgcgaacggcgcgaaccacgcaggccaaaggagggacacaccaacgaccgaaacagagacag

SEQ ID NO: 448921 - DNA, 1007 bp, Homo sapiens
  misc_feature (26)..(26): n is a, c, g, or t
  misc_feature (33)..(33): n is a, c, g, or t
cccaacccaaccttacggctaggtangaggctnggtgttgaatcggccgaggctctgaccagcaccatggcggttggcaagaacaagcgccttacgaaaggcggcaaaaagggagccaagaagaaagtggttgatccattttctaagaaagattggtatgatgtgaaagcacctgctatgttcaatataagaaatattggaaagacgctcgtcaccaggacccaaggaaccaaaattgcatctgatggtctcaagggtcgtgtgtttgaagtgagtcttgctgatttgcagaatgatgaagttgcatttagaaaattcaagctgattactgaagatgttcagggtaaaaactgcctgactaacttccatggcatggatcttacccgtgacaaaatgtgttccatggtcaaaaaatggcagacaatgattgaagctcacgttgatgtcaagactaccgatggttacttgcttcgtctgttctgtgttggttttactaaaaaacgcaacaatcagatacggaagacctcttatgctcagcaccaacaggtccgccaaatccggaagaagatgatggaaatcatgacccgagaggtgcagacaaatgacttgaaagaagtggtcaataaattgattccagacagcattggaaaagacatagaaaaggcttgccaatctatttatcctctccatgatgtcttcgttagaaaagtaaaaatgctgaagaagcccaagtttgaattgggaaagctcatggagcttcatggtgaaggcagtagttctgggaaaagccactggggacgagacaggtgctaaagttgaacgagctgatggatattgaaccaccaggtccaagaatctgtttaaagttcagacttcaaatagtggcaataaaagggtattgtggaaattaaaaggccttgcgcacacacaaaaaaacccgggctctttcgggcggaaagaaaaggcggagtccgccctttgagggaagggcctaggattgacaaata

SEQ ID NO: 448922 - DNA, 1023 bp, Homo sapiens
  misc_feature (26)..(26): n is a, c, g, or t
  misc_feature (33)..(33): n is a, c, g, or t
  misc_feature (915)..(915): n is a, c, g, or t
  misc_feature (935)..(936): n is a, c, g, or t
cccaacccaaccttacggctaggtangaggctnggtgttgaatcggccgaggctctgaccagcaccatggcggttggcaagaacaagcgccttacgaaaggcggcaaaaagggagccaagaagaaagtggttgatccattttctaagaaagattggtatgatgtgaaagcacctgctatgttcaatataagaaatattggaaagacgctcgtcaccaggacccaaggaaccaaaattgcatctgatggtctcaagggtcgtgtgtttgaagtgagtcttgctgatttgcagaatgatgaagttgcatttagaaaattcaagctgattactgaagatgttcagggtaaaaactgcctgactaacttccatggcatggatcttacccgtgacaaaatgtgttccatggtcaaaaaatggcagacaatgattgaagctcacgttgatgtcaagactaccgatggttacttgcttcgtctgttctgtgttggttttactaaaaaacgcaacaatcagatacggaagacctcttatgctcagcaccaacaggtccgccaaatccggaagaagatgatggaaatcatgacccgagaggtgcagacaaatgacttgaaagaagtggtcaataaattgattccagacagcattggaaaagacatagaaaaggcttgccaatctatttatcctctccatgatgtcttcgttagaaaagtaaaaatgctgaagaagcccaagtttgaattgggaaagctcatggagcttcatggtgaaggcagtagttctgggaaaagccactggggacgagacaggtgctaaagttgaacgagctgatggatattgaaccaccaggtccaagaatctgtttaaagttcagacttcaaatagtggcaataaaagggtattgtggaaatagtgganaagggtttgggacaaaaaannggggctaattccgggggcataggtactttgaggcaggggataaagagggggaaagagggaagtgtgagtttgggtgacactaaagtg

SEQ ID NO: 448923 - DNA, 1037 bp, Homo sapiens
  misc_feature (26)..(26): n is a, c, g, or t
  misc_feature (33)..(33): n is a, c, g, or t
  misc_feature (922)..(922): n is a, c, g, or t
  misc_feature (929)..(929): n is a, c, g, or t
  misc_feature (934)..(934): n is a, c, g, or t
  misc_feature (942)..(942): n is a, c, g, or t
  misc_feature (944)..(944): n is a, c, g, or t
  misc_feature (948)..(948): n is a, c, g, or t
  misc_feature (951)..(951): n is a, c, g, or t
  misc_feature (962)..(962): n is a, c, g, or t
  misc_feature (968)..(968): n is a, c, g, or t
cccaacccaaccttacggctaggtangaggctnggtgttgaatcggccgaggctctgaccagcaccatggcggttggcaagaacaagcgccttacgaaaggcggcaaaaagggagccaagaagaaagtggttgatccattttctaagaaagattggtatgatgtgaaagcacctgctatgttcaatataagaaatattggaaagacgctcgtcaccaggacccaaggaaccaaaattgcatctgatggtctcaagggtcgtgtgtttgaagtgagtcttgctgatttgcagaatgatgaagttgcatttagaaaattcaagctgattactgaagatgttcagggtaaaaactgcctgactaacttccatggcatggatcttacccgtgacaaaatgtgttccatggtcaaaaaatggcagacaatgattgaagctcacgttgatgtcaagactaccgatggttacttgcttcgtctgttctgtgttggttttactaaaaaacgcaacaatcagatacggaagacctcttatgctcagcaccaacaggtccgccaaatccggaagaagatgatggaaatcatgacccgagaggtgcagacaaatgacttgaaagaagtggtcaataaattgattccagacagcattggaaaagacatagaaaaggcttgccaatctatttatcctctccatgatgtcttcgttagaaaagtaaaaatgctgaagaagcccaagtttgaattgggaaagctcatggagcttcatggtgaaggcagtagttctgggaaaagccactggggacgagacaggtgctaaagttgaacgagctgatggatattgaaccaccaggtccaagaatctgtttaaagttcagacttcaaatagtggcaataaaagggtattgtggaaaccggggctttttcgngcggaanggttnagggctgntntttnccngccctttgtcnaggganccggcccataagggatatgaacgattaattcacacaataaaaacaaaaaggtaaaaaaaaagaaaaaat

SEQ ID NO: 448924 - DNA, 883 bp, Homo sapiens
ttaacgggctaggtgcgaggcctggtggtgctgaccagcaccatggcggttggcaagaacaagcgccttacgaaaggcggcaaaaagggagccaagaagaaagtggttgatccattttctaagaaagattggtatgatgtgaaagcacctgctatgttcaatataagaaatattggaaagacgctcgtcaccaggacccaaggaaccaaaattgcatctgatggtctcaagggtcgtgtgtttgaagtgagtcttgctgatttgcagaatgatgaagttgcatttagaaaattcaagctgattactgaagatgttcagggtaaaaactgcctgactaacttccatggcatggatcttacccgtgacaaaatgtgttccatggtcaaaaaatggcagacaatgattgaagctcacgttgatgtcaagactaccgatggttacttgcttcgtctgttctgtgttggttttactaaaaaacgcaacaatcagatacggaagacctcttatgctcagcaccaacaggtccgccaaatccggaagaagatgatggaaatcatgacccgagaggtgcagacaaatgacttgaaagaagtggtcaataaattgattccagacagcattggaaaagacatagaaaaggcttgccaatctatttatcctctccatgatgtcttcgttagaaaagtaaaaatgctgaagaagcccaagtttgaattgggaaagctcatggagcttcatggtgaaggcagtagttctgggaaaagccactggggacgagacaggtgctaaagttgaacgagctgatggatattgaaccaccaggtccaagaatctgtttaaagttcagacttcaaatagtggcaataaaagggtattgtggaaa

SEQ ID NO: 448925 - DNA, 897 bp, Homo sapiens
tgttaatgaaagtatgaatcgctttttggctctctgaccagcaccatggcagcaccatggcggttggcaagaacaagcgccttacgaaaggcggcaaaaagggagccaagaagaaagtggttgatccattttctaagaaagattggtatgatgtgaaagcacctgctatgttcaatataagaaatattggaaagacgctcgtcaccaggacccaaggaaccaaaattgcatctgatggtctcaagggtcgtgtgtttgaagtgagtcttgctgatttgcagaatgatgaagttgcatttagaaaattcaagctgattactgaagatgttcagggtaaaaactgcctgactaacttccatggcatggatcttacccgtgacaaaatgtgttccatggtcaaaaaatggcagacaatgattgaagctcacgttgatgtcaagactaccgatggttacttgcttcgtctgttctgtgttggttttactaaaaaacgcaacaatcagatacggaagacctcttatgctcagcaccaacaggtccgccaaatccggaagaagatgatggaaatcatgacccgagaggtgcagacaaatgacttgaaagaagtggtcaataaattgattccagacagcattggaaaagacatagaaaaggcttgccaatctatttatcctctccatgatgtcttcgttagaaaagtaaaaatgctgaagaagcccaagtttgaattgggaaagctcatggagcttcatggtgaaggcagtagttctgggaaaagccactggggacgagacaggtgctaaagttgaacgagctgatggatattgaaccaccaggtccaagaatctgtttaaagttcagacttcaaatagtggcaataaaagggtattgtggaaa

SEQ ID NO: 448926 - DNA, 908 bp, Homo sapiens
tcccccccccaccgcgccaacccatagcgctaaggtactgaggcctcgagtgttgatcgacagcaccatggcggttggcaagaacaagcgccttacgaaaggcggcaaaaagggagccaagaagaaagtggttgatccattttctaagaaagattggtatgatgtgaaagcacctgctatgttcaatataagaaatattggaaagacgctcgtcaccaggacccaaggaaccaaaattgcatctgatggtctcaagggtcgtgtgtttgaagtgagtcttgctgatttgcagaatgatgaagttgcatttagaaaattcaagctgattactgaagatgttcagggtaaaaactgcctgactaacttccatggcatggatcttacccgtgacaaaatgtgttccatggtcaaaaaatggcagacaatgattgaagctcacgttgatgtcaagactaccgatggttacttgcttcgtctgttctgtgttggttttactaaaaaacgcaacaatcagatacggaagacctcttatgctcagcaccaacaggtccgccaaatccggaagaagatgatggaaatcatgacccgagaggtgcagacaaatgacttgaaagaagtggtcaataaattgattccagacagcattggaaaagacatagaaaaggcttgccaatctatttatcctctccatgatgtcttcgttagaaaagtaaaaatgctgaagaagcccaagtttgaattgggaaagctcatggagcttcatggtgaaggcagtagttctgggaaaagccactggggacgagacaggtgctaaagttgaacgagctgatggatattgaaccaccaggtccaagaatctgtttaaagttcagacttcaaatagtggcaataaaagggtattgtggaaa

SEQ ID NO: 448927 - DNA, 944 bp, Homo sapiens
  misc_feature (26)..(26): n is a, c, g, or t
  misc_feature (33)..(33): n is a, c, g, or t
  misc_feature (877)..(877): n is a, c, g, or t
cccaacccaaccttacggctaggtangaggctnggtgttgaatcggccgaggctctgaccagcaccatggcggttggcaagaacaagcgccttacgaaaggcggcaaaaagggagccaagaagaaagtggttgatccattttctaagaaagattggtatgatgtgaaagcacctgctatgttcaatataagaaatattggaaagacgctcgtcaccaggacccaaggaaccaaaattgcatctgatggtctcaagggtcgtgtgtttgaagtgagtcttgctgatttgcagaatgatgaagttgcatttagaaaattcaagctgattactgaagatgttcagggtaaaaactgcctgactaacttccatggcatggatcttacccgtgacaaaatgtgttccatggtcaaaaaatggcagacaatgattgaagctcacgttgatgtcaagactaccgatggttacttgcttcgtctgttctgtgttggttttactaaaaaacgcaacaatcagatacggaagacctcttatgctcagcaccaacaggtccgccaaatccggaagaagatgatggaaatcatgacccgagaggtgcagacaaatgacttgaaagaagtggtcaataaattgattccagacagcattggaaaagacatagaaaaggcttgccaatctatttatcctctccatgatgtcttcgttagaaaagtaaaaatgctgaagaagcccaagtttgaattgggaaagctcatggagcttcatggtgaaggcagtagttctgggaaaagccactggggacgagacaggtgctaaagttgagtgacgagtgtggttgaccccgccaattgttagtcactccatggggaaaggttggganaaaaactcgggttttgggggaggtgaggtgcattggcctgtagggtggctaaggttggggaatgaat

SEQ ID NO: 448928 - DNA, 883 bp, Homo sapiens
  misc_feature (26)..(26): n is a, c, g, or t
  misc_feature (33)..(33): n is a, c, g, or t
cccaacccaaccttacggctaggtangaggctnggtgttgaatcggccgaggctctgaccagcaccatggcggttggcaagaacaagcgccttacgaaaggcggcaaaaagggagccaagaagaaagtggttgatccattttctaagaaagattggtatgatgtgaaagcacctgctatgttcaatataagaaatattggaaagacgctcgtcaccaggacccaaggaaccaaaattgcatctgatggtctcaagggtcgtgtgtttgaagtgagtcttgctgatttgcagaatgatgaagttgcatttagaaaattcaagctgattactgaagatgttcagggtaaaaactgcctgactaacttccatggcatggatcttacccgtgacaaaatgtgttccatggtcaaaaaatggcagacaatgattgaagctcacgttgatgtcaagactaccgatggttacttgcttcgtctgttctgtgttggttttactaaaaaacgcaacaatcagatacggaagacctcttatgctcagcaccaacaggtccgccaaatccggaagaagatgatggaaatcatgacccgagaggtgcagacaaatgacttgaaagaagtggtcaataaattgattccagacagcattggaaaagacatagaaaaggcttgccaatctatttatcctctccatgatgtcttcgttagaaaagtaaaaatgctgaagaagcccaagtttgaattgggaaagctcatggagcttcatggtgaaggcagtagttctgggaaaagccactggggacgagacaggtgctaaagttgatgtggtttaacaccgtcagaattcgttagttcgattatgtggcttaagggtttggggaaacaag

SEQ ID NO: 448929 - DNA, 840 bp, Homo sapiens
  misc_feature (26)..(26): n is a, c, g, or t
  misc_feature (33)..(33): n is a, c, g, or t
  misc_feature (793)..(793): n is a, c, g, or t
  misc_feature (803)..(803): n is a, c, g, or t
cccaacccaaccttacggctaggtangaggctnggtgttgaatcggccgaggctctgaccagcaccatggcggttggcaagaacaagcgccttacgaaaggcggcaaaaagggagccaagaagaaagtggttgatccattttctaagaaagattggtatgatgtgaaagcacctgctatgttcaatataagaaatattggaaagacgctcgtcaccaggacccaaggaaccaaaattgcatctgatggtctcaagggtcgtgtgtttgaagtgagtcttgctgatttgcagaatgatgaagttgcatttagaaaattcaagctgattactgaagatgttcagggtaaaaactgcctgactaacttccatggcatggatcttacccgtgacaaaatgtgttccatggtcaaaaaatggcagacaatgattgaagctcacgttgatgtcaagactaccgatggttacttgcttcgtctgttctgtgttggttttactaaaaaacgcaacaatcagatacggaagacctcttatgctcagcaccaacaggtccgccaaatccggaagaagatgatggaaatcatgacccgagaggtgcagacaaatgacttgaaagaagtggtcaataaattgattccagacagcattggaaaagacatagaaaaggcttgccaatctatttatcctctccatgatgtcttcgttagaaaagtaaaaatgctgaagaagcccaagtttgaattgggaaagctcatggagcttcatgggaatctggaaacccggggcgaacagggcnagtacggcgnggttaccccccattgttgtccatccttggaaaaggtg

SEQ ID NO: 448930 - DNA, 959 bp, Homo sapiens
  misc_feature (880)..(880): n is a, c, g, or t
  misc_feature (884)..(884): n is a, c, g, or t
  misc_feature (891)..(891): n is a, c, g, or t
  misc_feature (898)..(898): n is a, c, g, or t
  misc_feature (901)..(901): n is a, c, g, or t
  misc_feature (908)..(908): n is a, c, g, or t
  misc_feature (912)..(912): n is a, c, g, or t
aactaggctaggtacgaggcggtgggtaatcggccgagccacttccgccccagcaccatggcggttggcaagaacaagcgccttacgaaaggcggcaaaaagggagccaagaagaaagtggttgatccattttctaagaaagattggtatgatgtgaaagcacctgctatgttcaatataagaaatattggaaagacgctcgtcaccaggacccaaggaaccaaaattgcatctgatggtctcaagggtcgtgtgtttgaagtgagtcttgctgatttgcagaatgatgaagttgcatttagaaaattcaagctgattactgaagatgttcagggtaaaaactgcctgactaacttccatggcatggatcttacccgtgacaaaatgtgttccatggtcaaaaaatggcagacaatgattgaagctcacgttgatgtcaagactaccgatggttacttgcttcgtctgttctgtgttggttttactaaccaaatccggaagaagatgatggaaatcatgacccgagaggtgcagacaaatgacttgaaagaagtggtcaataaattgattccagacagcattggaaaagacatagaaaaggcttgccaatctatttatcctctccatgatgtcttcgttagaaaagtaaaaatgctgaagaagcccaagtttgaattgggaaagctcatggagcttcatggtgaaggcagtagttctgggaaaagccactggggacgagacaggtgctaaagttgaacgagctgatggatattgaaccaccaggtccaagaatctgtttaaagttcagacttcaaatagtggcaataaaagggtattgtggaaactcgggacctaattcgggggcggacaaaagagtctnacangccaggncaaacgngtntgaccantttnttcaggggaaactgcggtcccaaagaggggaaactcaaaccgtcgta

SEQ ID NO: 448931 - DNA, 907 bp, Homo sapiens
  misc_feature (26)..(26): n is a, c, g, or t
  misc_feature (33)..(33): n is a, c, g, or t
cccaacccaaccttacggctaggtangaggctnggtgttgaatcggccgaggctctgaccagcaccatggcggttggcaagaacaagcgccttacgaaaggcggcaaaaagggagccaagaagaaagtggttgatccattttctaagaaagattggtatgatgtgaaagcacctgctatgttcaatataagaaatattggaaagacgctcgtcaccaggacccaaggaaccaaaattgcatctgatggtctcaagggtcgtgtgtttgaagtgagtcttgctgatttgcagaatgatgaagttgcatttagaaaattcaagctgattactgaagatgttcagggtaaaaactgcctgactaacttccatggcatggatcttacccgtgacaaaatgtgttccatggtcaaaaaatggcagacaatgattgaagctcacgttgatgtcaagactaccgatggttacttgcttcgtctgttctgtgttggttttactaaaaaacgcaacaatcagatacggaagacctcttatgctcagcaccaacaggtccgccaaatccggaagaagatgatggaaatcatgacccgagaggtgcagacaaatgacttgaaagaagtggtcaataaattgattccagacagcattggaaaagacatagaaaaggcttgccaatctatttatcctctccatgatgtcttcgttagaaaagtaaaaatgctgaagaagcccaagtttgaattgggaaagctcatggagcttcatggtgaaggcagtagttctgggaaaagccactggggacgagacaggtgctaaagttgaacgagctgatggatattgaaccaccaggtccaagaatctgtttaaagttcagacttcaaatagtggcaataaaagggtattgtggaaa

SEQ ID NO: 448932 - DNA, 898 bp, Homo sapiens
aactaggctaggtacgaggcggtgggtaatcggccgagccacttccgccccagcaccatggcggttggcaagaacaagcgccttacgaaaggcggcaaaaagggagccaagaagaaagtggttgatccattttctaagaaagattggtatgatgtgaaagcacctgctatgttcaatataagaaatattggaaagacgctcgtcaccaggacccaaggaaccaaaattgcatctgatggtctcaagggtcgtgtgtttgaagtgagtcttgctgatttgcagaatgatgaagttgcatttagaaaattcaagctgattactgaagatgttcagggtaaaaactgcctgactaacttccatggcatggatcttacccgtgacaaaatgtgttccatggtcaaaaaatggcagacaatgattgaagctcacgttgatgtcaagactaccgatggttacttgcttcgtctgttctgtgttggttttactaaaaaacgcaacaatcagatacggaagacctcttatgctcagcaccaacaggtccgccaaatccggaagaagatgatggaaatcatgacccgagaggtgcagacaaatgacttgaaagaagtggtcaataaattgattccagacagcattggaaaagacatagaaaaggcttgccaatctatttatcctctccatgatgtcttcgttagaaaagtaaaaatgctgaagaagcccaagtttgaattgggaaagctcatggagcttcatggtgaaggcagtagttctgggaaaagccactggggacgagacaggtgctaaagttgaacgagctgatggatattgaaccaccaggtccaagaatctgtttaaagttcagacttcaaatagtggcaataaaagggtattgtggaaa

SEQ ID NO: 448933 - DNA, 1059 bp, Homo sapiens
aactaggctaggtacgaggcggtgggtaatcggccgagccacttccgccccagcaccatggcggttggcaagaacaagcgccttacgaaaggcggcaaaaagggagccaagaagaaagtggttgatccattttctaagaaagattggtatgatgtgaaagcacctgctatgttcaatataagaaatattggaaagacgctcgtcaccaggacccaaggaaccaaaattgcatctgatggtctcaagggtcgtgtgtttgaagtgagtcttgctgatttgcagaatgatgaagttgcatttagaaaattcaagctgattactgaagatgttcagggtaaaaactgcctgactaacttccatggcatggatcttacccgtgacaaaatgtgttccatggtcaaaaaatggcagacaatgattgaagctcacgttgatgtcaagactaccgatggttacttgcttcgtctgttctgtgttggttttactaaaaaacgcaacaatcagatacggaagacctcttatgctcagcaccaacaggtccgccaaatccggaagaagatgatggaaatcatgacccgagaggtgcagacaaatgacttgaaagaagtggtcaataaattgattccagacagcattggaaaagacatagaaaaggcttgccaatctatttatcctctccatgatgtcttcgttagaaaagtaaaaatgctgaagaagcccaagtttgaattgggaaagctcatggagcttcatggtgaaggcagtagttctgggaaaagccactggggacgagacaggtgctaaagttgaacgagctgatggatattgaaccaccaggtccaagaatctgtttaaagttcagacttcaaatagtggcaataaaagggtattgtggaaagtgaatggtaacaacaaaacacaacagcccacggcatctatgacgggctggggcaaagcgacagcaagggcaagggcacaacggacgcgcaccgatctgcgcgaacggcgcgaaccacgcaggccaaaggagggacacaccaacgaccgaaacagagacag

SEQ ID NO: 448934 - DNA, 1029 bp, Homo sapiens
  misc_feature (916)..(916): n is a, c, g, or t
ccacagcacgctcaggccgaggttaaatcgagcacgaggggcggcagcaccatggcggttggcaagaacaagcgccttacgaaaggcggcaaaaagggagccaagaagaaagtggttgatccattttctaagaaagattggtatgatgtgaaagcacctgctatgttcaatataagaaatattggaaagacgctcgtcaccaggacccaaggaaccaaaattgcatctgatggtctcaagggtcgtgtgtttgaagtgagtcttgctgatttgcagaatgatgaagttgcatttagaaaattcaagctgattactgaagatgttcagggtaaaaactgcctgactaacttccatggcatggatcttacccgtgacaaaatgtgttccatggtcaaaaaatggcagacaatgattgaagctcacgttgatgtcaagactaccgatggttacttgcttcgtctgttctgtgttggttttactaaaaaacgcaacaatcagatacggaagacctcttatgctcagcaccaacaggtccgccaaatccggaagaagatgatggaaatcatgacccgagaggtgcagacaaatgacttgaaagaagtggtcaataaattgattccagacagcattggaaaagacatagaaaaggcttgccaatctatttatcctctccatgatgtcttcgttagaaaagtaaaaatgctgaagaagcccaagtttgaattgggaaagctcatggagcttcatggtgaaggcagtagttctgggaaaagccactggggacgagacaggtgctaaagttgaacgagctgatggatattgaaccaccaggtccaagaatctgtttaaagttcagacttcaaatagtggcaataaaagggtattgtggaaagcacatacaaggggccttggcganacacaacacaaaaacaagagaacaacgagaaaaaaaaaaaaggggcggggaaaaaaatacacagaagggggcaaaaaaaccccaccgaatgaagaaagggccccaagggcaga

SEQ ID NO: 448935 - DNA, 934 bp, Homo sapiens
  misc_feature (867)..(867): n is a, c, g, or t
tgttaatgaaagtatgaatcgctttttggctctctgaccagcaccatggcagcaccatggcggttggcaagaacaagcgccttacgaaaggcggcaaaaagggagccaagaagaaagtggttgatccattttctaagaaagattggtatgatgtgaaagcacctgctatgttcaatataagaaatattggaaagacgctcgtcaccaggacccaaggaaccaaaattgcatctgatggtctcaagggtcgtgtgtttgaagtgagtcttgctgatttgcagaatgatgaagttgcatttagaaaattcaagctgattactgaagatgttcagggtaaaaactgcctgactaacttccatggcatggatcttacccgtgacaaaatgtgttccatggtcaaaaaatggcagacaatgattgaagctcacgttgatgtcaagactaccgatggttacttgcttcgtctgttctgtgttggttttactaaaaaacgcaacaatcagatacggaagacctcttatgctcagcaccaacaggtccgccaaatccggaagaagatgatggaaatcatgacccgagaggtgcagacaaatgacttgaaagaagtggtcaataaattgattccagacagcattggaaaagacatagaaaaggcttgccaatctatttatcctctccatgatgtcttcgttagaaaagtaaaaatgctgaagaagcccaagtttgaattgggaaagctcatggagcttcatggtgaaggcagtagttctgggaaaagccactggggacgagacaggtgctaaagttgagtgacgagtgtggttgaccccgccaattgttagtcactccatggggaaaggttggganaaaaactcgggttttgggggaggtgaggtgcattggcctgtagggtggctaaggttggggaatgaat

SEQ ID NO: 448936 - DNA, 1214 bp, Homo sapiens
  misc_feature (26)..(26): n is a, c, g, or t
  misc_feature (33)..(33): n is a, c, g, or t
cccaacccaaccttacggctaggtangaggctnggtgttgaatcggccgaggctctgaccagcaccatggcggttggcaagaacaagcgccttacgaaaggcggcaaaaagggagccaagaagaaagtggttgatccattttctaagaaagattggtatgatgtgaaagcacctgctatgttcaatataagaaatattggaaagacgctcgtcaccaggacccaaggaaccaaaattgcatctgatggtctcaagggtcgtgtgtttgaagtgagtcttgctgatttgcagaatgatgaagttgcatttagaaaattcaagctgattactgaagatgttcagggtaaaaactgcctgactaacttccatggcatggatcttacccgtgacaaaatgtgttccatggtcaaaaaatggcagacaatgattgaagctcacgttgatgtcaagactaccgatggttacttgcttcgtctgttctgtgttggttttactaaaaaacgcaacaatcagatacggaagacctcttatgctcagcaccaacaggtccgccaaatccggaagaagatgatggaaatcatgacccgagaggtgcagacaaatgacttgaaagaagtggtcaataaattgattccagacagcattggaaaagacatagaaaaggcttgccaatctatttatcctctccatgatgtcttcgttagaaaagtaaaaatgctgaagaagcccaagtttgaattgggaaagctcatggagcttcatggtgaaggcagtagttctgggaaaagccactggggacgagacaggtgctaaagttgaacgagctgatggatattgaaccaccaggtccaagaatctgtttaaagttcagacttcaaatagtggcaataaaagggtattgtggaaagacacccaccaacacaaaaacaacacaaaaacccgcgggcgacaacaattctggcgggcggcgaaaagaagatatacacaaggcacggagcgtgaaacaggttcatgcacccccctttgttcaacagcggggaatcgcgcgcccccctagaggggggtcacaaatagaagacgggcatcagaatattgagaacactaatgcagacacaacacgacacagcaccggacaccacagccaacgcgacaagcacagacgcgacgcataccagaccagcatcacgacacgcacagaccactaccgtcccaac

SEQ ID NO: 448937 - DNA, 1044 bp, Homo sapiens
  misc_feature (26)..(26): n is a, c, g, or t
  misc_feature (33)..(33): n is a, c, g, or t
  misc_feature (931)..(931): n is a, c, g, or t
cccaacccaaccttacggctaggtangaggctnggtgttgaatcggccgaggctctgaccagcaccatggcggttggcaagaacaagcgccttacgaaaggcggcaaaaagggagccaagaagaaagtggttgatccattttctaagaaagattggtatgatgtgaaagcacctgctatgttcaatataagaaatattggaaagacgctcgtcaccaggacccaaggaaccaaaattgcatctgatggtctcaagggtcgtgtgtttgaagtgagtcttgctgatttgcagaatgatgaagttgcatttagaaaattcaagctgattactgaagatgttcagggtaaaaactgcctgactaacttccatggcatggatcttacccgtgacaaaatgtgttccatggtcaaaaaatggcagacaatgattgaagctcacgttgatgtcaagactaccgatggttacttgcttcgtctgttctgtgttggttttactaaaaaacgcaacaatcagatacggaagacctcttatgctcagcaccaacaggtccgccaaatccggaagaagatgatggaaatcatgacccgagaggtgcagacaaatgacttgaaagaagtggtcaataaattgattccagacagcattggaaaagacatagaaaaggcttgccaatctatttatcctctccatgatgtcttcgttagaaaagtaaaaatgctgaagaagcccaagtttgaattgggaaagctcatggagcttcatggtgaaggcagtagttctgggaaaagccactggggacgagacaggtgctaaagttgaacgagctgatggatattgaaccaccaggtccaagaatctgtttaaagttcagacttcaaatagtggcaataaaagggtattgtggaaagcacatacaaggggccttggcganacacaacacaaaaacaagagaacaacgagaaaaaaaaaaaaggggcggggaaaaaaatacacagaagggggcaaaaaaaccccaccgaatgaagaaagggccccaagggcaga

SEQ ID NO: 448938 - DNA, 1119 bp, Homo sapiens
  misc_feature (26)..(26): n is a, c, g, or t
  misc_feature (33)..(33): n is a, c, g, or t
  misc_feature (922)..(922): n is a, c, g, or t
cccaacccaaccttacggctaggtangaggctnggtgttgaatcggccgaggctctgaccagcaccatggcggttggcaagaacaagcgccttacgaaaggcggcaaaaagggagccaagaagaaagtggttgatccattttctaagaaagattggtatgatgtgaaagcacctgctatgttcaatataagaaatattggaaagacgctcgtcaccaggacccaaggaaccaaaattgcatctgatggtctcaagggtcgtgtgtttgaagtgagtcttgctgatttgcagaatgatgaagttgcatttagaaaattcaagctgattactgaagatgttcagggtaaaaactgcctgactaacttccatggcatggatcttacccgtgacaaaatgtgttccatggtcaaaaaatggcagacaatgattgaagctcacgttgatgtcaagactaccgatggttacttgcttcgtctgttctgtgttggttttactaaaaaacgcaacaatcagatacggaagacctcttatgctcagcaccaacaggtccgccaaatccggaagaagatgatggaaatcatgacccgagaggtgcagacaaatgacttgaaagaagtggtcaataaattgattccagacagcattggaaaagacatagaaaaggcttgccaatctatttatcctctccatgatgtcttcgttagaaaagtaaaaatgctgaagaagcccaagtttgaattgggaaagctcatggagcttcatggtgaaggcagtagttctgggaaaagccactggggacgagacaggtgctaaagttgaacgagctgatggatattgaaccaccaggtccaagaatctgtttaaagttcagacttcaaatagtggcaataaaagggtattgtggaaattacagggcgactgngcgaaaacaaaaaaaaagaaaaaccggagaattacagagggaaaaagataaaagggaagagcaaggcagccactttcaagggaataggcacatggagcaaaacacgacgtaaaaagacgacgacaacaagagaaaaaaaaaagagatacaggagagacaaacaaagcgatacagaaaacaaccaatacccactaaga

SEQ ID NO: 448939 - DNA, 892 bp, Homo sapiens
ccacagcacgctcaggccgaggttaaatcgagcacgaggggcggcagcaccatggcggttggcaagaacaagcgccttacgaaaggcggcaaaaagggagccaagaagaaagtggttgatccattttctaagaaagattggtatgatgtgaaagcacctgctatgttcaatataagaaatattggaaagacgctcgtcaccaggacccaaggaaccaaaattgcatctgatggtctcaagggtcgtgtgtttgaagtgagtcttgctgatttgcagaatgatgaagttgcatttagaaaattcaagctgattactgaagatgttcagggtaaaaactgcctgactaacttccatggcatggatcttacccgtgacaaaatgtgttccatggtcaaaaaatggcagacaatgattgaagctcacgttgatgtcaagactaccgatggttacttgcttcgtctgttctgtgttggttttactaaaaaacgcaacaatcagatacggaagacctcttatgctcagcaccaacaggtccgccaaatccggaagaagatgatggaaatcatgacccgagaggtgcagacaaatgacttgaaagaagtggtcaataaattgattccagacagcattggaaaagacatagaaaaggcttgccaatctatttatcctctccatgatgtcttcgttagaaaagtaaaaatgctgaagaagcccaagtttgaattgggaaagctcatggagcttcatggtgaaggcagtagttctgggaaaagccactggggacgagacaggtgctaaagttgaacgagctgatggatattgaaccaccaggtccaagaatctgtttaaagttcagacttcaaatagtggcaataaaagggtattgtggaaa

SEQ ID NO: 448940 - DNA, 929 bp, Homo sapiens
aagtattagtaggtcggcaccgcgttgtaatttcagtactgatggatgagcatgtgcttgtacagtttgtcttgacatggccagcaccatggcggttggcaagaacaagcgccttacgaaaggcggcaaaaagggagccaagaagaaagtggttgatccattttctaagaaagattggtatgatgtgaaagcacctgctatgttcaatataagaaatattggaaagacgctcgtcaccaggacccaaggaaccaaaattgcatctgatggtctcaagggtcgtgtgtttgaagtgagtcttgctgatttgcagaatgatgaagttgcatttagaaaattcaagctgattactgaagatgttcagggtaaaaactgcctgactaacttccatggcatggatcttacccgtgacaaaatgtgttccatggtcaaaaaatggcagacaatgattgaagctcacgttgatgtcaagactaccgatggttacttgcttcgtctgttctgtgttggttttactaaaaaacgcaacaatcagatacggaagacctcttatgctcagcaccaacaggtccgccaaatccggaagaagatgatggaaatcatgacccgagaggtgcagacaaatgacttgaaagaagtggtcaataaattgattccagacagcattggaaaagacatagaaaaggcttgccaatctatttatcctctccatgatgtcttcgttagaaaagtaaaaatgctgaagaagcccaagtttgaattgggaaagctcatggagcttcatggtgaaggcagtagttctgggaaaagccactggggacgagacaggtgctaaagttgaacgagctgatggatattgaaccaccaggtccaagaatctgtttaaagttcagacttcaaatagtggcaataaaagggtattgtggaaa

SEQ ID NO: 448941 - DNA, 882 bp, Homo sapiens
  misc_feature (26)..(26): n is a, c, g, or t
  misc_feature (33)..(33): n is a, c, g, or t
  misc_feature (824)..(824): n is a, c, g, or t
  misc_feature (831)..(831): n is a, c, g, or t
  misc_feature (835)..(835): n is a, c, g, or t
  misc_feature (840)..(840): n is a, c, g, or t
  misc_feature (845)..(845): n is a, c, g, or t
cccaacccaaccttacggctaggtangaggctnggtgttgaatcggccgaggctctgaccagcaccatggcggttggcaagaacaagcgccttacgaaaggcggcaaaaagggagccaagaagaaagtggttgatccattttctaagaaagattggtatgatgtgaaagcacctgctatgttcaatataagaaatattggaaagacgctcgtcaccaggacccaaggaaccaaaattgcatctgatggtctcaagggtcgtgtgtttgaagtgagtcttgctgatttgcagaatgatgaagttgcatttagaaaattcaagctgattactgaagatgttcagggtaaaaactgcctgactaacttccatggcatggatcttacccgtgacaaaatgtgttccatggtcaaaaaatggcagacaatgattgaagctcacgttgatgtcaagactaccgatggttacttgcttcgtctgttctgtgttggttttactaaaaaacgcaacaatcagatacggaagacctcttatgctcagcaccaacaggtccgccaaatccggaagaagatgatggaaatcatgacccgagaggtgcagacaaatgacttgaaagaagtggtcaataaattgattccagacagcattggaaaagacatagaaaaggcttgccaatctatttatcctctccatgatgtcttcgttagaaaagtaaaaatgctgaagaagcccaagtttgaattgggaaagctcatggagcttcatggtgaaggcagtagttctgggaaaagccactggggacgagacaggtgctaaagttgaagcgngggttancccntccanattgntagtccgcttctgtgcgtcgggcttgggcaaaaaatg

SEQ ID NO: 448942 - DNA, 984 bp, Homo sapiens
  misc_feature (26)..(26): n is a, c, g, or t
  misc_feature (33)..(33): n is a, c, g, or t
  misc_feature (905)..(905): n is a, c, g, or t
  misc_feature (909)..(909): n is a, c, g, or t
  misc_feature (916)..(916): n is a, c, g, or t
  misc_feature (923)..(923): n is a, c, g, or t
  misc_feature (926)..(926): n is a, c, g, or t
  misc_feature (933)..(933): n is a, c, g, or t
  misc_feature (937)..(937): n is a, c, g, or t
cccaacccaaccttacggctaggtangaggctnggtgttgaatcggccgaggctctgaccagcaccatggcggttggcaagaacaagcgccttacgaaaggcggcaaaaagggagccaagaagaaagtggttgatccattttctaagaaagattggtatgatgtgaaagcacctgctatgttcaatataagaaatattggaaagacgctcgtcaccaggacccaaggaaccaaaattgcatctgatggtctcaagggtcgtgtgtttgaagtgagtcttgctgatttgcagaatgatgaagttgcatttagaaaattcaagctgattactgaagatgttcagggtaaaaactgcctgactaacttccatggcatggatcttacccgtgacaaaatgtgttccatggtcaaaaaatggcagacaatgattgaagctcacgttgatgtcaagactaccgatggttacttgcttcgtctgttctgtgttggttttactaaaaaacgcaacaatcagatacggaagacctcttatgctcagcaccaacaggtccgccaaatccggaagaagatgatggaaatcatgacccgagaggattccagacagcattggaaaagacatagaaaaggcttgccaatctatttatcctctccatgatgtcttcgttagaaaagtaaaaatgctgaagaagcccaagtttgaattgggaaagctcatggagcttcatggtgaaggcagtagttctgggaaaagccactggggacgagacaggtgctaaagttgaacgagctgatggatattgaaccaccaggtccaagaatctgtttaaagttcagacttcaaatagtggcaataaaagggtattgtggaaactcgggacctaattcgggggcggacaaaagagtctnacangccaggncaaacgngtntgaccantttnttcaggggaaactgcggtcccaaagaggggaaactcaaaccgtcgta

SEQ ID NO: 448943 - DNA, 817 bp, Homo sapiens
  misc_feature (26)..(26): n is a, c, g, or t
  misc_feature (33)..(33): n is a, c, g, or t
cccaacccaaccttacggctaggtangaggctnggtgttgaatcggccgaggctctgaccagcaccatggcggttggcaagaacaagcgccttacgaaaggcggcaaaaagggagccaagaagaaagtggttgatccattttctaagaaagattggtatgatgtgaaagcacctgctatgttcaatataagaaatattggaaagacgctcgtcaccaggacccaaggaaccaaaattgcatctgatggtctcaagggtcgtgtgtttgaagtgagtcttgctgatttgcagaatgatgaagttgcatttagaaaattcaagctgattactgaagatgttcagggtaaaaactgcctgactaacttccatggcatggatcttacccgtgacaaaatgtgttccatggtcaaaaaatggcagacaatgattgaaacctcttatgctcagcaccaacaggtccgccaaatccggaagaagatgatggaaatcatgacccgagaggtgcagacaaatgacttgaaagaagtggtcaataaattgattccagacagcattggaaaagacatagaaaaggcttgccaatctatttatcctctccatgatgtcttcgttagaaaagtaaaaatgctgaagaagcccaagtttgaattgggaaagctcatggagcttcatggtgaaggcagtagttctgggaaaagccactggggacgagacaggtgctaaagttgaacgagctgatggatattgaaccaccaggtccaagaatctgtttaaagttcagacttcaaatagtggcaataaaagggtattgtggaaa

SEQ ID NO: 448944 - DNA, 5925 bp, Homo sapiens
cccaaagttcgaaaccaacagaacgaaaagcaacgaagcacacttaaagtgaggaacccggcaagcggcgaaattcttgctgaagagaagaaaaagcgaaaggttttccgctgcaaccaatcagatgagaggattcttggcacgcccctttctatctaccaatcaacatctagctcaatggggcagtccattgccacagggaaagggcttggtgcagcttccctcacaacacacacgtcattctaggccattccacgaactgtgctcaaaagaggaaaacagtgcaacagttccaaagctgatcagtctcgtggtgagcagcgaaactatagacttctctaacaaaaccatggattctaggagggactgggaaagagaaaaacgaattctggaaggcaaactacaactcccaaaggcccttgcgcggactcagcgcgcgagggacgaagggcgggcgtggacgagccggtggctgcagcggcggcggtccccggagtcctgtgaagcgcccctgtccgcgcctctgtggggccctcagagagggctgccaggacgcgagccactgaggagccgctcagccagcgccatagcccttaggactatcggtcacattctcgcgctcctgctccggctcctccatcttggcctcggcagtggcggctgccgggaggatgtgccgccttctggcagggggaagaaggaggagaagatgaagaagcaccggcgggccttggccctggtctcctgcctctttctgtgctctctggtctggcttcccagctggcgtgtatgttgtaaagagagttcttcagcttcagcgtcatcatattactctcaagatgacaactgcgcactagaaaatgaagatgtacaattccagaaaaagaatacagagtcaaaaaagttaagtccaccggtggtggagacactccctacagttgatttgcatgaagagtcttccaatgcagttgtggacagtgaaactgttgaaaatatttccagctcatctacctcagaaatcactccaatctcaaagcttgatgaaatagaaaaatctggtactattccgatagccaaaccaagtgaaactgagcagtctgaaactgattgtgatgttggtgaggcccttgatgctagtgctccaattgaacaaccttcctttgtcagtccacctgacagccttgttggccagcatatagaaaatgtatcatcttcacatggtaaaggaaagataacaaaatcagaatttgaatcaaaagtttcagcaagtgaacagggcggtggtgatccaaaatctgcattgaatgcttcagataatttaaaaaatgagagctctgattatacaaaaccaggagacattgaccctacatcagtagcaagtcccaaagatccagaagatataccaacatttgatgaatggaagaagaaagttatggaagtagaaaaagaaaaaagtcagtcgatgcatgcatcttctaatggaggttcacatgccaccaaaaaggtccagaaaaatcgaaataattatgcctcagtagaatgtggtgccaaaattctagcagctaatccagaagccaagagcacatctgctattcttatagaaaatatggatctttacatgttgaatccttgcagcactaaaatttggtttgttattgaactttgtgaaccaattcaagtaaaacagcttgatattgcaaattatgaattattttcttctactcctaaagattttctggtttctatcagtgacagatatccaacaaataagtggattaagctgggtacttttcatggtagagatgagcggaatgtacagagtttccctttagatgaacagatgtatgcaaaatatgtcaaggttgagttgctatcacattttggatcagagcacttttgtccattaagccttataagggtatttggcactagcatggtggaagaatatgaagaaattgctgattcccagtatcactcagaacgccaggaactatttgatgaggactatgattatccactggattataatactggagaggataaatcctcaaaaaatcttcttggttctgctacaaatgccattctaaatatggtgaatattgctgctaatattctgggagcaaaaactgaagacctgacagaaggaaataaaagtatatctgagaatgccactgccacagctgcacctaaaatgcctgaatcaactcctgtttcaactcctgttccatctcctgagtatgtaaccactgaagtacacacacatgacatggagccgtcaacaccagatactccaaaagagagtcccattgtacagttagttcaagaggaggaagaggaggcaagtccatctacagtgacccttctgggcagcggtgaacaggaagatgaatcatcaccctggtttgagtcagagacacaaatattttgcagtgaactgaccacaatttgttgtatttctagtttttcagaatacatatataaatggtgttcagttagagttgctctttatcggcagcgcagccgaactgctttgagtaaaggaaaagattatcttgtgttagctcaaccacccttactacttcctgcggaatcagtagatgtttcagtattgcaacctctgagtggagaattggaaaatacgaatatagaaagggaagctgaaactgttgttctgggtgatttaagtagtagtatgcaccaggatgacttggtgaatcacactgtagatgcagttgaacttgaaccaagccattctcaaactctttctcagtctcttcttttagatattaccccagaaatcaatcccttgcctaaaatagaagtatctgagtctgttgaatatgaggcaggacatataccatcaccagtgattccccaagagagttctgttgagatcgataatgaaacagaacaaaagtctgagagctttagttctatagagaaaccatctattacctatgaaacaaataaagttaatgagttaatggataatattataaaagaagatgtgaactccatgcaaattttcacaaagctgtctgaaacaatagtgccaccaataaatacagccactgtacccgacaatgaagatggggaagccaaaatgaatatagctgacacagcaaagcaaactttgatttctgttgtggattcttcttcattacctgaagtaaaagaagaagaacagtctccagaagatgcccttttgagagggttacagaggacagctacagatttttatgctgaattgcaaaattctacagatctaggatatgctaatggaaatcttgtacatggatcaaaccaaaaggagtcagtatttatgagacttaataatcgtattaaagccttagaagttaacatgtctctcagtggtcgctatctggaggagcttagccaaaggtaccgaaaacaaatggaagaaatgcaaaaggctttcaataaaacaatcgtgaaacttcagaatacttcaagaatagcagaggagcaggatcagcggcaaactgaagccatccagttgctacaggcacagctgaccaacatgacacagcttgtttcaaatttatcagcaacagtagcagaattgaaacgggaggtttcagatcgacaaagctatcttgtcatatctttggttctttgtgttgtcttgggactgatgctttgtatgcagcgttgtcgaaatacttctcaatttgatggagattatatttcaaaacttcctaaaagtaatcagtatccaagccctaaaaggtgtttctcttcctatgatgatatgaatttgaaaagaagaacttcattcccactcatgagatccaagtctctacagttaactggcaaagaagtagacccaaatgatttgtacattgtagaacccctcaagttttctccagaaaagaagaagaagcgctgcaagtacaaaattgaaaaaattgagaccataaagcctgaagaaccattgcaccccatagccaatggcgacataaaaggaagaaagccctttacgaaccagagagatttttctaatatgggagaagtttatcactcttcttataaaggtcctccatctgaaggaagctcagaaacttcatcacagtcagaagagtcctatttttgtggcatttcagcttgcacaagtctgtgcaatggacagtctcaaaagacaaaaactgagaagagggctttaaaacgaagacgatctaaagtccaagaccaaggaaaattgataaaaactctaatacagactaagtcgggatcattgccgagcctgcatgacataatcaaaggaaacaaagagatcaccgtgggaacatttggtgttacagcagtctcgggacatatctaaaattaattgaacttttcatacagaagacttttttgttgttgttctttgaagaacagtctgtagtatttgaagggtttgggggagggagaaaatattaatgggaaaggcattcagaaattatggtttctacctttttaaaaagtagatgggattgtgtcaatcttggttaatgagctacagttttacaaagctgatcacttcctataaggacaatggtagacattttataaagatgttttttcacaagattaattactgggacaaaagtaatttggaagcccagttccttaggtgggataggaatgaaagcctaaacctcttcctttagctttgttcctatttcttgcaccttcccatatttatgtgccttttgtctatttataatgccactggaagaggagggataactttttctgttatttgatttcttttataactttgttaggtttttgaagctgcaaacactacaatgctttgagggggtctgtgcctgaagctcaggagtgtggatcagacagtctaaagatcctaaaaacttgccaactggatctttgtttagcaaactcactggaaatgaacacttaatggaatttttaagtctgttctgttaggtagatggtgatgctcttgttattttcacttattcagactggattacttcttacttagttactaactcaatgaggaaaaatccctacaggatctttttttgcaaacaactgatatatgcagacaaatttttgacaaattcaccttttaaacacacttaaccatttgtgaaggttttctttagcttacattttaaacatacacaataaacactaatcctccaaactttcactgtttttattagtatgaatataaaatttgaaggtttggccaattagtacaagtctcatgatataatcactgcctgcatacatatgcacagatccagttagtgagtttgtcaagcttaatctaattggttaagtctaaagagattattattccttgatgtttgctttgtattggctacaaatgtgcagaggtaatacatatgtgatgtcgatgtctctgtctttttttttgtctttaaaaaataattggcagcaactgtatttgaataaaatgatttcttagtatgattgtacagtaatgaatgaaagtggaacatgtttctttttgaaagggagagaattgaccatttattgttgtgatgtttaagttataacttattgagcacttttagtagtgataactgtttttaaacttgcctaatacctttcttgggtattgtttgtaatgtgacttatttaacgccttttttgtttgtttaagttgctgctttaggttaacagcgtgttttagaagatttaaatttctttcctgtctgcacaattagctattcagagcaagagggcctgattttatagaagccccttgaaaagaggtccagatgagagcagagatacagtgagaaattatgtgatctgtgtgttgtgggaagagaattttcaatatgtaactacggagctgtagtgccattagaaactgtgaatttccaaataaatctgaacacttgtctttattaaaaaaaaaat

SEQ ID NO: 448945 - DNA, 2886 bp, Homo sapiens
ggaaatttttaaaacttggttttgggcctactttataacccaaaaaattcttccgaaaattttccatttgtctttgcgcccactgctttgctttaaaaaccctgacttcttaaatatttctggttatatgctagtttatatatatggaacacatgttaatttgaaaagtaatttacccaattctgttatacagtatttcacattgtagccgtgggtgaccaaaataaataaataataattcttgttggggagggttagacacggtcccagatacttcgtgttttgtttatttctaaaatttctgttccaagtttacttactcattgagattcctattaatacatttgttttggaataacttaatggttttttttagattatttgacttccatttataatgttaatagtttgtagttaatattccaaaaaaaatatattcctcttatcataggatcagcggcaaactgaagccatccagttgctacaggcacagctgaccaacatgacacagcttgtttcaaatttatcagcaacagtagcagaattgaaacgggaggtttcagatcgacaaagctatcttgtcatatctttggttctttgtgttgtcttgggactgatgctttgtatgcagcgttgtcgaaatacttctcaatttgatggagattatatttcaaaacttcctaaaagtaatcagtatccaagccctaaaaggtgtttctcttcctatgatgatatgaatttgaaaagaagaacttcattcccactcatgagatccaagtctctacagttaactggcaaagaagtagacccaaatgatttgtacattgtagaacccctcaagttttctccagaaaagaagaagaagcgctgcaagtacaaaattgaaaaaattgagaccataaagcctgaagaaccattgcaccccatagccaatggcgacataaaaggaagaaagccctttacgaaccagagagatttttctaatatgggagaagtttatcactcttcttataaaggtcctccatctgaaggaagctcagaaacttcatcacagtcagaagagtcctatttttgtggcatttcagcttgcacaagtctgtgcaatggacagtctcaaaagacaaaaactgagaagagggctttaaaacgaagacgatctaaagtccaagaccaaggaaaattgataaaaactctaatacagactaagtcgggatcattgccgagcctgcatgacataatcaaaggaaacaaagagatcaccgtgggaacatttggtgttacagcagtctcgggacatatctaaaattaattgaacttttcatacagaagacttttttgttgttgttctttgaagaacagtctgtagtatttgaagggtttgggggagggagaaaatattaatgggaaaggcattcagaaattatggtttctacctttttaaaaagtagatgggattgtgtcaatcttggttaatgagctacagttttacaaagctgatcacttcctataaggacaatggtagacattttataaagatgttttttcacaagattaattactgggacaaaagtaatttggaagcccagttccttaggtgggataggaatgaaagcctaaacctcttcctttagctttgttcctatttcttgcaccttcccatatttatgtgccttttgtctatttataatgccactggaagaggagggataactttttctgttatttgatttcttttataactttgttaggtttttgaagctgcaaacactacaatgctttgagggggtctgtgcctgaagctcaggagtgtggatcagacagtctaaagatcctaaaaacttgccaactggatctttgtttagcaaactcactggaaatgaacacttaatggaatttttaagtctgttctgttaggtagatggtgatgctcttgttattttcacttattcagactggattacttcttacttagttactaactcaatgaggaaaaatccctacaggatctttttttgcaaacaactgatatatgcagacaaatttttgacaaattcaccttttaaacacacttaaccatttgtgaaggttttctttagcttacattttaaacatacacaataaacactaatcctccaaactttcactgtttttattagtatgaatataaaatttgaaggtttggccaattagtacaagtctcatgatataatcactgcctgcatacatatgcacagatccagttagtgagtttgtcaagcttaatctaattggttaagtctaaagagattattattccttgatgtttgctttgtattggctacaaatgtgcagaggtaatacatatgtgatgtcgatgtctctgtctttttttttgtctttaaaaaataattggcagcaactgtatttgaataaaatgatttcttagtatgattgtacagtaatgaatgaaagtggaacatgtttctttttgaaagggagagaattgaccatttattgttgtgatgtttaagttataacttattgagcacttttagtagtgataactgtttttaaacttgcctaatacctttcttgggtattgtttgtaatgtgacttatttaacgccttttttgtttgtttaagttgctgctttaggttaacagcgtgttttagaagatttaaatttctttcctgtctgcacaattagctattcagagcaagagggcctgattttatagaagccccttgaaaagaggtccagatgagagcagagatacagtgagaaattatgtgatctgtgtgttgtgggaagagaattttcaatatgtaactacggagctgtagtgccattagaaactgtgaatttccaaataaatctgaacacttgtctttattaaaaaaaaaat

SEQ ID NO: 448946 - DNA, 908 bp, Homo sapiens
taagtctaaagagattattattccttgatgtttgcttgtatggctacaaatgtgcagacaaatttttgacaaattcaccttttaaacacacttaaccatttgtgaaggttttctttagcttacattttaaacatacacaataaacactaatcctccaaactttcactgtttttattagtatgaatataaaatttgaaggtttggccaattagtacaagtctcatgatataatcactgcctgcatacatatgcacagatccagttagtgagtttgtcaagcttaatctaattggttaagtctaaagagattattattccttgatgtttgctttgtattggctacaaatgtgcagaggtaatacatatgtgatgtcgatgtctctgtctttttttttgtctttaaaaaataattggcagcaactgtatttgaataaaatgatttcttagtatgattgtacagtaatgaatgaaagtggaacatgtttctttttgaaagggagagaattgaccatttattgttgtgatgtttaagttataacttattgagcacttttagtagtgataactgtttttaaacttgcctaatacctttcttgggtattgtttgtaatgtgacttatttaacgccttttttgtttgtttaagttgctgctttaggttaacagcgtgttttagaagatttaaatttctttcctgtctgcacaattagctattcagagcaagagggcctgattttatagaagccccttgaaaagaggtccagatgagagcagagatacagtgagaaattatgtgatctgtgtgttgtgggaagagaattttcaatatgtaactacggagctgtagtgccattagaaactgtgaatttccaaataaatctgaacacttgtctttattaaaaaaaaaat

SEQ ID NO: 448947 - DNA, 5496 bp, Homo sapiens
tgggcgggacctggggcgggcggagcggcgaaagcatctgctcctgcgctttgtggtctcctgcctccggcttctccgcctgcgacgtcgaagggggcgtggcctgcgcagaggctggtgggggtgcgggcgccgcgggacttgggtgacgcgtccctttccagctcagcggtgtgtgaggtgtcgcggccccgccggcgattggctgttgagaggcgagtacgcggcggccgttggtcgctggcctcacggagcaaggcccccggcgggcggggaggatatggggcggcagtggcggctgcaggaggcgggcgtggacgagccggtggctgcagcggcggcggtccccggagtcctgtgaagcgcccctgtccgcgcctctgtggggccctcagagagggctgccaggacgcgagccactgaggagccgctcagccagcgccatagcccttaggactatcggtcacattctcgcgctcctgctccggctcctccatcttggcctcggcagtggcggctgccgggaggatgtgccgccttctggcagggggaagaaggaggagaagatgaagaagcaccggcgggccttggccctggtctcctgcctctttctgtgctctctggtctggcttcccagctggcgtgtatgttgtaaagagagttcttcagcttcagcgtcatcatattactctcaagatgacaactgcgcactagaaaatgaagatgtacaattccagaaaaagaatacagagtcaaaaaagttaagtccaccggtggtggagacactccctacagttgatttgcatgaagagtcttccaatgcagttgtggacagtgaaactgttgaaaatatttccagctcatctacctcagaaatcactccaatctcaaagcttgatgaaatagaaaaatctggtactattccgatagccaaaccaagtgaaactgagcagtctgaaactgattgtgatgttggtgaggcccttgatgctagtgctccaattgaacaaccttcctttgtcagtccacctgacagccttgttggccagcatatagaaaatgtatcatcttcacatggtaaaggaaagataacaaaatcagaatttgaatcaaaagtttcagcaagtgaacagggcggtggtgatccaaaatctgcattgaatgcttcagataatttaaaaaatgagagctctgattatacaaaaccaggagacattgaccctacatcagtagcaagtcccaaagatccagaagatataccaacatttgatgaatggaagaagaaagttatggaagtagaaaaagaaaaaagtcagtcgatgcatgcatcttctaatggaggttcacatgccaccaaaaaggtccagaaaaatcgaaataattatgcctcagtagaatgtggtgccaaaattctagcagctaatccagaagccaagagcacatctgctattcttatagaaaatatggatctttacatgttgaatccttgcagcactaaaatttggtttgttattgaactttgtgaaccaattcaagtaaaacagcttgatattgcaaattatgaattattttcttctactcctaaagattttctggtttctatcagtgacagatatccaacaaataagtggattaagctgggtacttttcatggtagagatgagcggaatgtacagagtttccctttagatgaacagatgtatgcaaaatatgtcaaggttgagttgctatcacattttggatcagagcacttttgtccattaagccttataagggtatttggcactagcatggtggaagaatatgaagaaattgctgattcccagtatcactcagaacgccaggaactatttgatgaggactatgattatccactggattataatactggagaggataaatcctcaaaaaatcttcttggttctgctacaaatgccattctaaatatggtgaatattgctgctaatattctgggagcaaaaactgaagacctgacagaaggaaataaaagtatatctgagaatgccactgccacagctgcacctaaaatgcctgaatcaactcctgtttcaactcctgttccatctcctgagtatgtaaccactgaagtacacacacatgacatggagccgtcaacaccagatactccaaaagagagtcccattgtacagttagttcaagaggaggaagaggaggcaagtccatctacagtgacccttctgggcagcggtgaacaggaagatgaatcatcaccctggtttgagtcagagacacaaatattttgcagtgaactgaccacaatttgttgtatttctagtttttcagaatacatatataaatggtgttcagttagagttgctctttatcggcagcgcagccgaactgctttgagtaaaggaaaagattatcttgtgttagctcaaccacccttactacttcctgcggaatcagtagatgtttcagtattgcaacctctgagtggagaattggaaaatacgaatatagaaagggaagctgaaactgttgttctgggtgatttaagtagtagtatgcaccaggatgacttggtgaatcacactgtagatgcagttgaacttgaaccaagccattctcaaactctttctcagtctcttcttttagatattaccccagaaatcaatcccttgcctaaaatagaagtatctgagtctgttgaatatgaggcaggacatataccatcaccagtgattccccaagagagttctgttgagatcgataatgaaacagaacaaaagtctgagagctttagttctatagagaaaccatctattacctatgaaacaaataaagttaatgagttaatggataatattataaaagaagatgtgaactccatgcaaattttcacaaagctgtctgaaacaatagtgccaccaataaatacagccactgtacccgacaatgaagatggggaagccaaaatgaatatagctgacacagcaaagcaaactttgatttctgttgtggattcttcttcattacctgaagtaaaagaagaagaacagtctccagaagatgcccttttgagagggttacagaggacagctacagatttttatgctgaattgcaaaattctacagatctaggatatgctaatggaaatcttgtacatggatcaaaccaaaaggagtcagtatttatgagacttaataatcgtattaaagccttagaagttaacatgtctctcagtggtcgctatctggaggagcttagccaaaggtaccgaaaacaaatggaagaaatgcaaaaggctttcaataaaacaatcgtgaaacttcagaatacttcaagaatagcagaggagcaggatcagcggcaaactgaagccatccagttgctacaggcacagctgaccaacatgacacagcttgtttcaaatttatcagcaacagtagcagaattgaaacgggaggtttcagatcgacaaagctatcttgtcatatctttggttctttgtgttgtcttgggactgatgctttgtatgcagcgttgtcgaaatacttctcaatttgatggagattatatttcaaaacttcctaaaagtaatcagtatccaagccctaaaaggtgtttctcttcctatgatgatatgaatttgaaaagaagaacttcattcccactcatgagatccaagtctctacagttaactggcaaagaagtagacccaaatgatttgtacattgtagaacccctcaagttttctccagaaaagaagaagaagcgctgcaagtacaaaattgaaaaaattgagaccataaagcctgaagaaccattgcaccccatagccaatggcgacataaaaggaagaaagccctttacgaaccagagagatttttctaatatgggagaagtttatcactcttcttataaaggtcctccatctgaaggaagctcagaaacttcatcacagtcagaagagtcctatttttgtggcatttcagcttgcacaagtctgtgcaatggacagtctcaaaagacaaaaactgagaagagggctttaaaacgaagacgatctaaagtccaagaccaaggaaaattgataaaaactctaatacagactaagtcgggatcattgccgagcctgcatgacataatcaaaggaaacaaagagatcaccgtgggaacatttggtgttacagcagtctcgggacatatctaaaattaattgaacttttcatacagaagacttttttgttgttgttctttgaagaacagtctgtagtatttgaagggtttgggggagggagaaaatattaatgggaaaggcattcagaaattatggtttctacctttttaaaaagtagatgggattgtgtcaatcttggttaatgagctacagttttacaaagctgatcacttcctataaggacaatggtagacattttataaagatgttttttcacaagattaattactgggacaaaagtaatttggaagcccagttccttaggtgggataggaatgaaagcctaaacctcttcctttagctttgttcctatttcttgcaccttcccatatttatgtgccttttgtctatttataatgccactggaagaggagggataactttttctgttatttgatttcttttataactttgttaggtttttgaagctgcaaacactacaatgctttgagggggtctgtgcctgaagctcaggagtgtggatcagacagtctaaagatcctaaaaacttgccaactggatctttgtttagcaaactcactggaaatgaacacttaatggaatttttaagtctgttctgttaggtagatggtgatgctcttgttattttcacttattcagactggattacttcttacttagttactaactcaatgaggaaaaatccctacaggatctttttttgcaaacaactgatatatgcagacaaatttttgacaaattcaccttttaaacacacttaaccatttgtgaaggttttctttagcttacattttaaacatacacaataaacactaatcctccaaactttcactgtttttattagtatgaatataaaatttgaaggtttggccaattagtacaagtctcatgatataatcactgcctgcatacatatgcacagatccagttagtgagtttgtcaagcttaatctaattggttaagtctaaagagattattattccttgatgtttgctttgtattggctacaaatgtgcagaggtaatacatatgtgatgtcgatgtctctgtctttttttttgtctttaaaaaataattggcagcaactgtatttgaataaaatgatttcttagtatgattgtacagtaatgaatgaaagtggaaccattacaatcaacacatttttgccaatgagaaataagtttgtttactcctgtagcataaaaatccatgcttccaaatttgacgaactcttggaaagcattttctgtgtctgctagttgtggagcaatttcctgcacaatctct

SEQ ID NO: 448948 - DNA, 628 bp, Homo sapiens
ccccttttgatgaagcattttgcaaacaaatgtcataaaagtgaatttaagcaaagcattaagggggaaagcatgttctttcagtaaacatttagatacctagtatgagctagataggctcaggtaaacaaagattgaatatgaacttttatgaaaattacactctagaaggcataaaggtattagaaattctaacttgaatgtatgtcaaaaaagagatgaaagaaagagctttatgtatcttcatttgtcaggtattcattggagttttactaggtgcttacaacggtgctggatggtaagactaaaatgcttattaagaaatcaaatgaagttcttgaactggtgtattgcacattttaaatgttgtagcaatgaggggattcaaggaaatagacaataatcttgtatacaaatgaaattaattagagtcaaataaacaaggcagttttttggttttaaagtatggaaaaaaaccatcttcgtattgctttataactgttttgtaaaacagttttatcaggtgatttttgttgttgttgttatataggatgaaagagagggacctatcaatgccgaatcattgggaaaatcaggttcaaatttacctatttctccaaaagaacat

SEQ ID NO: 448949 - DNA, 5914 bp, Homo sapiens
tgggcgggacctggggcgggcggagcggcgaaagcatctgctcctgcgctttgtggtctcctgcctccggcttctccgcctgcgacgtcgaagggggcgtggcctgcgcagaggctggtgggggtgcgggcgccgcgggacttgggtgacgcgtccctttccagctcagcggtgtgtgaggtgtcgcggccccgccggcgattggctgttgagaggcgagtacgcggcggccgttggtcgctggcctcacggagcaaggcccccggcgggcggggaggatatggggcggcagtggcggctgcaggaggcgggcgtggacgagccggtggctgcagcggcggcggtccccggagtcctgtgaagcgcccctgtccgcgcctctgtggggccctcagagagggctgccaggacgcgagccactgaggagccgctcagccagcgccatagcccttaggactatcggtcacattctcgcgctcctgctccggctcctccatcttggcctcggcagtggcggctgccgggaggatgtgccgccttctggcagggggaagaaggaggagaagatgaagaagcaccggcgggccttggccctggtctcctgcctctttctgtgctctctggtctggcttcccagctggcgtgtatgttgtaaagagagttcttcagcttcagcgtcatcatattactctcaagatgacaactgcgcactagaaaatgaagatgtacaattccagaaaaaggatgaaagagagggacctatcaatgccgaatcattgggaaaatcaggttcaaatttacctatttctccaaaagaacataaattaaaagatgattctattgtggatgtacaaaatacagagtcaaaaaagttaagtccaccggtggtggagacactccctacagttgatttgcatgaagagtcttccaatgcagttgtggacagtgaaactgttgaaaatatttccagctcatctacctcagaaatcactccaatctcaaagcttgatgaaatagaaaaatctggtactattccgatagccaaaccaagtgaaactgagcagtctgaaactgattgtgatgttggtgaggcccttgatgctagtgctccaattgaacaaccttcctttgtcagtccacctgacagccttgttggccagcatatagaaaatgtatcatcttcacatggtaaaggaaagataacaaaatcagaatttgaatcaaaagtttcagcaagtgaacagggcggtggtgatccaaaatctgcattgaatgcttcagataatttaaaaaatgagagctctgattatacaaaaccaggagacattgaccctacatcagtagcaagtcccaaagatccagaagatataccaacatttgatgaatggaagaagaaagttatggaagtagaaaaagaaaaaagtcagtcgatgcatgcatcttctaatggaggttcacatgccaccaaaaaggtccagaaaaatcgaaataattatgcctcagtagaatgtggtgccaaaattctagcagctaatccagaagccaagagcacatctgctattcttatagaaaatatggatctttacatgttgaatccttgcagcactaaaatttggtttgttattgaactttgtgaaccaattcaagtaaaacagcttgatattgcaaattatgaattattttcttctactcctaaagattttctggtttctatcagtgacagatatccaacaaataagtggattaagctgggtacttttcatggtagagatgagcggaatgtacagagtttccctttagatgaacagatgtatgcaaaatatgtcaagatgttcatcaagtacataaaggttgagttgctatcacattttggatcagagcacttttgtccattaagccttataagggtatttggcactagcatggtggaagaatatgaagaaattgctgattcccagtatcactcagaacgccaggaactatttgatgaggactatgattatccactggattataatactggagaggataaatcctcaaaaaatcttcttggttctgctacaaatgccattctaaatatggtgaatattgctgctaatattctgggagcaaaaactgaagacctgacagaaggaaataaaagtatatctgagaatgccactgccacagctgcacctaaaatgcctgaatcaactcctgtttcaactcctgttccatctcctgagtatgtaaccactgaagtacacacacatgacatggagccgtcaacaccagatactccaaaagagagtcccattgtacagttagttcaagaggaggaagaggaggcaagtccatctacagtgacccttctgggcagcggtgaacaggaagatgaatcatcaccctggtttgagtcagagacacaaatattttgcagtgaactgaccacaatttgttgtatttctagtttttcagaatacatatataaatggtgttcagttagagttgctctttatcggcagcgcagccgaactgctttgagtaaaggaaaagattatcttgtgttagctcaaccacccttactacttcctgcggaatcagtagatgtttcagtattgcaacctctgagtggagaattggaaaatacgaatatagaaagggaagctgaaactgttgttctgggtgatttaagtagtagtatgcaccaggatgacttggtgaatcacactgtagatgcagttgaacttgaaccaagccattctcaaactctttctcagtctcttcttttagatattaccccagaaatcaatcccttgcctaaaatagaagtatctgagtctgttgaatatgaggcaggacatataccatcaccagtgattccccaagagagttctgttgagatcgataatgaaacagaacaaaagtctgagagctttagttctatagagaaaccatctattacctatgaaacaaataaagttaatgagttaatggataatattataaaagaagatgtgaactccatgcaaattttcacaaagctgtctgaaacaatagtgccaccaataaatacagccactgtacccgacaatgaagatggggaagccaaaatgaatatagctgacacagcaaagcaaactttgatttctgttgtggattcttcttcattacctgaagtaaaagaagaagaacagtctccagaagatgcccttttgagagggttacagaggacagctacagatttttatgctgaattgcaaaattctacagatctaggatatgctaatggaaatcttgtacatggatcaaaccaaaaggagtcagtatttatgagacttaataatcgtattaaagccttagaagttaacatgtctctcagtggtcgctatctggaggagcttagccaaaggtaccgaaaacaaatggaagaaatgcaaaaggctttcaataaaacaatcgtgaaacttcagaatacttcaagaatagcagaggagcaggatcagcggcaaactgaagccatccagttgctacaggcacagctgaccaacatgacacagcttgtttcaaatttatcagcaacagtagcagaattgaaacgggaggtttcagatcgacaaagctatcttgtcatatctttggttctttgtgttgtcttgggactgatgctttgtatgcagcgttgtcgaaatacttctcaatttgatggagattatatttcaaaacttcctaaaagtaatcagtatccaagccctaaaaggtgtttctcttcctatgatgatatgaatttgaaaagaagaacttcattcccactcatgagatccaagtctctacagttaactggcaaagaagtagacccaaatgatttgtacattgtagaacccctcaagttttctccagaaaagaagaagaagcgctgcaagtacaaaattgaaaaaattgagaccataaagcctgaagaaccattgcaccccatagccaatggcgacataaaaggaagaaagccctttacgaaccagagagatttttctaatatgggagaagtttatcactcttcttataaaggtcctccatctgaaggaagctcagaaacttcatcacagtcagaagagtcctatttttgtggcatttcagcttgcacaagtctgtgcaatggacagtctcaaaagacaaaaactgagaagagggctttaaaacgaagacgatctaaagtccaagaccaaggaaaattgataaaaactctaatacagactaagtcgggatcattgccgagcctgcatgacataatcaaaggaaacaaagagatcaccgtgggaacatttggtgttacagcagtctcgggacatatctaaaattaattgaacttttcatacagaagacttttttgttgttgttctttgaagaacagtctgtagtatttgaagggtttgggggagggagaaaatattaatgggaaaggcattcagaaattatggtttctacctttttaaaaagtagatgggattgtgtcaatcttggttaatgagctacagttttacaaagctgatcacttcctataaggacaatggtagacattttataaagatgttttttcacaagattaattactgggacaaaagtaatttggaagcccagttccttaggtgggataggaatgaaagcctaaacctcttcctttagctttgttcctatttcttgcaccttcccatatttatgtgccttttgtctatttataatgccactggaagaggagggataactttttctgttatttgatttcttttataactttgttaggtttttgaagctgcaaacactacaatgctttgagggggtctgtgcctgaagctcaggagtgtggatcagacagtctaaagatcctaaaaacttgccaactggatctttgtttagcaaactcactggaaatgaacacttaatggaatttttaagtctgttctgttaggtagatggtgatgctcttgttattttcacttattcagactggattacttcttacttagttactaactcaatgaggaaaaatccctacaggatctttttttgcaaacaactgatatatgcagacaaatttttgacaaattcaccttttaaacacacttaaccatttgtgaaggttttctttagcttacattttaaacatacacaataaacactaatcctccaaactttcactgtttttattagtatgaatataaaatttgaaggtttggccaattagtacaagtctcatgatataatcactgcctgcatacatatgcacagatccagttagtgagtttgtcaagcttaatctaattggttaagtctaaagagattattattccttgatgtttgctttgtattggctacaaatgtgcagaggtaatacatatgtgatgtcgatgtctctgtctttttttttgtctttaaaaaataattggcagcaactgtatttgaataaaatgatttcttagtatgattgtacagtaatgaatgaaagtggaacatgtttctttttgaaagggagagaattgaccatttattgttgtgatgtttaagttataacttattgagcacttttagtagtgataactgtttttaaacttgcctaatacctttcttgggtattgtttgtaatgtgacttatttaacgccttttttgtttgtttaagttgctgctttaggttaacagcgtgttttagaagatttaaatttctttcctgtctgcacaattagctattcagagcaagagggcctgattttatagaagccccttgaaaagaggtccagatgagagcagagatacagtgagaaattatgtgatctgtgtgttgtgggaagagaattttcaatatgtaactacggagctgtagtgccattagaaactgtgaatttccaaataaatctgaacacttgtctttattaaaaaaaaaat

SEQ ID NO: 448950 - DNA, 5728 bp, Homo sapiens
tgggcgggacctggggcgggcggagcggcgaaagcatctgctcctgcgctttgtggtctcctgcctccggcttctccgcctgcgacgtcgaagggggcgtggcctgcgcagaggctggtgggggtgcgggcgccgcgggacttgggtgacgcgtccctttccagctcagcggtgtgtgaggtgtcgcggccccgccggcgattggctgttgagaggcgagtacgcggcggccgttggtcgctggcctcacggagcaaggcccccggcgggcggggaggatatggggcggcagtggcggctgcaggaggcgggcgtggacgagccggtggctgcagcggcggcggtccccggagtcctgtgaagcgcccctgtccgcgcctctgtggggccctcagagagggctgccaggacgcgagccactgaggagccgctcagccagcgccatagcccttaggactatcggtcacattctcgcgctcctgctccggctcctccatcttggcctcggcagtggcggctgccgggaggatgtgccgccttctggcagggggaagaaggaggagaagatgaagaagcaccggcgggccttggccctggtctcctgcctctttctgtgctctctggtctggcttcccagctggcgtgtatgttgtaaagagagttcttcagcttcagcgtcatcatattactctcaagatgacaactgcgcactagaaaatgaagatgtacaattccagaaaaagaatacagagtcaaaaaagttaagtccaccggtggtggagacactccctacagttgatttgcatgaagagtcttccaatgcagttgtggacagtgaaactgttgaaaatatttccagctcatctacctcagaaatcactccaatctcaaagcttgatgaaatagaaaaatctggtactattccgatagccaaaccaagtgaaactgagcagtctgaaactgattgtgatgttggtgaggcccttgatgctagtgctccaattgaacaaccttcctttgtcagtccacctgacagccttgttggccagcatatagaaaatgtatcatcttcacatggtaaaggaaagataacaaaatcagaatttgaatcaaaagtttcagcaagtgaacagggcggtggtgatccaaaatctgcattgaatgcttcagataatttaaaaaatgagagctctgattatacaaaaccaggagacattgaccctacatcagtagcaagtcccaaagatccagaagatataccaacatttgatgaatggaagaagaaagttatggaagtagaaaaagaaaaaagtcagtcgatgcatgcatcttctaatggaggttcacatgccaccaaaaaggtccagaaaaatcgaaataattatgcctcagtagaatgtggtgccaaaattctagcagctaatccagaagccaagagcacatctgctattcttatagaaaatatggatctttacatgttgaatccttgcagcactaaaatttggtttgttattgaactttgtgaaccaattcaagtaaaacagcttgatattgcaaattatgaattattttcttctactcctaaagattttctggtttctatcagtgacagatatccaacaaataagtggattaagctgggtacttttcatggtagagatgagcggaatgtacagagtttccctttagatgaacagatgtatgcaaaatatgtcaaggttgagttgctatcacattttggatcagagcacttttgtccattaagccttataagggtatttggcactagcatggtggaagaatatgaagaaattgctgattcccagtatcactcagaacgccaggaactatttgatgaggactatgattatccactggattataatactggagaggataaatcctcaaaaaatcttcttggttctgctacaaatgccattctaaatatggtgaatattgctgctaatattctgggagcaaaaactgaagacctgacagaaggaaataaaagtatatctgagaatgccactgccacagctgcacctaaaatgcctgaatcaactcctgtttcaactcctgttccatctcctgagtatgtaaccactgaagtacacacacatgacatggagccgtcaacaccagatactccaaaagagagtcccattgtacagttagttcaagaggaggaagaggaggcaagtccatctacagtgacccttctgggcagcggtgaacaggaagatgaatcatcaccctggtttgagtcagagacacaaatattttgcagtgaactgaccacaatttgttgtatttctagtttttcagaatacatatataaatggtgttcagttagagttgctctttatcggcagcgcagccgaactgctttgagtaaaggaaaagattatcttgtgttagctcaaccacccttactacttcctgcggaatcagtagatgtttcagtattgcaacctctgagtggagaattggaaaatacgaatatagaaagggaagctgaaactgttgttctgggtgatttaagtagtagtatgcaccaggatgacttggtgaatcacactgtagatgcagttgaacttgaaccaagccattctcaaactctttctcagtctcttcttttagatattaccccagaaatcaatcccttgcctaaaatagaagtatctgagtctgttgaatatgaggcaggacatataccatcaccagtgattccccaagagagttctgttgagatcgataatgaaacagaacaaaagtctgagagctttagttctatagagaaaccatctattacctatgaaacaaataaagttaatgagttaatggataatattataaaagaagatgtgaactccatgcaaattttcacaaagctgtctgaaacaatagtgccaccaataaatacagccactgtacccgacaatgaagatggggaagccaaaatgaatatagctgacacagcaaagcaaactttgatttctgttgtggattcttcttcattacctgaagtaaaagaagaagaacagtctccagaagatgcccttttgagagggttacagaggacagctacagatttttatgctgaattgcaaaattctacagatctaggatatgctaatggaaatcttgtacatggatcaaaccaaaaggagtcagtatttatgagacttaataatcgtattaaagccttagaagttaacatgtctctcagtggtcgctatctggaggagcttagccaaaggtaccgaaaacaaatggaagaaatgcaaaaggctttcaataaaacaatcgtgaaacttcagaatacttcaagaatagcagaggagcaggatcagcggcaaactgaagccatccagttgctacaggcacagctgaccaacatgacacagcttgtttcaaatttatcagcaacagtagcagaattgaaacgggaggtttcagatcgacaaagctatcttgtcatatctttggttctttgtgttgtcttgggactgatgctttgtatgcagcgttgtcgaaatacttctcaatttgatggagattatatttcaaaacttcctaaaagtaatcagtatccaagccctaaaaggtgtttctcttcctatgatgatatgaatttgaaaagaagaacttcattcccactcatgagatccaagtctctacagttaactggcaaagaagtagacccaaatgatttgtacattgtagaacccctcaagttttctccagaaaagaagaagaagcgctgcaagtacaaaattgaaaaaattgagaccataaagcctgaagaaccattgcaccccatagccaatggcgacataaaaggaagaaagccctttacgaaccagagagatttttctaatatgggagaagtttatcactcttcttataaaggtcctccatctgaaggaagctcagaaacttcatcacagtcagaagagtcctatttttgtggcatttcagcttgcacaagtctgtgcaatggacagtctcaaaagacaaaaactgagaagagggctttaaaacgaagacgatctaaagtccaagaccaaggaaaattgataaaaactctaatacagactaagtcgggatcattgccgagcctgcatgacataatcaaaggaaacaaagagatcaccgtgggaacatttggtgttacagcagtctcgggacatatctaaaattaattgaacttttcatacagaagacttttttgttgttgttctttgaagaacagtctgtagtatttgaagggtttgggggagggagaaaatattaatgggaaaggcattcagaaattatggtttctacctttttatgatcacttcctataaggacaatggtagacattttataaagatgttttttcacaagattaattactgggacaaaagtaatttggaagcccagttccttaggtgggataggaatgaaagcctaaacctcttcctttagctttgttcctatttcttgcaccttcccatatttatgtgccttttgtctatttataatgccactggaagaggagggataactttttctgttatttgatttcttttataactttgttaggtttttgaagctgcaaacactacaatgctttgagggggtctgtgcctgaagctcaggagtgtggatcagacagtctaaagatcctaaaaacttgccaactggatctttgtttagcaaactcactggaaatgaacacttaatggaatttttaagtctgttctgttaggtagatggtgatgctcttgttattttcacttattcagactggattacttcttacttagttactaactcaatgaggaaaaatccctacaggatctttttttgcaaacaactgatatatgcagacaaatttttgacaaattcaccttttaaacacacttaaccatttgtgaaggttttctttagcttacattttaaacatacacaataaacactaatcctccaaactttcactgtttttattagtatgaatataaaatttgaaggtttggccaattagtacaagtctcatgatataatcactgcctgcatacatatgcacagatccagttagtgagtttgtcaagcttaatctaattggttaagtctaaagagattattattccttgatgtttgctttgtattggctacaaatgtgcagaggtaatacatatgtgatgtcgatgtctctgtctttttttttgtctttaaaaaataattggcagcaactgtatttgaataaaatgatttcttagtatgattgtacagtaatgaatgaaagtggaacatgtttctttttgaaagggagagaattgaccatttattgttgtgatgtttaagttataacttattgagcacttttagtagtgataactgtttttaaacttgcctaatacctttcttgggtattgtttgtaatgtgacttatttaacgccttttttgtttgtttaagttgctgctttaggttaacagcgtgttttagaagatttaaatttctttcctgtctgcacaattagctattcagagcaagagggcctgattttatagaagccccttgaaaagaggtccagatgagagcagagatacagtgagaaattatgtgatctgtgtgttgtgggaagagaattttcaatatgtaactacggagctgtagtgccattagaaactgtgaatttccaaataaatctgaacacttgtctttattaaaaaaaaaat

SEQ ID NO: 448951 - DNA, 4117 bp, Homo sapiens
tgggcgggacctggggcgggcggagcggcgaaagcatctgctcctgcgctttgtggtctcctgcctccggcttctccgcctgcgacgtcgaagggggcgtggcctgcgcagaggctggtgggggtgcgggcgccgcgggacttgggtgacgcgtccctttccagctcagcggtgtgtgaggtgtcgcggccccgccggcgattggctgttgagaggcgagtacgcggcggccgttggtcgctggcctcacggagcaaggcccccggcgggcggggaggatatggggcggcagtggcggctgcaggaggcgggcgtggacgagccggtggctgcagcggcggcggtccccggagtcctgtgaagcgcccctgtccgcgcctctgtggggccctcagagagggctgccaggacgcgagccactgaggagccgctcagccagcgccatagcccttaggactatcggtcacattctcgcgctcctgctccggctcctccatcttggcctcggcagtggcggctgccgggaggatgtgccgccttctggcagggggaagaaggaggagaagatgaagaagcaccggcgggccttggccctggtctcctgcctctttctgtgctctctggtctggcttcccagctggcgtgtatgttgtaaagagagttcttcagcttcagcgtcatcatattactctcaagatgacaactgcgcactagaaaatgaagatgtacaattccagaaaaagaatacagagtcaaaaaagttaagtccaccggtggtggagacactccctacagttgatttgcatgaagagtcttccaatgcagttgtggacagtgaaactgttgaaaatatttccagctcatctacctcagaaatcactccaatctcaaagcttgatgaaatagaaaaatctggtactattccgatagccaaaccaagtgaaactgagcagtctgaaactgattgtgatgttggtgaggcccttgatgctagtgctccaattgaacaaccttcctttgtcagtccacctgacagccttgttggccagcatatagaaaatgtatcatcttcacatggtaaaggaaagataacaaaatcagaatttgaatcaaaagtttcagcaagtgaacagggcggtggtgatccaaaatctgcattgaatgcttcagataatttaaaaaatgagagctctgattatacaaaaccaggagacattgaccctacatcagtagcaagtcccaaagatccagaagatataccaacatttgatgaatggaagaagaaagttatggaagtagaaaaagaaaaaagtcagtcgatgcatgcatcttctaatggaggttcacatgccaccaaaaaggtccagaaaaatcgaaataattatgcctcagtagaatgtggtgccaaaattctagcagctaatccagaagccaagagcacatctgctattcttatagaaaatatggatctttacatgttgaatccttgcagcactaaaatttggtttgttattgaactttgtgaaccaattcaagtaaaacagcttgatattgcaaattatgaattattttcttctactcctaaagattttctggtttctatcagtgacagatatccaacaaataagtggattaagctgggtacttttcatggtagagatgagcggaatgtacagagtttccctttagatgaacagatgtatgcaaaatatgtcaaggttgagttgctatcacattttggatcagagcacttttgtccattaagccttataagggtatttggcactagcatggtggaagaatatgaagaaattgctgattcccagtatcactcagaacgccaggaactatttgatgaggactatgattatccactggattataatactggagaggataaatcctcaaaaaatcttcttggttctgctacaaatgccattctaaatatggtgaatattgctgctaatattctgggagcaaaaactgaagacctgacagaaggaaataaaagtatatctgagaatgccactgccacagctgcacctaaaatgcctgaatcaactcctgtttcaactcctgttccatctcctgagtatgtaaccactgaagtacacacacatgacatggagccgtcaacaccagatactccaaaagagagtcccattgtacagttagttcaagaggaggaagaggaggcaagtccatctacagtgacccttctgggcagcggtgaacaggaagatgaatcatcaccctggtttgagtcagagacacaaatattttgcagtgaactgaccacaatttgttgtatttctagtttttcagaatacatatataaatggtgttcagttagagttgctctttatcggcagcgcagccgaactgctttgagtaaaggaaaagattatcttgtgttagctcaaccacccttactacttcctgcggaatcagtagatgtttcagtattgcaacctctgagtggagaattggaaaatacgaatatagaaagggaagctgaaactgttgttctgggtgatttaagtagtagtatgcaccaggatgacttggtgaatcacactgtagatgcagttgaacttgaaccaagccattctcaaactctttctcagtctcttcttttagatattaccccagaaatcaatcccttgcctaaaatagaagtatctgagtctgttgaatatgaggcaggacatataccatcaccagtgattccccaagagagttctgttgagatcgataatgaaacagaacaaaagtctgagagctttagttctatagagaaaccatctattacctatgaaacaaataaagttaatgagttaatggataatattataaaagaagatgtgaactccatgcaaattttcacaaagctgtctgaaacaatagtgccaccaataaatacagccactgtacccgacaatgaagatggggaagccaaaatgaatatagctgacacagcaaagcaaactttgatttctgttgtggattcttcttcattacctgaagtaaaagaagaagaacagtctccagaagatgcccttttgagagggttacagaggacagctacagatttttatgctgaattgcaaaattctacagatctaggatatgctaatggaaatcttgtacatggatcaaaccaaaaggagtcagtatttatgagacttaataatcgtattaaagccttagaagttaacatgtctctcagtggtcgctatctggaggagcttagccaaaggtaccgaaaacaaatggaagaaatgcaaaaggctttcaataaaacaatcgtgaaacttcagaatacttcaagaatagcagaggagcaggatcagcggcaaactgaagccatccagttgctacaggcacagctgaccaacatgacacagcttgtttcaaatttatcagcaacagtagcagaattgaaacgggaggtttcagatcgacaaagctatcttgtcatatctttggttctttgtgttgtcttgggactgatgctttgtatgcagcgttgtcgaaatacttctcaatttgatggagattatatttcaaaacttcctaaaagtaatcagtatccaagccctaaaaggtgtttctcttcctatgatgatatgaatttgaaaagaagaacttcattcccactcatgagatccaagtctctacagttaactggcaaagaaggtagatttctgtggatatataatatgtatatataaacatgaaactagcttctggcataaatataatgtcagtgttgtgttcatgaccatctgcaacaaaaaatggatacaagtagcctttgtctttgtgctgtgtcaagccactttatcattttcacattttatatctgtctttgttcctaaaagcccagagggtagggaggggggcttagtttaattagcagttggtagctttgtttgcacatgctcctgtttagaagtatttctttttagaaagggatgtttgagaaagttcaacagatatggaaaacctgaatgtgctcccatagcatcctgtgcttttctgcctcctcttcttatacaggtaggaccccttttgtctctagtttaggactatgaggcactttctgaacaaaaat

SEQ ID NO: 448952 - DNA, 1644 bp, Homo sapiens
tacaaattgcatcaccctcctcctctgcccagacctgggggctccaacacctttcgctaggtctggctctggcctctgagcgaaccttccgtacagtatggcggctcccgaagccccgcccctggacagagttttccgtacaacatggctgtctacagagtgcgattcccacccacttccgcctagctaccggaagtttctatttgaaacccaggcggccgacttagccggtggcacgacagttgctgcagggaatcttttaaacgagagcgagaaggactgcgggcaggaccggcgggctcctggggttcagccgtgccgcctcgttacgatgaccagtgtggttaagacagtgtatagcctgcagcccccctctgcgctgagcggcggccagccggcagacacacaaactcgggccacttctaagagtctcttacctgttaggtccaaagaagtcgatgtttccaaacagcttcattcaggaggtccagagaatgatgttacaaaaatcaccaaactgagacgagagaatgggcaaatgaaagctactgacactgccaccagaaggaatgtcagaaaaggctacaaaccactgagtaagcaaaaatcagaggaagagctcaaggacaagaaccagctgttagaagccgtcaacaagcagttgcaccagaagttgactgaaactcagggagagctgaaggacctgacccagaaggtagagctgctggagaagtttcgggacaactgtttggcaattttggagagcaagggccttgatccagctttaggcagtgagaccctggcatcacgacaagaatccactactgatcacatggactctatgttgctgttagaaactttgcaagaggagctgaagctttttaacgaaacagccaaaaagcagatggaggagttacaggccttaaaggtaaagctggagatgaaagaggaaagagtccgattcctagaacagcaaaccttatgtaacaatcaagtaaatgatttaacaacagcccttaaggaaatggagcagctattagaaatgtaagaagaagcaagtggccagatggctccctcttgggcataaaatctcagaggaagctacttaggacatcatcttggccatgatcttctgggactcaccatctccagaatgaaaacaatttctacagtagacttaaggacagtttatgctgaaatggcaattcctcatttaagcaagttttcccaaccttcaggttggtcagccctcctgagcctcacaggtggataattgaggcctacaagagaggggagcctaggagcttggattgaccttctagtcaaccacctgacttcagcacaccattacaatcgggagactaaaccaacaaccagaggatctaaaatgtcacattcagattttcaggaagaaaatcttcattacagtggagcacaaatgttccatacaagacatcattgaggagccatgctgtccccttctaacctgaaacacattctttcccatcctggttgggcttctgtacctccttattaatttatgaacctgaagttgcttgaagtgttttgggcttaataaatggggtgaaagtataggtagcagtaacacctacatgaaacaatacaccttggatcttttaatct

SEQ ID NO: 448953 - DNA, 762 bp, Homo sapiens
taagttcataccaataatacctgtcttgctgggtggttataaaagagaattatgtccagtacctaacccagtgcctggcaaaggtactcaaatcctggtggtgatattattaaagtttaaaacttatcctggcaaaagattcccttcataaattcaccccaaacttctattccagtgcccccttctccccaccccaaaacacagtcgctgatcttaccatgcctttgcaggcctcagttattcaacttccttctgacttgggaactctcaactttgactcttaagttcaaattgcaaccatcttaaaacataaagccaaaaccccacccttatcccctccagctaccacatatactatattcacagccaaatatctcaagaagctatttccttaccatttttctttctctgccaatctggcttcaaagtacacagaaacactaatgtgatgtagctacagtaggcaaatccatccaaagtagaatatagattaccagggactgagcaggaggggaggggagtttctctttgggatgatgacattctggaaatggaaagtggtggtggttgcataacattgtgcatatacctaatgccactgaattgtacactttaaaatggttgaggccgggtgcggtggctcacacctgtaatcccagcactttgggaggccaaggtgggtggattacctgaggtcaggagtttgagcggcctggccaacatggtgaaaccctgtctctactaaaaatacaaaaattagcc

SEQ ID NO: 448954 - DNA, 721 bp, Homo sapiens
cccggaattcggccattatggccgggggagagcgagattgactgcgggcaggaccgccgggctcctggggttcagccgtgccgcctcgttacgatgaccagtgtggttaagacagtgtatagcctgcagcccccctctgcgctgagcggcggccagccggcagacacacaaactcgggccacttctaagagtctcttacctgttaggtccaaagaagtcgatgtttccaaacagcttcattcaggaggtccagagaatgatgttacaaaaatcaccaaactgagacgagagaatgggcaaatgaaagctactgacactgccaccagaaggaatgtcagaaaaggctacaaaccactgagtaagcaaaaatcagaggaagagctcaaggacaagaaccagctgttagaagccgtcaacaagcagttgcaccagaagttgactgaaactcagggagagctgaaggacctgacccagaaggtagagctgctggagaagtttcgggacaactgtttggcaattttggagagcaagggccttgatccagctttaggcagtgagaccctggcatcacgacaagaatccactactgatcacatggactctatgttgctgttagaaactttgcaagaggagctgaagctttttaacgaaacagccaatagagtccgtttcctagaacgcataccttatttacaattaatgaatgttttacaacacgctt

SEQ ID NO: 448955 - DNA, 1696 bp, Homo sapiens
tacaaattgcatcaccctcctcctctgcccagacctgggggctccaacacctttcgctaggtctggctctggcctctgagcgaaccttccgtacagtatggcggctcccgaagccccgcccctggacagagttttccgtacaacatggctgtctacagagtgcgattcccacccacttccgcctagctaccggaagtttctatttgaaacccaggcggccgacttagccggtggcacgacagttgctgcagggaatcttttaaacgagagcgagaaggactgcgggcaggaccggcgggctcctggggttcagccgtgccgcctcgttacgatgaccagtgtggttaagacagtgtatagcctgcagcccccctctgcgctgagcggcggccagccggcagacacacaaactcgggccacttctaagagtctcttacctgttaggtccaaagaagtcgatgtttccaaacagcttcattcaggaggtccagagaatgatgttacaaaaatcaccaaactgagacgagagaatgggcaaatgaaagctactgacactgccaccagaaggaatgtcagaaaaggctacaaaccactgagtaagcaaaaatcagaggaagagctcaaggacaagaaccagctgttagaagccgtcaacaagcagttgcaccagaagttgactgaaactcagggagagctgaaggacctgacccagaaggtagagctgctggagaagtttcgggacaactgtttggcaattttggagagcaagggccttgatccagctttaggcagtgagaccctggcatcacgacaagaatccactactgatcacatggactctatgttgctgttagaaactttgcaagaggagctgaagctttttaacgaaacagccaaaaagcagatggaggagttacaggccttaaaggtaaagctggagatgaaagaggaaagagtccgattcctagaacagcaaaccttatgtaacaatcaagtaaatgatttaacaacagcccttaaggaaatggagcagctattagaaatgtaagaagaagcaagtggccagatggctccctcttgggcataaaatctcagaggaagctacttaggacatcatcttggccatgatcttctgggactcaccatctccagaatgaaaacaatttctacagtagacttaaggacagtttatgctgaaatggcaattcctcatttaagcaagttttcccaaccttcaggttggtcagccctcctgagcctcacaggtggataattgaggcctacaagagaggggagcctaggagcttggattgaccttctagtcaaccacctgacttcagcacaccattacaatcgggagactaaaccaacaaccagaggatctaaaatgtcacattcagattttcaggaagaaaatcttcattacagtggagcacaaatgttccatacaagacatcattgaggagccatgctgtccccttctaacctgaaacacattctttcccatcctggttgggcttctgtacctccttattaatttatgaacctgaagttgcttgaagtgttttgggcttaataaatggggtgaaagtataggtagcagtaacacctacatgaaacaatacaccttggatcttttaatctaaattacttttcttttttaagtctacttttaaaataaatacttctgtaaata

SEQ ID NO: 448956 - DNA, 2049 bp, Homo sapiens
tacaaattgcatcaccctcctcctctgcccagacctgggggctccaacacctttcgctaggtctggctctggcctctgagcgaaccttccgtacagtatggcggctcccgaagccccgcccctggacagagttttccgtacaacatggctgtctacagagtgcgattcccacccacttccgcctagctaccggaagtttctatttgaaacccaggcggccgacttagccggtggcacgacagttgctgcagggaatcttttaaacgagagcgagaaggactgcgggcaggaccggcgggctcctggggttcagccgtgccgcctcgttacgatgaccagtgtggttaagacagtgtatagcctgcagcccccctctgcgctgagcggcggccagccggcagacacacaaactcgggccacttctaagagtctcttacctgttaggtccaaagaagtcgatgtttccaaacagcttcattcaggaggtccagagaatgatgttacaaaaatcaccaaactgagacgagagaatgggcaaatgaaagctactgacactgccaccagaaggaatgtcagaaaaggctacaaaccactgagtaagcaaaaatcagaggaagagctcaaggacaagaaccagctgttagaagccgtcaacaagcagttgcaccagaagttgactgaaactcagggagagctgaaggacctgacccagaaggtagagctgctggagaagtttcgggacaactgtttggcaattttggagagcaagggccttgatccagctttaggcagtgagaccctggcatcacgacaagaatccactactgatcacatggactctatgttgctgttagaaactttgcaagaggagctgaagctttttaacgaaacagccaaaaagcagatggaggagttacaggccttaaaggtaaagctggagatgaaagaggaaagagtccgattcctagaacagcaaaccttatgtaacaatcaagtaaatgatttaacaacagcccttaaggaaatggagcagctattagaaatgtaagaagaagcaagtggccagatggctccctcttgggcataaaatctcagaggaagctacttaggacatcatcttggccatgatcttctgggactcaccatctccagaatgaaaacaatttctacagtagacttaaggacagtttatgctgaaatggcaattcctcatttaagcaagttttcccaaccttcaggttggtcagccctcctgagcctcacaggtggataattgaggcctacaagagaggggagcctaggagcttggattgaccttctagtcaaccacctgacttcagcacaccattacaatcgggagactaaaccaacaaccagaggatctaaaatgtcacattcagattttcaggaagaaaatcttcattacagtggagcacaaatgttccatacaagacatcattgaggagccatgctgtccccttctaacctgaaacacattctttcccatcctggttgggcttctgtacctccttattaatttatgaacctgaagttgcttgaagtgttttgggcttaataaatggggtgaaagtataggtagcagtaacacctacatgaaacaatacaccttggatcttttaatctaaattacttttcttttttaagtctacttttaaaataaatacttctgtaaatattctgactgtaacattgaggaatgaaaatagccttttaacctagatatgtcagttgatcattattgaactaatttagttaacaagtccaagatattctgacttaatctagaatatttttctgctactctttaagagtcctgtggctagtccctctgtctcccaagagcattggctagtctcctgagggtgttgcccatttgtagcagtggtttcaccaggtctgtggccacttgctgcccatgttttccctgcacttccagcctgggtgacaagagcaagactccatctctaaataaataaataaataaataaataaataaataaataaaatagttgaaatggcaaactttaa

SEQ ID NO: 448957 - DNA, 1656 bp, Homo sapiens
tacaaattgcatcaccctcctcctctgcccagacctgggggctccaacacctttcgctaggtctggctctggcctctgagcgaaccttccgtacagtatggcggctcccgaagccccgcccctggacagagttttccgtacaacatggctgtctacagagtgcgattcccacccacttccgcctagctaccggaagtttctatttgaaacccaggcggccgacttagccggtggcacgacagttgctgcagggaatcttttaaacgagagcgagaaggactgcgggcaggaccggcgggctcctggggttcagccgtgccgcctcgttacgatgaccagtgtggttaagacagtgtatagcctgcagcccccctctgcgctgagcggcggccagccggcagacacacaaactcgggccacttctaagagtctcttacctgttaggtccaaagaagtcgatgtttccaaacagcttcattcaggaggtccagagaatgatgttacaaaaatcaccaaactgagacgagagaatgggcaaatgaaagctactgacactgccaccagaaggaatgtcagaaaaggctacaaaccactgagtaagcaaaaatcagaggaagagctcaaggacaagaaccagctgttagaagccgtcaacaagcagttgcaccagaagttgactgaaactcagggagagctgaaggacctgacccagaaggtagagctgctggagaagtttcgggacaactgtttggcaattttggagagcaagggccttgatccagctttaggcagtgagaccctggcatcacgacaagaatccactactgatcacatggactctatgttgctgttagaaactttgcaagaggagctgaagctttttaacgaaacagccaaaaagcagatggaggagttacaggccttaaaggtaaagctggagatgaaagaggaaagagtccgattcctagaacagcaaaccttatgtaacaatcaagtaaatgatttaacaacagcccttaaggaaatggagcagctattagaaatgtaagaagaagcaagtggccagatggctccctcttgggcataaaatctcagaggaagctacttaggacatcatcttggccatgatcttctgggactcaccatctccagaatgaaaacaatttctacagtagacttaaggacagtttatgctgaaatggcaattcctcatttaagcaagttttcccaaccttcaggttggtcagccctcctgagcctcacagttggattgaccttctagtcaaccacctgacttcagcacaccattacaatcgggagactaaaccaacaaccagaggatctaaaatgtcacattcagattttcaggaagaaaatcttcattacagtggagcacaaatgttccatacaagacatcattgaggagccatgctgtccccttctaacctgaaacacattctttcccatcctggttgggcttctgtacctccttattaatttatgaacctgaagttgcttgaagtgttttgggcttaataaatggggtgaaagtataggtagcagtaacacctacatgaaacaatacaccttggatcttttaatctaaattacttttcttttttaagtctacttttaaaataaatacttctgtaaata

SEQ ID NO: 448958 - DNA, 2361 bp, Homo sapiens
tacaaattgcatcaccctcctcctctgcccagacctgggggctccaacacctttcgctaggtctggctctggcctctgagcgaaccttccgtacagtatggcggctcccgaagccccgcccctggacagagttttccgtacaacatggctgtctacagagtgcgattcccacccacttccgcctagctaccggaagtttctatttgaaacccaggcggccgacttagccggtggcacgacagttgctgcagggaatcttttaaacgagagcgagaaggactgcgggcaggaccggcgggctcctggggttcagccgtgccgcctcgttacgatgaccagtgtggttaagacagtgtatagcctgcagcccccctctgcgctgagcggcggccagccggcagacacacaaactcgggccacttctaagagtctcttacctgttaggtccaaagaagtcgatgtttccaaacagcttcattcaggaggtccagagaatgatgttacaaaaatcaccaaactgagacgagagaatgggcaaatgaaagctactgacactgccaccagaaggaatgtcagaaaaggctacaaaccactgagtaagcaaaaatcagaggaagagctcaaggacaagaaccagctgttagaagccgtcaacaagcagttgcaccagaagttgactgaaactcagggagagctgaaggacctgacccagaaggtagagctgctggagaagtttcgggacaactgtttggcaattttggagagcaagggccttgatccagctttaggcagtgagaccctggcatcacgacaagaatccactactgatcacatggactctatgttgctgttagaaactttgcaagaggagctgaagctttttaacgaaacagccaaaaagcagatggaggagttacagattgcttggatgaatcatgggatattgcaccaaatgtagaggatttcatcgttccagtttagatacaggagtctagtccctctctactactagagggacaattcctaaaaccagtgcatagaaataaaatctaaaatagaagatacagtctgttgatactccagtggtcttccttagtggaataggagcataatgttctgatgtgggaattgtgtttcctgttagtcaagagttttgtgtatgtgttgttttcttttggaatgtctttccatgcaggccttaaaggtaaagctggagatgaaagaggaaagagtccgattcctagaacagcaaaccttatgtaacaatcaagtaaatgatttaacaacagcccttaaggaaatggagcagctattagaaatgtaagaagaagcaagtggccagatggctccctcttgggcataaaatctcagaggaagctacttaggacatcatcttggccatgatcttctgggactcaccatctccagaatgaaaacaatttctacagtagacttaaggacagtttatgctgaaatggcaattcctcatttaagcaagttttcccaaccttcaggttggtcagccctcctgagcctcacaggtggataattgaggcctacaagagaggggagcctaggagcttggattgaccttctagtcaaccacctgacttcagcacaccattacaatcgggagactaaaccaacaaccagaggatctaaaatgtcacattcagattttcaggaagaaaatcttcattacagtggagcacaaatgttccatacaagacatcattgaggagccatgctgtccccttctaacctgaaacacattctttcccatcctggttgggcttctgtacctccttattaatttatgaacctgaagttgcttgaagtgttttgggcttaataaatggggtgaaagtataggtagcagtaacacctacatgaaacaatacaccttggatcttttaatctaaattacttttcttttttaagtctacttttaaaataaatacttctgtaaatattctgactgtaacattgaggaatgaaaatagccttttaacctagatatgtcagttgatcattattgaactaatttagttaacaagtccaagatattctgacttaatctagaatatttttctgctactctttaagagtcctgtggctagtccctctgtctcccaagagcattggctagtctcctgagggtgttgcccatttgtagcagtggtttcaccaggtctgtggccacttgctgcccatgttttccctgcactctttttttttttttttttctgagacacagtctcacttccagcctgggtgacaagagcaagactccatctctaaataaataaataaataaataaataaataaataaataaaatagttgaaatggcaaactttaa

SEQ ID NO: 448959 - DNA, 1759 bp, Homo sapiens
tacaaattgcatcaccctcctcctctgcccagacctgggggctccaacacctttcgctaggtctggctctggcctctgagcgaaccttccgtacagtatggcggctcccgaagccccgcccctggacagagttttccgtacaacatggctgtctacagagtgcgattcccacccacttccgcctagctaccggaagtttctatttgaaacccaggcggccgacttagccggtggcacgacagttgctgcagggaatcttttaaacgagagcgagaaggactgcgggcaggaccggcgggctcctggggttcagccgtgccgcctcgttacgatgaccagtgtggttaagacagtgtatagcctgcagcccccctctgcgctgagcggcggccagccggcagaacacctgaatggtaatcctggcaccagcggggactaggagttgctggaagaactggagccagacacacaaactcgggccacttctaagagtctcttacctgttaggtccaaagaagtcgatgtttccaaacagcttcattcaggaggtccagagaatgatgttacaaaaatcaccaaactgagacgagagaatgggcaaatgaaagctactgacactgccaccagaaggaatgtcagaaaaggctacaaaccactgagtaagcaaaaatcagaggaagagctcaaggacaagaaccagctgttagaagccgtcaacaagcagttgcaccagaagttgactgaaactcagggagagctgaaggacctgacccagaaggtagagctgctggagaagtttcgggacaactgtttggcaattttggagagcaagggccttgatccagctttaggcagtgagaccctggcatcacgacaagaatccactactgatcacatggactctatgttgctgttagaaactttgcaagaggagctgaagctttttaacgaaacagccaaaaagcagatggaggagttacaggccttaaaggtaaagctggagatgaaagaggaaagagtccgattcctagaacagcaaaccttatgtaacaatcaagtaaatgatttaacaacagcccttaaggaaatggagcagctattagaaatgtaagaagaagcaagtggccagatggctccctcttgggcataaaatctcagaggaagctacttaggacatcatcttggccatgatcttctgggactcaccatctccagaatgaaaacaatttctacagtagacttaaggacagtttatgctgaaatggcaattcctcatttaagcaagttttcccaaccttcaggttggtcagccctcctgagcctcacaggtggataattgaggcctacaagagaggggagcctaggagcttggattgaccttctagtcaaccacctgacttcagcacaccattacaatcgggagactaaaccaacaaccagaggatctaaaatgtcacattcagattttcaggaagaaaatcttcattacagtggagcacaaatgttccatacaagacatcattgaggagccatgctgtccccttctaacctgaaacacattctttcccatcctggttgggcttctgtacctccttattaatttatgaacctgaagttgcttgaagtgttttgggcttaataaatggggtgaaagtataggtagcagtaacacctacatgaaacaatacaccttggatcttttaatctaaattacttttcttttttaagtctacttttaaaataaatacttctgtaaata

SEQ ID NO: 448960 - DNA, 1634 bp, Homo sapiens
tacaaattgcatcaccctcctcctctgcccagacctgggggctccaacacctttcgctaggtctggctctggcctctgagcgaaccttccgtacagtatggcggctcccgaagccccgcccctggacagagttttccgtacaacatggctgtctacagagtgcgattcccacccacttccgcctagctaccggaagtttctatttgaaacccaggcggccgacttagccggtggcacgacagttgctgcagggaatcttttaaacgagagcgagaaggactgcgggcaggaccggcgggctcctggggttcagccgtgccgcctcgttacgatgaccagtgtggttaagacagtgtatagcctgcagcccccctctgcgctgagcggcggccagccggcagacacacaaactcgggccacttctaagagtctcttacctgttaggtccaaagaagtcgatgtttccaaacagcttcattcaggaggtccagagaatgatgttacaaaaatcaccaaactgagacgagagaatgggcaaatgaaagctactgacactgccaccagaaggaatgtcagaaaaggctacaaaccactgagtaagcaaaaatcagaggaagagctcaaggacaagaaccagctgttagaagccgtcaacaagcagttgcaccagaagttgactgaaactcagggagagctgaaggacctgacccagaaggtagagctgctggagaagtttcgggacaactgtttggcaattttggagagcaagggccttgatccagttgctgttagaaactttgcaagaggagctgaagctttttaacgaaacagccaaaaagcagatggaggagttacaggccttaaaggtaaagctggagatgaaagaggaaagagtccgattcctagaacagcaaaccttatgtaacaatcaagtaaatgatttaacaacagcccttaaggaaatggagcagctattagaaatgtaagaagaagcaagtggccagatggctccctcttgggcataaaatctcagaggaagctacttaggacatcatcttggccatgatcttctgggactcaccatctccagaatgaaaacaatttctacagtagacttaaggacagtttatgctgaaatggcaattcctcatttaagcaagttttcccaaccttcaggttggtcagccctcctgagcctcacaggtggataattgaggcctacaagagaggggagcctaggagcttggattgaccttctagtcaaccacctgacttcagcacaccattacaatcgggagactaaaccaacaaccagaggatctaaaatgtcacattcagattttcaggaagaaaatcttcattacagtggagcacaaatgttccatacaagacatcattgaggagccatgctgtccccttctaacctgaaacacattctttcccatcctggttgggcttctgtacctccttattaatttatgaacctgaagttgcttgaagtgttttgggcttaataaatggggtgaaagtataggtagcagtaacacctacatgaaacaatacaccttggatcttttaatctaaattacttttcttttttaagtctacttttaaaataaatacttctgtaaata

SEQ ID NO: 448961 - DNA, 1706 bp, Homo sapiens
ctgatctgtctgtgctgtgctccaatagggagagctgaaggacctgacccagaaggtagagctgctggagaagtttcgggacaactgtttggcaattttggagagcaagggccttgatccagctttaggcagtgagaccctggcatcacgacaagaatccactactgatcacatggactctatggtgagggcatgggtgtgaaagggcgcaagggctgagtgactgtggggctctgtaaatctaagaaggtctctgctatatattccataaactccaagaaacagcctttgattatctgtgatgctagaaaagagaaatgggatgtgtactcaaaatagcatattttacttgaaaggtagctttgtgcttacaaatataagtgagtctgaattgaaaatttaaaacacataataggtaaacctgtagagagagctttctcgttcttctgttctatactttatcaaatttctctcctgactcctttgttgagaactgtgtggaaaggatgttagccatcatctaatgcaagtctggttttatatgaagatttgtttactacattgtgctttcctcttagttgctgttagaaactttgcaagaggagctgaagctttttaacgaaacagccaaaaagcagatggaggagttacagattgcttggatgaatcatgggatattgcaccaaatgtagaggatttcatcgttccagtttagatacaggagtctagtccctctctactactagagggacaattcctaaaaccagtgcatagaaataaaatctaaaatagaagatacagtctgttgatactccagtggtcttccttagtggaataggagcataatgttctgatgtgggaattgtgtttcctgttagtcaagagttttgtgtatgtgttgttttcttttggaatgtctttccatgcaggccttaaaggtaaagctggagatgaaagaggaaagagtccgattcctagaacagcaaaccttatgtaacaatcaagtaaatgatttaacaacagcccttaaggaaatggagcagctattagaaatgtaagaagaagcaagtggccagatggctccctcttgggcataaaatctcagaggaagctacttaggacatcatcttggccatgatcttctgggactcaccatctccagaatgaaaacaatttctacagtagacttaaggacagtttatgctgaaatggcaattcctcatttaagcaagttttcccaaccttcaggttggtcagccctcctgagcctcacaggtggataattgaggcctacaagagaggggagcctaggagcttggattgaccttctagtcaaccacctgacttcagcacaccattacaatcgggagactaaaccaacaaccagaggatctaaaatgtcacattcagattttcaggaagaaaatcttcattacagtggagcacaaatgttccatacaagacatcattgaggagccatgctgtccccttctaacctgaaacacattctttcccatcctggttgggcttctgtacctccttattaatttatgaacctgaagttgcttgaagtgttttgggcttaataaatggggtgaaagtataggtagcagtaacacctacatgaaacaatacaccttggatcttttaatctaaattacttttcttttttaagtctacttttaaaataaatacttctgtaaata

SEQ ID NO: 448962 - DNA, 650 bp, Homo sapiens
aactttgactcttaagttcaaattgcaaccatcttaaaacataaagccaaaaccccacccttatcccctccagctaccacatatactatattcacagccaaatatctcaagaagctatttccttaccatttttctttctctgccaatctggcttcaaagtacacagaaacactaatgtgatgtagctacagtaggcaaatccatccaaagtagaatatagattaccagggactgagcaggaggggaggggagtttctctttgggatgatgacattctggaaatggaaagtggtggtggttgcataacattgtgcatatacctaatgccactgaattgtacactttaaaatggttgaggccgggtgcggtggctcacacctgtaatcccagcactttgggaggccaaggtgggtggattacctgaggtcaggagtttgagcggcctggccaacatggtgaaaccctgtctctactaaaaatacaaaaattagccggttgtggtggcgggtgcctatagtcgcagctacttgggtggctgaggcaggagaatcgcttgaacccgggaggcggaggttgcagtgagccaagatcgtgccactgcactccagcctgggtgacaagagcaagactccatctctaaataaataaat

SEQ ID NO: 448963 - DNA, 687 bp, Homo sapiens
gagaaggactgcgggcaggaccggcgggctcctgggttcggctctcccggggcgagggactgggctggatgggaggaaggacggaatgagctgggaaaggaggattttctcttttccaaccccgagccggggcctgtcgggtcgcgctatccccgggccctccactctctcgggcccagtggcccagcgctgggtaacattcatcctgtaccttccagggttcagccgtgccgcctcgttacgatgaccagtgtggttaagacagtgtatagcctgcagcccccctctgcgctgagcggcggccagccggcaggtgagggtccaagccacgcccggggcactgcggcctggccggggatggtctcgggagtgtggagatcgaatgggtggcgcgggcacggggaagggcgtcccgtcggccctgaaaacctgtgagccccctataaccaggctatgtaggtttatgatgggagttaagggaaggaccatgtggtaggattttagacgtgctctgcacttttctgcccgcatgtgtactgtattcatcagttagattcaagttgttggttattgtacaatgttattcccattaagctaggaatccccttctaatcggttatcgtcttatttccagacttgggctatcttgagggattgggtttgttttcagggaggaaagaggagaat

SEQ ID NO: 448964 - DNA, 867 bp, Homo sapiens
tacaaattgcatcaccctcctcctctgcccagacctgggggctccaacacctttcgctaggtctggctctggcctctgagcgaaccttccgtacagtatggcggctcccgaagccccgcccctggacagagttttccgtacaacatggctgtctacagagtgcgattcccacccacttccgcctagctaccggaagtttctatttgaaacccaggcggccgacttagccggtggcacgacagttgctgcagggaatcttttaaacgagagcgagaaggactgcgggcaggaccggcgggctcctggggttcagccgtgccgcctcgttacgatgaccagtgtggttaagacagtgtatagcctgcagcccccctctgcgctgagcggcggccagccggcagaacacctgaatggtaatcctggcaccagcggggactaggagttgctggaagaactggagccaggtctctcagctgctgtgtctttcccttagatgcggtgcccctgagtcagtgggcagtgactagctctctcagccaagttggaagtgttcatctctttgatttctatctctgtcccagctttatgatcatatgtaactggaacagtttcaaatttttaggctgcctcccaggatttttgttttgattttgagcatgggctggataagtaatatatgcacatgtgaaaaaaaaaaaggtggaaaaccatatacaatgataaacaagtttccttcccttccttgacaccagccatccagttcctctcccagtgtctcccatttttaagagacagctttgttaaatcctactgaatttttcctacagtgcaatcctagattttagcaaatacaaattattggaacca

SEQ ID NO: 448965 - DNA, 2085 bp, Homo sapiens
tacaaattgcatcaccctcctcctctgcccagacctgggggctccaacacctttcgctaggtctggctctggcctctgagcgaaccttccgtacagtatggcggctcccgaagccccgcccctggacagagttttccgtacaacatggctgtctacagagtgcgattcccacccacttccgcctagctaccggaagtttctatttgaaacccaggcggccgacttagccggtggcacgacagttgctgcagggaatcttttaaacgagagcgagaaggactgcgggcaggaccggcgggctcctggggttcagccgtgccgcctcgttacgatgaccagtgtggttaagacagtgtatagcctgcagcccccctctgcgctgagcggcggccagccggcagacacacaaactcgggccacttctaagagtctcttacctgttaggtccaaagaagtcgatgtttccaaacagcttcattcaggaggtccagagaatgatgttacaaaaatcaccaaactgagacgagagaatgggcaaatgaaagctactgacactgccaccagaaggaatgtcagaaaaggctacaaaccactgagtaagcaaaaatcagaggaagagctcaaggacaagaaccagctgttagaagccgtcaacaagcagttgcaccagaagttgactgaaactcagggagagctgaaggacctgacccagaaggtagagctgctggagaagtttcgggacaactgtttggcaattttggagagcaagggccttgatccagctttaggcagtgagaccctggcatcacgacaagaatccactactgatcacatggactctatgttgctgttagaaactttgcaagaggagctgaagctttttaacgaaacagccaaaaagcagatggaggagttacaggccttaaaggtaaagctggagatgaaagaggaaagagtccgattcctagaacagcaaaccttatgtaacaatcaagtaaatgatttaacaacagcccttaaggaaatggagcagctattagaaatgtaagaagaagcaagtggccagatggctccctcttgggcataaaatctcagaggaagctacttaggacatcatcttggccatgatcttctgggactcaccatctccagaatgaaaacaatttctacagtagacttaaggacagtttatgctgaaatggcaattcctcatttaagcaagttttcccaaccttcaggttggtcagccctcctgagcctcacaggtggataattgaggcctacaagagaggggagcctaggagcttggattgaccttctagtcaaccacctgacttcagcacaccattacaatcgggagactaaaccaacaaccagaggatctaaaatgtcacattcagattttcaggaagaaaatcttcattacagtggagcacaaatgttccatacaagacatcattgaggagccatgctgtccccttctaacctgaaacacattctttcccatcctggttgggcttctgtacctccttattaatttatgaacctgaagttgcttgaagtgttttgggcttaataaatggggtgaaagtataggtagcagtaacacctacatgaaacaatacaccttggatcttttaatctaaattacttttcttttttaagtctacttttaaaataaatacttctgtaaatattctgactgtaacattgaggaatgaaaatagccttttaacctagatatgtcagttgatcattattgaactaatttagttaacaagtccaagatattctgacttaatctagaatatttttctgctactctttaagagtcctgtggctagtccctctgtctcccaagagcattggctagtctcctgagggtgttgcccatttgtagcagtggtttcaccaggtctgtggccacttgctgcccatgttttccctgcactctttttttttttttttttctgagacacagtctcacttccagcctgggtgacaagagcaagactccatctctaaataaataaataaataaataaataaataaataaataaaatagttgaaatggcaaactttaa

SEQ ID NO: 448966 - DNA, 1978 bp, Homo sapiens
tacaaattgcatcaccctcctcctctgcccagacctgggggctccaacacctttcgctaggtctggctctggcctctgagcgaaccttccgtacagtatggcggctcccgaagccccgcccctggacagagttttccgtacaacatggctgtctacagagtgcgattcccacccacttccgcctagctaccggaagtttctatttgaaacccaggcggccgacttagccggtggcacgacagttgctgcagggaatcttttaaacgagagcgagaaggactgcgggcaggaccggcgggctcctggggttcagccgtgccgcctcgttacgatgaccagtgtggttaagacagtgtatagcctgcagcccccctctgcgctgagcggcggccagccggcagacacacaaactcgggccacttctaagagtctcttacctgttaggtccaaagaagtcgatgtttccaaacagcttcattcaggaggtccagagaatgatgttacaaaaatcaccaaactgagacgagagaatgggcaaatgaaagctactgacactgccaccagaaggaatgtcagaaaaggctacaaaccactgagtaagcaaaaatcagaggaagagctcaaggacaagaaccagctgttagaagccgtcaacaagcagttgcaccagaagttgactgaaactcagggagagctgaaggacctgacccagaaggtagagctgctggagaagtttcgggacaactgtttggcaattttggagagcaagggccttgatccagctttaggcagtgagaccctggcatcacgacaagaatccactactgatcacatggactctatgttgctgttagaaactttgcaagaggagctgaagctttttaacgaaacagccaaaaagcagatggaggagttacaggccttaaaggtaaagctggagatgaaagaggaaagagtccgattcctagaacagcaaaccttatgtaacaatcaagtaaatgatttaacaacagcccttaaggaaatggagcagctattagaaatgtaagaagaagcaagtggccagatggctccctcttgggcataaaatctcagaggaagctacttaggacatcatcttggccatgatcttctgggactcaccatctccagaatgaaaacaatttctacagtagacttaaggacagtttatgctgaaatggcaattcctcatttaagcaagttttcccaaccttcaggttggtcagccctcctgagcctcacaggtggataattgaggcctacaagagaggggagcctaggagcttggattgaccttctagtcaaccacctgacttcagcacaccattacaatcgggagactaaaccaacaaccagaggatctaaaatgtcacattcagattttcaggaagaaaatcttcattacagtggagcacaaatgttccatacaagacatcattgaggagccatgctgtccccttctaacctgaaacacattctttcccatcctggttgggcttctgtacctccttattaatttatgaacctgaagttgcttgaaaaaaaaaaaaaaaaaaaaaaaaaaaaaaaaagggggggggggcctaaaaagttatctccccgggggggccacagtttcggggttccccggtttttgttggtccaaggggggccccatagggggggggtttaaatagcccaaggaccgggcgccgccgttttaacacccgctcgcggccgggggaaacgcggctacgctgtggggcgaccgttggggaagggaacccttatacctcggtggtggggtcgggacaccttgttggcgccaaactttcccttagggaaaatttaaacgcctcaaggcgtaactatttactacctttcacgcgtgctttcccggtgtttacccttcctgtgcagtagtgctgcctggctggaaaagtttgcgtccgggagattgctctgtgacacttttgtg

SEQ ID NO: 448967 - DNA, 1972 bp, Homo sapiens
tacaaattgcatcaccctcctcctctgcccagacctgggggctccaacacctttcgctaggtctggctctggcctctgagcgaaccttccgtacagtatggcggctcccgaagccccgcccctggacagagttttccgtacaacatggctgtctacagagtgcgattcccacccacttccgcctagctaccggaagtttctatttgaaacccaggcggccgacttagccggtggcacgacagttgctgcagggaatcttttaaacgagagcgagaaggactgcgggcaggaccggcgggctcctggggttcagccgtgccgcctcgttacgatgaccagtgtggttaagacagtgtatagcctgcagcccccctctgcgctgagcggcggccagccggcagacacacaaactcgggccacttctaagagtctcttacctgttaggtccaaagaagtcgatgtttccaaacagcttcattcaggaggtccagagaatgatgttacaaaaatcaccaaactgagacgagagaatgggcaaatgaaagctactgacactgccaccagaaggaatgtcagaaaaggctacaaaccactgagtaagcaaaaatcagaggaagagctcaaggacaagaaccagctgttagaagccgtcaacaagcagttgcaccagaagttgactgaaactcagggagagctgaaggacctgacccagaaggtagagctgctggagaagtttcgggacaactgtttggcaattttggagagcaagggccttgatccagctttaggcagtgagaccctggcatcacgacaagaatccactactgatcacatggactctatgttgctgttagaaactttgcaagaggagctgaagctttttaacgaaacagccaaaaagcagatggaggagttacagattgcttggatgaatcatgggatattgcaccaaatgtagaggatttcatcgttccagtttagatacaggagtctagtccctctctactactagagggacaattcctaaaaccagtgcatagaaataaaatctaaaatagaagatacagtctgttgatactccagtggtcttccttagtggaataggagcataatgttctgatgtgggaattgtgtttcctgttagtcaagagttttgtgtatgtgttgttttcttttggaatgtctttccatgcaggccttaaaggtaaagctggagatgaaagaggaaagagtccgattcctagaacagcaaaccttatgtaacaatcaagtaaatgatttaacaacagcccttaaggaaatggagcagctattagaaatgtaagaagaagcaagtggccagatggctccctcttgggcataaaatctcagaggaagctacttaggacatcatcttggccatgatcttctgggactcaccatctccagaatgaaaacaatttctacagtagacttaaggacagtttatgctgaaatggcaattcctcatttaagcaagttttcccaaccttcaggttggtcagccctcctgagcctcacaggtggataattgaggcctacaagagaggggagcctaggagcttggattgaccttctagtcaaccacctgacttcagcacaccattacaatcgggagactaaaccaacaaccagaggatctaaaatgtcacattcagattttcaggaagaaaatcttcattacagtggagcacaaatgttccatacaagacatcattgaggagccatgctgtccccttctaacctgaaacacattctttcccatcctggttgggcttctgtacctccttattaatttatgaacctgaagttgcttgaagtgttttgggcttaataaatggggtgaaagtataggtagcagtaacacctacatgaaacaatacaccttggatcttttaatctaaattacttttcttttttaagtctacttttaaaataaatacttctgtaaata

SEQ ID NO: 448968 - DNA, 1822 bp, Homo sapiens
tacaaattgcatcaccctcctcctctgcccagacctgggggctccaacacctttcgctaggtctggctctggcctctgagcgaaccttccgtacagtatggcggctcccgaagccccgcccctggacagagttttccgtacaacatggctgtctacagagtgcgattcccacccacttccgcctagctaccggaagtttctatttgaaacccaggcggccgacttagccggtggcacgacagttgctgcagggaatcttttaaacgagagcgagaaggactgcgggcaggaccggcgggctcctggggttcagccgtgccgcctcgttacgatgaccagtgtggttaagacagtgtatagcctgcagcccccctctgcgctgagcggcggccagccggcagacacacaaactcgggccacttctaagagtctcttacctgttaggtccaaagaagtcgatgtttccaaacagcttcattcaggaggtccagagaatgatgttacaaaaatcaccaaactgagacgagagaatgggcaaatgaaagctactgacactgccaccagaaggaatgtcagaaaaggacggagttttgctcttgttgccacccaggctggagtgcaatggcgcaatctcagctcaccacaacctccgcctcctgggttcaagcgattatcctgcctcagcctcccaaatacctgggattacagctacaaaccactgagtaagcaaaaatcagaggaagagctcaaggacaagaaccagctgttagaagccgtcaacaagcagttgcaccagaagttgactgaaactcagggagagctgaaggacctgacccagaaggtagagctgctggagaagtttcgggacaactgtttggcaattttggagagcaagggccttgatccagctttaggcagtgagaccctggcatcacgacaagaatccactactgatcacatggactctatgttgctgttagaaactttgcaagaggagctgaagctttttaacgaaacagccaaaaagcagatggaggagttacaggccttaaaggtaaagctggagatgaaagaggaaagagtccgattcctagaacagcaaaccttatgtaacaatcaagtaaatgatttaacaacagcccttaaggaaatggagcagctattagaaatgtaagaagaagcaagtggccagatggctccctcttgggcataaaatctcagaggaagctacttaggacatcatcttggccatgatcttctgggactcaccatctccagaatgaaaacaatttctacagtagacttaaggacagtttatgctgaaatggcaattcctcatttaagcaagttttcccaaccttcaggttggtcagccctcctgagcctcacaggtggataattgaggcctacaagagaggggagcctaggagcttggattgaccttctagtcaaccacctgacttcagcacaccattacaatcgggagactaaaccaacaaccagaggatctaaaatgtcacattcagattttcaggaagaaaatcttcattacagtggagcacaaatgttccatacaagacatcattgaggagccatgctgtccccttctaacctgaaacacattctttcccatcctggttgggcttctgtacctccttattaatttatgaacctgaagttgcttgaagtgttttgggcttaataaatggggtgaaagtataggtagcagtaacacctacatgaaacaatacaccttggatcttttaatctaaattacttttcttttttaagtctacttttaaaataaatacttctgtaaata

SEQ ID NO: 448969 - DNA, 1515 bp, Homo sapiens
tacaaattgcatcaccctcctcctctgcccagacctgggggctccaacacctttcgctaggtctggctctggcctctgagcgaaccttccgtacagtatggcggctcccgaagccccgcccctggacagagttttccgtacaacatggctgtctacagagtgcgattcccacccacttccgcctagctaccggaagtttctatttgaaacccaggcggccgacttagccggtggcacgacagttgctgcagggaatcttttaaacgagagcgagaaggactgcgggcaggaccggcgggctcctggggttcagccgtgccgcctcgttacgatgaccagtgtggttaagacagtgtatagcctgcagcccccctctgcgctgagcggcggccagccggcagctacaaaccactgagtaagcaaaaatcagaggaagagctcaaggacaagaaccagctgttagaagccgtcaacaagcagttgcaccagaagttgactgaaactcagggagagctgaaggacctgacccagaaggtagagctgctggagaagtttcgggacaactgtttggcaattttggagagcaagggccttgatccagctttaggcagtgagaccctggcatcacgacaagaatccactactgatcacatggactctatgttgctgttagaaactttgcaagaggagctgaagctttttaacgaaacagccaaaaagcagatggaggagttacaggccttaaaggtaaagctggagatgaaagaggaaagagtccgattcctagaacagcaaaccttatgtaacaatcaagtaaatgatttaacaacagcccttaaggaaatggagcagctattagaaatgtaagaagaagcaagtggccagatggctccctcttgggcataaaatctcagaggaagctacttaggacatcatcttggccatgatcttctgggactcaccatctccagaatgaaaacaatttctacagtagacttaaggacagtttatgctgaaatggcaattcctcatttaagcaagttttcccaaccttcaggttggtcagccctcctgagcctcacaggtggataattgaggcctacaagagaggggagcctaggagcttggattgaccttctagtcaaccacctgacttcagcacaccattacaatcgggagactaaaccaacaaccagaggatctaaaatgtcacattcagattttcaggaagaaaatcttcattacagtggagcacaaatgttccatacaagacatcattgaggagccatgctgtccccttctaacctgaaacacattctttcccatcctggttgggcttctgtacctccttattaatttatgaacctgaagttgcttgaagtgttttgggcttaataaatggggtgaaagtataggtagcagtaacacctacatgaaacaatacaccttggatcttttaatctaaattacttttcttttttaagtctacttttaaaataaatacttctgtaaata

SEQ ID NO: 448970 - DNA, 1060 bp, Homo sapiens
aaaaaacgctagaaatacacccccattcgcgagttataatagagaaagaggacgccaggttgtctaccttcataacaacaatatctctgtagttggatcaagtgacttctgcccacctggacacaacaccaaaaaggcttcttattcgggtgtgagtcttttcagcaacccggtccagtactgggagatacagccatccaccttcagatgtgtctacgtgcgctctgccattcaactcggaaactataagtaattctcaagaaagccctcatttttataacctggcaaaatcttgttaatgtcattgctaaaaaataaataaaagctagatactggaaacctaactgcaatgtggatgttttacccacatgacttattatgcataaagccaaatttccagtttaagtaattgcctacaataaaaagaaattttgcctgccattttcagaatcatcttttgaagctttctgttgatgttaactgagctactagagatattcttatttcactaaatgtaaaatttggagtaaatatatatgtcaatatttagtaaagcttttcttttttaatttccaggaaaaaataaaaagagtatgagtcttctgtaattcattgagcagttagctcatttgagataaagtcaaatgccaaacactagctctgtattaatccccatcattactggtaaagcctcatttgaatgtgtgaattcaatacaggctatgtaaaatttttactaatgtcattattttgaaaaaataaatttaaaaatacattcaaaatactattgtatacaagcttaattgttaatattccctaaacacaattttatgaagggagaagacattggtttgttgacaataacagtacatcttttcaagttctcagctatttcttctacctctccctatcttacatttgagtatggtaacttatgtcatctatgttgaatgtaagcttataaagcacaaagcatacatttcctgactggtctagagaactgatgtttcaatttacccctctgctaaataaatattaaaactatcatgtgacttcatgt

SEQ ID NO: 448971 - DNA, 780 bp, Homo sapiens
aaaaaacgctagaaatacacccccattcgcgagttataatagagaaagaggacgccaggttgtctaccttcataacaacaatatctctgtagttggatcaagtgacttctgcccacctggacacaacaccaaaaaggcttcttattcgggtgtgagtcttttcagcaacccggtccagtactgggagatacagccatccaccttcagatgtgtctacgtgcgctctgccattcaactcggaaactataagtaattctcaagaaagccctcatttttataacctggcaaaatcttgttaatgtcattgctaaaaaataaataaaagctagatactggaaacctaactgcaatgtggatgttttacccacatgacttattatgcataaagccaaatttccagtttaagtaattgcctacaataaaaagaaattttgcctgccattttcagaatcatcttttgaagctttctgttgatgttaactgagctactagagatattcttatttcactaaatgtaaaatttggagtaaatatatatgtcaatatttagtaaagcttttcttttttaatttccaggaaaaaataaaaagagtatgagtcttctgtaattcattgagcagttagctcatttgagataaagtcaaatgccaaacactagctctgtattaatccccatcattactggtaaagcctcatttgaatgtgtgaattcaatacaggctatgtaaaatttttactaatgtcattattttgaaaaaataaatttaaaaatacattcaa

SEQ ID NO: 448972 - DNA, 479 bp, Homo sapiens
taacctggggaccttataatatacagctagcctgaaaggactgaataatttggctaagttgggattgagtttcaacagcatctctgctgttgacaatggctctctggccaacacgcctcatctgagggagcttcacttggacaacaacaagcttaccagagtacctggtgggctggcagagcataagtacatccaggttgtctaccttcataacaacaatatctctgtagttggatcaagtgacttctgcccacctggacacaacaccaaaaaggcttcttattcgggtgtgagtcttttcagcaacccggtccagtactgggagatacagccatccaccttcagatgtgtctacgtgcgctctgccattcaactcggaaactataagtaattctcaagaaagccctcatttttataacctggcaaaatcttgttaatgtcattgctaaaaaataaataaaagctagatactggaaacc

SEQ ID NO: 448973 - DNA, 2151 bp, Homo sapiens
ttagattatgacataaatcttgtaaaaacctgtcagttattttcatctatgagagaagaggagcccaaactctcgcccacctgttcttaaccagaaaacccactgactttgaaaatctcacctctgccacccatctacttgcattcgtctttggcagacctcaagataaatatgggttaatgcctgcatgatgcctctgaattcaggaattgcagggaaaactcggggctttgtgccagtctctaagttggcaactttggctgaacaaatgagtagtggcttcagtgtccttgcgtacacattctgtggattgatttaatggagttgtcagcatgatcatcatcttctagccaggggcatagttgccaaggccatttacctctttctaagaagaaacagaattatgtgtatatatgagagaaagaaacaagaatgcgtgaatgaggatgaagaaacatttaccccatgtactcaagacatttcagttttaaaagtcactttcctattagacttcttgaaaaagattctcacatagcctctatgtaatcagacaaatgacatttgatttcaagagcagaggggtaaacatcctctgctaatcgacaggtagcaggtgtcagaggaggcataatattaatagcgccaccttctgttgggtcagtggagatgggtgaggagcagcacagagcagcagggatcatcacatgcagccaaacttggcctctgaagggggaaggtagtgggaataggtggtgagagaactcacatttttctcttgtcctggttttatatttcggagggaaaggattatttggccccattaagaattaagaggctgggtgcggtggctcacgtctgtaatcccagcaccttgggaggcccaggcaggcagatcacctgaggtcgggagttcgagaccagcgtgaccaacgtggagaaacccccgtctctactaaaaatacaaaaaattagctgggcatggtggtgcatgcctgtgattccagtttgcctccagctatgtgttttattggcgggattactttgaggaccagccccttctgtatcccccaggctttgacggaagagtcgtggtgtatcccagcaaccagactttaaaggactacctcagctggcgacaagcagattgtcacatcaataatctttataatacagttttctgggcacttatacaacaatctggactaacaccagtacaagcccaagggagattacagggaactcttgcagcagacaagaatgagattttgttttctgaattcaacatcaactataataatgagccgccgatgtataggaaagggactgtgttgatatggcagaaggtggatgaagtgatgacaaaagaaattaagctgccaacagaaatggaaggaaaaaagatggcagtgacccggaccaggacaaagccagtgcccttgcactgcgatatcatcggggatgctttctggaaggaacatccagagattctagatgaagacagctgacccttttgcgcttcagttctggtgtgcttaaccatgcaagccctcccacctcccagggctccttgccttaggtggctgtagcatccctaccacccaggacactggtgtgaatgacacaactcaagttgggaggggaacagggaaggaagggatggatgggggtggtgtatcttattctgtttaagcagaacaccttgtttgcggtgttggaacatggttcctttggcagaagtgctttttttttaatcgcagtactatttttataaagcaagaactattccatgccttggagaatgaatcaattttttaactgtgctatggagtagaagcaggaggttttcaacctagtcacagagcagcacctaccccctcctcctttccacacctgcaaactcttttacttgggctgaatatttagtgtaattacatctcagctttgagggctcctgtggcaaattcccggattaaaaggttccctggttgtgaaaatacatgagataaatcatgaaggccactatcatcctccttctgcttgcacaagtttcctgggctggaccgtttcaacagaactcaggaggcggaagttgcggtgagccaagattgtgccattgcactccagcctgggcaacgagcgaaactacatctc

SEQ ID NO: 448974 - DNA, 332 bp, Homo sapiens
gctgaaacagatactacagtgactagtaatatctgtttcagcaagcaacctatattactagtcactgtagtatctgtttctgcaagccacctatactacagtgactagtaatatcctaaaatttcctctaaaagccttgcacttattacatttgtagaaactgggcaccaatccgctgaagagctcaggaattgaaaatggggctttccagggaatgaagaagctctcctacatccgcattgctgataccaatatcaccagcattcctcaaggtgatagaagattctccaaaacattttgaaaaatttaaattcaaaggctttaattaaaaa

SEQ ID NO: 448975 - DNA, 846 bp, Homo sapiens
aaggaataataagacacgccctgaaggagtacatcgtctagtgagggacagaccaagcacgcaaaacaaattgcaatataatgtgataagttctttaaaagaggtaagagcaacgtgctttgggagcagagaagagggagaaagcagcatcttgcctggatgagccaggggacacagaagagaagcccactatctcatttaatctttacaactctcttgcaaggttccctggttgtgaaaatacatgagataaatcatgaaggccactatcatcctccttctgcttgcacaagtttcctgggctggaccgtttcaacagagaggcttatttgactttatgctagaagatgaggcttctgggataggcccagaagttcctgatgaccgcgacttcgagccctccctaggcccagtgtgccccttccgctgtcaatgccatcttcgagtggtccagtgttctgatttgggtctggacaaagtgccaaaggatcttccccctgacacaactctgctagacctgcaaaacaacaaaataaccgaaatcaaagatggagactttaagaacctgaagaaccttcacgcattgattcttgtcaacaataaaattagcaaagttagtcctggagcatttacacctttggtgaagttggaacgactttatctgtccaagaatcagctgaaggaattgccagaaaaaatgcccaaaactcttcaggatataagagcattttgaaccagaagcgggaaccccaaaaaccctatgtacttaaaagtccccgccataggatggcggtggaccaggtggaacagagtcccttttaagaaatggaattaacgtaacgggga

SEQ ID NO: 448976 - DNA, 3896 bp, Homo sapiens
ttagattatgacataaatcttgtaaaaacctgtcagttattttcatctatgagagaagaggagcccaaactctcgcccacctgttcttaaccagaaaacccactgactttgaaaatctcacctctgccacccatctacttgcattcgtctttggcagacctcaagataaatatgggttaatgcctgcatgatgcctctgaattcaggaattgcagggaaaactcggggctttgtgccagtctctaagttggcaactttggctgaacaaatgagtagtggcttcagtgtccttgcgtacacattctgtggattgatttaatggagttgtcagcatgatcatcatcttctagccaggggcatagttgccaaggccatttacctctttctaagaagaaacagaattatgtgtatatatgagagaaagaaacaagaatgcgtgaatgaggatgaagaaacatttaccccatgtactcaagacatttcagttttaaaagtcactttcctattagacttcttgaaaaagattctcacatagcctctatgtaatcagacaaatgacatttgatttcaagagcagaggggtaaacatcctctgctaatcgacaggtagcaggtgtcagaggaggcataatattaatagcgccaccttctgttgggtcagtggagatgggtgaggagcagcacagagcagcagggatcatcacatgcagccaaacttggcctctgaagggggaaggtagtgggaataggtggtgagagaactcacatttttctcttgtcctggttttatatttcggagggaaaggattatttggccccattaagaattaagaggctgggtgcggtggctcacgtctgtaatcccagcaccttgggaggcccaggcaggcagatcacctgaggtcgggagttcgagaccagcgtgaccaacgtggagaaacccccgtctctactaaaaatacaaaaaattagctgggcatggtggtgcatgcctgtgattccagtttgcctccagctatgtgttttattggcgggattactttgaggaccagccccttctgtatcccccaggctttgacggaagagtcgtggtgtatcccagcaaccagactttaaaggactacctcagctggcgacaagcagattgtcacatcaataatctttataatacagttttctgggcacttatacaacaatctggactaacaccagtacaagcccaagggagattacagggaactcttgcagcagacaagaatgagattttgttttctgaattcaacatcaactataataatgagccgccgatgtataggaaagggactgtgttgatatggcagaaggtggatgaagtgatgacaaaagaaattaagctgccaacagaaatggaaggaaaaaagatggcagtgacccggaccaggacaaagccagtgcccttgcactgcgatatcatcggggatgctttctggaaggaacatccagagattctagatgaagacagctgacccttttgcgcttcagttctggtgtgcttaaccatgcaagccctcccacctcccagggctccttgccttaggtggctgtagcatccctaccacccaggacactggtgtgaatgacacaactcaagttgggaggggaacagggaaggaagggatggatgggggtggtgtatcttattctgtttaagcagaacaccttgtttgcggtgttggaacatggttcctttggcagaagtgctttttttttaatcgcagtactatttttataaagcaagaactattccatgccttggagaatgaatcaattttttaactgtgctatggagtagaagcaggaggttttcaacctagtcacagagcagcacctaccccctcctcctttccacacctgcaaactcttttacttgggctgaatatttagtgtaattacatctcagctttgagggctcctgtggcaaattcccggattaaaaggttccctggttgtgaaaatacatgagataaatcatgaaggccactatcatcctccttctgcttgcacaagtttcctgggctggaccgtttcaacagagaggcttatttgactttatgctagaagatgaggcttctgggataggcccagaagttcctgatgaccgcgacttcgagccctccctaggcccagtgtgccccttccgctgtcaatgccatcttcgagtggtccagtgttctgatttgggtctggacaaagtgccaaaggatcttccccctgacacaactctgctagacctgcaaaacaacaaaataaccgaaatcaaagatggagactttaagaacctgaagaaccttcacgcattgattcttgtcaacaataaaattagcaaagttagtcctggagcatttacacctttggtgaagttggaacgactttatctgtccaagaatcagctgaaggaattgccagaaaaaatgcccaaaactcttcaggagctgcgtgcccatgagaatgagatcaccaaagtgcgaaaagttactttcaatggactgaaccagatgattgtcatagaactgggcaccaatccgctgaagagctcaggaattgaaaatggggctttccagggaatgaagaagctctcctacatccgcattgctgataccaatatcaccagcattcctcaaggtcttcctccttcccttacggaattacatcttgatggcaacaaaatcagcagagttgatgcagctagcctgaaaggactgaataatttggctaagttgggattgagtttcaacagcatctctgctgttgacaatggctctctggccaacacgcctcatctgagggagcttcacttggacaacaacaagcttaccagagtacctggtgggctggcagagcataagtacatccaggttgtctaccttcataacaacaatatctctgtagttggatcaagtgacttctgcccacctggacacaacaccaaaaaggcttcttattcgggtgtgagtcttttcagcaacccggtccagtactgggagatacagccatccaccttcagatgtgtctacgtgcgctctgccattcaactcggaaactataagtaattctcaagaaagccctcatttttataacctggcaaaatcttgttaatgtcattgctaaaaaataaataaaagctagatactggaaacctaactgcaatgtggatgttttacccacatgacttattatgcataaagccaaatttccagtttaagtaattgcctacaataaaaagaaattttgcctgccattttcagaatcatcttttgaagctttctgttgatgttaactgagctactagagatattcttatttcactaaatgtaaaatttggagtaaatatatatgtcaatatttagtaaagcttttcttttttaatttccaggaaaaaataaaaagagtatgagtcttctgtaattcattgagcagttagctcatttgagataaagtcaaatgccaaacactagctctgtattaatccccatcattactggtaaagcctcatttgaatgtgtgaattcaatacaggctatgtaaaatttttactaatgtcattattttgaaaaaataaatttaaaaatacattcaaaatactattgtatacaagcttaattgttaatattccctaaacacaattttatgaagggagaagacattggtttgttgacaataacagtacatcttttcaagttctcagctatttcttctacctctccctatcttacatttgagtatggtaacttatgtcatctatgttgaatgtaagcttataaagcacaaagcatacatttcctgactggtctagagaactgatgtttcaatttacccctctgctaaataaatattaaaactatcatgtgacttcatgt

SEQ ID NO: 448977 - DNA, 3682 bp, Homo sapiens
  misc_feature (3628)..(3628): n is a, c, g, or t
  misc_feature (3639)..(3639): n is a, c, g, or t
  misc_feature (3643)..(3644): n is a, c, g, or t
  misc_feature (3647)..(3647): n is a, c, g, or t
  misc_feature (3656)..(3656): n is a, c, g, or t
  misc_feature (3659)..(3660): n is a, c, g, or t
  misc_feature (3662)..(3662): n is a, c, g, or t
  misc_feature (3668)..(3668): n is a, c, g, or t
ttagattatgacataaatcttgtaaaaacctgtcagttattttcatctatgagagaagaggagcccaaactctcgcccacctgttcttaaccagaaaacccactgactttgaaaatctcacctctgccacccatctacttgcattcgtctttggcagacctcaagataaatatgggttaatgcctgcatgatgcctctgaattcaggaattgcagggaaaactcggggctttgtgccagtctctaagttggcaactttggctgaacaaatgagtagtggcttcagtgtccttgcgtacacattctgtggattgatttaatggagttgtcagcatgatcatcatcttctagccaggggcatagttgccaaggccatttacctctttctaagaagaaacagaattatgtgtatatatgagagaaagaaacaagaatgcgtgaatgaggatgaagaaacatttaccccatgtactcaagacatttcagttttaaaagtcactttcctattagacttcttgaaaaagattctcacatagcctctatgtaatcagacaaatgacatttgatttcaagagcagaggggtaaacatcctctgctaatcgacaggtagcaggtgtcagaggaggcataatattaatagcgccaccttctgttgggtcagtggagatgggtgaggagcagcacagagcagcagggatcatcacatgcagccaaacttggcctctgaagggggaaggtagtgggaataggtggtgagagaactcacatttttctcttgtcctggttttatatttcggagggaaaggattatttggccccattaagaattaagaggctgggtgcggtggctcacgtctgtaatcccagcaccttgggaggcccaggcaggcagatcacctgaggtcgggagttcgagaccagcgtgaccaacgtggagaaacccccgtctctactaaaaatacaaaaaattagctgggcatggtggtgcatgcctgtgattccagtttgcctccagctatgtgttttattggcgggattactttgaggaccagccccttctgtatcccccaggctttgacggaagagtcgtggtgtatcccagcaaccagactttaaaggactacctcagctggcgacaagcagattgtcacatcaataatctttataatacagttttctgggcacttatacaacaatctggactaacaccagtacaagcccaagggagattacagggaactcttgcagcagacaagaatgagattttgttttctgaattcaacatcaactataataatgagccgccgatgtataggaaagggactgtgttgatatggcagaaggtggatgaagtgatgacaaaagaaattaagctgccaacagaaatggaaggaaaaaagatggcagtgacccggaccaggacaaagccagtgcccttgcactgcgatatcatcggggatgctttctggaaggaacatccagagattctagatgaagacagctgacccttttgcgcttcagttctggtgtgcttaaccatgcaagccctcccacctcccagggctccttgccttaggtggctgtagcatccctaccacccaggacactggtgtgaatgacacaactcaagttgggaggggaacagggaaggaagggatggatgggggtggtgtatcttattctgtttaagcagaacaccttgtttgcggtgttggaacatggttcctttggcagaagtgctttttttttaatcgcagtactatttttataaagcaagaactattccatgccttggagaatgaatcaattttttaactgtgctatggagtagaagcaggaggttttcaacctagtcacagagcagcacctaccccctcctcctttccacacctgcaaactcttttacttgggctgaatatttagtgtaattacatctcagctttgagggctcctgtggcaaattcccggattaaaaggttccctggttgtgaaaatacatgagataaatcatgaaggccactatcatcctccttctgcttgcacaagtttcctgggctggaccgtttcaacagagaggcttatttgactttatgctagaagatgaggcttctgggataggcccagaagttcctgatgaccgcgacttcgagccctccctaggcccagtgtgccccttccgctgtcaatgccatcttcgagtggtccagtgttctgatttgggtctggacaaagtgccaaaggatcttccccctgacacaactctgctagacctgcaaaacaacaaaataaccgaaatcaaagatggagactttaagaacctgaagaaccttcacgcattgattcttgtcaacaataaaattagcaaagttagtcctggagcatttacacctttggtgaagttggaacgactttatctgtccaagaatcagctgaaggaattgccagaaaaaatgcccaaaactcttcaggagctgcgtgcccatgagaatgagatcaccaaagtgcgaaaagttactttcaatggactgaaccagatgattgtcatagaactgggcaccaatccgctgaagagctcaggaattgaaaatggggctttccagggaatgaagaagctctcctacatccgcattgctgataccaatatcaccagcattcctcaaggtcttcctccttcccttacggaattacatcttgatggcaacaaaatcagcagagttgatgcagctagcctgaaaggactgaataatttggctaagttgggattgagtttcaacagcatctctgctgttgacaatggctctctggccaacacgcctcatctgagggagcttcacttggacaacaacaagcttaccagagtacctggtgggctggcagagcataagtacatccaggttgtctaccttcataacaacaatatctctgtagttggatcaagtgacttctgcccacctggacacaacaccaaaaaggcttcttattcgggtgtgagtcttttcagcaacccggtccagtactgggagatacagccatccaccttcagatgtgtctacgtgcgctctgccattcaactcggaaactataagtaattctcaagaaagccctcatttttataacctggcaaaatcttgttaatgtcattgctaaaaaataaataaaagctagatactggaaacctaactgcaatgtggatgttttacccacatgacttattatgcataaagccaaatttccagtttaagtaattgcctacaataaaaagaaattttgcctgccattttcagaatcatcttttgaagctttctgttgatgttaactgagctactagagatattcttatttcactaaatgtaaaatttggagtaaatatatatgtcaatatttagtaaagcttttcttttttaatttccaggaaaaaataaaaagagtatgagtcttctgtaattcattgagcagttagctcatttgagataaagtcaaatgccaaacactagctctgtattaatccccatcattactggtaaagcctcatttgaatgtgtgaattcaatacaggctatgtaaaatttttactaatgtcattattttgaaaaaataaatttaaaaatacattcaaaaaaaaaaaaantggcctccttnggcnncangggggagcnttnncnccgttncctttagtgagggg

SEQ ID NO: 448978 - DNA, 3975 bp, Homo sapiens
ttagattatgacataaatcttgtaaaaacctgtcagttattttcatctatgagagaagaggagcccaaactctcgcccacctgttcttaaccagaaaacccactgactttgaaaatctcacctctgccacccatctacttgcattcgtctttggcagacctcaagataaatatgggttaatgcctgcatgatgcctctgaattcaggaattgcagggaaaactcggggctttgtgccagtctctaagttggcaactttggctgaacaaatgagtagtggcttcagtgtccttgcgtacacattctgtggattgatttaatggagttgtcagcatgatcatcatcttctagccaggggcatagttgccaaggccatttacctctttctaagaagaaacagaattatgtgtatatatgagagaaagaaacaagaatgcgtgaatgaggatgaagaaacatttaccccatgtactcaagacatttcagttttaaaagtcactttcctattagacttcttgaaaaagattctcacatagcctctatgtaatcagacaaatgacatttgatttcaagagcagaggggtaaacatcctctgctaatcgacaggtagcaggtgtcagaggaggcataatattaatagcgccaccttctgttgggtcagtggagatgggtgaggagcagcacagagcagcagggatcatcacatgcagccaaacttggcctctgaagggggaaggtagtgggaataggtggtgagagaactcacatttttctcttgtcctggttttatatttcggagggaaaggattatttggccccattaagaattaagaggctgggtgcggtggctcacgtctgtaatcccagcaccttgggaggcccaggcaggcagatcacctgaggtcgggagttcgagaccagcgtgaccaacgtggagaaacccccgtctctactaaaaatacaaaaaattagctgggcatggtggtgcatgcctgtgattccagtttgcctccagctatgtgttttattggcgggattactttgaggaccagccccttctgtatcccccaggctttgacggaagagtcgtggtgtatcccagcaaccagactttaaaggactacctcagctggcgacaagcagattgtcacatcaataatctttataatacagttttctgggcacttatacaacaatctggactaacaccagtacaagcccaagggagattacagggaactcttgcagcagacaagaatgagattttgttttctgaattcaacatcaactataataatgagccgccgatgtataggaaagggactgtgttgatatggcagaaggtggatgaagtgatgacaaaagaaattaagctgccaacagaaatggaaggaaaaaagatggcagtgacccggaccaggacaaagccagtgcccttgcactgcgatatcatcggggatgctttctggaaggaacatccagagattctagatgaagacagctgacccttttgcgcttcagttctggtgtgcttaaccatgcaagccctcccacctcccagggctccttgccttaggtggctgtagcatccctaccacccaggacactggtgtgaatgacacaactcaagttgggaggggaacagggaaggaagggatggatgggggtggtgtatcttattctgtttaagcagaacaccttgtttgcggtgttggaacatggttcctttggcagaagtgctttttttttaatcgcagtactatttttataaagcaagaactattccatgccttggagaatgaatcaattttttaactgtgctatggagtagaagcaggaggttttcaacctagtcacagagcagcacctaccccctcctcctttccacacctgcaaactcttttacttgggctgaatatttagtgtaattacatctcagctttgagggctcctgtggcaaattcccggattaaaagatggttttcaataattgtcctgaactctgctacagactaataaaacttcggtcaagttgcgagcaaaagggattatttggttccctggttgtgaaaatacatgagataaatcatgaaggccactatcatcctccttctgcttgcacaagtttcctgggctggaccgtttcaacagagaggcttatttgactttatgctagaagatgaggcttctgggataggcccagaagttcctgatgaccgcgacttcgagccctccctaggcccagtgtgccccttccgctgtcaatgccatcttcgagtggtccagtgttctgatttgggtctggacaaagtgccaaaggatcttccccctgacacaactctgctagacctgcaaaacaacaaaataaccgaaatcaaagatggagactttaagaacctgaagaaccttcacgcattgattcttgtcaacaataaaattagcaaagttagtcctggagcatttacacctttggtgaagttggaacgactttatctgtccaagaatcagctgaaggaattgccagaaaaaatgcccaaaactcttcaggagctgcgtgcccatgagaatgagatcaccaaagtgcgaaaagttactttcaatggactgaaccagatgattgtcatagaactgggcaccaatccgctgaagagctcaggaattgaaaatggggctttccagggaatgaagaagctctcctacatccgcattgctgataccaatatcaccagcattcctcaaggtcttcctccttcccttacggaattacatcttgatggcaacaaaatcagcagagttgatgcagctagcctgaaaggactgaataatttggctaagttgggattgagtttcaacagcatctctgctgttgacaatggctctctggccaacacgcctcatctgagggagcttcacttggacaacaacaagcttaccagagtacctggtgggctggcagagcataagtacatccaggttgtctaccttcataacaacaatatctctgtagttggatcaagtgacttctgcccacctggacacaacaccaaaaaggcttcttattcgggtgtgagtcttttcagcaacccggtccagtactgggagatacagccatccaccttcagatgtgtctacgtgcgctctgccattcaactcggaaactataagtaattctcaagaaagccctcatttttataacctggcaaaatcttgttaatgtcattgctaaaaaataaataaaagctagatactggaaacctaactgcaatgtggatgttttacccacatgacttattatgcataaagccaaatttccagtttaagtaattgcctacaataaaaagaaattttgcctgccattttcagaatcatcttttgaagctttctgttgatgttaactgagctactagagatattcttatttcactaaatgtaaaatttggagtaaatatatatgtcaatatttagtaaagcttttcttttttaatttccaggaaaaaataaaaagagtatgagtcttctgtaattcattgagcagttagctcatttgagataaagtcaaatgccaaacactagctctgtattaatccccatcattactggtaaagcctcatttgaatgtgtgaattcaatacaggctatgtaaaatttttactaatgtcattattttgaaaaaataaatttaaaaatacattcaaaatactattgtatacaagcttaattgttaatattccctaaacacaattttatgaagggagaagacattggtttgttgacaataacagtacatcttttcaagttctcagctatttcttctacctctccctatcttacatttgagtatggtaacttatgtcatctatgttgaatgtaagcttataaagcacaaagcatacatttcctgactggtctagagaactgatgtttcaatttacccctctgctaaataaatattaaaactatcatgtgacttcatgt

SEQ ID NO: 448979 - DNA, 2066 bp, Homo sapiens
actaggcagagccgtggaaccgacgccaggtcgctgatggaccacgccgtccgtcgcgccgtccgaccgctcagcgtccgccgtcgccatgggagtgcaggcggaaaccatctccccaggagacggtgagaggggcgcattaaaaggttccctggttgtgaaaatacatgagataaatcatgaaggccactatcatcctccttctgcttgcacaagtttcctgggctggaccgtttcaacagagaggcttatttgactttatgctagaagatgaggcttctgggataggcccagaagttcctgatgaccgcgacttcgagccctccctaggcccagtgtgccccttccgctgtcaatgccatcttcgagtggtccagtgttctgatttgggtctggacaaagtgccaaaggatcttccccctgacacaactctgctagacctgcaaaacaacaaaataaccgaaatcaaagatggagactttaagaacctgaagaaccttcacgcattgattcttgtcaacaataaaattagcaaagttagtcctggagcatttacacctttggtgaagttggaacgactttatctgtccaagaatcagctgaaggaattgccagaaaaaatgcccaaaactcttcaggagctgcgtgcccatgagaatgagatcaccaaagtgcgaaaagttactttcaatggactgaaccagatgattgtcatagaactgggcaccaatccgctgaagagctcaggaattgaaaatggggctttccagggaatgaagaagctctcctacatccgcattgctgataccaatatcaccagcattcctcaaggtcttcctccttcccttacggaattacatcttgatggcaacaaaatcagcagagttgatgcagctagcctgaaaggactgaataatttggctaagttgggattgagtttcaacagcatctctgctgttgacaatggctctctggccaacacgcctcatctgagggagcttcacttggacaacaacaagcttaccagagtacctggtgggctggcagagcataagtacatccaggttgtctaccttcataacaacaatatctctgtagttggatcaagtgacttctgcccacctggacacaacaccaaaaaggcttcttattcgggtgtgagtcttttcagcaacccggtccagtactgggagatacagccatccaccttcagatgtgtctacgtgcgctctgccattcaactcggaaactataagtaattctcaagaaagccctcatttttataacctggcaaaatcttgttaatgtcattgctaaaaaataaataaaagctagatactggaaacctaactgcaatgtggatgttttacccacatgacttattatgcataaagccaaatttccagtttaagtaattgcctacaataaaaagaaattttgcctgccattttcagaatcatcttttgaagctttctgttgatgttaactgagctactagagatattcttatttcactaaatgtaaaatttggagtaaatatatatgtcaatatttagtaaagcttttcttttttaatttccaggaaaaaataaaaagagtatgagtcttctgtaattcattgagcagttagctcatttgagataaagtcaaatgccaaacactagctctgtattaatccccatcattactggtaaagcctcatttgaatgtgtgaattcaatacaggctatgtaaaatttttactaatgtcattattttgaaaaaataaatttaaaaatacattcaaaatactattgtatacaagcttaattgttaatattccctaaacacaattttatgaagggagaagacattggtttgttgacaataacagtacatcttttcaagttctcagctatttcttctacctctccctatcttacatttgagtatggtaacttatgtcatctatgttgaatgtaagcttataaagcacaaagcatacatttcctgactggtctagagaactgatgtttcaatttacccctctgctaaataaatattaaaactatcatgtgacttcatgt

SEQ ID NO: 448980 - DNA, 4110 bp, Homo sapiens
  misc_feature (2253)..(2253): n is a, c, g, or t
ttagattatgacataaatcttgtaaaaacctgtcagttattttcatctatgagagaagaggagcccaaactctcgcccacctgttcttaaccagaaaacccactgactttgaaaatctcacctctgccacccatctacttgcattcgtctttggcagacctcaagataaatatgggttaatgcctgcatgatgcctctgaattcaggaattgcagggaaaactcggggctttgtgccagtctctaagttggcaactttggctgaacaaatgagtagtggcttcagtgtccttgcgtacacattctgtggattgatttaatggagttgtcagcatgatcatcatcttctagccaggggcatagttgccaaggccatttacctctttctaagaagaaacagaattatgtgtatatatgagagaaagaaacaagaatgcgtgaatgaggatgaagaaacatttaccccatgtactcaagacatttcagttttaaaagtcactttcctattagacttcttgaaaaagattctcacatagcctctatgtaatcagacaaatgacatttgatttcaagagcagaggggtaaacatcctctgctaatcgacaggtagcaggtgtcagaggaggcataatattaatagcgccaccttctgttgggtcagtggagatgggtgaggagcagcacagagcagcagggatcatcacatgcagccaaacttggcctctgaagggggaaggtagtgggaataggtggtgagagaactcacatttttctcttgtcctggttttatatttcggagggaaaggattatttggccccattaagaattaagaggctgggtgcggtggctcacgtctgtaatcccagcaccttgggaggcccaggcaggcagatcacctgaggtcgggagttcgagaccagcgtgaccaacgtggagaaacccccgtctctactaaaaatacaaaaaattagctgggcatggtggtgcatgcctgtgattccagtttgcctccagctatgtgttttattggcgggattactttgaggaccagccccttctgtatcccccaggctttgacggaagagtcgtggtgtatcccagcaaccagactttaaaggactacctcagctggcgacaagcagattgtcacatcaataatctttataatacagttttctgggcacttatacaacaatctggactaacaccagtacaagcccaagggagattacagggaactcttgcagcagacaagaatgagattttgttttctgaattcaacatcaactataataatgagccgccgatgtataggaaagggactgtgttgatatggcagaaggtggatgaagtgatgacaaaagaaattaagctgccaacagaaatggaaggaaaaaagatggcagtgacccggaccaggacaaagccagtgcccttgcactgcgatatcatcggggatgctttctggaaggaacatccagagattctagatgaagacagctgacccttttgcgcttcagttctggtgtgcttaaccatgcaagccctcccacctcccagggctccttgccttaggtggctgtagcatccctaccacccaggacactggtgtgaatgacacaactcaagttgggaggggaacagggaaggaagggatggatgggggtggtgtatcttattctgtttaagcagaacaccttgtttgcggtgttggaacatggttcctttggcagaagtgctttttttttaatcgcagtactatttttataaagcaagaactattccatgccttggagaatgaatcaattttttaactgtgctatggagtagaagcaggaggttttcaacctagtcacagagcagcacctaccccctcctcctttccacacctgcaaactcttttacttgggctgaatatttagtgtaattacatctcagctttgagggctcctgtggcaaattcccggattaaaaggttccctggttgtgaaaatacatgagataaatcatgaaggccactatcatcctccttctgcttcttgcgacaaggagggatgatagtggccttcatgatttatctcatgtattttcacaaccagggaaccttttaatccgggaatttgccacaggagccctcaaagctgagatgtaattacactaaatattcagcccaagtaaaagagtttgcaggtgtggaaaggaggagggggtaggtgctgctctgtgactaggttgaaaacctcctgcttctngcacaagtttcctgggctggaccgtttcaacagagaggcttatttgactttatgctagaagatgaggcttctgggataggcccagaagttcctgatgaccgcgacttcgagccctccctaggcccagtgtgccccttccgctgtcaatgccatcttcgagtggtccagtgttctgatttgggtctggacaaagtgccaaaggatcttccccctgacacaactctgctagacctgcaaaacaacaaaataaccgaaatcaaagatggagactttaagaacctgaagaaccttcacgcattgattcttgtcaacaataaaattagcaaagttagtcctggagcatttacacctttggtgaagttggaacgactttatctgtccaagaatcagctgaaggaattgccagaaaaaatgcccaaaactcttcaggagctgcgtgcccatgagaatgagatcaccaaagtgcgaaaagttactttcaatggactgaaccagatgattgtcatagaactgggcaccaatccgctgaagagctcaggaattgaaaatggggctttccagggaatgaagaagctctcctacatccgcattgctgataccaatatcaccagcattcctcaaggtcttcctccttcccttacggaattacatcttgatggcaacaaaatcagcagagttgatgcagctagcctgaaaggactgaataatttggctaagttgggattgagtttcaacagcatctctgctgttgacaatggctctctggccaacacgcctcatctgagggagcttcacttggacaacaacaagcttaccagagtacctggtgggctggcagagcataagtacatccaggttgtctaccttcataacaacaatatctctgtagttggatcaagtgacttctgcccacctggacacaacaccaaaaaggcttcttattcgggtgtgagtcttttcagcaacccggtccagtactgggagatacagccatccaccttcagatgtgtctacgtgcgctctgccattcaactcggaaactataagtaattctcaagaaagccctcatttttataacctggcaaaatcttgttaatgtcattgctaaaaaataaataaaagctagatactggaaacctaactgcaatgtggatgttttacccacatgacttattatgcataaagccaaatttccagtttaagtaattgcctacaataaaaagaaattttgcctgccattttcagaatcatcttttgaagctttctgttgatgttaactgagctactagagatattcttatttcactaaatgtaaaatttggagtaaatatatatgtcaatatttagtaaagcttttcttttttaatttccaggaaaaaataaaaagagtatgagtcttctgtaattcattgagcagttagctcatttgagataaagtcaaatgccaaacactagctctgtattaatccccatcattactggtaaagcctcatttgaatgtgtgaattcaatacaggctatgtaaaatttttactaatgtcattattttgaaaaaataaatttaaaaatacattcaaaatactattgtatacaagcttaattgttaatattccctaaacacaattttatgaagggagaagacattggtttgttgacaataacagtacatcttttcaagttctcagctatttcttctacctctccctatcttacatttgagtatggtaacttatgtcatctatgttgaatgtaagcttataaagcacaaagcatacatttcctgactggtctagagaactgatgtttcaatttacccctctgctaaataaatattaaaactatcatgtgacttcatgt

SEQ ID NO: 448981 - DNA, 3413 bp, Homo sapiens
ttagattatgacataaatcttgtaaaaacctgtcagttattttcatctatgagagaagaggagcccaaactctcgcccacctgttcttaaccagaaaacccactgactttgaaaatctcacctctgccacccatctacttgcattcgtctttggcagacctcaagataaatatgggttaatgcctgcatgatgcctctgaattcaggaattgcagggaaaactcggggctttgtgccagtctctaagttggcaactttggctgaacaaatgagtagtggcttcagtgtccttgcgtacacattctgtggattgatttaatggagttgtcagcatgatcatcatcttctagccaggggcatagttgccaaggccatttacctctttctaagaagaaacagaattatgtgtatatatgagagaaagaaacaagaatgcgtgaatgaggatgaagaaacatttaccccatgtactcaagacatttcagttttaaaagtcactttcctattagacttcttgaaaaagattctcacatagcctctatgtaatcagacaaatgacatttgatttcaagagcagaggggtaaacatcctctgctaatcgacaggtagcaggtgtcagaggaggcataatattaatagcgccaccttctgttgggtcagtggagatgggtgaggagcagcacagagcagcagggatcatcacatgcagccaaacttggcctctgaagggggaaggtagtgggaataggtggtgagagaactcacatttttctcttgtcctggttttatatttcggagggaaaggattatttggccccattaagaattaagaggctgggtgcggtggctcacgtctgtaatcccagcaccttgggaggcccaggcaggcagatcacctgaggtcgggagttcgagaccagcgtgaccaacgtggagaaacccccgtctctactaaaaatacaaaaaattagctgggcatggtggtgcatgcctgtgattccagtttgcctccagctatgtgttttattggcgggattactttgaggaccagccccttctgtatcccccaggctttgacggaagagtcgtggtgtatcccagcaaccagactttaaaggactacctcagctggcgacaagcagattgtcacatcaataatctttataatacagttttctgggcacttatacaacaatctggactaacaccagtacaagcccaagggagattacagggaactcttgcagcagacaagaatgagattttgttttctgaattcaacatcaactataataatgagccgccgatgtataggaaagggactgtgttgatatggcagaaggtggatgaagtgatgacaaaagaaattaagctgccaacagaaatggaaggaaaaaagatggcagtgacccggaccaggacaaagccagtgcccttgcactgcgatatcatcggggatgctttctggaaggaacatccagagattctagatgaagacagctgacccttttgcgcttcagttctggtgtgcttaaccatgcaagccctcccacctcccagggctccttgccttaggtggctgtagcatccctaccacccaggacactggtgtgaatgacacaactcaagttgggaggggaacagggaaggaagggatggatgggggtggtgtatcttattctgtttaagcagaacaccttgtttgcggtgttggaacatggttcctttggcagaagtgctttttttttaatcgcagtactatttttataaagcaagaactattccatgccttggagaatgaatcaattttttaactgtgctatggagtagaagcaggaggttttcaacctagtcacagagcagcacctaccccctcctcctttccacacctgcaaactcttttacttgggctgaatatttagtgtaattacatctcagctttgagggctcctgtggcaaattcccggattaaaaggttccctggttgtgaaaatacatgagataaatcatgaaggccactatcatcctccttctgcttgcacaagtttcctgggctggaccgtttcaacagagaggcttatttgactttatgctagaagatgaggcttctgggataggcccagaagttcctgatgaccgcgacttcgagccctccctaggcccagtgtgccccttccgctgtcaatgccatcttcgagtggtccagtgttctgatttgggtctggacaaagtgccaaaggatcttccccctgacacaactctgctagacctgcaaaacaacaaaataaccgaaatcaaagatggagactttaagaacctgaagaaccttcacgcattgattcttgtcaacaataaaattagcaaagttagtcctggagcatttacacctttggtgaagttggaacgactttatctgtccaagaatcagctgaaggaattgccagaaaaaatgcccaaaactcttcaggagctgcgtgcccatgagaatgagatcaccaaagtgcgaaaagttactttcaatggactgaaccagatgattgtcatagaactgggcaccaatccgctgaagagctcaggaattgaaaatggggctttccagggaatgaagaagctctcctacatccgcattgctgataccaatatcaccagcattcctcaaggtcttcctccttcccttacggaattacatcttgatggcaacaaaatcagcagagttgatgcagctagcctgaaaggactgaataatttggctaagttgggattgagtttcaacagcatctctgctgttgacaatggctctctggccaacacgcctcatctgagggagcttcacttggacaacaacaagcttaccagagtacctggtgggctggcagagcataagtacatccaggttgtctaccttcataacaacaatatctctgtagttggatcaagtgacttctgcccacctggacacaacaccaaaaaggcttcttattcgggtgtgagtcttttcagcaacccggtccagtactgggagatacagccatccaccttcagatgtgtctacgtgcgctctgccattcaactcggaaactataagtaattctcaagaaagccctcatttttataacctggcaaaatcttgttaatgtcattgctaaaaaataaataaaagctagatactggaaacctaactgcaatgtggatgttttacccacatgacttattatgcataaagccaaatttccagtttaagtaattgcctacaataaaaagaaattttgcctgccattttcagaatcatcttttgaagctttctgttgatgttaactgagctactagagatattcttatttcactaaatgtaaaatttggagtaaatatatatgtcaatatttagtaaagcttttcttttttaatttccagg

SEQ ID NO: 448982 - DNA, 3845 bp, Homo sapiens
ttagattatgacataaatcttgtaaaaacctgtcagttattttcatctatgagagaagaggagcccaaactctcgcccacctgttcttaaccagaaaacccactgactttgaaaatctcacctctgccacccatctacttgcattcgtctttggcagacctcaagataaatatgggttaatgcctgcatgatgcctctgaattcaggaattgcagggaaaactcggggctttgtgccagtctctaagttggcaactttggctgaacaaatgagtagtggcttcagtgtccttgcgtacacattctgtggattgatttaatggagttgtcagcatgatcatcatcttctagccaggggcatagttgccaaggccatttacctctttctaagaagaaacagaattatgtgtatatatgagagaaagaaacaagaatgcgtgaatgaggatgaagaaacatttaccccatgtactcaagacatttcagttttaaaagtcactttcctattagacttcttgaaaaagattctcacatagcctctatgtaatcagacaaatgacatttgatttcaagagcagaggggtaaacatcctctgctaatcgacaggtagcaggtgtcagaggaggcataatattaatagcgccaccttctgttgggtcagtggagatgggtgaggagcagcacagagcagcagggatcatcacatgcagccaaacttggcctctgaagggggaaggtagtgggaataggtggtgagagaactcacatttttctcttgtcctggttttatatttcggagggaaaggattatttggccccattaagaattaagaggctgggtgcggtggctcacgtctgtaatcccagcaccttgggaggcccaggcaggcagatcacctgaggtcgggagttcgagaccagcgtgaccaacgtggagaaacccccgtctctactaaaaatacaaaaaattagctgggcatggtggtgcatgcctgtgattccagtttgcctccagctatgtgttttattggcgggattactttgaggaccagccccttctgtatcccccaggctttgacggaagagtcgtggtgtatcccagcaaccagactttaaaggactacctcagctggcgacaagcagattgtcacatcaataatctttataatacagttttctgggcacttatacaacaatctggactaacaccagtacaagcccaagggagattacagggaactcttgcagcagacaagaatgagattttgttttctgaattcaacatcaactataataatgagccgccgatgtataggaaagggactgtgttgatatggcagaaggtggatgaagtgatgacaaaagaaattaagctgccaacagaaatggaaggaaaaaagatggcagtgacccggaccaggacaaagccagtgcccttgcactgcgatatcatcggggatgctttctggaaggaacatccagagattctagatgaagacagctgacccttttgcgcttcagttctggtgtgcttaaccatgcaagccctcccacctcccagggctccttgccttaggtggctgtagcatccctaccacccaggacactggtgtgaatgacacaactcaagttgggaggggaacagggaaggaagggatggatgggggtggtgtatcttattctgtttaagcagaacaccttgtttgcggtgttggaacatggttcctttggcagaagtgctttttttttaatcgcagtactatttttataaagcaagaactattccatgccttggagaatgaatcaattttttaactgtgctatggagtagaagcaggaggttttcaacctagtcacagagcagcacctaccccctcctcctttccacacctgcaaactcttttacttgggctgaatatttagtgtaattacatctcagctttgagggctcctgtggcaaattcccggattaaaaggttccctggttgtgaaaatacatgagataaatcatgaaggccactatcatcctccttctgcttgcacaagtttcctgggctggaccgtttcaacagaaagttcctgatgaccgcgacttcgagccctccctaggcccagtgtgccccttccgctgtcaatgccatcttcgagtggtccagtgttctgatttgggtctggacaaagtgccaaaggatcttccccctgacacaactctgctagacctgcaaaacaacaaaataaccgaaatcaaagatggagactttaagaacctgaagaaccttcacgcattgattcttgtcaacaataaaattagcaaagttagtcctggagcatttacacctttggtgaagttggaacgactttatctgtccaagaatcagctgaaggaattgccagaaaaaatgcccaaaactcttcaggagctgcgtgcccatgagaatgagatcaccaaagtgcgaaaagttactttcaatggactgaaccagatgattgtcatagaactgggcaccaatccgctgaagagctcaggaattgaaaatggggctttccagggaatgaagaagctctcctacatccgcattgctgataccaatatcaccagcattcctcaaggtcttcctccttcccttacggaattacatcttgatggcaacaaaatcagcagagttgatgcagctagcctgaaaggactgaataatttggctaagttgggattgagtttcaacagcatctctgctgttgacaatggctctctggccaacacgcctcatctgagggagcttcacttggacaacaacaagcttaccagagtacctggtgggctggcagagcataagtacatccaggttgtctaccttcataacaacaatatctctgtagttggatcaagtgacttctgcccacctggacacaacaccaaaaaggcttcttattcgggtgtgagtcttttcagcaacccggtccagtactgggagatacagccatccaccttcagatgtgtctacgtgcgctctgccattcaactcggaaactataagtaattctcaagaaagccctcatttttataacctggcaaaatcttgttaatgtcattgctaaaaaataaataaaagctagatactggaaacctaactgcaatgtggatgttttacccacatgacttattatgcataaagccaaatttccagtttaagtaattgcctacaataaaaagaaattttgcctgccattttcagaatcatcttttgaagctttctgttgatgttaactgagctactagagatattcttatttcactaaatgtaaaatttggagtaaatatatatgtcaatatttagtaaagcttttcttttttaatttccaggaaaaaataaaaagagtatgagtcttctgtaattcattgagcagttagctcatttgagataaagtcaaatgccaaacactagctctgtattaatccccatcattactggtaaagcctcatttgaatgtgtgaattcaatacaggctatgtaaaatttttactaatgtcattattttgaaaaaataaatttaaaaatacattcaaaatactattgtatacaagcttaattgttaatattccctaaacacaattttatgaagggagaagacattggtttgttgacaataacagtacatcttttcaagttctcagctatttcttctacctctccctatcttacatttgagtatggtaacttatgtcatctatgttgaatgtaagcttataaagcacaaagcatacatttcctgactggtctagagaactgatgtttcaatttacccctctgctaaataaatattaaaactatcatgtgacttcatgt

SEQ ID NO: 448983 - DNA, 3783 bp, Homo sapiens
ttagattatgacataaatcttgtaaaaacctgtcagttattttcatctatgagagaagaggagcccaaactctcgcccacctgttcttaaccagaaaacccactgactttgaaaatctcacctctgccacccatctacttgcattcgtctttggcagacctcaagataaatatgggttaatgcctgcatgatgcctctgaattcaggaattgcagggaaaactcggggctttgtgccagtctctaagttggcaactttggctgaacaaatgagtagtggcttcagtgtccttgcgtacacattctgtggattgatttaatggagttgtcagcatgatcatcatcttctagccaggggcatagttgccaaggccatttacctctttctaagaagaaacagaattatgtgtatatatgagagaaagaaacaagaatgcgtgaatgaggatgaagaaacatttaccccatgtactcaagacatttcagttttaaaagtcactttcctattagacttcttgaaaaagattctcacatagcctctatgtaatcagacaaatgacatttgatttcaagagcagaggggtaaacatcctctgctaatcgacaggtagcaggtgtcagaggaggcataatattaatagcgccaccttctgttgggtcagtggagatgggtgaggagcagcacagagcagcagggatcatcacatgcagccaaacttggcctctgaagggggaaggtagtgggaataggtggtgagagaactcacatttttctcttgtcctggttttatatttcggagggaaaggattatttggccccattaagaattaagaggctgggtgcggtggctcacgtctgtaatcccagcaccttgggaggcccaggcaggcagatcacctgaggtcgggagttcgagaccagcgtgaccaacgtggagaaacccccgtctctactaaaaatacaaaaaattagctgggcatggtggtgcatgcctgtgattccagtttgcctccagctatgtgttttattggcgggattactttgaggaccagccccttctgtatcccccaggctttgacggaagagtcgtggtgtatcccagcaaccagactttaaaggactacctcagctggcgacaagcagattgtcacatcaataatctttataatacagttttctgggcacttatacaacaatctggactaacaccagtacaagcccaagggagattacagggaactcttgcagcagacaagaatgagattttgttttctgaattcaacatcaactataataatgagccgccgatgtataggaaagggactgtgttgatatggcagaaggtggatgaagtgatgacaaaagaaattaagctgccaacagaaatggaaggaaaaaagatggcagtgacccggaccaggacaaagccagtgcccttgcactgcgatatcatcggggatgctttctggaaggaacatccagagattctagatgaagacagctgacccttttgcgcttcagttctggtgtgcttaaccatgcaagccctcccacctcccagggctccttgccttaggtggctgtagcatccctaccacccaggacactggtgtgaatgacacaactcaagttgggaggggaacagggaaggaagggatggatgggggtggtgtatcttattctgtttaagcagaacaccttgtttgcggtgttggaacatggttcctttggcagaagtgctttttttttaatcgcagtactatttttataaagcaagaactattccatgccttggagaatgaatcaattttttaactgtgctatggagtagaagcaggaggttttcaacctagtcacagagcagcacctaccccctcctcctttccacacctgcaaactcttttacttgggctgaatatttagtgtaattacatctcagctttgagggctcctgtggcaaattcccggattaaaaggttccctggttgtgaaaatacatgagataaatcatgaaggccactatcatcctccttctgcttgcacaagtttcctgggctggaccgtttcaacagagaggcttatttgactttatgctagaagatgaggcttctgggataggcccagaagttcctgatgaccgcgacttcgagccctccctaggcccagtgtgccccttccgctgtcaatgccatcttcgagtggtccagtgttctgatttgggcattgattcttgtcaacaataaaattagcaaagttagtcctggagcatttacacctttggtgaagttggaacgactttatctgtccaagaatcagctgaaggaattgccagaaaaaatgcccaaaactcttcaggagctgcgtgcccatgagaatgagatcaccaaagtgcgaaaagttactttcaatggactgaaccagatgattgtcatagaactgggcaccaatccgctgaagagctcaggaattgaaaatggggctttccagggaatgaagaagctctcctacatccgcattgctgataccaatatcaccagcattcctcaaggtcttcctccttcccttacggaattacatcttgatggcaacaaaatcagcagagttgatgcagctagcctgaaaggactgaataatttggctaagttgggattgagtttcaacagcatctctgctgttgacaatggctctctggccaacacgcctcatctgagggagcttcacttggacaacaacaagcttaccagagtacctggtgggctggcagagcataagtacatccaggttgtctaccttcataacaacaatatctctgtagttggatcaagtgacttctgcccacctggacacaacaccaaaaaggcttcttattcgggtgtgagtcttttcagcaacccggtccagtactgggagatacagccatccaccttcagatgtgtctacgtgcgctctgccattcaactcggaaactataagtaattctcaagaaagccctcatttttataacctggcaaaatcttgttaatgtcattgctaaaaaataaataaaagctagatactggaaacctaactgcaatgtggatgttttacccacatgacttattatgcataaagccaaatttccagtttaagtaattgcctacaataaaaagaaattttgcctgccattttcagaatcatcttttgaagctttctgttgatgttaactgagctactagagatattcttatttcactaaatgtaaaatttggagtaaatatatatgtcaatatttagtaaagcttttcttttttaatttccaggaaaaaataaaaagagtatgagtcttctgtaattcattgagcagttagctcatttgagataaagtcaaatgccaaacactagctctgtattaatccccatcattactggtaaagcctcatttgaatgtgtgaattcaatacaggctatgtaaaatttttactaatgtcattattttgaaaaaataaatttaaaaatacattcaaaatactattgtatacaagcttaattgttaatattccctaaacacaattttatgaagggagaagacattggtttgttgacaataacagtacatcttttcaagttctcagctatttcttctacctctccctatcttacatttgagtatggtaacttatgtcatctatgttgaatgtaagcttataaagcacaaagcatacatttcctgactggtctagagaactgatgtttcaatttacccctctgctaaataaatattaaaactatcatgtgacttcatgt

SEQ ID NO: 448984 - DNA, 3843 bp, Homo sapiens
ttagattatgacataaatcttgtaaaaacctgtcagttattttcatctatgagagaagaggagcccaaactctcgcccacctgttcttaaccagaaaacccactgactttgaaaatctcacctctgccacccatctacttgcattcgtctttggcagacctcaagataaatatgggttaatgcctgcatgatgcctctgaattcaggaattgcagggaaaactcggggctttgtgccagtctctaagttggcaactttggctgaacaaatgagtagtggcttcagtgtccttgcgtacacattctgtggattgatttaatggagttgtcagcatgatcatcatcttctagccaggggcatagttgccaaggccatttacctctttctaagaagaaacagaattatgtgtatatatgagagaaagaaacaagaatgcgtgaatgaggatgaagaaacatttaccccatgtactcaagacatttcagttttaaaagtcactttcctattagacttcttgaaaaagattctcacatagcctctatgtaatcagacaaatgacatttgatttcaagagcagaggggtaaacatcctctgctaatcgacaggtagcaggtgtcagaggaggcataatattaatagcgccaccttctgttgggtcagtggagatgggtgaggagcagcacagagcagcagggatcatcacatgcagccaaacttggcctctgaagggggaaggtagtgggaataggtggtgagagaactcacatttttctcttgtcctggttttatatttcggagggaaaggattatttggccccattaagaattaagaggctgggtgcggtggctcacgtctgtaatcccagcaccttgggaggcccaggcaggcagatcacctgaggtcgggagttcgagaccagcgtgaccaacgtggagaaacccccgtctctactaaaaatacaaaaaattagctgggcatggtggtgcatgcctgtgattccagtttgcctccagctatgtgttttattggcgggattactttgaggaccagccccttctgtatcccccaggctttgacggaagagtcgtggtgtatcccagcaaccagactttaaaggactacctcagctggcgacaagcagattgtcacatcaataatctttataatacagttttctgggcacttatacaacaatctggactaacaccagtacaagcccaagggagattacagggaactcttgcagcagacaagaatgagattttgttttctgaattcaacatcaactataataatgagccgccgatgtataggaaagggactgtgttgatatggcagaaggtggatgaagtgatgacaaaagaaattaagctgccaacagaaatggaaggaaaaaagatggcagtgacccggaccaggacaaagccagtgcccttgcactgcgatatcatcggggatgctttctggaaggaacatccagagattctagatgaagacagctgacccttttgcgcttcagttctggtgtgcttaaccatgcaagccctcccacctcccagggctccttgccttaggtggctgtagcatccctaccacccaggacactggtgtgaatgacacaactcaagttgggaggggaacagggaaggaagggatggatgggggtggtgtatcttattctgtttaagcagaacaccttgtttgcggtgttggaacatggttcctttggcagaagtgctttttttttaatcgcagtactatttttataaagcaagaactattccatgccttggagaatgaatcaattttttaactgtgctatggagtagaagcaggaggttttcaacctagtcacagagcagcacctaccccctcctcctttccacacctgcaaactcttttacttgggctgaatatttagtgtaattacatctcagctttgagggctcctgtggcaaattcccggattaaaaggttccctggttgtgaaaatacatgagataaatcatgaaggccactatcatcctccttctgcttgcacaagtttcctgggctggaccgtttcaacagagaggcttatttgactttatgctagaagatgaggcttctgggataggcccagaagttcctgatgaccgcgacttcgagccctccctaggcccagtgtgccccttccgctgtcaatgccatcttcgagtggtccagtgttctgatttgggtctggacaaagtgccaaaggatcttccccctgacacaactctgctagacctgcaaaacaacaaaataaccgaaatcaaagatggagactttaagaacctgaagaaccttcacgcattgattcttgtcaacaataaaattagcaaagttagtcctggagcatttacacctttggtgaagttggaacgactttatctgtccaagaatcagctgaaggaattgccagaaaaaatgcccaaaactcttcaggagctgcgtgcccatgagaatgagatcaccaaagtgcgaaaagttactttcaatggactgaaccagatgattgtcatagaactgggcaccaatccgctgaagagctcaggaattgaaaatggggctttccagggaatgaagaagctctcctacatccgcattgctgataccaatatcaccagcattcctcaaggtcttcctccttcccttacggaattacatcttgatggcaacgttgggattgagtttcaacagcatctctgctgttgacaatggctctctggccaacacgcctcatctgagggagcttcacttggacaacaacaagcttaccagagtacctggtgggctggcagagcataagtacatccaggttgtctaccttcataacaacaatatctctgtagttggatcaagtgacttctgcccacctggacacaacaccaaaaaggcttcttattcgggtgtgagtcttttcagcaacccggtccagtactgggagatacagccatccaccttcagatgtgtctacgtgcgctctgccattcaactcggaaactataagtaattctcaagaaagccctcatttttataacctggcaaaatcttgttaatgtcattgctaaaaaataaataaaagctagatactggaaacctaactgcaatgtggatgttttacccacatgacttattatgcataaagccaaatttccagtttaagtaattgcctacaataaaaagaaattttgcctgccattttcagaatcatcttttgaagctttctgttgatgttaactgagctactagagatattcttatttcactaaatgtaaaatttggagtaaatatatatgtcaatatttagtaaagcttttcttttttaatttccaggaaaaaataaaaagagtatgagtcttctgtaattcattgagcagttagctcatttgagataaagtcaaatgccaaacactagctctgtattaatccccatcattactggtaaagcctcatttgaatgtgtgaattcaatacaggctatgtaaaatttttactaatgtcattattttgaaaaaataaatttaaaaatacattcaaaatactattgtatacaagcttaattgttaatattccctaaacacaattttatgaagggagaagacattggtttgttgacaataacagtacatcttttcaagttctcagctatttcttctacctctccctatcttacatttgagtatggtaacttatgtcatctatgttgaatgtaagcttataaagcacaaagcatacatttcctgactggtctagagaactgatgtttcaatttacccctctgctaaataaatattaaaactatcatgtgacttcatgt

SEQ ID NO: 448985 - DNA, 3853 bp, Homo sapiens
ttagattatgacataaatcttgtaaaaacctgtcagttattttcatctatgagagaagaggagcccaaactctcgcccacctgttcttaaccagaaaacccactgactttgaaaatctcacctctgccacccatctacttgcattcgtctttggcagacctcaagataaatatgggttaatgcctgcatgatgcctctgaattcaggaattgcagggaaaactcggggctttgtgccagtctctaagttggcaactttggctgaacaaatgagtagtggcttcagtgtccttgcgtacacattctgtggattgatttaatggagttgtcagcatgatcatcatcttctagccaggggcatagttgccaaggccatttacctctttctaagaagaaacagaattatgtgtatatatgagagaaagaaacaagaatgcgtgaatgaggatgaagaaacatttaccccatgtactcaagacatttcagttttaaaagtcactttcctattagacttcttgaaaaagattctcacatagcctctatgtaatcagacaaatgacatttgatttcaagagcagaggggtaaacatcctctgctaatcgacaggtagcaggtgtcagaggaggcataatattaatagcgccaccttctgttgggtcagtggagatgggtgaggagcagcacagagcagcagggatcatcacatgcagccaaacttggcctctgaagggggaaggtagtgggaataggtggtgagagaactcacatttttctcttgtcctggttttatatttcggagggaaaggattatttggccccattaagaattaagaggctgggtgcggtggctcacgtctgtaatcccagcaccttgggaggcccaggcaggcagatcacctgaggtcgggagttcgagaccagcgtgaccaacgtggagaaacccccgtctctactaaaaatacaaaaaattagctgggcatggtggtgcatgcctgtgattccagtttgcctccagctatgtgttttattggcgggattactttgaggaccagccccttctgtatcccccaggctttgacggaagagtcgtggtgtatcccagcaaccagactttaaaggactacctcagctggcgacaagcagattgtcacatcaataatctttataatacagttttctgggcacttatacaacaatctggactaacaccagtacaagcccaagggagattacagggaactcttgcagcagacaagaatgagattttgttttctgaattcaacatcaactataataatgagccgccgatgtataggaaagggactgtgttgatatggcagaaggtggatgaagtgatgacaaaagaaattaagctgccaacagaaatggaaggaaaaaagatggcagtgacccggaccaggacaaagccagtgcccttgcactgcgatatcatcggggatgctttctggaaggaacatccagagattctagatgaagacagctgacccttttgcgcttcagttctggtgtgcttaaccatgcaagccctcccacctcccagggctccttgccttaggtggctgtagcatccctaccacccaggacactggtgtgaatgacacaactcaagttgggaggggaacagggaaggaagggatggatgggggtggtgtatcttattctgtttaagcagaacaccttgtttgcggtgttggaacatggttcctttggcagaagtgctttttttttaatcgcagtactatttttataaagcaagaactattccatgccttggagaatgaatcaattttttaactgtgctatggagtagaagcaggaggttttcaacctagtcacagagcagcacctaccccctcctcctttccacacctgcaaactcttttacttgggctgaatatttagtgtaattacatctcagctttgagggctcctgtggcaaattcccggattaaaaggttccctggttgtgaaaatacatgagataaatcatgaaggccactatcatcctccttctgcttgcacaagtttcctgggctggaccgtttcaacagagaggcttatttgactttatgctagaagatgaggcttctgggataggcccagaagttcctgatgaccgcgacttcgagccctccctaggcccagtgtgccccttccgctgtcaatgccatcttcgagtggtccagtgttctgatttgggtctggacaaagtgccaaaggatcttccccctgacacaactctgctagacctgcaaaacaacaaaataaccgaaatcaaagatggagactttaagaacctgaagaaccttcacgcattgattcttgtcaacaataaaattagcaaagttagtcctggagcatttacacctttggtgaagttggaacgactttatctgtccaagaatcagctgaaggaattgccagaaaaaatgcccaaaactcttcaggagctgcgtgcccatgagaatgagatcaccaaagtgaactgggcaccaatccgctgaagagctcaggaattgaaaatggggctttccagggaatgaagaagctctcctacatccgcattgctgataccaatatcaccagcattcctcaaggtcttcctccttcccttacggaattacatcttgatggcaacaaaatcagcagagttgatgcagctagcctgaaaggactgaataatttggctaagttgggattgagtttcaacagcatctctgctgttgacaatggctctctggccaacacgcctcatctgagggagcttcacttggacaacaacaagcttaccagagtacctggtgggctggcagagcataagtacatccaggttgtctaccttcataacaacaatatctctgtagttggatcaagtgacttctgcccacctggacacaacaccaaaaaggcttcttattcgggtgtgagtcttttcagcaacccggtccagtactgggagatacagccatccaccttcagatgtgtctacgtgcgctctgccattcaactcggaaactataagtaattctcaagaaagccctcatttttataacctggcaaaatcttgttaatgtcattgctaaaaaataaataaaagctagatactggaaacctaactgcaatgtggatgttttacccacatgacttattatgcataaagccaaatttccagtttaagtaattgcctacaataaaaagaaattttgcctgccattttcagaatcatcttttgaagctttctgttgatgttaactgagctactagagatattcttatttcactaaatgtaaaatttggagtaaatatatatgtcaatatttagtaaagcttttcttttttaatttccaggaaaaaataaaaagagtatgagtcttctgtaattcattgagcagttagctcatttgagataaagtcaaatgccaaacactagctctgtattaatccccatcattactggtaaagcctcatttgaatgtgtgaattcaatacaggctatgtaaaatttttactaatgtcattattttgaaaaaataaatttaaaaatacattcaaaatactattgtatacaagcttaattgttaatattccctaaacacaattttatgaagggagaagacattggtttgttgacaataacagtacatcttttcaagttctcagctatttcttctacctctccctatcttacatttgagtatggtaacttatgtcatctatgttgaatgtaagcttataaagcacaaagcatacatttcctgactggtctagagaactgatgtttcaatttacccctctgctaaataaatattaaaactatcatgtgacttcatgt

SEQ ID NO: 448986 - DNA, 3819 bp, Homo sapiens
ttagattatgacataaatcttgtaaaaacctgtcagttattttcatctatgagagaagaggagcccaaactctcgcccacctgttcttaaccagaaaacccactgactttgaaaatctcacctctgccacccatctacttgcattcgtctttggcagacctcaagataaatatgggttaatgcctgcatgatgcctctgaattcaggaattgcagggaaaactcggggctttgtgccagtctctaagttggcaactttggctgaacaaatgagtagtggcttcagtgtccttgcgtacacattctgtggattgatttaatggagttgtcagcatgatcatcatcttctagccaggggcatagttgccaaggccatttacctctttctaagaagaaacagaattatgtgtatatatgagagaaagaaacaagaatgcgtgaatgaggatgaagaaacatttaccccatgtactcaagacatttcagttttaaaagtcactttcctattagacttcttgaaaaagattctcacatagcctctatgtaatcagacaaatgacatttgatttcaagagcagaggggtaaacatcctctgctaatcgacaggtagcaggtgtcagaggaggcataatattaatagcgccaccttctgttgggtcagtggagatgggtgaggagcagcacagagcagcagggatcatcacatgcagccaaacttggcctctgaagggggaaggtagtgggaataggtggtgagagaactcacatttttctcttgtcctggttttatatttcggagggaaaggattatttggccccattaagaattaagaggctgggtgcggtggctcacgtctgtaatcccagcaccttgggaggcccaggcaggcagatcacctgaggtcgggagttcgagaccagcgtgaccaacgtggagaaacccccgtctctactaaaaatacaaaaaattagctgggcatggtggtgcatgcctgtgattccagtttgcctccagctatgtgttttattggcgggattactttgaggaccagccccttctgtatcccccaggctttgacggaagagtcgtggtgtatcccagcaaccagactttaaaggactacctcagctggcgacaagcagattgtcacatcaataatctttataatacagttttctgggcacttatacaacaatctggactaacaccagtacaagcccaagggagattacagggaactcttgcagcagacaagaatgagattttgttttctgaattcaacatcaactataataatgagccgccgatgtataggaaagggactgtgttgatatggcagaaggtggatgaagtgatgacaaaagaaattaagctgccaacagaaatggaaggaaaaaagatggcagtgacccggaccaggacaaagccagtgcccttgcactgcgatatcatcggggatgctttctggaaggaacatccagagattctagatgaagacagctgacccttttgcgcttcagttctggtgtgcttaaccatgcaagccctcccacctcccagggctccttgccttaggtggctgtagcatccctaccacccaggacactggtgtgaatgacacaactcaagttgggaggggaacagggaaggaagggatggatgggggtggtgtatcttattctgtttaagcagaacaccttgtttgcggtgttggaacatggttcctttggcagaagtgctttttttttaatcgcagtactatttttataaagcaagaactattccatgccttggagaatgaatcaattttttaactgtgctatggagtagaagcaggaggttttcaacctagtcacagagcagcacctaccccctcctcctttccacacctgcaaactcttttacttgggctgaatatttagtgtaattacatctcagctttgagggctcctgtggcaaattcccggattaaaaggttccctggttgtgaaaatacatgagataaatcatgaaggccactatcatcctccttctgcttgcacaagtttcctgggctggaccgtttcaacagagaggcttatttgactttatgctagaagatgaggcttctgggataggcccagaagttcctgatgaccgcgacttcgagccctccctaggcccagtgtgccccttccgctgtcaatgccatcttcgagtggtccagtgttctgatttgggtctggacaaagtgccaaaggatcttccccctgacacaactctgctagacctgcaaaacaacaaaataaccgaaatcaaagatggagactttaagaacctgaagaaccttcacgcattgattcttgtcaacaataaaattagcaaagttagtcctggagcatttacacctttggtgaagttggaacgactttatctgtccaagaatcagctgaaggaattgccagaaaaaatgcccaaaactcttcaggaaactgggcaccaatccgctgaagagctcaggaattgaaaatggggctttccagggaatgaagaagctctcctacatccgcattgctgataccaatatcaccagcattcctcaaggtcttcctccttcccttacggaattacatcttgatggcaacaaaatcagcagagttgatgcagctagcctgaaaggactgaataatttggctaagttgggattgagtttcaacagcatctctgctgttgacaatggctctctggccaacacgcctcatctgagggagcttcacttggacaacaacaagcttaccagagtacctggtgggctggcagagcataagtacatccaggttgtctaccttcataacaacaatatctctgtagttggatcaagtgacttctgcccacctggacacaacaccaaaaaggcttcttattcgggtgtgagtcttttcagcaacccggtccagtactgggagatacagccatccaccttcagatgtgtctacgtgcgctctgccattcaactcggaaactataagtaattctcaagaaagccctcatttttataacctggcaaaatcttgttaatgtcattgctaaaaaataaataaaagctagatactggaaacctaactgcaatgtggatgttttacccacatgacttattatgcataaagccaaatttccagtttaagtaattgcctacaataaaaagaaattttgcctgccattttcagaatcatcttttgaagctttctgttgatgttaactgagctactagagatattcttatttcactaaatgtaaaatttggagtaaatatatatgtcaatatttagtaaagcttttcttttttaatttccaggaaaaaataaaaagagtatgagtcttctgtaattcattgagcagttagctcatttgagataaagtcaaatgccaaacactagctctgtattaatccccatcattactggtaaagcctcatttgaatgtgtgaattcaatacaggctatgtaaaatttttactaatgtcattattttgaaaaaataaatttaaaaatacattcaaaatactattgtatacaagcttaattgttaatattccctaaacacaattttatgaagggagaagacattggtttgttgacaataacagtacatcttttcaagttctcagctatttcttctacctctccctatcttacatttgagtatggtaacttatgtcatctatgttgaatgtaagcttataaagcacaaagcatacatttcctgactggtctagagaactgatgtttcaatttacccctctgctaaataaatattaaaactatcatgtgacttcatgt

SEQ ID NO: 448987 - DNA, 3768 bp, Homo sapiens
ttagattatgacataaatcttgtaaaaacctgtcagttattttcatctatgagagaagaggagcccaaactctcgcccacctgttcttaaccagaaaacccactgactttgaaaatctcacctctgccacccatctacttgcattcgtctttggcagacctcaagataaatatgggttaatgcctgcatgatgcctctgaattcaggaattgcagggaaaactcggggctttgtgccagtctctaagttggcaactttggctgaacaaatgagtagtggcttcagtgtccttgcgtacacattctgtggattgatttaatggagttgtcagcatgatcatcatcttctagccaggggcatagttgccaaggccatttacctctttctaagaagaaacagaattatgtgtatatatgagagaaagaaacaagaatgcgtgaatgaggatgaagaaacatttaccccatgtactcaagacatttcagttttaaaagtcactttcctattagacttcttgaaaaagattctcacatagcctctatgtaatcagacaaatgacatttgatttcaagagcagaggggtaaacatcctctgctaatcgacaggtagcaggtgtcagaggaggcataatattaatagcgccaccttctgttgggtcagtggagatgggtgaggagcagcacagagcagcagggatcatcacatgcagccaaacttggcctctgaagggggaaggtagtgggaataggtggtgagagaactcacatttttctcttgtcctggttttatatttcggagggaaaggattatttggccccattaagaattaagaggctgggtgcggtggctcacgtctgtaatcccagcaccttgggaggcccaggcaggcagatcacctgaggtcgggagttcgagaccagcgtgaccaacgtggagaaacccccgtctctactaaaaatacaaaaaattagctgggcatggtggtgcatgcctgtgattccagtttgcctccagctatgtgttttattggcgggattactttgaggaccagccccttctgtatcccccaggctttgacggaagagtcgtggtgtatcccagcaaccagactttaaaggactacctcagctggcgacaagcagattgtcacatcaataatctttataatacagttttctgggcacttatacaacaatctggactaacaccagtacaagcccaagggagattacagggaactcttgcagcagacaagaatgagattttgttttctgaattcaacatcaactataataatgagccgccgatgtataggaaagggactgtgttgatatggcagaaggtggatgaagtgatgacaaaagaaattaagctgccaacagaaatggaaggaaaaaagatggcagtgacccggaccaggacaaagccagtgcccttgcactgcgatatcatcggggatgctttctggaaggaacatccagagattctagatgaagacagctgacccttttgcgcttcagttctggtgtgcttaaccatgcaagccctcccacctcccagggctccttgccttaggtggctgtagcatccctaccacccaggacactggtgtgaatgacacaactcaagttgggaggggaacagggaaggaagggatggatgggggtggtgtatcttattctgtttaagcagaacaccttgtttgcggtgttggaacatggttcctttggcagaagtgctttttttttaatcgcagtactatttttataaagcaagaactattccatgccttggagaatgaatcaattttttaactgtgctatggagtagaagcaggaggttttcaacctagtcacagagcagcacctaccccctcctcctttccacacctgcaaactcttttacttgggctgaatatttagtgtaattacatctcagctttgagggctcctgtggcaaattcccggattaaaaggttccctggttgtgaaaatacatgagataaatcatgaaggccactatcatcctccttctgcttgcacaagtttcctgggctggaccgtttcaacagagaggcttatttgactttatgctagaagatgaggcttctgggataggcccagaagttcctgatgaccgcgacttcgagccctccctaggcccagtgtgccccttccgctgtcaatgccatcttcgagtggtccagtgttctgatttgggtctggacaaagtgccaaaggatcttccccctgacacaactctgctagacctgcaaaacaacaaaataaccgaaatcaaagatggagactttaagaacctgaagaaccttcacgcattgattcttgtcaacaataaaattagcaaagttagtcctggagcatttacacctttggtgaagttggaacgactttatctgtcaactgggcaccaatccgctgaagagctcaggaattgaaaatggggctttccagggaatgaagaagctctcctacatccgcattgctgataccaatatcaccagcattcctcaaggtcttcctccttcccttacggaattacatcttgatggcaacaaaatcagcagagttgatgcagctagcctgaaaggactgaataatttggctaagttgggattgagtttcaacagcatctctgctgttgacaatggctctctggccaacacgcctcatctgagggagcttcacttggacaacaacaagcttaccagagtacctggtgggctggcagagcataagtacatccaggttgtctaccttcataacaacaatatctctgtagttggatcaagtgacttctgcccacctggacacaacaccaaaaaggcttcttattcgggtgtgagtcttttcagcaacccggtccagtactgggagatacagccatccaccttcagatgtgtctacgtgcgctctgccattcaactcggaaactataagtaattctcaagaaagccctcatttttataacctggcaaaatcttgttaatgtcattgctaaaaaataaataaaagctagatactggaaacctaactgcaatgtggatgttttacccacatgacttattatgcataaagccaaatttccagtttaagtaattgcctacaataaaaagaaattttgcctgccattttcagaatcatcttttgaagctttctgttgatgttaactgagctactagagatattcttatttcactaaatgtaaaatttggagtaaatatatatgtcaatatttagtaaagcttttcttttttaatttccaggaaaaaataaaaagagtatgagtcttctgtaattcattgagcagttagctcatttgagataaagtcaaatgccaaacactagctctgtattaatccccatcattactggtaaagcctcatttgaatgtgtgaattcaatacaggctatgtaaaatttttactaatgtcattattttgaaaaaataaatttaaaaatacattcaaaatactattgtatacaagcttaattgttaatattccctaaacacaattttatgaagggagaagacattggtttgttgacaataacagtacatcttttcaagttctcagctatttcttctacctctccctatcttacatttgagtatggtaacttatgtcatctatgttgaatgtaagcttataaagcacaaagcatacatttcctgactggtctagagaactgatgtttcaatttacccctctgctaaataaatattaaaactatcatgtgacttcatgt

SEQ ID NO: 448988 - DNA, 3782 bp, Homo sapiens
ttagattatgacataaatcttgtaaaaacctgtcagttattttcatctatgagagaagaggagcccaaactctcgcccacctgttcttaaccagaaaacccactgactttgaaaatctcacctctgccacccatctacttgcattcgtctttggcagacctcaagataaatatgggttaatgcctgcatgatgcctctgaattcaggaattgcagggaaaactcggggctttgtgccagtctctaagttggcaactttggctgaacaaatgagtagtggcttcagtgtccttgcgtacacattctgtggattgatttaatggagttgtcagcatgatcatcatcttctagccaggggcatagttgccaaggccatttacctctttctaagaagaaacagaattatgtgtatatatgagagaaagaaacaagaatgcgtgaatgaggatgaagaaacatttaccccatgtactcaagacatttcagttttaaaagtcactttcctattagacttcttgaaaaagattctcacatagcctctatgtaatcagacaaatgacatttgatttcaagagcagaggggtaaacatcctctgctaatcgacaggtagcaggtgtcagaggaggcataatattaatagcgccaccttctgttgggtcagtggagatgggtgaggagcagcacagagcagcagggatcatcacatgcagccaaacttggcctctgaagggggaaggtagtgggaataggtggtgagagaactcacatttttctcttgtcctggttttatatttcggagggaaaggattatttggccccattaagaattaagaggctgggtgcggtggctcacgtctgtaatcccagcaccttgggaggcccaggcaggcagatcacctgaggtcgggagttcgagaccagcgtgaccaacgtggagaaacccccgtctctactaaaaatacaaaaaattagctgggcatggtggtgcatgcctgtgattccagtttgcctccagctatgtgttttattggcgggattactttgaggaccagccccttctgtatcccccaggctttgacggaagagtcgtggtgtatcccagcaaccagactttaaaggactacctcagctggcgacaagcagattgtcacatcaataatctttataatacagttttctgggcacttatacaacaatctggactaacaccagtacaagcccaagggagattacagggaactcttgcagcagacaagaatgagattttgttttctgaattcaacatcaactataataatgagccgccgatgtataggaaagggactgtgttgatatggcagaaggtggatgaagtgatgacaaaagaaattaagctgccaacagaaatggaaggaaaaaagatggcagtgacccggaccaggacaaagccagtgcccttgcactgcgatatcatcggggatgctttctggaaggaacatccagagattctagatgaagacagctgacccttttgcgcttcagttctggtgtgcttaaccatgcaagccctcccacctcccagggctccttgccttaggtggctgtagcatccctaccacccaggacactggtgtgaatgacacaactcaagttgggaggggaacagggaaggaagggatggatgggggtggtgtatcttattctgtttaagcagaacaccttgtttgcggtgttggaacatggttcctttggcagaagtgctttttttttaatcgcagtactatttttataaagcaagaactattccatgccttggagaatgaatcaattttttaactgtgctatggagtagaagcaggaggttttcaacctagtcacagagcagcacctaccccctcctcctttccacacctgcaaactcttttacttgggctgaatatttagtgtaattacatctcagctttgagggctcctgtggcaaattcccggattaaaaggttccctggttgtgaaaatacatgagataaatcatgaaggccactatcatcctccttctgcttgcacaagtttcctgggctggaccgtttcaacagagaggcttatttgactttatgctagaagatgaggcttctgggataggcccagaagttcctgatgaccgcgacttcgagccctccctaggcccagtgtgccccttccgctgtcaatgccatcttcgagtggtccagtgttctgatttgggtctggacaaagtgccaaaggatcttccccctgacacaactctgctagacctgcaaaacaacaaaataaccgaaatcaaagatggagactttaagaacctgaagaaccttcacgcattgattcttgtcaacaataaaattagcaaagttagtcctggagcatttacacctttggtgaagttggaacgactttatctgtccaagaatcagctgaaggaattgccagaaaaaatgcccaaaactcttcaggagctgcgtgcccatgagaatgagatcaccaaagtgcgaaaagttactttcaatggactgaaccagatgattgtcataggtcttcctccttcccttacggaattacatcttgatggcaacaaaatcagcagagttgatgcagctagcctgaaaggactgaataatttggctaagttgggattgagtttcaacagcatctctgctgttgacaatggctctctggccaacacgcctcatctgagggagcttcacttggacaacaacaagcttaccagagtacctggtgggctggcagagcataagtacatccaggttgtctaccttcataacaacaatatctctgtagttggatcaagtgacttctgcccacctggacacaacaccaaaaaggcttcttattcgggtgtgagtcttttcagcaacccggtccagtactgggagatacagccatccaccttcagatgtgtctacgtgcgctctgccattcaactcggaaactataagtaattctcaagaaagccctcatttttataacctggcaaaatcttgttaatgtcattgctaaaaaataaataaaagctagatactggaaacctaactgcaatgtggatgttttacccacatgacttattatgcataaagccaaatttccagtttaagtaattgcctacaataaaaagaaattttgcctgccattttcagaatcatcttttgaagctttctgttgatgttaactgagctactagagatattcttatttcactaaatgtaaaatttggagtaaatatatatgtcaatatttagtaaagcttttcttttttaatttccaggaaaaaataaaaagagtatgagtcttctgtaattcattgagcagttagctcatttgagataaagtcaaatgccaaacactagctctgtattaatccccatcattactggtaaagcctcatttgaatgtgtgaattcaatacaggctatgtaaaatttttactaatgtcattattttgaaaaaataaatttaaaaatacattcaaaatactattgtatacaagcttaattgttaatattccctaaacacaattttatgaagggagaagacattggtttgttgacaataacagtacatcttttcaagttctcagctatttcttctacctctccctatcttacatttgagtatggtaacttatgtcatctatgttgaatgtaagcttataaagcacaaagcatacatttcctgactggtctagagaactgatgtttcaatttacccctctgctaaataaatattaaaactatcatgtgacttcatgt

SEQ ID NO: 448989 - DNA, 3177 bp, Homo sapiens
ttagattatgacataaatcttgtaaaaacctgtcagttattttcatctatgagagaagaggagcccaaactctcgcccacctgttcttaaccagaaaacccactgactttgaaaatctcacctctgccacccatctacttgcattcgtctttggcagacctcaagataaatatgggttaatgcctgcatgatgcctctgaattcaggaattgcagggaaaactcggggctttgtgccagtctctaagttggcaactttggctgaacaaatgagtagtggcttcagtgtccttgcgtacacattctgtggattgatttaatggagttgtcagcatgatcatcatcttctagccaggggcatagttgccaaggccatttacctctttctaagaagaaacagaattatgtgtatatatgagagaaagaaacaagaatgcgtgaatgaggatgaagaaacatttaccccatgtactcaagacatttcagttttaaaagtcactttcctattagacttcttgaaaaagattctcacatagcctctatgtaatcagacaaatgacatttgatttcaagagcagaggggtaaacatcctctgctaatcgacaggtagcaggtgtcagaggaggcataatattaatagcgccaccttctgttgggtcagtggagatgggtgaggagcagcacagagcagcagggatcatcacatgcagccaaacttggcctctgaagggggaaggtagtgggaataggtggtgagagaactcacatttttctcttgtcctggttttatatttcggagggaaaggattatttggccccattaagaattaagaggctgggtgcggtggctcacgtctgtaatcccagcaccttgggaggcccaggcaggcagatcacctgaggtcgggagttcgagaccagcgtgaccaacgtggagaaacccccgtctctactaaaaatacaaaaaattagctgggcatggtggtgcatgcctgtgattccagtttgcctccagctatgtgttttattggcgggattactttgaggaccagccccttctgtatcccccaggctttgacggaagagtcgtggtgtatcccagcaaccagactttaaaggactacctcagctggcgacaagcagattgtcacatcaataatctttataatacagttttctgggcacttatacaacaatctggactaacaccagtacaagcccaagggagattacagggaactcttgcagcagacaagaatgagattttgttttctgaattcaacatcaactataataatgagccgccgatgtataggaaagggactgtgttgatatggcagaaggtggatgaagtgatgacaaaagaaattaagctgccaacagaaatggaaggaaaaaagatggcagtgacccggaccaggacaaagccagtgcccttgcactgcgatatcatcggggatgctttctggaaggaacatccagagattctagatgaagacagctgacccttttgcgcttcagttctggtgtgcttaaccatgcaagccctcccacctcccagggctccttgccttaggtggctgtagcatccctaccacccaggacactggtgtgaatgacacaactcaagttgggaggggaacagggaaggaagggatggatgggggtggtgtatcttattctgtttaagcagaacaccttgtttgcggtgttggaacatggttcctttggcagaagtgctttttttttaatcgcagtactatttttataaagcaagaactattccatgccttggagaatgaatcaattttttaactgtgctatggagtagaagcaggaggttttcaacctagtcacagagcagcacctaccccctcctcctttccacacctgcaaactcttttacttgggctgaatatttagtgtaattacatctcagctttgagggctcctgtggcaaattcccggattaaaaggttccctggttgtgaaaatacatgagataaatcatgaaggccactatcatcctccttctgcttgcacaagtttcctgggctggaccgtttcaacagagaggcttatttgactttatgctagaagatgaggcttctgggataggcccagaagttcctgatgaccgcgacttcgagccctccctaggcccagtgtgccccttccgctgtcaatgccatcttcgagtggtccagtgttctgatttgggtctggacaaagtgccaaaggatcttccccctgacacaactctgctagacctgcaaaacaacaaaataaccgaaatcaaagatggagactttaagaacctgaagaaccttcacgcattgattcttgtcaacaataaaattagcaaagttagtcctggagcatttacacctttggtgaagttggaacgactttatctgtccaagaatcagctgaaggaattgccagaaaaaatgcccaaaactcttcaggagctgcgtgcccatgagaatgagatcaccaaagtgcgaaaagttactttcaatggactgaaccagatgattgtcatagaactgggcaccaatccgctgaagagctcaggaattgaaaatggggctttccagggaatgaagaagctctcctacatccgcattgctgataccaatatcaccagcattcctcaaggtcttcctccttcccttacggaattacatcttgatggcaacaaaatcagcagagttgatgcagctagcctgaaaggactgaataatttggctaagttgggattgagtttcaacagcatctctgctgttgacaatggctctctggccaacacgcctcatctgagggagcttcacttggacaacaacaagcttaccagagtacctggtgggctggcagagcataagtacatccaggttgtctaccttcataacaacaatatctctgtagttggatcaagtgacttctgcccacctggacacaacaccaaaaaggcttcttattcgggtgtgagtcttttcagcaacccggtccagtactgggagatacagccatccaccttcagatgtgtctacgtgcgctctgccattcaactcggaaactataagtaattctcaagaaagccctcatttttataacctggcaaaatcttgttaatgtcattgctaaaaaataaataaaagctagatactggaaacc

SEQ ID NO: 448990 - DNA, 3551 bp, Homo sapiens
ttagattatgacataaatcttgtaaaaacctgtcagttattttcatctatgagagaagaggagcccaaactctcgcccacctgttcttaaccagaaaacccactgactttgaaaatctcacctctgccacccatctacttgcattcgtctttggcagacctcaagataaatatgggttaatgcctgcatgatgcctctgaattcaggaattgcagggaaaactcggggctttgtgccagtctctaagttggcaactttggctgaacaaatgagtagtggcttcagtgtccttgcgtacacattctgtggattgatttaatggagttgtcagcatgatcatcatcttctagccaggggcatagttgccaaggccatttacctctttctaagaagaaacagaattatgtgtatatatgagagaaagaaacaagaatgcgtgaatgaggatgaagaaacatttaccccatgtactcaagacatttcagttttaaaagtcactttcctattagacttcttgaaaaagattctcacatagcctctatgtaatcagacaaatgacatttgatttcaagagcagaggggtaaacatcctctgctaatcgacaggtagcaggtgtcagaggaggcataatattaatagcgccaccttctgttgggtcagtggagatgggtgaggagcagcacagagcagcagggatcatcacatgcagccaaacttggcctctgaagggggaaggtagtgggaataggtggtgagagaactcacatttttctcttgtcctggttttatatttcggagggaaaggattatttggccccattaagaattaagaggctgggtgcggtggctcacgtctgtaatcccagcaccttgggaggcccaggcaggcagatcacctgaggtcgggagttcgagaccagcgtgaccaacgtggagaaacccccgtctctactaaaaatacaaaaaattagctgggcatggtggtgcatgcctgtgattccagtttgcctccagctatgtgttttattggcgggattactttgaggaccagccccttctgtatcccccaggctttgacggaagagtcgtggtgtatcccagcaaccagactttaaaggactacctcagctggcgacaagcagattgtcacatcaataatctttataatacagttttctgggcacttatacaacaatctggactaacaccagtacaagcccaagggagattacagggaactcttgcagcagacaagaatgagattttgttttctgaattcaacatcaactataataatgagccgccgatgtataggaaagggactgtgttgatatggcagaaggtggatgaagtgatgacaaaagaaattaagctgccaacagaaatggaaggaaaaaagatggcagtgacccggaccaggacaaagccagtgcccttgcactgcgatatcatcggggatgctttctggaaggaacatccagagattctagatgaagacagctgacccttttgcgcttcagttctggtgtgcttaaccatgcaagccctcccacctcccagggctccttgccttaggtggctgtagcatccctaccacccaggacactggtgtgaatgacacaactcaagttgggaggggaacagggaaggaagggatggatgggggtggtgtatcttattctgtttaagcagaacaccttgtttgcggtgttggaacatggttcctttggcagaagtgctttttttttaatcgcagtactatttttataaagcaagaactattccatgccttggagaatgaatcaattttttaactgtgctatggagtagaagcaggaggttttcaacctagtcacagagcagcacctaccccctcctcctttccacacctgcaaactcttttacttgggctgaatatttagtgtaattacatctcagctttgagggctcctgtggcaaattcccggattaaaaggttccctggttgtgaaaatacatgagataaatcatgaaggccactatcatcctccttctgcttgcacaagtttcctgggctggaccgtttcaacagagaggcttatttgactttatgctagaagatgaggcttctgggataggcccagaagttcctgatgaccgcgacttcgagccctccctaggcccagtgtgccccttccgctgtcaatgccatcttcgagtggtccagtgttctgatttgggtctggacaaagtgccaaaggatcttccccctgacacaactctgctagacctgcaaaacaacaaaataaccgaaatcaaagatggagactttaagaacctgaagaaccttcacgcattgattcttgtcaacaataaaattagcaaagttagtcctggagcatttacacctttggtgaagttggaacgactttatctgtccaagaatcagctgaaggaattgccagaaaaaatgcccaaaactcttcaggagctgcgtgcccatgagaatgagatcaccaaagtgcgaaaagttactttcaatggactgaaccagatgattgtcatagaactgggcaccaatccgctgaagagctcaggaattgaaaatggggctttccagggaatgaagaagctctcctacatccgcattgctgataccaatatcaccagcattcctcaaggtcttcctccttcccttacggaattacatcttgatggcaacaaaatcagcagagttgatgcagctagcctgaaaggactgaataatttggctaagttgggattgagtttcaacagcatctctgctgttgacaatggctctctggccaacacgcctcatctgagggagcttcacttggacaacaacaagcttaccagagtacctggtgggctggcagagcataagtacatccaggttgtctaccttcataacaacaatatctctgtagttggatcaagtgacttctgcccacctggacacaacaccaaaaaggcttcttattcgggtgtgagtcttttcagcaacccggtccagtactgggagatacagccatccaccttcagatgtgtctacgtgcgctctgccattcaactcggaaactataagtaattctcaagaaagccctcatttttataacctggcaaaatcttgttaatgtcattgctaaaaaataaataaaagctagatactggaaacccaaaaaaaaaaaaaaaaaaaaaaaaaagaaaaaacaaaaaaaaaaaaaaaaaacaaaaaaaaaaaaaaaaaaaaaaaaaaaaaaaaaaaaaaggggggggcgggcaaaaaaagacccagagagggagacaacaaaaagaaacacacccagctatattagtgaaaaaaagggacgcacacaaaaagagaaggaataataaaaaacaaaaagcacgggtaggcgagaacaaaaagcacggagaaggagagaaaacaaaagacacaagagagaaacaatagtgggagagagacaccaaacaaacgagaggggggaaaaaaaaaaatagggaagaaaccacacacaaggaaaaaaaagaaacgagagggaaccaaaaa

SEQ ID NO: 448991 - DNA, 3455 bp, Homo sapiens
ttagattatgacataaatcttgtaaaaacctgtcagttattttcatctatgagagaagaggagcccaaactctcgcccacctgttcttaaccagaaaacccactgactttgaaaatctcacctctgccacccatctacttgcattcgtctttggcagacctcaagataaatatgggttaatgcctgcatgatgcctctgaattcaggaattgcagggaaaactcggggctttgtgccagtctctaagttggcaactttggctgaacaaatgagtagtggcttcagtgtccttgcgtacacattctgtggattgatttaatggagttgtcagcatgatcatcatcttctagccaggggcatagttgccaaggccatttacctctttctaagaagaaacagaattatgtgtatatatgagagaaagaaacaagaatgcgtgaatgaggatgaagaaacatttaccccatgtactcaagacatttcagttttaaaagtcactttcctattagacttcttgaaaaagattctcacatagcctctatgtaatcagacaaatgacatttgatttcaagagcagaggggtaaacatcctctgctaatcgacaggtagcaggtgtcagaggaggcataatattaatagcgccaccttctgttgggtcagtggagatgggtgaggagcagcacagagcagcagggatcatcacatgcagccaaacttggcctctgaagggggaaggtagtgggaataggtggtgagagaactcacatttttctcttgtcctggttttatatttcggagggaaaggattatttggccccattaagaattaagaggctgggtgcggtggctcacgtctgtaatcccagcaccttgggaggcccaggcaggcagatcacctgaggtcgggagttcgagaccagcgtgaccaacgtggagaaacccccgtctctactaaaaatacaaaaaattagctgggcatggtggtgcatgcctgtgattccagtttgcctccagctatgtgttttattggcgggattactttgaggaccagccccttctgtatcccccaggctttgacggaagagtcgtggtgtatcccagcaaccagactttaaaggactacctcagctggcgacaagcagattgtcacatcaataatctttataatacagttttctgggcacttatacaacaatctggactaacaccagtacaagcccaagggagattacagggaactcttgcagcagacaagaatgagattttgttttctgaattcaacatcaactataataatgagccgccgatgtataggaaagggactgtgttgatatggcagaaggtggatgaagtgatgacaaaagaaattaagctgccaacagaaatggaaggaaaaaagatggcagtgacccggaccaggacaaagccagtgcccttgcactgcgatatcatcggggatgctttctggaaggaacatccagagattctagatgaagacagctgacccttttgcgcttcagttctggtgtgcttaaccatgcaagccctcccacctcccagggctccttgccttaggtggctgtagcatccctaccacccaggacactggtgtgaatgacacaactcaagttgggaggggaacagggaaggaagggatggatgggggtggtgtatcttattctgtttaagcagaacaccttgtttgcggtgttggaacatggttcctttggcagaagtgctttttttttaatcgcagtactatttttataaagcaagaactattccatgccttggagaatgaatcaattttttaactgtgctatggagtagaagcaggaggttttcaacctagtcacagagcagcacctaccccctcctcctttccacacctgcaaactcttttacttgggctgaatatttagtgtaattacatctcagctttgagggctcctgtggcaaattcccggattaaaaggttccctggttgtgaaaatacatgagataaatcatgaaggccactatcatcctccttctgcttgcacaagtttcctgggctggaccgtttcaacagagaggcttatttgactttatgctagaagatgaggcttctgggataggcccagaagttcctgatgaccgcgacttcgagccctccctaggcccagtgtgccccttccgctgtcaatgccatcttcgagtggtccagtgttctgatttgggtcttcctccttcccttacggaattacatcttgatggcaacaaaatcagcagagttgatgcagctagcctgaaaggactgaataatttggctaagttgggattgagtttcaacagcatctctgctgttgacaatggctctctggccaacacgcctcatctgagggagcttcacttggacaacaacaagcttaccagagtacctggtgggctggcagagcataagtacatccaggttgtctaccttcataacaacaatatctctgtagttggatcaagtgacttctgcccacctggacacaacaccaaaaaggcttcttattcgggtgtgagtcttttcagcaacccggtccagtactgggagatacagccatccaccttcagatgtgtctacgtgcgctctgccattcaactcggaaactataagtaattctcaagaaagccctcatttttataacctggcaaaatcttgttaatgtcattgctaaaaaataaataaaagctagatactggaaacctaactgcaatgtggatgttttacccacatgacttattatgcataaagccaaatttccagtttaagtaattgcctacaataaaaagaaattttgcctgccattttcagaatcatcttttgaagctttctgttgatgttaactgagctactagagatattcttatttcactaaatgtaaaatttggagtaaatatatatgtcaatatttagtaaagcttttcttttttaatttccaggaaaaaataaaaagagtatgagtcttctgtaattcattgagcagttagctcatttgagataaagtcaaatgccaaacactagctctgtattaatccccatcattactggtaaagcctcatttgaatgtgtgaattcaatacaggctatgtaaaatttttactaatgtcattattttgaaaaaataaatttaaaaatacattcaaaatactattgtatacaagcttaattgttaatattccctaaacacaattttatgaagggagaagacattggtttgttgacaataacagtacatcttttcaagttctcagctatttcttctacctctccctatcttacatttgagtatggtaacttatgtcatctatgttgaatgtaagcttataaagcacaaagcatacatttcctgactggtctagagaactgatgtttcaatttacccctctgctaaataaatattaaaactatcatgtgacttcatgt

SEQ ID NO: 448992 - DNA, 3234 bp, Homo sapiens
ttagattatgacataaatcttgtaaaaacctgtcagttattttcatctatgagagaagaggagcccaaactctcgcccacctgttcttaaccagaaaacccactgactttgaaaatctcacctctgccacccatctacttgcattcgtctttggcagacctcaagataaatatgggttaatgcctgcatgatgcctctgaattcaggaattgcagggaaaactcggggctttgtgccagtctctaagttggcaactttggctgaacaaatgagtagtggcttcagtgtccttgcgtacacattctgtggattgatttaatggagttgtcagcatgatcatcatcttctagccaggggcatagttgccaaggccatttacctctttctaagaagaaacagaattatgtgtatatatgagagaaagaaacaagaatgcgtgaatgaggatgaagaaacatttaccccatgtactcaagacatttcagttttaaaagtcactttcctattagacttcttgaaaaagattctcacatagcctctatgtaatcagacaaatgacatttgatttcaagagcagaggggtaaacatcctctgctaatcgacaggtagcaggtgtcagaggaggcataatattaatagcgccaccttctgttgggtcagtggagatgggtgaggagcagcacagagcagcagggatcatcacatgcagccaaacttggcctctgaagggggaaggtagtgggaataggtggtgagagaactcacatttttctcttgtcctggttttatatttcggagggaaaggattatttggccccattaagaattaagaggctgggtgcggtggctcacgtctgtaatcccagcaccttgggaggcccaggcaggcagatcacctgaggtcgggagttcgagaccagcgtgaccaacgtggagaaacccccgtctctactaaaaatacaaaaaattagctgggcatggtggtgcatgcctgtgattccagtttgcctccagctatgtgttttattggcgggattactttgaggaccagccccttctgtatcccccaggctttgacggaagagtcgtggtgtatcccagcaaccagactttaaaggactacctcagctggcgacaagcagattgtcacatcaataatctttataatacagttttctgggcacttatacaacaatctggactaacaccagtacaagcccaagggagattacagggaactcttgcagcagacaagaatgagattttgttttctgaattcaacatcaactataataatgagccgccgatgtataggaaagggactgtgttgatatggcagaaggtggatgaagtgatgacaaaagaaattaagctgccaacagaaatggaaggaaaaaagatggcagtgacccggaccaggacaaagccagtgcccttgcactgcgatatcatcggggatgctttctggaaggaacatccagagattctagatgaagacagctgacccttttgcgcttcagttctggtgtgcttaaccatgcaagccctcccacctcccagggctccttgccttaggtggctgtagcatccctaccacccaggacactggtgtgaatgacacaactcaagttgggaggggaacagggaaggaagggatggatgggggtggtgtatcttattctgtttaagcagaacaccttgtttgcggtgttggaacatggttcctttggcagaagtgctttttttttaatcgcagtactatttttataaagcaagaactattccatgccttggagaatgaatcaattttttaactgtgctatggagtagaagcaggaggttttcaacctagtcacagagcagcacctaccccctcctcctttccacacctgcaaactcttttacttgggctgaatatttagtgtaattacatctcagctttgagggctcctgtggcaaattcccggattaaaaggttccctggttgtgaaaatacatgagataaatcatgaaggccactatcatcctccttctgcttgcacaagtttcctgggctggaccgtttcaacagagaggcttatttgactttatgctagaagatgaggcttctgggataggcccagaagttcctgatgaccgcgacttcgagccctccctaggcccagtgtgccccttccgctgtcaatgccatcttcgagtggtccagtgttctgatttgggtctggacaaagtgccaaaggatcttccccctgacacaactctgctagacctgcaaaacaacaaaataaccgaaatcaaagatggagactttaagaacctgaagaaccttcacgcattgattcttgtcaacaataaaattagcaaagttagtcctggagcatttacacctttggtgaagttggaacgactttatctgtccaagaatcagctgaaggaattgccagaaaaaatgcccaaaactcttcaggagctgcgtgcccatgagaatgagatcaccaaagtgcgaaaagttactttcaatggactgaaccagatgattgtcatagaactgggcaccaatccgctgaagagctcaggaattgaaaatggggctttccagggaatgaagaagctctcctacatccgcattgctgataccaatatcaccagcattcctcaaggtcttcctccttcccttacggaattacatcttgatggcaacaaaatcagcagagttgatgcagctagcctgaaaggactgaataatttggctaagttgggattgagtttcaacagcatctctgctgttgacaatggctctctggccaacacgcctcatctgagggagcttcacttggacaacaacaagcttaccagagtacctggtgggctggcagagcataagtacatccaggttgtctaccttcataacaacaatatctctgtagttggatcaagtgacttctgcccacctggacacaacaccaaaaaggcttcttattcgggtgtgagtcttttcagcaacccggtccagtactgggagatacagccatccaccttcagatgtgtctacgtgcgctctgccattcaactcggaaactataagtaattctcaagaaagccctcatttttatccacttcatgtggcaaatcccttttattttagcaacagcctgaggttttctttcacagtgagaaatccaatttgcacattggattgtggacaaatccgtgactgctgatattttctatat

SEQ ID NO: 448993 - DNA, 3288 bp, Homo sapiens
ttagattatgacataaatcttgtaaaaacctgtcagttattttcatctatgagagaagaggagcccaaactctcgcccacctgttcttaaccagaaaacccactgactttgaaaatctcacctctgccacccatctacttgcattcgtctttggcagacctcaagataaatatgggttaatgcctgcatgatgcctctgaattcaggaattgcagggaaaactcggggctttgtgccagtctctaagttggcaactttggctgaacaaatgagtagtggcttcagtgtccttgcgtacacattctgtggattgatttaatggagttgtcagcatgatcatcatcttctagccaggggcatagttgccaaggccatttacctctttctaagaagaaacagaattatgtgtatatatgagagaaagaaacaagaatgcgtgaatgaggatgaagaaacatttaccccatgtactcaagacatttcagttttaaaagtcactttcctattagacttcttgaaaaagattctcacatagcctctatgtaatcagacaaatgacatttgatttcaagagcagaggggtaaacatcctctgctaatcgacaggtagcaggtgtcagaggaggcataatattaatagcgccaccttctgttgggtcagtggagatgggtgaggagcagcacagagcagcagggatcatcacatgcagccaaacttggcctctgaagggggaaggtagtgggaataggtggtgagagaactcacatttttctcttgtcctggttttatatttcggagggaaaggattatttggccccattaagaattaagaggctgggtgcggtggctcacgtctgtaatcccagcaccttgggaggcccaggcaggcagatcacctgaggtcgggagttcgagaccagcgtgaccaacgtggagaaacccccgtctctactaaaaatacaaaaaattagctgggcatggtggtgcatgcctgtgattccagtttgcctccagctatgtgttttattggcgggattactttgaggaccagccccttctgtatcccccaggctttgacggaagagtcgtggtgtatcccagcaaccagactttaaaggactacctcagctggcgacaagcagattgtcacatcaataatctttataatacagttttctgggcacttatacaacaatctggactaacaccagtacaagcccaagggagattacagggaactcttgcagcagacaagaatgagattttgttttctgaattcaacatcaactataataatgagccgccgatgtataggaaagggactgtgttgatatggcagaaggtggatgaagtgatgacaaaagaaattaagctgccaacagaaatggaaggaaaaaagatggcagtgacccggaccaggacaaagccagtgcccttgcactgcgatatcatcggggatgctttctggaaggaacatccagagattctagatgaagacagctgacccttttgcgcttcagttctggtgtgcttaaccatgcaagccctcccacctcccagggctccttgccttaggtggctgtagcatccctaccacccaggacactggtgtgaatgacacaactcaagttgggaggggaacagggaaggaagggatggatgggggtggtgtatcttattctgtttaagcagaacaccttgtttgcggtgttggaacatggttcctttggcagaagtgctttttttttaatcgcagtactatttttataaagcaagaactattccatgccttggagaatgaatcaattttttaactgtgctatggagtagaagcaggaggttttcaacctagtcacagagcagcacctaccccctcctcctttccacacctgcaaactcttttacttgggctgaatatttagtgtaattacatctcagctttgagggctcctgtggcaaattcccggattaaaaggttccctggttgtgaaaatacatgagataaatcatgaaggccactatcatcctccttctgcttgcacaagtttcctgggctggaccgtttcaacagagaggcttatttgactttatgctagaagatgaggcttctgggataggcccagaagttcctgatgaccgcgacttcgagccctccctaggcccagtgtgccccttccgctgtcaatgccatcttcgagtggtccagtgttctgatttgggtctggacaaagtgccaaaggatcttccccctgacacaactctgctagacctgcaaaacaacaaaataaccgaaatcaaagatggagactttaagaacctgaagaaccttcacgcattgattcttgtcaacaataaaattagcaaagttagtcctggagcatttacacctttggtgaagttggaacgactttatctgtccaagaatcagctgaaggaattgccagaaaaaatgcccaaaactcttcaggagctgcgtgcccatgagaatgagatcaccaaagtgcgaaaagttactttcaatggactgaaccagatgattgtcatagaactgggcaccaatccgctgaagagctcaggaattgaaaatggggctttccagggaatgaagaagctctcctacatccgcattgctgataccaatatcaccagcattcctcaaggtcttcctccttcccttacggaattacatcttgatggcaacaaaatcagcagagttgatgcagctagcctgaaaggactgaataatttggctaagttgggattgagtttcaacagcatctctgctgttgacaatggctctctggccaacacgcctcatctgagggagcttcacttggacaacaacaagcttaccagagtacctggtgggctggcagagcataagtacatccaggttgtctaccttcataacaacaatatctctgtagttggatcaagtgacttctgcccacctggacacaacaccaaaaaggcttcttattcgggtgtgagtcttttcagcaacccggtccagtactgggagatacagccatccaccttcagatgtgtctacgtgcgctctgccattcaactcggaaactataaaaaaaataaaaagagtatgagtcttctgtaattcattgagcagttagctcatttgagataaagtcaaatgccaaacactagctctgtattaatccccatcattactggtaaagcctcatttgaatgtgtgaattcaatacaggctatgtaaaatttttactaatgtcattattttgaaaaaataaatttaaaaatacattcaa

SEQ ID NO: 448994 - DNA, 1198 bp, Homo sapiens
taacctggggaccttataatatacagctagcctgaaaggactgaataatttggctaagttgggattgagtttcaacagcatctctgctgttgacaatggctctctggccaacacgcctcatctgagggagcttcacttggacaacaacaagcttaccagagtacctggtgggctggcagagcataagtacatccaggttgtctaccttcataacaacaatatctctgtagttggatcaagtgacttctgcccacctggacacaacaccaaaaaggcttcttattcgggtgtgagtcttttcagcaacccggtccagtactgggagatacagccatccaccttcagatgtgtctacgtgcgctctgccattcaactcggaaactataagtaattctcaagaaagccctcatttttataacctggcaaaatcttgttaatgtcattgctaaaaaataaataaaagctagatactggaaacctaactgcaatgtggatgttttacccacatgacttattatgcataaagccaaatttccagtttaagtaattgcctacaataaaaagaaattttgcctgccattttcagaatcatcttttgaagctttctgttgatgttaactgagctactagagatattcttatttcactaaatgtaaaatttggagtaaatatatatgtcaatatttagtaaagcttttcttttttaatttccaggaaaaaataaaaagagtatgagtcttctgtaattcattgagcagttagctcatttgagataaagtcaaatgccaaacactagctctgtattaatccccatcattactggtaaagcctcatttgaatgtgtgaattcaatacaggctatgtaaaatttttactaatgtcattattttgaaaaaataaatttaaaaatacattcaaaatactattgtatacaagcttaattgttaatattccctaaacacaattttatgaagggagaagacattggtttgttgacaataacagtacatcttttcaagttctcagctatttcttctacctctccctatcttacatttgagtatggtaacttatgtcatctatgttgaatgtaagcttataaagcacaaagcatacatttcctgactggtctagagaactgatgtttcaatttacccctctgctaaataaatattaaaactatcatgtgacttcatgt

SEQ ID NO: 448995 - DNA, 3214 bp, Homo sapiens
ttagattatgacataaatcttgtaaaaacctgtcagttattttcatctatgagagaagaggagcccaaactctcgcccacctgttcttaaccagaaaacccactgactttgaaaatctcacctctgccacccatctacttgcattcgtctttggcagacctcaagataaatatgggttaatgcctgcatgatgcctctgaattcaggaattgcagggaaaactcggggctttgtgccagtctctaagttggcaactttggctgaacaaatgagtagtggcttcagtgtccttgcgtacacattctgtggattgatttaatggagttgtcagcatgatcatcatcttctagccaggggcatagttgccaaggccatttacctctttctaagaagaaacagaattatgtgtatatatgagagaaagaaacaagaatgcgtgaatgaggatgaagaaacatttaccccatgtactcaagacatttcagttttaaaagtcactttcctattagacttcttgaaaaagattctcacatagcctctatgtaatcagacaaatgacatttgatttcaagagcagaggggtaaacatcctctgctaatcgacaggtagcaggtgtcagaggaggcataatattaatagcgccaccttctgttgggtcagtggagatgggtgaggagcagcacagagcagcagggatcatcacatgcagccaaacttggcctctgaagggggaaggtagtgggaataggtggtgagagaactcacatttttctcttgtcctggttttatatttcggagggaaaggattatttggccccattaagaattaagaggctgggtgcggtggctcacgtctgtaatcccagcaccttgggaggcccaggcaggcagatcacctgaggtcgggagttcgagaccagcgtgaccaacgtggagaaacccccgtctctactaaaaatacaaaaaattagctgggcatggtggtgcatgcctgtgattccagtttgcctccagctatgtgttttattggcgggattactttgaggaccagccccttctgtatcccccaggctttgacggaagagtcgtggtgtatcccagcaaccagactttaaaggactacctcagctggcgacaagcagattgtcacatcaataatctttataatacagttttctgggcacttatacaacaatctggactaacaccagtacaagcccaagggagattacagggaactcttgcagcagacaagaatgagattttgttttctgaattcaacatcaactataataatgagccgccgatgtataggaaagggactgtgttgatatggcagaaggtggatgaagtgatgacaaaagaaattaagctgccaacagaaatggaaggaaaaaagatggcagtgacccggaccaggacaaagccagtgcccttgcactgcgatatcatcggggatgctttctggaaggaacatccagagattctagatgaagacagctgacccttttgcgcttcagttctggtgtgcttaaccatgcaagccctcccacctcccagggctccttgccttaggtggctgtagcatccctaccacccaggacactggtgtgaatgacacaactcaagttgggaggggaacagggaaggaagggatggatgggggtggtgtatcttattctgtttaagcagaacaccttgtttgcggtgttggaacatggttcctttggcagaagtgctttttttttaatcgcagtactatttttataaagcaagaactattccatgccttggagaatgaatcaattttttaactgtgctatggagtagaagcaggaggttttcaacctagtcacagagcagcacctaccccctcctcctttccacacctgcaaactcttttacttgggctgaatatttagtgtaattacatctcagctttgagggctcctgtggcaaattcccggattaaaaggttccctggttgtgaaaatacatgagataaatcatgaaggccactatcatcctccttctgcttgcacaagtttcctgggctggaccgtttcaacagagttgggattgagtttcaacagcatctctgctgttgacaatggctctctggccaacacgcctcatctgagggagcttcacttggacaacaacaagcttaccagagtacctggtgggctggcagagcataagtacatccaggttgtctaccttcataacaacaatatctctgtagttggatcaagtgacttctgcccacctggacacaacaccaaaaaggcttcttattcgggtgtgagtcttttcagcaacccggtccagtactgggagatacagccatccaccttcagatgtgtctacgtgcgctctgccattcaactcggaaactataagtaattctcaagaaagccctcatttttataacctggcaaaatcttgttaatgtcattgctaaaaaataaataaaagctagatactggaaacctaactgcaatgtggatgttttacccacatgacttattatgcataaagccaaatttccagtttaagtaattgcctacaataaaaagaaattttgcctgccattttcagaatcatcttttgaagctttctgttgatgttaactgagctactagagatattcttatttcactaaatgtaaaatttggagtaaatatatatgtcaatatttagtaaagcttttcttttttaatttccaggaaaaaataaaaagagtatgagtcttctgtaattcattgagcagttagctcatttgagataaagtcaaatgccaaacactagctctgtattaatccccatcattactggtaaagcctcatttgaatgtgtgaattcaatacaggctatgtaaaatttttactaatgtcattattttgaaaaaataaatttaaaaatacattcaaaatactattgtatacaagcttaattgttaatattccctaaacacaattttatgaagggagaagacattggtttgttgacaataacagtacatcttttcaagttctcagctatttcttctacctctccctatcttacatttgagtatggtaacttatgtcatctatgttgaatgtaagcttataaagcacaaagcatacatttcctgactggtctagagaactgatgtttcaatttacccctctgctaaataaatattaaaactatcatgtgacttcatgt

SEQ ID NO: 448996 - DNA, 1179 bp, Homo sapiens
actgaggtaataagccctgaggttgtttattagcaacagttgggattgagtttcaacagcatctctgctgttgacaatggctctctggccaacacgcctcatctgagggagcttcacttggacaacaacaagcttaccagagtacctggtgggctggcagagcataagtacatccaggttgtctaccttcataacaacaatatctctgtagttggatcaagtgacttctgcccacctggacacaacaccaaaaaggcttcttattcgggtgtgagtcttttcagcaacccggtccagtactgggagatacagccatccaccttcagatgtgtctacgtgcgctctgccattcaactcggaaactataagtaattctcaagaaagccctcatttttataacctggcaaaatcttgttaatgtcattgctaaaaaataaataaaagctagatactggaaacctaactgcaatgtggatgttttacccacatgacttattatgcataaagccaaatttccagtttaagtaattgcctacaataaaaagaaattttgcctgccattttcagaatcatcttttgaagctttctgttgatgttaactgagctactagagatattcttatttcactaaatgtaaaatttggagtaaatatatatgtcaatatttagtaaagcttttcttttttaatttccaggaaaaaataaaaagagtatgagtcttctgtaattcattgagcagttagctcatttgagataaagtcaaatgccaaacactagctctgtattaatccccatcattactggtaaagcctcatttgaatgtgtgaattcaatacaggctatgtaaaatttttactaatgtcattattttgaaaaaataaatttaaaaatacattcaaaatactattgtatacaagcttaattgttaatattccctaaacacaattttatgaagggagaagacattggtttgttgacaataacagtacatcttttcaagttctcagctatttcttctacctctccctatcttacatttgagtatggtaacttatgtcatctatgttgaatgtaagcttataaagcacaaagcatacatttcctgactggtctagagaactgatgtttcaatttacccctctgctaaataaatattaaaactatcatgtgacttcatgt

SEQ ID NO: 448997 - DNA, 3335 bp, Homo sapiens
ttagattatgacataaatcttgtaaaaacctgtcagttattttcatctatgagagaagaggagcccaaactctcgcccacctgttcttaaccagaaaacccactgactttgaaaatctcacctctgccacccatctacttgcattcgtctttggcagacctcaagataaatatgggttaatgcctgcatgatgcctctgaattcaggaattgcagggaaaactcggggctttgtgccagtctctaagttggcaactttggctgaacaaatgagtagtggcttcagtgtccttgcgtacacattctgtggattgatttaatggagttgtcagcatgatcatcatcttctagccaggggcatagttgccaaggccatttacctctttctaagaagaaacagaattatgtgtatatatgagagaaagaaacaagaatgcgtgaatgaggatgaagaaacatttaccccatgtactcaagacatttcagttttaaaagtcactttcctattagacttcttgaaaaagattctcacatagcctctatgtaatcagacaaatgacatttgatttcaagagcagaggggtaaacatcctctgctaatcgacaggtagcaggtgtcagaggaggcataatattaatagcgccaccttctgttgggtcagtggagatgggtgaggagcagcacagagcagcagggatcatcacatgcagccaaacttggcctctgaagggggaaggtagtgggaataggtggtgagagaactcacatttttctcttgtcctggttttatatttcggagggaaaggattatttggccccattaagaattaagaggctgggtgcggtggctcacgtctgtaatcccagcaccttgggaggcccaggcaggcagatcacctgaggtcgggagttcgagaccagcgtgaccaacgtggagaaacccccgtctctactaaaaatacaaaaaattagctgggcatggtggtgcatgcctgtgattccagtttgcctccagctatgtgttttattggcgggattactttgaggaccagccccttctgtatcccccaggctttgacggaagagtcgtggtgtatcccagcaaccagactttaaaggactacctcagctggcgacaagcagattgtcacatcaataatctttataatacagttttctgggcacttatacaacaatctggactaacaccagtacaagcccaagggagattacagggaactcttgcagcagacaagaatgagattttgttttctgaattcaacatcaactataataatgagccgccgatgtataggaaagggactgtgttgatatggcagaaggtggatgaagtgatgacaaaagaaattaagctgccaacagaaatggaaggaaaaaagatggcagtgacccggaccaggacaaagccagtgcccttgcactgcgatatcatcggggatgctttctggaaggaacatccagagattctagatgaagacagctgacccttttgcgcttcagttctggtgtgcttaaccatgcaagccctcccacctcccagggctccttgccttaggtggctgtagcatccctaccacccaggacactggtgtgaatgacacaactcaagttgggaggggaacagggaaggaagggatggatgggggtggtgtatcttattctgtttaagcagaacaccttgtttgcggtgttggaacatggttcctttggcagaagtgctttttttttaatcgcagtactatttttataaagcaagaactattccatgccttggagaatgaatcaattttttaactgtgctatggagtagaagcaggaggttttcaacctagtcacagagcagcacctaccccctcctcctttccacacctgcaaactcttttacttgggctgaatatttagtgtaattacatctcagctttgagggctcctgtggcaaattcccggattaaaaggttccctggttgtgaaaatacatgagataaatcatgaaggccactatcatcctccttctgcttgcacaagtttcctgggctggaccgtttcaacagagaggcttatttgactttatgctagaagatgaggcttctgggataggcccagaagttcctgatgaccgcgacttcgagccctccctaggcccagtgtgccccttccgctgtcaatgccatcttcgagtggtccagtgttctgatttgggtctggacaaagtgccaaaggatcttccccctgacacaactctgctagacctgcaaaacaacaaaataaccgaaatcaaagatggagactttaagaacctgaagaaccttcacgttgtctaccttcataacaacaatatctctgtagttggatcaagtgacttctgcccacctggacacaacaccaaaaaggcttcttattcgggtgtgagtcttttcagcaacccggtccagtactgggagatacagccatccaccttcagatgtgtctacgtgcgctctgccattcaactcggaaactataagtaattctcaagaaagccctcatttttataacctggcaaaatcttgttaatgtcattgctaaaaaataaataaaagctagatactggaaacctaactgcaatgtggatgttttacccacatgacttattatgcataaagccaaatttccagtttaagtaattgcctacaataaaaagaaattttgcctgccattttcagaatcatcttttgaagctttctgttgatgttaactgagctactagagatattcttatttcactaaatgtaaaatttggagtaaatatatatgtcaatatttagtaaagcttttcttttttaatttccaggaaaaaataaaaagagtatgagtcttctgtaattcattgagcagttagctcatttgagataaagtcaaatgccaaacactagctctgtattaatccccatcattactggtaaagcctcatttgaatgtgtgaattcaatacaggctatgtaaaatttttactaatgtcattattttgaaaaaataaatttaaaaatacattcaaaatactattgtatacaagcttaattgttaatattccctaaacacaattttatgaagggagaagacattggtttgttgacaataacagtacatcttttcaagttctcagctatttcttctacctctccctatcttacatttgagtatggtaacttatgtcatctatgttgaatgtaagcttataaagcacaaagcatacatttcctgactggtctagagaactgatgtttcaatttacccctctgctaaataaatattaaaactatcatgtgacttcatgt

SEQ ID NO: 448998 - DNA, 3484 bp, Homo sapiens
ttagattatgacataaatcttgtaaaaacctgtcagttattttcatctatgagagaagaggagcccaaactctcgcccacctgttcttaaccagaaaacccactgactttgaaaatctcacctctgccacccatctacttgcattcgtctttggcagacctcaagataaatatgggttaatgcctgcatgatgcctctgaattcaggaattgcagggaaaactcggggctttgtgccagtctctaagttggcaactttggctgaacaaatgagtagtggcttcagtgtccttgcgtacacattctgtggattgatttaatggagttgtcagcatgatcatcatcttctagccaggggcatagttgccaaggccatttacctctttctaagaagaaacagaattatgtgtatatatgagagaaagaaacaagaatgcgtgaatgaggatgaagaaacatttaccccatgtactcaagacatttcagttttaaaagtcactttcctattagacttcttgaaaaagattctcacatagcctctatgtaatcagacaaatgacatttgatttcaagagcagaggggtaaacatcctctgctaatcgacaggtagcaggtgtcagaggaggcataatattaatagcgccaccttctgttgggtcagtggagatgggtgaggagcagcacagagcagcagggatcatcacatgcagccaaacttggcctctgaagggggaaggtagtgggaataggtggtgagagaactcacatttttctcttgtcctggttttatatttcggagggaaaggattatttggccccattaagaattaagaggctgggtgcggtggctcacgtctgtaatcccagcaccttgggaggcccaggcaggcagatcacctgaggtcgggagttcgagaccagcgtgaccaacgtggagaaacccccgtctctactaaaaatacaaaaaattagctgggcatggtggtgcatgcctgtgattccagtttgcctccagctatgtgttttattggcgggattactttgaggaccagccccttctgtatcccccaggctttgacggaagagtcgtggtgtatcccagcaaccagactttaaaggactacctcagctggcgacaagcagattgtcacatcaataatctttataatacagttttctgggcacttatacaacaatctggactaacaccagtacaagcccaagggagattacagggaactcttgcagcagacaagaatgagattttgttttctgaattcaacatcaactataataatgagccgccgatgtataggaaagggactgtgttgatatggcagaaggtggatgaagtgatgacaaaagaaattaagctgccaacagaaatggaaggaaaaaagatggcagtgacccggaccaggacaaagccagtgcccttgcactgcgatatcatcggggatgctttctggaaggaacatccagagattctagatgaagacagctgacccttttgcgcttcagttctggtgtgcttaaccatgcaagccctcccacctcccagggctccttgccttaggtggctgtagcatccctaccacccaggacactggtgtgaatgacacaactcaagttgggaggggaacagggaaggaagggatggatgggggtggtgtatcttattctgtttaagcagaacaccttgtttgcggtgttggaacatggttcctttggcagaagtgctttttttttaatcgcagtactatttttataaagcaagaactattccatgccttggagaatgaatcaattttttaactgtgctatggagtagaagcaggaggttttcaacctagtcacagagcagcacctaccccctcctcctttccacacctgcaaactcttttacttgggctgaatatttagtgtaattacatctcagctttgagggctcctgtggcaaattcccggattaaaaggttccctggttgtgaaaatacatgagataaatcatgaaggccactatcatcctccttctgcttgcacaagtttcctgggctggaccgtttcaacagagaggcttatttgactttatgctagaagatgaggcttctgggataggcccagaagttcctgatgaccgcgacttcgagccctccctaggcccagtgtgccccttccgctgtcaatgccatcttcgagtggtccagtgttctgatttgggtctggacaaagtgccaaaggatcttccccctgacacaactctgctagacctgcaaaacaacaaaataaccgaaatcaaagatggagactttaagaacctgaagaaccttcacgcattgattcttgtcaacaataaaattagcaaagttagtcctggagcatttacacctttggtgaagttggaacgactttatctgtccaagaatcagctgaaggaattgccagaaaaaatgcccaaaactcttcaggagctgcgtgcccatgagaatgagatcaccaaagtgcgaaaagttactttcaatggactgaaccagatgattgtcatagaactgggcaccaatccgctgaagagctcaggaattgaaaatggggctttccagggaatgaagaagctctcctacatccgcattgctgataccaatatcaccagcattcctcaaggtcttcctccttcccttacggaattacatcttgatggcaacaacctggcaaaatcttgttaatgtcattgctaaaaaataaataaaagctagatactggaaacctaactgcaatgtggatgttttacccacatgacttattatgcataaagccaaatttccagtttaagtaattgcctacaataaaaagaaattttgcctgccattttcagaatcatcttttgaagctttctgttgatgttaactgagctactagagatattcttatttcactaaatgtaaaatttggagtaaatatatatgtcaatatttagtaaagcttttcttttttaatttccaggaaaaaataaaaagagtatgagtcttctgtaattcattgagcagttagctcatttgagataaagtcaaatgccaaacactagctctgtattaatccccatcattactggtaaagcctcatttgaatgtgtgaattcaatacaggctatgtaaaatttttactaatgtcattattttgaaaaaataaatttaaaaatacattcaaaatactattgtatacaagcttaattgttaatattccctaaacacaattttatgaagggagaagacattggtttgttgacaataacagtacatcttttcaagttctcagctatttcttctacctctccctatcttacatttgagtatggtaacttatgtcatctatgttgaatgtaagcttataaagcacaaagcatacatttcctgactggtctagagaactgatgtttcaatttacccctctgctaaataaatattaaaactatcatgtgacttcatgt

SEQ ID NO: 448999 - DNA, 3027 bp, Homo sapiens
ttagattatgacataaatcttgtaaaaacctgtcagttattttcatctatgagagaagaggagcccaaactctcgcccacctgttcttaaccagaaaacccactgactttgaaaatctcacctctgccacccatctacttgcattcgtctttggcagacctcaagataaatatgggttaatgcctgcatgatgcctctgaattcaggaattgcagggaaaactcggggctttgtgccagtctctaagttggcaactttggctgaacaaatgagtagtggcttcagtgtccttgcgtacacattctgtggattgatttaatggagttgtcagcatgatcatcatcttctagccaggggcatagttgccaaggccatttacctctttctaagaagaaacagaattatgtgtatatatgagagaaagaaacaagaatgcgtgaatgaggatgaagaaacatttaccccatgtactcaagacatttcagttttaaaagtcactttcctattagacttcttgaaaaagattctcacatagcctctatgtaatcagacaaatgacatttgatttcaagagcagaggggtaaacatcctctgctaatcgacaggtagcaggtgtcagaggaggcataatattaatagcgccaccttctgttgggtcagtggagatgggtgaggagcagcacagagcagcagggatcatcacatgcagccaaacttggcctctgaagggggaaggtagtgggaataggtggtgagagaactcacatttttctcttgtcctggttttatatttcggagggaaaggattatttggccccattaagaattaagaggctgggtgcggtggctcacgtctgtaatcccagcaccttgggaggcccaggcaggcagatcacctgaggtcgggagttcgagaccagcgtgaccaacgtggagaaacccccgtctctactaaaaatacaaaaaattagctgggcatggtggtgcatgcctgtgattccagtttgcctccagctatgtgttttattggcgggattactttgaggaccagccccttctgtatcccccaggctttgacggaagagtcgtggtgtatcccagcaaccagactttaaaggactacctcagctggcgacaagcagattgtcacatcaataatctttataatacagttttctgggcacttatacaacaatctggactaacaccagtacaagcccaagggagattacagggaactcttgcagcagacaagaatgagattttgttttctgaattcaacatcaactataataatgagccgccgatgtataggaaagggactgtgttgatatggcagaaggtggatgaagtgatgacaaaagaaattaagctgccaacagaaatggaaggaaaaaagatggcagtgacccggaccaggacaaagccagtgcccttgcactgcgatatcatcggggatgctttctggaaggaacatccagagattctagatgaagacagctgacccttttgcgcttcagttctggtgtgcttaaccatgcaagccctcccacctcccagggctccttgccttaggtggctgtagcatccctaccacccaggacactggtgtgaatgacacaactcaagttgggaggggaacagggaaggaagggatggatgggggtggtgtatcttattctgtttaagcagaacaccttgtttgcggtgttggaacatggttcctttggcagaagtgctttttttttaatcgcagtactatttttataaagcaagaactattccatgccttggagaatgaatcaattttttaactgtgctatggagtagaagcaggaggttttcaacctagtcacagagcagcacctaccccctcctcctttccacacctgcaaactcttttacttgggctgaatatttagtgtaattacatctcagctttgagggctcctgtggcaaattcccggattaaaaggttccctggttgtgaaaatacatgagataaatcatgaaggccactatcatcctccttctgcttgcacaagtttcctgggctggaccgtttcaacagagaggcttatttgactttatgctagaagatgaggcttctgggataggcccagaagttcctgatgaccgcgacttcgagccctccctaggcccagtgtgccccttccgctgtcaatgccatcttcgagtggtccagtgttctgatttgggtctggacaaagtgccaaaggatcttccccctgacacaactctgctagacctgcaaaacaacaaaataaccgaaatcaaagatggagactttaagaacctgaagaaccttcacgcattgattcttgtcaacaataaaattagcaaagttagtcctggagcatttacacctttggtgaagttggaacgactttatctgtccaagaatcagctgaaggaattgccagaaaaaatgcccaaaactcttcaggagctgcgtgcccatgagaatgagatcaccaaagtgcgaaaagttactttcaatggactgaaccagatgattgtcatagaactgggcaccaatccgctgaagagctcaggaattgaaaatggggctttccagggaatgaagaagctctcctacatccgcattgctgataccaatatcaccagcattcctcaaggtcttcctccttcccttacggaattacatcttgatggcaacaaaatcagcagagttgatgcagctagcctgaaaggactgaataatttggctaagttgggattgagtttcaacagcatctctgctgttgacaatggctctctggccaacacgcctcatctgagggagcttcacttggacaacaacaagcttaccagagtacctggtgggctggcagagcataagtacatccagggtgctacttctcaacaattcgtggtggcaggaactgccccggaacccggtgttttcgggttggtttcccccgaggggaacccccaaagttcgggaccaatatataaccccacgctagcggaccggcatagtc

SEQ ID NO: 449000 - DNA, 1152 bp, Homo sapiens
tattttattacactgacaacactctttttctttctgtttgtactatgagactctctggtccatctatcgcctcatctgagggagcttcacttggacaacaacaagcttaccagagtacctggtgggctggcagagcataagtacatccaggttgtctaccttcataacaacaatatctctgtagttggatcaagtgacttctgcccacctggacacaacaccaaaaaggcttcttattcgggtgtgagtcttttcagcaacccggtccagtactgggagatacagccatccaccttcagatgtgtctacgtgcgctctgccattcaactcggaaactataagtaattctcaagaaagccctcatttttataacctggcaaaatcttgttaatgtcattgctaaaaaataaataaaagctagatactggaaacctaactgcaatgtggatgttttacccacatgacttattatgcataaagccaaatttccagtttaagtaattgcctacaataaaaagaaattttgcctgccattttcagaatcatcttttgaagctttctgttgatgttaactgagctactagagatattcttatttcactaaatgtaaaatttggagtaaatatatatgtcaatatttagtaaagcttttcttttttaatttccaggaaaaaataaaaagagtatgagtcttctgtaattcattgagcagttagctcatttgagataaagtcaaatgccaaacactagctctgtattaatccccatcattactggtaaagcctcatttgaatgtgtgaattcaatacaggctatgtaaaatttttactaatgtcattattttgaaaaaataaatttaaaaatacattcaaaatactattgtatacaagcttaattgttaatattccctaaacacaattttatgaagggagaagacattggtttgttgacaataacagtacatcttttcaagttctcagctatttcttctacctctccctatcttacatttgagtatggtaacttatgtcatctatgttgaatgtaagcttataaagcacaaagcatacatttcctgactggtctagagaactgatgtttcaatttacccctctgctaaataaatattaaaactatcatgtgacttcatgt

SEQ ID NO: 449001 - DNA, 1088 bp, Homo sapiens
cctagttttagaagtttcaatagcacttggacaacaacaagcttaccagagtacctggtgggctggcagagcataagtacatccaggttgtctaccttcataacaacaatatctctgtagttggatcaagtgacttctgcccacctggacacaacaccaaaaaggcttcttattcgggtgtgagtcttttcagcaacccggtccagtactgggagatacagccatccaccttcagatgtgtctacgtgcgctctgccattcaactcggaaactataagtaattctcaagaaagccctcatttttataacctggcaaaatcttgttaatgtcattgctaaaaaataaataaaagctagatactggaaacctaactgcaatgtggatgttttacccacatgacttattatgcataaagccaaatttccagtttaagtaattgcctacaataaaaagaaattttgcctgccattttcagaatcatcttttgaagctttctgttgatgttaactgagctactagagatattcttatttcactaaatgtaaaatttggagtaaatatatatgtcaatatttagtaaagcttttcttttttaatttccaggaaaaaataaaaagagtatgagtcttctgtaattcattgagcagttagctcatttgagataaagtcaaatgccaaacactagctctgtattaatccccatcattactggtaaagcctcatttgaatgtgtgaattcaatacaggctatgtaaaatttttactaatgtcattattttgaaaaaataaatttaaaaatacattcaaaatactattgtatacaagcttaattgttaatattccctaaacacaattttatgaagggagaagacattggtttgttgacaataacagtacatcttttcaagttctcagctatttcttctacctctccctatcttacatttgagtatggtaacttatgtcatctatgttgaatgtaagcttataaagcacaaagcatacatttcctgactggtctagagaactgatgtttcaatttacccctctgctaaataaatattaaaactatcatgtgacttcatgt

SEQ ID NO: 449002 - DNA, 1056 bp, Homo sapiens
tagtagtaatatatacgcacttatgttatgtagagcagcccaggagagagctaggttgtctaccttcataacaacaatatctctgtagttggatcaagtgacttctgcccacctggacacaacaccaaaaaggcttcttattcgggtgtgagtcttttcagcaacccggtccagtactgggagatacagccatccaccttcagatgtgtctacgtgcgctctgccattcaactcggaaactataagtaattctcaagaaagccctcatttttataacctggcaaaatcttgttaatgtcattgctaaaaaataaataaaagctagatactggaaacctaactgcaatgtggatgttttacccacatgacttattatgcataaagccaaatttccagtttaagtaattgcctacaataaaaagaaattttgcctgccattttcagaatcatcttttgaagctttctgttgatgttaactgagctactagagatattcttatttcactaaatgtaaaatttggagtaaatatatatgtcaatatttagtaaagcttttcttttttaatttccaggaaaaaataaaaagagtatgagtcttctgtaattcattgagcagttagctcatttgagataaagtcaaatgccaaacactagctctgtattaatccccatcattactggtaaagcctcatttgaatgtgtgaattcaatacaggctatgtaaaatttttactaatgtcattattttgaaaaaataaatttaaaaatacattcaaaatactattgtatacaagcttaattgttaatattccctaaacacaattttatgaagggagaagacattggtttgttgacaataacagtacatcttttcaagttctcagctatttcttctacctctccctatcttacatttgagtatggtaacttatgtcatctatgttgaatgtaagcttataaagcacaaagcatacatttcctgactggtctagagaactgatgtttcaatttacccctctgctaaataaatattaaaactatcatgtgacttcatgt

SEQ ID NO: 449003 - DNA, 1058 bp, Homo sapiens
  misc_feature (40)..(40): n is a, c, g, or t
aggatataaagaaactgggcgcaccaccgataaaatatanaaaaagggagcggagggttgtctaccttcataacaacaatatctctgtagttggatcaagtgacttctgcccacctggacacaacaccaaaaaggcttcttattcgggtgtgagtcttttcagcaacccggtccagtactgggagatacagccatccaccttcagatgtgtctacgtgcgctctgccattcaactcggaaactataagtaattctcaagaaagccctcatttttataacctggcaaaatcttgttaatgtcattgctaaaaaataaataaaagctagatactggaaacctaactgcaatgtggatgttttacccacatgacttattatgcataaagccaaatttccagtttaagtaattgcctacaataaaaagaaattttgcctgccattttcagaatcatcttttgaagctttctgttgatgttaactgagctactagagatattcttatttcactaaatgtaaaatttggagtaaatatatatgtcaatatttagtaaagcttttcttttttaatttccaggaaaaaataaaaagagtatgagtcttctgtaattcattgagcagttagctcatttgagataaagtcaaatgccaaacactagctctgtattaatccccatcattactggtaaagcctcatttgaatgtgtgaattcaatacaggctatgtaaaatttttactaatgtcattattttgaaaaaataaatttaaaaatacattcaaaatactattgtatacaagcttaattgttaatattccctaaacacaattttatgaagggagaagacattggtttgttgacaataacagtacatcttttcaagttctcagctatttcttctacctctccctatcttacatttgagtatggtaacttatgtcatctatgttgaatgtaagcttataaagcacaaagcatacatttcctgactggtctagagaactgatgtttcaatttacccctctgctaaataaatattaaaactatcatgtgacttcatgt

SEQ ID NO: 449004 - DNA, 2721 bp, Homo sapiens
ttagattatgacataaatcttgtaaaaacctgtcagttattttcatctatgagagaagaggagcccaaactctcgcccacctgttcttaaccagaaaacccactgactttgaaaatctcacctctgccacccatctacttgcattcgtctttggcagacctcaagataaatatgggttaatgcctgcatgatgcctctgaattcaggaattgcagggaaaactcggggctttgtgccagtctctaagttggcaactttggctgaacaaatgagtagtggcttcagtgtccttgcgtacacattctgtggattgatttaatggagttgtcagcatgatcatcatcttctagccaggggcatagttgccaaggccatttacctctttctaagaagaaacagaattatgtgtatatatgagagaaagaaacaagaatgcgtgaatgaggatgaagaaacatttaccccatgtactcaagacatttcagttttaaaagtcactttcctattagacttcttgaaaaagattctcacatagcctctatgtaatcagacaaatgacatttgatttcaagagcagaggggtaaacatcctctgctaatcgacaggtagcaggtgtcagaggaggcataatattaatagcgccaccttctgttgggtcagtggagatgggtgaggagcagcacagagcagcagggatcatcacatgcagccaaacttggcctctgaagggggaaggtagtgggaataggtggtgagagaactcacatttttctcttgtcctggttttatatttcggagggaaaggattatttggccccattaagaattaagaggctgggtgcggtggctcacgtctgtaatcccagcaccttgggaggcccaggcaggcagatcacctgaggtcgggagttcgagaccagcgtgaccaacgtggagaaacccccgtctctactaaaaatacaaaaaattagctgggcatggtggtgcatgcctgtgattccagtttgcctccagctatgtgttttattggcgggattactttgaggaccagccccttctgtatcccccaggctttgacggaagagtcgtggtgtatcccagcaaccagactttaaaggactacctcagctggcgacaagcagattgtcacatcaataatctttataatacagttttctgggcacttatacaacaatctggactaacaccagtacaagcccaagggagattacagggaactcttgcagcagacaagaatgagattttgttttctgaattcaacatcaactataataatgagccgccgatgtataggaaagggactgtgttgatatggcagaaggtggatgaagtgatgacaaaagaaattaagctgccaacagaaatggaaggaaaaaagatggcagtgacccggaccaggacaaagccagtgcccttgcactgcgatatcatcggggatgctttctggaaggaacatccagagattctagatgaagacagctgacccttttgcgcttcagttctggtgtgcttaaccatgcaagccctcccacctcccagggctccttgccttaggtggctgtagcatccctaccacccaggacactggtgtgaatgacacaactcaagttgggaggggaacagggaaggaagggatggatgggggtggtgtatcttattctgtttaagcagaacaccttgtttgcggtgttggaacatggttcctttggcagaagtgctttttttttaatcgcagtactatttttataaagcaagaactattccatgccttggagaatgaatcaattttttaactgtgctatggagtagaagcaggaggttttcaacctagtcacagagcagcacctaccccctcctcctttccacacctgcaaactcttttacttgggctgaatatttagtgtaattacatctcagctttgagggctcctgtggcaaattcccggattaaaaggttccctggttgtgaaaatacatgagataaatcatgaaggccactatcatcctccttctgcttgcacaagtttcctgggctggaccgtttcaacagagaggcttatttgactttatgctagaagatgaggcttctgggataggcccagaagttcctgatgaccgcgacttcgagccctccctaggcccagtgtgccccttccgctgtcaatgccatcttcgagtggtccagtgttctgatttgggtctggacaaagtgccaaaggatcttccccctgacacaactctgctagacctgcaaaacaacaaaataaccgaaatcaaagatggagactttaagaacctgaagaaccttcacgcattgattcttgtcaacaataaaattagcaaagttagtcctggagcatttacacctttggtgaagttggaacgactttatctgtccaagaatcagctgaaggaattgccagaaaaaatgcccaaaactcttcaggagctgcgtgcccatgagaatgagatcaccaaagtgcgaaaagttactttcaatggactgaaccagatgattgtcatagaactgggcaccaatccgctgaagagctcaggaattgaaaatggggctttccagggaatgaagaagctctcctacatccgcattgctgataccaatatcaccagcattcctcaaggtgatagaagattctccaaaacattttgaaaaatttaaattcaaaggctttaattaaaaa

SEQ ID NO: 449005 - DNA, 2678 bp, Homo sapiens
ttagattatgacataaatcttgtaaaaacctgtcagttattttcatctatgagagaagaggagcccaaactctcgcccacctgttcttaaccagaaaacccactgactttgaaaatctcacctctgccacccatctacttgcattcgtctttggcagacctcaagataaatatgggttaatgcctgcatgatgcctctgaattcaggaattgcagggaaaactcggggctttgtgccagtctctaagttggcaactttggctgaacaaatgagtagtggcttcagtgtccttgcgtacacattctgtggattgatttaatggagttgtcagcatgatcatcatcttctagccaggggcatagttgccaaggccatttacctctttctaagaagaaacagaattatgtgtatatatgagagaaagaaacaagaatgcgtgaatgaggatgaagaaacatttaccccatgtactcaagacatttcagttttaaaagtcactttcctattagacttcttgaaaaagattctcacatagcctctatgtaatcagacaaatgacatttgatttcaagagcagaggggtaaacatcctctgctaatcgacaggtagcaggtgtcagaggaggcataatattaatagcgccaccttctgttgggtcagtggagatgggtgaggagcagcacagagcagcagggatcatcacatgcagccaaacttggcctctgaagggggaaggtagtgggaataggtggtgagagaactcacatttttctcttgtcctggttttatatttcggagggaaaggattatttggccccattaagaattaagaggctgggtgcggtggctcacgtctgtaatcccagcaccttgggaggcccaggcaggcagatcacctgaggtcgggagttcgagaccagcgtgaccaacgtggagaaacccccgtctctactaaaaatacaaaaaattagctgggcatggtggtgcatgcctgtgattccagtttgcctccagctatgtgttttattggcgggattactttgaggaccagccccttctgtatcccccaggctttgacggaagagtcgtggtgtatcccagcaaccagactttaaaggactacctcagctggcgacaagcagattgtcacatcaataatctttataatacagttttctgggcacttatacaacaatctggactaacaccagtacaagcccaagggagattacagggaactcttgcagcagacaagaatgagattttgttttctgaattcaacatcaactataataatgagccgccgatgtataggaaagggactgtgttgatatggcagaaggtggatgaagtgatgacaaaagaaattaagctgccaacagaaatggaaggaaaaaagatggcagtgacccggaccaggacaaagccagtgcccttgcactgcgatatcatcggggatgctttctggaaggaacatccagagattctagatgaagacagctgacccttttgcgcttcagttctggtgtgcttaaccatgcaagccctcccacctcccagggctccttgccttaggtggctgtagcatccctaccacccaggacactggtgtgaatgacacaactcaagttgggaggggaacagggaaggaagggatggatgggggtggtgtatcttattctgtttaagcagaacaccttgtttgcggtgttggaacatggttcctttggcagaagtgctttttttttaatcgcagtactatttttataaagcaagaactattccatgccttggagaatgaatcaattttttaactgtgctatggagtagaagcaggaggttttcaacctagtcacagagcagcacctaccccctcctcctttccacacctgcaaactcttttacttgggctgaatatttagtgtaattacatctcagctttgagggctcctgtggcaaattcccggattaaaaggttccctggttgtgaaaatacatgagataaatcatgaaggccactatcatcctccttctgcttgcacaagtttcctgggctggaccgtttcaacagagaggcttatttgactttatgctagaagatgaggcttctgggataggcccagaagttcctgatgaccgcgacttcgagccctccctaggcccagtgtgccccttccgctgtcaatgccatcttcgagtggtccagtgttctgatttgggtctggacaaagtgccaaaggatcttccccctgacacaactctgctagacctgcaaaacaacaaaataaccgaaatcaaagatggagactttaagaacctgaagaaccttcacgcattgattcttgtcaacaataaaattagcaaagttagtcctggagcatttacacctttggtgaagttggaacgactttatctgtccaagaatcagctgaaggaattgccagaaaaaatgcccaaaactcttcaggagctgcgtgcccatgagaatgagatcaccaaagtgaactgggcaccaatccgctgaagagctcaggaattgaaaatggggctttccagggaatgaagaagctctcctacatccgcattgctgataccaatatcaccagcattcctcaaggtgatagaagattctccaaaacattttgaaaaatttaaattcaaaggctttaattaaaaa

SEQ ID NO: 449006 - DNA, 2567 bp, Homo sapiens
ttagattatgacataaatcttgtaaaaacctgtcagttattttcatctatgagagaagaggagcccaaactctcgcccacctgttcttaaccagaaaacccactgactttgaaaatctcacctctgccacccatctacttgcattcgtctttggcagacctcaagataaatatgggttaatgcctgcatgatgcctctgaattcaggaattgcagggaaaactcggggctttgtgccagtctctaagttggcaactttggctgaacaaatgagtagtggcttcagtgtccttgcgtacacattctgtggattgatttaatggagttgtcagcatgatcatcatcttctagccaggggcatagttgccaaggccatttacctctttctaagaagaaacagaattatgtgtatatatgagagaaagaaacaagaatgcgtgaatgaggatgaagaaacatttaccccatgtactcaagacatttcagttttaaaagtcactttcctattagacttcttgaaaaagattctcacatagcctctatgtaatcagacaaatgacatttgatttcaagagcagaggggtaaacatcctctgctaatcgacaggtagcaggtgtcagaggaggcataatattaatagcgccaccttctgttgggtcagtggagatgggtgaggagcagcacagagcagcagggatcatcacatgcagccaaacttggcctctgaagggggaaggtagtgggaataggtggtgagagaactcacatttttctcttgtcctggttttatatttcggagggaaaggattatttggccccattaagaattaagaggctgggtgcggtggctcacgtctgtaatcccagcaccttgggaggcccaggcaggcagatcacctgaggtcgggagttcgagaccagcgtgaccaacgtggagaaacccccgtctctactaaaaatacaaaaaattagctgggcatggtggtgcatgcctgtgattccagtttgcctccagctatgtgttttattggcgggattactttgaggaccagccccttctgtatcccccaggctttgacggaagagtcgtggtgtatcccagcaaccagactttaaaggactacctcagctggcgacaagcagattgtcacatcaataatctttataatacagttttctgggcacttatacaacaatctggactaacaccagtacaagcccaagggagattacagggaactcttgcagcagacaagaatgagattttgttttctgaattcaacatcaactataataatgagccgccgatgtataggaaagggactgtgttgatatggcagaaggtggatgaagtgatgacaaaagaaattaagctgccaacagaaatggaaggaaaaaagatggcagtgacccggaccaggacaaagccagtgcccttgcactgcgatatcatcggggatgctttctggaaggaacatccagagattctagatgaagacagctgacccttttgcgcttcagttctggtgtgcttaaccatgcaagccctcccacctcccagggctccttgccttaggtggctgtagcatccctaccacccaggacactggtgtgaatgacacaactcaagttgggaggggaacagggaaggaagggatggatgggggtggtgtatcttattctgtttaagcagaacaccttgtttgcggtgttggaacatggttcctttggcagaagtgctttttttttaatcgcagtactatttttataaagcaagaactattccatgccttggagaatgaatcaattttttaactgtgctatggagtagaagcaggaggttttcaacctagtcacagagcagcacctaccccctcctcctttccacacctgcaaactcttttacttgggctgaatatttagtgtaattacatctcagctttgagggctcctgtggcaaattcccggattaaaaggttccctggttgtgaaaatacatgagataaatcatgaaggccactatcatcctccttctgcttgcacaagtttcctgggctggaccgtttcaacagagaggcttatttgactttatgctagaagatgaggcttctgggataggcccagaagttcctgatgaccgcgacttcgagccctccctaggcccagtgtgccccttccgctgtcaatgccatcttcgagtggtccagtgttctgatttgggtctggacaaagtgccaaaggatcttccccctgacacaactctgctagacctgcaaaacaacaaaataaccgaaatcaaagatggagactttaagaacctgaagaaccttcacgcattgattcttgtcaacaataaaattagcaaagttagtcctggagcatttacacctttggtgaagttggaacgactttatctgtccaagaatcagctgaaggaattgccagaaaaaatgcccaaaactcttcaggagctgcgtgcccatgagaatgagatcaccaaagtgcttgtttaagtaccttaaatgaactaaccaaatttttgatttacactggtcccaattctttaa

SEQ ID NO: 449007 - DNA, 2296 bp, Homo sapiens
  misc_feature (2227)..(2227): n is a, c, g, or t
ttagattatgacataaatcttgtaaaaacctgtcagttattttcatctatgagagaagaggagcccaaactctcgcccacctgttcttaaccagaaaacccactgactttgaaaatctcacctctgccacccatctacttgcattcgtctttggcagacctcaagataaatatgggttaatgcctgcatgatgcctctgaattcaggaattgcagggaaaactcggggctttgtgccagtctctaagttggcaactttggctgaacaaatgagtagtggcttcagtgtccttgcgtacacattctgtggattgatttaatggagttgtcagcatgatcatcatcttctagccaggggcatagttgccaaggccatttacctctttctaagaagaaacagaattatgtgtatatatgagagaaagaaacaagaatgcgtgaatgaggatgaagaaacatttaccccatgtactcaagacatttcagttttaaaagtcactttcctattagacttcttgaaaaagattctcacatagcctctatgtaatcagacaaatgacatttgatttcaagagcagaggggtaaacatcctctgctaatcgacaggtagcaggtgtcagaggaggcataatattaatagcgccaccttctgttgggtcagtggagatgggtgaggagcagcacagagcagcagggatcatcacatgcagccaaacttggcctctgaagggggaaggtagtgggaataggtggtgagagaactcacatttttctcttgtcctggttttatatttcggagggaaaggattatttggccccattaagaattaagaggctgggtgcggtggctcacgtctgtaatcccagcaccttgggaggcccaggcaggcagatcacctgaggtcgggagttcgagaccagcgtgaccaacgtggagaaacccccgtctctactaaaaatacaaaaaattagctgggcatggtggtgcatgcctgtgattccagtttgcctccagctatgtgttttattggcgggattactttgaggaccagccccttctgtatcccccaggctttgacggaagagtcgtggtgtatcccagcaaccagactttaaaggactacctcagctggcgacaagcagattgtcacatcaataatctttataatacagttttctgggcacttatacaacaatctggactaacaccagtacaagcccaagggagattacagggaactcttgcagcagacaagaatgagattttgttttctgaattcaacatcaactataataatgagccgccgatgtataggaaagggactgtgttgatatggcagaaggtggatgaagtgatgacaaaagaaattaagctgccaacagaaatggaaggaaaaaagatggcagtgacccggaccaggacaaagccagtgcccttgcactgcgatatcatcggggatgctttctggaaggaacatccagagattctagatgaagacagctgacccttttgcgcttcagttctggtgtgcttaaccatgcaagccctcccacctcccagggctccttgccttaggtggctgtagcatccctaccacccaggacactggtgtgaatgacacaactcaagttgggaggggaacagggaaggaagggatggatgggggtggtgtatcttattctgtttaagcagaacaccttgtttgcggtgttggaacatggttcctttggcagaagtgctttttttttaatcgcagtactatttttataaagcaagaactattccatgccttggagaatgaatcaattttttaactgtgctatggagtagaagcaggaggttttcaacctagtcacagagcagcacctaccccctcctcctttccacacctgcaaactcttttacttgggctgaatatttagtgtaattacatctcagctttgagggctcctgtggcaaattcccggattaaaaggttccctggttgtgaaaatacatgagataaatcatgaaggccactatcatcctccttctgcttgcacaagtttcctgggctggaccgtttcaacagagaggcttatttgactttatgctagaagatgaggcttctgggataggcccagaagttcctgatgaccgcgacttcgagccctccctaggcccagtgtgccccttccgctgtcaatgccatcttcgagtggtccagtgttctgatttggctgacangtccaaggatctcccctacacactctctagcctcaaacacaaatacccaataagatgagctttagacct

SEQ ID NO: 449008 - DNA, 376 bp, Homo sapiens
gagaggttggagaaagcactccaagaactgggaagagtaagtgcaaaaacaaaaaatgtcctttcctatagacttgattaactacacaatgcttgtaagaaaggcatccatgtgtggtgtttgctttcatttctgctttctgttgcagggttgggattgagtttcaacagcatctctgctgttgacaatggctctctggccaacacgcctcatctgagggagcttcacttggacaacaacaagcttaccagagtacctggtgggctggcagagcataagtacatccaggtaatgcaaagccactgcttatgtgaggaatatccaaaaagcaagacccccaccctgcttatgggatgctgggaagcaggaagctctt

SEQ ID NO: 449009 - DNA, 1782 bp, Homo sapiens
gaattccggttacgtctgccccccggtggcaaattcccggattaaaaggttccctggttgtgaaaatacatgagataaatcatgaaggccactatcatcctccttctgcttgcacaagtttcctgggctggaccgtttcaacagagaggcttatttgactttatgctagaagatgaggcttctgggataggcccagaagttcctgatgaccgcgacttcgagccctccctaggcccagtgtgccccttccgctgtcaatgccatcttcgagtggtccagtgttctgatttgggtctggacaaagtgccaaaggatcttccccctgacacaactctgctagacctgcaaaacaacaaaataaccgaaatcaaagatggagactttaagaacctgaagaaccttcacgcattgattcttgtcaacaataaaattagcaaagttagtcctggagcatttacacctttggtgaagttggaacgactttatctgtccaagaatcagctgaaggaattgccagaaaaaatgcccaaaactcttcaggagctgcgtgcccatgagaatgagatcaccaaagtgcgaaaagttactttcaatggactgaaccagatgattgtcatagaactgggcaccaatccgctgaagagctcaggaattgaaaatggggctttccagggaatgaagaagctctcctacatccgcattgctgataccaatatcaccagcattcctcaaggtcttcctccttcccttacggaattacatcttgatggcaacaaaatcagcagagttgatgcagctagcctgaaaggactgaataatttggctaagttgggattgagtttcaacagcatctctgctgttgacaatggctctctggccaacacgcctcatctgagggagcttcacttggacaacaacaagcttaccagagtacctggtgggctggcagagcataagtacatccaggttgtctaccttcataacaacaatatctctgtagttggatcaagtgacttctgcccacctggacacaacaccaaaaaggcttcttattcgggtgtgagtcttttcagcaacccggtccagtactgggagatacagccatccaccttcagatgtgtctacgtgcgctctgccattcaactcggaaactataagtaattctcaagaaagccctcatttttataacctggcaaaatcttgttaatgtcattgctaaaaaataaataaaagctagatactggaaacctaactgcaatgtggatgttttacccacatgacttattatgcataaaggttatgatcagtagttgattttgagaaagctctatgagctctaagtaactgcatggttttttgtttaatgtaatataggagacccttcacattcccaaggaatatattccaaaacatttttgtgaatatctaagtttgtgaaactactagggcatgatacagtaaggtgtaattacagaatttacgaaatgtaaatgacctctacagagttttatggaatacctggtactaacgtaggcagctgcaaaaccacactgagttacagctgtcagccctcctcattcctaaataacttgccttacatatcagccctcccacttctgaagttcaaattagtgcctcggaaatgtagaatttattatttgtcatttttttttttttagcatagattgagaacagttgaactcttaaatcctcagatgccaggggtctgctctagcatcagtaagtatttagcagaaactaactccgtaatgaatggaattc

SEQ ID NO: 449010 - DNA, 577 bp, Homo sapiens
aaaaaacgctagaaatacacccccattcgcgagttataatagagaaagaggacgccaggttgtctaccttcataacaacaatatctctgtagttggatcaagtgacttctgcccacctggacacaacaccaaaaaggcttcttattcgggtgtgagtcttttcagcaacccggtccagtactgggagatacagccatccaccttcagatgtgtctacgtgcgctctgccattcaactcggaaactataagtaattctcaagaaagccctcatttttataacctggcaaaatcttgttaatgtcattgctaaaaaataaataaaagctagatactggaaacctaactgcaatgtggatgttttacccacatgacttattatgcataaagccaaatttccagtttaagtaattgcctacaataaaaagaaattttgcctgccattttcagaatcatcttttgaagctttctgttgatgttaactgagctactagagatattcttatttcactaaatgtaaaatttggagtaaatatatatgtcaatatttagtaaagcttttcttttttaatttccagg

SEQ ID NO: 449011 - DNA, 3569 bp, Homo sapiens
ttagattatgacataaatcttgtaaaaacctgtcagttattttcatctatgagagaagaggagcccaaactctcgcccacctgttcttaaccagaaaacccactgactttgaaaatctcacctctgccacccatctacttgcattcgtctttggcagacctcaagataaatatgggttaatgcctgcatgatgcctctgaattcaggaattgcagggaaaactcggggctttgtgccagtctctaagttggcaactttggctgaacaaatgagtagtggcttcagtgtccttgcgtacacattctgtggattgatttaatggagttgtcagcatgatcatcatcttctagccaggggcatagttgccaaggccatttacctctttctaagaagaaacagaattatgtgtatatatgagagaaagaaacaagaatgcgtgaatgaggatgaagaaacatttaccccatgtactcaagacatttcagttttaaaagtcactttcctattagacttcttgaaaaagattctcacatagcctctatgtaatcagacaaatgacatttgatttcaagagcagaggggtaaacatcctctgctaatcgacaggtagcaggtgtcagaggaggcataatattaatagcgccaccttctgttgggtcagtggagatgggtgaggagcagcacagagcagcagggatcatcacatgcagccaaacttggcctctgaagggggaaggtagtgggaataggtggtgagagaactcacatttttctcttgtcctggttttatatttcggagggaaaggattatttggccccattaagaattaagaggctgggtgcggtggctcacgtctgtaatcccagcaccttgggaggcccaggcaggcagatcacctgaggtcgggagttcgagaccagcgtgaccaacgtggagaaacccccgtctctactaaaaatacaaaaaattagctgggcatggtggtgcatgcctgtgattccagtttgcctccagctatgtgttttattggcgggattactttgaggaccagccccttctgtatcccccaggctttgacggaagagtcgtggtgtatcccagcaaccagactttaaaggactacctcagctggcgacaagcagattgtcacatcaataatctttataatacagttttctgggcacttatacaacaatctggactaacaccagtacaagcccaagggagattacagggaactcttgcagcagacaagaatgagattttgttttctgaattcaacatcaactataataatgagccgccgatgtataggaaagggactgtgttgatatggcagaaggtggatgaagtgatgacaaaagaaattaagctgccaacagaaatggaaggaaaaaagatggcagtgacccggaccaggacaaagccagtgcccttgcactgcgatatcatcggggatgctttctggaaggaacatccagagattctagatgaagacagctgacccttttgcgcttcagttctggtgtgcttaaccatgcaagccctcccacctcccagggctccttgccttaggtggctgtagcatccctaccacccaggacactggtgtgaatgacacaactcaagttgggaggggaacagggaaggaagggatggatgggggtggtgtatcttattctgtttaagcagaacaccttgtttgcggtgttggaacatggttcctttggcagaagtgctttttttttaatcgcagtactatttttataaagcaagaactattccatgccttggagaatgaatcaattttttaactgtgctatggagtagaagcaggaggttttcaacctagtcacagagcagcacctaccccctcctcctttccacacctgcaaactcttttacttgggctgaatatttagtgtaattacatctcagctttgagggctcctgtggcaaattcccggattaaaaggttccctggttgtgaaaatacatgagataaatcatgaaggccactatcatcctccttctgcttgcacaagtttcctgggctggaccgtttcaacagagaggcttatttgactttatgctagaagatgaggcttctgggataggcccagaagttcctgatgaccgcgacttcgagccctccctaggcccagtgtgccccttccgctgtcaatgccatcttcgagtggtccagtgttctgatttggaactgggcaccaatccgctgaagagctcaggaattgaaaatggggctttccagggaatgaagaagctctcctacatccgcattgctgataccaatatcaccagcattcctcaaggtcttcctccttcccttacggaattacatcttgatggcaacaaaatcagcagagttgatgcagctagcctgaaaggactgaataatttggctaagttgggattgagtttcaacagcatctctgctgttgacaatggctctctggccaacacgcctcatctgagggagcttcacttggacaacaacaagcttaccagagtacctggtgggctggcagagcataagtacatccaggttgtctaccttcataacaacaatatctctgtagttggatcaagtgacttctgcccacctggacacaacaccaaaaaggcttcttattcgggtgtgagtcttttcagcaacccggtccagtactgggagatacagccatccaccttcagatgtgtctacgtgcgctctgccattcaactcggaaactataagtaattctcaagaaagccctcatttttataacctggcaaaatcttgttaatgtcattgctaaaaaataaataaaagctagatactggaaacctaactgcaatgtggatgttttacccacatgacttattatgcataaagccaaatttccagtttaagtaattgcctacaataaaaagaaattttgcctgccattttcagaatcatcttttgaagctttctgttgatgttaactgagctactagagatattcttatttcactaaatgtaaaatttggagtaaatatatatgtcaatatttagtaaagcttttcttttttaatttccaggaaaaaataaaaagagtatgagtcttctgtaattcattgagcagttagctcatttgagataaagtcaaatgccaaacactagctctgtattaatccccatcattactggtaaagcctcatttgaatgtgtgaattcaatacaggctatgtaaaatttttactaatgtcattattttgaaaaaataaatttaaaaatacattcaaaatactattgtatacaagcttaattgttaatattccctaaacacaattttatgaagggagaagacattggtttgttgacaataacagtacatcttttcaagttctcagctatttcttctacctctccctatcttacatttgagtatggtaacttatgtcatctatgttgaatgtaagcttataaagcacaaagcatacatttcctgactggtctagagaactgatgtttcaatttacccctctgctaaataaatattaaaactatcatgtgacttcatgt

SEQ ID NO: 449012 - DNA, 1188 bp, Homo sapiens
gaagttaatacatattcataaatattttcaaatcaaatagaacttgcgttgggattgagtttcaacagcatctctgctgttgacaatggctctctggccaacacgcctcatctgagggagcttcacttggacaacaacaagcttaccagagtacctggtgggctggcagagcataagtacatccaggttgtctaccttcataacaacaatatctctgtagttggatcaagtgacttctgcccacctggacacaacaccaaaaaggcttcttattcgggtgtgagtcttttcagcaacccggtccagtactgggagatacagccatccaccttcagatgtgtctacgtgcgctctgccattcaactcggaaactataagtaattctcaagaaagccctcatttttataacctggcaaaatcttgttaatgtcattgctaaaaaataaataaaagctagatactggaaacctaactgcaatgtggatgttttacccacatgacttattatgcataaagccaaatttccagtttaagtaattgcctacaataaaaagaaattttgcctgccattttcagaatcatcttttgaagctttctgttgatgttaactgagctactagagatattcttatttcactaaatgtaaaatttggagtaaatatatatgtcaatatttagtaaagcttttcttttttaatttccaggaaaaaataaaaagagtatgagtcttctgtaattcattgagcagttagctcatttgagataaagtcaaatgccaaacactagctctgtattaatccccatcattactggtaaagcctcatttgaatgtgtgaattcaatacaggctatgtaaaatttttactaatgtcattattttgaaaaaataaatttaaaaatacattcaaaatactattgtatacaagcttaattgttaatattccctaaacacaattttatgaagggagaagacattggtttgttgacaataacagtacatcttttcaagttctcagctatttcttctacctctccctatcttacatttgagtatggtaacttatgtcatctatgttgaatgtaagcttataaagcacaaagcatacatttcctgactggtctagagaactgatgtttcaatttacccctctgctaaataaatattaaaactatcatgtgacttcatgt

SEQ ID NO: 449013 - DNA, 1066 bp, Homo sapiens
tcctcgattaccagcatatcggaccaatgtgccagcaagcaaaaaggagctttggtgtgtgacagttgtctaccttcataacaacaatatctctgtagttggatcaagtgacttctgcccacctggacacaacaccaaaaaggcttcttattcgggtgtgagtcttttcagcaacccggtccagtactgggagatacagccatccaccttcagatgtgtctacgtgcgctctgccattcaactcggaaactataagtaattctcaagaaagccctcatttttataacctggcaaaatcttgttaatgtcattgctaaaaaataaataaaagctagatactggaaacctaactgcaatgtggatgttttacccacatgacttattatgcataaagccaaatttccagtttaagtaattgcctacaataaaaagaaattttgcctgccattttcagaatcatcttttgaagctttctgttgatgttaactgagctactagagatattcttatttcactaaatgtaaaatttggagtaaatatatatgtcaatatttagtaaagcttttcttttttaatttccaggaaaaaataaaaagagtatgagtcttctgtaattcattgagcagttagctcatttgagataaagtcaaatgccaaacactagctctgtattaatccccatcattactggtaaagcctcatttgaatgtgtgaattcaatacaggctatgtaaaatttttactaatgtcattattttgaaaaaataaatttaaaaatacattcaaaatactattgtatacaagcttaattgttaatattccctaaacacaattttatgaagggagaagacattggtttgttgacaataacagtacatcttttcaagttctcagctatttcttctacctctccctatcttacatttgagtatggtaacttatgtcatctatgttgaatgtaagcttataaagcacaaagcatacatttcctgactggtctagagaactgatgtttcaatttacccctctgctaaataaatattaaaactatcatgtgacttcatgt

SEQ ID NO: 449014 - DNA, 3839 bp, Homo sapiens
ttagattatgacataaatcttgtaaaaacctgtcagttattttcatctatgagagaagaggagcccaaactctcgcccacctgttcttaaccagaaaacccactgactttgaaaatctcacctctgccacccatctacttgcattcgtctttggcagacctcaagataaatatgggttaatgcctgcatgatgcctctgaattcaggaattgcagggaaaactcggggctttgtgccagtctctaagttggcaactttggctgaacaaatgagtagtggcttcagtgtccttgcgtacacattctgtggattgatttaatggagttgtcagcatgatcatcatcttctagccaggggcatagttgccaaggccatttacctctttctaagaagaaacagaattatgtgtatatatgagagaaagaaacaagaatgcgtgaatgaggatgaagaaacatttaccccatgtactcaagacatttcagttttaaaagtcactttcctattagacttcttgaaaaagattctcacatagcctctatgtaatcagacaaatgacatttgatttcaagagcagaggggtaaacatcctctgctaatcgacaggtagcaggtgtcagaggaggcataatattaatagcgccaccttctgttgggtcagtggagatgggtgaggagcagcacagagcagcagggatcatcacatgcagccaaacttggcctctgaagggggaaggtagtgggaataggtggtgagagaactcacatttttctcttgtcctggttttatatttcggagggaaaggattatttggccccattaagaattaagaggctgggtgcggtggctcacgtctgtaatcccagcaccttgggaggcccaggcaggcagatcacctgaggtcgggagttcgagaccagcgtgaccaacgtggagaaacccccgtctctactaaaaatacaaaaaattagctgggcatggtggtgcatgcctgtgattccagtttgcctccagctatgtgttttattggcgggattactttgaggaccagccccttctgtatcccccaggctttgacggaagagtcgtggtgtatcccagcaaccagactttaaaggactacctcagctggcgacaagcagattgtcacatcaataatctttataatacagttttctgggcacttatacaacaatctggactaacaccagtacaagcccaagggagattacagggaactcttgcagcagacaagaatgagattttgttttctgaattcaacatcaactataataatgagccgccgatgtataggaaagggactgtgttgatatggcagaaggtggatgaagtgatgacaaaagaaattaagctgccaacagaaatggaaggaaaaaagatggcagtgacccggaccaggacaaagccagtgcccttgcactgcgatatcatcggggatgctttctggaaggaacatccagagattctagatgaagacagctgacccttttgcgcttcagttctggtgtgcttaaccatgcaagccctcccacctcccagggctccttgccttaggtggctgtagcatccctaccacccaggacactggtgtgaatgacacaactcaagttgggaggggaacagggaaggaagggatggatgggggtggtgtatcttattctgtttaagcagaacaccttgtttgcggtgttggaacatggttcctttggcagaagtgctttttttttaatcgcagtactatttttataaagcaagaactattccatgccttggagaatgaatcaattttttaactgtgctatggagtagaagcaggaggttttcaacctagtcacagagcagcacctaccccctcctcctttccacacctgcaaactcttttacttgggctgaatatttagtgtaattacatctcagctttgagggctcctgtggcaaattcccggattaaaaggttccctggttgtgaaaatacatgagataaatcatgaaggccactatcatcctccttctgcttgcacaagtttcctgggctggaccgtttcaacagagaggcttatttgactttatgctagaagatgaggcttctgggataggcccagaagttcctgatgaccgcgacttcgagccctccctaggcccagtgtgccccttccgctgtcaatgccatcttcgagtggtccagtgttctgatttgggtctggacaaagtgccaaaggatcttccccctgacacaactctgctagacctgcaaaacaacaaaataaccgaaatcaaagatggagactttaagaacctgaagaaccttcacgcattgattcttgtcaacaataaaattagcaaagttagtcctggagcatttacacctttggtgaagttggaacgactttatctgtccaagaatcagctgaaggaattgccagaaaaaatgcccaaaactcttcaggagctgcgtgcccatgagaatgagatcaccaaagtgcgaaaagttactttcaatggactgaaccagatgattgtcatagaactgggcaccaatccgctgaagagctcaggaattgaaaatggggctttccagggaatgaagaagctctcctacatccgcattgctgataccaatatcaccagcattcctcaaggtcttcctccttcccttacggaattacatcttgatggcaacaaaatcagcagagttgatgcagctagcctgaaaggactgaataatttggctaagttgggattgagtttcaacagcatctctgctgttgacaatggctctctggccaacacgcctcatctgagggagcttcacttggacaacaacaagcttaccagagtacctggtgggctggcagagcataagtacatccaggttgtctaccttcataacaacaatatctctgtagttggatcaagtgacttctgcccacctggacacaacaccaaaaaggcttcttattcgggtgtgagtcttttcagcaacccggtccagtactgggagatacagccatccaccttcagatgtgtctacgtgcgctctgccattcaactcggaaactataagtaattctcaagaaagccctcatttttataacctggcaaaatcttgttaatgtcattgctaaaaaataaataaaagctagatactggaaacctaactgcaatgtggatgttttacccacatgacttattatgcataaagccaaatttccagtttaagtaattgcctacaataaaaagaaattttgcctgccattttcagaatcatcttttgaagctttctgttgatgttaactgagctactagagatattcttatttcactaaatgtaaaatttggagtaaatatatatgtcaatatttagtaaagcttttcttttttaatttccaggataaagtcaaatgccaaacactagctctgtattaatccccatcattactggtaaagcctcatttgaatgtgtgaattcaatacaggctatgtaaaatttttactaatgtcattattttgaaaaaataaatttaaaaatacattcaaaatactattgtatacaagcttaattgttaatattccctaaacacaattttatgaagggagaagacattggtttgttgacaataacagtacatcttttcaagttctcagctatttcttctacctctccctatcttacatttgagtatggtaacttatgtcatctatgttgaatgtaagcttataaagcacaaagcatacatttcctgactggtctagagaactgatgtttcaatttacccctctgctaaataaatattaaaactatcatgtgacttcatgt

SEQ ID NO: 449015 - DNA, 3735 bp, Homo sapiens
  misc_feature (3618)..(3619): n is a, c, g, or t
  misc_feature (3624)..(3624): n is a, c, g, or t
  misc_feature (3627)..(3627): n is a, c, g, or t
  misc_feature (3631)..(3631): n is a, c, g, or t
ttagattatgacataaatcttgtaaaaacctgtcagttattttcatctatgagagaagaggagcccaaactctcgcccacctgttcttaaccagaaaacccactgactttgaaaatctcacctctgccacccatctacttgcattcgtctttggcagacctcaagataaatatgggttaatgcctgcatgatgcctctgaattcaggaattgcagggaaaactcggggctttgtgccagtctctaagttggcaactttggctgaacaaatgagtagtggcttcagtgtccttgcgtacacattctgtggattgatttaatggagttgtcagcatgatcatcatcttctagccaggggcatagttgccaaggccatttacctctttctaagaagaaacagaattatgtgtatatatgagagaaagaaacaagaatgcgtgaatgaggatgaagaaacatttaccccatgtactcaagacatttcagttttaaaagtcactttcctattagacttcttgaaaaagattctcacatagcctctatgtaatcagacaaatgacatttgatttcaagagcagaggggtaaacatcctctgctaatcgacaggtagcaggtgtcagaggaggcataatattaatagcgccaccttctgttgggtcagtggagatgggtgaggagcagcacagagcagcagggatcatcacatgcagccaaacttggcctctgaagggggaaggtagtgggaataggtggtgagagaactcacatttttctcttgtcctggttttatatttcggagggaaaggattatttggccccattaagaattaagaggctgggtgcggtggctcacgtctgtaatcccagcaccttgggaggcccaggcaggcagatcacctgaggtcgggagttcgagaccagcgtgaccaacgtggagaaacccccgtctctactaaaaatacaaaaaattagctgggcatggtggtgcatgcctgtgattccagtttgcctccagctatgtgttttattggcgggattactttgaggaccagccccttctgtatcccccaggctttgacggaagagtcgtggtgtatcccagcaaccagactttaaaggactacctcagctggcgacaagcagattgtcacatcaataatctttataatacagttttctgggcacttatacaacaatctggactaacaccagtacaagcccaagggagattacagggaactcttgcagcagacaagaatgagattttgttttctgaattcaacatcaactataataatgagccgccgatgtataggaaagggactgtgttgatatggcagaaggtggatgaagtgatgacaaaagaaattaagctgccaacagaaatggaaggaaaaaagatggcagtgacccggaccaggacaaagccagtgcccttgcactgcgatatcatcggggatgctttctggaaggaacatccagagattctagatgaagacagctgacccttttgcgcttcagttctggtgtgcttaaccatgcaagccctcccacctcccagggctccttgccttaggtggctgtagcatccctaccacccaggacactggtgtgaatgacacaactcaagttgggaggggaacagggaaggaagggatggatgggggtggtgtatcttattctgtttaagcagaacaccttgtttgcggtgttggaacatggttcctttggcagaagtgctttttttttaatcgcagtactatttttataaagcaagaactattccatgccttggagaatgaatcaattttttaactgtgctatggagtagaagcaggaggttttcaacctagtcacagagcagcacctaccccctcctcctttccacacctgcaaactcttttacttgggctgaatatttagtgtaattacatctcagctttgagggctcctgtggcaaattcccggattaaaaggttccctggttgtgaaaatacatgagataaatcatgaaggccactatcatcctccttctgcttgcacaagtttcctgggctggaccgtttcaacagagaggcttatttgactttatgctagaagatgaggcttctgggataggcccagaagttcctgatgaccgcgacttcgagccctccctaggcccagtgtgccccttccgctgtcaatgccatcttcgagtggtccagtgttctgatttgggtctggacaaagtgccaaaggatcttccccctgacacaactctgctagacctgcaaaacaacaaaataaccgaaatcaaagatggagactttaagaacctgaagaaccttcacgcattgattcttgtcaacaataaaattagcaaagttagtcctggagcatttacacctttggtgaagttggaacgactttatctgtccaagaatcagctgaaggaattgccagaaaaaatgcccaaaactcttcaggagctgcgtgcccatgagaatgagatcaccaaagtgcgaaaagttactttcaatggactgaaccagatgattgtcatagaactgggcaccaatccgctgaagagctcaggaattgaaaatggggctttccagggaatgaagaagctctcctacatccgcattgctgataccaatatcaccagcattcctcaaggtcttcctccttcccttacggaattacatcttgatggcaacaaaatcagcagagttgatgcagctagcctgaaaggactgaataatttggctaagttgggattgagtttcaacagcatctctgctgttgacaatggctctctggccaacacgcctcatctgagggagcttcacttggacaacaacaagcttaccagagtacctggtgggctggcagagcataagtacatccaggttgtctaccttcataacaacaatatctctgtagttggatcaagtgacttctgcccacctggacacaacaccaaaaaggcttcttattcgggtgtgagtcttttcagcaacccggtccagtactgggagatacagccatccaccttcagatgtgtctacgtgcgctctgccattcaactcggaaactataagtaattctcaagaaagccctcatttttataacctggcaaaatcttgttaatgtcattgctaaaaaataaataaaagctagatactggaaacctaactgcaatgtggatgttttacccacatgacttattatgcataaagccaaatttccagtttaagtaattgcctacaataaaaagaaattttgcctgccattttcagaatcatcttttgaagctttctgttgatgttaactgagctactagagatattcttatttcactaaatgtaaaatttggagtaaatatatatgtcaatatttagtaaagcttttcttttttaatttccaggaaaaaataaaaagagtatgagtcttctgtaattcattgagcagttagctcatttgagataaagtcaaatgccaaacactagctctgtattaatccccatcattactggtaaagcctcatttgaatgtgtgaattcaatacaggctatgtaaaatttttactaatgtcattattttgaaaaaataaatttaaaaatacattcaacnnaaaanacnaaancacacaaaaacaacactgtgcgggcagctcctgtgccctgaaaatttttaaaaccatcttagcgcgcgggcacacagagagtagacacaagacaaacggctccc

SEQ ID NO: 449016 - DNA, 3616 bp, Homo sapiens
ttagattatgacataaatcttgtaaaaacctgtcagttattttcatctatgagagaagaggagcccaaactctcgcccacctgttcttaaccagaaaacccactgactttgaaaatctcacctctgccacccatctacttgcattcgtctttggcagacctcaagataaatatgggttaatgcctgcatgatgcctctgaattcaggaattgcagggaaaactcggggctttgtgccagtctctaagttggcaactttggctgaacaaatgagtagtggcttcagtgtccttgcgtacacattctgtggattgatttaatggagttgtcagcatgatcatcatcttctagccaggggcatagttgccaaggccatttacctctttctaagaagaaacagaattatgtgtatatatgagagaaagaaacaagaatgcgtgaatgaggatgaagaaacatttaccccatgtactcaagacatttcagttttaaaagtcactttcctattagacttcttgaaaaagattctcacatagcctctatgtaatcagacaaatgacatttgatttcaagagcagaggggtaaacatcctctgctaatcgacaggtagcaggtgtcagaggaggcataatattaatagcgccaccttctgttgggtcagtggagatgggtgaggagcagcacagagcagcagggatcatcacatgcagccaaacttggcctctgaagggggaaggtagtgggaataggtggtgagagaactcacatttttctcttgtcctggttttatatttcggagggaaaggattatttggccccattaagaattaagaggctgggtgcggtggctcacgtctgtaatcccagcaccttgggaggcccaggcaggcagatcacctgaggtcgggagttcgagaccagcgtgaccaacgtggagaaacccccgtctctactaaaaatacaaaaaattagctgggcatggtggtgcatgcctgtgattccagtttgcctccagctatgtgttttattggcgggattactttgaggaccagccccttctgtatcccccaggctttgacggaagagtcgtggtgtatcccagcaaccagactttaaaggactacctcagctggcgacaagcagattgtcacatcaataatctttataatacagttttctgggcacttatacaacaatctggactaacaccagtacaagcccaagggagattacagggaactcttgcagcagacaagaatgagattttgttttctgaattcaacatcaactataataatgagccgccgatgtataggaaagggactgtgttgatatggcagaaggtggatgaagtgatgacaaaagaaattaagctgccaacagaaatggaaggaaaaaagatggcagtgacccggaccaggacaaagccagtgcccttgcactgcgatatcatcggggatgctttctggaaggaacatccagagattctagatgaagacagctgacccttttgcgcttcagttctggtgtgcttaaccatgcaagccctcccacctcccagggctccttgccttaggtggctgtagcatccctaccacccaggacactggtgtgaatgacacaactcaagttgggaggggaacagggaaggaagggatggatgggggtggtgtatcttattctgtttaagcagaacaccttgtttgcggtgttggaacatggttcctttggcagaagtgctttttttttaatcgcagtactatttttataaagcaagaactattccatgccttggagaatgaatcaattttttaactgtgctatggagtagaagcaggaggttttcaacctagtcacagagcagcacctaccccctcctcctttccacacctgcaaactcttttacttgggctgaatatttagtgtaattacatctcagctttgagggctcctgtggcaaattcccggattaaaaggttccctggttgtgaaaatacatgagataaatcatgaaggccactatcatcctccttctgcttgcacaagtttcctgggctggaccgtttcaacagagaggcttatttgactttatgctagaagatgaggcttctgggataggcccagaagttcctgatgaccgcgacttcgagccctccctaggcccagtgtgccccttccgctgtcaatgccatcttcgagtggtccagtgttctgatttgggtctggacaaagtgccaaaggatcttccccctgacacaactctgctagacctgcaaaacaacaaaataaccgaaatcaaagatggagactttaagaacctgaagaaccttcacgcattgattcttgtcaacaataaaattagcaaagttagtcctggagcatttacacctttggtgaagttggaacgactttatctgtccaagaatcagctgaaggaattgccagaaaaaatgcccaaaactcttcaggagctgcgtgcccatgagaatgagatcaccaaagtgcgaaaagttactttcaatggactgaaccagatgattgtcatagaactgggcaccaatccgctgaagagctcaggaattgaaaatggggctttccagggaatgaagaagctctcctacatccgcattgctgataccaatatcaccagcattcctcaaggtcttcctccttcccttacggaattacatcttgatggcaacaaaatcagcagagttgatgcagctagcctgaaaggactgaataatttggctaagttgggattgagtttcaacagcatctctgctgttgacaatggctctctggccaacacgcctcatctgagggagcttcacttggacaacaacaagcttaccagagtacctggtgggctggcagagcataagtacatccaggttgtctaccttcataacaacaatatctctgtagttggatcaagtgacttctgcccacctggacacaacaccaaaaaggcttcttattcgggtgtgagtcttttcagcaacccggtccagtactgggagatacagccatccaccttcagatgtgtctacgtgcgctctgccattcaactcggaaactataagtaattctcaagaaagccctcatttttataacctggcaaaatcttgttaatgtcattgctaaaaaataaataaaagctagatactggaaacctaactgcaatgtggatgttttacccacatgacttattatgcataaagccaaatttccagtttaagtaattgcctacaataaaaagaaattttgcctgccattttcagaatcatcttttgaagctttctgttgatgttaactgagctactagagatattcttatttcactaaatgtaaaatttggagtaaatatatatgtcaatatttagtaaagcttttcttttttaatttccaggaaaaaataaaaagagtatgagtcttctgtaattcattgagcagttagctcatttgagataaagtcaaatgccaaacactagctctgtattaatccccatcattactggtaaagcctcatttgaatgtgtgaattcaatacaggctatgtaaaatttttactaatgtcattattttgaaaaaataaatttaaaaatacattcaa

SEQ ID NO: 449017 - DNA, 1681 bp, Homo sapiens
ggagtcgaccgctcgggcagcgccaccgccacgagagcccgggacgcgggaaagaccgaaaggaagaggaagaggcaccggtggccatggggctggaggcggcgcgcgagctggagtgcgcggcgctgggcacgctgctgcgggatccgcgggaggcggaacgcacgctgctgctggactgccgccccttcctggccttctgccggcgccacgtgcgcgccgcgcggccagtgccttggaacgcgctgctgcggcgccgcgcgcgcggccctcctgccgccgttctcgcctgcctgctgcccgaccgcgcgctgcggacgcgcctggtccgcggggagctggcgcgggccgtggtgctggacgagggcagtgcctcggtggcggagctccggcccgacagcccggctcatgtgctgctggccgcgctgctgcacgagacccgcgcggggcccactgccgtgtacttcctgcgaggaggcttcgacggcttccagggctgctgtcccgatctgtgctctgaggcccccgcccctgcgctgccgccaacaggggacaaaaccagccgctccgactccagggctcctgtctacgaccagggtggccctgtggagatcttgccctacctgttcctgggcagctgcagtcactcgtcagacctgcaggggctgcaggcctgtggcatcacagccgtcctcaacgtgtccgccagctgccccaaccactttgagggccttttccgctacaagagtatccctgtggaggacaaccagatggtggagatcagtgcctggttccaggaggccataggcttcattgactgggtgaagaacagcggaggccgggtgctggtgcactgccaggcgggtatctcgcgctctgccaccatctgtctggcatacctcatgcagagtcgccgtgtgcggctggacgaggcctttgacttcgttaagcagcgccggggggtcatctcccccaacttcagtttcatggggcagctgctgcagtttgagacccaggtgctgtgtcactgaggtggtgcccctctgcctgcctgccccactgtgctggcaggagctgactgtggactggtgggctcccctctgggccagcacagtcccctcacctctggcagggctgctacctcctcagagtttcagaagcccccacatgggggctctaggaatgccggcatgctggtctttccgacctggtgctcttctgctgggggactgaggctggccctcattcggggtcgggaaccaagggtgtgtctgctctttccctccccatcctctggcagaaatcagctagacgctataccgtggactctccctggtccaccaccatgttgaagcccttggcagcctgagagctccaaggaacaagctgtgacaaccaggagccctgtctgtgggttcgtctgcccagggcctggagcccaagccctgtgttcctggggaagctggggacttgggaagtgatgggtgtgtcatgttgcgtgtgtctgtctgtgagcctttcacacctgtgctggcgctggaaaattatttgtgctcagctgacatttaacactccctcccccgcttcctcctagccctgtgggcaggggttggaaacttagcactttatatttatacagaacattcaggatatgtcaataaaatattgttatatttaaaaa

SEQ ID NO: 449018 - DNA, 1821 bp, Homo sapiens
ggagtcgaccgctcgggcagcgccaccgccacgagagcccgggacgcgggaaagaccgaaaggaagaggaagaggcaccggtggccatggggctggaggcggcgcgcgagctggagtgcgcggcgctgggcacgctgctgcgggatccgcgggaggcggaacgcacgctgctgctggactgccgccccttcctggccttctgccggcgccacgtgcgcgccgcgcggccagtgccttggaacgcgctgctgcggcgccgcgcgcgcggccctcctgccgccgttctcgcctgcctgctgcccgaccgcgcgctgcggacgcgcctggtccgcggggagctggcgcgggccgtggtgctggacgagggcagtgcctcggtggcggagctccggcccgacagcccggctcatgtgctgctggccgcgctgctgcacgagacccgcgcggggcccactgccgtgtacttcctgcgaggaggcttcgacggcttccagggctgctgtcccgatctgtgctctgaggcccccgcccctgcgctgccgccaacaggggacaaaaccagccgctccgactccagggctcctgtctacgaccagggtggccctgtggagatcttgccctacctgttcctgggcagctgcagtcactcgtcagacctgcaggggctgcaggcctgtggcatcacagccgtcctcaacgtgtccgccagctgccccaaccactttgagggccttttccgctacaagagtatccctgtggaggacaaccagatggtggagatcagtgcctggttccaggaggccataggcttcattgactgggtgaagaacagcggaggccgggtgctggtgcactgccaggcgggtatctcgcgctctgccaccatctgtctggcatacctcatgcagagtcgccgtgtgcggctggacgaggcctttgacttcgttaagcagcgccggggggtcatctcccccaacttcagtttcatggggcagctgctgcagtttgagacccaggtgctgtgtcactgaggtggtgcccctctgcctgcctgccccactgtgctggcaggagctgactgtggactggtgggctcccctctgggccagcacagtcccctcacctctggcagggctgctacctcctcagagtttcagaagcccccacatgggggctctaggaatgccggcatgctggtctttccgacctggtgctcttctgctgggggactgaggctggccctcattcggggtcgggaaccaagggtgtgtctgctctttccctccccatcctctggcagaaatcagctagacgctataccgtggactctccctggtccaccaccatgttgaagcccttggcagcctgagagctccaaggaacaagctgtgacaaccaggagccctgtctgtgggttcgtctgcccagggcctggagcccaagccctgtgttcctggggaagctggggacttgggaagtgatgggtgtgtcatgttgcgtgtgtctgtctgtgagcctttcacacctgtgctggcgctggaaaattatttgtgctcagctgacatttaacactccctcccccgcttcctcctagccctgtgggcaggggttggaaacttagcactttatatttatacagaacattcaggatatgtcaataaaatattgttatatttaaaaaccataatagagaatagtatttttcttaaccagaacaacaatctctgattaataccctttgaactcaaaccgttatacgccaaaaaagctttctgtttggtgccaattgtccaataagagaccctttttgggggggctggg

SEQ ID NO: 449019 - DNA, 2155 bp, Homo sapiens
ggagtcgaccgctcgggcagcgccaccgccacgagagcccgggacgcgggaaagaccgaaaggaagaggaagaggcaccggtggccatggggctggaggcggcgcgcgagctggagtgcgcggcgctgggcacgctgctgcgggatccgcgggaggcggaacgcacgctgctgctggactgccgccccttcctggccttctgccggcgccacgtgcgcgccgcgcggccagtgccttggaacgcgctgctgcggcgccgcgcgcgcggccctcctgccgccgttctcgcctgcctgctgcccgaccgcgcgctgcggacgcgcctggtccgcggggagctggcgcgggccgtggtgctggacgagggcagtgcctcggtggcggagctccggcccgacagcccggctcatgtgctgctggccgcgctgctgcacgagacccgcgcggggcccactgccgtgtacttcctgcgaggaggcttcgacggcttccagggctgctgtcccgatctgtgctctgaggcccccgcccctgcgctgccgccaacaggggacaaaaccagccgctccgactccagggctcctgtctacgaccagggtggccctgtggagatcttgccctacctgttcctgggcagctgcagtcactcgtcagacctgcaggggctgcaggcctgtggcatcacagccgtcctcaacgtgtccgccagctgccccaaccactttgagggccttttccgctacaagagtatccctgtggaggacaaccagatggtggagatcagtgcctggttccaggaggccataggcttcattgactgggtgaagaacagcggaggccgggtgctggtgcactgccaggcgggtatctcgcgctctgccaccatctgtctggcatacctcatgcagagtcgccgtgtgcggctggacgaggcctttgacttcgttaagcagcgccggggggtcatctcccccaacttcagtttcatggggcagctgctgcagtttgagacccaggtgctgtgtcactgaggtggtgcccctctgcctgcctgccccactgtgctggcaggagctgactgtggactggtgggctcccctctgggccagcacagtcccctcacctctggcagggctgctacctcctcagagtttcagaagcccccacatgggggctctaggaatgccggcatgctggtctttccgacctggtgctcttctgctgggggactgaggctggccctcattcggggtcgggaaccaagggtgtgtctgctctttccctccccatcctctggcagaaatcagctagacgctataccgtggactctccctggtccaccaccatgttgaagcccttggcagcctgagagctccaaggaacaagctgtgacaaccaggagccctgtctgtgggttcgtctgcccagggcctggagcccaagccctgtgttcctggggaagctggggacttgggaagtgatgggtgtgtcatgttgcgtgtgtctgtctgtgagcctttcacacctgtgctggcgctggaaaattatttgtgctcagctgacatttaacactccctcccccgcttcctcctagccctgtgggcaggggttggaaacttagcactttatatttatacagaacattcaggatatgtcaataaaatattgttatatttaaaaaaaaaaaaaaaaaacaaaaaaaaaaacaacaaaaaaaaaaaaaaaaaaaaaaacaacaacaacaacaaaaaaaaaacaaaaaaaaaaaaaaaagaaaaaaaaaaaaaaaaagagggggggcgcgccgaacaaacaccgccctgggagggagagcacctatagaacccccaccacatttgagacaacgagagagcggcgcccagagagagggtctgtcttatataacagaggagcgagcgtgcgcgcaggccgcgagttttacacaacacgaccgttaatgggtgaggaacacatacggacacatcggatgggcacatactgcggtaggagcaccgccaacccccacatatgttggagggcgggaacgaaactcgagagggcggacacaaccgcgctccacagcgggaccgtgaccagtcagccgagcgtaggggaacgtcctatcacaatggcggacggaggaaacgaatgaggc

SEQ ID NO: 449020 - DNA, 475 bp, Homo sapiens
tttatatataaatctataaaaagaagcacaaaagacagaccggtcaccgcacactccccttattttgcactttcttgtgagagaggtgacacactgtgtgtgtgtgtgtgtgtgagtgtgtgtgtgtgtgtgtgatgggtgtgtcatgttgcgtgtgtctgtctgtgagcctttcacacctgtgctggcgctggaaaattatttgtgctcagctgacatttaacactccctcccccgcttcctcctagccctgtgggcaggggttggaaacttagcactttatatttatacagaacattcaggatatgtcaataaaatattgttatatttaaaaaccataatagagaatagtatttttcttaaccagaacaacaatctctgattaataccctttgaactcaaaccgttatacgccaaaaaagctttctgtttggtgccaattgtccaataagagaccctttttgggggggctggg

SEQ ID NO: 449021 - DNA, 889 bp, Homo sapiens
ccacgagagcccgggacgcgggaaagaccgaaaggaagaggaagaggcaccggtggccatggggctggaggcggcgcgcgagctggagtgcgcggcgctgggcacgctgctgcgggatccgcgggaggcggaacgcacgctgctgctggactgccgccccttcctggccttctgccggcgccacgtgcgcgccgcgcggccagtgccttggaacgcgctgctgcggcgccgcgcgcgcggccctcctgccgccgttctcgcctgcctgctgcccgaccgcgcgctgcggacgcgcctggtccgcggggagctggcgcgggccgtggtgctggacgagggcagtgcctcggtggcggagctccggcccgacagcccggctcatgtgctgctggccgcgctgctgcacgagacccgcgcggggcccactgccgtgtacttcctgcgaggtgagcaagccggccgcccttggcccgccccacccgactccagcccggctttccctgctgatcgtgctcttcccctccttgcaggaggcttcgacggcttccagggctgctgtcccgatctgtgctctgaggcccccgcccctgcgctgccgccaacaggggacaaaaccagccgctccgactccagggctcctgtctacgaccaggtgagtattgacccccctcccccgaacctccctctctccccgccgcggactgggcgcctctagggaaagagcctgccatttggggatgcgagcagtttgcccatatacacacacttttatacgtgtgtgtgttgggggagggggtggggcatggctgctcgcgcgtgcctgtatgggtctgtgtatgtttgcatgtgtatgttgggagcatgaagggaaatgtatgtcccggtgtgt

SEQ ID NO: 449022 - DNA, 1475 bp, Homo sapiens
ggagtcgaccgctcgggcagcgccaccgccacgagagcccgggacgcgggaaagaccgaaaggaagaggaagaggcaccggtggccatggggctggaggcggcgcgcgagctggagtgcgcggcgctgggcacgctgctgcgggatccgcgggaggcggaacgcacgctgctgctggactgccgccccttcctggccttctgccggcgccacgtgcgcgctgctgcacgagacccgcgcggggcccactgccgtgtacttcctgcgaggaggcttcgacggcttccagggctgctgtcccgatctgtgctctgaggcccccgcccctgcgctgccgccaacaggggacaaaaccagccgctccgactccagggctcctgtctacgaccagggtggccctgtggagatcttgccctacctgttcctgggcagctgcagtcactcgtcagacctgcaggggctgcaggcctgtggcatcacagccgtcctcaacgtgtccgccagctgccccaaccactttgagggccttttccgctacaagagtatccctgtggaggacaaccagatggtggagatcagtgcctggttccaggaggccataggcttcattgactgggtgaagaacagcggaggccgggtgctggtgcactgccaggcgggtatctcgcgctctgccaccatctgtctggcatacctcatgcagagtcgccgtgtgcggctggacgaggcctttgacttcgttaagcagcgccggggggtcatctcccccaacttcagtttcatggggcagctgctgcagtttgagacccaggtgctgtgtcactgaggtggtgcccctctgcctgcctgccccactgtgctggcaggagctgactgtggactggtgggctcccctctgggccagcacagtcccctcacctctggcagggctgctacctcctcagagtttcagaagcccccacatgggggctctaggaatgccggcatgctggtctttccgacctggtgctcttctgctgggggactgaggctggccctcattcggggtcgggaaccaagggtgtgtctgctctttccctccccatcctctggcagaaatcagctagacgctataccgtggactctccctggtccaccaccatgttgaagcccttggcagcctgagagctccaaggaacaagctgtgacaaccaggagccctgtctgtgggttcgtctgcccagggcctggagcccaagccctgtgttcctggggaagctggggacttgggaagtgatgggtgtgtcatgttgcgtgtgtctgtctgtgagcctttcacacctgtgctggcgctggaaaattatttgtgctcagctgacatttaacactccctcccccgcttcctcctagccctgtgggcaggggttggaaacttagcactttatatttatacagaacattcaggatatgtcaataaaatattgttatatttaaaaa

SEQ ID NO: 449023 - DNA, 833 bp, Homo sapiens
ctacctgttcctgggcagctgcagtcactcgtcagacctgcaggggctgcaggcctgtggcatcacagccgtcctcaacgtgtccgccagctgccccaaccactttgagggccttttccgctacaagagtatccctgtggaggacaaccagatggtggagatcagtgcctggttccaggaggccataggcttcattggtaagggggcacctctgcccagaaatcccgaggggctccagaggagaggactgggggcacctgtctcctgggctgtgcacattccgtctgacaccactcccccatctcccttgcagactgggtgaagaacagcggaggccgggtgctggtgcactgccaggcgggtatctcgcgctctgccaccatctgtctggcatacctcatgcagagtcgccgtgtgcggctggacgaggcctttgacttcgttaagcagcgccggggggtcatctcccccaacttcagtttcatggggcagctgctgcagtttgagacccaggtgctgtgtcactgaggtggtgcccctctgcctgcctgccccactgtgctggcaggagctgactgtggactggtgggctcccctctgggccagcacagtcccctcacctctggcagggctgctacctcctcagagtttcagaagcccccacatgggggctctaggaatgccggcatgctggtctttccgacctggtgctcttctgctgggggactgaggctggccctcattcggggtcgggaaccaagggtgtgtctgctctttccctccccatcctctggcagaaatcagctagacgctataccgtggactctccctgg

SEQ ID NO: 449024 - DNA, 3456 bp, Homo sapiens
  misc_feature (1921)..(1921): n is a, c, g, or t
tttccttcatgtagattgctgtgtgtgtctttttcttcataattccccttaattctgtgtgctttgaatgacactgttgttgttactgttgttttatatccattgtcacataaaactcttatcatttattcttccaggccagggactgtccttatgggtagagatacactatctgcaggaatttatttttttacgtatttttactagttgatgggaaagacattgggaaagacctgggctggatttgtgatgagctgtgtttactgagcatgatgaagtaaagctcaacgtgattactctgaagtccagccttactgtcagtctaaggactcaggatacaaatactcaaaacataaattcttagactctaaatttcacatggtttttcctatcagtacaggttaaggataatggcgtgttgtaggtttttccagtgcaatacaaggaagttggttctagatcctttagtacagttaatgttttgtagagtgtgttctatgttcactgcattggtatgtctcatctttggcatgatcttggctcaccgcaacctccgcctcttgcattcaagcacttcttgtctcagcctccagagtagctgggattacaagcatgtgccaacatgcccggctaatttttgtatgcttttgtggagacaggctttgccatgtttgccaggttggtctctaagtgatccacccgcctcagccccacaaagtgctgggattacatgcgtgagccaccgtacccagccacacctttgcttatttctactatgcatttcaagtgatcatttcaagagaataagtacttaggagctcctatgctctttttttttttaaccctgttgcttgcatcacccggttccaaccctatatgaaagtttcatgagcatgtttctgtcactgaggcagcttctccatttggcatataattgagaaattgctagtttgtggctgagacattggtttgagaggagacgtaatttatatatttagcagaatgcttaagttacatttccagagattaatttaattctacttttaattaagttaaccctttgctgtatctttacaagacgtaggtggagatttaattttgactcttagattcagttaaggtgatgaaattggcattatatagtttttgatgctgagccccacggagattaaaagatttgctaaacaccatgcaatttttgaatcacatctctaatctcacattattctgtactctattttttgcttgtatgattgatgggtctttcattatctgtgattgacattctatgagtaggtgcttttgctttgcctataagtcgttattatgaaggaggaatggtgaataagaaggtaatttagaaaagcctatattaaatataccatgaacattgaatatagcaagatcttattctctagttgttatcttagttgataaattctgtatgtgttatgtgtttgtgtatacatatgtacatattaatgatgtgggtgttgatactgtgatcacatgacaaatgactggtttatagtgaaaagctgttggggttcagagaaatgaacattcttctaaaagtgaggtagataagttattttatagttcttgcctttgagtctctgttcttctggtagaaatgttagtgtatttataacctctcagatttgtttggttctcttagtgttcttgatccaggcagttagcgatatgttggatgaattgagaaaaatgagtttttcctttcctactaactgaattagattagaaataagcagttaagtgagaaaaatagggaattagtgccagatatgttgaggtgtagtgttgacagggggtcttttaccttcagatgtttggtgcaacttagagaatgcagtggtagttgctggcccagcccatccaaacaacctcatttgtggggtgntacttcacagatgacttaaaataaatcccctgaaaataagaatctctggaagagatgacacgtgtatgtgcgtgtgtgcacgtgtgtgcgtgtgtgcacgtgtgtgtgtgtgtgtgttttggtggagtggtaggaggagggttggcttaatgatgagaatcattatttcttgaattggatgacactttccattcctgcaaagggagcgtgaggtccagccttgctaattcatgatcaaagtaatttgctgagagtagtggaaggaatgagttagcagaagatggcaaattgcattaatgagtagtaggaggaaaacaaataagcaaattttaatgtggttggaacatgttcctgagttgtatgaagggagacaggtaaattgagagtaatgttatgattgtttcatttgttggaaataaggaaaacttgcatggtttgaattgtggaacaataggtggtgtatgttaggagtcagaattatcatttaacatgtaagtttctgttttacttcagataaagaatgtcagctacctttcccatgttagcttctataccttttcttgaggtgaccataaataggtaatattgtctttcactgagattgttttaattagcgaagtgtgctgattaaatgtcttttcttgataaattattagaatgaataaaggatggtatttctagatagccttggttagtcagtgatttgtttaaatttagtgtggataagaatcacctgagggctttttaaacacagtttactgggtcctgaccttagtgtttctggcttattaggtataagtatgagaagttgatttttatcaagtttctagatgctacagatctaggaaccatacttagagtgctattatatgtcttttaatgtacactgatatggaaaaagcaatgatacatcatgttatcgcatattttaaaatgtgatcatgaccagggaatcttgaaagttgtcttatgtaataatgtaaatcaatgtagaataccatatatttttttcttgcaaggttattattaataggaatgactatttgtagccaatgtgttcaaatgcatgggaggacgtaaacacttcataatttcctggaaatacagacatatatcacttaaaataatacatttctaatataaatttaaattatctacgtgatatgaggaaacgagcttatttttgataattttcctagcagtgaatcaactatactcatttgaatctaaattaaattaaatttgagtaaattcagccatttctaaattcagtccatataaattcactttgggtaaaagaagacaaaattcctgaaaacagtagattaaaaaaataacattttaagagcaggtatgatctcaatgaatatagtgtggtaatttctgcctaatacctacccttttggaggaaggaaaggtaatcctgtttgtgtttaatgttaattactgactctttataacttgttttatttatttattgtttgattttaagcatctgcttctggtggacttacatatgttgggtttgggaaatt

SEQ ID NO: 449025 - DNA, 1193 bp, Homo sapiens
gaaaactatattcctgttggaaaatataaggattgcctttcttttcatttggtaggactattgccagagcctactgaatttcatttttgttttctttttcttaagaaacatacaagaaatgcccattccttttaaaatcatcagttattttacattccaaaaatattgcagtgagattcttgtagtcaatgagttctacggactgaatttcacttgtggcagctcaaatgtttctgtgacaactaatccaatgtgtgccttcactcaaggaattcaattcattgagaaaacctgcccaggtgcaacatctagattcacaatgaactttctgattttgtattcatttattccagctcttgtcatcctaggaatagttgttttcaaaataagggatcatctcattagcaggtagtgaaagccatggctgggaaaatggaagtgaagctgccgactgtgcatgactgctctgaacgtctgaaatgagagtgccatgtatttctttcttgacaggacatctcaagtcttttaaccattaagactccatttgtgcctcttggatccaagcaggccttgaatgcaatggaagtggtttatagtcccttgctcttacaacttgcagggacatgtggttatttggaaattgtgactgagcggacccaagaatgtaaataatattcataaacctatgggagactcgtgtgactattttttttccttgttctaggcacagaaaaaaataggtcagcttaaaaatatgtttacattggataaaggattaggcaaaaataaaatgtttcaaggattcctgaccataagtgacagagaaagagagttgtgggtttagatgaagcaaggttatcatgcagaattgggtaagaatgcttctgttcctggaagacccagagttaaatgcagatgtccacacgaggggtcggagttacctgatcacatcgagagagtgctgggcagatggatggtgagcaccactgctacagagcacccagtgattttactgaggattaaaataaaaaaccgtaggaatgggctcaacagtgaacaaagcacaccagacaaacctctggttatgtttttaaagattcgtttgctatttttcactttcagctgagtttacttataggcacattgtgcacatgtaccctaaaacttaaagtataaaaaaaaaaaaacctacc

SEQ ID NO: 449026 - DNA, 1644 bp, Homo sapiens
taggtaggtgtggtgttggctaggcagaacatggttatttatgaagatgcctgtagagttcaacaagcctgcttactgcggttagttgtgaccattgtctaagtaatttaatgttttcctatgagagctgaaggagccgtgaaagggaaaaggtggctcccaatgagttgcagccaatgggaacaatttgatataataaatagtctcatgttgactcctttccaaaacggcctttcaaaggggagtgtggcttgccctgcaaacttctcccacccactcaccacaaaggatttattcacagaggcaagtgcagtatttttcttaaatgatagcccttggagaggaaactaaagagcttatgcttttctaggacgctgggcttacatcctgaggttgcccgatttggatatttttctgctgctctcttggccccccacttaattggtgaatttctaactcttgtgctacttggtatcgtccaaaatccaaatatagtcaacagtgtagtggctctgctgtccattgcgggggtgcttgttggatctggattcctcagaaacatacaagaaatgcccattccttttaaaatcatcagttattttacattccaaaaatattgcagtgagattcttgtagtcaatgagttctacggactgaatttcacttgtggcagctcaaatgtttctgtgacaactaatccaatgtgtgccttcactcaaggaattcaattcattgagaaaacctgcccaggtgcaacatctagattcacaatgaactttctgattttgtattcatttattccagctcttgtcatcctaggaatagttgttttcaaaataagggatcatctcattagcaggtagtgaaagccatggctgggaaaatggaagtgaagctgccgactgtgcatgactgctctgaacgtctgaaatgagagtgccatgtatttctttcttgacaggacatctcaagtcttttaaccattaagactccatttgtgcctcttggatccaagcaggccttgaatgcaatggaagtggtttatagtcccttgctcttacaacttgcagggacatgtggttatttggaaattgtgactgagcggacccaagaatgtaaataatattcataaacctatgggagactcgtgtgactattttttttccttgttctaggcacagaaaaaaataggtcagcttaaaaatatgtttacattggataaaggattaggcaaaaataaaatgtttcaaggattcctgaccataagtgacagagaaagagagttgtgggtttagatgaagcaaggttatcatgcagaattgggtaagaatgcttctgttcctggaagacccagagttaaatgcagatgtccacacgaggggtcggagttacctgatcacatcgagagagtgctgggcagatggatggtgagcaccactgctacagagcacccagtgattttactgaggattaaaataaaaaaccgtaggaatgggctcaacagtgaacaaagcacaccagacaaacctctggttatgtttttaaagattcgtttgctatttttcactttcagctgagtttacttataggcacattgtgcacatgtaccctaaaacttaaagtataaaaaaaaaaaaacctacc

SEQ ID NO: 449027 - DNA, 1880 bp, Homo sapiens
aagtcccagtcctgctgtcccaagggactccggggtcaggtggagcaggcagggcagtctgccacgggctccccaactgaagccactctggggagggtccggccaccagaaaatttgcccagctttgctgcctgttggccatgggtgacctctcatctttgacccccggagggtccatgggtctccaagtaaacagaggctcccagagctccctggagggggctcctgccaccgccccggagcctcacagcctgggcatcctccatgcctcctacagcgtcagccaccgcgtgaggccctggtgggacatcacatcttgccggcagcagtggaccaggcagatcctcaaagatgtctccttgtacgtggagagcgggcagatcatgtgcatcctaggaagctcaggctccgggaaaaccacgctgctggacgccatgtccgggaggctggggcgcgcggggaccttcctgggggaggtgtatgtgaacggccgggcgctgcgccgggagcagttccaggactgcttctcctacgtcctgcagagcgacaccctgctgagcagcctcaccgtgcgcgagacgctgcactacaccgcgctgctggccatccgccgcggcaatcccggctccttccagaagaaggtggaggccgtcatggcagagctgagtctgagccatgtggcagaccgactgattggcaactacagcttggggggcatttccacgggtgagcggcgccgggtctccatcgcagcccagctgctccaggatcctaaggtcatgctgtttgatgagccaaccacaggcctggactgcatgactgctaatcagattgtcgtcctcctggtggaactggctcgcaggaaccgaattgtggttctcaccattcaccagccccgttctgagctttttcagctctttgacaaaattgccatcctgagcttcggagagctgattttctgtggcacgccagcggaaatgcttgatttcttcaatgactgcggttacccttgtcctgaacattcaaacccttttgacttctatatggacctgacgtcagtggatacccaaagcaaggaacgggaaatagaaacctccaagagagtccagatgatagaatctgcctacaagaaatcagcaatttgtcataaaactttgaagaatattgaaagaatgaaacacctgaaaacgttaccaatggttcctttcaaaaccaaagattctcctggagttttctctaaactgggtgttctcctgaggagagtgacaagaaacttggtgagaaataagctggcagtgattacgcgtctccttcagaatctgatcatgggtttgttcctccttttcttcgttctgcgggtccgaagcaatgtgctaaagggtgctatccaggaccgcgtaggtctcctttaccagtttgtgggcgccaccccgtacacaggcatgctgaacgctgtgaatctgtttcccgtgctgcgagctgtcagcgaccaggagagtcaggacggcctctaccagaagtggcagatgatgctggcctatgcactgcacgtcctccccttcagcgttgttgccaccatgattttcagcagtgtgtgctactggacgctgggcttacatcctgaggttgcccgatttggatatttttctgctgctctcttggccccccacttaattggtgaatttctaactcttgtgctacttggtatcgtccaaaatccaaatatagtcaacagtgtagtggctctgctgtccattgcgggggtgcttgttggatctggattcctcagaaacatacaagaaatgcccattccttttaatgagttctacggacttgatttcacttgtggcagctctgtttctgtgacaacttccctgtgt

SEQ ID NO: 449028 - DNA, 387 bp, Homo sapiens
cttgtcctgaacattcaaacccttttgacttctatagtaagtttttctttcacattccccatcatgaatgttttttaaactttctcatctcagacttctgcctggatgacaccagtctagtggatttgatttttgcttttgtttttgtgttttatactcttcaaggaatcaatttggccgggtcaatgaacttgccagagatgactatcagaatgaggtcagggatctctctcaaacaaactggcgcactgctactactttatcagagcataattagctgagcttctgaattctcccagacaatcccaatgggatcctcaaggccctgctgggatgctttaaagtattctgattttataggtgggcattaaccacaaattttatctt

SEQ ID NO: 449029 - DNA, 2877 bp, Homo sapiens
aagtcccagtcctgctgtcccaagggactccggggtcaggtggagcaggcagggcagtctgccacgggctccccaactgaagccactctggggagggtccggccaccagaaaatttgcccagctttgctgcctgttggccatgggtgacctctcatctttgacccccggagggtccatgggtctccaagtaaacagaggctcccagagctccctggagggggctcctgccaccgccccggagcctcacagcctgggcatcctccatgcctcctacagcgtcagccaccgcgtgaggccctggtgggacatcacatcttgccggcagcagtggaccaggcagatcctcaaagatgtctccttgtacgtggagagcgggcagatcatgtgcatcctaggaagctcaggctccgggaaaaccacgctgctggacgccatgtccgggaggctggggcgcgcggggaccttcctgggggaggtgtatgtgaacggccgggcgctgcgccgggagcagttccaggactgcttctcctacgtcctgcagagcgacaccctgctgagcagcctcaccgtgcgcgagacgctgcactacaccgcgctgctggccatccgccgcggcaatcccggctccttccagaagaaggtggaggccgtcatggcagagctgagtctgagccatgtggcagaccgactgattggcaactacagcttggggggcatttccacgggtgagcggcgccgggtctccatcgcagcccagctgctccaggatcctaaggtcatgctgtttgatgagccaaccacaggcctggactgcatgactgctaatcagattgtcgtcctcctggtggaactggctcgcaggaaccgaattgtggttctcaccattcaccagccccgttctgagctttttcagctctttgacaaaattgccatcctgagcttcggagagctgattttctgtggcacgccagcggaaatgcttgatttcttcaatgactgcggttacccttgtcctgaacattcaaacccttttgacttctatatggacctgacgtcagtggatacccaaagcaaggaacgggaaatagaaacctccaagagagtccagatgatagaatctgcctacaagaaatcagcaatttgtcataaaactttgaagaatattgaaagaatgaaacacctgaaaacgttaccaatggttcctttcaaaaccaaagattctcctggagttttctctaaactgggtgttctcctgaggagagtgacaagaaacttggtgagaaataagctggcagtgattacgcgtctccttcagaatctgatcatgggtttgttcctccttttcttcgttctgcgggtccgaagcaatgtgctaaagggtgctatccaggaccgcgtaggtctcctttaccagtttgtgggcgccaccccgtacacaggcatgctgaacgctgtgaatctgtttcccgtgctgcgagctgtcagcgaccaggagagtcaggacggcctctaccagaagtggcagatgatgctggcctatgcactgcacgtcctccccttcagcgttgttgccaccatgattttcagcagtgtgtgctactggacgctgggcttacatcctgaggttgcccgatttggatatttttctgctgctctcttggccccccacttaattggtgaatttctaactcttgtgctacttggtatcgtccaaaatccaaatatagtcaacagtgtagtggctctgctgtccattgcgggggtgcttgttggatctggattcctcagaaacatacaagaaatgcccattccttttaaaatcatcagttattttacattccaaaaatattgcagtgagattcttgtagtcaatgagttctacggactgaatttcacttgtggcagctcaaatgtttctgtgacaactaatccaatgtgtgccttcactcaaggaattcaattcattgagaaaacctgcccaggtgcaacatctagattcacaatgaactttctgattttgtattcatttattccagctcttgtcatcctaggaatagttgttttcaaaataagggatcatctcattagcaggtagtgaaagccatggctgggaaaatggaagtgaagctgccgactgtgcatgactgctctgaacgtctgaaatgagagtgccatgtatttctttcttgacaggacatctcaagtcttttaaccattaagactccatttgtgcctcttggatccaagcaggccttgaatgcaatggaagtggtttatagtcccttgctcttacaacttgcagggacatgtggttatttggaaattgtgactgagcggacccaagaatgtaaataatattcataaacctatgggagactcgtgtgactattttttttccttgttctaggcacagaaaaaaataggtcagcttaaaaatatgtttacattggataaaggattaggcaaaaataaaatgtttcaaggattcctgaccataagtgacagagaaagagagttgtgggtttagatgaagcaaggttatcatgcagaattgggtaagaatgcttctgttcctggaagacccagagttaaatgcagatgtccacacgaggggtcggagttacctgatcacatcgagagagtgctgggcagatggatggtgagcaccactgctacagagcacccagtgattttactgaggattaaaataaaaaaccgtaggaatgggctcaacagtgaacaaagcacaccagacaaacctctggttatgtttttaaagattcgtttgctatttttcactttcagctgagtttacttataggcacattgtgcacatgtaccctaaaacttaaagtataaaaaaaaaaaaacctacc

SEQ ID NO: 449030 - DNA, 3263 bp, Homo sapiens
gaattccggcaggcgcccatggcgggctgagtcctgcccatgccctggtggcctggaagcctgcatgggcgccgtgcaaagatcaacgttttccagaggagcttttgggctcatcactggcctggggagggcttgacacggggttcccacagcttgccccacaccaccttcacacccacacacagcaggtccccgcggggccggtgcaggctgtggctgcccgcgctgcgctgttgctctgtcccggctggctggctccgagtgtggggcgctctgggccggggccgctggggcgcgcacagtggggtgacaggcggcctggctgcagaaacgttgcaccggtgcctgaggtgggaggatgtgatgacgcggcccacgcagcgggaacccaggcctttaaaaagcccaggaaacagcctcagctcaagcggtggctccactggaggaaaacacaccccggtctcacattaaagaagccaaactgtcggcttcaaagagaaaaggcaacatcctgtcacaggccatgctctggcaaaaacccacagctccggagcaagccccagccccggcccggccataccagggcgtccgtgtgaaggagccagtgaaggaactgctgaggaggaagcgaggccacgccagcagtggggcagcacctgcacctacggcggtggtgctgccccatcagcccctggcgacctacaccacagtgggtccttcctgcctggacatggaaggttctgtgtctgcagtgacagaggaggctgccctgtgtgccggctggctctcccagcccaccccggccaccctgcagcccctggccccatggacaccttacaccgagtatgtgccccatgaagctgtcagctgcccctactcagctgacatgtatgtgcagcccgtgtgccccagctacacggtggtggggccctcctcagtgttgacctatgcctctccgccactcatcaccaatgtcacgacaagaagctccgccacgcccgcagtggggcccccgctggagggcccagagcaccaggcacccctcacctatttcccgtggcctcagcccctttccacactacccacctccaccctgcagtaccagcctccggccccagccctacctgggccccagtttgtccagctccccatctctatcccagagccagtccttcaggacatggaagaccccagaagagccgccagctcgttgaccatcgacaagctgcttttggaggaagaggatagcgacgcctatgcgcttaaccacactctctctgtggaaggcttttaggcgtggctcccacctgagtcctgttccctgaaactgggattttaaaatgagcctggaattgagccccaggttcatgcttgtttggagtagtcatttcatgactacactttctacgcacagctagaattgtagacctgtaaaccttccttcccttcttccttcccctccctccctcacttcctccctctcccccatccttccattcttcccctccctcccttcttcctttccaaccccttccttccttttcctccctcccttccttccctccttcccttctccctttccaaccccttccttccttttcctccctcccttccttccctccttcccttctccctttccttctttacctccctccctccctcgcttcttctctctttcttacttcttttttcaattctgttccattttgggaggtaattatagggattttagcaataacattttatgtcaaatgttgccaagtctgtggtccatgggctttcatttctgtcacatttcatttcttggaaaaggcctccttcctccagtgcctgctgaaccatcttagggtcactcacaccctctgtaattttaagatgtatgtggtggccggcgggaagaccagccccgacagcacctcctgagaaagtcagccaagggcctaccctgatgccagagtccttgagctgtcagttcccacagttgctcctttgtttgctcttctcagcctcggccagatttacagtccaggcagcaaaatctcaaggcctggggctcagagtagtaaggggtgggaagtgggtggcagggagaaaagaacatcagggtgggtggggacaggccagtgacgaagagagggacagaggagggatgggaacaggctgtgcatcttagttggagagaggggtgtgggaggaagcttgagtttgatgcagggaggaggaaggctgaggaatgacttggctccagattacttggttattaagaagaacaataaactaaaggaaagcattgcttgaagagatggttttgctgctctccttgaggatacgtgcaagggaagttgggctgttgtaaacagggtgaagggtgtgtttggtcggccatttctgtctcacctctaggccctctgctggtgctgtggaggccaagaccccattaagcctaaaggtgatgggtcctcgcctaggcttagtgctaccatgtgggttttgtttctttccttccttccttccttccttccttccttccttccttccttccttccttcctctctctttctttcttttttttggttttttttgggacggagtctcactccattgcccaggctggagtacaatggtgcgatcttggctcactgcacctctgtctcccaagttcaagtgattctcctgcctgagcctcccgagtagctgggattacaggtgcatgccaccatgcctggctaatttttgtatttttagtagagacggggtttcaccatgttggccaggctggtctcgaactcctgaccttgtgatccgcccgcctcagcctctcagagtgctgggatcacaggcgtgagccaccgcacccagccttttaccatgtgggtttctttagtgtcttaaaagcgtccataagccaccattctgtggaaccaaggccccctccacgcaaacaccctccctcctggggacctctggagcctcagccagaagtaccattaggtttaattttaatttgttttgctggagaaacatcaggtttgtaggagactgagttgttagcaggtgtgcttagctcttgatagtgaacgtgtaccttgggaactggctcacccacctgctaatagcaccatcgtcactattaagcagacatttcagttggtagaatccatgtagaagtcatggacttttctgggaaatgacttttctgggaaatgacagtttctttgacatattttctttgcccactttaaataaaaactctggagaaagtt

SEQ ID NO: 449031 - DNA, 3516 bp, Homo sapiens
gaattccggcaggcgcccatggcgggctgagtcctgcccatgccctggtggcctggaagcctgcatgggcgccgtgcaaagatcaacgttttccagaggagcttttgggctcatcactggcctggggagggcttgacacggggttcccacagcttgccccacaccaccttcacacccacacacagcaggtccccgcggggccggtgcaggctgtggctgcccgcgctgcgctgttgctctgtcccggctggctggctccgagtgtggggcgctctgggccggggccgctggggcgcgcacagtggggtgacaggcggcctggctgcagaaacgttgcaccggtgcctgaggtgggaggatgtgatgacgcggcccacgcagcgggaacccaggcctttaaaaagcccaggaaacagcctcagctcaagcggtggctccactggaggaaaacacaccccggtctcacattaaagaagccaaactgtcggcttcaaagagaaaaggcaacatcctgtcacaggccatgctctggcaaaaacccacagctccggagcaagccccagccccggcccggccataccagggcgtccgtgtgaaggagccagtgaaggaactgctgaggaggaagcgaggccacgccagcagtggggcagcacctgcacctacggcggtggtgctgccccatcagcccctggcgacctacaccacagtgggtccttcctgcctggacatggaaggttctgtgtctgcagtgacagaggaggctgccctgtgtgccggctggctctcccagcccaccccggccaccctgcagcccctggccccatggacaccttacaccgagtatgtgccccatgaagctgtcagctgcccctactcagctgacatgtatgtgcagcccgtgtgccccagctacacggtggtggggccctcctcagtgttgacctatgcctctccgccactcatcaccaatgtcacgacaagaagctccgccacgcccgcagtggggcccccgctggagggcccagagcaccaggcacccctcacctatttcccgtggcctcagcccctttccacactacccacctccaccctgcagtaccagcctccggccccagccctacctgggccccagtttgtccagctccccatctctatcccagagccagtccttcaggacatggaagaccccagaagagccgccagctcgttgaccatcgacaagctgcttttggaggaagaggatagcgacgcctatgcgcttaaccacactctctctgtggaaggcttttaggcgtggctcccacctgagtcctgttccctgaaactgggattttaaaatgagcctggaattgagccccaggttcatgcttgtttggagtagtcatttcatgactacactttctacgcacagctagaattgtagacctgtaaaccttccttcccttcttccttcccctccctccctcacttcctccctctcccccatccttccattcttcccctccctcccttcttcctttccaaccccttccttccttttcctccctcccttccttccctccttcccttctccctttccaaccccttccttccttttcctccctcccttccttccctccttcccttctccctttccttctttacctccctccctccctcgcttcttctctctttcttacttcttttttcaattctgttccattttgggaggtaattatagggattttagcaataacattttatgtcaaatgttgccaagtctgtggtccatgggctttcatttctgtcacatttcatttcttggaaaaggcctccttcctccagtgcctgctgaaccatcttagggtcactcacaccctctgtaattttaagatgtatgtggtggccggcgggaagaccagccccgacagcacctcctgagaaagtcagccaagggcctaccctgatgccagagtccttgagctgtcagttcccacagttgctcctttgtttgctcttctcagcctcggccagatttacagtccaggcagcaaaatctcaaggcctggggctcagagtagtaaggggtgggaagtgggtggcagggagaaaagaacatcagggtgggtggggacaggccagtgacgaagagagggacagaggagggatgggaacaggctgtgcatcttagttggagagaggggtgtgggaggaagcttgagtttgatgcagggaggaggaaggctgaggaatgacttggctccagattacttggttattaagaagaacaataaactaaaggaaagcattgcttgaagagatggttttgctgctctccttgaggatacgtgcaagggaagttgggctgttgtaaacagggtgaagggtgtgtttggtcggccatttctgtctcacctctaggccctctgctggtgctgtggaggccaagaccccattaagcctaaaggtgatgggtcctcgcctaggcttagtgctaccatgtgggttttgtttctttccttccttccttccttccttccttccttccttccttccttccttccttccttccttccttccttctttccttccttccttccttccttccttcctctctctttctttcttttttttggttttttttgggacggagtctcactccattgcccaggctggagtacaatggtgcgatcttggctcactgcacctctgtctcccaagttcaagtgattctcctgcctgagcctcccgagtagctgggattacaggtgcatgccaccatgcctggctaatttttgtatttttagtagagacggggtttcaccatgttggccaggctggtctcgaactcctgaccttgtgatccgcccgcctcagcctctcagagtgctgggatcacaggcgtgagccaccgcacccagccttttaccatgtgggtttctttagtgtcttaaaagcgtccataagccaccattctgtggaaccaaggccccctccacgcaaacaccctccctcctggggacctctggagcctcagccagaagtaccattaggtttaattttaatttgttttgctggagaaacatcaggtttgtaggagactgagttgttagcaggtgtgcttagctcttgatagtgaacgtgtaccttgggaactggctcacccacctgctaatagcaccatcgtcactattaagcagacatttcagttggtagaatccatgtagaagtcatggacttttctgggaaatgacttttctgggaaatgacagtttctttgacatattttctttgcccactttaaataaaaactctggagaaagttaaaaaaaaaaaaaaaaaaaaaaaaaacccggggggctcattagggcggggggggaacaacgcgcggcaccaacaggggcccgtgggcacaaacggtgatcccgagacccaaggttccggggcaccaacgggggcacaactcggggggtcccccataatggggaccccgataaaccccagaaacccgggtacccggctagaactcgcaaa

SEQ ID NO: 449032 - DNA, 3386 bp, Homo sapiens
gaattccggcaggcgcccatggcgggctgagtcctgcccatgccctggtggcctggaagcctgcatgggcgccgtgcaaagatcaacgttttccagaggagcttttgggctcatcactggcctggggagggcttgacacggggttcccacagcttgccccacaccaccttcacacccacacacagcaggtccccgcggggccggtgcaggctgtggctgcccgcgctgcgctgttgctctgtcccggctggctggctccgagtgtggggcgctctgggccggggccgctggggcgcgcacagtggggtgacaggcggcctggctgcagaaacgttgcaccggtgcctgaggtgggaggatgtgatgacgcggcccacgcagcgggaacccaggcctttaaaaagcccaggaaacagcctcagctcaagcggtggctccactggaggaaaacacaccccggtctcacattaaagaagccaaactgtcggcttcaaagagaaaaggcaacatcctgtcacaggccatgctctggcaaaaacgcgatggagcagcggcagcctatcctttctgggacaatggcagctgaccctgttgtgagtgctgtgtggatgagagcagccacagctccggagcaagccccagccccggcccggccataccagggcgtccgtgtgaaggagccagtgaaggaactgctgaggaggaagcgaggccacgccagcagtggggcagcacctgcacctacggcggtggtgctgccccatcagcccctggcgacctacaccacagtgggtccttcctgcctggacatggaaggttctgtgtctgcagtgacagaggaggctgccctgtgtgccggctggctctcccagcccaccccggccaccctgcagcccctggccccatggacaccttacaccgagtatgtgccccatgaagctgtcagctgcccctactcagctgacatgtatgtgcagcccgtgtgccccagctacacggtggtggggccctcctcagtgttgacctatgcctctccgccactcatcaccaatgtcacgacaagaagctccgccacgcccgcagtggggcccccgctggagggcccagagcaccaggcacccctcacctatttcccgtggcctcagcccctttccacactacccacctccaccctgcagtaccagcctccggccccagccctacctgggccccagtttgtccagctccccatctctatcccagagccagtccttcaggacatggaagaccccagaagagccgccagctcgttgaccatcgacaagctgcttttggaggaagaggatagcgacgcctatgcgcttaaccacactctctctgtggaaggcttttaggcgtggctcccacctgagtcctgttccctgaaactgggattttaaaatgagcctggaattgagccccaggttcatgcttgtttggagtagtcatttcatgactacactttctacgcacagctagaattgtagacctgtaaaccttccttcccttcttccttcccctccctccctcacttcctccctctcccccatccttccattcttcccctccctcccttcttcctttccaaccccttccttccttttcctccctcccttccttccctccttcccttctccctttccaaccccttccttccttttcctccctcccttccttccctccttcccttctccctttccttctttacctccctccctccctcgcttcttctctctttcttacttcttttttcaattctgttccattttgggaggtaattatagggattttagcaataacattttatgtcaaatgttgccaagtctgtggtccatgggctttcatttctgtcacatttcatttcttggaaaaggcctccttcctccagtgcctgctgaaccatcttagggtcactcacaccctctgtaattttaagatgtatgtggtggccggcgggaagaccagccccgacagcacctcctgagaaagtcagccaagggcctaccctgatgccagagtccttgagctgtcagttcccacagttgctcctttgtttgctcttctcagcctcggccagatttacagtccaggcagcaaaatctcaaggcctggggctcagagtagtaaggggtgggaagtgggtggcagggagaaaagaacatcagggtgggtggggacaggccagtgacgaagagagggacagaggagggatgggaacaggctgtgcatcttagttggagagaggggtgtgggaggaagcttgagtttgatgcagggaggaggaaggctgaggaatgacttggctccagattacttggttattaagaagaacaataaactaaaggaaagcattgcttgaagagatggttttgctgctctccttgaggatacgtgcaagggaagttgggctgttgtaaacagggtgaagggtgtgtttggtcggccatttctgtctcacctctaggccctctgctggtgctgtggaggccaagaccccattaagcctaaaggtgatgggtcctcgcctaggcttagtgctaccatgtgggttttgtttctttccttccttccttccttccttccttccttccttccttccttccttccttccttccttccttccttctttccttccttccttccttccttccttcctctctctttctttcttttttttggttttttttgggacggagtctcactccattgcccaggctggagtacaatggtgcgatcttggctcactgcacctctgtctcccaagttcaagtgattctcctgcctgagcctcccgagtagctgggattacaggtgcatgccaccatgcctggctaatttttgtatttttagtagagacggggtttcaccatgttggccaggctggtctcgaactcctgaccttgtgatccgcccgcctcagcctctcagagtgctgggatcacaggcgtgagccaccgcacccagccttttaccatgtgggtttctttagtgtcttaaaagcgtccataagccaccattctgtggaaccaaggccccctccacgcaaacaccctccctcctggggacctctggagcctcagccagaagtaccattaggtttaattttaatttgttttgctggagaaacatcaggtttgtaggagactgagttgttagcaggtgtgcttagctcttgatagtgaacgtgtaccttgggaactggctcacccacctgctaatagcaccatcgtcactattaagcagacatttcagttggtagaatccatgtagaagtcatggacttttctgggaaatgacttttctgggaaatgacagtttctttgacatattttctttgcccactttaaataaaaactctggagaaagtt

SEQ ID NO: 449033 - DNA, 3307 bp, Homo sapiens
gaattccggcaggcgcccatggcgggctgagtcctgcccatgccctggtggcctggaagcctgcatgggcgccgtgcaaagatcaacgttttccagaggagcttttgggctcatcactggcctggggagggcttgacacggggttcccacagcttgccccacaccaccttcacacccacacacagcaggtccccgcggggccggtgcaggctgtggctgcccgcgctgcgctgttgctctgtcccggctggctggctccgagtgtggggcgctctgggccggggccgctggggcgcgcacagtggggtgacaggcggcctggctgcagaaacgttgcaccggtgcctgaggtgggaggatgtgatgacgcggcccacgcagcgggaacccaggcctttaaaaagcccaggaaacagcctcagctcaagcggtggctccactggaggaaaacacaccccggtctcacattaaagaagccaaactgtcggcttcaaagagaaaaggcaacatcctgtcacaggccatgctctggcaaaaacccacagctccggagcaagccccagccccggcccggccataccagggcgtccgtgtgaaggagccagtgaaggaactgctgaggaggaagcgaggccacgccagcagtggggcagcacctgcacctacggcggtggtgctgccccatcagcccctggcgacctacaccacagtgggtccttcctgcctggacatggaaggttctgtgtctgcagtgacagaggaggctgccctgtgtgccggctggctctcccagcccaccccggccaccctgcagcccctggccccatggacaccttacaccgagtatgtgccccatgaagctgtcagctgcccctactcagctgacatgtatgtgcagcccgtgtgccccagctacacggtggtggggccctcctcagtgttgacctatgcctctccgccactcatcaccaatgtcacgacaagaagctccgccacgcccgcagtggggcccccgctggagggcccagagcaccaggcacccctcacctatttcccgtggcctcagcccctttccacactacccacctccaccctgcagtaccagcctccggccccagccctacctgggccccagtttgtccagctccccatctctatcccagagccagtccttcaggacatggaagaccccagaagagccgccagctcgttgaccatcgacaagctgcttttggaggaagaggatagcgacgcctatgcgcttaaccacactctctctgtggaaggcttttaggcgtggctcccacctgagtcctgttccctgaaactgggattttaaaatgagcctggaattgagccccaggttcatgcttgtttggagtagtcatttcatgactacactttctacgcacagctagaattgtagacctgtaaaccttccttcccttcttccttcccctccctccctcacttcctccctctcccccatccttccattcttcccctccctcccttcttcctttccaaccccttccttccttttcctccctcccttccttccctccttcccttctccctttccaaccccttccttccttttcctccctcccttccttccctccttcccttctccctttccttctttacctccctccctccctcgcttcttctctctttcttacttcttttttcaattctgttccattttgggaggtaattatagggattttagcaataacattttatgtcaaatgttgccaagtctgtggtccatgggctttcatttctgtcacatttcatttcttggaaaaggcctccttcctccagtgcctgctgaaccatcttagggtcactcacaccctctgtaattttaagatgtatgtggtggccggcgggaagaccagccccgacagcacctcctgagaaagtcagccaagggcctaccctgatgccagagtccttgagctgtcagttcccacagttgctcctttgtttgctcttctcagcctcggccagatttacagtccaggcagcaaaatctcaaggcctggggctcagagtagtaaggggtgggaagtgggtggcagggagaaaagaacatcagggtgggtggggacaggccagtgacgaagagagggacagaggagggatgggaacaggctgtgcatcttagttggagagaggggtgtgggaggaagcttgagtttgatgcagggaggaggaaggctgaggaatgacttggctccagattacttggttattaagaagaacaataaactaaaggaaagcattgcttgaagagatggttttgctgctctccttgaggatacgtgcaagggaagttgggctgttgtaaacagggtgaagggtgtgtttggtcggccatttctgtctcacctctaggccctctgctggtgctgtggaggccaagaccccattaagcctaaaggtgatgggtcctcgcctaggcttagtgctaccatgtgggttttgtttctttccttccttccttccttccttccttccttccttccttccttccttccttccttccttccttccttctttccttccttccttccttccttccttcctctctctttctttcttttttttggttttttttgggacggagtctcactccattgcccaggctggagtacaatggtgcgatcttggctcactgcacctctgtctcccaagttcaagtgattctcctgcctgagcctcccgagtagctgggattacaggtgcatgccaccatgcctggctaatttttgtatttttagtagagacggggtttcaccatgttggccaggctggtctcgaactcctgaccttgtgatccgcccgcctcagcctctcagagtgctgggatcacaggcgtgagccaccgcacccagccttttaccatgtgggtttctttagtgtcttaaaagcgtccataagccaccattctgtggaaccaaggccccctccacgcaaacaccctccctcctggggacctctggagcctcagccagaagtaccattaggtttaattttaatttgttttgctggagaaacatcaggtttgtaggagactgagttgttagcaggtgtgcttagctcttgatagtgaacgtgtaccttgggaactggctcacccacctgctaatagcaccatcgtcactattaagcagacatttcagttggtagaatccatgtagaagtcatggacttttctgggaaatgacttttctgggaaatgacagtttctttgacatattttctttgcccactttaaataaaaactctggagaaagtt

SEQ ID NO: 449034 - DNA, 2418 bp, Homo sapiens
gaattccggcaggcgcccatggcgggctgagtcctgcccatgccctggtggcctggaagcctgcatgggcgccgtgcaaagatcaacgttttccagaggagcttttgggctcatcactggcctggggagggcttgacacggggttcccacagcttgccccacaccaccttcacacccacacacagcaggtccccgcggggccggtgcaggctgtggctgcccgcgctgcgctgttgctctgtcccggctggctggctccgagtgtggggcgctctgggccggggccgctggggcgcgcacagtggggtgacaggcggcctggctgcagaaacgttgcaccggtgcctgaggtgggaggatgtgatgacgcggcccacgcagcgggaacccaggcctttaaaaagcccaggaaacagcctcagctcaagcggtggctccactggaggaaaacacaccccggtctcacattaaagaagccaaactgtcggcttcaaagagaaaaggcaacatcctgtcacaggccatgctctggcaaaaacccacagctccggagcaagccccagccccggcccggccataccagggcgtccgtgtgaaggagccagtgaaggaactgctgaggaggaagcgaggccacgccagcagtggggcagcacctgcacctacggcggtggtgctgccccatcagcccctggcgacctacaccacagtgggtccttcctgcctggacatggaaggttctgtgtctgcagtgacagaggaggctgccctgtgtgccggctggctctcccagcccaccccggccaccctgcagcccctggccccatggacaccttacaccgagtatgtgccccatgaagctgtcagctgcccctactcagctgacatgtatgtgcagcccgtgtgccccagctacacggtggtggggccctcctcagtgttgacctatgcctctccgccactcatcaccaatgtcacgacaagaagctccgccacgcccgcagtggggcccccgctggagggcccagagcaccaggcacccctcacctatttcccgtggcctcagcccctttccacactacccacctccaccctgcagtaccagcctccggccccagccctacctgggccccagtttgtccagctccccatctctatcccagagccagtccttcaggacatggaagaccccagaagagccgccagctcgttgaccatcgacaagctgcttttggaggaagaggatagcgacgcctatgcgcttaaccacactctctctgtggaaggcttttaggcgtggctcccacctgagtcctgttccctgaaactgggattttaaaatgagcctggaattgagccccaggttcatgcttgtttggagtagtcatttcatgactacactttctacgcacagctagaattgtagacctgtaaaccttccttcccttcttccttcccctccctccctcacttcctccctctcccccatccttccattcttcccctccctcccttcttcctttccaaccccttccttcctttggccgtcccgtccgcgttcgcgttccgcgtcgcgtgttccgcgttgcgtgcgcgctgttcgcaggcgcggtgtcggttcgcgtttgtgcgtcggggtcgcgcggtttggcgttcgcgggtgccgtatcgcgcgtgtcagtcggcgttgtgcgctgttcgtgtgtaggcgttcgcgcgtcgcgcgttccacattccgaccgtgtacttttcgatacgtaccatatgtgccttaaccgtatgcgtggtttctgctgaacaaaacgtactacgtcggttctccgcgagattactgggggcgcgaagggcattagacgtctagctaagaggcgaagttgtacacagcctagacgttagaagcgaagtagcggctcaagtgggatcgagaagcaatggttttaggaccacgaacaggcttccttggtcggcgattccaccaattgtcgagtccgtagtcgtatcgaagtatcgtccgttggggttaccaaagcacactgtcatgccaagcttatcatcccctagtgagcaaatcaacaggcggcaccagtccacctgtgtacccaatatcccgaaaggaatgggcagcacttggcatgtcgggagcaccacgacaggtacccttcgtctaacagggggggttcatcgacctttcctgaagcagatcacaccatttccatctgcgtacaacacttgtcatcacagagggaaacttcggatcaactaggttcagggggttgggaggcccagcgagatggagcgacaacagtgaacaccaacggatagcgccaccaggaagagcagggagcgacccttaccattgggatggaaacacaatgagtccgagcgggcacctacagaggtggaccacgttgaaggagc

SEQ ID NO: 449035 - DNA, 1044 bp, Homo sapiens
gaattccggcaggcgcccatggcgggctgagtcctgcccatgccctggtggcctggaagcctgcatgggcgccgtgcaaagatcaacgttttccagaggagcttttgggctcatcactggcctggggagggcttgacacggggttcccacagcttgccccacaccaccttcacacccacacacagcaggtccccgcggggccggtgcaggctgtggctgcccgcgctgcgctgttgctctgtcccggctggctggctccgagtgtggggcgctctgggccggggccgctggggcgcgcacagtggggtgacaggcggcctggctgcagaaacgttgcaccggtgcctgaggtgggaggatgtgatgacgcggcccacgcagcgggaacccaggcctttaaaaagcccaggaaacagcctcagctcaagcggtggctccactggaggaaaacacaccccggtctcacattaaagaagccaaactgtcggcttcaaagagaaaaggcaacatcctgtcacaggccatgctctggcaaaaacccacagctccggagcaagccccagccccggcccggccataccagggcgtccgtgtgaaggagccagtgaaggaactgctgaggaggaagcgaggccacgccagcagtggggcagcacctgcacctacggcggtgagagtttgtgtgtgtgagagtgtgagtgtgtgtgtgtgagagagaatgtgtgtgtcagggatagtgtgagagtgtatgtgtgtgtgagagtatgtgtatgcgtgtgtgtatgtgtttgtgtgtgatagagtgtgtgagagtgtgatagtgtgagagaatgtgtatgtgcataagtgtgtgagtgtatgtgtgtgtgagggagtgtgagtgtgtgagtgtatgcatgtgagtgtgtatgtgtttgtgtgtgatggcgtgtgtgagtgtgtgatagtgtgagagagaatgtgtatgtgtcagtgtgtgagaacgtatgtgtgtgagggagtgtgtgtgaagtgtgtgagagtgtgagcgtgtgtgtgagagag

SEQ ID NO: 449036 - DNA, 2134 bp, Homo sapiens
cgagctcgcgggcgactgcctgccaggcagacgctgcagctaagctgcgcggtggctgtggcaggtgagagcctccggaagggaggcggcctctggccccgaccctgctccgcgatcgcccactcgggcgcccggccgggcctggcagggaagggccgccgccgccgccgcgcgtttgcgaggcctggcggggccgcggggcccaggaatggcgtaaggggcccccccagactccgagacggcccgagcgggtcgccggctgtgggacggcggcgtgcccttcctttcctccctcccaggttcgcgcccgagctctgctagccacccgtccgacaacttccggactcccagggacagccctgccatcaaggaagacagcacaggactgggacccacccatgaacccttctcaggacaacccaacagcaccagtggggatgttctcctaagccgcagagggcctgggcacgccatccgtcctccaggaagagccatggtgttaatgcaggacaagggcagctctcagcagtggcctggtctggggggcgagggtggtggcacaggtcccttaagcatgctcagagctgccctgctgctcatcagcctgccatggggggcccaagggacagccagcaccagcctcagcactgctgggggtcacaccgtgccaccgactgggggccgctacttgagcattggagatggctctgtgatggagtttgagtttcctgaggacagtgagggcatcatcgtgatctccagccagtacccaggccaggccaacaggacggcgcctggccccatgctcagggtcacctccctggacacagaggtgctgaccatcaagaacgtgagtgctataacctggggaggcgggggtggctttgtggtgagcatccactcaggcctggctgggctggccccactccacatccagctcgtggacgcccatgaggccccgcccacactgattgaggagcggagagacttctgcatcaaggtctcacctgctgaagacacgcctgccaccctcagcgccgacctggcccacttctcggaaaacccaatcctctacctgctcctgcctcttatctttgtcaacaagtgttcgtttgggtgcaaagtggaactcgaggttctgaaggggctcatgcagagcccccagcccatgctgctgggcctcctgggccagtttctggtcatgcccttgtacgctttcctcatggccaaggtcttcatgctgcccaaggccctggctctgggcctcatcatcacctgctcgtcgcctggcggcggggggagctacctcttcagcctccttcttggaggggacgtcaccctggccatctccatgactttcctctctacggtggctgccactggcttcttgcctctgtcttcggccatctacagccgcctgctcagcatccatgagacgctccacgtgcccatctccaagatcctggggaccctgctgttcattgccatccccatagccgtgggcgtgctgatcaagtccaagctccccaagttctcccagctgctgctgcaggtcgtcaagcccttcagctttgtgctcctcctgggcggcctcttcctggcctatcgcatgggggtcttcatcctggcaggcatccggctacccatcgtactggtgggtatcacggtgcccctggttggcctgttggtgggctactgcctagccacgtgtctgaagctgccagtggcccagcggcggacggtcagcattgaggtaggggtgcagaacagcctgctggccttggccatgctgcagctatccctccgccgccttcaagctgactatgcctcccaggcccccttcattgtggcgctgagcggcacctccgagatgctggccttggtcattggccacttcatctacagcagcctgttcccagttccctgaggcctctgggtcaagctttcatcagccccagcccccacactccaccaaagttctcatgcactatgcactcagaaaaatccaggcttattttttttactgattttttattctccagctttcagtgccaaagaggccatgctgagttaggtaggtgggcgctgcccagaaaatatatttcaataaaagagagaagcaaaaaaaaaacct

SEQ ID NO: 449037 - DNA, 2072 bp, Homo sapiens
  misc_feature (14)..(14): n is a, c, g, or t
  misc_feature (17)..(19): n is a, c, g, or t
  misc_feature (21)..(21): n is a, c, g, or t
  misc_feature (50)..(50): n is a, c, g, or t
tcatgtctggtacnccnnngngttttggatatcgtcgacccacgcgctcnggcagacgctgcagctaagctgcgcggtggctgtggcaggtgagagcctccggaagggaggcggcctctggccccgaccctgctccgcgatcgcccactcgggcgcccggccgggcctggcagggaagggccgccgccgccgccgcgcgtttgcgaggcctggcggggccgcggggcccaggaatggcgtaaggggcccccccagactccgagacggcccgagcgggtcgccggctgtgggacggcggcgtgcccttcctttcctccctcccaggttcgcgcccgagctctgctagccacccgtccgacaacttccggactcccagggacagccctgccatcaaggaagacagcacaggactgggacccacccatgaacccttctcaggacaacccaacagcaccagtggggatgttctcctaagccgcagagggcctgggcacgccatccgtcctccaggaagagccatggtgttaatgcaggacaagggcagctctcagcagtggcctggtctggggggcgagggtggtggcacaggtcccttaagcatgctcagagctgccctgctgctcatcagcctgccatggggggcccaagggacagccagcaccagcctcagcactgctgggggtcacaccgtgccaccgactgggggccgctacttgagcattggagatggctctgtgatggagtttgagtttcctgaggacagtgagggcatcatcgtgatctccagccagtacccaggccaggccaacaggacggcgcctggccccatgctcagggtcacctccctggacacagaggtgctgaccatcaagaacctcgtggacgcccatgaggccccgcccacactgattgaggagcggagagacttctgcatcaaggtctcacctgctgaagacacgcctgccaccctcagcgccgacctggcccacttctcggaaaacccaatcctctacctgctcctgcctcttatctttgtcaacaagtgttcgtttgggtgcaaagtggaactcgaggttctgaaggggctcatgcagagcccccagcccatgctgctgggcctcctgggccagtttctggtcatgcccttgtacgctttcctcatggccaaggtcttcatgctgcccaaggccctggctctgggcctcatcatcacctgctcgtcgcctggcggcggggggagctacctcttcagcctccttcttggaggggacgtcaccctggccatctccatgactttcctctctacggtggctgccactggcttcttgcctctgtcttcggccatctacagccgcctgctcagcatccatgagacgctccacgtgcccatctccaagatcctggggaccctgctgttcattgccatccccatagccgtgggcgtgctgatcaagtccaagctccccaagttctcccagctgctgctgcaggtcgtcaagcccttcagctttgtgctcctcctgggcggcctcttcctggcctatcgcatgggggtcttcatcctggcaggcatccggctacccatcgtactggtgggtatcacggtgcccctggttggcctgttggtgggctactgcctagccacgtgtctgaagctgccagtggcccagcggcggacggtcagcattgaggtaggggtgcagaacagcctgctggccttggccatgctgcagctatccctccgccgccttcaagctgactatgcctcccaggcccccttcattgtggcgctgagcggcacctccgagatgctggccttggtcattggccacttcatctacagcagcctgttcccagttccctgaggcctctgggtcaagctttcatcagccccagcccccacactccaccaaagttctcatgcactatgcactcagaaaaatccaggcttattttttttactgattttttattctccagctttcagtgccaaagaggccatgctgagttaggtaggtgggcgctgcccagaaaatatatttcaataaaagagagaagcaaaaaaaaaacct

SEQ ID NO: 449038 - DNA, 1872 bp, Homo sapiens
  misc_feature (14)..(14): n is a, c, g, or t
  misc_feature (17)..(19): n is a, c, g, or t
  misc_feature (21)..(21): n is a, c, g, or t
  misc_feature (50)..(50): n is a, c, g, or t
tcatgtctggtacnccnnngngttttggatatcgtcgacccacgcgctcnggcagacgctgcagctaagctgcgcggtggctgtggcagggacagccctgccatcaaggaagacagcacaggactgggacccacccatgaacccttctcaggacaacccaacagcaccagtggggatgttctcctaagccgcagagggcctgggcacgccatccgtcctccaggaagagccatggtgttaatgcaggacaagggcagctctcagcagtggcctggtctggggggcgagggtggtggcacaggtcccttaagcatgctcagagctgccctgctgctcatcagcctgccatggggggcccaagggacagccagcaccagcctcagcactgctgggggtcacaccgtgccaccgactgggggccgctacttgagcattggagatggctctgtgatggagtttgagtttcctgaggacagtgagggcatcatcgtgatctccagccagtacccaggccaggccaacaggacggcgcctggccccatgctcagggtcacctccctggacacagaggtgctgaccatcaagaacgtgagtgctataacctggggaggcgggggtggctttgtggtgagcatccactcaggcctggctgggctggccccactccacatccagctcgtggacgcccatgaggccccgcccacactgattgaggagcggagagacttctgcatcaaggtctcacctgctgaagacacgcctgccaccctcagcgccgacctggcccacttctcggaaaacccaatcctctacctgctcctgcctcttatctttgtcaacaagtgttcgtttgggtgcaaagtggaactcgaggttctgaaggggctcatgcagagcccccagcccatgctgctgggcctcctgggccagtttctggtcatgcccttgtacgctttcctcatggccaaggtcttcatgctgcccaaggccctggctctgggcctcatcatcacctgctcgtcgcctggcggcggggggagctacctcttcagcctccttcttggaggggacgtcaccctggccatctccatgactttcctctctacggtggctgccactggcttcttgcctctgtcttcggccatctacagccgcctgctcagcatccatgagacgctccacgtgcccatctccaagatcctggggaccctgctgttcattgccatccccatagccgtgggcgtgctgatcaagtccaagctccccaagttctcccagctgctgctgcaggtcgtcaagcccttcagctttgtgctcctcctgggcggcctcttcctggcctatcgcatgggggtcttcatcctggcaggcatccggctacccatcgtactggtgggtatcacggtgcccctggttggcctgttggtgggctactgcctagccacgtgtctgaagctgccagtggcccagcggcggacggtcagcattgaggtaggggtgcagaacagcctgctggccttggccatgctgcagctatccctccgccgccttcaagctgactatgcctcccaggcccccttcattgtggcgctgagcggcacctccgagatgctggccttggtcattggccacttcatctacagcagcctgttcccagttccctgaggcctctgggtcaagctttcatcagccccagcccccacactccaccaaagttctcatgcactatgcactcagaaaaatccaggcttattttttttactgattttttattctccagctttcagtgccaaagaggccatgctgagttaggtaggtgggcgctgcccagaaaatatatttcaataaaagagagaagcaaaaaaaaaacct

SEQ ID NO: 449039 - DNA, 2524 bp, Homo sapiens
  misc_feature (14)..(14): n is a, c, g, or t
  misc_feature (17)..(19): n is a, c, g, or t
  misc_feature (21)..(21): n is a, c, g, or t
  misc_feature (50)..(50): n is a, c, g, or t
tcatgtctggtacnccnnngngttttggatatcgtcgacccacgcgctcnggcagacgctgcagctaagctgcgcggtggctgtggcaggtgagagcctccggaagggaggcggcctctggccccgaccctgctccgcgatcgcccactcgggcgcccggccgggcctggcagggaagggccgccgccgccgccgcgcgtttgcgaggcctggcggggccgcggggcccaggaatggcgtaaggggcccccccagactccgagacggcccgagcgggtcgccggctgtgggacggcggcgtgcccttcctttcctccctcccaggttcgcgcccgagctctgctagccacccgtccgacaacttccggactcccaggtagggaggagcccctgttagcactgccagttaccccgaacacttggccgttttggaagggccgggactccctcccctgccttgtgggtgcatctgctcaaactctgtcggcccctcaagcagaaatggtgtgggttctgggccaaacccctcttggagtgactcagagccgccagccctactggagggatggggcatggggtggatggcccctagcctttcccttctgagctggtttgtatcaccccggtggcttcagtcctggtgccttcatcttagctcctgtactttgcctctcccaccccactggttttcctgcctccctcttcagaggtaagacacatggctggaccaaggcctccaggggacagccctgccatcaaggaagacagcacaggactgggacccacccatgaacccttctcaggacaacccaacagcaccagtggggatgttctcctaagccgcagagggcctgggcacgccatccgtcctccaggaagagccatggtgttaatgcaggacaagggcagctctcagcagtggcctggtctggggggcgagggtggtggcacaggtcccttaagcatgctcagagctgccctgctgctcatcagcctgccatggggggcccaagggacagccagcaccagcctcagcactgctgggggtcacaccgtgccaccgactgggggccgctacttgagcattggagatggctctgtgatggagtttgagtttcctgaggacagtgagggcatcatcgtgatctccagccagtacccaggccaggccaacaggacggcgcctggccccatgctcagggtcacctccctggacacagaggtgctgaccatcaagaacgtgagtgctataacctggggaggcgggggtggctttgtggtgagcatccactcaggcctggctgggctggccccactccacatccagctcgtggacgcccatgaggccccgcccacactgattgaggagcggagagacttctgcatcaaggtctcacctgctgaagacacgcctgccaccctcagcgccgacctggcccacttctcggaaaacccaatcctctacctgctcctgcctcttatctttgtcaacaagtgttcgtttgggtgcaaagtggaactcgaggttctgaaggggctcatgcagagcccccagcccatgctgctgggcctcctgggccagtttctggtcatgcccttgtacgctttcctcatggccaaggtcttcatgctgcccaaggccctggctctgggcctcatcatcacctgctcgtcgcctggcggcggggggagctacctcttcagcctccttcttggaggggacgtcaccctggccatctccatgactttcctctctacggtggctgccactggcttcttgcctctgtcttcggccatctacagccgcctgctcagcatccatgagacgctccacgtgcccatctccaagatcctggggaccctgctgttcattgccatccccatagccgtgggcgtgctgatcaagtccaagctccccaagttctcccagctgctgctgcaggtcgtcaagcccttcagctttgtgctcctcctgggcggcctcttcctggcctatcgcatgggggtcttcatcctggcaggcatccggctacccatcgtactggtgggtatcacggtgcccctggttggcctgttggtgggctactgcctagccacgtgtctgaagctgccagtggcccagcggcggacggtcagcattgaggtaggggtgcagaacagcctgctggccttggccatgctgcagctatccctccgccgccttcaagctgactatgcctcccaggcccccttcattgtggcgctgagcggcacctccgagatgctggccttggtcattggccacttcatctacagcagcctgttcccagttccctgaggcctctgggtcaagctttcatcagccccagcccccacactccaccaaagttctcatgcactatgcactcagaaaaatccaggcttattttttttactgattttttattctccagctttcagtgccaaagaggccatgctgagttaggtaggtgggcgctgcccagaaaatatatttcaataaaagagagaagcaaaaaaaaaacct

SEQ ID NO: 449040 - DNA, 1139 bp, Homo sapiens
  misc_feature (14)..(14): n is a, c, g, or t
  misc_feature (17)..(19): n is a, c, g, or t
  misc_feature (21)..(21): n is a, c, g, or t
  misc_feature (50)..(50): n is a, c, g, or t
tcatgtctggtacnccnnngngttttggatatcgtcgacccacgcgctcnggcagacgctgcagctaagctgcgcggtggctgtggcaggtgagagcctccggaagggaggcggcctctggccccgaccctgctccgcgatcgcccactcgggcgcccggccgggcctggcagggaagggccgccgccgccgccgcgcgtttgcgaggcctggcggggccgcggggcccaggaatggcgtaaggggcccccccagactccgagacggcccgagcgggtcgccggctgtgggacggcggcgtgcccttcctttcctccctcccaggttcgcgcccgagctctgctagccacccgtccgacaacttccggactcccaggtagggaggagcccctgttagcactgccagttaccccgaacacttggccgttttggaagggccgggactccctcccctgccttgtgggtgcatctgctcaaactctgtcggcccctcaagcagaaatggtgtgggttctgggccaaacccctcttggagtgactcagagccgccagccctactggagggatggggcatggggtggatggcccctagcctttcccttctgagctggtttgtatcaccccggtggcttcagtcctggtgccttcatcttagctcctgtactttgcctctcccaccccactggttttcctgcctccctcttcagaggtaagacacatggctggaccaaggcctccaggggacagccctgccatcaaggaagacagcacaggactgggacccacccatgaacccttctcaggacaacccaacagcaccagtggggatgttctcccaggcccccttcattgtggcgctgagcggcacctccgagatgctggccttggtcattggccacttcatctacagcagcctgttcccagttccctgaggcctctgggtcaagctttcatcagccccagcccccacactccaccaaagttctcatgcactatgcactcagaaaaatccaggcttattttttttactgattttttattctccagctttcagtgccaaagaggccatgctgagttaggtaggtgggcgctgcccagaaaatatatttcaataaaagagagaagcaaaaaaaaaacct

SEQ ID NO: 449041 - DNA, 2047 bp, Homo sapiens
cgagctcgcgggcgactgcctgccaggcagacgctgcagctaagctgcgcggtggctgtggcaggtgagagcctccggaagggaggcggcctctggccccgaccctgctccgcgatcgcccactcgggcgcccggccgggcctggcagggaagggccgccgccgccgccgcgcgtttgcgaggcctggcggggccgcggggcccaggaatggcgtaaggggcccccccagactccgagacggcccgagcgggtcgccggctgtgggacggcggcgtgcccttcctttcctccctcccaggttcgcgcccgagctctgctagccacccgtccgacaacttccggactcccagggacagccctgccatcaaggaagacagcacaggactgggacccacccatgaacccttctcaggacaacccaacagcaccagtggggatgttctcctaagccgcagagggcctgggcacgccatccgtcctccaggaagagccatggtgttaatgcaggacaagggcagctctcagcagtggcctggtctggggggcgagggtggtggcacaggtcccttaagcatgctcagagctgccctgctgctcatcagcctgccatggggggcccaagggacagccagcaccagcctcagcactgctgggggtcacaccgtgccaccgactgggggccgctacttgagcattggagatggctctgtgatggagtttgagtttcctgaggacagtgagggcatcatcgtgatctccagccagtacccaggccaggccaacaggacggcgcctggccccatgctcagggtcacctccctggacacagaggtgctgaccatcaagaacctcgtggacgcccatgaggccccgcccacactgattgaggagcggagagacttctgcatcaaggtctcacctgctgaagacacgcctgccaccctcagcgccgacctggcccacttctcggaaaacccaatcctctacctgctcctgcctcttatctttgtcaacaagtgttcgtttgggtgcaaagtggaactcgaggttctgaaggggctcatgcagagcccccagcccatgctgctgggcctcctgggccagtttctggtcatgcccttgtacgctttcctcatggccaaggtcttcatgctgcccaaggccctggctctgggcctcatcatcacctgctcgtcgcctggcggcggggggagctacctcttcagcctccttcttggaggggacgtcaccctggccatctccatgactttcctctctacggtggctgccactggcttcttgcctctgtcttcggccatctacagccgcctgctcagcatccatgagacgctccacgtgcccatctccaagatcctggggaccctgctgttcattgccatccccatagccgtgggcgtgctgatcaagtccaagctccccaagttctcccagctgctgctgcaggtcgtcaagcccttcagctttgtgctcctcctgggcggcctcttcctggcctatcgcatgggggtcttcatcctggcaggcatccggctacccatcgtactggtgggtatcacggtgcccctggttggcctgttggtgggctactgcctagccacgtgtctgaagctgccagtggcccagcggcggacggtcagcattgaggtaggggtgcagaacagcctgctggccttggccatgctgcagctatccctccgccgccttcaagctgactatgcctcccaggcccccttcattgtggcgctgagcggcacctccgagatgctggccttggtcattggccacttcatctacagcagcctgttcccagttccctgaggcctctgggtcaagctttcatcagccccagcccccacactccaccaaagttctcatgcactatgcactcagaaaaatccaggcttattttttttactgattttttattctccagctttcagtgccaaagaggccatgctgagttaggtaggtgggcgctgcccagaaaatatatttcaataaaagagagaagcaaaaaaaaaacct

SEQ ID NO: 449042 - DNA, 2034 bp, Homo sapiens
  misc_feature (14)..(14): n is a, c, g, or t
  misc_feature (17)..(19): n is a, c, g, or t
  misc_feature (21)..(21): n is a, c, g, or t
  misc_feature (50)..(50): n is a, c, g, or t
tcatgtctggtacnccnnngngttttggatatcgtcgacccacgcgctcnggtgagagcctccggaagggaggcggcctctggccccgaccctgctccgcgatcgcccactcgggcgcccggccgggcctggcagggaagggccgccgccgccgccgcgcgtttgcgaggcctggcggggccgcggggcccaggaatggcgtaaggggcccccccagactccgagacggcccgagcgggtcgccggctgtgggacggcggcgtgcccttcctttcctccctcccaggttcgcgcccgagctctgctagccacccgtccgacaacttccggactcccagggacagccctgccatcaaggaagacagcacaggactgggacccacccatgaacccttctcaggacaacccaacagcaccagtggggatgttctcctaagccgcagagggcctgggcacgccatccgtcctccaggaagagccatggtgttaatgcaggacaagggcagctctcagcagtggcctggtctggggggcgagggtggtggcacaggtcccttaagcatgctcagagctgccctgctgctcatcagcctgccatggggggcccaagggacagccagcaccagcctcagcactgctgggggtcacaccgtgccaccgactgggggccgctacttgagcattggagatggctctgtgatggagtttgagtttcctgaggacagtgagggcatcatcgtgatctccagccagtacccaggccaggccaacaggacggcgcctggccccatgctcagggtcacctccctggacacagaggtgctgaccatcaagaacctcgtggacgcccatgaggccccgcccacactgattgaggagcggagagacttctgcatcaaggtctcacctgctgaagacacgcctgccaccctcagcgccgacctggcccacttctcggaaaacccaatcctctacctgctcctgcctcttatctttgtcaacaagtgttcgtttgggtgcaaagtggaactcgaggttctgaaggggctcatgcagagcccccagcccatgctgctgggcctcctgggccagtttctggtcatgcccttgtacgctttcctcatggccaaggtcttcatgctgcccaaggccctggctctgggcctcatcatcacctgctcgtcgcctggcggcggggggagctacctcttcagcctccttcttggaggggacgtcaccctggccatctccatgactttcctctctacggtggctgccactggcttcttgcctctgtcttcggccatctacagccgcctgctcagcatccatgagacgctccacgtgcccatctccaagatcctggggaccctgctgttcattgccatccccatagccgtgggcgtgctgatcaagtccaagctccccaagttctcccagctgctgctgcaggtcgtcaagcccttcagctttgtgctcctcctgggcggcctcttcctggcctatcgcatgggggtcttcatcctggcaggcatccggctacccatcgtactggtgggtatcacggtgcccctggttggcctgttggtgggctactgcctagccacgtgtctgaagctgccagtggcccagcggcggacggtcagcattgaggtaggggtgcagaacagcctgctggccttggccatgctgcagctatccctccgccgccttcaagctgactatgcctcccaggcccccttcattgtggcgctgagcggcacctccgagatgctggccttggtcattggccacttcatctacagcagcctgttcccagttccctgaggcctctgggtcaagctttcatcagccccagcccccacactccaccaaagttctcatgcactatgcactcagaaaaatccaggcttattttttttactgattttttattctccagctttcagtgccaaagaggccatgctgagttaggtaggtgggcgctgcccagaaaatatatttcaataaaagagagaagcaaaaaaaaaacct

SEQ ID NO: 449043 - DNA, 1329 bp, Homo sapiens
cgagctcgcgggcgactgcctgccaggcagacgctgcagctaagctgcgcggtggctgtggcaggtgagagcctccggaagggaggcggcctctggccccgaccctgctccgcgatcgcccactcgggcgcccggccgggcctggcagggaagggccgccgccgccgccgcgcgtttgcgaggcctggcggggccgcggggcccaggaatggcgtaaggggcccccccagactccgagacggcccgagcgggtcgccggctgtgggacggcggcgtgcccttcctttcctccctcccaggttcgcgcccgagctctgctagccacccgtccgacaacttccggactcccagggacagccctgccatcaaggaagacagcacaggactgggacccacccatgaacccttctcaggacaacccaacagcaccagtggggatgttctcctaagccgcagagggcctgggcacgccatccgtcctccaggaagagccatggtgttaatgcaggacaagggcagctctcagcagtggcctggtctggggggcgagggtggtggcacaggtcccttaagcatgctcagagctgccctgctgctcatcagcctgccatggggggcccaagggacagccagcaccagcctcagcactgctgggggtcacaccgtgccaccgactgggggccgctacttgagcattggagatggctctgtgatggagtttgagtttcctgaggacagtgagggcatcatcgtgatctccagccagtacccaggccaggccaacaggacggcgcctggccccatgctcagggtcacctccctggacacagaggtgctgaccatcaagaacgtgagtgctataacctggggaggcgggggtggctttgtggtgagcatccactcaggcctggctgggctggccccactccacatccagctcgtggacgcccatgaggccccgcccacactgattgaggagcggagagacttctgcatcaaggtctcacctgctgaagacacgcctgccaccctcagcgccgacctggcccacttctcggaaaacccaatcctctacctgctcctgcctcttatctttgtcaacaagtgttcccagttccctgaggcctctgggtcaagctttcatcagccccagcccccacactccaccaaagttctcatgcactatgcactcagaaaaatccaggcttattttttttactgattttttattctccagctttcagtgccaaagaggccatgctgagttaggtaggtgggcgctgcccagaaaatatatttcaataaaagagagaagcaaaaaaaaaacct

SEQ ID NO: 449044 - DNA, 1719 bp, Homo sapiens
gacgtcagcgtgctgacgtcacgggccggaggtcccggggctgctgggtgcgggcggtgggctgcgcgttgtccgctggactgggtcccggtcacgccccgccaagccccgcccctcaggccggggcgcgaccgcggatccgcagttcccgggccagcctggggcggccggccaggaaccacccgttaaggtgtcttctctttagggatggtgaggttggaaaaaggctcctgtaaccctcctccaggatgaaccacctgccagaagacatggagaacgctctcaccgggagccagagctcccatgcttctctgcgcaatatccattccatcaaccccacacaactcatggccaggattgagtcctatgaaggaagggaaaagaaaggcatatctgatgtcaggaggactttctgtttgtttgtcacctttgacctcttattcgtaacattactgtggataatagagttaaatgtgaatggaggcattgagaacacattagagaaggaggtgatgcagtatgactactattcttcatattttgatatatttcttctggcagtttttcgatttaaagtgttaatacttgcatatgctgtgtgcagactgcgccattggtgggcaatagcgttgacaacggcagtgaccagtgcctttttactagcaaaagtgatcctttcgaagcttttctctcaaggggcttttggctatgtgctgcccatcatttcattcatccttgcctggattgagacgtggttcctggatttcaaagtgttacctcaagaagcagaagaagaaaacagactcctgatagttcaggatgcttcagagagggcagcacttatacctggtggtctttctgatggtcagttttattcccctcctgaatccgaagcaggatctgaagaagctgaagaaaaacaggacagtgagaaaccacttttagaactatgagtactacttttgttaaatgtgaaaaaccctcacagaaagtcatcgaggcaaaaagaggcaggcagtggagtctccctgtcgacagtaaagttgaaatggtgacgtccactgctggctttattgaacagctaataaagatttatttattgtaatacctcacagacgttgtaccatatccatgcacatttagttgcctgcctgtggctggtaaggtaatgtcatgattcatcctctcttcagtgagactgagcctgatgtgttaacaaataggtgaagaaagtcttgtgctgtattcctaatcaaaagacttaatatattgaagtaacacttttttagtaagcaagatacctttttatttcaattcacagaatggaatttttttgtttcatgtctcagatttattttgtatttcttttttaacactctacatttcccttgttttttaactcatgcacatgtgctctttgtacagttttaaaaagtgtaataaaatctgacatgtcaatgtggctagttttatttttcttgttttgcattatgtgtatggcctgaagtgttggacttgcaaaaggggaagaaaggaattgcgaatacatgtaaaatgtcaccagacatttgtattatttttatcatgaaatcatgtttttctctgattgttctgaaatgttctaaatactcttattttgaatgcacaaaatgacttaaaccattcatatcatgtttcctttgcgttcagccaatttcaattaaaatgaactaaattata

SEQ ID NO: 449045 - DNA, 791 bp, Homo sapiens
gacgtcagcgtgctgacgtcacgggccggaggtcccggggctgctgggtgcgggcggtgggctgcgcgttgtccgctggactgggtcccggtcacgccccgccaagccccgcccctcaggccggggcgcgaccgcggatccgcagttcccgggccagcctggggcggccggccaggaaccacccgttaaggtgtcttctctttagggatggtgaggttggaaaaaggctcctgtaaccctcctccaggatgaaccacctgccagaagacatggagaacgctctcaccgggagccagagctcccatgcttctctgcgcaatatccattccatcaaccccacacaactcatggccaggattgagtcctatgaaggaagggaaaagaaaggcatatctgatgtcaggaggactttctgtttgtttgtcacctttgacctcttattcgtaacattactgtggataatagagttaaatgtgaatggaggcattgagaacacattagagaaggaggtgatgcagtatgactactattcttcatattttgatatatttcttctggcagtttttcgatttaaagtgttaatacttgcatatgctgtgtgcagactgcgccattggtgggcaatagcggtgagtatgccctgcatgagtgggtcatctcctccagtgctggtggccaagtcctgctctcaacaggcctgggctgggagaagatacagttctaatgcaggtggaatcccaccagctttcctgagtcccgtttcctccatacttaagtaggtttaatactcc

SEQ ID NO: 449046 - DNA, 1775 bp, Homo sapiens
gacgtcagcgtgctgacgtcacgggccggaggtcccggggctgctgggtgcgggcggtgggctgcgcgttgtccgctggactgggtcccggtcacgccccgccaagccccgcccctcaggccggggcgcgaccgcggatccgcagttcccgggccagcctggggcggccggccaggaaccacccgttaagatggaatcactgaattcatcacttgacacagtactagtttggataagtttagcaaggtgtcttctctttagggatggtgaggttggaaaaaggctcctgtaaccctcctccaggatgaaccacctgccagaagacatggagaacgctctcaccgggagccagagctcccatgcttctctgcgcaatatccattccatcaaccccacacaactcatggccaggattgagtcctatgaaggaagggaaaagaaaggcatatctgatgtcaggaggactttctgtttgtttgtcacctttgacctcttattcgtaacattactgtggataatagagttaaatgtgaatggaggcattgagaacacattagagaaggaggtgatgcagtatgactactattcttcatattttgatatatttcttctggcagtttttcgatttaaagtgttaatacttgcatatgctgtgtgcagactgcgccattggtgggcaatagcgttgacaacggcagtgaccagtgcctttttactagcaaaagtgatcctttcgaagcttttctctcaaggggcttttggctatgtgctgcccatcatttcattcatccttgcctggattgagacgtggttcctggatttcaaagtgttacctcaagaagcagaagaagaaaacagactcctgatagttcaggatgcttcagagagggcagcacttatacctggtggtctttctgatggtcagttttattcccctcctgaatccgaagcaggatctgaagaagctgaagaaaaacaggacagtgagaaaccacttttagaactatgagtactacttttgttaaatgtgaaaaaccctcacagaaagtcatcgaggcaaaaagaggcaggcagtggagtctccctgtcgacagtaaagttgaaatggtgacgtccactgctggctttattgaacagctaataaagatttatttattgtaatacctcacagacgttgtaccatatccatgcacatttagttgcctgcctgtggctggtaaggtaatgtcatgattcatcctctcttcagtgagactgagcctgatgtgttaacaaataggtgaagaaagtcttgtgctgtattcctaatcaaaagacttaatatattgaagtaacacttttttagtaagcaagatacctttttatttcaattcacagaatggaatttttttgtttcatgtctcagatttattttgtatttcttttttaacactctacatttcccttgttttttaactcatgcacatgtgctctttgtacagttttaaaaagtgtaataaaatctgacatgtcaatgtggctagttttatttttcttgttttgcattatgtgtatggcctgaagtgttggacttgcaaaaggggaagaaaggaattgcgaatacatgtaaaatgtcaccagacatttgtattatttttatcatgaaatcatgtttttctctgattgttctgaaatgttctaaatactcttattttgaatgcacaaaatgacttaaaccattcatatcatgtttcctttgcgttcagccaatttcaattaaaatgaactaaattata

SEQ ID NO: 449047 - DNA, 1972 bp, Homo sapiens
gacgtcagcgtgctgacgtcacgggccggaggtcccggggctgctgggtgcgggcggtgggctgcgcgttgtccgctggactgggtcccggtcacgccccgccaagccccgcccctcaggccggggcgcgaccgcggatccgcagttcccgggccagcctggggcggccggccaggaaccacccgttaagggtcttactctgttgcccaggctggagtgcagtggcaccatctcagctcactggagcgtctgcctccaggttcaagtgattctcctgcctcagcatcccaagtagctgggactacaggtgtgcactaccactcctgtctaatgtttgtattttttggtagagacagggtttccctatgttggccagtctggtcttgaactgctggcctcaagtgatctgcccgcctcggcctcctaaagtgctgggattacaggtgtcttctctttagggatggtgaggttggaaaaaggctcctgtaaccctcctccaggatgaaccacctgccagaagacatggagaacgctctcaccgggagccagagctcccatgcttctctgcgcaatatccattccatcaaccccacacaactcatggccaggattgagtcctatgaaggaagggaaaagaaaggcatatctgatgtcaggaggactttctgtttgtttgtcacctttgacctcttattcgtaacattactgtggataatagagttaaatgtgaatggaggcattgagaacacattagagaaggaggtgatgcagtatgactactattcttcatattttgatatatttcttctggcagtttttcgatttaaagtgttaatacttgcatatgctgtgtgcagactgcgccattggtgggcaatagcgttgacaacggcagtgaccagtgcctttttactagcaaaagtgatcctttcgaagcttttctctcaaggggcttttggctatgtgctgcccatcatttcattcatccttgcctggattgagacgtggttcctggatttcaaagtgttacctcaagaagcagaagaagaaaacagactcctgatagttcaggatgcttcagagagggcagcacttatacctggtggtctttctgatggtcagttttattcccctcctgaatccgaagcaggatctgaagaagctgaagaaaaacaggacagtgagaaaccacttttagaactatgagtactacttttgttaaatgtgaaaaaccctcacagaaagtcatcgaggcaaaaagaggcaggcagtggagtctccctgtcgacagtaaagttgaaatggtgacgtccactgctggctttattgaacagctaataaagatttatttattgtaatacctcacagacgttgtaccatatccatgcacatttagttgcctgcctgtggctggtaaggtaatgtcatgattcatcctctcttcagtgagactgagcctgatgtgttaacaaataggtgaagaaagtcttgtgctgtattcctaatcaaaagacttaatatattgaagtaacacttttttagtaagcaagatacctttttatttcaattcacagaatggaatttttttgtttcatgtctcagatttattttgtatttcttttttaacactctacatttcccttgttttttaactcatgcacatgtgctctttgtacagttttaaaaagtgtaataaaatctgacatgtcaatgtggctagttttatttttcttgttttgcattatgtgtatggcctgaagtgttggacttgcaaaaggggaagaaaggaattgcgaatacatgtaaaatgtcaccagacatttgtattatttttatcatgaaatcatgtttttctctgattgttctgaaatgttctaaatactcttattttgaatgcacaaaatgacttaaaccattcatatcatgtttcctttgcgttcagccaatttcaattaaaatgaactaaattata

SEQ ID NO: 449048 - DNA, 1436 bp, Homo sapiens
gacgtcagcgtgctgacgtcacgggccggaggtcccggggctgctgggtgcgggcggtgggctgcgcgttgtccgctggactgggtcccggtcacgccccgccaagccccgcccctcaggccggggcgcgaccgcggatccgcagttcccgggccagcctggggcggccggccaggaaccacccgttaaggtgaatggaggcattgagaacacattagagaaggaggtgatgcagtatgactactattcttcatattttgatatatttcttctggcagtttttcgatttaaagtgttaatacttgcatatgctgtgtgcagactgcgccattggtgggcaatagcgttgacaacggcagtgaccagtgcctttttactagcaaaagtgatcctttcgaagcttttctctcaaggggcttttggctatgtgctgcccatcatttcattcatccttgcctggattgagacgtggttcctggatttcaaagtgttacctcaagaagcagaagaagaaaacagactcctgatagttcaggatgcttcagagagggcagcacttatacctggtggtctttctgatggtcagttttattcccctcctgaatccgaagcaggatctgaagaagctgaagaaaaacaggacagtgagaaaccacttttagaactatgagtactacttttgttaaatgtgaaaaaccctcacagaaagtcatcgaggcaaaaagaggcaggcagtggagtctccctgtcgacagtaaagttgaaatggtgacgtccactgctggctttattgaacagctaataaagatttatttattgtaatacctcacagacgttgtaccatatccatgcacatttagttgcctgcctgtggctggtaaggtaatgtcatgattcatcctctcttcagtgagactgagcctgatgtgttaacaaataggtgaagaaagtcttgtgctgtattcctaatcaaaagacttaatatattgaagtaacacttttttagtaagcaagatacctttttatttcaattcacagaatggaatttttttgtttcatgtctcagatttattttgtatttcttttttaacactctacatttcccttgttttttaactcatgcacatgtgctctttgtacagttttaaaaagtgtaataaaatctgacatgtcaatgtggctagttttatttttcttgttttgcattatgtgtatggcctgaagtgttggacttgcaaaaggggaagaaaggaattgcgaatacatgtaaaatgtcaccagacatttgtattatttttatcatgaaatcatgtttttctctgattgttctgaaatgttctaaatactcttattttgaatgcacaaaatgacttaaaccattcatatcatgtttcctttgcgttcagccaatttcaattaaaatgaactaaattata

SEQ ID NO: 449049 - DNA, 1665 bp, Homo sapiens
gacgtcagcgtgctgacgtcacgggccggaggtcccggggctgctgggtgcgggcggtgggctgcgcgttgtccgctggactgggtcccggtcacgccccgccaagccccgcccctcaggccggggcgcgaccgcggatccgcagttcccgggccagcctggggcggccggccaggaaccacccgttaaggtgtcttctctttagggatggtgaggttggaaaaaggctcctgtaaccctcctccaggatgaaccacctgccagaagacatggagaacgctctcaccgggagccagagctcccatgcttctctgcgcaatatccattccatcaaccccacacaactcatggccaggattgagtcctatgaaggaagggaaaagaaaggcatatctgatgtcaggaggactttctgtttgtttgtcacctttgacctcttattcgtaacattactgtggataatagagttaaatgtgaatggaggcattgagaacacattagagaaggaggtgatgcagtatgactactattcttcatattttgatatatttcttctggcagtttttcgatttaaagtgttaatacttgcatatgctgtgtgcagactgcgccattggtgggcaatagcgcttttctctcaaggggcttttggctatgtgctgcccatcatttcattcatccttgcctggattgagacgtggttcctggatttcaaagtgttacctcaagaagcagaagaagaaaacagactcctgatagttcaggatgcttcagagagggcagcacttatacctggtggtctttctgatggtcagttttattcccctcctgaatccgaagcaggatctgaagaagctgaagaaaaacaggacagtgagaaaccacttttagaactatgagtactacttttgttaaatgtgaaaaaccctcacagaaagtcatcgaggcaaaaagaggcaggcagtggagtctccctgtcgacagtaaagttgaaatggtgacgtccactgctggctttattgaacagctaataaagatttatttattgtaatacctcacagacgttgtaccatatccatgcacatttagttgcctgcctgtggctggtaaggtaatgtcatgattcatcctctcttcagtgagactgagcctgatgtgttaacaaataggtgaagaaagtcttgtgctgtattcctaatcaaaagacttaatatattgaagtaacacttttttagtaagcaagatacctttttatttcaattcacagaatggaatttttttgtttcatgtctcagatttattttgtatttcttttttaacactctacatttcccttgttttttaactcatgcacatgtgctctttgtacagttttaaaaagtgtaataaaatctgacatgtcaatgtggctagttttatttttcttgttttgcattatgtgtatggcctgaagtgttggacttgcaaaaggggaagaaaggaattgcgaatacatgtaaaatgtcaccagacatttgtattatttttatcatgaaatcatgtttttctctgattgttctgaaatgttctaaatactcttattttgaatgcacaaaatgacttaaaccattcatatcatgtttcctttgcgttcagccaatttcaattaaaatgaactaaattata

SEQ ID NO: 449050 - DNA, 1140 bp, Homo sapiens
cacagtgtgagatgcctagtgtgaacagtgctggattatgtgtcttgcagttgacaacggcagtgaccagtgcctttttactagcaaaagtgatcctttcgaagcttttctctcaaggggcttttggctatgtgctgcccatcatttcattcatccttgcctggattgagacgtggttcctggatttcaaagtgttacctcaagaagcagaagaagaaaacagactcctgatagttcaggatgcttcagagagggcagcacttatacctggtggtctttctgatggtcagttttattcccctcctgaatccgaagcaggatctgaagaagctgaagaaaaacaggacagtgagaaaccacttttagaactatgagtactacttttgttaaatgtgaaaaaccctcacagaaagtcatcgaggcaaaaagaggcaggcagtggagtctccctgtcgacagtaaagttgaaatggtgacgtccactgctggctttattgaacagctaataaagatttatttattgtaatacctcacagacgttgtaccatatccatgcacatttagttgcctgcctgtggctggtaaggtaatgtcatgattcatcctctcttcagtgagactgagcctgatgtgttaacaaataggtgaagaaagtcttgtgctgtattcctaatcaaaagacttaatatattgaagtaacacttttttagtaagcaagatacctttttatttcaattcacagaatggaatttttttgtttcatgtctcagatttattttgtatttcttttttaacactctacatttcccttgttttttaactcatgcacatgtgctctttgtacagttttaaaaagtgtaataaaatctgacatgtcaatgtggctagttttatttttcttgttttgcattatgtgtatggcctgaagtgttggacttgcaaaaggggaagaaaggaattgcgaatacatgtaaaatgtcaccagacatttgtattatttttatcatgaaatcatgtttttctctgattgttctgaaatgttctaaatactcttattttgaatgcacaaaatgacttaaaccattcatatcatgtttcctttgcgttcagccaatttcaattaaaatgaactaaattata

SEQ ID NO: 449051 - DNA, 872 bp, Homo sapiens
gatgactctagaggatcccgagtgtcttcaagaagcagaagaagaaaacagatctgaagaagctgaagaaaaacaggacagtgagaaaccacttttagaactatgagtactacttttgttaaatgtgaaaaaccctcacagaaagtcatcgaggcaaaaagaggcaggcagtggagtctccctgtcgacagtaaagttgaaatggtgacgtccactgctggctttattgaacagctaataaagatttatttattgtaatacctcacagacgttgtaccatatccatgcacatttagttgcctgcctgtggctggtaaggtaatgtcatgattcatcctctcttcagtgagactgagcctgatgtgttaacaaataggtgaagaaagtcttgtgctgtattcctaatcaaaagacttaatatattgaagtaacacttttttagtaagcaagatacctttttatttcaattcacagaatggaatttttttgtttcatgtctcagatttattttgtatttcttttttaacactctacatttcccttgttttttaactcatgcacatgtgctctttgtacagttttaaaaagtgtaataaaatctgacatgtcaatgtggctagttttatttttcttgttttgcattatgtgtatggcctgaagtgttggacttgcaaaaggggaagaaaggaattgcgaatacatgtaaaatgtcaccagacatttgtattatttttatcatgaaatcatgtttttctctgattgttctgaaatgttctaaatactcttattttgaatgcacaaaatgacttaaaccattcatatcatgtttcctttgcgttcagccaatttcaattaaaatgaactaaattata

SEQ ID NO: 449052 - DNA, 879 bp, Homo sapiens
taccatgtgagcacgtattgctggtcaatggtaccgccctccagtatgcaatcatggacctgactaagctctgtatgaacatggacagtgagaaaccacttttagaactatgagtactacttttgttaaatgtgaaaaaccctcacagaaagtcatcgaggcaaaaagaggcaggcagtggagtctccctgtcgacagtaaagttgaaatggtgacgtccactgctggctttattgaacagctaataaagatttatttattgtaatacctcacagacgttgtaccatatccatgcacatttagttgcctgcctgtggctggtaaggtaatgtcatgattcatcctctcttcagtgagactgagcctgatgtgttaacaaataggtgaagaaagtcttgtgctgtattcctaatcaaaagacttaatatattgaagtaacacttttttagtaagcaagatacctttttatttcaattcacagaatggaatttttttgtttcatgtctcagatttattttgtatttcttttttaacactctacatttcccttgttttttaactcatgcacatgtgctctttgtacagttttaaaaagtgtaataaaatctgacatgtcaatgtggctagttttatttttcttgttttgcattatgtgtatggcctgaagtgttggacttgcaaaaggggaagaaaggaattgcgaatacatgtaaaatgtcaccagacatttgtattatttttatcatgaaatcatgtttttctctgattgttctgaaatgttctaaatactcttattttgaatgcacaaaatgacttaaaccattcatatcatgtttcctttgcgttcagccaatttcaattaaaatgaactaaattata

SEQ ID NO: 449053 - DNA, 683 bp, Homo sapiens
tacaggagataactggtacctgtgacattgattggctctaactacagcttcagtgatggggggatggaaaatgtcccaacccaattgtgctgattcagcacataaagttgcctgcctgtggctggtaaggtaatgtcatgattcatcctctcttcagtgagactgagcctgatgtgttaacaaataggtgaagaaagtcttgtgctgtattcctaatcaaaagacttaatatattgaagtaacacttttttagtaagcaagatacctttttatttcaattcacagaatggaatttttttgtttcatgtctcagatttattttgtatttcttttttaacactctacatttcccttgttttttaactcatgcacatgtgctctttgtacagttttaaaaagtgtaataaaatctgacatgtcaatgtggctagttttatttttcttgttttgcattatgtgtatggcctgaagtgttggacttgcaaaaggggaagaaaggaattgcgaatacatgtaaaatgtcaccagacatttgtattatttttatcatgaaatcatgtttttctctgattgttctgaaatgttctaaatactcttattttgaatgcacaaaatgacttaaaccattcatatcatgtttcctttgcgttcagccaatttcaattaaaatgaactaaattata

SEQ ID NO: 449054 - DNA, 598 bp, Homo sapiens
gcggccgctccaacatcagaatcgtaacattaccttaccagccacaggaggcaactaaatgtgcatggatatggtacaacgtctgtgaggtattacaaataggtgaagaaagtcttgtgctgtattcctaatcaaaagacttaatatattgaagtaacacttttttagtaagcaagatacctttttatttcaattcacagaatggaatttttttgtttcatgtctcagatttattttgtatttcttttttaacactctacatttcccttgttttttaactcatgcacatgtgctctttgtacagttttaaaaagtgtaataaaatctgacatgtcaatgtggctagttttatttttcttgttttgcattatgtgtatggcctgaagtgttggacttgcaaaaggggaagaaaggaattgcgaatacatgtaaaatgtcaccagacatttgtattatttttatcatgaaatcatgtttttctctgattgttctgaaatgttctaaatactcttattttgaatgcacaaaatgacttaaaccattcatatcatgtttcctttgcgttcagccaatttcaattaaaatgaactaaattata

SEQ ID NO: 449055 - DNA, 834 bp, Homo sapiens
gacgtcagcgtgctgacgtcacgggccggaggtcccggggctgctgggtgcgggcggtgggctgcgcgttgtccgctggactgggtcccggtcacgccccgccaagccccgcccctcaggccggggcgcgaccgcggatccgcagttcccgggccagcctggggcggccggccaggaaccacccgttaaggtgtcttctctttagggatggtgaggttggaaaaaggctcctgtaaccctcctccaggatgaaccacctgccagaagacatggagaacgctctcaccgggagccagagctcccatgcttctctgcgcaatatccattccatcaaccccacacaactcatggccaggattgagtcctatgaaggaagggaaaagaaaggcatatctgatgtcaggaggactttctgtttgtttgtcacctttgacctcttattcgtaacattactgtggataatagagttaaatgtgaatggaggcattgagaacacattagagaaggaattgcgaatacatgtaaaatgtcaccagacatttgtattatttttatcatgaaatcatgtttttctctgattgttctgaaatgttctaaatactcttattttgaatgcacaaaatgacttaaaccattcatatcatgtttcctttgcgttcagccaatttcaattaaaatgaactaaattataaaaaaaaaaaaaaaaaaactcgagggggggcccggtacccaaattcccctatagggagtcggttaacaatcaatggccccgcgttttaacaactccgtgacctggggaaaacccccgcggttcccccaactttaatcggcttt

SEQ ID NO: 449056 - DNA, 856 bp, Homo sapiens
cacagtgtgagatgcctagtgtgaacagtgctggattatgtgtcttgcagttgacaacggcagtgaccagtgcctttttactagcaaaagtgatcctttcgaagcttttctctcaaggggcttttggctatgtgctgcccatcatttcattcatccttgcctggattgagacgtggttcctggatttcaaagtgttacctcaagaagcagaagaagaaaacagactcctgatagttcaggatgcttcagagagggcagcacttatacctggtggtctttctgatggtcagttttattcccctcctgaatccgaagcaggatctgaagaagctgaagaaaaacaggacagtgagaaaccacttttagaactatgagtactacttttgttaaatgtgaaaaaccctcacagaaagtcatcgaggcaaaaagaggcaggcagtggagtctccctgtcgacagtaaagttgaaatggtgacgtccactgctggctttattgaacagctaataaagatttatttattgtaatacctcacagacgttgtaccatatccatgcacatttagttgcctgcctgtggctggtaaggtaatgtcatgattcatcctctcttcagtgagactgagcctgatgtgttaacaaataggtgaagaaagtcttgtgctgtattcctaatcaaaagacttaatatattgaagtaacacttttttagtaagcaagatacctttttatttcaattcacagaatggaattttgggtccgggcccaaattttttgggtctcttaaacctcacatcccgtgttaaccaggcacggcctgggcatcacaggttaaaccgcggggggcgcggagcggga

SEQ ID NO: 449057 - DNA, 1842 bp, Homo sapiens
gacgtcagcgtgctgacgtcacgggccggaggtcccggggctgctgggtgcgggcggtgggctgcgcgttgtccgctggactgggtcccggtcacgccccgccaagccccgcccctcaggccggggcgcgaccgcggatccgcagttcccgggccagcctggggcggccggccaggaaccacccgttaaggtgtcttctctttagggatggtgaggttggaaaaaggctcctgtaaccctcctccaggatgaaccacctgccagaagacatggagaacgctctcaccgggagccagagctcccatgcttctctgcgcaatatccattccatcaaccccacacaactcatggccaggattgagtcctatgaaggaagggaaaagaaaggcatatctgatgtcaggaggactttctgtttgtttgtcacctttgacctcttattcgtaacattactgtggataatagagttaaatgtgaatggaggcattgagaacacattagagaaggaggtgatgcagtatgactactattcttcatattttgatatatttcttctggcagtttttcgatttaaagtgttaatacttgcatatgctgtgtgcagactgcgccattggtgggcaatagcgttgacaacggcagtgaccagtgcctttttactagcaaaagtgatcctttcgaagcttttctctcaaggggcttttggctatgtgctgcccatcatttcattcatccttgcctggattgagacgtggttcctggatttcaaagtgttacctcaagaagcagaagaagaaaacagactcctgatagttcaggatgcttcagagagggcagcacttatacctggtggtctttctgatggtcagttttattcccctcctgaatccgaagcaggatctgaagaagctgaagaaaaacaggacagtgagaaaccacttttagaactatgagtactacttttgttaaatgtgaaaaaccctcacagaaagtcatcgaggcaaaaagaggcaggcagtggagtctccctgtcgacagtaaagttgaaatggtgacgtccactgctggctttattgaacagctaataaagatttatttattgtaatacctcacagacgttgtaccatatccatgcacatttagttgcctgcctgtggctggtaaggtaatgtcatgattcatcctctcttcagtgagactgagcctgatgtgttaacaaataggtgaagaaagtcttgtgctgtattcctaatcaaaagacttaatatattgaagtaacacttttttagtaagcaagatacctttttatttcaattcacagaatggaatttttttgtttcatgtctcagatttattttgtatttcttttttaacactctacatttcccttgttttttaactcatgcacatgtgctctttgtacagttttaaaaagtgtaataaaatctgacatgtcaatgtggctagttttatttttcttgttttgcattatgtgtatggcctgaagtgttggacttgcaaaaggggaagaaaggaattgcgaatacatgtaaaatgtcaccagacatttgtattatttttatcatgaaatcatgtttttctctgattgttctgaaatgttctaaatactcttattttgaatgcacaaaatgacttaaaccattcatatcatgtttcctttgcgttcagccaatttcaattaaaatgaactaaattatactgtgtgctgttttttcaaacatgaatattccccttgactcaagggaagtcaggatgtctgttagttttctttcatcattcattgtgtcattgaagaaaaacctaattgcctgtagtggtgat

SEQ ID NO: 449058 - DNA, 1836 bp, Homo sapiens
gacgtcagcgtgctgacgtcacgggccggaggtcccggggctgctgggtgcgggcggtgggctgcgcgttgtccgctggactgggtcccggtcacgccccgccaagccccgcccctcaggccggggcgcgaccgcggatccgcagttcccgggccagcctggggcggccggccaggaaccacccgttaagggtcttactctgttgcccaggctggagtgcagtggcaccatctcagctcactggagcgtctgcctccaggttcaagtgattctcctgcctcagcatcccaagtagctgggactacaggtgtcttctctttagggatggtgaggttggaaaaaggctcctgtaaccctcctccaggatgaaccacctgccagaagacatggagaacgctctcaccgggagccagagctcccatgcttctctgcgcaatatccattccatcaaccccacacaactcatggccaggattgagtcctatgaaggaagggaaaagaaaggcatatctgatgtcaggaggactttctgtttgtttgtcacctttgacctcttattcgtaacattactgtggataatagagttaaatgtgaatggaggcattgagaacacattagagaaggaggtgatgcagtatgactactattcttcatattttgatatatttcttctggcagtttttcgatttaaagtgttaatacttgcatatgctgtgtgcagactgcgccattggtgggcaatagcgttgacaacggcagtgaccagtgcctttttactagcaaaagtgatcctttcgaagcttttctctcaaggggcttttggctatgtgctgcccatcatttcattcatccttgcctggattgagacgtggttcctggatttcaaagtgttacctcaagaagcagaagaagaaaacagactcctgatagttcaggatgcttcagagagggcagcacttatacctggtggtctttctgatggtcagttttattcccctcctgaatccgaagcaggatctgaagaagctgaagaaaaacaggacagtgagaaaccacttttagaactatgagtactacttttgttaaatgtgaaaaaccctcacagaaagtcatcgaggcaaaaagaggcaggcagtggagtctccctgtcgacagtaaagttgaaatggtgacgtccactgctggctttattgaacagctaataaagatttatttattgtaatacctcacagacgttgtaccatatccatgcacatttagttgcctgcctgtggctggtaaggtaatgtcatgattcatcctctcttcagtgagactgagcctgatgtgttaacaaataggtgaagaaagtcttgtgctgtattcctaatcaaaagacttaatatattgaagtaacacttttttagtaagcaagatacctttttatttcaattcacagaatggaatttttttgtttcatgtctcagatttattttgtatttcttttttaacactctacatttcccttgttttttaactcatgcacatgtgctctttgtacagttttaaaaagtgtaataaaatctgacatgtcaatgtggctagttttatttttcttgttttgcattatgtgtatggcctgaagtgttggacttgcaaaaggggaagaaaggaattgcgaatacatgtaaaatgtcaccagacatttgtattatttttatcatgaaatcatgtttttctctgattgttctgaaatgttctaaatactcttattttgaatgcacaaaatgacttaaaccattcatatcatgtttcctttgcgttcagccaatttcaattaaaatgaactaaattata

SEQ ID NO: 449059 - DNA, 1457 bp, Homo sapiens
gacgtcagcgtgctgacgtcacgggccggaggtcccggggctgctgggtgcgggcggtgggctgcgcgttgtccgctggactgggtcccggtcacgccccgccaagccccgcccctcaggccggggcgcgaccgcggatccgcagttcccgggccagcctggggcggccggccaggaaccacccgttaaggtgtcttctctttagggatggtgaggttggaaaaaggctcctgtaaccctcctccaggatgaaccacctgccagaagacatggagaacgctctcaccgggagccagagctcccatgcttctctgcgcaatatccattccatcaaccccacacaactcatggccaggattgagtcctatgaaggaagggaaaagaaaggcatatctgatgtcaggaggactttctgtttgtttgtcacctttgacctcttattcgtaacattactgtggataatagagttaaatgtgaatggaggcattgagaacacattagagaaggaggtgatgcagtatgactactattcttcatattttgatatatttcttctggcagtttttcgatttaaagtgttaatacttgcatatgctgtgtgcagactgcgccattggtgggcaatagcgttgacaacggcagtgaccagtgcctttttactagcaaaagtgatcctttcgaagcttttctctcaaggggcttttggctatgtgctgcccatcatttcattcatccttgcctggattgagacgtggttcctggatttcaaagtgttacctcaagaagcagaagaagaaaacagactcctgatagttcaggatgcttcagagagggcagcacttatacctggtggtctttctgatggtcagttttattcccctcctgaatccgaagcaggatctgaagaagctgaagaaaaacaggacagtgagaaaccacttttagaactatgagtactacttttgttaaatgtgaaaaaccctcacagaaagtcatcgaggcaaaaagaggcaggcagtggagtctccctgtcgacagtaaagttgaaatggtgacgtccactgctggctttattgaacagctaataaagatttatttattgtaatacctcacagacgttgtaccatatccatgcacatttagttgcctgcctgtggctggtaaggtaatgtcatgattcatcctctcttcagtgagactgagcctgatgtgttaacaaataggtgaagaaagtcttgtgctgtattcctaatcaaaagacttaatatattgaagtaacacttttttagtaagcaagatacctttttatttcaattcacagaatggaatttttttgtttcatgtctcagatttattttgtatttcttttttaacactctacatttcccttgttttttaactcatgcacatgtgctctttgtacagttttaaaaagtgtaataaaatctgacatgtca

SEQ ID NO: 449060 - DNA, 968 bp, Homo sapiens
gatgactctagaggatcccgagtgtcttcaagaagcagaagaagaaaacagactcctgatagttcaggatgcttcagagagggcagcacttatacctggtggtctttctgatggtcagttttattcccctcctgaatccgaagcaggatctgaagaagctgaagaaaaacaggacagtgagaaaccacttttagaactatgagtactacttttgttaaatgtgaaaaaccctcacagaaagtcatcgaggcaaaaagaggcaggcagtggagtctccctgtcgacagtaaagttgaaatggtgacgtccactgctggctttattgaacagctaataaagatttatttattgtaatacctcacagacgttgtaccatatccatgcacatttagttgcctgcctgtggctggtaaggtaatgtcatgattcatcctctcttcagtgagactgagcctgatgtgttaacaaataggtgaagaaagtcttgtgctgtattcctaatcaaaagacttaatatattgaagtaacacttttttagtaagcaagatacctttttatttcaattcacagaatggaatttttttgtttcatgtctcagatttattttgtatttcttttttaacactctacatttcccttgttttttaactcatgcacatgtgctctttgtacagttttaaaaagtgtaataaaatctgacatgtcaatgtggctagttttatttttcttgttttgcattatgtgtatggcctgaagtgttggacttgcaaaaggggaagaaaggaattgcgaatacatgtaaaatgtcaccagacatttgtattatttttatcatgaaatcatgtttttctctgattgttctgaaatgttctaaatactcttattttgaatgcacaaaatgacttaaaccattcatatcatgtttcctttgcgttcagccaatttcaattaaaatgaactaaattata

SEQ ID NO: 449061 - DNA, 805 bp, Homo sapiens
gacgtcagcgtgctgacgtcacgggccggaggtcccggggctgctgggtgcgggcggtgggctgcgcgttgtccgctggactgggtcccggtcacgccccgccaagccccgcccctcaggccggggcgcgaccgcggatccgcagttcccgggccagcctggggcggccggccaggaaccacccgttaaggtgtcttctctttagggatggtgaggttggaaaaaggctcctgtaaccctcctccaggatgaaccacctgccagaagacatggagaacgctctcaccgggagccagagctcccatgcttctctgcgcaatatccattccatcaaccccacacaactcatggccaggattgagtcctatgaaggaagggaaaagaaaggcatatctgatgtcaggaggactttctgtttgtttgtcacctttgacctcttattcgtaacattactgtggataatagagttaaatgtaagttggtggttctttcataactttttaagaagtgtttccagagacaacagggtttttttgttcgtttctcttatcatttgtttcatttagtaatttccatctttttccaaatgaagccattgcttttctcctcctgatttggacctttcttgttctttaatattattgtttaaggcaaatgtgatcagtttaaaactcatgttgtctggggttttgaaatttgaattcctggtattttgctctgtaacaggagttgacaaactataggctgtaagacaaattcagtaggcctgttttaataaagttttattggaacgtggaaaaaaaaa

SEQ ID NO: 449062 - DNA, 1739 bp, Homo sapiens
ctgcagcctgcgcgacgcggcgggaggctacccggaggcgatgggaaggcgggcgcagtcgacccaagggtggagaagagggaaggcgaaggacgcgcgttcccgggctcgtgaccgccagcggcccggggaacccgctcccagacagactcggagagatggcaggcggaagacaccggcgcgtcgtgggcaccctccacctgctgctgctggtggccgccctgccctgggcatccaggggggtcagtccgagtgcctcagcctggccagaggagaagaattaccaccagccagccattttgaattcatcggctcttcggcaaattgcagaaggcaccagtatctctgaaatgtggcaaaatgacttacagccattgctgatagagcgatacccgggatcccctggaagctatgctgctcgtcagcacatcatgcagcgaattcagaggcttcaggctgactgggtcttggaaatagacaccttcttgagtcagacaccctatgggtaccggtctttctcaaatatcatcagcaccctcaatcccactgctaaacgacatttggtcctcgcctgccactatgactccaagtatttttcccactggaacaacagagtgtttgtaggagccactgattcagccgtgccatgtgcaatgatgttggaacttgctcgtgccttagacaagaaactcctttccttaaagactgtttcagactccaagccagatttgtcactccagctgatcttctttgatggtgaagaggcttttcttcactggtctcctcaagattctctctatgggtctcgacacttagctgcaaagatggcatcgaccccgcacccacctggagcgagaggcaccagccaactgcatggcatggatttattggtcttattggatttgattggagctccaaacccaacgtttcccaatttttttccaaactcagccaggtggttcgaaagacttcaagcaattgaacatgaacttcatgaattgggtttgctcaaggatcactctttggaggggcggtatttccagaattacagttatggaggtgtgattcaggatgaccatattccatttttaagaagaggtgttccagttctgcatctgataccgtctcctttccctgaagtctggcacaccatggatgacaatgaagaaaatttggatgaatcaaccattgacaatctaaacaaaatcctacaagtctttgtgttggaatatcttcatttgtaatactctgatttagtttaggataattggttctagaattgaattcaaaagtcaaggcatcatttaaaataatctgatttcagacaaatgctgtgtggaaacatctatcctatagatcatcctattcttatgtgtctttggttatcagatcaattacagaataattgtgttgtgatattgtgtcctaaattgctcattaatttttatttacagattgaaaaagagggaccgtgtaaagaaaatggaaaataaatatctttcaaagactcttttagataaacacgatgaggcaaaatcaggttcattcattcaacgatagtttctaaacagtacttaaatagcggttggaaaacgtagccttcattttatgattttttcatatgtggaaatctattacatgtaatacaaaacaaacatgtagtttgaaggcggtcagatttctttgagaaatctttgtagagttaattttatggaaattaaaatcagaattaaatgcta

SEQ ID NO: 449063 - DNA, 956 bp, Homo sapiens
ctgcagcctgcgcgacgcggcgggaggctacccggaggcgatgggaaggcgggcgcagtcgacccaagggtggagaagagggaaggcgaaggacgcgcgttcccgggctcgtgaccgccagcggcccggggaacccgctcccagacagactcggagagatggcaggcggaagacaccggcgcgtcgtgggcaccctccacctgctgctgctggtggccgccctgccctgggcatccaggggggtcagtccgagtgcctcagcctggccagaggagaagaattaccaccagccagccattttgaattcatcggctcttcggcaaattgcagaaggcaccagtatctctgaaatgtggcaaaatgacttacagccattgctgatagagcgatacccgggatcccctggaagctatgctgctcgtcagtgagcggaggtctgaaataacctgaaccaccccctagctatgggagctttctacgttatccttagcagcacatcatgcagcgaattcagaggcttcaggctgactgggtcttggaaatagacaccttcttgagtcagacaccctatgggtaccggtctttctcaaatatcatcagcaccctcaatcccactgctaaacgacatttggtcctcgcctgccactatgactccaagtatttttcccactggaacaacagagtgtttgtaggagccactgattcagccgtgccatgtgcaatgatgttggaacttgctcgtgccttagacaagaaactcctttccttaaaggtatctgttttctgcttattgattcctaggataaagtacattaacagtaactcagagtgaattctagaatccttggaggaatgagaaggccatttagaaatggagacttttggtacatttttattatgaacattaattgtaagattgcatgattgggaatatcaaccatgggcaataaacctaa

SEQ ID NO: 449064 - DNA, 2265 bp, Homo sapiens
ctgcagcctgcgcgacgcggcgggaggctacccggaggcgatgggaaggcgggcgcagtcgacccaagggtggagaagagggaaggcgaaggacgcgcgttcccgggctcgtgaccgccagcggcccggggaacccgctcccagacagactcggagagatggcaggcggaagacaccggcgcgtcgtgggcaccctccacctgctgctgctggtggccgccctgccctgggcatccaggggggtcagtccgagtgcctcagcctggccagaggagaagaattaccaccagccagccattttgaattcatcggctcttcggcaaattgcagaaggcaccagtatctctgaaatgtggcaaaatgacttacagccattgctgatagagcgatacccgggatcccctggaagctatgctgctcgtcagcacatcatgcagcgaattcagaggcttcaggctgactgggtcttggaaatagacaccttcttgagtcagacaccctatgggtaccggtctttctcaaatatcatcagcaccctcaatcccactgctaaacgacatttggtcctcgcctgccactatgactccaagtatttttcccactggaacaacagagtgtttgtaggagccactgattcagccgtgccatgtgcaatgatgttggaacttgctcgtgccttagacaagaaactcctttccttaaagactgtttcagactccaagccagatttgtcactccagctgatcttctttgatggtgaagaggcttttcttcactggtctcctcaagattctctctatgggtctcgacacttagctgcaaagatggcatcgaccccgcacccacctggagcgagaggcaccagccaactgcatggcatggatttattggtcttattggatttgattggagctccaaacccaacgtttcccaatttttttccaaactcagccaggtggttcgaaagacttcaagcaattgaacatgaacttcatgaattgggtttgctcaaggatcactctttggaggggcggtatttccagaattacagttatggaggtgtgattcaggatgaccatattccatttttaagaagaggtgttccagttctgcatctgataccgtctcctttccctgaagtctggcacaccatggatgacaatgaagaaaatttggatgaatcaaccattgacaatctaaacaaaatcctacaagtctttgtgttggaatatcttcatttgtaatactctgatttagtttaggataattggttctagaattgaattcaaaagtcaaggcatcatttaaaataatctgatttcagacaaatgctgtgtggaaacatctatcctatagatcatcctattcttatgtgtctttggttatcagatcaattacagaataattgtgttgtgatattgtgtcctaaattgctcattaatttttatttacagattgaaaaagagggaccgtgtaaagaaaatggaaaataaatatctttcaaagactcttttagataaacacgatgaggcaaaatcaggttcattcattcaacgatagtttctaaacagtacttaaatagcggttggaaaacgtagccttcattttatgattttttcatatgtggaaatctattacatgtaatacaaaacaaacatgtagtttgaaggcggtcagatttctttgagaaatctttgtagagttaattttatggaaattaaaatcagaattaaatgctaaaaaaaaaaaaagaaaaaaaaaaacaaaaaaaaacaaaacaccacaggagaaacaacaaaaagaaaaacgccaagaagaagacccaacaacaaacgaaacaaggaacacgaaaggacataaaaatacaaggcaggcacggcgcaacgaaatacccaaacaaccgcgcacagaagagaccgcagcacccgacgagggacaaacgaaccgcacaaggaaaagcgaccatgaagacgaatcacgtagtaggccgacaaagacgagagaagagaacacaaagaggtacaatgcaaggggagcgaagcaaaagcaacagaggcgacgaagagcaacacggaacgacacacgcagtggcgcgcaaacaacggagagggagagagccataccacgtggaggaacgacagagagacgaaaaaaagaagaaagagaaagagaggaaacaacgagaacaacagggcggaagcgggagcagacagcgcgacgacagaacgagaaaaacagaacaacagagaaaaagaaaagacgaaa

SEQ ID NO: 449065 - DNA, 1592 bp, Homo sapiens
ctgcagcctgcgcgacgcggcgggaggctacccggaggcgatgggaaggcgggcgcagtcgacccaagggtggagaagagggaaggcgaaggacgcgcgttcccgggctcgtgaccgccagcggcccggggaacccgctcccagacagactcggagagatggcaggcggaagacaccggcgcgtcgtgggcaccctccacctgctgctgctggtggccgccctgccctgggcatccaggggggtcagtccgagtgcctcagcctggccagaggagaagcacatcatgcagcgaattcagaggcttcaggctgactgggtcttggaaatagacaccttcttgagtcagacaccctatgggtaccggtctttctcaaatatcatcagcaccctcaatcccactgctaaacgacatttggtcctcgcctgccactatgactccaagtatttttcccactggaacaacagagtgtttgtaggagccactgattcagccgtgccatgtgcaatgatgttggaacttgctcgtgccttagacaagaaactcctttccttaaagactgtttcagactccaagccagatttgtcactccagctgatcttctttgatggtgaagaggcttttcttcactggtctcctcaagattctctctatgggtctcgacacttagctgcaaagatggcatcgaccccgcacccacctggagcgagaggcaccagccaactgcatggcatggatttattggtcttattggatttgattggagctccaaacccaacgtttcccaatttttttccaaactcagccaggtggttcgaaagacttcaagcaattgaacatgaacttcatgaattgggtttgctcaaggatcactctttggaggggcggtatttccagaattacagttatggaggtgtgattcaggatgaccatattccatttttaagaagaggtgttccagttctgcatctgataccgtctcctttccctgaagtctggcacaccatggatgacaatgaagaaaatttggatgaatcaaccattgacaatctaaacaaaatcctacaagtctttgtgttggaatatcttcatttgtaatactctgatttagtttaggataattggttctagaattgaattcaaaagtcaaggcatcatttaaaataatctgatttcagacaaatgctgtgtggaaacatctatcctatagatcatcctattcttatgtgtctttggttatcagatcaattacagaataattgtgttgtgatattgtgtcctaaattgctcattaatttttatttacagattgaaaaagagggaccgtgtaaagaaaatggaaaataaatatctttcaaagactcttttagataaacacgatgaggcaaaatcaggttcattcattcaacgatagtttctaaacagtacttaaatagcggttggaaaacgtagccttcattttatgattttttcatatgtggaaatctattacatgtaatacaaaacaaacatgtagtttgaaggcggtcagatttctttgagaaatctttgtagagttaattttatggaaattaaaatcagaattaaatgcta

SEQ ID NO: 449066 - DNA, 1491 bp, Homo sapiens
tctcttttatatttgccagcatttgcagtgcgtctcaacctgcctgggtgcagagggaaagctgcttgatatgttattatggttcagggttgcttattaattcttacagtgagcggaggtctgaaataacctgaaccaccccctagctatgggagctttctacgttatccttagcagcacatcatgcagcgaattcagaggcttcaggctgactgggtcttggaaatagacaccttcttgagtcagacaccctatgggtaccggtctttctcaaatatcatcagcaccctcaatcccactgctaaacgacatttggtcctcgcctgccactatgactccaagtatttttcccactggaacaacagagtgtttgtaggagccactgattcagccgtgccatgtgcaatgatgttggaacttgctcgtgccttagacaagaaactcctttccttaaagactgtttcagactccaagccagatttgtcactccagctgatcttctttgatggtgaagaggcttttcttcactggtctcctcaagattctctctatgggtctcgacacttagctgcaaagatggcatcgaccccgcacccacctggagcgagaggcaccagccaactgcatggcatggatttattggtcttattggatttgattggagctccaaacccaacgtttcccaatttttttccaaactcagccaggtggttcgaaagacttcaagcaattgaacatgaacttcatgaattgggtttgctcaaggatcactctttggaggggcggtatttccagaattacagttatggaggtgtgattcaggatgaccatattccatttttaagaagaggtgttccagttctgcatctgataccgtctcctttccctgaagtctggcacaccatggatgacaatgaagaaaatttggatgaatcaaccattgacaatctaaacaaaatcctacaagtctttgtgttggaatatcttcatttgtaatactctgatttagtttaggataattggttctagaattgaattcaaaagtcaaggcatcatttaaaataatctgatttcagacaaatgctgtgtggaaacatctatcctatagatcatcctattcttatgtgtctttggttatcagatcaattacagaataattgtgttgtgatattgtgtcctaaattgctcattaatttttatttacagattgaaaaagagggaccgtgtaaagaaaatggaaaataaatatctttcaaagactcttttagataaacacgatgaggcaaaatcaggttcattcattcaacgatagtttctaaacagtacttaaatagcggttggaaaacgtagccttcattttatgattttttcatatgtggaaatctattacatgtaatacaaaacaaacatgtagtttgaaggcggtcagatttctttgagaaatctttgtagagttaattttatggaaattaaaatcagaattaaatgcta

SEQ ID NO: 449067 - DNA, 1766 bp, Homo sapiens
ctgcagcctgcgcgacgcggcgggaggctacccggaggcgatgggaaggcgggcgcagtcgacccaagggtggagaagagggaaggcgaaggacgcgcgttcccgggctcgtgaccgccagcggcccggggaacccgctcccagacagactcggagagatggcaggcggaagacaccggcgcgtcgtgggcaccctccacctgctgctgctggtggccgccctgccctgggcatccaggggggtcagtccgagtgcctcagcctggccagaggagaagaattaccaccagccagccattttgaattcatcggctcttcggcaaattgcagaaggcaccagtatctctgaaatgtggcaaaatgacttacagccattgctgatagagcgatacccgggatcccctggaagctatgctgctcgtcagcacatcatgcagcgaattcagaggcttcaggctgactgggtcttggaaatagacaccttcttgagtcagacaccctatgggtaccggtctttctcaaatatcatcagcaccctcaatcccactgctaaacgacatttggtcctcgcctgccactatgactccaagtatttttcccactggaacaacagagtgtttgtaggagccactgattcagccgtgccatgtgcaatgatgttggaacttgctcgtgccttagacaagaaactcctttccttaaagactgtttcagactccaagccagatttgtcactccagctgatcttctttgatggtgaagaggcttttcttcactggtctcctcaagattctctctatgggtctcgacacttagctgcaaagatggcatcgaccccgcacccacctggagcgagaggcaccagccaactgcatggcatggatttattggtcttattggatttgattggagctccaaacccaacgtttcccaatttttttccaaactcagccaggtggttcgaaagacttcaagcaattgaacatgaacttcatgaattgggtttgctcaaggatcactctttggaggggcggtatttccagaattacagttatggaggtgtgattcaggatgaccatattccatttttaagaagaggtgttccagttctgcatctgataccgtctcctttccctgaagtctggcacaccatggatgacaatgaagtctggcacaccatggatgacaatgaagaaaatttggatgaatcaaccattgacaatctaaacaaaatcctacaagtctttgtgttggaatatcttcatttgtaatactctgatttagtttaggataattggttctagaattgaattcaaaagtcaaggcatcatttaaaataatctgatttcagacaaatgctgtgtggaaacatctatcctatagatcatcctattcttatgtgtctttggttatcagatcaattacagaataattgtgttgtgatattgtgtcctaaattgctcattaatttttatttacagattgaaaaagagggaccgtgtaaagaaaatggaaaataaatatctttcaaagactcttttagataaacacgatgaggcaaaatcaggttcattcattcaacgatagtttctaaacagtacttaaatagcggttggaaaacgtagccttcattttatgattttttcatatgtggaaatctattacatgtaatacaaaacaaacatgtagtttgaaggcggtcagatttctttgagaaatctttgtagagttaattttatggaaattaaaatcagaattaaatgcta

SEQ ID NO: 449068 - DNA, 1354 bp, Homo sapiens
  misc_feature (1314)..(1315): n is a, c, g, or t
  misc_feature (1318)..(1318): n is a, c, g, or t
ctgcagcctgcgcgacgcggcgggaggctacccggaggcgatgggaaggcgggcgcagtcgacccaagggtggagaagagggaaggcgaaggacgcgcgttcccgggctcgtgaccgccagcggcccggggaacccgctcccagacagactcggagagatggcaggcggaagacaccggcgcgtcgtgggcaccctccacctgctgctgctggtggccgccctgccctgggcatccaggggggtcagtccgagtgcctcagcctggccagaggagaagaattaccaccagccagccattttgaattcatcggctcttcggcaaattgcagaaggcaccagtatctctgaaatgtggcaaaatgacttacagccattgctgatagagcgatacccgggatcccctggaagctatgctgctcgtcagcacatcatgcagcgaattcagaggcttcaggctgactgggtcttggaaatagacaccttcttgagtcagacaccctatgggtaccggtctttctcaaatatcatcagcaccctcaatcccactgctaaacgacatttggtcctcgcctgccactatgactccaagtatttttcccactggaacaacagagtgtttgtaggagccactgattcagccgtgccatgtgcaatgatgttggaacttgctcgtgccttagacaagaaactcctttccttaaagactgtttcagactccaagccagatttgtcactccagctgatcttctttgatggtgaagaggcttttcttcactggtctcctcaagattctctctatgggtctcgacacttagctgcaaagatggcatcgaccccgcacccacctggagcgagaggcaccagccaactgcatggcatggatttattggtcttattggatttgattggagctccaaacccaacgtttcccaatttttttccaaactcagccaggtggttcgaaagacttcaagcaattgaacatgaacttcatgaattgggtttgctcaaggatcactctttggaggggcggtatttccagaattacagttatggaggtgtgattcaggatgaccatattccatttttaagaagaggtgttccagttctgcatctgataccgtctcctttccctgaagtctggcacaccatggatgacaatgaagaaaatttggatgaatcaaccattgacaatctaaacaaaatcctacaagtctttgtgttggaatatcttcatttgtaatactctgatttagtttaggataattggttctagaattgaattcaaaagtcaaggcatcattttcctattnntangtgtctttggtatcagatcactaccagataattgcg

SEQ ID NO: 449069 - DNA, 1063 bp, Homo sapiens
gctatgtttttattgttgtttttaccagactgtttcagactccaagccagatttgtcactccagctgatcttctttgatggtgaagaggcttttcttcactggtctcctcaagattctctctatgggtctcgacacttagctgcaaagatggcatcgaccccgcacccacctggagcgagaggcaccagccaactgcatggcatggatttattggtcttattggatttgattggagctccaaacccaacgtttcccaatttttttccaaactcagccaggtggttcgaaagacttcaagcaattgaacatgaacttcatgaattgggtttgctcaaggatcactctttggaggggcggtatttccagaattacagttatggaggtgtgattcaggatgaccatattccatttttaagaagaggtgttccagttctgcatctgataccgtctcctttccctgaagtctggcacaccatggatgacaatgaagaaaatttggatgaatcaaccattgacaatctaaacaaaatcctacaagtctttgtgttggaatatcttcatttgtaatactctgatttagtttaggataattggttctagaattgaattcaaaagtcaaggcatcatttaaaataatctgatttcagacaaatgctgtgtggaaacatctatcctatagatcatcctattcttatgtgtctttggttatcagatcaattacagaataattgtgttgtgatattgtgtcctaaattgctcattaatttttatttacagattgaaaaagagggaccgtgtaaagaaaatggaaaataaatatctttcaaagactcttttagataaacacgatgaggcaaaatcaggttcattcattcaacgatagtttctaaacagtacttaaatagcggttggaaaacgtagccttcattttatgattttttcatatgtggaaatctattacatgtaatacaaaacaaacatgtagtttgaaggcggtcagatttctttgagaaatctttgtagagttaattttatggaaattaaaatcagaattaaatgcta

SEQ ID NO: 449070 - DNA, 1238 bp, Homo sapiens
ccccattcctgggcccacactccatccctaatccctcccccgacccctgcatcttctcctgactctgactctcttcccatatttgatcttctttctgtccccacgtcttcactaaccccagcttggaacctcatgctacccttgagacttcactagccccggtgccttcatccctccctgacgctcaccccatctgtgaactgatagcttattcccagcacccccgcttattcctatccattgccctatcactgaccttcgccctataaaagtacaaatggtcacattctgtgtcctctgtgaccctaacacacctcctgttggcatttgctctccctcctgttatccattggcagctcctaatgggccaggggaatgtggatttattggtcttattggatttgattggagctccaaacccaacgtttcccaatttttttccaaactcagccaggtggttcgaaagacttcaagcaattgaacatgaacttcatgaattgggtttgctcaaggatcactctttggaggggcggtatttccagaattacagttatggaggtgtgattcaggatgaccatattccatttttaagaagaggtgttccagttctgcatctgataccgtctcctttccctgaagtctggcacaccatggatgacaatgaagaaaatttggatgaatcaaccattgacaatctaaacaaaatcctacaagtctttgtgttggaatatcttcatttgtaatactctgatttagtttaggataattggttctagaattgaattcaaaagtcaaggcatcatttaaaataatctgatttcagacaaatgctgtgtggaaacatctatcctatagatcatcctattcttatgtgtctttggttatcagatcaattacagaataattgtgttgtgatattgtgtcctaaattgctcattaatttttatttacagattgaaaaagagggaccgtgtaaagaaaatggaaaataaatatctttcaaagactcttttagataaacacgatgaggcaaaatcaggttcattcattcaacgatagtttctaaacagtacttaaatagcggttggaaaacgtagccttcattttatgattttttcatatgtggaaatctattacatgtaatacaaaacaaacatgtagtttgaaggcggtcagatttctttgagaaatctttgtagagttaattttatggaaattaaaatcagaattaaatgcta

SEQ ID NO: 449071 - DNA, 1706 bp, Homo sapiens
ctgcagcctgcgcgacgcggcgggaggctacccggaggcgatgggaaggcgggcgcagtcgacccaagggtggagaagagggaaggcgaaggacgcgcgttcccgggctcgtgaccgccagcggcccggggaacccgctcccagacagactcggagagatggcaggcggaagacaccggcgcgtcgtgggcaccctccacctgctgctgctggtggccgccctgccctgggcatccaggggggtcagtccgagtgcctcagcctggccagaggagaagaattaccaccagccagccattttgaattcatcggctcttcggcaaattgcagaaggcaccagtatctctgaaatgtggcaaaatgacttacagccattgctgatagagcgatacccgggatcccctggaagctatgctgctcgtcagcacatcatgcagcgaattcagaggcttcaggctgactgggtcttggaaatagacaccttcttgagtcagacaccctatgggtaccggtctttctcaaatatcatcagcaccctcaatcccactgctaaacgacatttggtcctcgcctgccactatgactccaagtatttttcccactggaacaacagagtgtttgtaggagccactgattcagccgtgccatgtgcaatgatgttggaacttgctcgtgccttagacaagaaactcctttccttaaagactgtttcagactccaagccagatttgtcactccagctgatcttctttgatggtgaagaggcttttcttcactggtctcctcaagattctctctatgggtctcgacacttagctgcaaagatggcatcgaccccgcacccacctggagcgagaggcaccagccaactgcatggcatggatttattggtcttattggatttgattggagctccaaacccaacgtttcccaatttttttccaaactcagccaggtggttcgaaagacttcaagcaattgaacatgaacttcatgaattgggtttgctcaaggatcactctttggaggggcggtatttccagaattacagttatggaggtgtgattcaggatgaccatattccatttttaagaagaggtgttccagttctgcatctgataccgtctcctttccctgaagtctggcacaccatggatgacaatgaagaaaatttggatgaatcaaccattgacaatctaaacaaaatcctacaagtctttgtgttggaatatcttcatttgtaatactctgatttagtttaggataattggttctagaattgaattcaaaagtcaaggcatcatttaaaataatctgatttcagacaaatgctgtgtggaaacatctatcctatagatcatcctattcttatgtgtctttggttatcagatcaattacagaataattgtgttgtgatattgtgtcctaaattgctcattaatttttatttacagattgaaaaagagggaccgtgtaaagaaaatggaaaataaatatctttcaaagagttcattcattcaacgatagtttctaaacagtacttaaatagcggttggaaaacgtagccttcattttatgattttttcatatgtggaaatctattacatgtaatacaaaacaaacatgtagtttgaaggcggtcagatttctttgagaaatctttgtagagttaattttatggaaattaaaatcagaattaaatgcta

SEQ ID NO: 449072 - DNA, 1559 bp, Homo sapiens
cactccatggaggtgcagagataaggccccagacattttggcccagtatgggacaactttgaccgtctttttcagcttcaggactcccatggagttggaattaccaccagccagccattttgaattcatcggctcttcggcaaattgcagaaggcaccagtatctctgaaatgtggcaaaatgacttacagccattgctgatagagcgatacccgggatcccctggaagctatgctgctcgtcagcacatcatgcagcgaattcagaggcttcaggctgactgggtcttggaaatagacaccttcttgagtcagacaccctatgggtaccggtctttctcaaatatcatcagcaccctcaatcccactgctaaacgacatttggtcctcgcctgccactatgactccaagtatttttcccactggaacaacagagtgtttgtaggagccactgattcagccgtgccatgtgcaatgatgttggaacttgctcgtgccttagacaagaaactcctttccttaaagactgtttcagactccaagccagatttgtcactccagctgatcttctttgatggtgaagaggcttttcttcactggtctcctcaagattctctctatgggtctcgacacttagctgcaaagatggcatcgaccccgcacccacctggagcgagaggcaccagccaactgcatggcatggatttattggtcttattggatttgattggagctccaaacccaacgtttcccaatttttttccaaactcagccaggtggttcgaaagacttcaagcaattgaacatgaacttcatgaattgggtttgctcaaggatcactctttggaggggcggtatttccagaattacagttatggaggtgtgattcaggatgaccatattccatttttaagaagaggtgttccagttctgcatctgataccgtctcctttccctgaagtctggcacaccatggatgacaatgaagaaaatttggatgaatcaaccattgacaatctaaacaaaatcctacaagtctttgtgttggaatatcttcatttgtaatactctgatttagtttaggataattggttctagaattgaattcaaaagtcaaggcatcatttaaaataatctgatttcagacaaatgctgtgtggaaacatctatcctatagatcatcctattcttatgtgtctttggttatcagatcaattacagaataattgtgttgtgatattgtgtcctaaattgctcattaatttttatttacagattgaaaaagagggaccgtgtaaagaaaatggaaaataaatatctttcaaagactcttttagataaacacgatgaggcaaaatcaggttcattcattcaacgatagtttctaaacagtacttaaatagcggttggaaaacgtagccttcattttatgattttttcatatgtggaaatctattacatgtaatacaaaacaaacatgtagtttgaaggcggtcagatttctttgagaaatctttgtagagttaattttatggaaattaaaatcagaattaaatgcta

SEQ ID NO: 449073 - DNA, 1678 bp, Homo sapiens
ctgcagcctgcgcgacgcggcgggaggctacccggaggcgatgggaaggcgggcgcagtcgacccaagggtggagaagagggaaggcgaaggacgcgcgttcccgggctcgtgaccgccagcggcccggggaacccgctcccagacagactcggagagatggcaggcggaagacaccggcgcgtcgtgggcaccctccacctgctgctgctggtggccgccctgccctgggcatccaggggggtcagtccgagtgcctcagcctggccagaggagaagaattaccaccagccagccattttgaattcatcggctcttcggcaaattgcagaaggcaccagtatctctgaaatgtggcaaaatgacacatcatgcagcgaattcagaggcttcaggctgactgggtcttggaaatagacaccttcttgagtcagacaccctatgggtaccggtctttctcaaatatcatcagcaccctcaatcccactgctaaacgacatttggtcctcgcctgccactatgactccaagtatttttcccactggaacaacagagtgtttgtaggagccactgattcagccgtgccatgtgcaatgatgttggaacttgctcgtgccttagacaagaaactcctttccttaaagactgtttcagactccaagccagatttgtcactccagctgatcttctttgatggtgaagaggcttttcttcactggtctcctcaagattctctctatgggtctcgacacttagctgcaaagatggcatcgaccccgcacccacctggagcgagaggcaccagccaactgcatggcatggatttattggtcttattggatttgattggagctccaaacccaacgtttcccaatttttttccaaactcagccaggtggttcgaaagacttcaagcaattgaacatgaacttcatgaattgggtttgctcaaggatcactctttggaggggcggtatttccagaattacagttatggaggtgtgattcaggatgaccatattccatttttaagaagaggtgttccagttctgcatctgataccgtctcctttccctgaagtctggcacaccatggatgacaatgaagaaaatttggatgaatcaaccattgacaatctaaacaaaatcctacaagtctttgtgttggaatatcttcatttgtaatactctgatttagtttaggataattggttctagaattgaattcaaaagtcaaggcatcatttaaaataatctgatttcagacaaatgctgtgtggaaacatctatcctatagatcatcctattcttatgtgtctttggttatcagatcaattacagaataattgtgttgtgatattgtgtcctaaattgctcattaatttttatttacagattgaaaaagagggaccgtgtaaagaaaatggaaaataaatatctttcaaagactcttttagataaacacgatgaggcaaaatcaggttcattcattcaacgatagtttctaaacagtacttaaatagcggttggaaaacgtagccttcattttatgattttttcatatgtggaaatctattacatgtaatacaaaacaaacatgtagtttgaaggcggtcagatttctttgagaaatctttgtagagttaattttatggaaattaaaatcagaattaaatgcta

SEQ ID NO: 449074 - DNA, 1659 bp, Homo sapiens
  misc_feature (1517)..(1517): n is a, c, g, or t
ctgcagcctgcgcgacgcggcgggaggctacccggaggcgatgggaaggcgggcgcagtcgacccaagggtggagaagagggaaggcgaaggacgcgcgttcccgggctcgtgaccgccagcggcccggggaacccgctcccagacagactcggagagatggcaggcggaagacaccggcgcgtcgtgggcaccctccacctgctgctgctggtggccgccctgccctgggcatccaggggggtcagtccgagtgcctcagcctggccagaggagaagaattaccaccagccagccattttgaattcatcggctcttcggcaaattgcagaaggcaccagtatctctgaaatgtggcaaaatgacttacagccattgctgatagagcgatacccgggatcccctggaagctatgctgctcgtcagcacatcatgcagcgaattcagaggcttcaggctgactgggtcttggaaatagacaccttcttgagtcagacaccctatgggtaccggtctttctcaaatatcatcagcaccctcaatcccactgctaaacgacatttggtcctcgcctgccactatgactccaagtatttttcccactggaacaacagagtgtttgtaggagccactgattcagccgtgccatgtgcaatgatgttggaacttgctcgtgccttagacaagaaactcctttccttaaagactgtttcagactccaagccagatttgtcactccagctgatcttctttgatggtgaagaggcttttcttcactggtctcctcaagattctctctatgggtctcgacacttagctgcaaagatggcatcgaccccgcacccacctggagcgagaggcaccagccaactgcatggcatggatttattggtcttattggatttgattggagctccaaacccaacgtttcccaatttttttccaaactcagccaggtggttcgaaagacttcaagcaattgaacatgaacttcatgaattgggtttgctcaaggatcactctttggaggggcggtatttccagaattacagttatggaggtgtgattcaggatgaccatattccatttttaagaagaggtgttccagttctgcatctgataccgtctcctttccctgaagtctggcacaccatggatgacaatgaagaaaatttggatgaatcaaccattgacaatctaaacaaaatcctacaagtctttgtgttggaatatcttcatttgtaatactctgatttagtttaggataattggttctagaattgaattcaaaagtcaaggcatcatttaaaataatctgatttcagacaaatgctgtgtggaaacatctatcctatagatcatcctattcttatgtgtctttggttatcagatcaattacagaataattgtgttgtgatattgtgtcctaaattgctcattaatttttatttacagattgaaaaagagggaccgtgtaaagaaaatggaaaataaatatctttcaaagactctttaaanaaacaccatttaggcgcaattagggttattcctttcaccattgattgcttaagaatacttatatatggggtagcaaaaggtaatctttcagtcatggtttgtatctatggggaagaacttttactcgtcatacatagtccat

SEQ ID NO: 449075 - DNA, 1624 bp, Homo sapiens
ctgcagcctgcgcgacgcggcgggaggctacccggaggcgatgggaaggcgggcgcagtcgacccaagggtggagaagagggaaggcgaaggacgcgcgttcccgggctcgtgaccgccagcggcccggggaacccgctcccagacagactcggagagatggcaggcggaagacaccggcgcgtcgtgggcaccctccacctgctgctgctggtggccgccctgccctgggcatccaggggggtcagtccgagtgcctcagcctggccagaggagaagaattaccaccagccagccattttgaattcatcggctcttcggcaaattgcagaaggcaccagtatctctgaaatgtggcaaaatgacttacagccattgctgatagagcgatacccgggatcccctggaagctatgctgctcgtcagcacatcatgcagcgaattcagaggcttcaggctgactgggtcttggaaatagacaccttcttgagtcagacaccctatgggtaccggtctttctcaaatatcatcagcaccctcaatcccactgctaaacgacatttggtcctcgcctgccactatgactccaagtatttttcccactggaacaacagagtgtttgtaggagccactgattcagccgtgccatgtgcaatgatgttggaacttgctcgtgccttagacaagaaactcctttccttaaagactgtttcagactccaagccagatttgtcactccagctgatcttctttgatggtgaagaggcttttcttcactggtctcctcaagattctctctatgggtctcgacacttagctgcaaagatggcatcgaccccgcacccacctggagcgagaggcaccagccaactgcatggcatggatttattggtcttattggatttgattggagctccaaacccaacgtttcccaatttttttccaaactcagccaggtggttcgaaagacttcaagcaattgaacatgaacttcatgaattgggtttgctcaaggatcactctttggaggggcggtatttccagaattacagttatggaggtgtgattcaggatgaccatattccatttttaagaagaggtgttccagttctgcatctgataccgtctcctttccctgaagtctggcacaccatggatgacaatgaagaaaatttggatgaatcaaccattgacaatctaaacaaaatcctacaagtctttgtgttggaatatcttcatttgtaatacttattcttatgtgtctttggttatcagatcaattacagaataattgtgttgtgatattgtgtcctaaattgctcattaatttttatttacagattgaaaaagagggaccgtgtaaagaaaatggaaaataaatatctttcaaagactcttttagataaacacgatgaggcaaaatcaggttcattcattcaacgatagtttctaaacagtacttaaatagcggttggaaaacgtagccttcattttatgattttttcatatgtggaaatctattacatgtaatacaaaacaaacatgtagtttgaaggcggtcagatttctttgagaaatctttgtagagttaattttatggaaattaaaatcagaattaaatgcta

SEQ ID NO: 449076 - DNA, 1685 bp, Homo sapiens
ctgcagcctgcgcgacgcggcgggaggctacccggaggcgatgggaaggcgggcgcagtcgacccaagggtggagaagagggaaggcgaaggacgcgcgttcccgggctcgtgaccgccagcggcccggggaacccgctcccagacagactcggagagatggcaggcggaagacaccggcgcgtcgtgggcaccctccacctgctgctgctggtggccgccctgccctgggcatccaggggggtcagtccgagtgcctcagcctggccagaggagaagaattaccaccagccagccattttgaattcatcggctcttcggcaaattgcagaaggcaccagtatctctgaaatgtggcaaaatgacttacagccattgctgatagagcgatacccgggatcccctggaagctatgctgctcgtcagcacatcatgcagcgaattcagaggcttcaggctgactgggtcttggaaatagacaccttcttgagtcagacaccctatgggtaccggtctttctcaaatatcatcagcaccctcaatcccactgctaaacgacatttggtcctcgcctgccactatgactccaagtatttttcccactggaacaacagagtgtttgtaggagccactgattcagccgtgccatgtgcaatgatgttggaacttgctcgtgccttagacaagaaactcctttccttaaagactgtttcagactccaagccagatttgtcactccagctgatcttctttgatggtgaagctgcaaagatggcatcgaccccgcacccacctggagcgagaggcaccagccaactgcatggcatggatttattggtcttattggatttgattggagctccaaacccaacgtttcccaatttttttccaaactcagccaggtggttcgaaagacttcaagcaattgaacatgaacttcatgaattgggtttgctcaaggatcactctttggaggggcggtatttccagaattacagttatggaggtgtgattcaggatgaccatattccatttttaagaagaggtgttccagttctgcatctgataccgtctcctttccctgaagtctggcacaccatggatgacaatgaagaaaatttggatgaatcaaccattgacaatctaaacaaaatcctacaagtctttgtgttggaatatcttcatttgtaatactctgatttagtttaggataattggttctagaattgaattcaaaagtcaaggcatcatttaaaataatctgatttcagacaaatgctgtgtggaaacatctatcctatagatcatcctattcttatgtgtctttggttatcagatcaattacagaataattgtgttgtgatattgtgtcctaaattgctcattaatttttatttacagattgaaaaagagggaccgtgtaaagaaaatggaaaataaatatctttcaaagactcttttagataaacacgatgaggcaaaatcaggttcattcattcaacgatagtttctaaacagtacttaaatagcggttggaaaacgtagccttcattttatgattttttcatatgtggaaatctattacatgtaatacaaaacaaacatgtagtttgaaggcggtcagatttctttgagaaatctttgtagagttaattttatggaaattaaaatcagaattaaatgcta

SEQ ID NO: 449077 - DNA, 654 bp, Homo sapiens
atgggattagtggattaaatccgggaaggttggacaagcacctaggacggtgcctggtgccgtgttcagcagacgtcgattccctgtccaccccttctttaggagctgtgggaaacacttcataactccccagggtctggtgaacccttcctcccttttctgttccctgttttggcattggagatcataaaaaggctcttccatgtctcttgcttccttcctttcatcttctccaagagaaggaagtggccgcctttgttagcttgggttcagaagcttgtgtctgtcacccagggccgcccagccccggggtttgcgaaggtccggggtaggagggctgcagcctgcgcgacgcggcgggaggctacccggaggcgatgggaaggcgggcgcagtcgacccaagggtggagaagagggaaggcgaaggacgcgcgttcccgggctcgtgaccgccagcggcccggggaacccgctcccagacagactcggagagatggcaggcggaagacaccggcgcgtcgtgggcaccctccacctgctgctgctggtggccgccctgccctgggcatccaggggggtcagtccgagtgcctcagcctggccagaggagaaggtgaggggctgtttctgcgtagttgtacttgagcggctc

SEQ ID NO: 449078 - DNA, 4651 bp, Homo sapiens
  misc_feature (4516)..(4517): n is a, c, g, or t
  misc_feature (4522)..(4522): n is a, c, g, or t
  misc_feature (4527)..(4528): n is a, c, g, or t
agcggccggggccacgatggagcgcgacggctgcgcggggggcgggagccgcggcggcgagggcgggcgcgctccccgggagggcccggcggggaacggccgcgatcggggccgcagccacgctgccgaggcgcccggggacccgcaggcggccgcgtccttgctggcccctatggacgtgggggaggagccgctggagaaggcggcgcgcgcccgcactgccaaggaccccaacacctataaagtactctcgctggtattgtcagtatgtgtgttaacaacaatacttggttgtatatttgggttgaaaccaagctgtgccaaagaagttaaaagttgcaaaggtcgctgtttcgagagaacatttgggaactgtcgctgtgatgctgcctgtgttgagcttggaaactgctgtttagattaccaggagacgtgcatagaaccagaacatatatggacttgcaacaaattcaggtgtggtgagaaaaggttgaccagaagcctctgtgcctgttcagatgactgcaaggacaagggcgactgctgcatcaactacagttctgtgtgtcaaggtgagaaaagttgggtagaagaaccatgtgagagcattaatgagccacagtgcccagcagggtttgaaacgcctcctaccctcttattttctttggatggattcagggcagaatatttacacacttggggtggacttcttcctgttattagcaaactaaaaaaatgtggaacatatactaaaaacatgagaccggtatatccaacaaaaactttccccaatcactacagcattgtcaccggattgtatccagaatctcatggcataatcgacaataaaatgtatgatcccaaaatgaatgcttccttttcacttaaaagtaaagagaaatttaatcctgagtggtacaaaggagaaccaatttgggtcacagctaagtatcaaggcctcaagtctggcacatttttctggccaggatcagatgtggaaattaacggaattttcccagacatctataaaatgtataatggttcagtaccatttgaagaaaggattttagctgttcttcagtggctacagcttcctaaagatgaaagaccacacttttacactctgtatttagaagaaccagattcttcaggtcattcatatggaccagtcagcagtgaagtcatcaaagccttgcagagggttgatggtatggttggtatgctgatggatggtctgaaagagctgaacttgcacagatgcctgaacctcatccttatttcagatcatggcatggaacaaggcagttgtaagaaatacatatatctgaataaatatttgggggatgttaaaaatattaaagttatctatggacctgcagctcgattgagaccctctgatgtcccagataaatactattcatttaactatgaaggcattgcccgaaatctttcttgccgggaaccaaaccagcacttcaaaccttacctgaaacatttcttacctaagcgtttgcactttgctaagagtgatagaattgagcccttgacattctatttggaccctcagtggcaacttgcattgaatccctcagaaaggaaatattgtggaagtggatttcatggctctgacaatgtattttcaaatatgcaagccctctttgttggctatggacctggattcaagcatggcattgaggctgacacctttgaaaacattgaagtctataacttaatgtgtgatttactgaatttgacaccggctcctaataacggaactcatggaagtcttaaccaccttctaaagaatcctgtttatacgccaaagcatcccaaagaagtgcaccccctggtacagtgccccttcacaagaaaccccagagataaccttggctgctcatgtaacccttcgattttgccgattgaggattttcaaacacagttcaatctgactgtggcagaagagaagattattaagcatgaaactttaccctatggaagacctagagttctccagaaggaaaacaccatctgtcttctttcccagcaccagtttatgagtggatacagccaagacatcttaatgcccctttggacatcctataccgtggacagaaatgacagtttctctacggaagacttctccaactgtctgtaccaggactttagaattcctcttagtcctgtccataaatgttcattttataaaaataacaccaaagtgagttacgggttcctctccccaccacaactaaataaaaattcaagtggaatatattctgaagctttgcttactacaaatatagtgccaatgtaccagagttttcaagttatatggcgctactttcatgacaccctactgcgaaagtatgctgaagaaagaaatggtgtcaatgtcgtcagtggtcctgtgtttgactttgattatgatggacgttgtgattccttagagaatctgaggcaaaaaagaagagtcatccgtaaccaagaaattttgattccaactcacttctttattgtgctaacaagctgtaaagatacatctcagacgcctttgcactgtgaaaacctagacaccttagctttcattttgcctcacaggactgataacagcgagagctgtgtgcatgggaagcatgactcctcatgggttgaagaattgttaatgttacacagagcacggatcacagatgttgagcacatcactggactcagcttctatcaacaaagaaaagagccagtttcagacattttaaagttgaaaacacatttgccaacctttagccaagaagactgatatgttttttatccccaaacaccatgaatctttttgagagaaccttatattttatatagtcctctagctacactattgcattgttcagaaactgtcgaccagagttagaacggagccctcggtgatgcggacatctcagggaaacttgcgtactcagcacagcagtggagagtgttcctgttgaatcttgcacatatttgaatgtgtaagcattgtatacattgatcaagttcgggggaataaagacagaccacacctaaaactgcctttctgcttctcttaaaggagaagtagctgtgaacattgtctggataccagatatttgaatctttcttactattggtaataaaccttgatggcattgggcaaacagtagacttatagtagggttggggtagcccatgttatgtgactatctttatgagaattttaaagtggttctggatatcttttaacttggagtttcatttcttttcattgtaatcaaaaaaaaaattaacagaagccaaaatacttctgagaccttgtttcaatctttgctgtatatcccctcaaaatccaagttattaatcttatgtgttttctttttaattttttgattggatttctttagatttaatggttcaaatgagttcaactttgagggacgatctttgaatatacttacctattataaaatcttactttgtatttgtatttaaaaaagaaaaatattcctatcctgctcactggtaattaacataggtttaaaatggcttcaaatgtggccctatagacggttaaaattgtaccttatcttggcaaaacttcagagcaccagtcagtgcatgcaaggtgccattttttattgagatgcttagaatgtttctttctgtgcacaagacttaccctaccagcagcagagccattctctgttgagtggttcattttgaagttccacagattgaagagaacatgccaccaatcacctcacatcttcttggtggacatgataaatgacacaatgaacttgatttctttactaccttgactgtagctttttatccctacctgtgaaccttcaaagactgcattaacttttaggctacataggtccaattgaggtataatatcagtacaccaaagatttttatatgtccttcgtgtgaccattcttcaacggcctaagggccagctgcaaagacttttggaaaatacaatttacaactcaaaattatttaataatttaggaagttgctttttttttttttttttttcagtcctgcagtttcctgaagctctgtatatgatatttttttcagcctgcttctctctgttgttcagattaggtaattttattcttctgtctcgaagctcactgattctttattctgtctaatctgttctgctgttgagcccatttattcctgatttttatattttagttattgtatgttttatttctaaaatttccattcagtttttctttatatcttctatttgctgagaatttctgtctctttgctgagactttctacgttttcatttgtttcaagtgcatttatacttgcttgttgaagaatttttatgatggctgctgtaaaatccttatcagataattccaacatctgtcacctcattgtttgcatctactgatggtcttttttccattcggaaacattttcctgtttcttggtgtgtggaatgattttttattgaaacctggatatttttaggtaaaannaacanaaaanntctctttactcttaatttttttctcttatttttttttattttatataaaaaacctcggggggggggcccccgggcaccccaatttcggcccctattaggtgggggcggttaattaccaaattc

SEQ ID NO: 449079 - DNA, 4236 bp, Homo sapiens
atatactagtaggaaaatagggaaggacatgagctgacagctagagcttcataattttatgatgtagttcacctttaaatattaataaagcaattttcttctctgtgcctgatatctgagagttcttctcattttcgttcttcaggacagtttctctacggaagacttctccaactgtctgtaccaggactttagaattcctcttagtcctgtccataaatgttcattttataaaaataacaccaaagtgagttacgggttcctctccccaccacaactaaataaaaattcaagtggaatatattctgaagctttgcttactacaaatatagtgccaatgtaccagagttttcaagttatatggcgctactttcatgacaccctactgcgaaagtatgctgaagaaagaaatggtgtcaatgtcgtcagtggtcctgtgtttgactttgattatgatggacgttgtgattccttagagaatctgaggcaaaaaagaagagtcatccgtaaccaagaaattttgattccaactcacttctttattgtgctaacaagctgtaaagatacatctcagacgcctttgcactgtgaaaacctagacaccttagctttcattttgcctcacaggactgataacagcgagagctgtgtgcatgggaagcatgactcctcatgggttgaagaattgttaatgttacacagagcacggatcacagatgttgagcacatcactggactcagcttctatcaacaaagaaaagagccagtttcagacattttaaagttgaaaacacatttgccaacctttagccaagaagactgatatgttttttatccccaaacaccatgaatctttttgagagaaccttatattttatatagtcctctagctacactattgcattgttcagaaactgtcgaccagagttagaacggagccctcggtgatgcggacatctcagggaaacttgcgtactcagcacagcagtggagagtgttcctgttgaatcttgcacatatttgaatgtgtaagcattgtatacattgatcaagttcgggggaataaagacagaccacacctaaaactgcctttctgcttctcttaaaggagaagtagctgtgaacattgtctggataccagatatttgaatctttcttactattggtaataaaccttgatggcattgggcaaacagtagacttatagtagggttggggtagcccatgttatgtgactatctttatgagaattttaaagtggttctggatatcttttaacttggagtttcatttcttttcattgtaatcaaaaaaaaaattaacagaagccaaaatacttctgagaccttgtttcaatctttgctgtatatcccctcaaaatccaagttattaatcttatgtgttttctttttaattttttgattggatttctttagatttaatggttcaaatgagttcaactttgagggacgatctttgaatatacttacctattataaaatcttactttgtatttgtatttaaaaaagaaaaatattcctatcctgctcactggtaattaacataggtttaaaatggcttcaaatgtggccctatagacggttaaaattgtaccttatcttggcaaaacttcagagcaccagtcagtgcatgcaaggtgccattttttattgagatgcttagaatgtttctttctgtgcacaagacttaccctaccagcagcagagccattctctgttgagtggttcattttgaagttccacagattgaagagaacatgccaccaatcacctcacatcttcttggtggacatgataaatgacacaatgaacttgatttctttactaccttgactgtagctttttatccctacctgtgaaccttcaaagactgcattaacttttaggctacataggtccaattgaggtataatatcagtacaccaaagatttttatatgtccttcgtgtgaccattcttcaacggcctaagggccagctgcaaagacttttggaaaatacaatttacaactcaaaattatttaataatttaggaagttgctttttttttttttttttttcagtcctgcagtttcctgaagctctgtatatgatatttttttcagcctgcttctctctgttgttcagattaggtaattttattcttctgtctcgaagctcactgattctttattctgtctaatctgttctgctgttgagcccatttattcctgatttttatattttagttattgtatgttttatttctaaaatttccattcagtttttctttatatcttctatttgctgagaatttctgtctctttgctgagactttctacgttttcatttgtttcaagtgcatttatacttgcttgttgaagaatttttatgatggctgctgtaaaatccttatcagataattccaacatctgtcacctcattgtttgcatctactgatggtcttttttccattcggaaacattttcctgtttcttggtgtgtggaatgattttttattgaaacctggatatttttaggtattatgttatgagactatgggtcttatttaaaccttctgctttagccaactttctcagataccaccacagcaggggaattgggagcactgcttcattattaccaggtgtggctaggagtccaggttccccagtcagcctccctttatactgagtaacagggtcccctcattactactgggcaaggtgagaattcagtttcccattaggtctttattgattcttccctggctggaatgtgcagcggcaccttttggtgcaccctgggaatctccactaatgctatgggacagagtgaccaggaagagcttcattacaccaggtgggaatgaaattcccagtagcctacacagccttctccgacaccactctggagttgtattcttccagcacacaaacatacacaatttaactcaaagcatcttagcagagcttaattaaatggatagatgcctgttccctttgctggataccaagaatacaaaagtcagggagttggggcacctctttacagcttggtgagagtgtaagtctggactccccactcagcatttgctggtatgggtggggccatggtgtttttccatggtgtttggttggagtacagccttttttacccttgcttggctacccttttctggtcctttggcaggagagagcaggactctcttagggcttttttttcccctgcatttattgacatttccaggttgctgactttttcagctccaagttggaaatatatgagctgaaaagaaaatgtagggaactcatcacagtgttgttacttgggccccaatgttcctagcctattttctgtctactattcagagtcttgctgtgttttaatataatatccaggatttttatatgcatttagcagaaggatgtctactctgcctttgtagaagtgtctcactgatttttacatatttttccagcacacaaacatacacaatttaactcaaagcatcttagcagagcttaattaaatggatagatgtctgttccctttgctggacgccaagaatacaaaaaagaacaagtgacaattttctctgtcttagggagaagagacagcagaagtgtaaatgatccctaaagagtgatagatgttatcatgaagccacaggaggggtgccaggctgcacaaaagagacactggatgcttcttggtagtagaggcagtggcttcccagccttggggctaaggcttgtagggtgaattggaacttttcagatgagcaaggcaaagaagggaccttctaacattccttggatggaacatttttgacattttcccatttacagctacttatattttctacaagtgtcactgtgaccaacttatgtacacatactttttcttgcttagttataataatctgttcttaaagaaaatgtcagtctctacattctatgctgactgttaaggaaagagcacccacatctgctcctacttagctttttttctgtggttcttacacagtattcctttttttcttttcttgaaagagactcctcctttcttttcttttcttgaaagagttttaaacagataagatggcaaaagtgactgatctctactcccccagtttgaatggtaaatttgaatggtaaattcccatgaacatatatggaaatgtctttatcctactttctccaataaaggctgttcttagcttttcaaatgcaaaa

SEQ ID NO: 449080 - DNA, 1942 bp, Homo sapiens
agcggccggggccacgatggagcgcgacggctgcgcggggggcgggagccgcggcggcgagggcgggcgcgctccccgggagggcccggcggggaacggccgcgatcggggccgcagccacgctgccgaggcgcccggggacccgcaggcggccgcgtccttgctggcccctatggacgtgggggaggagccgctggagaaggcggcgcgcgcccgcactgccaaggaccccaacacctataaagtactctcgctggtattgtcagtatgtgtgttaacaacaatacttggttgtatatttgggttgaaaccaagctgtgccaaagaagttaaaagttgcaaaggtcgctgtttcgagagaacatttgggaactgtcgctgtgatgctgcctgtgttgagcttggaaactgctgtttagattaccaggagacgtgcatagaaccagaacatatatggacttgcaacaaattcaggtgtggtgagaaaaggttgaccagaagcctctgtgcctgttcagatgactgcaaggacaagggcgactgctgcatcaactacagttctgtgtgtcaaggtgagaaaagttgggtagaagaaccatgtgagagcattaatgagccacagtgcccagcagggtttgaaacgcctcctaccctcttattttctttggatggattcagggcagaatatttacacacttggggtggacttcttcctgttattagcaaactaaaaaaatgtggaacatatactaaaaacatgagaccggtatatccaacaaaaactttccccaatcactacagcattgtcaccggattgtatccagaatctcatggcataatcgacaataaaatgtatgatcccaaaatgaatgcttccttttcacttaaaagtaaagagaaatttaatcctgagtggtacaaaggagaaccaatttgggtcacagctaagtatcaaggcctcaagtctggcacatttttctggccaggatcagatgtggaaattaacggaattttcccagacatctataaaatgtataatggttcagtaccatttgaagaaaggattttagctgttcttcagtggctacagcttcctaaagatgaaagaccacacttttacactctgtatttagaagaaccagattcttcaggtcattcatatggaccagtcagcagtgaagtcatcaaagccttgcagagggttgatggtatggttggtatgctgatggatggtctgaaagagctgaacttgcacagatgcctgaacctcatccttatttcagatcatggcatggaacaaggcagttgtaagaaatacatatatctgaataaatatttgggggatgttaaaaatattaaagttatctatggacctgcagctcgattgagaccctctgatgtcccagataaatactattcatttaactatgaaggcattgcccgaaatctttcttgccgggaaccaaaccagcacttcaaaccttacctgaaacatttcttacctaagcgtttgcactttgctaagagtgatagaattgagcccttgacattctatttggaccctcagtggcaacttgcattgaatccctcagaaaggaaatattgtggaagtggatttcatggctctgacaatgtattttcaaatatgcaagccctctttgttggctatggacctggattcaagcatggcattgaggctgacacctttgaaaacattgaagtctataacttaatgtgtgatttactgaatttgacaccggctcctaataacggaactcatggaagtcttaaccaccttctaaagaatcctgtttatacgccaaagcatcccaaagaagtgcaccccctggtacagtgccccttcacaagaaaccccagagataactgggtggtcagttaccttcgaattgcggatggggtttcaccgttcttgctgggggtt

SEQ ID NO: 449081 - DNA, 6207 bp, Homo sapiens
agcggccggggccacgatggagcgcgacggctgcgcggggggcgggagccgcggcggcgagggcgggcgcgctccccgggagggcccggcggggaacggccgcgatcggggccgcagccacgctgccgaggcgcccggggacccgcaggcggccgcgtccttgctggcccctatggacgtgggggaggagccgctggagaaggcggcgcgcgcccgcactgccaaggaccccaacacctataaagtactctcgctggtattgtcagtatgtgtgttaacaacaatacttggttgtatatttgggttgaaaccaagctgtgccaaagaagttaaaagttgcaaaggtcgctgtttcgagagaacatttgggaactgtcgctgtgatgctgcctgtgttgagcttggaaactgctgtttagattaccaggagacgtgcatagaaccagaacatatatggacttgcaacaaattcaggtgtggtgagaaaaggttgaccagaagcctctgtgcctgttcagatgactgcaaggacaagggcgactgctgcatcaactacagttctgtgtgtcaaggtgagaaaagttgggtagaagaaccatgtgagagcattaatgagccacagtgcccagcagggtttgaaacgcctcctaccctcttattttctttggatggattcagggcagaatatttacacacttggggtggacttcttcctgttattagcaaactaaaaaaatgtggaacatatactaaaaacatgagaccggtatatccaacaaaaactttccccaatcactacagcattgtcaccggattgtatccagaatctcatggcataatcgacaataaaatgtatgatcccaaaatgaatgcttccttttcacttaaaagtaaagagaaatttaatcctgagtggtacaaaggagaaccaatttgggtcacagctaagtatcaaggcctcaagtctggcacatttttctggccaggatcagatgtggaaattaacggaattttcccagacatctataaaatgtataatggttcagtaccatttgaagaaaggattttagctgttcttcagtggctacagcttcctaaagatgaaagaccacacttttacactctgtatttagaagaaccagattcttcaggtcattcatatggaccagtcagcagtgaagtcatcaaagccttgcagagggttgatggtatggttggtatgctgatggatggtctgaaagagctgaacttgcacagatgcctgaacctcatccttatttcagatcatggcatggaacaaggcagttgtaagaaatacatatatctgaataaatatttgggggatgttaaaaatattaaagttatctatggacctgcagctcgattgagaccctctgatgtcccagataaatactattcatttaactatgaaggcattgcccgaaatctttcttgccgggaaccaaaccagcacttcaaaccttacctgaaacatttcttacctaagcgtttgcactttgctaagagtgatagaattgagcccttgacattctatttggaccctcagtggcaacttgcattgaatccctcagaaaggaaatattgtggaagtggatttcatggctctgacaatgtattttcaaatatgcaagccctctttgttggctatggacctggattcaagcatggcattgaggctgacacctttgaaaacattgaagtctataacttaatgtgtgatttactgaatttgacaccggctcctaataacggaactcatggaagtcttaaccaccttctaaagaatcctgtttatacgccaaagcatcccaaagaagtgcaccccctggtacagtgccccttcacaagaaaccccagagataaccttggctgctcatgtaacccttcgattttgccgattgaggattttcaaacacagttcaatctgactgtggcagaagagaagattattaagcatgaaactttaccctatggaagacctagagttctccagaaggaaaacaccatctgtcttctttcccagcaccagtttatgagtggatacagccaagacatcttaatgcccctttggacatcctataccgtggacagaaatgacagtttctctacggaagacttctccaactgtctgtaccaggactttagaattcctcttagtcctgtccataaatgttcattttataaaaataacaccaaagtgagttacgggttcctctccccaccacaactaaataaaaattcaagtggaatatattctgaagctttgcttactacaaatatagtgccaatgtaccagagttttcaagttatatggcgctactttcatgacaccctactgcgaaagtatgctgaagaaagaaatggtgtcaatgtcgtcagtggtcctgtgtttgactttgattatgatggacgttgtgattccttagagaatctgaggcaaaaaagaagagtcatccgtaaccaagaaattttgattccaactcacttctttattgtgctaacaagctgtaaagatacatctcagacgcctttgcactgtgaaaacctagacaccttagctttcattttgcctcacaggactgataacagcgagagctgtgtgcatgggaagcatgactcctcatgggttgaagaattgttaatgttacacagagcacggatcacagatgttgagcacatcactggactcagcttctatcaacaaagaaaagagccagtttcagacattttaaagttgaaaacacatttgccaacctttagccaagaagactgatatgttttttatccccaaacaccatgaatctttttgagagaaccttatattttatatagtcctctagctacactattgcattgttcagaaactgtcgaccagagttagaacggagccctcggtgatgcggacatctcagggaaacttgcgtactcagcacagcagtggagagtgttcctgttgaatcttgcacatatttgaatgtgtaagcattgtatacattgatcaagttcgggggaataaagacagaccacacctaaaactgcctttctgcttctcttaaaggagaagtagctgtgaacattgtctggataccagatatttgaatctttcttactattggtaataaaccttgatggcattgggcaaacagtagacttatagtagggttggggtagcccatgttatgtgactatctttatgagaattttaaagtggttctggatatcttttaacttggagtttcatttcttttcattgtaatcaaaaaaaaaattaacagaagccaaaatacttctgagaccttgtttcaatctttgctgtatatcccctcaaaatccaagttattaatcttatgtgttttctttttaattttttgattggatttctttagatttaatggttcaaatgagttcaactttgagggacgatctttgaatatacttacctattataaaatcttactttgtatttgtatttaaaaaagaaaaatattcctatcctgctcactggtaattaacataggtttaaaatggcttcaaatgtggccctatagacggttaaaattgtaccttatcttggcaaaacttcagagcaccagtcagtgcatgcaaggtgccattttttattgagatgcttagaatgtttctttctgtgcacaagacttaccctaccagcagcagagccattctctgttgagtggttcattttgaagttccacagattgaagagaacatgccaccaatcacctcacatcttcttggtggacatgataaatgacacaatgaacttgatttctttactaccttgactgtagctttttatccctacctgtgaaccttcaaagactgcattaacttttaggctacataggtccaattgaggtataatatcagtacaccaaagatttttatatgtccttcgtgtgaccattcttcaacggcctaagggccagctgcaaagacttttggaaaatacaatttacaactcaaaattatttaataatttaggaagttgctttttttttttttttttttcagtcctgcagtttcctgaagctctgtatatgatatttttttcagcctgcttctctctgttgttcagattaggtaattttattcttctgtctcgaagctcactgattctttattctgtctaatctgttctgctgttgagcccatttattcctgatttttatattttagttattgtatgttttatttctaaaatttccattcagtttttctttatatcttctatttgctgagaatttctgtctctttgctgagactttctacgttttcatttgtttcaagtgcatttatacttgcttgttgaagaatttttatgatggctgctgtaaaatccttatcagataattccaacatctgtcacctcattgtttgcatctactgatggtcttttttccattcggaaacattttcctgtttcttggtgtgtggaatgattttttattgaaacctggatatttttaggtattatgttatgagactatgggtcttatttaaaccttctgctttagccaactttctcagataccaccacagcaggggaattgggagcactgcttcattattaccaggtgtggctaggagtccaggttccccagtcagcctccctttatactgagtaacagggtcccctcattactactgggcaaggtgagaattcagtttcccattaggtctttattgattcttccctggctggaatgtgcagcggcaccttttggtgcaccctgggaatctccactaatgctatgggacagagtgaccaggaagagcttcattacaccaggtgggaatgaaattcccagtagcctacacagccttctccgacaccactctggagttgtattcttccagcacacaaacatacacaatttaactcaaagcatcttagcagagcttaattaaatggatagatgcctgttccctttgctggataccaagaatacaaaagtcagggagttggggcacctctttacagcttggtgagagtgtaagtctggactccccactcagcatttgctggtatgggtggggccatggtgtttttccatggtgtttggttggagtacagccttttttacccttgcttggctacccttttctggtcctttggcaggagagagcaggactctcttagggcttttttttcccctgcatttattgacatttccaggttgctgactttttcagctccaagttggaaatatatgagctgaaaagaaaatgtagggaactcatcacagtgttgttacttgggccccaatgttcctagcctattttctgtctactattcagagtcttgctgtgttttaatataatatccaggatttttatatgcatttagcagaaggatgtctactctgcctttgtagaagtgtctcactgatttttacatatttttccagcacacaaacatacacaatttaactcaaagcatcttagcagagcttaattaaatggatagatgtctgttccctttgctggacgccaagaatacaaaaaagaacaagtgacaattttctctgtcttagggagaagagacagcagaagtgtaaatgatccctaaagagtgatagatgttatcatgaagccacaggaggggtgccaggctgcacaaaagagacactggatgcttcttggtagtagaggcagtggcttcccagccttggggctaaggcttgtagggtgaattggaacttttcagatgagcaaggcaaagaagggaccttctaacattccttggatggaacatttttgacattttcccatttacagctacttatattttctacaagtgtcactgtgaccaacttatgtacacatactttttcttgcttagttataataatctgttcttaaagaaaatgtcagtctctacattctatgctgactgttaaggaaagagcacccacatctgctcctacttagctttttttctgtggttcttacacagtattcctttttttcttttcttgaaagagactcctcctttcttttcttttcttgaaagagttttaaacagataagatggcaaaagtgactgatctctactcccccagtttgaatggtaaatttgaatggtaaattcccatgaacatatatggaaatgtctttatcctactttctccaataaaggctgttcttagcttttcaaatgcaaaa

SEQ ID NO: 449082 - DNA, 6151 bp, Homo sapiens
agcggccggggccacgatggagcgcgacggctgcgcggggggcgggagccgcggcggcgagggcgggcgcgctccccgggagggcccggcggggaacggccgcgatcggggccgcagccacgctgccgaggcgcccggggacccgcaggcggccgcgtccttgctggcccctatggacgtgggggaggagccgctggagaaggcggcgcgcgcccgcactgccaaggaccccaacacctataaagtactctcgctggtattgtcagtatgtgtgttaacaacaatacttggttgtatatttgggttgaaaccaagctgtgccaaagaagttaaaagttgcaaaggtcgctgtttcgagagaacatttgggaactgtcgctgtgatgctgcctgtgttgagcttggaaactgctgtttagattaccaggagacgtgcatagaaccagaacatatatggacttgcaacaaattcaggtgtggtgagaaaaggttgaccagaagcctctgtgcctgttcagatgactgcaaggacaagggcgactgctgcatcaactacagttctgtgtgtcaaggtgagaaaagttgggtagaagaaccatgtgagagcattaatgagccacagtgcccagcagggtttgaaacgcctcctaccctcttattttctttggatggattcagggcagaatatttacacacttggggtggacttcttcctgttattagcaaactaaaaaaatgtggaacatatactaaaaacatgagaccggtatatccaacaaaaactttccccaatcactacagcattgtcaccggattgtatccagaatctcatggcataatcgacaataaaatgtatgatcccaaaatgaatgcttccttttcacttaaaagtaaagagaaatttaatcctgagtggtacaaaggagaaccaatttgggtcacagctaagtatcaaggcctcaagtctggcacatttttctggccaggatcagatgtggaaattaacggaattttcccagacatctataaaatgtataatggttcagtaccatttgaagaaaggattttagctgttcttcagtggctacagcttcctaaagatgaaagaccacacttttacactctgtatttagaagaaccagattcttcaggtcattcatatggaccagtcagcagtgaagtcatcaaagccttgcagagggttgatggtatggttggtatgctgatggatggtctgaaagagctgaacttgcacagatgcctgaacctcatccttatttcagatcatggcatggaacaaggcagttgtaagaaatacatatatctgaataaatatttgggggatgttaaaaatattaaagttatttaactatgaaggcattgcccgaaatctttcttgccgggaaccaaaccagcacttcaaaccttacctgaaacatttcttacctaagcgtttgcactttgctaagagtgatagaattgagcccttgacattctatttggaccctcagtggcaacttgcattgaatccctcagaaaggaaatattgtggaagtggatttcatggctctgacaatgtattttcaaatatgcaagccctctttgttggctatggacctggattcaagcatggcattgaggctgacacctttgaaaacattgaagtctataacttaatgtgtgatttactgaatttgacaccggctcctaataacggaactcatggaagtcttaaccaccttctaaagaatcctgtttatacgccaaagcatcccaaagaagtgcaccccctggtacagtgccccttcacaagaaaccccagagataaccttggctgctcatgtaacccttcgattttgccgattgaggattttcaaacacagttcaatctgactgtggcagaagagaagattattaagcatgaaactttaccctatggaagacctagagttctccagaaggaaaacaccatctgtcttctttcccagcaccagtttatgagtggatacagccaagacatcttaatgcccctttggacatcctataccgtggacagaaatgacagtttctctacggaagacttctccaactgtctgtaccaggactttagaattcctcttagtcctgtccataaatgttcattttataaaaataacaccaaagtgagttacgggttcctctccccaccacaactaaataaaaattcaagtggaatatattctgaagctttgcttactacaaatatagtgccaatgtaccagagttttcaagttatatggcgctactttcatgacaccctactgcgaaagtatgctgaagaaagaaatggtgtcaatgtcgtcagtggtcctgtgtttgactttgattatgatggacgttgtgattccttagagaatctgaggcaaaaaagaagagtcatccgtaaccaagaaattttgattccaactcacttctttattgtgctaacaagctgtaaagatacatctcagacgcctttgcactgtgaaaacctagacaccttagctttcattttgcctcacaggactgataacagcgagagctgtgtgcatgggaagcatgactcctcatgggttgaagaattgttaatgttacacagagcacggatcacagatgttgagcacatcactggactcagcttctatcaacaaagaaaagagccagtttcagacattttaaagttgaaaacacatttgccaacctttagccaagaagactgatatgttttttatccccaaacaccatgaatctttttgagagaaccttatattttatatagtcctctagctacactattgcattgttcagaaactgtcgaccagagttagaacggagccctcggtgatgcggacatctcagggaaacttgcgtactcagcacagcagtggagagtgttcctgttgaatcttgcacatatttgaatgtgtaagcattgtatacattgatcaagttcgggggaataaagacagaccacacctaaaactgcctttctgcttctcttaaaggagaagtagctgtgaacattgtctggataccagatatttgaatctttcttactattggtaataaaccttgatggcattgggcaaacagtagacttatagtagggttggggtagcccatgttatgtgactatctttatgagaattttaaagtggttctggatatcttttaacttggagtttcatttcttttcattgtaatcaaaaaaaaaattaacagaagccaaaatacttctgagaccttgtttcaatctttgctgtatatcccctcaaaatccaagttattaatcttatgtgttttctttttaattttttgattggatttctttagatttaatggttcaaatgagttcaactttgagggacgatctttgaatatacttacctattataaaatcttactttgtatttgtatttaaaaaagaaaaatattcctatcctgctcactggtaattaacataggtttaaaatggcttcaaatgtggccctatagacggttaaaattgtaccttatcttggcaaaacttcagagcaccagtcagtgcatgcaaggtgccattttttattgagatgcttagaatgtttctttctgtgcacaagacttaccctaccagcagcagagccattctctgttgagtggttcattttgaagttccacagattgaagagaacatgccaccaatcacctcacatcttcttggtggacatgataaatgacacaatgaacttgatttctttactaccttgactgtagctttttatccctacctgtgaaccttcaaagactgcattaacttttaggctacataggtccaattgaggtataatatcagtacaccaaagatttttatatgtccttcgtgtgaccattcttcaacggcctaagggccagctgcaaagacttttggaaaatacaatttacaactcaaaattatttaataatttaggaagttgctttttttttttttttttttcagtcctgcagtttcctgaagctctgtatatgatatttttttcagcctgcttctctctgttgttcagattaggtaattttattcttctgtctcgaagctcactgattctttattctgtctaatctgttctgctgttgagcccatttattcctgatttttatattttagttattgtatgttttatttctaaaatttccattcagtttttctttatatcttctatttgctgagaatttctgtctctttgctgagactttctacgttttcatttgtttcaagtgcatttatacttgcttgttgaagaatttttatgatggctgctgtaaaatccttatcagataattccaacatctgtcacctcattgtttgcatctactgatggtcttttttccattcggaaacattttcctgtttcttggtgtgtggaatgattttttattgaaacctggatatttttaggtattatgttatgagactatgggtcttatttaaaccttctgctttagccaactttctcagataccaccacagcaggggaattgggagcactgcttcattattaccaggtgtggctaggagtccaggttccccagtcagcctccctttatactgagtaacagggtcccctcattactactgggcaaggtgagaattcagtttcccattaggtctttattgattcttccctggctggaatgtgcagcggcaccttttggtgcaccctgggaatctccactaatgctatgggacagagtgaccaggaagagcttcattacaccaggtgggaatgaaattcccagtagcctacacagccttctccgacaccactctggagttgtattcttccagcacacaaacatacacaatttaactcaaagcatcttagcagagcttaattaaatggatagatgcctgttccctttgctggataccaagaatacaaaagtcagggagttggggcacctctttacagcttggtgagagtgtaagtctggactccccactcagcatttgctggtatgggtggggccatggtgtttttccatggtgtttggttggagtacagccttttttacccttgcttggctacccttttctggtcctttggcaggagagagcaggactctcttagggcttttttttcccctgcatttattgacatttccaggttgctgactttttcagctccaagttggaaatatatgagctgaaaagaaaatgtagggaactcatcacagtgttgttacttgggccccaatgttcctagcctattttctgtctactattcagagtcttgctgtgttttaatataatatccaggatttttatatgcatttagcagaaggatgtctactctgcctttgtagaagtgtctcactgatttttacatatttttccagcacacaaacatacacaatttaactcaaagcatcttagcagagcttaattaaatggatagatgtctgttccctttgctggacgccaagaatacaaaaaagaacaagtgacaattttctctgtcttagggagaagagacagcagaagtgtaaatgatccctaaagagtgatagatgttatcatgaagccacaggaggggtgccaggctgcacaaaagagacactggatgcttcttggtagtagaggcagtggcttcccagccttggggctaaggcttgtagggtgaattggaacttttcagatgagcaaggcaaagaagggaccttctaacattccttggatggaacatttttgacattttcccatttacagctacttatattttctacaagtgtcactgtgaccaacttatgtacacatactttttcttgcttagttataataatctgttcttaaagaaaatgtcagtctctacattctatgctgactgttaaggaaagagcacccacatctgctcctacttagctttttttctgtggttcttacacagtattcctttttttcttttcttgaaagagactcctcctttcttttcttttcttgaaagagttttaaacagataagatggcaaaagtgactgatctctactcccccagtttgaatggtaaatttgaatggtaaattcccatgaacatatatggaaatgtctttatcctactttctccaataaaggctgttcttagcttttcaaatgcaaaa

SEQ ID NO: 449083 - DNA, 1478 bp, Homo sapiens
agcggccggggccacgatggagcgcgacggctgcgcggggggcgggagccgcggcggcgagggcgggcgcgctccccgggagggcccggcggggaacggccgcgatcggggccgcagccacgctgccgaggcgcccggggacccgcaggcggccgcgtccttgctggcccctatggacgtgggggaggagccgctggagaaggcggcgcgcgcccgcactgccaaggaccccaacacctataaagtactctcgctggtattgtcagtatgtgtgttaacaacaatacttggttgtatatttgggttgaaaccaagctgtgccaaagaagttaaaagttgcaaaggtcgctgtttcgagagaacatttgggaactgtcgctgtgatgctgcctgtgttgagcttggaaactgctgtttagattaccaggagacgtgcatagaaccagaacatatatggacttgcaacaaattcaggtgtggtgagaaaaggttgaccagaagcctctgtgcctgttcagatgactgcaaggacaagggcgactgctgcatcaactacagttctgtgtgtcaaggtgagaaaagttgggtagaagaaccatgtgagagcattaatgagccacagtgcccagcagggtttgaaacgcctcctaccctcttattttctttggatggattcagggcagaatatttacacacttggggtggacttcttcctgttattagcaaactaaaaaaatgtggaacatatactaaaaacatgagaccggtatatccaacaaaaactttccccaatcactacagcattgtcaccggattgtatccagaatctcatggcataatcgacaataaaatgtatgatcccaaaatgaatgcttccttttcacttaaaagtaaagagaaatttaatcctgagtggtacaaaggagaaccaatttgggtcacagctaagtatcaaggcctcaagtctggcacatttttctggccaggatcagatgtggaaattaacggaattttcccagacatctataaaatgtataatggttcagtaccatttgaagaaaggattttagctgttcttcagtggctacagcttcctaaagatgaaagaccacacttttacactctgtatttagaagaaccagattcttcaggtcattcatatggaccagtcagcagtgaagtcatcaaagccttgcagagggttgatggtatggttggtatgctgatggatggtctgaaagagctgaacttgcacagatgcctgaacctcatccttatttcagatcatggcatggaacaaggcagttgtaagaaatacatatatctgaataaatatttgggggatgttaaaaatattaaagttatctatggacctgcagctcgattgagaccctctgatgtcccagataaatactattcatgaaggcattgcccgaaatctttcagcaaggacaccacggggtcacgagctcgcaatc

SEQ ID NO: 449084 - DNA, 679 bp, Homo sapiens
gagatttgtcacagtttggaagcagtctattccatcaactagccaaaaatgcaaacaccctgaggattcagagaacaatttctttgaagggtttccttcaagatactggctcccagctttcttctttccacaagcctttcttgctgctgtgcttcaagactatgggaggtcccgaggaatcgctgtggatgccctcaccttcacccaccatgtgatttccaacaccactgacaaggatgagaagttctccgtatttatgccaaagaaactcaacatagtcaggagagcgtttaagggctcagcttcctctcacactggagtttacatttttggtttattcatcgagggggcaagatggaatcgtgaacagaaaatactggaagactcgctgcctctggagatgtgctgtgattttcccgacatatactttttgccaacaaagatttctaccaaaacaccaaatgcttccaaccagacagattcagaactctatgcttttgaatgcccagtttaccagacacctgagaggtcaagaattttggcaactaccggtttaccaacaaactttttaacatcagtgtatttatcaacgaagaaacctcctagtcactggatcacaatgcgggttgcattgctttgtgagaagaatgaaaaataaatgtccatatcaaaccatttt

SEQ ID NO: 449085 - DNA, 679 bp, Homo sapiens
gagatttgtcacagtttggaagcagtctattccatcaactagccaaaaatgcaaacaccctgaggattcagagaacaatttctttgaagggtttccttcaagatactggctcccagctttcttctttccacaagcctttcttgctgctgtgcttcaagactatgggaggtcccgaggaatcgctgtggatgccctcaccttcacccaccatgtgatttccaacaccactgacaaggatgagaagttctccgtatttatgccaaagaaactcaacatagtcaggagagcgtttaagggctcagcttcctctcacactggagtttacatttttggtttattcatcgagggggcaagatggaatcgtgaacagaaaatactggaagactcgctgcctctggagatgtgctgtgattttcccgacatatactttttgccaacaaagatttctaccaaaacaccaaatgcttccaaccagacagattcagaactctatgcttttgaatgcccagtttcctctcccccctcactctttttttttttttttttctccctcccacccctcccccaccctcctcccctcttttttccaactaataaacctcctagtcactggatcacaatgcgggttgcattgctttgtgagaagaatgaaaaataaatgtccatatcaaaccatttt

SEQ ID NO: 449086 - DNA, 897 bp, Homo sapiens
gagatttgtcacagtttggaagcagtctattccatcaactagccaaaaatgcaaacaccctgaggattcagagaacaatttctttgaagggtttccttcaagatactggctcccagctttcttctttccacaagcctttcttgctgctgtgcttcaagactatgggaggtcccgaggaatcgctgtggatgccctcaccttcacccaccatgtgatttccaacaccactgacaaggatgagaagttctccgtatttatgccaaagaaactcaacatagtcaggagagcgtttaagggctcagcttcctctcacactggagtttacatttttggtttattcatcgagggggcaagatggaatcgtgaacagaaaatactggaagactcgctgcctctggagatgtgctgtgattttcccgacatatactttttgccaacaaagatttctaccaaaacaccaaatgcttccaaccagacagattcagaactctatgcttttgaatgcccagtttaccagacacctgagaggtcaagaattttggcaactaccggtttaccaacaaactttttaacatcagtgtatttatcaacgaagaaacctcctagtcactggatcacaatgcgggttgcattgctttgtgagaagaatgaaaaataaatgtccatatcaaaccattttaatttttgactctaatcagacttacatgtttcaagacattcacatgtagtcaacaccctttataaaatatttgtgtgttcagccagactgggcaggtgcagtctatttcatttgtacatgaaaacttcaacacagaggggaatcttgcagctgctttttattctaagtacatgagacctgactgtgcaatgtccctgtggttgggctctagtacaggt

SEQ ID NO: 449087 - DNA, 5090 bp, Homo sapiens
gcctgcgccgcgcagcccgcctcgggcgggaggcgggaggcgggaggccgggcccaggccggggcagcccctccaccgcaccgtcctgggccggtgcccaggtccgagtcgccttccgcctgccccccccgccaatcccccgccgcggcagccccagccaggtcccgccgccaggccggctcccgcccccgctccgcccccggagccgcagccccgcccgccatcgccgtcgccatgttgtggctcccgcagccggcgctggggacgcgcgcggccgagactctggcctgcagtcgccgccgccgccgccaggtggtgtttggactctagaccatgtgcctaggtagaagtttttcctttctccgcagctctgctcccctagcaacgctcgccacacccttgttttgagatcctctctaaggagcggagagtttaataggcaagaaggaagggagaagacagaaggaagacgctcccccgtacggagacagagggagggggggctccaaagccgaaagaggaggtccctacctgccacggataccagtcagcccttgccagcatccagccatgggggatatgaaaaccccagattttgatgaccttctggctgcctttgacatcccagaccccaccagccttgatgccaaggaggccatccagacacccagtgaggagaatgagagtcccctcaaacctccaggcatatgtatggatgaaagtgtgtccttgtctcactcaggatcagcccccgatgtgccggccgtgagtgtcattgtcaagaacaccagccgccaggagtcatttgaagcggagaaagaccacattactcccagtctcctacacaatggattccggggctcagatctgcctccagatccccacaactgtgggaaatttgattctacttttatgaatggagacagtgccaggagtttccctggcaaactggagcctcccaagtcagagccattacccaccttcaaccagttcagtccaatctccagcccagaacctgaggatcccatcaaagataacggatttgggataaagcccaaacactctgacagttatttcccaccccctcttgggtgcggggctgtgggaggcccagtcctggaggctctggctaagtttccggttccagagctgcatatgtttgatcatttttgtaagaaagaacccaagccagaacccctgcccttggggagccagcaggaacacgagcaaagtgggcagaacacagtggaacctcacaaggatccggatgccactcgattcttcggggaagctttggagttcaacagccatcctagcaacagtattggagagtccaaggggcttgcccgggagcttggtacctgctcatcagtcccccctaggcagcgtctaaagccagctcattccaagctgtcctcttgtgtggcagccttggtggccttgcaggccaaaagagtggctagtgtcactaaggaggatcagcctggccacacaaaggatctctcagggcccactaaagagagttctaaaggtagccccaaaatgcccaagtcaccaaagagtccccggagccctctggaggccactagaaaaagtatcaagccatcggacagccctcgtagcatctgcagtgacagcagcagcaaaggctcaccgtctgtggctgccagctccccaccagcaattcccaaagtgagaatcaaaaccattaagacatcatcaggggaaatcaaacggactgtcacaaggatcctgccagatcctgatgatccaagtaagtcccctgttgggtcacctctagggagcgccattgcagaggcccccagcgagatgccaggggatgaggtgcctgtggaagagcactttcctgaggcaggcacaaattcagggagcccccagggggccaggaaaggggacgagagcatgacaaaggccagtgactcgtcatctcccagctgcagttctgggccccgggtcccaaagggggctgccccaggctcacagacaggcaagaagcaacagagcacagcactgcaggcatccaccctggcccctgccaacctcctgcccaaagccgtgcacttggccaacctgaacctcgtcccccacagtgttgctgcatcagtgacagccaagtcttcagtgcaaagacggagccagccacagcttacacaaatgtcggtgcccctggtccaccaggtgaaaaaggctgccccactgattgtagaggtcttcaacaaggtccttcacagctccaaccccgtgcccctctatgcgccaaatctcagcccgcctgcggacagcaggatccacgtgccggccagtgggtactgctgcctggagtgtggagacgcatttgccttagagaagagcctgagccagcactatggccggcggagcgtccacattgaggtactgtgcacactgtgctccaagacgctgctcttcttcaacaagtgcagcctgctccggcacgcccgtgaccacaagagcaaggggctcgtcatgcagtgttcccagctgctggtgaagcctatctctgcggaccaaatgttcgtgtcggcccctgtgaactccacggcaccagcagccccagccccttcatcctctcccaaacatggcctcacttcgggcagtgccagtccccctcctccagccttgccactctacccagaccctgtgaggctcatccggtactcaatcaagtgtcttgaatgtcacaagcagatgcgggactacatggtcctggctgcacatttccagaggacaacagaggagacagaggggctgacctgccaggtatgccagatgctgctgcccaaccagtgcagtttctgtgcccaccagcggattcatgcacacaagtccccctactgctgcccggagtgtggggtcctctgccgctctgcctacttccagacccatgtaaaggagaattgcctgcactatgcccgcaaggtgggctacaggtgcatccactgtggtgtcgtccacctgaccttggccttgctgaaaagccacatccaggagcgacactgccaggttttccacaaatgtgcattctgccccatggccttcaagactgccagcagcactgcagaccacagtgccacccagcaccccacccagccccacagaccctcccagctcatttataagtgctcctgtgaaatggtcttcaacaagaagaggcacattcagcagcatttttaccagaatgtcagcaagacgcaggtgggcgtcttcaagtgccctgagtgcccactcttgttcgtgcagaagccggagttgatgcaacacgtcaagagcacccacggtgttccccgaaatgtggacgagctgtcaagcctccagtcttcagcggacacatcctcaagccgccctggctctcgagttcccactgagccaccagccactagtgtggctgctcggagcagctccctgccttctggccgctggggtaggcctgaagcccaccgcagggtggaagccaggccgcggctgaggaacactggctggacctgccaggagtgccaggagtgggttccagatcgggagagctacgtgtcccacatgaaaaagagccacggtcggacattgaagcggtacccatgccggcagtgtgaacagtccttccacacccccaacagcctgcgcaaacacatccgcaacaaccatgacacagtaaagaagttctacacctgcgggtactgcacagaggacagccccagctttcctcggccctcccttctggagagccacatcagccttatgcatggcatcagaaaccctgatttgagccagacgtccaaagtgaaacctccgggtggacattcccctcaggtgaaccatctgaaaagaccagtcagtggagtgggggacgctccaggcaccagcaatggcgcaactgtctcttccaccaaaaggcacaagtccctttttcagtgcgcgaaatgtagttttgccacagactcggggctcgagtttcagagccacatacctcagcaccaggtggacagctccacagcccaatgtctcctctgtggtttgtgctacacctctgccagctccctcagccgccacctcttcattgtccacaaggtgagagaccaggaggaggaggaggaagaggaggcggcggcagcggagatggcagtggaggtggcagagccagaggagggctccggggaggaggtgcccatggagactagagagaatggactggaagaatgtgccggtgagcctttgtcagctgacccagaggcgaggagattgctgggcccggcccctgaggacgatggtggccacaatgatcacagtcaaccacaggcctctcaggaccaggacagccacacactgtcccctcaggtgtgaccggagactttgcagtgtgcatggtcaggggtggtgccgaagtgtcttccacctgccctgcggaccgtggaaaataaaaggctctgcccccagtgtgagtgtgaccggttgtaccctggagtagtgtctgccctgagctgccagtgctgggtatcccccagccccaggaaatgtggggtcggccaggaccctcacagctctgaatttgcttctgttatttatggcttttcgctgcttcttggtgccccatctcttgtctgtgtccttccaaccccaagctgcttatgtggcccaaccccactgctgtcaactaggcttgaaccccacagcggctgtgctcttctgggaggttcccgcttgctgccttcagccagggcgctcctcagagctctattttcctgcagacaccagctctccttcctgcctttagatcctgagaaggagggaaatgaggggtgctgacacagtccctctgggagagctctgcctagtctggtttggcgagggcccttgatcaccttgcccctcctccctgtcttctctgattcttttccctcaaaatagtcctgagaactaattgtcacaagacattggaatatttgtactgctctcgtgccatttgagaggctgctgccccaggcaggccagcccctactcctcttggctacactcatgttgctcagactatatttcaaataaaaaatcttctcaccatg

SEQ ID NO: 449088 - DNA, 5279 bp, Homo sapiens
gcctgcgccgcgcagcccgcctcgggcgggaggcgggaggcgggaggccgggcccaggccggggcagcccctccaccgcaccgtcctgggccggtgcccaggtccgagtcgccttccgcctgccccccccgccaatcccccgccgcggcagccccagccaggtcccgccgccaggccggctcccgcccccgctccgcccccggagccgcagccccgcccgccatcgccgtcgccatgttgtggctcccgcagccggcgctggggacgcgcgcggccgagactctggcctgcagtcgccgccgccgccgccaggtggtgtttggactctagaccatgtgcctaggtagaagtttttcctttctccgcagctctgctcccctagcaacgctcgccacacccttgttttgagatcctctctaaggagcggagagtttaataggcaagaaggaagggagaagacagaaggaagacgctcccccgtacggagacagagggagggggggctccaaagccgaaagaggaggtccctacctgccacggataccagtcagcccttgccagcatccagccatgggggatatgaaaaccccagattttgatgaccttctggctgcctttgacatcccagaccccaccagccttgatgccaaggaggccatccagacacccagtgaggagaatgagagtcccctcaaacctccaggcatatgtatggatgaaagtgtgtccttgtctcactcaggatcagcccccgatgtgccggccgtgagtgtcattgtcaagaacaccagccgccaggagtcatttgaagcggagaaagaccacattactcccagtctcctacacaatggattccggggctcagatctgcctccagatccccacaactgtgggaaatttgattctacttttatgaatggagacagtgccaggagtttccctggcaaactggagcctcccaagtcagagccattacccaccttcaaccagttcagtccaatctccagcccagaacctgaggatcccatcaaagataacggatttgggataaagcccaaacactctgacagttatttcccaccccctcttgggtgcggggctgtgggaggcccagtcctggaggctctggctaagtttccggttccagagctgcatatgtttgatcatttttgtaagaaagaacccaagccagaacccctgcccttggggagccagcaggaacacgagcaaagtgggcagaacacagtggaacctcacaaggatccggatgccactcgattcttcggggaagctttggagttcaacagccatcctagcaacagtattggagagtccaaggggcttgcccgggagcttggtacctgctcatcagtcccccctaggcagcgtctaaagccagctcattccaagctgtcctcttgtgtggcagccttggtggccttgcaggccaaaagagtggctagtgtcactaaggaggatcagcctggccacacaaaggatctctcagggcccactaaagagagttctaaaggtagccccaaaatgcccaagtcaccaaagagtccccggagccctctggaggccactagaaaaagtatcaagccatcggacagccctcgtagcatctgcagtgacagcagcagcaaaggctcaccgtctgtggctgccagctccccaccagcaattcccaaagtgagaatcaaaaccattaagacatcatcaggggaaatcaaacggactgtcacaaggatcctgccagatcctgatgatccaagtaagtcccctgttgggtcacctctagggagcgccattgcagaggcccccagcgagatgccaggggatgaggtgcctgtggaagagcactttcctgaggcaggcacaaattcagggagcccccagggggccaggaaaggggacgagagcatgacaaaggccagtgactcgtcatctcccagctgcagttctgggccccgggtcccaaagggggctgccccaggctcacagacaggcaagaagcaacagagcacagcactgcaggcatccaccctggcccctgccaacctcctgcccaaagccgtgcacttggccaacctgaacctcgtcccccacagtgttgctgcatcagtgacagccaagtcttcagtgcaaagacggagccagccacagcttacacaaatgtcggtgcccctggtccaccaggtgaaaaaggctgccccactgattgtagaggtcttcaacaaggtccttcacagctccaaccccgtgcccctctatgcgccaaatctcagcccgcctgcggacagcaggatccacgtgccggccagtgggtactgctgcctggagtgtggagacgcatttgccttagagaagagcctgagccagcactatggccggcggagcgtccacattgaggtactgtgcacactgtgctccaagacgctgctcttcttcaacaagtgcagcctgctccggcacgcccgtgaccacaagagcaaggggctcgtcatgcagtgttcccagctgctggtgaagcctatctctgcggaccaaatgttcgtgtcggcccctgtgaactccacggcaccagcagccccagccccttcatcctctcccaaacatggcctcacttcgggcagtgccagtccccctcctccagccttgccactctacccagaccctgtgaggctcatccggtactcaatcaagtgtcttgaatgtcacaagcagatgcgggactacatggtcctggctgcacatttccagaggacaacagaggagacagaggggctgacctgccaggtatgccagatgctgctgcccaaccagtgcagtttctgtgcccaccagcggattcatgcacacaagtccccctactgctgcccggagtgtggggtcctctgccgctctgcctacttccagacccatgtaaaggagaattgcctgcactatgcccgcaaggtgggctacaggtgcatccactgtggtgtcgtccacctgaccttggccttgctgaaaagccacatccaggagcgacactgccaggttttccacaaatgtgcattctgccccatggccttcaagactgccagcagcactgcagaccacagtgccacccagcaccccacccagccccacagaccctcccagctcatttataagtgctcctgtgaaatggtcttcaacaagaagaggcacattcagcagcatttttaccagaatgtcagcaagacgcaggtgggcgtcttcaagtgccctgagtgcccactcttgttcgtgcagaagccggagttgatgcaacacgtcaagagcacccacggtgttccccgaaatgtggacgagctgtcaagcctccagtcttcagcggacacatcctcaagccgccctggctctcgagttcccactgagccaccagccactagtgtggctgctcggagcagctccctgccttctggccgctggggtaggcctgaagcccaccgcagggtggaagccaggccgcggctgaggaacactggctggacctgccaggagtgccaggagtgggttccagatcgggagagctacgtgtcccacatgaaaaagagccacggtcggacattgaagcggtacccatgccggcagtgtgaacagtccttccacacccccaacagcctgcgcaaacacatccgcaacaaccatgacacagtaaagaagttctacacctgcgggtactgcacagaggacagccccagctttcctcggccctcccttctggagagccacatcagccttatgcatggcatcagaaaccctgatttgagccagacgtccaaagtgaaacctccgggtggacattcccctcaggtgaaccatctgaaaagaccagtcagtggagtgggggacgctccaggcaccagcaatggcgcaactgtctcttccaccaaaaggcacaagtccctttttcagtgcgcgaaatgtagttttgccacagactcggggctcgagtttcagagccacatacctcagcaccaggtggacagctccacagcccaatgtctcctctgtggtttgtgctacacctctgccagctccctcagccgccacctcttcattgtccacaaggtgagagaccaggaggaggaggaggaagaggaggcggcggcagcggagatggcagtggaggtggcagagccagaggagggctccggggaggaggtgcccatggagactagagagaatggactggaagaatgtgccggtgagcctttgtcagctgacccagaggcgaggagattgctgggcccggcccctgaggacgatggtggccacaatgatcacagtcaaccacaggcctctcaggaccaggacagccacacactgtcccctcaggtgtgaccggagactttgcagtgtgcatggtcaggggtggtgccgaagtgtcttccacctgccctgcggaccgtggaaaataaaaggctctgcccccagtgtgagtgtgaccggttgtaccctggagtagtgtctgccctgagctgccagtgctgggtatcccccagccccaggaaatgtggggtcggccaggaccctcacagctctgaatttgcttctgttatttatggcttttcgctgcttcttggtgccccatctcttgtctgtgtccttccaaccccaagctgcttatgtggcccaaccccactgctgtcaactaggcttgaaccccacagcggctgtgctcttctgggaggttcccgcttgctgccttcagccagggcgctcctcagagctctattttcctgcagacaccagctctccttcctgcctttagatcctgagaaggagggaaatgaggggtgctgacacagtccctctgggagagctctgcctagtctggtttggcgagggcccttgatcaccttgcccctcctccctgtcttctctgattcttttccctcaaaatagtcctgagaactaattgtcacactggctcatcatgtctctgtgggtggggtgggagaaacctctgctgcacacctctgtttggaacctgggcagagcaggaggtaaggcaaaggcaggcaggcaccaagaaccagaccccttgagaaggcgctgtgggtgggtctttgttctgctgttctgcctttcctgacaggtggggttggggcacacagacattggaatatttgtactgctctcgtgccatttgagaggctgctgccccaggcaggccagcccctactcctcttggctacactcatgttgctcagactatatttcaaataaaaaatcttctcaccatg

SEQ ID NO: 449089 - DNA, 5708 bp, Homo sapiens
gcctgcgccgcgcagcccgcctcgggcgggaggcgggaggcgggaggccgggcccaggccggggcagcccctccaccgcaccgtcctgggccggtgcccaggtccgagtcgccttccgcctgccccccccgccaatcccccgccgcggcagccccagccaggtcccgccgccaggccggctcccgcccccgctccgcccccggagccgcagccccgcccgccatcgccgtcgccatgttgtggctcccgcagccggcgctggggacgcgcgcggccgagactctggcctgcagtcgccgccgccgccgccaggtggtgtttggactctagaccatgtgcctaggtagaagtttttcctttctccgcagctctgctcccctagcaacgctcgccacacccttgttttgagatcctctctaaggagcggagagtttaataggcaagaaggaagggagaagacagaaggaagacgctcccccgtacggagacagagggagggggggctccaaagccgaaagaggaggtccctacctgccacggataccagtcagcccttgccagcatccagccatgggggatatgaaaaccccagattttgatgaccttctggctgcctttgacatcccagaccccaccagccttgatgccaaggaggccatccagacacccagtgaggagaatgagagtcccctcaaacctccaggcatatgtatggatgaaagtgtgtccttgtctcactcaggatcagcccccgatgtgccggccgtgagtgtcattgtcaagaacaccagccgccaggagtcatttgaagcggagaaagaccacattactcccagtctcctacacaatggattccggggctcagatctgcctccagatccccacaactgtgggaaatttgattctacttttatgaatggagacagtgccaggagtttccctggcaaactggagcctcccaagtcagagccattacccaccttcaaccagttcagtccaatctccagcccagaacctgaggatcccatcaaagataacggatttgggataaagcccaaacactctgacagttatttcccaccccctcttgggtgcggggctgtgggaggcccagtcctggaggctctggctaagtttccggttccagagctgcatatgtttgatcatttttgtaagaaagaacccaagccagaacccctgcccttggggagccagcaggaacacgagcaaagtgggcagaacacagtggaacctcacaaggatccggatgccactcgattcttcggggaagctttggagttcaacagccatcctagcaacagtattggagagtccaaggggcttgcccgggagcttggtacctgctcatcagtcccccctaggcagcgtctaaagccagctcattccaagctgtcctcttgtgtggcagccttggtggccttgcaggccaaaagagtggctagtgtcactaaggaggatcagcctggccacacaaaggatctctcagggcccactaaagagagttctaaaggtagccccaaaatgcccaagtcaccaaagagtccccggagccctctggaggccactagaaaaagtatcaagccatcggacagccctcgtagcatctgcagtgacagcagcagcaaaggctcaccgtctgtggctgccagctccccaccagcaattcccaaagtgagaatcaaaaccattaagacatcatcaggggaaatcaaacggactgtcacaaggatcctgccagatcctgatgatccaagtaagtcccctgttgggtcacctctagggagcgccattgcagaggcccccagcgagatgccaggggatgaggtgcctgtggaagagcactttcctgaggcaggcacaaattcagggagcccccagggggccaggaaaggggacgagagcatgacaaaggccagtgactcgtcatctcccagctgcagttctgggccccgggtcccaaagggggctgccccaggctcacagacaggcaagaagcaacagagcacagcactgcaggcatccaccctggcccctgccaacctcctgcccaaagccgtgcacttggccaacctgaacctcgtcccccacagtgttgctgcatcagtgacagccaagtcttcagtgcaaagacggagccagccacagcttacacaaatgtcggtgcccctggtccaccaggtgaaaaaggctgccccactgattgtagaggtcttcaacaaggtccttcacagctccaaccccgtgcccctctatgcgccaaatctcagcccgcctgcggacagcaggatccacgtgccggccagtgggtactgctgcctggagtgtggagacgcatttgccttagagaagagcctgagccagcactatggccggcggagcgtccacattgaggtactgtgcacactgtgctccaagacgctgctcttcttcaacaagtgcagcctgctccggcacgcccgtgaccacaagagcaaggggctcgtcatgcagtgttcccagctgctggtgaagcctatctctgcggaccaaatgttcgtgtcggcccctgtgaactccacggcaccagcagccccagccccttcatcctctcccaaacatggcctcacttcgggcagtgccagtccccctcctccagccttgccactctacccagaccctgtgaggctcatccggtactcaatcaagtgtcttgaatgtcacaagcagatgcgggactacatggtcctggctgcacatttccagaggacaacagaggagacagaggggctgacctgccaggtatgccagatgctgctgcccaaccagtgcagtttctgtgcccaccagcggattcatgcacacaagtccccctactgctgcccggagtgtggggtcctctgccgctctgcctacttccagacccatgtaaaggagaattgcctgcactatgcccgcaaggtgggctacaggtgcatccactgtggtgtcgtccacctgaccttggccttgctgaaaagccacatccaggagcgacactgccaggttttccacaaatgtgcattctgccccatggccttcaagactgccagcagcactgcagaccacagtgccacccagcaccccacccagccccacagaccctcccagctcatttataagtgctcctgtgaaatggtcttcaacaagaagaggcacattcagcagcatttttaccagaatgtcagcaagacgcaggtgggcgtcttcaagtgccctgagtgcccactcttgttcgtgcagaagccggagttgatgcaacacgtcaagagcacccacggtgttccccgaaatgtggacgagctgtcaagcctccagtcttcagcggacacatcctcaagccgccctggctctcgagttcccactgagccaccagccactagtgtggctgctcggagcagctccctgccttctggccgctggggtaggcctgaagcccaccgcagggtggaagccaggccgcggctgaggaacactggctggacctgccaggagtgccaggagtgggttccagatcgggagagctacgtgtcccacatgaaaaagagccacggtcggacattgaagcggtacccatgccggcagtgtgaacagtccttccacacccccaacagcctgcgcaaacacatccgcaacaaccatgacacagtaaagaagttctacacctgcgggtactgcacagaggacagccccagctttcctcggccctcccttctggagagccacatcagccttatgcatggcatcagaaaccctgatttgagccagacgtccaaagtgaaacctccgggtggacattcccctcaggtgaaccatctgaaaagaccagtcagtggagtgggggacgctccaggcaccagcaatggcgcaactgtctcttccaccaaaaggcacaagtccctttttcagtgcgcgaaatgtagttttgccacagactcggggctcgagtttcagagccacatacctcagcaccaggtggacagctccacagcccaatgtctcctctgtggtttgtgctacacctctgccagctccctcagccgccacctcttcattgtccacaaggtgagagaccaggaggaggaggaggaagaggaggcggcggcagcggagatggcagtggaggtggcagagccagaggagggctccggggaggaggtgcccatggagactagagagaatggactggaagaatgtgccggtgagcctttgtcagctgacccagaggcgaggagattgctgggcccggcccctgaggacgatggtggccacaatgatcacagtcaaccacaggcctctcaggaccaggacagccacacactgtcccctcaggtgtgaccggagactttgcagtgtgcatggtcaggggtggtgccgaagtgtcttccacctgccctgcggaccgtggaaaataaaaggctctgcccccagtgtgagtgtgaccggttgtaccctggagtagtgtctgccctgagctgccagtgctgggtatcccccagccccaggaaatgtggggtcggccaggaccctcacagctctgaatttgcttctgttatttatggcttttcgctgcttcttggtgccccatctcttgtctgtgtccttccaaccccaagctgcttatgtggcccaaccccactgctgtcaactaggcttgaaccccacagcggctgtgctcttctgggaggttcccgcttgctgccttcagccagggcgctcctcagagctctattttcctgcagacaccagctctccttcctgcctttagatcctgagaaggagggaaatgaggggtgctgacacagtccctctgggagagctctgcctagtctggtttggcgagggcccttgatcaccttgcccctcctccctgtcttctctgattcttttccctcaaaatagtcctgagaactaattgtcacactggctcatcatgtctctgtgggtggggtgggagaaacctctgctgcacacctctgtttggaacctgggcagagcaggaggtaaggcaaaggcaggcaggcaccaagaaccagaccccttgagaaggcgctgtgggtgggtctttgttctgctgttctgcctttcctgacaggtggggttggggcacacagacattggaatatttgtactgctctcgtgccatttgagaggctgctgccccaggcaggccagcccctactcctcttggctacactcatgttgctcagactatatttcaaataaaaaatcttctcaccatgcaggtaggctcttgtattcctctccaagtgagcctggccccaccctattccacccaagggtctttcccagacttcccctgtttgtcccatctctgagggagaacaatacttcctactgtctaaggaaggccttctctagattctggagcttgtggttaggaaaccgggagccctgtactacttagttctctagagaccttctgaaggggtgaggggagcggctccacaatggtcaagtcacctccaagatctccaggctagtgacattggctttagggcgtatcgaaattttctaggcaccttcatctttccttcagttgattttcaacataagagaaccccttactggtaaaaagggaaaagggggtggagaagaggaattttataattttcttatagcattcaagaggtttcttatttcttacagca

SEQ ID NO: 449090 - DNA, 767 bp, Homo sapiens
cacgaggtttttttttgcatggtgagaagattttttatttgaaatatagtctgagcaacatgagtgtagccaagaggagtaggggctggcctgcctggggcagcagcctctcaaatggcacgagagcagtacaaatattccaatgtctgtggcccaaccccactgctgtcaactaggcttgaaccccacagcggctgtgctcttctgggaggttcccgcttgctgccttcagccagggcgctcctcagagctctattttcctgcagacaccagctctccttcctgcctttagatcctgagaaggagggaaatgaggggtgctgacacagtccctctgggagagctctgcctagtctggtttggcgagggcccttgatcaccttgcccctcctccctgtcttctctgattcttttccctcaaaatagtcctgagaactaattgtcacactggctcatcatgtctctgtgggtggggtgggagaaacctctgctgcacacctctgtttggaacctgggcagagcaggaggtaaggcaaaggcaggcaggcaccaagaaccagaccccttgagaaggcgctgtgggtgggtctttgttctgctgttctgcctttcctgacaggtggggttggggcacacagacattggaatatttgtactgctctcgtgccatttgagaggctgctgccccaggcaggccagcccctactcctcttggctacactcatgttgctcagactatatttcaaataaaaaatcttctcaccatg

SEQ ID NO: 449091 - DNA, 2996 bp, Homo sapiens
gcctgcgccgcgcagcccgcctcgggcgggaggcgggaggcgggaggccgggcccaggccggggcagcccctccaccgcaccgtcctgggccggtgcccaggtccgagtcgccttccgcctgccccccccgccaatcccccgccgcggcagccccagccaggtcccgccgccaggccggctcccgcccccgctccgcccccggagccgcagccccgcccgccatcgccgtcgccatgttgtggctcccgcagccggcgctggggacgcgcgcggccgagactctggcctgcagtcgccgccgccgccgccaggtggtgtttggactctagaccatgtgcctaggtagaagtttttcctttctccgcagctctgctcccctagcaacgctcgccacacccttgttttgagatcctctctaaggagcggagagtttaataggcaagaaggaagggagaagacagaaggaagacgctcccccgtacggagacagagggagggggggctccaaagccgaaagaggaggtccctacctgccacggataccagtcagcccttgccagcatccagccatgggggatatgaaaaccccagattttgatgaccttctggctgcctttgacatcccagaccccaccagccttgatgccaaggaggccatccagacacccagtgaggagaatgagagtcccctcaaacctccaggcatatgtatggatgaaagtgtgtccttgtctcactcaggatcagcccccgatgtgccggccgtgagtgtcattgtcaagaacaccagccgccaggagtcatttgaagcggagaaagaccacattactcccagtctcctacacaatggattccggggctcagatctgcctccagatccccacaactgtgggaaatttgattctacttttatgaatggagacagtgccaggagtttccctggcaaactggagcctcccaagtcagagccattacccaccttcaaccagttcagtccaatctccagcccagaacctgaggatcccatcaaagataacggatttgggataaagcccaaacactctgacagttatttcccaccccctcttgggtgcggggctgtgggaggcccagtcctggaggctctggctaagtttccggttccagagctgcatatgtttgatcatttttgtaagaaagaacccaagccagaacccctgcccttggggagccagcaggaacacgagcaaagtgggcagaacacagtggaacctcacaaggatccggatgccactcgattcttcggggaagctttggagttcaacagccatcctagcaacagtattggagagtccaaggggcttgcccgggagcttggtacctgctcatcagtcccccctaggcagcgtctaaagccagctcattccaagctgtcctcttgtgtggcagccttggtggccttgcaggccaaaagagtggctagtgtcactaaggaggatcagcctggccacacaaaggatctctcagggcccactaaagagagttctaaaggtagccccaaaatgcccaagtcaccaaagagtccccggagccctctggaggccactagaaaaagtatcaagccatcggacagccctcgtagcatctgcagtgacagcagcagcaaaggctcaccgtctgtggctgccagctccccaccagcaattcccaaagtgagaatcaaaaccattaagacatcatcaggggaaatcaaacggactgtcacaaggatcctgccagatcctgatgatccaagtaagtcccctgttgggtcacctctagggagcgccattgcagaggcccccagcgagatgccaggggatgaggtgcctgtggaagagcactttcctgaggcaggcacaaattcagggagcccccagggggccaggaaaggggacgagagcatgacaaaggccagtgactcgtcatctcccagctgcagttctgggccccgggtcccaaagggggctgccccaggctcacagacaggcaagaagcaacagagcacagcactgcaggcatccaccctggcccctgccaacctcctgcccaaagccgtgcacttggccaacctgaacctcgtcccccacagtgttgctgcatcagtgacagccaagtcttcagtgcaaagacggagccagccacagcttacacaaatgtcggtgcccctggtccaccaggtgaaaaaggctgccccactgattgtagaggtcttcaacaaggtccttcacagctccaaccccgtgcccctctatgcgccaaatctcagcccgcctgcggacagcaggatccacgtgccggccagtgggtactgctgcctggagtgtggagacgcatttgccttagagaagagcctgagccagcactatggccggcggagcgtccacattgaggtactgtgcacactgtgctccaagacgctgctcttcttcaacaagtgcagcctgctccggcacgcccgtgaccacaagagcaaggggctcgtcatgcagtgttcccagctgctggtgaagcctatctctgcggaccaaatgttcgtgtcggcccctgtgaactccacggcaccagcagccccagccccttcatcctctcccaaacatggcctcacttcgggcagtgccagtccccctcctccagccttgccactctacccagaccctgtgaggctcatccggtactcaatcaagtgtcttgaatgtcacaagcagatgcgggactacatggtcctggctgcacatttccagaggacaacagaggagacagaggggctggtaagcagaccctcactgttacgggtatcgggcccctggctcacacaggttccatgactgggcatggagaggaaagctcattgatatgggggcagtggtggaatcttatgagtcttagaagaggatgtctgcctgaatatttagtgtttggtgtttgttggaaaaggtgtcctgcccatactgaggtgagaccctaatttagcaag

SEQ ID NO: 449092 - DNA, 283 bp, Homo sapiens
ccctcaggacgtacttgtcaagggtggaagtccaagtgattgagggagggagaaggtgcctggatagttctgttcctcttctccatccctcctcttgcagcaccacctctgggtccagtactccctatactccacccacactcacactaccccacttctgtctaggtgcatccactgtggtgtcgtccacctgaccttggccttgctgaaaagccacatccaggagcgacactgccaggttttccacaaatgtgcattctgccccatggccttcaagactgcc

SEQ ID NO: 449093 - DNA, 4551 bp, Homo sapiens
cggcggggcccgtgtctggtatagtaggcggcaggctgccgctactactaccaagaacaccagccgccaggagtcatttgaagcggagaaagaccacattactcccagtctcctacacaatggattccggggctcagatctgcctccagatccccacaactgtgggaaatttgattctacttttatgaatggagacagtgccaggagtttccctggcaaactggagcctcccaagtcagagccattacccaccttcaaccagttcagtccaatctccagcccagaacctgaggatcccatcaaagataacggatttgggataaagcccaaacactctgacagttatttcccaccccctcttgggtgcggggctgtgggaggcccagtcctggaggctctggctaagtttccggttccagagctgcatatgtttgatcatttttgtaagaaagaacccaagccagaacccctgcccttggggagccagcaggaacacgagcaaagtgggcagaacacagtggaacctcacaaggatccggatgccactcgattcttcggggaagctttggagttcaacagccatcctagcaacagtattggagagtccaaggggcttgcccgggagcttggtacctgctcatcagtcccccctaggcagcgtctaaagccagctcattccaagctgtcctcttgtgtggcagccttggtggccttgcaggccaaaagagtggctagtgtcactaaggaggatcagcctggccacacaaaggatctctcagggcccactaaagagagttctaaaggtagccccaaaatgcccaagtcaccaaagagtccccggagccctctggaggccactagaaaaagtatcaagccatcggacagccctcgtagcatctgcagtgacagcagcagcaaaggctcaccgtctgtggctgccagctccccaccagcaattcccaaagtgagaatcaaaaccattaagacatcatcaggggaaatcaaacggactgtcacaaggatcctgccagatcctgatgatccaagtaagtcccctgttgggtcacctctagggagcgccattgcagaggcccccagcgagatgccaggggatgaggtgcctgtggaagagcactttcctgaggcaggcacaaattcagggagcccccagggggccaggaaaggggacgagagcatgacaaaggccagtgactcgtcatctcccagctgcagttctgggccccgggtcccaaagggggctgccccaggctcacagacaggcaagaagcaacagagcacagcactgcaggcatccaccctggcccctgccaacctcctgcccaaagccgtgcacttggccaacctgaacctcgtcccccacagtgttgctgcatcagtgacagccaagtcttcagtgcaaagacggagccagccacagcttacacaaatgtcggtgcccctggtccaccaggtgaaaaaggctgccccactgattgtagaggtcttcaacaaggtccttcacagctccaaccccgtgcccctctatgcgccaaatctcagcccgcctgcggacagcaggatccacgtgccggccagtgggtactgctgcctggagtgtggagacgcatttgccttagagaagagcctgagccagcactatggccggcggagcgtccacattgaggtactgtgcacactgtgctccaagacgctgctcttcttcaacaagtgcagcctgctccggcacgcccgtgaccacaagagcaaggggctcgtcatgcagtgttcccagctgctggtgaagcctatctctgcggaccaaatgttcgtgtcggcccctgtgaactccacggcaccagcagccccagccccttcatcctctcccaaacatggcctcacttcgggcagtgccagtccccctcctccagccttgccactctacccagaccctgtgaggctcatccggtactcaatcaagtgtcttgaatgtcacaagcagatgcgggactacatggtcctggctgcacatttccagaggacaacagaggagacagaggggctgacctgccaggtatgccagatgctgctgcccaaccagtgcagtttctgtgcccaccagcggattcatgcacacaagtccccctactgctgcccggagtgtggggtcctctgccgctctgcctacttccagacccatgtaaaggagaattgcctgcactatgcccgcaaggtgggctacaggtgcatccactgtggtgtcgtccacctgaccttggccttgctgaaaagccacatccaggagcgacactgccaggttttccacaaatgtgcattctgccccatggccttcaagactgccagcagcactgcagaccacagtgccacccagcaccccacccagccccacagaccctcccagctcatttataagtgctcctgtgaaatggtcttcaacaagaagaggcacattcagcagcatttttaccagaatgtcagcaagacgcaggtgggcgtcttcaagtgccctgagtgcccactcttgttcgtgcagaagccggagttgatgcaacacgtcaagagcacccacggtgttccccgaaatgtggacgagctgtcaagcctccagtcttcagcggacacatcctcaagccgccctggctctcgagttcccactgagccaccagccactagtgtggctgctcggagcagctccctgccttctggccgctggggtaggcctgaagcccaccgcagggtggaagccaggccgcggctgaggaacactggctggacctgccaggagtgccaggagtgggttccagatcgggagagctacgtgtcccacatgaaaaagagccacggtcggacattgaagcggtacccatgccggcagtgtgaacagtccttccacacccccaacagcctgcgcaaacacatccgcaacaaccatgacacagtaaagaagttctacacctgcgggtactgcacagaggacagccccagctttcctcggccctcccttctggagagccacatcagccttatgcatggcatcagaaaccctgatttgagccagacgtccaaagtgaaacctccgggtggacattcccctcaggtgaaccatctgaaaagaccagtcagtggagtgggggacgctccaggcaccagcaatggcgcaactgtctcttccaccaaaaggcacaagtccctttttcagtgcgcgaaatgtagttttgccacagactcggggctcgagtttcagagccacatacctcagcaccaggtggacagctccacagcccaatgtctcctctgtggtttgtgctacacctctgccagctccctcagccgccacctcttcattgtccacaaggtgagagaccaggaggaggaggaggaagaggaggcggcggcagcggagatggcagtggaggtggcagagccagaggagggctccggggaggaggtgcccatggagactagagagaatggactggaagaatgtgccggtgagcctttgtcagctgacccagaggcgaggagattgctgggcccggcccctgaggacgatggtggccacaatgatcacagtcaaccacaggcctctcaggaccaggacagccacacactgtcccctcaggtgtgaccggagactttgcagtgtgcatggtcaggggtggtgccgaagtgtcttccacctgccctgcggaccgtggaaaataaaaggctctgcccccagtgtgagtgtgaccggttgtaccctggagtagtgtctgccctgagctgccagtgctgggtatcccccagccccaggaaatgtggggtcggccaggaccctcacagctctgaatttgcttctgttatttatggcttttcgctgcttcttggtgccccatctcttgtctgtgtccttccaaccccaagctgcttatgtggcccaaccccactgctgtcaactaggcttgaaccccacagcggctgtgctcttctgggaggttcccgcttgctgccttcagccagggcgctcctcagagctctattttcctgcagacaccagctctccttcctgcctttagatcctgagaaggagggaaatgaggggtgctgacacagtccctctgggagagctctgcctagtctggtttggcgagggcccttgatcaccttgcccctcctccctgtcttctctgattcttttccctcaaaatagtcctgagaactaattgtcacactggctcatcatgtctctgtgggtggggtgggagaaacctctgctgcacacctctgtttggaacctgggcagagcaggaggtaaggcaaaggcaggcaggcaccaagaaccagaccccttgagaaggcgctgtgggtgggtctttgttctgctgttctgcctttcctgacaggtggggttggggcacacagacattggaatatttgtactgctctcgtgccatttgagaggctgctgccccaggcaggccagcccctactcctcttggctacactcatgttgctcagactatatttcaaataaaaaatcttctcaccatg

SEQ ID NO: 449094 - DNA, 5420 bp, Homo sapiens
gcctgcgccgcgcagcccgcctcgggcgggaggcgggaggcgggaggccgggcccaggccggggcagcccctccaccgcaccgtcctgggccggtgcccaggtccgagtcgccttccgcctgccccccccgccaatcccccgccgcggcagccccagccaggtcccgccgccaggccggctcccgcccccgctccgcccccggagccgcagccccgcccgccatcgccgtcgccatgttgtggctcccgcagccggcgctggggacgcgcgcggccgagactctggcctgcagtcgccgccgccgccgccaggtggtgtttggactctagaccatgtgcctaggtagaagtttttcctttctccgcagctctgctcccctagcaacgctcgccacacccttgttttgagatcctctctaaggagcggagagtttaataggcaagaaggaagggagaagacagaaggaagacgctcccccgtacggagacagagggagggggggctccaaagccgaaagaggaggtccctacctgccacggataccagtcagcccttgccagcatccagccatgggggatatgaaaaccccagattttgatgaccttctggctgcctttgacatcccagaccccaccagccttgatgccaaggaggccatccagacacccagtgaggagaatgagagtcccctcaaacctccaggcatatgtatggatgaaagtgtgtccttgtctcactcaggatcagcccccgatgtgccggccgtgagtgtcattgtcaagaacaccagccgccaggagtcatttgaagcggagaaagaccacattactcccagtctcctacacaatggattccggggctcagatctgcctccagatccccacaactgtgggaaatttgattctacttttatgaatggagacagtgccaggagtttccctggcaaactggagcctcccaagtcagagccattacccaccttcaaccagttcagtccaatctccagcccagaacctgaggatcccatcaaagataacggatttgggataaagcccaaacactctgacagttatttcccaccccctcttgggtgcggggctgtgggaggcccagtcctggaggctctggctaagtttccggttccagagctgcatatgtttgatcatttttgtaagaaagaacccaagccagaacccctgcccttggggagccagcaggaacacgagcaaagtgggcagaacacagtggaacctcacaaggatccggatgccactcgattcttcggggaagctttggagttcaacagccatcctagcaacagtattggagagtccaaggggcttgcccgggagcttggtacctgctcatcagtcccccctaggcagcgtctaaagccagctcattccaagctgtcctcttgtgtggcagccttggtggccttgcaggccaaaagagtggctagtgtcactaaggaggatcagcctggccacacaaaggatctctcagggcccactaaagagagttctaaaggtagccccaaaatgcccaagtcaccaaagagtccccggagccctctggaggccactagaaaaagtatcaagccatcggacagccctcgtagcatctgcagtgacagcagcagcaaaggctcaccgtctgtggctgccagctccccaccagcaattcccaaagtgagaatcaaaaccattaagacatcatcaggggaaatcaaacggactgtcacaaggatcctgccagatcctgatgatccaagtaagtcccctgttgggtcacctctagggagcgccattgcagaggcccccagcgagatgccaggggatgaggtgcctgtggaagagcactttcctgaggcaggcacaaattcagggagcccccagggggccaggaaaggggacgagagcatgacaaaggccagtgactcgtcatctcccagctgcagttctgggccccgggtcccaaagggggctgccccaggctcacagacaggcaagaagcaacagagcacagcactgcaggcatccaccctggcccctgccaacctcctgcccaaagccgtgcacttggccaacctgaacctcgtcccccacagtgttgctgcatcagtgacagccaagtcttcagtgcaaagacggagccagccacagcttacacaaatgtcggtgcccctggtccaccaggtgaaaaaggctgccccactgattgtagaggtcttcaacaaggtccttcacagctccaaccccgtgcccctctatgcgccaaatctcagcccgcctgcggacagcaggatccacgtgccggccagtgggtactgctgcctggagtgtggagacgcatttgccttagagaagagcctgagccagcactatggccggcggagcgtccacattgaggtactgtgcacactgtgctccaagacgctgctcttcttcaacaagtgcagcctgctccggcacgcccgtgaccacaagagcaaggggctcgtcatgcagtgttcccagctgctggtgaagcctatctctgcggaccaaatgttcgtgtcggcccctgtgaactccacggcaccagcagccccagccccttcatcctctcccaaacatggcctcacttcgggcagtgccagtccccctcctccagccttgccactctacccagaccctgtgaggctcatccggtactcaatcaagtgtcttgaatgtcacaagcagatgcgggactacatggtcctggctgcacatttccagaggacaacagaggagacagaggggctgacctgccaggtatgccagatgctgctgcccaaccagtgcagtttctgtgcccaccagcggattcatgcacacaagtccccctactgctgcccggagtgtggggtcctctgccgctctgcctacttccagacccatgtaaaggagaattgcctgcactatgcccgcaaggtgggctacaggtgcatccactgtggtgtcgtccacctgaccttggccttgctgaaaagccacatccaggagcgacactgccaggttttccacaaatgtgcattctgccccatggccttcaagactgccagcagcactgcagaccacagtgccacccagcaccccacccagccccacagaccctcccagctcatttataagtgctcctgtgaaatggtcttcaacaagaagaggcacattcagcagcatttttaccagaatgtcagcaagacgcaggtgggcgtcttcaagtgccctgagtgcccactcttgttcgtgcagaagccggagttgatgcaacacgtcaagagcacccacggtgttccccgaaatgtggacgagctgtcaagcctccagtcttcagcggacacatcctcaagccgccctggctctcgagttcccactgagccaccagccactagtgtggctgctcggagcagctccctgccttctggccgctggggtaggcctgaagcccaccgcagggtggaagccaggccgcggctgaggaacactggctggacctgccaggagtgccaggagtgggttccagatcgggagagctacgtgtcccacatgaaaaagagccacggtcggacattgaagcggtacccatgccggcagtgtgaacagtccttccacacccccaacagcctgcgcaaacacatccgcaacaaccatgacacagtaaagaagttctacacctgcgggtactgcacagaggacagccccagctttcctcggccctcccttctggagagccacatcagccttatgcatggcatcagaaaccctgatttgagccagacgtccaaagtgaaacctccgggtggacattcccctcaggtgaaccatctgaaaagaccagtcagtggagtgggggacgctccaggcaccagcaatggcgcaactgtctcttccaccaaaaggcacaagtccctttttcagtgcgcgaaatgtagttttgccacagactcggggctcgagtttcagagccacatacctcagcaccaggtggacagctccacagcccaatgtctcctctgtggtttgtgctacacctctgccagctccctcagccgccacctcttcattgtccacaaggtgagagaccaggaggaggaggaggaagaggaggcggcggcagcggagatggcagtggaggtggcagagccagaggagggctccggggaggaggtgcccatggagactagagagaatggactggaagaatgtgccggtgagcctttgtcagctgacccagaggcgaggagattgctgggcccggcccctgaggacgatggtggccacaatgatcacagtcaaccacaggcctctcaggaccaggacagccacacactgtcccctcaggtgtgaccggagactttgcagtgtgcatggtcaggggtggtgccgaagtgtcttccacctgccctgcggaccgtggaaaataaaaggctctgcccccagtgtgagtgtgaccggttgtaccctggagtagtgtctgccctgagctgccagtgctgggtatcccccagccccaggaaatgtggggtcggccaggaccctcacagctctgaatttgcttctgttatttatggcttttcgctgcttcttggtgccccatctcttgtctgtgtccttccaaccccaagctgcttatgtggcccaaccccactgctgtcaactaggcttgaaccccacagcggctgtgctcttctgggaggttcccgcttgctgccttcagccagggcgctcctcagagctctattttcctgcagacaccagctctccttcctgcctttagatcctgagaaggagggaaatgaggggtgctgacacagtccctctgggagagctctgcctagtctggtttggcgagggcccttgatcaccttgcccctcctccctgtcttctctgattcttttccctcaaaatagtcctgagaactaattgtcacactggctcatcatgtctctgtgggtggggtgggagaaacctctgctgcacacctctgtttggaacctgggcagagcaggaggtaaggcaaaggcaggcaggcaccaagaaccagaccccttgagaaggcgctgtgggtgggtctttgttctgctgttctgcctttcctgacaggtggggttggggcacacagacattggaatatttgtactgctctcgtgccatttgagaggctgctgccccaggcaggccagcccctactcctcttggctacactcatgttgctcagactatatttcaaataaaaaatcttctcaccatgaaaaaaatgaactataataaaaccataaatatatatactgaacttctaaacaacatttcaatatcaaaaaaaccttctaggggggccccgagccccattatgccctaatgggatccctatcacaattaactgaccgatttt

SEQ ID NO: 449095 - DNA, 2765 bp, Homo sapiens
gcctgcgccgcgcagcccgcctcgggcgggaggcgggaggcgggaggccgggcccaggccggggcagcccctccaccgcaccgtcctgggccggtgcccaggtccgagtcgccttccgcctgccccccccgccaatcccccgccgcggcagccccagccaggtcccgccgccaggccggctcccgcccccgctccgcccccggagccgcagccccgcccgccatcgccgtcgccatgttgtggctcccgcagccggcgctggggacgcgcgcggccgagactctggcctgcagtcgccgccgccgccgccaggtggtgtttggactctagaccatgtgcctaggtagaagtttttcctttctccgcagctctgctcccctagcaacgctcgccacacccttgttttgagatcctctctaaggagcggagagtttaataggcaagaaggaagggagaagacagaaggaagacgctcccccgtacggagacagagggagggggggctccaaagccgaaagaggaggtccctacctgccacggataccagtcagcccttgccagcatccagccatgggggatatgaaaaccccagattttgatgaccttctggctgcctttgacatcccagaccccaccagccttgatgccaaggaggccatccagacacccagtgaggagaatgagagtcccctcaaacctccaggcatatgtatggatgaaagtgtgtccttgtctcactcaggatcagcccccgatgtgccggccgtgagtgtcattgtcaagaacaccagccgccaggagtcatttgaagcggagaaagaccacattactcccagtctcctacacaatggattccggggctcagatctgcctccagatccccacaactgtgggaaatttgattctacttttatgaatggagacagtgccaggagtttccctggcaaactggagcctcccaagtcagagccattacccaccttcaaccagttcagtccaatctccagcccagaacctgaggatcccatcaaagataacggatttgggataaagcccaaacactctgacagttatttcccaccccctcttgggtgcggggctgtgggaggcccagtcctggaggctctggctaagtttccggttccagagctgcatatgtttgatcatttttgtaagaaagaacccaagccagaacccctgcccttggggagccagcaggaacacgagcaaagtgggcagaacacagtggaacctcacaaggatccggatgccactcgattcttcggggaagctttggagttcaacagccatcctagcaacagtattggagagtccaaggggcttgcccgggagcttggtacctgctcatcagtcccccctaggcagcgtctaaagccagctcattccaagctgtcctcttgtgtggcagccttggtggccttgcaggccaaaagagtggctagtgtcactaaggaggatcagcctggccacacaaaggatctctcagggcccactaaagagagttctaaaggtagccccaaaatgcccaagtcaccaaagagtccccggagccctctggaggccactagaaaaagtatcaagccatcggacagccctcgtagcatctgcagtgacagcagcagcaaaggctcaccgtctgtggctgccagctccccaccagcaattcccaaagtgagaatcaaaaccattaagacatcatcaggggaaatcaaacggactgtcacaaggatcctgccagatcctgatgatccaagtaagtcccctgttgggtcacctctagggagcgccattgcagaggcccccagcgagatgccaggggatgaggtgcctgtggaagagcactttcctgaggcaggcacaaattcagggagcccccagggggccaggaaaggggacgagagcatgacaaaggccagtgactcgtcatctcccagctgcagttctgggccccgggtcccaaagggggctgccccaggctcacagacaggcaagaagcaacagagcacagcactgcaggcatccaccctggcccctgccaacctcctgcccaaagccgtgcacttggccaacctgaacctcgtcccccacagtgttgctgcatcagtgacagccaagtcttcagtgcaaagacggagccagccacagcttacacaaatgtcggtgcccctggtccaccaggtgaaaaaggctgccccactgattgtagaggtcttcaacaaggtccttcacagctccaaccccgtgcccctctatgcgccaaatctcagcccgcctgcggacagcaggatccacgtgccggccagtgggtactgctgcctggagtgtggagacgcatttgccttagagaagagcctgagccagcactatggccggcggagcgtccacattgaggtactgtgcacactgtgctccaagacgctgctcttcttcaacaagtgcagcctgctccggcacgcccgtgaccacaagagcaaggggctcgtcatgcagtgttcccagctgctggtgaagcctatctctgcggaccaaatgttcgtgtcggcccctgtgaactccacggcaccagcagccccagccccttcatcctctcccaaacatggcctcacttcgggcagtgccagtccccctcctccagccttgccactctacccagaccctgtgtctcctctgtagtcctctggaaatgtgcagccaggaccatgtagtcccgcatctgcttgtgacattcaagacacttgattgag

SEQ ID NO: 449096 - DNA, 2335 bp, Homo sapiens
  misc_feature (659)..(659): n is a, c, g, or t
  misc_feature (672)..(673): n is a, c, g, or t
  misc_feature (675)..(675): n is a, c, g, or t
  misc_feature (680)..(680): n is a, c, g, or t
  misc_feature (687)..(687): n is a, c, g, or t
  misc_feature (690)..(690): n is a, c, g, or t
  misc_feature (706)..(706): n is a, c, g, or t
  misc_feature (712)..(712): n is a, c, g, or t
  misc_feature (719)..(719): n is a, c, g, or t
  misc_feature (725)..(727): n is a, c, g, or t
  misc_feature (730)..(730): n is a, c, g, or t
  misc_feature (752)..(753): n is a, c, g, or t
  misc_feature (762)..(762): n is a, c, g, or t
  misc_feature (775)..(775): n is a, c, g, or t
  misc_feature (787)..(787): n is a, c, g, or t
tgaaacctaaaacgttaatgtgatctttattatacagcacatctggtatttgtgtatcccaacaagtatacagaatactctataaaaccaaacccaacccttcaatattacactaatgaagattaacccagagtcgcatctcttcaaaatgcacacaattaagacggtcctgctgtaacaatattatggaaagagccaggtagcacaagaaaggagagaggataaagactgaagtgtgtgccaaagtcattgtcttttgttattgcacttttattctacacacttagtatcttacacttttatttaacactgtaataaacattagtcctttaaaacaaagaaaaaacattacatgaagacaaaagacaacaggctgcccagaccaattttcttttcaactatctgggcaaggtggcctccccagtgctagatgtcctgatgcacctctgagatcacctcaattggactggatgttaacaaaacagatgaagttaaaaatgaaacccttttaggaacagtagtgctactggaaacctccaggagagtttggaatacaagtgtctcaaggccactccctccttacccactttaacatcaaacaagctctattcatcccacctccataactgaaggattaaccttctttttttttttttttnttttttttgaganngngtctngctctgntgnccaggctggagtgcantggtgngatcttngctcannncancctctgtctcctgggttcaagnnattctcctncctcagcctcccnagtagctgggantacagttggaggtccccctccccactaagtgcctctttgcatagcaccagtccccacccgcacgctctctggaccactacagctggacgggcaatggcgggtcggggaggcgcagcacgacccaatggaccagctgctgggaacaagatctgtcaatttaagctggttctgctgggggagtctgcggtaggcaaatccagcctcgtcctccgctttgtcaagggacagtttcacgagtaccaggagagcacaattggagcggccttcctcacacagactgtctgcctggatgacacaacagtcaagtttgagatctgggacacagctggacaggagcggtatcacagcctggcccccatgtactatcggggggcccaggctgccatcgtggtctatgacatcaccaacacagatacatttgcacgggccaagaactgggtgaaggagctacagaggcaggccagccccaacatcgtcattgcactcgcgggtaacaaggcagacctggccagcaagagagccgtggaattccaggaagcacaagcctatgcagacgacaacagtttgctgttcatggagacatcagcaaagactgcaatgaacgtgaacgaaatcttcatggcaatagctaagaagcttcccaagaacgagccccagaatgcaactggtgctccaggccgaaaccgaggtgtggacctccaggagaacaacccagccagccggagccagtgctgcagcaactgagccccccttgcctgcccgctgcccccgcctcctccgcctgaatgacccgactggaatccactctaaccaatcgcacttaacgactcgggccaccactgggggggcagggggaggggtccaccatgatttctccatataattttgatcataggccggagtgagtcattccacctgcacctttctgtacaaatactaattcaattttaagtcttaagtcacttttttaatatatatgatcttctgctcttcccacttcctcccctttctactgctctcccattttcccttgctgggagtagccacatgctcttgccccccaacccttgtatatggggacagtggggtcagtgcagctaccctttctttccctcctgcggaacagcggacccagcaagagcatccacatcctcactttgttcggagtggtctttggtttgggcggtggggcagaccttgggaaggggcttaggaagggagaggcagctcttccttcagctggctctcatcaggctgcagccccctccccgctcccacctccctgctgggaaaccacagcattatcacagcattattgtgacagccacgaacccattgcccacaacccctccaccctcggtcaccccaacctctggctctgagccctgttctgaccaaatcatgatgatgagtatttgggggtgggtgggtaagggggggagtgggaggggacggaaccaactttttctgtattttgtattgtatgttttcttcaacatgtaaccaatcagtatcttgtcaatatagtcagccgatcgatcgacctca

SEQ ID NO: 449097 - DNA, 881 bp, Homo sapiens
  misc_feature (567)..(567): n is a, c, g, or t
  misc_feature (580)..(580): n is a, c, g, or t
  misc_feature (585)..(585): n is a, c, g, or t
  misc_feature (618)..(618): n is a, c, g, or t
  misc_feature (633)..(633): n is a, c, g, or t
  misc_feature (656)..(656): n is a, c, g, or t
  misc_feature (668)..(668): n is a, c, g, or t
  misc_feature (674)..(674): n is a, c, g, or t
  misc_feature (691)..(691): n is a, c, g, or t
  misc_feature (712)..(712): n is a, c, g, or t
  misc_feature (721)..(721): n is a, c, g, or t
  misc_feature (724)..(724): n is a, c, g, or t
  misc_feature (727)..(727): n is a, c, g, or t
  misc_feature (735)..(735): n is a, c, g, or t
  misc_feature (777)..(777): n is a, c, g, or t
  misc_feature (780)..(780): n is a, c, g, or t
  misc_feature (877)..(877): n is a, c, g, or t
tccggatccggagcggctgaaaggcggaagtggaggccggagcctgggacaccgccggcggggagagaagcggatcccgtccgagccccggccccaagtaacgccgccgccccggagccgccttggaggtccccctccccactaagtgcctctttgcatagcaccagtccccacccgcacgctctctggaccactacagctggacgggcaatggcgggtcggggaggcgcagcacgacccaatggaccagctgctgggaacaagatctgtcaatttaagctggttctgctgggggagtctgcggtaggcaaatccagcctcgtcctccgctttgtcaagggacagtttcacgagtaccaggagagcacaattggagcggccttcctcacacagactgtctgcctggatgacacaacagtcaagtttgagatctgggacacagctggacaggagcggtatcacagcctggcccccatgtactatcggggggcccaggctgccatcgtggtctatgacatcaccaacacagatacatttgcatgtgtgccaagaactgtgtgctgaatngagctacatgatngcatngccagccccaaacatctgtcatttgcactctgntgtgtaacaattgcngaccctgtgccatgcaatgatgngctgtgtgaaantccatngaatgcacaatgcccantgcatgactgacaaacatgtngtgcctgtncanttnatgacatncatgcaaatgacctgcaaatgaactgtgaactgaaaaacccncantgtgcaaaatgccaatgaatgccccccaaatgaactgatgccccatgaaatgcaacctgtgtgcgccattgcctgaaacctgattgttgttgatccnccat

SEQ ID NO: 449098 - DNA, 453 bp, Homo sapiens
attaaagaggtgaccgagggtggaggggttgtgggcatgggttcgtggctgtcacaataatgctgtgataatgctgtggtttcccagcaggaggtgggagccactgggggggcagggggaggggtccaccatgatttctccatataattttgatcataggccggagtgagtcattccacctgcacctttctgtacaaatactaattcaattttaagtcttaagtcacttttttaatatatatgatcttctgctcttcccacttcctcccctttctactgctctcccattttcccttgctgggagtagccacatgctcttgccccccaacccttgtatatggggacagtggggtcagtgcagctaccctttctgtacaaatactaattcaattttaagtcttaagtcacttttttaatatatatgatcttctgctcttcccacctccttaatga

SEQ ID NO: 449099 - DNA, 2017 bp, Homo sapiens
tccggatccggagcggctgaaaggcggaagtggaggccggagcctgggacaccgccggcggggagagaagcggatcccgtccgagccccggccccaagtaacgccgccgccccggagccgccttggaggtccccctccccactaagtgcctctttgcatagcaccagtccccacccgcacgctctctggaccactacagctggacgggcaatggcgggtcggggaggcgcagcacgacccaatggaccagctgctgggaacaagatctgtcaatttaagctggttctgctgggggagtctgcggtaggcaaatccagcctcgtcctccgctttgtcaagggacagtttcacgagtaccaggagagcacaattggagcggccttcctcacacagactgtctgcctggatgacacaacagtcaagtttgagatctgggacacagctggacaggagcggtatcacagcctggcccccatgtactatcggggggcccaggctgccatcgtggtctatgacatcaccaacacagatacatttgcacgggccaagaactgggtgaaggagctacagaggcaggccagccccaacatcgtcattgcactcgcgggtaacaaggcagacctggccagcaagagagccgtggaattccaggaagcacaagcctatgcagacgacaacagtttgctgttcatggagacatcagcaaagactgcaatgaacgtgaacgaaatcttcatggcaatagctaagaagcttcccaagaacgagccccagaatgcaactggtgctccaggccgaaaccgaggtgtggacctccaggagaacaacccagccagccggagccagtgctgcagcaactgagccccccttgcctgcccgctgcccccgcctcctccgcctgaatgacccgactggaatccactctaaccaatcgcacttaacgactcgggccaccactgggggggcagggggaggggtccaccatgatttctccatataattttgatcataggccggagtgagtcattccacctgcacctttctgtacaaatactaattcaattttaagtcttaagtcacttttttaatatatatgatcttctgctcttcccacttcctcccctttctactgctctcccattttcccttgctgggagtagccacatgctcttgccccccaacccttgtatatggggacagtggggtcagtgcagctaccctttctttccctcctgcggaacagcggacccagcaagagcatccacatcctcactttgttcggagtggtctttggtttgggcggtggggcagaccttgggaaggggcttaggaagggagaggcagctcttccttcagctggctctcatcaggctgcagccccctccccgctcccacctccctgctgggaaaccacagcattatcacagcattattgtgacagccacgaacccattgcccacaacccctccaccctcggtcaccccaacctctggctctgagccctgttctgaccaaatcatgatgatgagtatttgggggtgggtgggtaagggggggagtgggaggggacggaaccaactttttctgtattttgtattgtatgttttcttcaacatgtaaccaatcagtatcttgtcaatatagtcagccgatcgatcgacctcaaaaaaaaaaaagccaaacttcgtggacctaggcgttgcggccgccagagtgcggggagagccagaaaggggggggcgcaacaggagagggaaggaagggagaaattacgagaatatctgcggagaacggcctgggcctggacgcgcggtaaaaatcccccgaccagccggaaattttggcctaaagggccacgggtcacggtgggatcagccccacgtgaccctgacagggtggaggcagcaaaggaatcttccccctctggaaagcggtgactctggggccacttatcacctctaagccgaaggatatcctttgtgaatcggacagaaacgaacaagccctggataagaac

SEQ ID NO: 449100 - DNA, 1395 bp, Homo sapiens
aaggctaggtacgaggcgggtgtgaatcggccgaggggcaaatccagcctcgtcctccgctttgtcaagggacagtttcacgagtaccaggagagcacaattggagcggccttcctcacacagactgtctgcctggatgacacaacagtcaagtttgagatctgggacacagctggacaggagcggtatcacagcctggcccccatgtactatcggggggcccaggctgccatcgtggtctatgacatcaccaacacagatacatttgcacgggccaagaactgggtgaaggagctacagaggcaggccagccccaacatcgtcattgcactcgcgggtaacaaggcagacctggccagcaagagagccgtggaattccaggaagcacaagcctatgcagacgacaacagtttgctgttcatggagacatcagcaaagactgcaatgaacgtgaacgaaatcttcatggcaatagctaagaagcttcccaagaacgagccccagaatgcaactggtgctccaggccgaaaccgaggtgtggacctccaggagaacaacccagccagccggagccagtgctgcagcaactgagccccccttgcctgcccgctgcccccgcctcctccgcctgaatgacccgactggaatccactctaaccaatcgcacttaacgactcgggccaccactgggggggcagggggaggggtccaccatgatttctccatataattttgatcataggccggagtgagtcattccacctgcacctttctgtacaaatactaattcaattttaagtcttaagtcacttttttaatatatatgatcttctgctcttcccacttcctcccctttctactgctctcccattttcccttgctgggagtagccacatgctcttgccccccaacccttgtatatggggacagtggggtcagtgcagctaccctttctttccctcctgcggaacagcggacccagcaagagcatccacatcctcactttgttcggagtggtctttggtttgggcggtggggcagaccttgggaaggggcttaggaagggagaggcagctcttccttcagctggctctcatcaggctgcagccccctccccgctcccacctccctgctgggaaaccacagcattatcacagcattattgtgacagccacgaacccattgcccacaacccctccaccctcggtcaccccaacctctggctctgagccctgttctgaccaaatcatgatgatgagtatttgggggtgggtgggtaagggggggagtgggaggggacggaaccaactttttctgtattttgtattgtatgttttcttcaacatgtaaccaatcagtatcttgtcaatatagtcagccgatcgatcgacctca

SEQ ID NO: 449101 - DNA, 1148 bp, Homo sapiens
tccggatccggagcggctgaaaggcggaagtggaggccggagcctgggacaccgccggcggggagagaagcggatcccgtccgagccccggccccaagtaacgccgccgccccggagccgccttggaggtccccctccccactaagtgcctctttgcatagcaccagtccccacccgcacgctctctggaccactacagctggacgggcaatggcgggtcggggaggcgcagcacgacccaatggaccagctgctgggaacaagatctgtcaatttaagctggttctgctgggggagtctgcggtaggcaaatccagcctcgtcctccgctttgtcaagggacagtttcacgagtaccaggagagcacaattggagcggccttcctcacacagactgtctgcctggatgacacaacagtcaagtttgagatctgggacacagctggacaggagcggtatcacagcctggcccccatgtactatcggggggcccaggctgccatcgtggtctatgacatcaccaacacagatacatttgcacgggccaagaactgggtgaaggagctacagaggcaggccagccccaacatcgtcattgcactcgcgggtaacaaggcagacctggccagcaagagagccgtggaattccaggaagcacaagcctatgcagacgacaacagtttgctgttcatggagacatcagcaaagactgcaatgaacgtgaacgaaatcttcatggcaatagctaagaagcttcccaagaacgagccccagaatgcaactggtgctccaggccgaaaccgaggtgtggacctccaggagaacaacccagccagccggagccagtgctgcagcaactgagccccccttgcctgcccgctgcccccgcctcctccgcctgaatgacccgactggaatccactctaaccaatcgcacttaacgactcgggccaccctcggtcaccccaacctctggctctgagccctgttctgaccaaatcatgatgatgagtatttgggggtgggtgggtaagggggggagtgggaggggacggaaccaactttttctgtattttgtattgtatgttttcttcaacatgtaaccaatcagtatcttgtcaatatagtcagccgatcgatcgacctca

SEQ ID NO: 449102 - DNA, 1041 bp, Homo sapiens
tccggatccggagcggctgaaaggcggaagtggaggccggagcctgggacaccgccggcggggagagaagcggatcccgtccgagccccggccccaagtaacgccgccgccccggagccgccttggaggtccccctccccactaagtgcctctttgcatagcaccagtccccacccgcacgctctctggaccactacagctggacgggcaatggcgggtcggggaggcgcagcacgacccaatggaccagctgctgggaacaagatctgtcaatttaagctggttctgctgggggagtctgcggtaggcaaatccagcctcgtcctccgctttgtcaagggacagtttcacgagtaccaggagagcacaattggagcggccttcctcacacagactgtctgcctggatgacacaacagtcaagtttgagatctgggacacagctggacaggagcggtatcacagcctggcccccatgtactatcggggggcccaggctgccatcgtggtctatgacatcaccaacacagatacatttgcacgggccaagaactgggtgaaggagctacagaggcaggccagccccaacatcgtcattgcactcgcgggtaacaaggcagacctggccagcaagagagccgtggaattccaggaagcacaagcctatgcagacgacaacagtttgctgttcatggagacatcagcaaagactgcaatgaacgtgaacgaaatcttcatggcaatagctaagaagcttcccaagaacgagccccagaatgcaactggtgctccaggccgaaaccgaggtgtggacctccaggagaacaacccagccagccggagccagtgctgcagcaactgagccccccttgcctgcccgctgcccccgcctcctccgcctgaatgacccgactggaatccactctaaccaatcgcacttaacgactcgggccacccgagcgctaccagaattcaagtataatattaagtatgcatggacctctagagctaatcaaggaaaatagtttaggagaaaccagct

SEQ ID NO: 449103 - DNA, 975 bp, Homo sapiens
tccggatccggagcggctgaaaggcggaagtggaggccggagcctgggacaccgccggcggggagagaagcggatcccgtccgagccccggccccaagtaacgccgccgccccggagccgccttggaggtccccctccccactaagtgcctctttgcatagcaccagtccccacccgcacgctctctggaccactacagctggacgggcaatggcgggtcggggaggcgcagcacgacccaatggaccagctgctgggaacaagatctgtcaatttaagctggttctgctgggggagtctgcggtaggcaaatccagcctcgtcctccgctttgtcaagggacagtttcacgagtaccaggagagcacaattggagcggccttcctcacacagactgtctgcctggatgacacaacagtcaagtttgagatctgggacacagctggacaggagcggtatcacagcctggcccccatgtactatcggggggcccaggctgccatcgtggtctatgacatcaccaacacagatacatttgcacgggccaagaactgggtgaaggagctacagaggcaggccagccccaacatcgtcattgcactcgcgggtaacaaggcagacctggccagcaagagagccgtggaattccaggaagcacaagcctatgcagacgacaacagtttgctgttcatggagacatcagcaaagactgcaatgaacgtgaacgaaatcttcatggcaatagctaagaagcttcccaagcaacgaaggcccccgagaaattggcaaagcttggggtggccttccccaagggggcccggaaaaaaaccccgaacgggttggttggggaaccccgttccccaaagggggaaggaaaaaacaaaaacggcccccaagggccccaaaggggccccgggggaaaggcccccaagggtttggcctttgggccaagggccaaaaaccctttgggaaagg

SEQ ID NO: 449104 - DNA, 1665 bp, Homo sapiens
tccggatccggagcggctgaaaggcggaagtggaggccggagcctgggacaccgccggcggggagagaagcggatcccgtccgagccccggccccaagtaacgccgccgccccggagccgccttggaggtccccctccccactaagtgcctctttgcatagcaccagtccccacccgcacgctctctggaccactacagctggacgggcaatggcgggtcggggaggcgcagcacgacccaatggaccagctgctgggaacaagatctgtcaatttaagctggttctgctgggggagtctgcggtaggcaaatccagcctcgtcctccgctttgtcaagggacagtttcacgagtaccaggagagcacaattggagcggccttcctcacacagactgtctgcctggatgacacaacagtcaagtttgagatctgggacacagctggacaggagcggtatcacagcctggcccccatgtactatcggggggcccaggctgccatcgtggtctatgacatcaccaacacagatacatttgcacgggccaagaactgggtgaaggagctacagaggcaggccagccccaacatcgtcattgcactcgcgggtaacaaggcagacctggccagcaagagagccgtggaattccaggaagcacaagcctatgcagacgacaacagtttgctgttcatggagacatcagcaaagactgcaatgaacgtgaacgaaatcttcatggcaatagctaagaagcttcccaagaacgagccccagaatgcaactggtgctccaggccgaaaccgaggtgtggacctccaggagaacaacccagccagccggagccagtgctgcagcaactgagccccccttgcctgcccgctgcccccgcctcctccgcctgaatgacccgactggaatccactctaaccaatcgcacttaacgactcgggccaccactgggggggcagggggaggggtccaccatgatttctccatataattttgatcataggccggagtgagtcattccacctgcacctttctgtacaaatactaattcaattttaagtcttaagtcacttttttaatatatatgatcttctgctcttcccacttcctcccctttctactgctctcccattttcccttgctgggagtagccacatgctcttgccccccaacccttgtatatggggacagtggggtcagtgcagctaccctttctttccctcctgcggaacagcggacccagcaagagcatccacatcctcactttgttcggagtggtctttggtttgggcggtggggcagaccttgggaaggggcttaggaagggagaggcagctcttccttcagctggctctcatcaggctgcagccccctccccgctcccacctccctgctgggaaaccacagcattatcacagcattattgtgacagccacgaacccattgcccacaacccctccaccctcggtcaccccaacctctggctctgagccctgttctgaccaaatcatgatgatgagtatttgggggtgggtgggtaagggggggagtgggaggggacggaaccaactttttctgtattttgtattgtatgttttcttcaacatgtaaccaatcagtatcttgtcaatatagtcagccgatcgatcgacctca

SEQ ID NO: 449105 - DNA, 626 bp, Homo sapiens
tccggatccggagcggctgaaaggcggaagtggaggccggagcctgggacaccgccggcggggagagaagcggatcccgtccgagccccggccccaagtaacgccgccgccccggagccgccttggaggtccccctccccactaagtgcctctttgcatagcaccagtccccacccgcacgctctctggaccactacagctggacgggcaatggcgggtcggggaggcgcagcacgacccaatggaccagctgctgggaacaagatctgtcaatttaagctggttctgctgggggagtctgcggtaggcaaatccagcctcgtcctccgctttgtcaagggacagtttcacgagtaccaggagagcacaattggagcggccttcctcacacagactgtctgcctggatgacacaacagtcaagtttgagatctgggacacagctggacaggagcggtatcacagcctggcccccatgtactatcggggggcccaggctgccatcgtggtctatgacatcaccaacacagtaaagatttccccttgcttcttcctttgcccttcatcttctcaaagtcccagggattgggttatcagagccctgatttcaggccgcttaaccctctg

SEQ ID NO: 449106 - DNA, 1782 bp, Homo sapiens
tccggatccggagcggctgaaaggcggaagtggaggccggagcctgggacaccgccggcggggagagaagcggatcccgtccgagccccggccccaagtaacgccgccgccccggagccgccagtctcgctctctcgccaggccggagtgcagtggcactatctcagctcagtgcaacctctgcctcccgggttcaagcgattctcctgcctcagcctcccgagtagctgggactacagttggaggtccccctccccactaagtgcctctttgcatagcaccagtccccacccgcacgctctctggaccactacagctggacgggcaatggcgggtcggggaggcgcagcacgacccaatggaccagctgctgggaacaagatctgtcaatttaagctggttctgctgggggagtctgcggtaggcaaatccagcctcgtcctccgctttgtcaagggacagtttcacgagtaccaggagagcacaattggagcggccttcctcacacagactgtctgcctggatgacacaacagtcaagtttgagatctgggacacagctggacaggagcggtatcacagcctggcccccatgtactatcggggggcccaggctgccatcgtggtctatgacatcaccaacacagatacatttgcacgggccaagaactgggtgaaggagctacagaggcaggccagccccaacatcgtcattgcactcgcgggtaacaaggcagacctggccagcaagagagccgtggaattccaggaagcacaagcctatgcagacgacaacagtttgctgttcatggagacatcagcaaagactgcaatgaacgtgaacgaaatcttcatggcaatagctaagaagcttcccaagaacgagccccagaatgcaactggtgctccaggccgaaaccgaggtgtggacctccaggagaacaacccagccagccggagccagtgctgcagcaactgagccccccttgcctgcccgctgcccccgcctcctccgcctgaatgacccgactggaatccactctaaccaatcgcacttaacgactcgggccaccactgggggggcagggggaggggtccaccatgatttctccatataattttgatcataggccggagtgagtcattccacctgcacctttctgtacaaatactaattcaattttaagtcttaagtcacttttttaatatatatgatcttctgctcttcccacttcctcccctttctactgctctcccattttcccttgctgggagtagccacatgctcttgccccccaacccttgtatatggggacagtggggtcagtgcagctaccctttctttccctcctgcggaacagcggacccagcaagagcatccacatcctcactttgttcggagtggtctttggtttgggcggtggggcagaccttgggaaggggcttaggaagggagaggcagctcttccttcagctggctctcatcaggctgcagccccctccccgctcccacctccctgctgggaaaccacagcattatcacagcattattgtgacagccacgaacccattgcccacaacccctccaccctcggtcaccccaacctctggctctgagccctgttctgaccaaatcatgatgatgagtatttgggggtgggtgggtaagggggggagtgggaggggacggaaccaactttttctgtattttgtattgtatgttttcttcaacatgtaaccaatcagtatcttgtcaatatagtcagccgatcgatcgacctca

SEQ ID NO: 449107 - DNA, 1368 bp, Homo sapiens
aagtgcggcgtaagcagtctgacaggattcttgctgaagccagacagggaggacaccgtgagggtgagcaatgacaatgagcttgagtagatgtcgaggggtcaggggttcgtgctaatctgacctaacagggtgcatgtggctgaaagtggaggtttataaggaaggcaacagttgggctccaggagaaggtgcagaaaccgcgaccagaaggctggccctgccatatgcgatacatttgcacgggccaagaactgggtgaaggagctacagaggcaggccagccccaacatcgtcattgcactcgcgggtaacaaggcagacctggccagcaagagagccgtggaattccaggaagcacaagcctatgcagacgacaacagtttgctgttcatggagacatcagcaaagactgcaatgaacgtgaacgaaatcttcatggcaatagctaagaagcttcccaagaacgagccccagaatgcaactggtgctccaggccgaaaccgaggtgtggacctccaggagaacaacccagccagccggagccagtgctgcagcaactgagccccccttgcctgcccgctgcccccgcctcctccgcctgaatgacccgactggaatccactctaaccaatcgcacttaacgactcgggccaccactgggggggcagggggaggggtccaccatgatttctccatataattttgatcataggccggagtgagtcattccacctgcacctttctgtacaaatactaattcaattttaagtcttaagtcacttttttaatatatatgatcttctgctcttcccacttcctcccctttctactgctctcccattttcccttgctgggagtagccacatgctcttgccccccaacccttgtatatggggacagtggggtcagtgcagctaccctttctttccctcctgcggaacagcggacccagcaagagcatccacatcctcactttgttcggagtggtctttggtttgggcggtggggcagaccttgggaaggggcttaggaagggagaggcagctcttccttcagctggctctcatcaggctgcagccccctccccgctcccacctccctgctgggaaaccacagcattatcacagcattattgtgacagccacgaacccattgcccacaacccctccaccctcggtcaccccaacctctggctctgagccctgttctgaccaaatcatgatgatgagtatttgggggtgggtgggtaagggggggagtgggaggggacggaaccaactttttctgtattttgtattgtatgttttcttcaacatgtaaccaatcagtatcttgtcaatatagtcagccgatcgatcgacctca

SEQ ID NO: 449108 - DNA, 985 bp, Homo sapiens
caaaatgacgaacacaaagggaaagaggagaggcacccgatatatgttctctaggcctttgagaaaacatggagttgttcctttggccacatatatgcgaatctataagaaaggtgatattgtagacatcaagggaatgggtactgttcaaaaaggaatgccccacaagtgttaccatggcaaaactggaagagtctacaatgttacccagcatgctgttggcattgttgtaaacaaacaagttaagggcaagattcttgccaagagaattaatgtgcgtattgagcacattaagcactctaagagccgagatagcttcctgaaacgtgtgaaggaaaatgagtcattccacctgcacctttctgtacaaatactaattcaattttaagtcttaagtcacttttttaatatatatgatcttctgctcttcccacttcctcccctttctactgctctcccattttcccttgctgggagtagccacatgctcttgccccccaacccttgtatatggggacagtggggtcagtgcagctaccctttctttccctcctgcggaacagcggacccagcaagagcatccacatcctcactttgttcggagtggtctttggtttgggcggtggggcagaccttgggaaggggcttaggaagggagaggcagctcttccttcagctggctctcatcaggctgcagccccctccccgctcccacctccctgctgggaaaccacagcattatcacagcattattgtgacagccacgaacccattgcccacaacccctccaccctcggtcaccccaacctctggctctgagccctgttctgaccaaatcatgatgatgagtatttgggggtgggtgggtaagggggggagtgggaggggacggaaccaactttttctgtattttgtattgtatgttttcttcaacatgtaaccaatcagtatcttgtcaatatagtcagccgatcgatcgacctca

SEQ ID NO: 449109 - DNA, 672 bp, Homo sapiens
tttttttttttttctttttcccttctcttcttaggaaccatcagtggacatgaatgtttctacaatgcatttcttcatagattttgtttatggttttgtttcttttttcttctttgtttttcagtgtgggagtgggaagaggagattatagtgactgaagaaagaataggcaaacttttcaaatgaaaatggatatttagtgtattttgtagaagatctccaaagatcttttgtgactacaacttcttttgtaaataatgatatatggtatttccatcgtcagttaccgagtatagccactgggtatcactactttgtgttaaagtgccttcgcactttaagtacattacttaaatgttgcttttagctttgataaattgaaaatattttaatgtgttgtatttttgaaattgaaaacactgtaaaatagattgatgtgtcagctatattaagtcaacgtacagtttgcttgagttatagaaaccagcctgtcatcaaatgattctagttctaggactttgtaggcttaactataaaatatttcctttcctctgggtttaagtgattttatttaagtcaactaaggggatttaacagtggactagaggtaataagccacctcagtcaggattaataattcattaataaaatatatttaacccaaaaaaaaag

SEQ ID NO: 449110 - DNA, 800 bp, Homo sapiens
caaggagatagcaaaggttaaatgactgggggctgtaaagggcacggcaaggagagaacgagtgatgatgtgtagggttggggagagtgcagtgatgggagcacagaccagggtgggagatggagcttggggtctcaatagtctcccttctttgcccacagaaaatttgtgaattcagcctggggctggacatgcactttcttagggggctttgtgttgctggtggtgttcctggctacacggcgcgtggcagtaactgccagacacctgagccgactggtagtaggggcagccgtgtggcggggagccggccgggccttcctgctcatcgaggacctgactggctcctgcttcgagccactgccccagggtctgctgctccacgagctgcctgaccgccgcagctgcctggcagccggccaccagtggcgaggctacaccgtctcctcccacaccttcctgctcaccttttgctgcctgctcatggcagaggaagcagctgtgttcgccaagtacctggcccatgggcttcctgccggcgccccactgcgccttgtcttcctgctgaacgtgctgctgctgggcctctggaacttcttgctgctctgtaccgtcatctatttccaccagtacactcacaaggtggtgggcgccgcagtgggcacctttgcctggtacctcacctatggcagctggtatcatcagccctggtctccagggagcccaggccatgggctcttcccccgtccccactccagccgcaagcataactgaaagaaataaaaaccatcgggcctggc

SEQ ID NO: 449111 - DNA, 910 bp, Homo sapiens
ggaacatggagcgggggccggtggtgggggcaggactgggggccggggcccgaatccaggcactgctgggctgcctgctcaaggtgctgctctgggtggcctctgccttgctgtactttggaagcgaacaggccgcccgccttctgggcagcccctgcttacggcgcctctaccatgcctggctggcagcagtggtcatctttgggccgcttctgcagttccatgtcaaccctcggactatcttcgccagccacggcaacttcttcaacataaaatttgtgaattcagcctggggctggacatgcactttcttagggggctttgtgttgctggtggtgttcctggctacacggcgcgtggcagtaactgccagacacctgagccgactggtagtaggggcagccgtgtggcggggagccggccgggccttcctgctcatcgaggacctgactggctcctgcttcgagccactgccccagggtctgctgctccacgagctgcctgaccgccgcagctgcctggcagccggccaccagtggcgaggctacaccgtctcctcccacaccttcctgctcaccttttgctgcctgctcatggcagaggaagcagctgtgttcgccaagtacctggcccatgggcttcctgccggcgccccactgcgccttgtcttcctgctgaacgtgctgctgctgggcctctggaacttcttgctgctctgtaccgtcatctatttccaccagtacactcacaaggtggtgggcgccgcagtgggcacctttgcctggtacctcacctatggcagctggtatcatcagccctggtctccagggagcccaggccatgggctcttcccccgtccccactccagccgcaagcataactgaaagaaataaaaaccatcgggcctggc

SEQ ID NO: 449112 - DNA, 1929 bp, Homo sapiens
cactggacaaaagcgtggtctctggcgcggggatctcagagtttcccgggcactcaccgtgtgtagttggcatctccgcgcgtccggacacccgatcccagcatccctgcctgcaggactgttcgtgttcagctcgcgtcctgcagctgtccgaggtgctccagttggaggctgaggttcccgggctctgtagctgagtgggcggcggcaccggcggagatgcctgggaagaaggcgcgcaagaacgctcaaccgagccccgcgcgggctccagcagagctggaagtcgagtgtgctactcaactcaggagatttggagacaaactgaacttccggcagaaacttctgaatctgatatccaaactcttctgctcaggaacctgactgcatcaaaaacttgcatgaggggactccttcaaaagagttttctcaggaggtgcacgtttcatcaatttgaagaaagactgcattgtaattgagaggaatgtgaaggtgcattcatgggtgcccttggaaacggaagatggaatacatcaaagtgaatttctgttcaagttttcccagattatcattctttgggatgagagaacattataaaaccactttgtttattttaaagcaagaatggaagacccttgaaaataaagaagtaattattgacacatttcttttttacttagagaatcgttctagtgtttttgccgaagattaccgctggcctactgtgaagggagatgacctgtgattagactgggcggctggggagaaacagttcagtgcattgttgttgttgctgtttttggtgttttgcttttcagtgccaactcagcacattgtatatgattcggtttatacatattaccttgttataatgaaaaaactcattctgagaacactgaaatgttatactcagtgttgatttcttcggtcactacacaacgtaaaatcatttgtttcttttgactcaaattgtattgcttctgttcagatgatctttcattcaatgtgttcctgttgggcgttactagaaactatggaaaactggaaaataactttgaaaaaattggataaagtataggagggttacttggggccagtaaatcagtagactgaacattcaatataataaaagaacatggggattttgtataaccagggataataaaaagaaaaaagaagttaatttttaattgatgtttttgaaacttagtagaacaaatattcagaagtaacttgataagatatgaatgtttctaaagaagtttctaaaggttcggaaaatgctccttgtcacattagtgtgcatcctacaaaaagtgatctcttaatgtaaattaagaatattttcataattggaatatacttttcttaaaaaaaaggaacagttagttctcatctagaatgaaagttccatatatgcattggtgaatatatatgtatacacatacttacatacttatatgggtatctgtatagataatttgtattagagtattatatagcttcttagtagggtctcaagtaagtttcattttttttatctgggctatatacagtcctcaaataaataatgtcttgattttatttcagcaggaataattttatttattttgcctatttataattaaagtatttttctttagtttgaaaatgtgtattaaagttacatttttgagttacaagagtcttataactacttgaatttttagttaaaatgtcttaatgtaggttgtagtcactttagatggaaaattacctcacatctgttttcttcagtattacttaagattgtttatttagtggtagagagttttttttttcagcctagaggcagctattttaccatctggtatttatggtctaatttgtatttaaacatatgcacacatataaaagttgatactgtggcagtaaactattaaaagtttt

SEQ ID NO: 449113 - DNA, 542 bp, Homo sapiens
gtaatatgattgattgtgctcgcctcagagggcggttatatattttgggtggagatggtgttgtgccgctcacattatttgggtctctcccccccgcccccgataatgatggtggggtgttggttttccacaaaaagaagtagcaacgtgcgtgacggtcggtgttttttccctcaccaccatacactcgttttggttataaagaaaggggccgccgcgcgcggcgtcggtattaataatataatagctccctcttttgtgggctccttctttatatttgggggggtgtgttgtggcggccccctgcggggagtgtgtgtgtgctgcgcgcgcccctccctttctttttttttttttttttttttttttttttttttttttttttttttttttgttttttttttttttttttttttttttttttttccgaggggagcccgggggcagctattttaccatctggtatttatggtctaatttgtatttaaacatatgcacacatataaaagttgatactgtggcagtaaactattaaaagtttt

SEQ ID NO: 449114 - DNA, 2216 bp, Homo sapiens
cactggacaaaagcgtggtctctggcgcggggatctcagagtttcccgggcactcaccgtgtgtagttggcatctccgcgcgtccggacacccgatcccagcatccctgcctgcaggactgttcgtgttcagctcgcgtcctgcagctgtccgaggtgctccagttggaggctgaggttcccgggctctgtagctgagtgggcggcggcaccggcggagatgcctgggaagaaggcgcgcaagaacgctcaaccgagccccgcgcgggctccagcaggaccggcgggtacggcgggtacggcgagggaccaagccggatttgcgattgggatgcagctgcgtttcaccaggggcaaaaagctcctttcctcctctctttcctcctcgccacttgcccttccccggggccacgaggaacaagtgcaagtgtaggcggctgtctctaggagaaagtcattgtcgcggcagaaggggcaggagagagccccggggaccgcctggactcccagcgcttccagagacggccccacaagggcccctgtgttcaggagcctagaaaatcttagctggaagtcgagtgtgctactcaactcaggagatttggagacaaactgaacttccggcagaaacttctgaatctgatatccaaactcttctgctcaggaacctgactgcatcaaaaacttgcatgaggggactccttcaaaagagttttctcaggaggtgcacgtttcatcaatttgaagaaagactgcattgtaattgagaggaatgtgaaggtgcattcatgggtgcccttggaaacggaagatggaatacatcaaagtgaatttctgttcaagttttcccagattatcattctttgggatgagagaacattataaaaccactttgtttattttaaagcaagaatggaagacccttgaaaataaagaagtaattattgacacatttcttttttacttagagaatcgttctagtgtttttgccgaagattaccgctggcctactgtgaagggagatgacctgtgattagactgggcggctggggagaaacagttcagtgcattgttgttgttgctgtttttggtgttttgcttttcagtgccaactcagcacattgtatatgattcggtttatacatattaccttgttataatgaaaaaactcattctgagaacactgaaatgttatactcagtgttgatttcttcggtcactacacaacgtaaaatcatttgtttcttttgactcaaattgtattgcttctgttcagatgatctttcattcaatgtgttcctgttgggcgttactagaaactatggaaaactggaaaataactttgaaaaaattggataaagtataggagggttacttggggccagtaaatcagtagactgaacattcaatataataaaagaacatggggattttgtataaccagggataataaaaagaaaaaagaagttaatttttaattgatgtttttgaaacttagtagaacaaatattcagaagtaacttgataagatatgaatgtttctaaagaagtttctaaaggttcggaaaatgctccttgtcacattagtgtgcatcctacaaaaagtgatctcttaatgtaaattaagaatattttcataattggaatatacttttcttaaaaaaaaggaacagttagttctcatctagaatgaaagttccatatatgcattggtgaatatatatgtatacacatacttacatacttatatgggtatctgtatagataatttgtattagagtattatatagcttcttagtagggtctcaagtaagtttcattttttttatctgggctatatacagtcctcaaataaataatgtcttgattttatttcagcaggaataattttatttattttgcctatttataattaaagtatttttctttagtttgaaaatgtgtattaaagttacatttttgagttacaagagtcttataactacttgaatttttagttaaaatgtcttaatgtaggttgtagtcactttagatggaaaattacctcacatctgttttcttcagtattacttaagattgtttatttagtggtagagagttttttttttcagcctagaggcagctattttaccatctggtatttatggtctaatttgtatttaaacatatgcacacatataaaagttgatactgtggcagtaaactattaaaagtttt

SEQ ID NO: 449115 - DNA, 1260 bp, Homo sapiens
  misc_feature (29)..(29): n is a, c, g, or t
  misc_feature (56)..(56): n is a, c, g, or t
  misc_feature (134)..(134): n is a, c, g, or t
  misc_feature (142)..(142): n is a, c, g, or t
  misc_feature (157)..(158): n is a, c, g, or t
atctcgctctctatcagtcgtatgtacanccttgtacgatatacctcactacactncactccgttcatcgctctcctacttacatcgagagtgctcttagagatctactactccgctccccccacatgaacccnattggagntcttgcgacatgcgnngaacctgccaattcggccattatggccgatattaccttgttataatgaaaaaactcattctgagaacactgaaatgttatactcagtgttgatttcttcggtcactacacaacgtaaaatcatttgtttcttttgactcaaattgtattgcttctgttcagatgatctttcattcaatgtgttcctgttgggcgttactagaaactatggaaaactggaaaataactttgaaaaaattggataaagtataggagggttacttggggccagtaaatcagtagactgaacattcaatataataaaagaacatggggattttgtataaccagggataataaaaagaaaaaagaagttaatttttaattgatgtttttgaaacttagtagaacaaatattcagaagtaacttgataagatatgaatgtttctaaagaagtttctaaaggttcggaaaatgctccttgtcacattagtgtgcatcctacaaaaagtgatctcttaatgtaaattaagaatattttcataattggaatatacttttcttaaaaaaaaggaacagttagttctcatctagaatgaaagttccatatatgcattggtgaatatatatgtatacacatacttacatacttatatgggtatctgtatagataatttgtattagagtattatatagcttcttagtagggtctcaagtaagtttcattttttttatctgggctatatacagtcctcaaataaataatgtcttgattttatttcagcaggaataattttatttattttgcctatttataattaaagtatttttctttagtttgaaaatgtgtattaaagttacatttttgagttacaagagtcttataactacttgaatttttagttaaaatgtcttaatgtaggttgtagtcactttagatggaaaattacctcacatctgttttcttcagtattacttaagattgtttatttagtggtagagagttttttttttcagcctagaggcagctattttaccatctggtatttatggtctaatttgtatttaaacatatgcacacatataaaagttgatactgtggcagtaaactattaaaagtttt

SEQ ID NO: 449116 - DNA, 7560 bp, Homo sapiens
aatgaattagagaaacagatgaattgtaacttgaaggaactcaaggaatttatagacaatgagatgctacttatcttgggacagatggacaagccctcccttatcttcgatcatctttatctcggttgattacattttaaatgttaccagagaaatcgataatttttttcctggcttatttgcatatcataacatccgagtctacgatgaagagaccacagacctcctcgcccactggaatgaagcgtatcattttataaacaaagcgaagaggaaccattccaagtgcctggtgcattgcaaaatgggcgtgagtcgctcggcctccacagtcatagcctatgcaatgaaggaattcggctggcctctggaaaaagcatataactatgtaaagcagaagcgcagcatcacgcgccccaacgcgggctttatgaggcagctgtctgagtatgaaggcatcttggatgcaagcaaacagcggcacaacaagctgtggcgtcagcagacagacagcagcctccagcagcctgtggatgaccctgcaggacctggcgacttcttgccagagaccccagatggcaccccggaaagccagctgcccttcttggatgatgccgcccagcccggcttagggccccccctcccctgctgtttccggcgactctcagacccccttctgccttcccctgaggatgaaactggcagcttggtccacctggaggatccggagagggaggctctgttggaggaagctgctccacctgcagaggtgcacaggccggccagacagccccagcaaggttccggactctgtgagaaggatgtgaagaagaaactagagtttgggagtcccaaaggtcggagcggctccttgctgcaggtggaggagacggaaagggaggagggcctgggagcagggaggtgggggcagcttccaacccagctcgatcaaaacctgctcaactcggagaacctaaacaacaacagcaagaggagctgtcccaacggcatggaggatgatgctatatttgggatccttaacaaagtgaagccttcctataaatcctgtgccgactgcatgtaccctacagccagcggggctcctgaggcctccagggagcgatgtgaggaccccaatgctcccgccatctgcacccagccagccttcctaccccacatcacgtcctcccctgtggcccacttggccagcaggtcccgtgttccggagaagccagcctctggcccaaccgaacctcccccgttcctaccaccagcaggctccaggagggcagacaccagtggccctggggctggagctgccctagagccaccagccagccttttggaaccttccagagagaccccaaaagtcctgccaaagtccctccttttgaagaattctcactgtgataagaaccctcccagcacagaagtggtaataaaggaagaatcgtcacccaagaaagatatgaagccagccaaggacctgaggcttctgttcagtaatgaatctgagaagccgacaaccaacagctacctgatgcagcaccaggagtccatcattcagctgcagaaggcaggcttggtccgcaagcacaccaaagagctagagcggctgaagagcgtgcctgcagacccagcacctccctccagggatggccctgccagcaggctggaggccagcatccccgaggagagccaggatccagccgcgctccacgagctgggccccctggttatgcccagccaggccgggagtgatgagaagtcagaggccgcccccgcttcattggaaggaggctcactgaagagcccccctcctttcttctaccgcctggaccacaccagtagtttctcaaaagactttctgaagaccatctgctacacccccacctcctcttccatgagctccaacctgacccggagctccagcagcgatagcatccacagtgtccgtgggaagcccgggctggtgaagcagcggacacaggagattgagacccggctccggctggcgggcctcaccgtctcttccccactgaagcgctcacactctcttgccaagctggggagtctcaccttctcaacggaagacctgtccagtgaggctgacccgtccaccgtcgctgactcccaggacaccactttgagtgaatcttccttcttgcatgagccccagggaaccccgagggacccagctgcaacctccaaaccatcagggaaacccgccccagaaaacttaaagagcccttcgtggatgagcaaaagctgacccgccttttgctgcgtcaggctgggcggatattttcatatgatccctccctcactttcactgtggatttggatcgaccccttacatcttgatttcccttaaacgagtgaagtcatcctaacttttcccctactcttgccatagagaggaggagaagaaactaaccaacatgcagcacaagaaggggagctgtcagtcgtgtggcctgggagaaccaggagccgccggccaggagacacaaaactccgctcccaccgtgtcttcaagaagaaccatgttttaggaagaacgtgcacacataggcgcacacatccagactgttcccttcgcatcctgcagaagagtcctggtggtggcagcctcaccgcggcacacgttctagctcattcttggcctcgcagaaaactctcggatggcaacattaagtcctacctctgttctcgctgcgctttttatttttaaaacacacgaatgaccaaggcttgttccagggaataatgctctgtctgaaagcgtttttccaaaaaaagaatttttcgttttgtgttttggttgggaccccagacgtgtcaagacttttaacccgacagccccaagcactgctgagtaaagtcatcagatgagtagtcccacgctgttgttgagctgactctgtgcccgaatggtggtgcaggcgccctgtcctggttgtgttgttacgtgtttgaccagcacaggggtccggtggggaaaatgtatgggttgttctcagttgttgctaatgctgaagtttaaatctcaaggggaagggcccacctgcattgttgagtgtctgctgctgaaacacatgattgtgtttaggtttgaaattgctcaagtgtctggctcaggtggtggttctgagacacatcgtcctgctgagagcccagatgcttaggtccactagggcccatctagggaagggaaaggagatttcagcggcttccccgaaaggaacgggactgtcgggatgcttcccggatgtctacagttgccccttcctgcagtgagattactgcttcctgtttccctccagctcttcccagcagcagtgagggagtataagagggatctgtagtcgctgcctggctctgtgggcggcccctttaagactcaggtgagctcagccagtcccgctgcgccaggcttgaatcaaaggtgtcagcaagctagatgtcaaaacatttcgagagagaggcagcttgcagaaaagcagaaaggttgaattcaggggtcagcaaactatggcatgtggccccgtgagctaggaatggtttttcctctttaagacagggcctggctctgtcacctaggctggagtacagtagtgcaatcatgactcactgcagcatcaacctccctggctcaagcgatggcttttacctttttaaggagttgtaaaaaaaagaaataatatgtgacagaattcatgtggcccacaaagcctgaggtacttactgtcaggccctttgtagaaaaagttgctgacccctggtttgatttgccacacagggctgctcatggccctgtaggaagaaactgggtaaatgtgaagccctctgcctctctgacacctaaggccagacccttccctcctcccgaccacaagctttgccagccccgcactagcctcacctgtgcaggatggagtaggttgcgtacatgggggaaggcaggtgaacacagttggctgaagctcttccacaattccatcttgccctcagctgggtccgccagattaactcagtgaaaccagaaagccttcaaggaccagctgaattctgaaagtgagtgagtgagccatcatcttaacattggccagaactgtgttccccaaagctattctagaaagcaccccaggagggatctgcaggaacaaggctagttcatattttacctagtgagcacagtttttgcaaaaatcctccctccaggactttgtctccttggagtgatttttaaaaatacatacattactttatagggagctgttttcccactagtgtcaattaaaatcaccttaaaaggtgattatccacttattcctaaacccctgtgggttgttccccctttccctcagccaacaaaagcatagcctcaaaaaatatcaagttcggtatgttttgccaaatcaaatttcatgtggtagatcaatttttgtgtcaaaataatcttttaaatttagtgatgacaggcttttgttggttttttaaccacgtctatgtatgagaatgatatatttttgaaaactttaattttgaaagccataatttttcttatctaaagagttggggggtggggtgtggaatctggagagtacaagttggtctttggcttctggcaaacttacccattcatttttggaagcacagctagcatatcaacatccagacgagagcgctggtcccgtccacagagcagagtgaagcattctggacttgatgcttaatagcctggcctggagaaaagggtaaggtttatttttggaaacccagatcagttgcatgtaaacagatggcacatggctatttaaaatgctgtatgatggggccgggcgcggtggctcacgcctgtaatcctagcactttgggaggccgaggcaggcggatcatctgaggtcaggagttctagaccagcctggccaacatggtgaaaccccgtctctactaaaaatacaaaaacttagctgggtgtggtagtgcgtgcctgtaatcctagctacttaggaggctgaggcaggagaatcgcttgaacctgggtggcggaggttgcaatgagccgagatcgcgccactgcactccagcctgggtgcaatgaaactgggagtgaaactccgtctcaaaaaaataaaatgctgtatgaacaagatgagcattctgtcaggtgtcgggacacctgggcaaagacgaattcatgctgtctgtgaaaaggaagtttgcactgtaacatatgccatagcttggcccttgctttgtatgcaaccttagctgatggggaaaattccaaacataagtggcacaggaaagaggcaggcagaggaggcaggggtctgtgctgtgcaagtcactggttttttatgactatcattttcattgaatgcatttgttgaattgggacaaaaggaacattttctaaatcagcttgatactctttataaaaaacagctgaatcttatcttctgcctcacattaattcatgtggcatgccaaaagttagactgaacttttctacatcttcaccttgcattgatacaggaaagtcttctctttaagtcttgctaagtataagggggatagtggtcacgggaagaggagaaccggggctgctctcggatggtaattgacaatgccgatttccatttctttgtcttacggctacttccgagccttctagcaaggtccctggttgcatgtatttcctaagagcagagtttatttctctttacattccctgcttccttgctctccatgcagggaccccagccaacctctgggctgttgaatagctctctgctgggtggcaagcccttctccttggcaccctgttgcttaagcatacagattgctcaccaggtgcacacagacagctgtactgtccaagcccattctgctccaccctgtcctcttcagctaaagagcattccagtaatctaaagcccttttcccctggagaagtccagagtttgcagcagtgtggagctgagcttgaacagaacagaccctcagcacggccctggactaatgcactcttatctgagggcagtccattctagaaggttgatgaatttccctaccactctcctggggaccttttctctctagtgggaacaaatgctacataatttagtcaagatcctattaagtcatctcacctgaggcatctggagagggagttgccttccattggtgggaaattgttggtgccagaatacattttgcccaaaactcttctcattggctggccacctagcagggctcctctaaacacgcaactcagcgaggggacccccttcacctctggcaagagagctgggtagatcagaaacttggtgacacctggctagcacagagcaggctcacttgtcttggtcccactacccagattcctgcagacattgcaaaccaaatgaaggttgttgaatgacccctgtccccagccacttgttttgttatcatctgctctgcagtggaatgcctgtgtgtttgagttcactctgcatctgtatatttgagtatagaaaccgagtcaagtgatcatgtgcatccagacacactgtgtcacctgagccacagagcaaatcaccttaacgatctggaatgaaactgtgaccagtgccgccctgggtggttctggagagactgccgtcttcttgtttggccataggtgctggggccccggcttcagtcactgtctcagacaggagtcccgataagcagatcaccagtcctccactgtccttcctgtcggccttgctgcatgagaagatagctgcttcctccctcttttcctacactgtaattattgttttacaattgagtgccttaataatagtttacaaatactatgtatttatgcaaaactgttaaagtctcatctgttatgattggatacttggtcttgtcagtagtggtcagcattgggttgtgagcttgtcctactccatacgtgtttatcctgctatgcagttttacattgtgtgttcacatctattccaaggagccttgctagaaacaacactggcggttcctgcaggccaggcaggcattggcccatgctgtgtcccataggagccaatgaaagaacgtagcttggtctgctagccagccgtggggtggcgcaggccaggcagcctctgcaccagagtccagcacctgcccattccccagtcacacaatcatactcttctttcatagagattttattaccacctagaccaccctagttttcctctctgttagtgtcctgagctcttttgcaacaaaatgtaggtacagaccaatccctgtcccttccccaatcaggagctccacaccatgagttgtttggttttccagaagctgccagtgggttcccgtgaattgcgttaagatatcgatgattttttttattgtttttcttcttgtttttttaaataatatatttaaaggcagtatcttttgtactgtgaatttgcagtagaagatgcagaatgcactttttttttacttctgttggtgtgtattgtatatagtgtgtgtgcttcttgtgatgaaaataaactttttctttat

SEQ ID NO: 449117 - DNA, 7834 bp, Homo sapiens
aatgaattagagaaacagatgaattgtaacttgaaggaactcaaggaatttatagacaatgagatgctacttatcttgggacagatggacaagccctcccttatcttcgatcatctttatctcggttgattacattttaaatgttaccagagaaatcgataatttttttcctggcttatttgcatatcataacatccgagtctacgatgaagagaccacagacctcctcgcccactggaatgaagcgtatcattttataaacaaagcgaagaggaaccattccaagtgcctggtgcattgcaaaatgggcgtgagtcgctcggcctccacagtcatagcctatgcaatgaaggaattcggctggcctctggaaaaagcatataactatgtaaagcagaagcgcagcatcacgcgccccaacgcgggctttatgaggcagctgtctgagtatgaaggcatcttggatgcaagcaaacagcggcacaacaagctgtggcgtcagcagacagacagcagcctccagcagcctgtggatgaccctgcaggacctggcgacttcttgccagagaccccagatggcaccccggaaagccagctgcccttcttggatgatgccgcccagcccggcttagggccccccctcccctgctgtttccggcgactctcagacccccttctgccttcccctgaggatgaaactggcagcttggtccacctggaggatccggagagggaggctctgttggaggaagctgctccacctgcagaggtgcacaggccggccagacagccccagcaaggttccggactctgtgagaaggatgtgaagaagaaactagagtttgggagtcccaaaggtcggagcggctccttgctgcaggtggaggagacggaaagggaggagggcctgggagcagggaggtgggggcagcttccaacccagctcgatcaaaacctgctcaactcggagaacctaaacaacaacagcaagaggagctgtcccaacggcatggaggatgatgctatatttgggatccttaacaaagtgaagccttcctataaatcctgtgccgactgcatgtaccctacagccagcggggctcctgaggcctccagggagcgatgtgaggaccccaatgctcccgccatctgcacccagccagccttcctaccccacatcacgtcctcccctgtggcccacttggccagcaggtcccgtgttccggagaagccagcctctggcccaaccgaacctcccccgttcctaccaccagcaggctccaggagggcagacaccagtggccctggggctggagctgccctagagccaccagccagccttttggaaccttccagagagaccccaaaagtcctgccaaagtccctccttttgaagaattctcactgtgataagaaccctcccagcacagaagtggtaataaaggaagaatcgtcacccaagaaagatatgaagccagccaaggacctgaggcttctgttcagtaatgaatctgagaagccgacaaccaacagctacctgatgcagcaccaggagtccatcattcagctgcagaaggcaggcttggtccgcaagcacaccaaagagctagagcggctgaagagcgtgcctgcagacccagcacctccctccagggatggccctgccagcaggctggaggccagcatccccgaggagagccaggatccagccgcgctccacgagctgggccccctggttatgcccagccaggccgggagtgatgagaagtcagaggccgcccccgcttcattggaaggaggctcactgaagagcccccctcctttcttctaccgcctggaccacaccagtagtttctcaaaagactttctgaagaccatctgctacacccccacctcctcttccatgagctccaacctgacccggagctccagcagcgatagcatccacagtgtccgtgggaagcccgggctggtgaagcagcggacacaggagattgagacccggctccggctggcgggcctcaccgtctcttccccactgaagcgctcacactctcttgccaagctggggagtctcaccttctcaacggaagacctgtccagtgaggctgacccgtccaccgtcgctgactcccaggacaccactttgagtgaatcttccttcttgcatgagccccagggaaccccgagggacccagctgcaacctccaaaccatcagggaaacccgccccagaaaacttaaagagcccttcgtggatgagcaaaagctgacccgccttttgctgcgtcaggctgggcggatattttcatatgatccctccctcactttcactgtggatttggatcgaccccttacatcttgatttcccttaaacgagtgaagtcatcctaacttttcccctactcttgccatagagaggaggagaagaaactaaccaacatgcagcacaagaaggggagctgtcagtcgtgtggcctgggagaaccaggagccgccggccaggagacacaaaactccgctcccaccgtgtcttcaagaagaaccatgttttaggaagaacgtgcacacataggcgcacacatccagactgttcccttcgcatcctgcagaagagtcctggtggtggcagcctcaccgcggcacacgttctagctcattcttggcctcgcagaaaactctcggatggcaacattaagtcctacctctgttctcgctgcgctttttatttttaaaacacacgaatgaccaaggcttgttccagggaataatgctctgtctgaaagcgtttttccaaaaaaagaatttttcgttttgtgttttggttgggaccccagacgtgtcaagacttttaacccgacagccccaagcactgctgagtaaagtcatcagatgagtagtcccacgctgttgttgagctgactctgtgcccgaatggtggtgcaggcgccctgtcctggttgtgttgttacgtgtttgaccagcacaggggtccggtggggaaaatgtatgggttgttctcagttgttgctaatgctgaagtttaaatctcaaggggaagggcccacctgcattgttgagtgtctgctgctgaaacacatgattgtgtttaggtttgaaattgctcaagtgtctggctcaggtggtggttctgagacacatcgtcctgctgagagcccagatgcttaggtccactagggcccatctagggaagggaaaggagatttcagcggcttccccgaaaggaacgggactgtcgggatgcttcccggatgtctacagttgccccttcctgcagtgagattactgcttcctgtttccctccagctcttcccagcagcagtgagggagtataagagggatctgtagtcgctgcctggctctgtgggcggcccctttaagactcaggtgagctcagccagtcccgctgcgccaggcttgaatcaaaggtgtcagcaagctagatgtcaaaacatttcgagagagaggcagcttgcagaaaagcagaaaggttgaattcaggggtcagcaaactatggcatgtggccccgtgagctaggaatggtttttcctctttaagacagggcctggctctgtcacctaggctggagtacagtagtgcaatcatgactcactgcagcatcaacctccctggctcaagcgatggcttttacctttttaaggagttgtaaaaaaaagaaataatatgtgacagaattcatgtggcccacaaagcctgaggtacttactgtcaggccctttgtagaaaaagttgctgacccctggtttgatttgccacacagggctgctcatggccctgtaggaagaaactgggtaaatgtgaagccctctgcctctctgacacctaaggccagacccttccctcctcccgaccacaagctttgccagccccgcactagcctcacctgtgcaggatggagtaggttgcgtacatgggggaaggcaggtgaacacagttggctgaagctcttccacaattccatcttgccctcagctgggtccgccagattaactcagtgaaaccagaaagccttcaaggaccagctgaattctgaaagtgagtgagtgagccatcatcttaacattggccagaactgtgttccccaaagctattctagaaagcaccccaggagggatctgcaggaacaaggctagttcatattttacctagtgagcacagtttttgcaaaaatcctccctccaggactttgtctccttggagtgatttttaaaaatacatacattactttatagggagctgttttcccactagtgtcaattaaaatcaccttaaaaggtgattatccacttattcctaaacccctgtgggttgttccccctttccctcagccaacaaaagcatagcctcaaaaaatatcaagttcggtatgttttgccaaatcaaatttcatgtggtagatcaatttttgtgtcaaaataatcttttaaatttagtgatgacaggcttttgttggttttttaaccacgtctatgtatgagaatgatatatttttgaaaactttaattttgaaagccataatttttcttatctaaagagttggggggtggggtgtggaatctggagagtacaagttggtctttggcttctggcaaacttacccattcatttttggaagcacagctagcatatcaacatccagacgagagcgctggtcccgtccacagagcagagtgaagcattctggacttgatgcttaatagcctggcctggagaaaagggtaaggtttatttttggaaacccagatcagttgcatgtaaacagatggcacatggctatttaaaatgctgtatgatggggccgggcgcggtggctcacgcctgtaatcctagcactttgggaggccgaggcaggcggatcatctgaggtcaggagttctagaccagcctggccaacatggtgaaaccccgtctctactaaaaatacaaaaacttagctgggtgtggtagtgcgtgcctgtaatcctagctacttaggaggctgaggcaggagaatcgcttgaacctgggtggcggaggttgcaatgagccgagatcgcgccactgcactccagcctgggtgcaatgaaactgggagtgaaactccgtctcaaaaaaataaaatgctgtatgaacaagatgagcattctgtcaggtgtcgggacacctgggcaaagacgaattcatgctgtctgtgaaaaggaagtttgcactgtaacatatgccatagcttggcccttgctttgtatgcaaccttagctgatggggaaaattccaaacataagtggcacaggaaagaggcaggcagaggaggcaggggtctgtgctgtgcaagtcactggttttttatgactatcattttcattgaatgcatttgttgaattgggacaaaaggaacattttctaaatcagcttgatactctttataaaaaacagctgaatcttatcttctgcctcacattaattcatgtggcatgccaaaagttagactgaacttttctacatcttcaccttgcattgatacaggaaagtcttctctttaagtcttgctaagtataagggggatagtggtcacgggaagaggagaaccggggctgctctcggatggtaattgacaatgccgatttccatttctttgtcttacggctacttccgagccttctagcaaggtccctggttgcatgtatttcctaagagcagagtttatttctctttacattccctgcttccttgctctccatgcagggaccccagccaacctctgggctgttgaatagctctctgctgggtggcaagcccttctccttggcaccctgttgcttaagcatacagattgctcaccaggtgcacacagacagctgtactgtccaagcccattctgctccaccctgtcctcttcagctaaagagcattccagtaatctaaagcccttttcccctggagaagtccagagtttgcagcagtgtggagctgagcttgaacagaacagaccctcagcacggccctggactaatgcactcttatctgagggcagtccattctagaaggttgatgaatttccctaccactctcctggggaccttttctctctagtgggaacaaatgctacataatttagtcaagatcctattaagtcatctcacctgaggcatctggagagggagttgccttccattggtgggaaattgttggtgccagaatacattttgcccaaaactcttctcattggctggccacctagcagggctcctctaaacacgcaactcagcgaggggacccccttcacctctggcaagagagctgggtagatcagaaacttggtgacacctggctagcacagagcaggctcacttgtcttggtcccactacccagattcctgcagacattgcaaaccaaatgaaggttgttgaatgacccctgtccccagccacttgttttgttatcatctgctctgcagtggaatgcctgtgtgtttgagttcactctgcatctgtatatttgagtatagaaaccgagtcaagtgatcatgtgcatccagacacactgtgtcacctgagccacagagcaaatcaccttaacgatctggaatgaaactgtgaccagtgccgccctgggtggttctggagagactgccgtcttcttgtttggccataggtgctggggccccggcttcagtcactgtctcagacaggagtcccgataagcagatcaccagtcctccactgtccttcctgtcggccttgctgcatgagaagatagctgcttcctccctcttttcctacactgtaattattgttttacaattgagtgccttaataatagtttacaaatactatgtatttatgcaaaactgttaaagtctcatctgttatgattggatacttggtcttgtcagtagtggtcagcattgggttgtgagcttgtcctactccatacgtgtttatcctgctatgcagttttacattgtgtgttcacatctattccaaggagccttgctagaaacaacactggcggttcctgcaggccaggcaggcattggcccatgctgtgtcccataggagccaatgaaagaacgtagcttggtctgctagccagccgtggggtggcgcaggccaggcagcctctgcaccagagtccagcacctgcccattccccagtcacacaatcatactcttctttcatagagattttattaccacctagaccaccctagttttcctctctgttagtgtcctgagctcttttgcaacaaaatgtaggtacagaccaatccctgtcccttccccaatcaggagctccacaccatgagttgtttggttttccagaagctgccagtgggttcccgtgaattgcgttaagatatcgatgattttttttattgtttttcttcttgtttttttaaataatatatttaaaggcagtatcttttgtactgtgaatttgcagtagaagatgcagaatgcactttttttttacttctgttggtgtgtattgtatatagtgtgtgtgcttcttgtgatgaaaataaactttttctttataaattcctgatgactgagtttatataaaaggaaactgcttcctcagcccttgccaaaacagtctgatacatcgtcatcatcatcgtcattgacatggccagtctttattgagcatctattacatgctcagttctttgctagaaaacctggacaagttacaccaaagaaaggaccacaggaagaaatgatagttcctcctggaactagtctgttttctttctaattttgtcagtaagcaagaacaggcccacctgtgggtggtcctttgtgtacc

SEQ ID NO: 449118 - DNA, 6822 bp, Homo sapiens
acttagatcctcactgaccaaaaggcaggagggtttccttaggaaacaatgtaaacttgttttctattggggtataaaatccacctcaggccagtggttattctcgatcaagtgggctccaggaggtctgtctgtcagtattaagtgaaatgagagcctcccctccaggcctggcccccagtccggcctcgcacccctttccctgcccaccctcatgtttttggtctttggctcatgactgcaccgtctcaccatgctcttgtccccttccttgcaggatgatgctatatttgggatccttaacaaagtgaagccttcctataaatcctgtgccgactgcatgtaccctacagccagcggggctcctgaggcctccagggagcgatgtgaggaccccaatgctcccgccatctgcacccagccagccttcctaccccacatcacgtcctcccctgtggcccacttggccagcaggtcccgtgttccggagaagccagcctctggcccaaccgaacctcccccgttcctaccaccagcaggctccaggagggcagacaccagtggccctggggctggagctgccctagagccaccagccagccttttggaaccttccagagagaccccaaaagtcctgccaaagtccctccttttgaagaattctcactgtgataagaaccctcccagcacagaagtggtaataaaggaagaatcgtcacccaagaaagatatgaagccagccaaggacctgaggcttctgttcagtaatgaatctgagaagccgacaaccaacagctacctgatgcagcaccaggagtccatcattcagctgcagaaggcaggcttggtccgcaagcacaccaaagagctagagcggctgaagagcgtgcctgcagacccagcacctccctccagggatggccctgccagcaggctggaggccagcatccccgaggagagccaggatccagccgcgctccacgagctgggccccctggttatgcccagccaggccgggagtgatgagaagtcagaggccgcccccgcttcattggaaggaggctcactgaagagcccccctcctttcttctaccgcctggaccacaccagtagtttctcaaaagactttctgaagaccatctgctacacccccacctcctcttccatgagctccaacctgacccggagctccagcagcgatagcatccacagtgtccgtgggaagcccgggctggtgaagcagcggacacaggagattgagacccggctccggctggcgggcctcaccgtctcttccccactgaagcgctcacactctcttgccaagctggggagtctcaccttctcaacggaagacctgtccagtgaggctgacccgtccaccgtcgctgactcccaggacaccactttgagtgaatcttccttcttgcatgagccccagggaaccccgagggacccagctgcaacctccaaaccatcagggaaacccgccccagaaaacttaaagagcccttcgtggatgagcaaaagctgacccgccttttgctgcgtcaggctgggcggatattttcatatgatccctccctcactttcactgtggatttggatcgaccccttacatcttgatttcccttaaacgagtgaagtcatcctaacttttcccctactcttgccatagagaggaggagaagaaactaaccaacatgcagcacaagaaggggagctgtcagtcgtgtggcctgggagaaccaggagccgccggccaggagacacaaaactccgctcccaccgtgtcttcaagaagaaccatgttttaggaagaacgtgcacacataggcgcacacatccagactgttcccttcgcatcctgcagaagagtcctggtggtggcagcctcaccgcggcacacgttctagctcattcttggcctcgcagaaaactctcggatggcaacattaagtcctacctctgttctcgctgcgctttttatttttaaaacacacgaatgaccaaggcttgttccagggaataatgctctgtctgaaagcgtttttccaaaaaaagaatttttcgttttgtgttttggttgggaccccagacgtgtcaagacttttaacccgacagccccaagcactgctgagtaaagtcatcagatgagtagtcccacgctgttgttgagctgactctgtgcccgaatggtggtgcaggcgccctgtcctggttgtgttgttacgtgtttgaccagcacaggggtccggtggggaaaatgtatgggttgttctcagttgttgctaatgctgaagtttaaatctcaaggggaagggcccacctgcattgttgagtgtctgctgctgaaacacatgattgtgtttaggtttgaaattgctcaagtgtctggctcaggtggtggttctgagacacatcgtcctgctgagagcccagatgcttaggtccactagggcccatctagggaagggaaaggagatttcagcggcttccccgaaaggaacgggactgtcgggatgcttcccggatgtctacagttgccccttcctgcagtgagattactgcttcctgtttccctccagctcttcccagcagcagtgagggagtataagagggatctgtagtcgctgcctggctctgtgggcggcccctttaagactcaggtgagctcagccagtcccgctgcgccaggcttgaatcaaaggtgtcagcaagctagatgtcaaaacatttcgagagagaggcagcttgcagaaaagcagaaaggttgaattcaggggtcagcaaactatggcatgtggccccgtgagctaggaatggtttttcctctttaagacagggcctggctctgtcacctaggctggagtacagtagtgcaatcatgactcactgcagcatcaacctccctggctcaagcgatggcttttacctttttaaggagttgtaaaaaaaagaaataatatgtgacagaattcatgtggcccacaaagcctgaggtacttactgtcaggccctttgtagaaaaagttgctgacccctggtttgatttgccacacagggctgctcatggccctgtaggaagaaactgggtaaatgtgaagccctctgcctctctgacacctaaggccagacccttccctcctcccgaccacaagctttgccagccccgcactagcctcacctgtgcaggatggagtaggttgcgtacatgggggaaggcaggtgaacacagttggctgaagctcttccacaattccatcttgccctcagctgggtccgccagattaactcagtgaaaccagaaagccttcaaggaccagctgaattctgaaagtgagtgagtgagccatcatcttaacattggccagaactgtgttccccaaagctattctagaaagcaccccaggagggatctgcaggaacaaggctagttcatattttacctagtgagcacagtttttgcaaaaatcctccctccaggactttgtctccttggagtgatttttaaaaatacatacattactttatagggagctgttttcccactagtgtcaattaaaatcaccttaaaaggtgattatccacttattcctaaacccctgtgggttgttccccctttccctcagccaacaaaagcatagcctcaaaaaatatcaagttcggtatgttttgccaaatcaaatttcatgtggtagatcaatttttgtgtcaaaataatcttttaaatttagtgatgacaggcttttgttggttttttaaccacgtctatgtatgagaatgatatatttttgaaaactttaattttgaaagccataatttttcttatctaaagagttggggggtggggtgtggaatctggagagtacaagttggtctttggcttctggcaaacttacccattcatttttggaagcacagctagcatatcaacatccagacgagagcgctggtcccgtccacagagcagagtgaagcattctggacttgatgcttaatagcctggcctggagaaaagggtaaggtttatttttggaaacccagatcagttgcatgtaaacagatggcacatggctatttaaaatgctgtatgatggggccgggcgcggtggctcacgcctgtaatcctagcactttgggaggccgaggcaggcggatcatctgaggtcaggagttctagaccagcctggccaacatggtgaaaccccgtctctactaaaaatacaaaaacttagctgggtgtggtagtgcgtgcctgtaatcctagctacttaggaggctgaggcaggagaatcgcttgaacctgggtggcggaggttgcaatgagccgagatcgcgccactgcactccagcctgggtgcaatgaaactgggagtgaaactccgtctcaaaaaaataaaatgctgtatgaacaagatgagcattctgtcaggtgtcgggacacctgggcaaagacgaattcatgctgtctgtgaaaaggaagtttgcactgtaacatatgccatagcttggcccttgctttgtatgcaaccttagctgatggggaaaattccaaacataagtggcacaggaaagaggcaggcagaggaggcaggggtctgtgctgtgcaagtcactggttttttatgactatcattttcattgaatgcatttgttgaattgggacaaaaggaacattttctaaatcagcttgatactctttataaaaaacagctgaatcttatcttctgcctcacattaattcatgtggcatgccaaaagttagactgaacttttctacatcttcaccttgcattgatacaggaaagtcttctctttaagtcttgctaagtataagggggatagtggtcacgggaagaggagaaccggggctgctctcggatggtaattgacaatgccgatttccatttctttgtcttacggctacttccgagccttctagcaaggtccctggttgcatgtatttcctaagagcagagtttatttctctttacattccctgcttccttgctctccatgcagggaccccagccaacctctgggctgttgaatagctctctgctgggtggcaagcccttctccttggcaccctgttgcttaagcatacagattgctcaccaggtgcacacagacagctgtactgtccaagcccattctgctccaccctgtcctcttcagctaaagagcattccagtaatctaaagcccttttcccctggagaagtccagagtttgcagcagtgtggagctgagcttgaacagaacagaccctcagcacggccctggactaatgcactcttatctgagggcagtccattctagaaggttgatgaatttccctaccactctcctggggaccttttctctctagtgggaacaaatgctacataatttagtcaagatcctattaagtcatctcacctgaggcatctggagagggagttgccttccattggtgggaaattgttggtgccagaatacattttgcccaaaactcttctcattggctggccacctagcagggctcctctaaacacgcaactcagcgaggggacccccttcacctctggcaagagagctgggtagatcagaaacttggtgacacctggctagcacagagcaggctcacttgtcttggtcccactacccagattcctgcagacattgcaaaccaaatgaaggttgttgaatgacccctgtccccagccacttgttttgttatcatctgctctgcagtggaatgcctgtgtgtttgagttcactctgcatctgtatatttgagtatagaaaccgagtcaagtgatcatgtgcatccagacacactgtgtcacctgagccacagagcaaatcaccttaacgatctggaatgaaactgtgaccagtgccgccctgggtggttctggagagactgccgtcttcttgtttggccataggtgctggggccccggcttcagtcactgtctcagacaggagtcccgataagcagatcaccagtcctccactgtccttcctgtcggccttgctgcatgagaagatagctgcttcctccctcttttcctacactgtaattattgttttacaattgagtgccttaataatagtttacaaatactatgtatttatgcaaaactgttaaagtctcatctgttatgattggatacttggtcttgtcagtagtggtcagcattgggttgtgagcttgtcctactccatacgtgtttatcctgctatgcagttttacattgtgtgttcacatctattccaaggagccttgctagaaacaacactggcggttcctgcaggccaggcaggcattggcccatgctgtgtcccataggagccaatgaaagaacgtagcttggtctgctagccagccgtggggtggcgcaggccaggcagcctctgcaccagagtccagcacctgcccattccccagtcacacaatcatactcttctttcatagagattttattaccacctagaccaccctagttttcctctctgttagtgtcctgagctcttttgcaacaaaatgtaggtacagaccaatccctgtcccttccccaatcaggagctccacaccatgagttgtttggttttccagaagctgccagtgggttcccgtgaattgcgttaagatatcgatgattttttttattgtttttcttcttgtttttttaaataatatatttaaaggcagtatcttttgtactgtgaatttgcagtagaagatgcagaatgcactttttttttacttctgttggtgtgtattgtatatagtgtgtgtgcttcttgtgatgaaaataaactttttctttat

SEQ ID NO: 449119 - DNA, 6355 bp, Homo sapiens
gtgatatccaccttgtagggtccctcctccggggggatgtagcgcacagactgggcttccgctccaccgcctgggtccagatggcagacaccagtggccctggggctggagctgccctagagccaccagccagccttttggaaccttccagagagaccccaaaagtcctgccaaagtccctccttttgaagaattctcactgtgataagaaccctcccagcacagaagtggtaataaaggaagaatcgtcacccaagaaagatatgaagccagccaaggacctgaggcttctgttcagtaatgaatctgagaagccgacaaccaacagctacctgatgcagcaccaggagtccatcattcagctgcagaaggcaggcttggtccgcaagcacaccaaagagctagagcggctgaagagcgtgcctgcagacccagcacctccctccagggatggccctgccagcaggctggaggccagcatccccgaggagagccaggatccagccgcgctccacgagctgggccccctggttatgcccagccaggccgggagtgatgagaagtcagaggccgcccccgcttcattggaaggaggctcactgaagagcccccctcctttcttctaccgcctggaccacaccagtagtttctcaaaagactttctgaagaccatctgctacacccccacctcctcttccatgagctccaacctgacccggagctccagcagcgatagcatccacagtgtccgtgggaagcccgggctggtgaagcagcggacacaggagattgagacccggctccggctggcgggcctcaccgtctcttccccactgaagcgctcacactctcttgccaagctggggagtctcaccttctcaacggaagacctgtccagtgaggctgacccgtccaccgtcgctgactcccaggacaccactttgagtgaatcttccttcttgcatgagccccagggaaccccgagggacccagctgcaacctccaaaccatcagggaaacccgccccagaaaacttaaagagcccttcgtggatgagcaaaagctgacccgccttttgctgcgtcaggctgggcggatattttcatatgatccctccctcactttcactgtggatttggatcgaccccttacatcttgatttcccttaaacgagtgaagtcatcctaacttttcccctactcttgccatagagaggaggagaagaaactaaccaacatgcagcacaagaaggggagctgtcagtcgtgtggcctgggagaaccaggagccgccggccaggagacacaaaactccgctcccaccgtgtcttcaagaagaaccatgttttaggaagaacgtgcacacataggcgcacacatccagactgttcccttcgcatcctgcagaagagtcctggtggtggcagcctcaccgcggcacacgttctagctcattcttggcctcgcagaaaactctcggatggcaacattaagtcctacctctgttctcgctgcgctttttatttttaaaacacacgaatgaccaaggcttgttccagggaataatgctctgtctgaaagcgtttttccaaaaaaagaatttttcgttttgtgttttggttgggaccccagacgtgtcaagacttttaacccgacagccccaagcactgctgagtaaagtcatcagatgagtagtcccacgctgttgttgagctgactctgtgcccgaatggtggtgcaggcgccctgtcctggttgtgttgttacgtgtttgaccagcacaggggtccggtggggaaaatgtatgggttgttctcagttgttgctaatgctgaagtttaaatctcaaggggaagggcccacctgcattgttgagtgtctgctgctgaaacacatgattgtgtttaggtttgaaattgctcaagtgtctggctcaggtggtggttctgagacacatcgtcctgctgagagcccagatgcttaggtccactagggcccatctagggaagggaaaggagatttcagcggcttccccgaaaggaacgggactgtcgggatgcttcccggatgtctacagttgccccttcctgcagtgagattactgcttcctgtttccctccagctcttcccagcagcagtgagggagtataagagggatctgtagtcgctgcctggctctgtgggcggcccctttaagactcaggtgagctcagccagtcccgctgcgccaggcttgaatcaaaggtgtcagcaagctagatgtcaaaacatttcgagagagaggcagcttgcagaaaagcagaaaggttgaattcaggggtcagcaaactatggcatgtggccccgtgagctaggaatggtttttcctctttaagacagggcctggctctgtcacctaggctggagtacagtagtgcaatcatgactcactgcagcatcaacctccctggctcaagcgatggcttttacctttttaaggagttgtaaaaaaaagaaataatatgtgacagaattcatgtggcccacaaagcctgaggtacttactgtcaggccctttgtagaaaaagttgctgacccctggtttgatttgccacacagggctgctcatggccctgtaggaagaaactgggtaaatgtgaagccctctgcctctctgacacctaaggccagacccttccctcctcccgaccacaagctttgccagccccgcactagcctcacctgtgcaggatggagtaggttgcgtacatgggggaaggcaggtgaacacagttggctgaagctcttccacaattccatcttgccctcagctgggtccgccagattaactcagtgaaaccagaaagccttcaaggaccagctgaattctgaaagtgagtgagtgagccatcatcttaacattggccagaactgtgttccccaaagctattctagaaagcaccccaggagggatctgcaggaacaaggctagttcatattttacctagtgagcacagtttttgcaaaaatcctccctccaggactttgtctccttggagtgatttttaaaaatacatacattactttatagggagctgttttcccactagtgtcaattaaaatcaccttaaaaggtgattatccacttattcctaaacccctgtgggttgttccccctttccctcagccaacaaaagcatagcctcaaaaaatatcaagttcggtatgttttgccaaatcaaatttcatgtggtagatcaatttttgtgtcaaaataatcttttaaatttagtgatgacaggcttttgttggttttttaaccacgtctatgtatgagaatgatatatttttgaaaactttaattttgaaagccataatttttcttatctaaagagttggggggtggggtgtggaatctggagagtacaagttggtctttggcttctggcaaacttacccattcatttttggaagcacagctagcatatcaacatccagacgagagcgctggtcccgtccacagagcagagtgaagcattctggacttgatgcttaatagcctggcctggagaaaagggtaaggtttatttttggaaacccagatcagttgcatgtaaacagatggcacatggctatttaaaatgctgtatgatggggccgggcgcggtggctcacgcctgtaatcctagcactttgggaggccgaggcaggcggatcatctgaggtcaggagttctagaccagcctggccaacatggtgaaaccccgtctctactaaaaatacaaaaacttagctgggtgtggtagtgcgtgcctgtaatcctagctacttaggaggctgaggcaggagaatcgcttgaacctgggtggcggaggttgcaatgagccgagatcgcgccactgcactccagcctgggtgcaatgaaactgggagtgaaactccgtctcaaaaaaataaaatgctgtatgaacaagatgagcattctgtcaggtgtcgggacacctgggcaaagacgaattcatgctgtctgtgaaaaggaagtttgcactgtaacatatgccatagcttggcccttgctttgtatgcaaccttagctgatggggaaaattccaaacataagtggcacaggaaagaggcaggcagaggaggcaggggtctgtgctgtgcaagtcactggttttttatgactatcattttcattgaatgcatttgttgaattgggacaaaaggaacattttctaaatcagcttgatactctttataaaaaacagctgaatcttatcttctgcctcacattaattcatgtggcatgccaaaagttagactgaacttttctacatcttcaccttgcattgatacaggaaagtcttctctttaagtcttgctaagtataagggggatagtggtcacgggaagaggagaaccggggctgctctcggatggtaattgacaatgccgatttccatttctttgtcttacggctacttccgagccttctagcaaggtccctggttgcatgtatttcctaagagcagagtttatttctctttacattccctgcttccttgctctccatgcagggaccccagccaacctctgggctgttgaatagctctctgctgggtggcaagcccttctccttggcaccctgttgcttaagcatacagattgctcaccaggtgcacacagacagctgtactgtccaagcccattctgctccaccctgtcctcttcagctaaagagcattccagtaatctaaagcccttttcccctggagaagtccagagtttgcagcagtgtggagctgagcttgaacagaacagaccctcagcacggccctggactaatgcactcttatctgagggcagtccattctagaaggttgatgaatttccctaccactctcctggggaccttttctctctagtgggaacaaatgctacataatttagtcaagatcctattaagtcatctcacctgaggcatctggagagggagttgccttccattggtgggaaattgttggtgccagaatacattttgcccaaaactcttctcattggctggccacctagcagggctcctctaaacacgcaactcagcgaggggacccccttcacctctggcaagagagctgggtagatcagaaacttggtgacacctggctagcacagagcaggctcacttgtcttggtcccactacccagattcctgcagacattgcaaaccaaatgaaggttgttgaatgacccctgtccccagccacttgttttgttatcatctgctctgcagtggaatgcctgtgtgtttgagttcactctgcatctgtatatttgagtatagaaaccgagtcaagtgatcatgtgcatccagacacactgtgtcacctgagccacagagcaaatcaccttaacgatctggaatgaaactgtgaccagtgccgccctgggtggttctggagagactgccgtcttcttgtttggccataggtgctggggccccggcttcagtcactgtctcagacaggagtcccgataagcagatcaccagtcctccactgtccttcctgtcggccttgctgcatgagaagatagctgcttcctccctcttttcctacactgtaattattgttttacaattgagtgccttaataatagtttacaaatactatgtatttatgcaaaactgttaaagtctcatctgttatgattggatacttggtcttgtcagtagtggtcagcattgggttgtgagcttgtcctactccatacgtgtttatcctgctatgcagttttacattgtgtgttcacatctattccaaggagccttgctagaaacaacactggcggttcctgcaggccaggcaggcattggcccatgctgtgtcccataggagccaatgaaagaacgtagcttggtctgctagccagccgtggggtggcgcaggccaggcagcctctgcaccagagtccagcacctgcccattccccagtcacacaatcatactcttctttcatagagattttattaccacctagaccaccctagttttcctctctgttagtgtcctgagctcttttgcaacaaaatgtaggtacagaccaatccctgtcccttccccaatcaggagctccacaccatgagttgtttggttttccagaagctgccagtgggttcccgtgaattgcgttaagatatcgatgattttttttattgtttttcttcttgtttttttaaataatatatttaaaggcagtatcttttgtactgtgaatttgcagtagaagatgcagaatgcactttttttttacttctgttggtgtgtattgtatatagtgtgtgtgcttcttgtgatgaaaataaactttttctttat

SEQ ID NO: 449120 - DNA, 7545 bp, Homo sapiens
aatgaattagagaaacagatgaattgtaacttgaaggaactcaaggaatttatagacaatgagatgctacttatcttgggacagatggacaagccctcccttatcttcgatcatctttatctcggttgattacattttaaatgttaccagagaaatcgataatttttttcctggcttatttgcatatcataacatccgagtctacgatgaagagaccacagacctcctcgcccactggaatgaagcgtatcattttataaacaaagcgaagaggaaccattccaagtgcctggtgcattgcaaaatgggcgtgagtcgctcggcctccacagtcatagcctatgcaatgaaggaattcggctggcctctggaaaaagcatataactatgtaaagcagaagcgcagcatcacgcgccccaacgcgggctttatgaggcagctgtctgagtatgaaggcatcttggatgcaagcaaacagcggcacaacaagctgtggcgtcagcagacagacagcagcctccagcagcctgtggatgaccctgcaggacctggcgacttcttgccagagaccccagatggcaccccggaaagccagctgcccttcttggatgatgccgcccagcccggcttagggccccccctcccctgctgtttccggcgactctcagacccccttctgccttcccctgaggatgaaactggcagcttggtccacctggaggatccggagagggaggctctgttggaggaagctgctccacctgcagaggtgcacaggccggccagacagccccagcaaggttccggactctgtgagaaggatgtgaagaagaaactagagtttgggagtcccaaaggtcggagcggctccttgctgcaggtggaggagacggaaagggaggagggcctgggagcagggaggtgggggcagcttccaacccagctcgatcaaaacctgctcaactcggagaacctaaacaacaacagcaagaggagctgtcccaacggcatggaggatgatgctatatttgggatccttaacaaagtgaagccttcctataaatcctgtgccgactgcatgtaccctacagccagcggggctcctgaggcctccagggagcgatgtgaggaccccaatgctcccgccatctgcacccagccagccttcctaccccacatcacgtcctcccctgtggcccacttggccagcaggtcccgtgttccggagaagccagcctctggcccaaccgaacctcccccgttcctaccaccagcaggctccaggagggcagacaccagtggccctggggctggagctgccctagagccaccagccagccttttggaaccttccagagagaccccaaaagtcctgccaaagtccctccttttgaagaattctcactgtgataagaaccctcccagcacagaagtggtaataaaggaagaatcgtcacccaagaaagatatgaagccagccaaggacctgaggcttctgttcagtaatgaatctgagaagccgacaaccaacagctacctgatgcagcaccaggagtccatcattcagctgcagaaggcaggcttggtccgcaagcacaccaaagagctagagcggctgaagagcgtgcctgcagacccagcacctccctccagggatggccctgccagcaggctggaggccagcatccccgaggagagccaggatccagccgcgctccacgagctgggccccctggttatgcccagccaggccgggagtgatgagaagtcagaggccgcccccgcttcattggaaggaggctcactgaagagcccccctcctttcttctaccgcctggaccacaccagtagtttctcaaaagactttctgaagaccatctgctacacccccacctcctcttccatgagctccaacctgacccggagctccagcagcgatagcatccacagtgtccgtgggaagcccgggctggtgaagcagcggacacaggagattgagacccggctccggctggcgggcctcaccgtctcttccccactgaagcgctcacactctcttgccaagctggggagtctcaccttctcaacggaagacctgtccagtgaggctgacccgtccaccgtcgctgactcccaggacaccactttgagtgaatcttccttcttgcatgagccccagggaaccccgagggacccagctgcaacctccaaaccatcagggaaacccgccccagaaaacttaaagagcccttcgtggatgagcaaaagctgacccgccttttgctgcgtcaggctgggcggatattttcatatgatccctccctcactttcactgtggatttggatcgaccccttacatcttgatttcccttaaacgagtgaagtcatcctaacttttcccctactcttgccatagagaggaggagaagaaactaaccaacatgcagcacaagaaggggagctgtcagtcgtgtggcctgggagaaccaggagccgccggccaggagacacaaaactccgctcccaccgtgtcttcaagaagaaccatgttttaggaagaacgtgcacacataggcgcacacatccagactgttcccttcgcatcctgcagaagagtcctggtggtggcagcctcaccgcggcacacgttctagctcattcttggcctcgcagaaaactctcggatggcaacattaagtcctacctctgttctcgctgcgctttttatttttaaaacacacgaatgaccaaggcttgttccagggaataatgctctgtctgaaagcgtttttccaaaaaaagaatttttcgttttgtgttttggttgggaccccagacgtgtcaagacttttaacccgacagccccaagcactgctgagtaaagtcatcagatgagtagtcccacgctgttgttgagctgactctgtgcccgaatggtggtgcaggcgccctgtcctggttgtgttgttacgtgtttgaccagcacaggggtccggtggggaaaatgtatgggttgttctcagttgttgctaatgctgaagtttaaatctcaaggggaagggcccacctgcattgttgagtgtctgctgctgaaacacatgattgtgtttaggtttgaaattgctcaagtgtctggctcaggtggtggttctgagacacatcgtcctgctgagagcccagatgcttaggtccactagggcccatctagggaagggaaaggagatttcagcggcttccccgaaaggaacgggactgtcgggatgcttcccggatgtctacagttgccccttcctgcagtgagattactgcttcctgtttccctccagctcttcccagcagcagtgagggagtataagagggatctgtagtcgctgcctggctctgtgggcggcccctttaagactcaggtgagctcagccagtcccgctgcgccaggcttgaatcaaaggtgtcagcaagctagatgtcaaaacatttcgagagagaggcagcttgcagaaaagcagaaaggttgaattcaggggtcagcaaactatggcatgtggccccgtgagctaggaatggtttttcctctttaagacagggcctggctctgtcacctaggctggagtacagtagtgcaatcatgactcactgcagcatcaacctccctggctcaagcgatggcttttacctttttaaggagttgtaaaaaaaagaaataatatgtgacagaattcatgtggcccacaaagcctgaggtacttactgtcaggccctttgtagaaaaagttgctgacccctggtttgatttgccacacagggctgctcatggccctgtaggaagaaactgggtaaatgtgaagccctctgcctctctgacacctaaggccagacccttccctcctcccgaccacaagctttgccagccccgcactagcctcacctgtgcaggatggagtaggttgcgtacatgggggaaggcaggtgaacacagttggctgaagctcttccacaattccatcttgccctcagctgggtccgccagattaactcagtgaaaccagaaagccttcaaggaccagctgaattctgaaagtgagtgagtgagccatcatcttaacattggccagaactgtgttccccaaagctattctagaaagcaccccaggagggatctgcaggaacaaggctagttcatattttacctagtgagcacagtttttgcaaaaatcctccctccaggactttgtctccttggagtgatttttaaaaatacatacattactttatagggagctgttttcccactagtgtcaattaaaatcaccttaaaaggtgattatccacttattcctaaacccctgtgggttgttccccctttccctcagccaacaaaagcatagcctcaaaaaatatcaagttcggtatgttttgccaaatcaaatttcatgtggtagatcaatttttgtgtcaaaataatcttttaaatttagtgatgacaggcttttgttggttttttaaccacgtctatgtatgagaatgatatatttttgaaaactttaattttgaaagccataatttttcttatctaaagagttggggggtggggtgtggaatctggagagtacaagttggtctttggcttctggcaaacttacccattcatttttggaagcacagctagcatatcaacatccagacgagagcgctggtcccgtccacagagcagagtgaagcattctggacttgatgcttaatagcctggcctggagaaaagggtaaggtttatttttggaaacccagatcagttgcatgtaaacagatggcacatggctatttaaaatgctgtatgatggggccgggcgcggtggctcacgcctgtaatcctagcactttgggaggccgaggcaggcggatcatctgaggtcaggagttctagaccagcctggccaacatggtgaaaccccgtctctactaaaaatacaaaaacttagctgggtgtggtagtgcgtgcctgtaatcctagctacttaggaggctgaggcaggagaatcgcttgaacctgggtggcggaggttgcaatgagccgagatcgcgccactgcactccagcctgggtgcaatgaaactgggagtgaaactccgtctcaaaaaaataaaatgctgtatgaacaagatgagcattctgtcaggtgtcgggacacctgggcaaagacgaattcatgctgtctgtgaaaaggaagtttgcactgtaacatatgccatagcttggcccttgctttgtatgcaaccttagctgatggggaaaattccaaacataagtggcacaggaaagaggcaggcagaggaggcaggggtctgtgctgtgcaagtcactggttttttatgactatcattttcattgaatgcatttgttgaattgggacaaaaggaacattttctaaatcagcttgatactctttataaaaaacagctgaatcttatcttctgcctcacattaattcatgtggcatgccaaaagttagactgaacttttctacatcttcaccttgcattgatacaggaaagtcttctctttaagtcttgctaagtataagggggatagtggtcacgggaagaggagaaccggggctgctctcggatggtaattgacaatgccgatttccatttctttgtcttacggctacttccgagccttctagcaaggtccctggttgcatgtatttcctaagagcagagtttatttctctttacattccctgcttccttgctctccatgcagggaccccagccaacctctgggctgttgaatagctctctgctgggtggcaagcccttctccttggcaccctgttgcttaagcatacagattgctcaccaggtgcacacagacagctgtactgtccaagcccattctgctccaccctgtcctcttcagctaaagagcattccagtaatctaaagcccttttcccctggagaagtccagagtttgcagcagtgtggagctgagcttgaacagaacagaccctcagcacggccctggactaatgcactcttatctgagggcagtccattctagaaggttgatgaatttccctaccactctcctggggaccttttctctctagtgggaacaaatgctacataatttagtcaagatcctattaagtcatctcacctgaggcatctggagagggagttgccttccattggtgggaaattgttggtgccagaatacattttgcccaaaactcttctcattggctggccacctagcagggctcctctaaacacgcaactcagcgaggggacccccttcacctctggcaagagagctgggtagatcagaaacttggtgacacctggctagcacagagcaggctcacttgtcttggtcccactacccagattcctgcagacattgcaaaccaaatgaaggttgttgaatgacccctgtccccagccacttgttttgttatcatctgctctgcagtggaatgcctgtgtgtttgagttcactctgcatctgtatatttgagtatagaaaccgagtcaagtgatcatgtgcatccagacacactgtgtcacctgagccacagagcaaatcaccttaacgatctggaatgaaactgtgaccagtgccgccctgggtggttctggagagactgccgtcttcttgtttggccataggtgctggggccccggcttcagtcactgtctcagacaggagtcccgataagcagatcaccagtcctccactgtccttcctgtcggccttgctgcatgagaagatagctgcttcctccctcttttcctacactgtaattattgttttacaattgagtgccttaataatagtttacaaatactatgtatttatgcaaaactgttaaagtctcatctgttatgattggatacttggtcttgtcagtagtggtcagcattgggttgtgagcttgtcctactccatacgtgtttatcctgctatgcagttttacattgtgtgttcacatctattccaaggagccttgctagaaacaacactggcggttcctgcaggccaggcaggcattggcccatgctgtgtcccataggagccaatgaaagaacgtagcttggtctgctagccagccgtggggtggcgcaggccaggcagcctctgcaccagagtccagcacctgcccattccccagtcacacaatcatactcttctttcatagagattttattaccacctagaccaccctagttttcctctctgttagtgtcctgagctcttttgcaacaaaatgtaggtacagaccaatccctgtcccttccccaatcaggagctccacaccatgagttgtttggttttccagaagctgccagtgggttcccgtgaattgcgttaagatatcgatgattttttttattgtttttcttcttgtttttttaaataatatatttaaaggcagtatcttttgtactgtgaatttgcagtagaagatgcagaatgcactttttttttacttctgttggttgtgtgtgcttcttgtgatgaaaataaactttttctttat

SEQ ID NO: 449121 - DNA, 2570 bp, Homo sapiens
gcgatcacccggttgtgtatttcatttaccgggccggggttttcgtttaaatcatcgtggtgccgtggttgcaatgagccgagatcgcgccactgcactccagcctgggtgcaatgaaactgggagtgaaactccgtctcaaaaaaataaaatgctgtatgaacaagatgagcattctgtcaggtgtcgggacacctgggcaaagacgaattcatgctgtctgtgaaaaggaagtttgcactgtaacatatgccatagcttggcccttgctttgtatgcaaccttagctgatggggaaaattccaaacataagtggcacaggaaagaggcaggcagaggaggcaggggtctgtgctgtgcaagtcactggttttttatgactatcattttcattgaatgcatttgttgaattgggacaaaaggaacattttctaaatcagcttgatactctttataaaaaacagctgaatcttatcttctgcctcacattaattcatgtggcatgccaaaagttagactgaacttttctacatcttcaccttgcattgatacaggaaagtcttctctttaagtcttgctaagtataagggggatagtggtcacgggaagaggagaaccggggctgctctcggatggtaattgacaatgccgatttccatttctttgtcttacggctacttccgagccttctagcaaggtccctggttgcatgtatttcctaagagcagagtttatttctctttacattccctgcttccttgctctccatgcagggaccccagccaacctctgggctgttgaatagctctctgctgggtggcaagcccttctccttggcaccctgttgcttaagcatacagattgctcaccaggtgcacacagacagctgtactgtccaagcccattctgctccaccctgtcctcttcagctaaagagcattccagtaatctaaagcccttttcccctggagaagtccagagtttgcagcagtgtggagctgagcttgaacagaacagaccctcagcacggccctggactaatgcactcttatctgagggcagtccattctagaaggttgatgaatttccctaccactctcctggggaccttttctctctagtgggaacaaatgctacataatttagtcaagatcctattaagtcatctcacctgaggcatctggagagggagttgccttccattggtgggaaattgttggtgccagaatacattttgcccaaaactcttctcattggctggccacctagcagggctcctctaaacacgcaactcagcgaggggacccccttcacctctggcaagagagctgggtagatcagaaacttggtgacacctggctagcacagagcaggctcacttgtcttggtcccactacccagattcctgcagacattgcaaaccaaatgaaggttgttgaatgacccctgtccccagccacttgttttgttatcatctgctctgcagtggaatgcctgtgtgtttgagttcactctgcatctgtatatttgagtatagaaaccgagtcaagtgatcatgtgcatccagacacactgtgtcacctgagccacagagcaaatcaccttaacgatctggaatgaaactgtgaccagtgccgccctgggtggttctggagagactgccgtcttcttgtttggccataggtgctggggccccggcttcagtcactgtctcagacaggagtcccgataagcagatcaccagtcctccactgtccttcctgtcggccttgctgcatgagaagatagctgcttcctccctcttttcctacactgtaattattgttttacaattgagtgccttaataatagtttacaaatactatgtatttatgcaaaactgttaaagtctcatctgttatgattggatacttggtcttgtcagtagtggtcagcattgggttgtgagcttgtcctactccatacgtgtttatcctgctatgcagttttacattgtgtgttcacatctattccaaggagccttgctagaaacaacactggcggttcctgcaggccaggcaggcattggcccatgctgtgtcccataggagccaatgaaagaacgtagcttggtctgctagccagccgtggggtggcgcaggccaggcagcctctgcaccagagtccagcacctgcccattccccagtcacacaatcatactcttctttcatagagattttattaccacctagaccaccctagttttcctctctgttagtgtcctgagctcttttgcaacaaaatgtaggtacagaccaatccctgtcccttccccaatcaggagctccacaccatgagttgtttggttttccagaagctgccagtgggttcccgtgaattgcgttaagatatcgatgattttttttattgtttttcttcttgtttttttaaataatatatttaaaggcagtatcttttgtactgtgaatttgcagtagaagatgcagaatgcactttttttttacttctgttggtgtgtattgtatatagtgtgtgtgcttcttgtgatgaaaataaactttttctttat

SEQ ID NO: 449122 - DNA, 5309 bp, Homo sapiens
aatgaattagagaaacagatgaattgtaacttgaaggaactcaaggaatttatagacaatgagatgctacttatcttgggacagatggacaagccctcccttatcttcgatcatctttatctcggttgattacattttaaatgttaccagagaaatcgataatttttttcctggcttatttgcatatcataacatccgagtctacgatgaagagaccacagacctcctcgcccactggaatgaagcgtatcattttataaacaaagcgaagaggaaccattccaagtgcctggtgcattgcaaaatgggcgtgagtcgctcggcctccacagtcatagcctatgcaatgaaggaattcggctggcctctggaaaaagcatataactatgtaaagcagaagcgcagcatcacgcgccccaacgcgggctttatgaggcagctgtctgagtatgaaggcatcttggatgcaagcaaacagcggcacaacaagctgtggcgtcagcagacagacagcagcctccagcagcctgtggatgaccctgcaggacctggcgacttcttgccagagaccccagatggcaccccggaaagccagctgcccttcttggatgatgccgcccagcccggcttagggccccccctcccctgctgtttccggcgactctcagacccccttctgccttcccctgaggatgaaactggcagcttggtccacctggaggatccggagagggaggctctgttggaggaagctgctccacctgcagaggtgcacaggccggccagacagccccagcaaggttccggactctgtgagaaggatgtgaagaagaaactagagtttgggagtcccaaaggtcggagcggctccttgctgcaggtggaggagacggaaagggaggagggcctgggagcagggaggtgggggcagcttccaacccagctcgatcaaaacctgctcaactcggagaacctaaacaacaacagcaagaggagctgtcccaacggcatggaggatgatgctatatttgggatccttaacaaagtgaagccttcctataaatcctgtgccgactgcatgtaccctacagccagcggggctcctgaggcctccagggagcgatgtgaggaccccaatgctcccgccatctgcacccagccagccttcctaccccacatcacgtcctcccctgtggcccacttggccagcaggtcccgtgttccggagaagccagcctctggcccaaccgaacctcccccgttcctaccaccagcaggctccaggagggcagacaccagtggccctggggctggagctgccctagagccaccagccagccttttggaaccttccagagagaccccaaaagtcctgccaaagtccctccttttgaagaattctcactgtgataagaaccctcccagcacagaagtggtaataaaggaagaatcgtcacccaagaaagatatgaagccagccaaggacctgaggcttctgttcagtaatgaatctgagaagccgacaaccaacagctacctgatgcagcaccaggagtccatcattcagctgcagaaggcaggcttggtccgcaagcacaccaaagagctagagcggctgaagagcgtgcctgcagacccagcacctccctccagggatggccctgccagcaggctggaggccagcatccccgaggagagccaggatccagccgcgctccacgagctgggccccctggttatgcccagccaggccgggagtgatgagaagtcagaggccgcccccgcttcattggaaggaggctcactgaagagcccccctcctttcttctaccgcctggaccacaccagtagtttctcaaaagactttctgaagaccatctgctacacccccacctcctcttccatgagctccaacctgacccggagctccagcagcgatagcatccacagtgtccgtgggaagcccgggctggtgaagcagcggacacaggagattgagacccggctccggctggcgggcctcaccgtctcttccccactgaagcgctcacactctcttgccaagctggggagtctcaccttctcaacggaagacctgtccagtgaggctgacccgtccaccgtcgctgactcccaggacaccactttgagtgaatcttccttcttgcatgagccccagggaaccccgagggacccagctgcaacctccaaaccatcagggaaacccgccccagaaaacttaaagagcccttcgtggatgagcaaaagctgacccgccttttgctgcgtcaggctgggcggatattttcatatgatccctccctcactttcactgtggatttggatcgaccccttacatcttgatttcccttaaacgagtgaagtcatcctaacttttcccctactcttgccatagagaggaggagaagaaactaaccaacatgcagcacaagaaggggagctgtcagtcgtgtggcctgggagaaccaggagccgccggccaggagacacaaaactccgctcccaccgtgtcttcaagaagaaccatgttttaggaagaacgtgcacacataggcgcacacatccagactgttcccttcgcatcctgcagaagagtcctggtggtggcagcctcaccgcggcacacgttctagctcattcttggcctcgcagaaaactctcggatggcaacattaagtcctacctctgttctcgctgcgctttttatttttaaaacacacgaatgaccaaggcttgttccagggaataatgctctgtctgaaagcgtttttccaaaaaaagaatttttcgttttgtgttttggttgggaccccagacgtgtcaagacttttaacccgacagccccaagcactgctgagtaaagtcatcagatgagtagtcccacgctgttgttgagctgactctgtgcccgaatggtggtgcaggcgccctgtcctggttgtgttgttacgtgtttgaccagcacaggggtccggtggggaaaatgtatgggttgttctcagttgttgctaatgctgaagtttaaatctcaaggggaagggcccacctgcattgttgagtgtctgctgctgaaacacatgattgtgtttaggtttgaaattgctcaagtgtctggctcaggtggtggttctgagacacatcgtcctgctgagagcccagatgcttaggtccactagggcccatctagggaagggaaaggagatttcagcggcttccccgaaaggaacgggactgtcgggatgcttcccggatgtctacagttgccccttcctgcagtgagattactgcttcctgtttccctccagctcttcccagcagcagtgagggagtataagagggatctgtagtcgctgcctggctctgtgggcggcccctttaagactcaggtgagctcagccagtcccgctgcgccaggcttgaatcaaaggtgtcagcaagctagatgtcaaaacatttcgagagagaggcagcttgcagaaaagcagaaaggttgaattcaggggtcagcaaactatggcatgtggccccgtgagctaggaatggtttttcctctttaagacagggcctggctctgtcacctaggctggagtacagtagtgcaatcatgactcactgcagcatcaacctccctggctcaagcgatggcttttacctttttaaggagttgtaaaaaaaagaaataatatgtgacagaattcatgtggcccacaaagcctgaggtacttactgtcaggccctttgtagaaaaagttgctgacccctggtttgatttgccacacagggctgctcatggccctgtaggaagaaactgggtaaatgtgaagccctctgcctctctgacacctaaggccagacccttccctcctcccgaccacaagctttgccagccccgcactagcctcacctgtgcaggatggagtaggttgcgtacatgggggaaggcaggtgaacacagttggctgaagctcttccacaattccatcttgccctcagctgggtccgccagattaactcagtgaaaccagaaagccttcaaggaccagctgaattctgaaagtgagtgagtgagccatcatcttaacattggccagaactgtgttccccaaagctattctagaaagcaccccaggagggatctgcaggaacaaggctagttcatattttacctagtgagcacagtttttgcaaaaatcctccctccaggactttgtctccttggagtgatttttaaaaatacatacattactttatagggagctgttttcccactagtgtcaattaaaatcaccttaaaaggtgattatccacttattcctaaacccctgtgggttgttccccctttccctcagccaacaaaagcatagcctcaaaaaatatcaagttcggtatgttttgccaaatcaaatttcatgtggtagatcaatttttgtgtcaaaataatcttttaaatttagtgatgacaggcttttgttggttttttaaccacgtctatgtatgagaatgatatatttttgaaaactttaattttgaaagccataatttttcttatctaaagagttggggggtggggtgtggaatctggagagtacaagttggtctttggcttctggcaaacttacccattccccagtcacacaatcatactcttctttcatagagattttattaccacctagaccaccctagttttcctctctgttagtgtcctgagctcttttgcaacaaaatgtaggtacagaccaatccctgtcccttccccaatcaggagctccacaccatgagttgtttggttttccagaagctgccagtgggttcccgtgaattgcgttaagatatcgatgattttttttattgtttttcttcttgtttttttaaataatatatttaaaggcagtatcttttgtactgtgaatttgcagtagaagatgcagaatgcactttttttttacttctgttggtgtgtattgtatatagtgtgtgtgcttcttgtgatgaaaataaactttttctttataaattcctgatgactgagtttatataaaaggaaactgcttcctcagcccttgccaaaacagtctgatacatcgtcatcatcatcgtcattgacatggccagtctttattgagcatctattacatgctcagttctttgctagaaaacctggacaagttacaccaaagaaaggaccacaggaagaaatgatagttcctcctggaactagtctgttttctttctaattttgtcagtaagcaagaacaggcccacctgtgggtggtcctttgtgtacc

SEQ ID NO: 449123 - DNA, 1320 bp, Homo sapiens
aatgaattagagaaacagatgaattgtaacttgaaggaactcaaggaatttatagacaatgagatgctacttatcttgggacagatggacaagccctcccttatcttcgatcatctttatctcggttgattacattttaaatgttaccagagaaatcgataatttttttcctggcttatttgcatatcataacatccgagtctacgatgaagagaccacagacctcctcgcccactggaatgaagcgtatcattttataaacaaagcgaagaggaaccattccaagtgcctggtgcattgcaaaatgggcgtgagtcgctcggcctccacagtcatagcctatgcaatgaaggaattcggctggcctctggaaaaagcatataactatgtaaagcagaagcgcagcatcacgcgccccaacgcgggctttatgaggcagctgtctgagtatgaaggcatcttggatgcaagcaaacagcggcacaacaagctgtggcgtcagcagacagacagcagcctccagcagcctgtggatgaccctgcaggacctggcgacttcttgccagagaccccagatggcaccccggaaagccagctgcccttcttggatgatgccgcccagcccggcttagggccccccctcccctgctgtttccggcgactctcagacccccttctgccttcccctgaggatgaaactggcagcttggtccacctggaggatccggagagggaggctctgttggaggaagctgctccacctgcagaggtgcacaggccggccagacagccccagcaaggttccggactctgtgagaaggatgtgaagaagaaactagagtttgggagtcccaaaggtcggagcggctccttgctgcaggtggaggagacggaaagggaggagggcctgggagcagggaggtgggggcagcttccaacccagctcgatcaaaacctgctcaactcggagaacctaaacaacaacagcaagaggagctgtcccaacggcatggaggtaggcagagcccggcctgcagggtggcacaccccatcccttccatcccactctaattggcctacctcagcctctgtagtagggactacaggcacccgccaccacacccagctgatttttttctattgtctcctctgggcccccagctcccatctccagggacctgagggttctttcacagggtgattctgctggtgggtacgtagtgcataccttatatagcaaattgagaatctgttgggaataacacatatctctgcacaccatcttcaccccatgtaccttattcataccctgggcagggc

SEQ ID NO: 449124 - DNA, 7255 bp, Homo sapiens
aatgaattagagaaacagatgaattgtaacttgaaggaactcaaggaatttatagacaatgagatgctacttatcttgggacagatggacaagccctcccttatcttcgatcatctttatctcggttgattacattttaaatgttaccagagaaatcgataatttttttcctggcttatttgcatatcataacatccgagtctacgatgaagagaccacagacctcctcgcccactggaatgaagcgtatcattttataaacaaagcgaagaggaaccattccaagtgcctggtgcattgcaaaatgggcgtgagtcgctcggcctccacagtcatagcctatgcaatgaaggaattcggctggcctctggaaaaagcatataactatgtaaagcagaagcgcagcatcacgcgccccaacgcgggctttatgaggcagctgtctgagtatgaaggcatcttggatgcaagcaaacagcggcacaacaagctgtggcgtcagcagacagacagcagcctccagcagcctgtggatgaccctgcaggacctggcgacttcttgccagagaccccagatggcaccccggaaagccagctgcccttcttggatgatgccgcccagcccggcttagggccccccctcccctgctgtttccggcgactctcagacccccttctgccttcccctgaggatgaaactggcagcttggtccacctggaggatccggagagggaggctctgttggaggaagctgctccacctgcagaggtgcacaggccggccagacagccccagcaaggttccggactctgtgagaaggatgtgaagaagaaactagagtttgggagtcccaaaggtcggagcggctccttgctgcaggtggaggagacggaaagggaggagggcctgggagcagggaggtgggggcagcttccaacccagctcgatcaaaacctgctcaactcggagaacctaaacaacaacagcaagaggagctgtcccaacggcatggaggatgatgctatatttgggatccttaacaaagtgaagccttcctataaatcctgtgccgactgcatgtaccctacagccagcggggctcctgaggcctccagggagcgatgtgaggaccccaatgctcccgccatctgcacccagccagccttcctaccccacatcacgtcctcccctgtggcccacttggccagcaggtcccgtgttccggagaagccagcctctggcccaaccgaacctcccccgttcctaccaccagcaggctccaggagggcagacaccagtggccctggggctggagctgccctagagccaccagccagccttttggaaccttccagagagaccccaaaagtcctgccaaagtccctccttttgaagaattctcactgtgataagaaccctcccagcacagaagtggtaataaaggaagaatcgtcacccaagaaagatatgaagccagccaaggacctgaggcttctgttcagtaatgaatctgagaagccgacaaccaacagctacctgatgcagcaccaggagtccatcattcagctgcagaaggcaggcttggtccgcaagcacaccaaagagctagagcggctgaagagcgtgcctgcagacccagcacctccctccagggatggccctgccagcaggctggaggccagcatccccgaggagagccaggatccagccgcgctccacgagctgggccccctggttatgcccagccaggccgggagtgatgagaagtcagaggccgcccccgcttcattggaaggaggctcactgaagagcccccctcctttcttctaccgcctggaccacaccagtagtttctcaaaagactttctgaagaccatctgctacacccccacctcctcttccatgagctccaacctgacccggagctccagcagcgatagcatccacagtgtccgtgggaagcccgggctggtgaagcagcggacacaggagattgagacccggctccggctggcgggcctcaccgtctcttccccactgaagcgctcacactctcttgccaagctggggagtctcaccttctcaacggaagacctgtccagtgaggctgacccgtccaccgtcgctgactcccaggacaccactttgagtgaatcttccttcttgcatgagccccagggaaccccgagggacccagctgcaacctccaaaccatcagggaaacccgccccagaaaacttaaagagcccttcgtggatgagcaaaagctgacccgccttttgctgcgtcaggctgggcggatattttcatatgatccctccctcactttcactgtggatttggatcgaccccttacatcttgatttcccttaaacgagtgaagtcatcctaacttttcccctactcttgccatagagaggaggagaagaaactaaccaacatgcagcacaagaaggggagctgtcagtcgtgtggcctgggagaaccaggagccgccggccaggagacacaaaactccgctcccaccgtgtcttcaagaagaaccatgttttaggaagaacgtgcacacataggcgcacacatccagactgttcccttcgcatcctgcagaagagtcctggtggtggcagcctcaccgcggcacacgttctagctcattcttggcctcgcagaaaactctcggatggcaacattaagtcctacctctgttctcgctgcgctttttatttttaaaacacacgaatgaccaaggcttgttccagggaataatgctctgtctgaaagcgtttttccaaaaaaagaatttttcgttttgtgttttggttgggaccccagacgtgtcaagacttttaacccgacagccccaagcactgctgagtaaagtcatcagatgagtagtcccacgctgttgttgagctgactctgtgcccgaatggtggtgcaggcgccctgtcctggttgtgttgttacgtgtttgaccagcacaggggtccggtggggaaaatgtatgggttgttctcagttgttgctaatgctgaagtttaaatctcaaggggaagggcccacctgcattgttgagtgtctgctgctgaaacacatgattgtgtttaggtttgaaattgctcaagtgtctggctcaggtggtggttctgagacacatcgtcctgctgagagcccagatgcttaggtccactagggcccatctagggaagggaaaggagatttcagcggcttccccgaaaggaacgggactgtcgggatgcttcccggatgtctacagttgccccttcctgcagtgagattactgcttcctgtttccctccagctcttcccagcagcagtgagggagtataagagggatctgtagtcgctgcctggctctgtgggcggcccctttaagactcaggtgagctcagccagtcccgctgcgccaggcttgaatcaaaggtgtcagcaagctagatgtcaaaacatttcgagagagaggcagcttgcagaaaagcagaaaggttgaattcaggggtcagcaaactatggcatgtggccccgtgagctaggaatggtttttcctctttaagacagggcctggctctgtcacctaggctggagtacagtagtgcaatcatgactcactgcagcatcaacctccctggctcaagcgatggcttttacctttttaaggagttgtaaaaaaaagaaataatatgtgacagaattcatgtggcccacaaagcctgaggtacttactgtcaggccctttgtagaaaaagttgctgacccctggtttgatttgccacacagggctgctcatggccctgtaggaagaaactgggtaaatgtgaagccctctgcctctctgacacctaaggccagacccttccctcctcccgaccacaagctttgccagccccgcactagcctcacctgtgcaggatggagtaggttgcgtacatgggggaaggcaggtgaacacagttggctgaagctcttccacaattccatcttgccctcagctgggtccgccagattaactcagtgaaaccagaaagccttcaaggaccagctgaattctgaaagtgagtgagtgagccatcatcttaacattggccagaactgtgttccccaaagctattctagaaagcaccccaggagggatctgcaggaacaaggctagttcatattttacctagtgagcacagtttttgcaaaaatcctccctccaggactttgtctccttggagtgatttttaaaaatacatacattactttatagggagctgttttcccactagtgtcaattaaaatcaccttaaaaggtgattatccacttattcctaaacccctgtgggttgttccccctttccctcagccaacaaaagcatagcctcaaaaaatatcaagttcggtatgttttgccaaatcaaatttcatgtggtagatcaatttttgtgtcaaaataatcttttaaatttagtgatgacaggcttttgttggttttttaaccacgtctatgtatgagaatgatatatttttgaaaactttaattttgaaagccataatttttcttatctaaagagttggggggtggggtgtggaatctggagagtacaagttggtctttggcttctggcaaacttacccattcatttttggaagcacagctagcatatcaacatccagacgagagcgctggtcccgtccacagagcagagtgaagcattctggacttgatgcttaatagcctggcctggagaaaagggtaaggtttatttttggaaacccagatcagttgcatgtaaacagatggcacatggctatttaaaatgctgtatgatggggccgggcgcggtggctcacgcctgtaatcctagcactttgggaggccgaggcaggcggatcatctgaggtcaggagttctagaccagcctggccaacatggtgaaaccccgtctctactaaaaatacaaaaacttagctgggtgtggtagtgcgtgcctgtaatcctagctacttaggaggctgaggcaggagaatcgcttgaacctgggtggcggaggttgcaatgagccgagatcgcgccactgcactccagcctgggtgcaatgaaactgggagtgaaactccgtctcaaaaaaataaaatgctgtatgaacaagatgagcattctgtcaggtgtcgggacacctgggcaaagacgaattcatgctgtctgtgaaaaggaagtttgcactgtaacatatgccatagcttggcccttgctttgtatgcaaccttagctgatggggaaaattccaaacataagtggcacaggaaagaggcaggcagaggaggcaggggtctgtgctgtgcaagtcactggttttttatgactatcattttcattgaatgcatttgttgaattgggacaaaaggaacattttctaaatcagcttgatactctttataaaaaacagctgaatcttatcttctgcctcacattaattcatgtggcatgccaaaagttagactgaacttttctacatcttcaccttgcattgatacaggaaagtcttctctttaagtcttgctaagtataagggggatagtggtcacgggaagaggagaaccggggctgctctcggatggtaattgacaatgccgatttccatttctttgtcttacggctacttccgagccttctagcaaggtccctggttgcatgtatttcctaagagcagagtttatttctctttacattccctgcttccttgctctccatgcagggaccccagccaacctctgggctgttgaatagctctctgctgggtggcaagcccttctccttggcaccctgttgcttaagcatacagattgctcaccaggtgcacacagacagctgtactgtccaagcccattctgctccaccctgtcctcttcagctaaagagcattccagtaatctaaagcccttttcccctggagaagtccagagtttgcagcagtgtggagctgagcttgaacagaacagaccctcagcacggccctggactaatgcactcttatctgagggcagtccattctagaaggttgatgaatttccctaccactctcctggggaccttttctctctagtgggaacaaatgctacataatttagtcaagatcctattaagtcatctcacctgaggcatctggagagggagttgccttccattggtgggaaattgttggtgccagaatacattttgcccaaaactcttctcattggctggccacctagcagggctcctctaaacacgcaactcagcgaggggacccccttcacctctggcaagagagctgggtagatcagaaacttggtgacacctggctagcacagagcaggctcacttgtcttggtcccactacccagattcctgcagacattgcaaaccaaatgaaggttgttgaatgacccctgtccccagccacttgttttgttatcatctgctctgcagtggaatgcctgtgtgtttgagttcactctgcatctgtatatttgagtatagaaaccgagtcaagtgatcatgtgcatccagacacactgtgtcacctgagccacagagcaaatcaccttaacgatctggaatgaaactgtgaccagtgccgccctgggtggttctggagagactgccgtcttcttgtttggccataggtgctggggccccggcttcagtcactgtctcagacaggagtcccgataagcagatcaccagtcctccactgtccttcctgtcggccttgctgcatgagaagatagctgcttcctccctcttttcctacactgtaattattgttttacaattgagtgccttaataatagtttacaaatactatgtatttatgcaaaactgttaaagtctcatctgttatgattggatacttggtcttgtcagtagtggtcagcattgggttgtgagcttgtcctactccatacgtgtttatcctgctatgcagttttacattgtgtgttcacatctattccaaggagccttgctagaaacaacactggcggttcctgcaggccaggcaggcattggcccatgctgtgtcccataggagccaatgaaagaacgtagcttggtctgctagccagccgtggggtggcgcaggccaggcagcctctgcaccagagtccagcacctgcccattccccagtcacacaatcattacagtgtaggaaaagagggaggaagcagctatcttctcatgcagcaaggccgacaggaagtcgagc

SEQ ID NO: 449125 - DNA, 922 bp, Homo sapiens
tggtatggaaaccaaatttttaaaatctggaatcttcaactctgaaaactcgtatcagtgaataggactcagaaagctcaatttgtatgcttttatgagccaaaaagtacgtgggattgtgtcaaagcaggatactgttatttacctcagatgactgaaaccacaccaggacagccaagggcttccagggtgccagggcatcgaagtaccctccacggcattctcttggggatccaacacttacatgtcaccagcagcaagagctgcttcatttcttctattccatttgcttgaccaaatgctgatgcatttctttttcaggtccacgctagtttgattttgttattaatattgttttaaaaaatgcctttttctgcctttggtaaactaaaggtctaacatatattccaacttcttttgacagaggaaaagacaagcatacgaatctaaccttatctgtcatggcctgcagttagaagcaacaagatcagtaagtactggtccctttttcagccctcggctgaccactgttctcgggcagcttcgtgccacttggaatacttgggtgacattggaaacatgcagccctggccacatcttagtcatagactgggagaggagtcaatcaaaatctgcattgtgtaggatgtattctttttttctgatcaaaactagcagatcttttttaatagccaacgaattttacaatgaatgcatgtatgaatgattattttctttctttaagaaacttctaaaagcttttttgttatacaaaaaatagtttatggtaaaaaattagaaaacataagaataaggaaaataatctgtatcttaattatccataaataattttgcagtccttctgagctgttttactcaaaaatatatatgtacacattttttatctttcaaaaaggagaaa

SEQ ID NO: 449126 - DNA, 944 bp, Homo sapiens
cggccgcactgggcatgctcagtctccgggctccgctcggcaggcgagaggcgtcctccggctctgggctccggtcggtgggtgcctcggctcggctttccccggcgctggctgggctcagcggcccctgagcccaagcgacacacgccccgcggtccccgatccggcccctgggagagccgcgccgttctggaacccgggagcccccaacttcgcgccaagttcggagccgccttctgagggagacatgaaaaagatgagcaggaatgttttgctacaaatggaggaggaggaggacgacgacgatggggatatcggaagaatttaatggaaaacctgactccctcttttttaatgatggccagcgaagaattgactttgttctagtatatgaggatgaaagcagaaaagagaccaataaaaagggtacaaatgaaaaacaaaggaggaaaagacaagcatacgaatctaaccttatctgtcatggcctgcagttagaagcaacaagatcagtaagtactggtccctttttcagccctcggctgaccactgttctcgggcagcttcgtgccacttggaatacttgggtgacattggaaacatgcagccctggccacatcttagtcatagactgggagaggagtcaatcaaaatctgcattgtgtaggatgtattctttttttctgatcaaaactagcagatcttttttaatagccaacgaattttacaatgaatgcatgtatgaatgattattttctttctttaagaaacttctaaaagcttttttgttatacaaaaaatagtttatggtaaaaaattagaaaacataagaataaggaaaataatctgtatcttaattatccataaataattttgcagtccttctgagctgttttactcaaaaatatatatgtacacattttttatctttcaaaaaggagaaa

SEQ ID NO: 449127 - DNA, 1024 bp, Homo sapiens
cggccgcactgggcatgctcagtctccgggctccgctcggcaggcgagaggcgtcctccggctctgggctccggtcggtgggtgcctcggctcggctttccccggcgctggctgggctcagcggcccctgagcccaagcgacacacgccccgcggtccccgatccggcccctgggagagccgcgccgttctggaacccgggagcccccaacttcgcgccaagttcggagccgccttctgagggagacatgaaaaagatgagcaggaatgttttgctacaaatggaggaggaggaggacgacgacgatggggatatcgtgttggaaaaccttggacagacaattgtccccgatttgggatcactggaaagtcagcatgattttcgaaccccggagtttgaagaatttaatggaaaacctgactccctcttttttaatgatggccagcgaagaattgactttgttctagtatatgaggatgaaagcagaaaagagaccaataaaaagggtacaaatgaaaaacaaaggaggaaaagacaagcatacgaatctaaccttatctgtcatggcctgcagttagaagcaacaagatcagtaagtactggtccctttttcagccctcggctgaccactgttctcgggcagcttcgtgccacttggaatacttgggtgacattggaaacatgcagccctggccacatcttagtcatagactgggagaggagtcaatcaaaatctgcattgtgtaggatgtattctttttttctgatcaaaactagcagatcttttttaatagccaacgaattttacaatgaatgcatgtatgaatgattattttctttctttaagaaacttctaaaagcttttttgttatacaaaaaatagtttatggtaaaaaattagaaaacataagaataaggaaaataatctgtatcttaattatccataaataattttgcagtccttctgagctgttttactcaaaaatatatatgtacacattttttatctttcaaaaaggagaaa

SEQ ID NO: 449128 - DNA, 472 bp, Homo sapiens
cggccgcactgggcatgctcagtctccgggctccgctcggcaggcgagaggcgtcctccggctctgggctccggtcggtgggtgcctcggctcggctttccccggcgctggctgggctcagcggcccctgagcccaagcgacacacgccccgcggtccccgatccggcccctgggagagccgcgccgttctggaacccgggagcccccaacttcgcgccaagttcggagccgccttctgagggagacatgaaaaagatgagcaggaatgttttgctacaaatggaggaggaggaggacgacgacgatggggatatcggaagaatttaatggaaaacctgactccctcttttttaatgatggccagcgaagaattgactttgttctagtatatgaggatgaaagcagaaaagagaccaataaaaagggtacaaatgaaaaacaaagggtaagtttttatgctattttcctttc

SEQ ID NO: 449129 - DNA, 1087 bp, Homo sapiens
cggccgcactgggcatgctcagtctccgggctccgctcggcaggcgagaggcgtcctccggctctgggctccggtcggtgggtgcctcggctcggctttccccggcgctggctgggctcagcggcccctgagcccaagcgacacacgccccgcggtccccgatccggcccctgggagagccgcgccgttctggaacccgggagcccccaacttcgcgccaagttcggagccgccttctgagggagacatgaaaaagatgagcaggaatgttttgctacaaatggaggaggaggaggacgacgacgatggggatatcggtgatgttcctgcctccaggaggccttttctgactcctcatactcacctcccatccagcctggtgttggaaaaccttggacagacaattgtccccgatttgggatcactggaaagtcagcatgattttcgaaccccggagtttgaagaatttaatggaaaacctgactccctcttttttaatgatggccagcgaagaattgactttgttctagtatatgaggatgaaagcagaaaagagaccaataaaaagggtacaaatgaaaaacaaaggaggaaaagacaagcatacgaatctaaccttatctgtcatggcctgcagttagaagcaacaagatcagtaagtactggtccctttttcagccctcggctgaccactgttctcgggcagcttcgtgccacttggaatacttgggtgacattggaaacatgcagccctggccacatcttagtcatagactgggagaggagtcaatcaaaatctgcattgtgtaggatgtattctttttttctgatcaaaactagcagatcttttttaatagccaacgaattttacaatgaatgcatgtatgaatgattattttctttctttaagaaacttctaaaagcttttttgttatacaaaaaatagtttatggtaaaaaattagaaaacataagaataaggaaaataatctgtatcttaattatccataaataattttgcagtccttctgagctgttttactcaaaaatatatatgtacacattttttatctttcaaaaaggagaaa

SEQ ID NO: 449130 - DNA, 871 bp, Homo sapiens
cgagcaggcaccctcatctcggcgtctgaggacagaggctttaaggtctgggaccattgtacaggatcattaatatacagttcatctgtgttatcagcatatcctcttctcagtttattcattgatgcagaaagcaggcagctggtcaccgggtgtgctgacggccaggtgagacagccacagagttaagttccagttcccagacatgcctgaacgtgagcttgtacacaaaggtctttgtcttcatgctactttgtattttcctgcgatttgaaaaaacctgtccacctcagtgctgagaacgtgaccttctgtgggtctcagcgtcactgtgggttcaatatggtcctgggccccctggtctgcggaggagctgggtctgcatgtcccagagctccatgcgtggttctggagtgcagcaaaagtgagggccactcacgtgaccctgaaaacctgctgagaagagggctgtgagcagacgtcccccgctcccacgggtgctgcccgcgccccggagaggcgccctggacggctcctgtgtggcatcccccgtgcccgcacgctgcccgcgccccggagaggcgccctggacggctcctgtgtggcatcccccgtgcccgcacgctgcccgcgccccggagaggcgccctggacggctcctgtgtggcatcccccgtgcccgcacgctgcccgcgccccggagaggcgccctggacggctcctgtgtggcatcccccgtggctttgtggtccctttctgtctctttcccctgtttggaaacctgaggatttggccttttcaaacttcttagctgggtctccttggtggttgggaccatttgttgtggcgggtggccagaaaaacgagattc

SEQ ID NO: 449131 - DNA, 2524 bp, Homo sapiens
tgggcctttctgttttggaggagtaaagcacgtttgctgtcagataaaatgcctgagtacccagggaagttgagccttctgctctctgtagaaacacatcccagaaccagcggtgttggtagggccaggactgccctgtccatccagcgtgacttgggcgtgcgccacacctggcctcatggtcaggtcctgagcacgtgtgcagctcgtgaatgccagggtccttgcgttcttccctcagatggctttctgttggtaaatgaagctggcacacggccacacagctacagcattgatggtgcaggcgtccgtccgcggagcacggcataaggagcggtctgtgacgccccagcacctctcccgtgcagcccctgtgcttgtcctcctggcatcttagggcactggtttcctgcattcgctttgctccccttgtgcacgttctgtcttcccagaagaagagagttagggaattaaaaggagagcgttcttccatgcgcatatcctcttctcagtttattcattgatgcagaaagcaggcagctggtcaccgggtgtgctgacggccaggtgagacagccacagagttaagttccagttcccagacatgcctgaacgtgagcttgtacacaaaggtctttgtcttcatgctactttgtattttcctgcgatttgaaaaaacctgtccacctcagtgctgagaacgtgaccttctgtgggtctcagcgtcactgtgggttcaatatggtcctgggccccctggtctgcggaggagctgggtctgcatgtcccagagctccatgcgtggttctggagtgcagcaaaagtgagggccactcacgtgaccctgaaaacctgctgagaagagggctgtgagcagacgtcccccgctcccacgggtgctgcccgcgccccggagaggcgccctggacggctcctgtgtggcatcccccgtgcccgcacgctgcccgcgccccggagaggcgccctggacggctcctgtgtggcatcccccgtgcccgcacgctgcccgcgccccggagaggcgccctggacggctcctgtgtggcatcccccgtgcccgcacgctgcccgcgccccggagaggcgccctggacggctcctgtgtggcatcccccgtgcccgcacgctgcccgcgccccggagaggcgccctggacggctcctgtgtggcatcccccgtgcttcttgtgctcccctttcctgtcatctttacacactgttgaaaaacctgaagatgttggcctttttcaaaacattttttagggcatgtgggacgtgctcttggctgtgaagctgtggggtgtgtgcagagagcctggggcctggggttcccagaggagcatcttggggaggcctgcacagtaggatcctgcccatgtgccctgagctgatgtgccagccgtgtgaaagtgctctgacaccgtgggccgtacggagggcctccagaggggatgttgaaggcaggagacagctgtgccgggagcctctgcaggccgtggagggcccgtcctgtgacgtgtctgccctccctgctccacctctggtgttgctgcttctgcgtcaggacccttgctgcagcgccatgtctgcatcttctttgcttttgtagctttggatcttcagtttgatggatggacaccattatcgtcgtgtggcacgggttgacctaaggaagaagacagagactttctccacaagaagggttaagtctgggctgtgcaaagaaagccagcttccctctacaagtgctctgggaaaaggagagcaggttgaagtaacatttcctgtactgagacttgcaccctgtgatctctcactcatcccaaattctgcatgtggatgtctttcttctgagaacacccgatgtgtgtggatcggaagctcagtgggcttattcgtatttaacctggcaaacctggaagtggaagctgctttgtattacaaggatttccagagcctcagcatcctgctggccggatcgtgtgccctgaggaaccgcactgcggatcaaaaggtgctgtgcttgctggcctccctctttggcgggaagattgccgtgttggagatcaacccggccgcgctagtcagggctcagcagtgccccagcatggggcagagcctctcggtgccagccagctcctgtgtcctaccgacctctccactgtatctgggaattgccaaggagaagagtaccaaggctgctagtgaacagcgacgtgcaacgtgcccaagactgaccgctgttcctctggtgcctgttgcagtgggggtgcagagtggaccttcagcaattactgattgtgagaacatttttttccccttttttctctgctgaggaatttgaaagcagatcccgagcgtgtgattgtactcctgcacacttgagtgtgcatttctggaacatgtatgtttttacctagccaccatgacgttatatcaaaaccagtcattttttggaaccttgtattagcaaggccataataaattattcttgattgccttga

SEQ ID NO: 449132 - DNA, 2643 bp, Homo sapiens
atgatacacttgatctttgatttcatttatagtttaattaggatatgtagtatttttcaatattcatttatctaatgctcctaaattactgacagtttagagtaagttttaaatgaaatgacatcctaggcaacaatttttttttaaggaaacaagacatccatttacttgctgttttcatcactaagtccataattttattatttctggctgactcaggaatccttctgctccaagtgcaacgtcgattaaacggcagtgctgccctccctctaggctataaagcagccggagctgggccgtggtttaagcccaccaggccttctgtcgggaggtgggatgggattcctcgggacccatctgtggtggactcaccgggcagccttttggggtgatgtccccagccttcattgtgtttatggggttttcaacatttgtattcatgtgcaagttttactttttggtgaagaaattattttggaatagttcaaacttgactaacagaaatactgtaagtaaatattacgtgtaaagagataagtaaaactgacagttctcgggttaattggtaccaggcacttacaaagctaaattttccgatgttcctttcaccagcatatcctcttctcagtttattcattgatgcagaaagcaggcagctggtcaccgggtgtgctgacggccaggtgagacagccacagagttaagttccagttcccagacatgcctgaacgtgagcttgtacacaaaggtctttgtcttcatgctactttgtattttcctgcgatttgaaaaaacctgtccacctcagtgctgagaacgtgaccttctgtgggtctcagcgtcactgtgggttcaatatggtcctgggccccctggtctgcggaggagctgggtctgcatgtcccagagctccatgcgtggttctggagtgcagcaaaagtgagggccactcacgtgaccctgaaaacctgctgagaagagggctgtgagcagacgtcccccgctcccacgggtgctgcccgcgccccggagaggcgccctggacggctcctgtgtggcatcccccgtgcccgcacgctgcccgcgccccggagaggcgccctggacggctcctgtgtggcatcccccgtgcccgcacgctgcccgcgccccggagaggcgccctggacggctcctgtgtggcatcccccgtgcccgcacgctgcccgcgccccggagaggcgccctggacggctcctgtgtggcatcccccgtgcccgcacgctgcccgcgccccggagaggcgccctggacggctcctgtgtggcatcccccgtgcttcttgtgctcccctttcctgtcatctttacacactgttgaaaaacctgaagatgttggcctttttcaaaacattttttagggcatgtgggacgtgctcttggctgtgaagctgtggggtgtgtgcagagagcctggggcctggggttcccagaggagcatcttggggaggcctgcacagtaggatcctgcccatgtgccctgagctgatgtgccagccgtgtgaaagtgctctgacaccgtgggccgtacggagggcctccagaggggatgttgaaggcaggagacagctgtgccgggagcctctgcaggccgtggagggcccgtcctgtgacgtgtctgccctccctgctccacctctggtgttgctgcttctgcgtcaggacccttgctgcagcgccatgtctgcatcttctttgcttttgtagctttggatcttcagtttgatggatggacaccattatcgtcgtgtggcacgggttgacctaaggaagaagacagagactttctccacaagaagggttaagtctgggctgtgcaaagaaagccagcttccctctacaagtgctctgggaaaaggagagcaggttgaagtaacatttcctgtactgagacttgcaccctgtgatctctcactcatcccaaattctgcatgtggatgtctttcttctgagaacacccgatgtgtgtggatcggaagctcagtgggcttattcgtatttaacctggcaaacctggaagtggaagctgctttgtattacaaggatttccagagcctcagcatcctgctggccggatcgtgtgccctgaggaaccgcactgcggatcaaaaggtgctgtgcttgctggcctccctctttggcgggaagattgccgtgttggagatcaacccggccgcgctagtcagggctcagcagtgccccagcatggggcagagcctctcggtgccagccagctcctgtgtcctaccgacctctccactgtatctgggaattgccaaggagaagagtaccaaggctgctagtgaacagcgacgtgcaacgtgcccaagactgaccgctgttcctctggtgcctgttgcagtgggggtgcagagtggaccttcagcaattactgattgtgagaacatttttttccccttttttctctgctgaggaatttgaaagcagatcccgagcgtgtgattgtactcctgcacacttgagtgtgcatttctggaacatgtatgtttttacctagccaccatgacgttatatcaaaaccagtcattttttggaaccttgtattagcaaggccataataaattattcttgattgccttga

SEQ ID NO: 449133 - DNA, 944 bp, Homo sapiens
tctcctgcgcatcgcagatgccacctgcacccgcccagcaccctcgtactcacctggtctcctgcgcattgcagatgccacatgcacccacccagcaaccttgtcctcacctggtctctggctgtccagagttgcttcctgttgacgacagctctcctcagaagaaagccagcttccctctacaagtgctctgggaaaaggagagcaggttgaagtaacatttcctgtactgagacttgcaccctgtgatctctcactcatcccaaattctgcatgtggatgtctttcttctgagaacacccgatgtgtgtggatcggaagctcagtgggcttattcgtatttaacctggcaaacctggaagtggaagctgctttgtattacaaggatttccagagcctcagcatcctgctggccggatcgtgtgccctgaggaaccgcactgcggatcaaaaggtgctgtgcttgctggcctccctctttggcgggaagattgccgtgttggagatcaacccggccgcgctagtcagggctcagcagtgccccagcatggggcagagcctctcggtgccagccagctcctgtgtcctaccgacctctccactgtatctgggaattgccaaggagaagagtaccaaggctgctagtgaacagcgacgtgcaacgtgcccaagactgaccgctgttcctctggtgcctgttgcagtgggggtgcagagtggaccttcagcaattactgattgtgagaacatttttttccccttttttctctgctgaggaatttgaaagcagatcccgagcgtgtgattgtactcctgcacacttgagtgtgcatttctggaacatgtatgtttttacctagccaccatgacgttatatcaaaaccagtcattttttggaaccttgtattagcaaggccataataaattattcttgattgccttga

SEQ ID NO: 449134 - DNA, 2618 bp, Homo sapiens
tgggcctttctgttttggaggagtaaagcacgtttgctgtcagataaaatgcctgagtacccagggaagttgagccttctgctctctgtagaaacacatcccagaaccagcggtgttggtagggccaggactgccctgtccatccagcgtgacttgggcgtgcgccacacctggcctcatggtcaggtcctgagcacgtgtgcagctcgtgaatgccagggtccttgcgttcttccctcagatggctttctgttggtaaatgaagctggcacacggccacacagctacagcattgatggtgcaggcgtccgtccgcggagcacggcataaggagcggtctgtgacgccccagcacctctcccgtgcagcccctgtgcttgtcctcctggcatcttagggcactggtttcctgcattcgctttgctccccttgtgcacgttctgtcttcccagaagaagagagttagggaattaaaaggagagcgttcttccatgcgcatatcctcttctcagtttattcattgatgcagaaagcaggcagctggtcaccgggtgtgctgacggccaggtgagacagccacagagttaagttccagttcccagacatgcctgaacgtgagcttgtacacaaaggtctttgtcttcatgctactttgtattttcctgcgatttgaaaaaacctgtccacctcagtgctgagaacgtgaccttctgtgggtctcagcgtcactgtgggttcaatatggtcctgggccccctggtctgcggaggagctgggtctgcatgtcccagagctccatgcgtggttctggagtgcagcaaaagtgagggccactcacgtgaccctgaaaacctgctgagaagagggctgtgagcagacgtcccccgctcccacgggtgctgcccgcgccccggagaggcgccctggacggctcctgtgtggcatcccccgtgcccgcacgctgcccgcgccccggagaggcgccctggacggctcctgtgtggcatcccccgtgcccgcacgctgcccgcgccccggagaggcgccctggacggctcctgtgtggcatcccccgtgcccgcacgctgcccgcgccccggagaggcgccctggacggctcctgtgtggcatcccccgtgcccgcacgctgcccgcgccccggagaggcgccctggacggctcctgtgtggcatcccccgtgcttcttgtgctcccctttcctgtcatctttacacactgttgaaaaacctgaagatgttggcctttttcaaaacattttttagggcatgtgggacgtgctcttggctgtgaagctgtggggtgtgtgcagagagcctggggcctggggttcccagaggagcatcttggggaggcctgcacagtaggatcctgcccatgtgccctgagctgatgtgccagccgtgtgaaagtgctctgacaccgtgggccgtacggagggcctccagaggggatgttgaaggcaggagacagctgtgccgggagcctctgcaggccgtggagggcccgtcctgtgacgtgtctgccctccctgctccacctctggtgttgctgcttctgcgtcaggacccttgctgcagcgccatgtctgcatcttctttgcttttgtagctttggatcttcagtttgatggatggacaccattatcgtcgtgtggcacgggttgacctaaggaagaagacagagactttctccacaagaagggttaagtctgggctgtgcaaagaaagccagcttccctctacaagtgctctgggaaaaggagagcaggttgaagtaacatttcctgtactgagacttgcaccctgtgatctctcactcatcccaaattctgcatgtggatgtctttcttctgagaacacccgatgtgtgtggatcggaagctcagtgggcttattcgtatttaacctggcaaacctggaagtggaagctgctttgtattacaaggatttccagagcctcagcatcctgctggccggatcgtgtgccctgaggaaccgcactgcggatcaaaaggtgctgtgcttgctggcctccctctttggcgggaagattgccgtgttggagatcaacccggccgcgctagtcagggctcagcagtgccccagcatggggcagagcctctcggtgccagccagctcctgtgtcctaccgacctctccactgtatctgggaattgccaaggagaagagtaccaaggctgctagtgaacagcgacgtgctgcacggaacgtcatgaaggaccaacgcctggttttccatagtaaagttaggtcatctggttatgcgtcagcaccacatgtaactatgttttcaccaaagaccaacatcaagagtgaggggaaaggatcttcaaggagcaggagcacgtgcgcacgggaggcataccccgtggagtgcgctgtgcccaccaagcccggcccccaggtcgtgccgcccccacctgcacacgtgtatgctgcatccagtactcaggtgcgccacgtcctgcgggagctgggtagcatttcattgtaagagtctttgattctgcccactgtaaacatttttctattgtatcataattgtaaatatatttttaaaaaccttggttacttgaa

SEQ ID NO: 449135 - DNA, 1315 bp, Homo sapiens
atgatacacttgatctttgatttcatttatagtttaattaggatatgtagtatttttcaatattcatttatctaatgctcctaaattactgacagtttagagtaagttttaaatgaaatgacatcctaggcaacaatttttttttaaggaaacaagacatccatttacttgctgttttcatcactaagtccataattttattatttctggctgactcaggaatccttctgctccaagtgcaacgtcgattaaacggcagtgctgccctccctctaggctataaagcagccggagctgggccgtggtttaagcccaccaggccttctgtcgggaggtgggatgggattcctcgggacccatctgtggtggactcaccgggcagccttttggggtgatgtccccagccttcattgtgtttatggggttttcaacatttgtattcatgtgcaagttttactttttggtgaagaaattattttggaatagttcaaacttgactaacagaaatactgtaagtaaatattacgtgtaaagagataagtaaaactgacagttctcgggttaattggtaccaggcacttacaaagctaaattttccgatgttcctttcaccagcatatcctcttctcagtttattcattgatgcagaaagcaggcagctggtctcctgcgcattgcagatgccacatgcacccacccagcaaccttgtcctcacctggtctctggctgtccagagttgcttcctgttgacgacagctctcctcagaagagtaccaaggctgctagtgaacagcgacgtggtcagtacagggtgctgtgagatctaagaatacaaggctgatgcgttctcattgtggttagggctgctgcattgctttgcgaattcttatgttaaaatatgcattccgtacttccttccatccttctgtccttcatgtctctgcctctcgtgcgtgttccatgtccgctgtggtggggaacttgctgggtgcttcgcctcctgaattggccatcactcatgggattcagcaacgtgcccaagactgaccgctgttcctctggtgcctgttgcagtgggggtgcagagtggaccttcagcaattactgattgtgagaacatttttttccccttttttctctgctgaggaatttgaaagcagatcccgagcgtgtgattgtactcctgcacacttgagtgtgcatttctggaacatgtatgtttttacctagccaccatgacgttatatcaaaaccagtcattttttggaaccttgtattagcaaggccataataaattattcttgattgccttga

SEQ ID NO: 449136 - DNA, 2539 bp, Homo sapiens
tgggcctttctgttttggaggagtaaagcacgtttgctgtcagataaaatgcctgagtacccagggaagttgagccttctgctctctgtagaaacacatcccagaaccagcggtgttggtagggccaggactgccctgtccatccagcgtgacttgggcgtgcgccacacctggcctcatggtcaggtcctgagcacgtgtgcagctcgtgaatgccagggtccttgcgttcttccctcagatggctttctgttggtaaatgaagctggcacacggccacacagctacagcattgatggtgcaggcgtccgtccgcggagcacggcataaggagcggtctgtgacgccccagcacctctcccgtgcagcccctgtgcttgtcctcctggcatcttagggcactggtttcctgcattcgctttgctccccttgtgcacgttctgtcttcccagaagaagagagttagggaattaaaaggagagcgttcttccatgcgcatatcctcttctcagtttattcattgatgcagaaagcaggcagctggtcaccgggtgtgctgacggccaggtgagacagccacagagttaagttccagttcccagacatgcctgaacgtgagcttgtacacaaaggtctttgtcttcatgctactttgtattttcctgcgatttgaaaaaacctgtccacctcagtgctgagaacgtgaccttctgtgggtctcagcgtcactgtgggttcaatatggtcctgggccccctggtctgcggaggagctgggtctgcatgtcccagagctccatgcgtggttctggagtgcagcaaaagtgagggccactcacgtgaccctgaaaacctgctgagaagagggctgtgagcagacgtcccccgctcccacgggtgctgcccgcgccccggagaggcgccctggacggctcctgtgtggcatcccccgtgcccgcacgctgcccgcgccccggagaggcgccctggacggctcctgtgtggcatcccccgtgcccgcacgctgcccgcgccccggagaggcgccctggacggctcctgtgtggcatcccccgtgcccgcacgctgcccgcgccccggagaggcgccctggacggctcctgtgtggcatcccccgtgcccgcacgctgcccgcgccccggagaggcgccctggacggctcctgtgtggcatcccccgtgcttcttgtgctcccctttcctgtcatctttacacactgttgaaaaacctgaagatgttggcctttttcaaaacattttttagggcatgtgggacgtgctcttggctgtgaagctgtggggtgtgtgcagagagcctggggcctggggttcccagaggagcatcttggggaggcctgcacagtaggatcctgcccatgtgccctgagctgatgtgccagccgtgtgaaagtgctctgacaccgtgggccgtacggagggcctccagaggggatgttgaaggcaggagacagctgtgccgggagcctctgcaggccgtggagggcccgtcctgtgacgtgtctgccctccctgctccacctctggtgttgctgcttctgcgtcaggacccttgctgcagcgccatgtctgcatcttctttgcttttgtagctttggatcttcagtttgatggatggacaccattatcgtcgtgtggcacgggttgacctaaggaagaagacagagactttctccacaagaagggttaagtctgggctgtgcaaagaaagccagcttccctctacaagtgctctgggaaaaggagagcaggttgaagtaacatttcctgtactgagacttgcaccctgtgatctctcactcatcccaaattctgcatgtggatgtctttcttctgagaacacccgatgtgtgtggatcggaagctcagtgggcttattcgtatttaacctggcaaacctggaagtggaagctgctttgtattacaaggatttccagagcctcagcatcctgctggccggatcgtgtgccctgaggaaccgcactgcggatcaaaaggtgctgtgcttgctggcctccctctttggcgggaagattgccgtgttggagatcaacccggccgcgctagtcagggctcagcagtgccccagcatggggcagagcctctcggtgccagccagctcctgtgtcctaccgacctctccactgtatctgggaattgccaaggagaagagtaccaaggctgctagtgaacagcgacgtgtgtaactatgttttcaccaaagaccaacatcaagagtgaggggaaaggatcttcaaggagcaggagcacgtgcgcacgggaggcataccccgtggagtgcgctgtgcccaccaagcccggcccccaggtcgtgccgcccccacctgcacacgtgtatgctgcatccagtactcaggtgcgccacgtcctgcgggagctgggtagcatttcattgtaagagtctttgattctgcccactgtaaacatttttctattgtatcataattgtaaatatatttttaaaaaccttggttacttgaa

SEQ ID NO: 449137 - DNA, 339 bp, Homo sapiens
aaaaaaaaaaagaaaactcggagctctgccaatgctatttggaagaaggtttttcgtgctgttgcttctatcttgttgaaaacgaaatagttgatagtttattttaattgaaacactatttcataatagaatgtacattataaaacagcgcttttattaagaatatttttttcctacaaggataagaatacacttgacagttttcattttcagatactgttatgtccacagctgcaggaatcagtcatttggaactgtctttaaagtgtgtgtcactgaggcatttccatcgtatcgtcgtttgcgctcctagtttcatggggcttgtttctgtttcag

SEQ ID NO: 449138 - DNA, 420 bp, Homo sapiens
atgtaagtctatttaaaagagttatttcctgattttgaatataagagtctaaatatagacatatagataaatattcaagtttactggaatacgattatacatgtagatggggggaagcccacttcgtttcttgcttatgttttacttctaatctcactgtgaatgtctcccgatcaccgttacctgtggccttccctcagggaggcataccccgtggagtgcgctgtgcccaccaagcccggcccccaggtcgtgccgcccccacctgcacacgtgtatgctgcatccagtactcaggtgcgccacgtcctgcgggagctgggtagcatttcattgtaagagtctttgattctgcccactgtaaacatttttctattgtatcataattgtaaatatatttttaaaaaccttggttacttg

SEQ ID NO: 449139 - DNA, 344 bp, Homo sapiens
gtactgttagcttcacctgttgcaataatggcaacgttgttacctcttctaaagaatcctgtgtttatccaaaggtctgggaccattgtacaggatcattaatatacagttcatctgtgttatcaggtaaatttaaaactttcatgttttctgtaaataggttgtgtgtaacccactttttctagagcatattacagggcataagatggagctgggacattcgagtggatctgaatgaggcaatctcagacttacagcccttcactcccgtccacacagggagaggattcacttaacagtgaatgtccttgatgtttttcacttaaaattaaatggatgcttgg

SEQ ID NO: 449140 - DNA, 557 bp, Homo sapiens
tgggcctttctgttttggaggagtaaagcacgtttgctgtcagataaaatgcctgagtacccagggaagttgagccttctgctctctgtagaaacacatcccagaaccagcggtgttggtagggccaggactgccctgtccatccagcgtgacttgggcgtgcgccacacctggcctcatggtcaggtcctgagcacgtgtgcagctcgtgaatgccagggtccttgcgttcttccctcagatggctttctgttggtaaatgaagctggcacacggccacacagctacagcattgatggtgcaggcgtccgtccgcggagcacggcataaggagcggtctgtgacgccccagcacctctcccgtgcagcccctgtgcttgtcctcctggcatcttagggcactggtttcctgcattcgctttgctccccttgtgcacgttctgtcttcccagaagaagagagttagggaattaaaaggagagcgttcttccatgcggtaagtgacatgaaaatgccacttaaagcatatacagatactttggtgacctggtagagtt

SEQ ID NO: 449141 - DNA, 1462 bp, Homo sapiens
tgggcctttctgttttggaggagtaaagcacgtttgctgtcagataaaatgcctgagtacccagggaagttgagccttctgctctctgtagaaacacatcccagaaccagcggtgttggtagggccaggactgccctgtccatccagcgtgacttgggcgtgcgccacacctggcctcatggtcaggtcctgagcacgtgtgcagctcgtgaatgccagggtccttgcgttcttccctcagatggctttctgttggtaaatgaagctggcacacggccacacagctacagcattgatggtgcaggcgtccgtccgcggagcacggcataaggagcggtctgtgacgccccagcacctctcccgtgcagcccctgtgcttgtcctcctggcatcttagggcactggtttcctgcattcgctttgctccccttgtgcacgttctgtcttcccagaagaagagagttagggaattaaaaggagagcgttcttccatgcgcatatcctcttctcagtttattcattgatgcagaaagcaggcagctggtcaccgggtgtgctgacggccagctttggatcttcagtttgatggatggacaccattatcgtcgtgtggcacgggttgacctaaggaagaagacagagactttctccacaagaagggttaagtctgggctgtgcaaagaaagccagcttccctctacaagtgctctgggaaaaggagagcaggttgaagtaacatttcctgtactgagacttgcaccctgtgatctctcactcatcccaaattctgcatgtggatgtctttcttctgagaacacccgatgtgtgtggatcggaagctcagtgggcttattcgtatttaacctggcaaacctggaagtggaagctgctttgtattacaaggatttccagagcctcagcatcctgctggccggatcgtgtgccctgaggaaccgcactgcggatcaaaaggtgctgtgcttgctggcctccctctttggcgggaagattgccgtgttggagatcaacccggccgcgctagtcagggctcagcagtgccccagcatggggcagagcctctcggtgccagccagctcctgtgtcctaccgacctctccactgtatctgggaattgccaaggagaagagtaccaaggctgctagtgaacagcgacgtgcaacgtgcccaagactgaccgctgttcctctggtgcctgttgcagtgggggtgcagagtggaccttcagcaattactgattgtgagaacatttttttccccttttttctctgctgaggaatttgaaagcagatcccgagcgtgtgattgtactcctgcacacttgagtgtgcatttctggaacatgtatgtttttacctagccaccatgacgttatatcaaaaccagtcattttttggaaccttgtattagcaaggccataataaattattcttgattgccttga

SEQ ID NO: 449142 - DNA, 2753 bp, Homo sapiens
tgggcctttctgttttggaggagtaaagcacgtttgctgtcagataaaatgcctgagtacccagggaagttgagccttctgctctctgtagaaacacatcccagaaccagcggtgttggtagggccaggactgccctgtccatccagcgtgacttgggcgtgcgccacacctggcctcatggtcaggtcctgagcacgtgtgcagctcgtgaatgccagggtccttgcgttcttccctcagatggctttctgttggtaaatgaagctggcacacggccacacagctacagcattgatggtgcaggcgtccgtccgcggagcacggcataaggagcggtctgtgacgccccagcacctctcccgtgcagcccctgtgcttgtcctcctggcatcttagggcactggtttcctgcattcgctttgctccccttgtgcacgttctgtcttcccagaagaagagagttagggaattaaaaggagagcgttcttccatgcgcatatcctcttctcagtttattcattgatgcagaaagcaggcagctggtcaccgggtgtgctgacggccaggtgagacagccacagagttaagttccagttcccagacatgcctgaacgtgagcttgtacacaaaggtctttgtcttcatgctactttgtattttcctgcgatttgaaaaaacctgtccacctcagtgctgagaacgtgaccttctgtgggtctcagcgtcactgtgggttcaatatggtcctgggccccctggtctgcggaggagctgggtctgcatgtcccagagctccatgcgtggttctggagtgcagcaaaagtgagggccactcacgtgaccctgaaaacctgctgagaagagggctgtgagcagacgtcccccgctcccacgggtgctgcccgcgccccggagaggcgccctggacggctcctgtgtggcatcccccgtgcccgcacgctgcccgcgccccggagaggcgccctggacggctcctgtgtggcatcccccgtgcccgcacgctgcccgcgccccggagaggcgccctggacggctcctgtgtggcatcccccgtgcccgcacgctgcccgcgccccggagaggcgccctggacggctcctgtgtggcatcccccgtgcccgcacgctgcccgcgccccggagaggcgccctggacggctcctgtgtggcatcccccgtgcttcttgtgctcccctttcctgtcatctttacacactgttgaaaaacctgaagatgttggcctttttcaaaacattttttagggcatgtgggacgtgctcttggctgtgaagctgtggggtgtgtgcagagagcctggggcctggggttcccagaggagcatcttggggaggcctgcacagtaggatcctgcccatgtgccctgagctgatgtgccagccgtgtgaaagtgctctgacaccgtgggccgtacggagggcctccagaggggatgttgaaggcaggagacagctgtgccgggagcctctgcaggccgtggagggcccgtcctgtgacgtgtctgccctccctgctccacctctggtgttgctgcttctgcgtcaggacccttgctgcagcgccatgtctgcatcttctttgcttttgtagctttggatcttcagtttgatggatggacaccattatcgtcgtgtggcacgggttgacctaaggaagaagacagagactttctccacaagaagggttaagtctgggctgtgcaaagaaagccagcttccctctacaagtgctctgggaaaaggagagcaggttgaagtaacatttcctgtactgagacttgcaccctgtgatctctcactcatcccaaattctgcatgtggatgtctttcttctgagaacacccgatgtgtgtggatcggaagctcagtgggcttattcgtatttaacctggcaaacctggaagtggaagctgctttgtattacaaggatttccagagcctcagcatcctgctggccggatcgtgtgccctgaggaaccgcactgcggatcaaaaggtgctgtgcttgctggcctccctctttggcgggaagattgccgtgttggagatcaacccggccgcgctagtcagggctcagcagtgccccagcatggggcagagcctctcggtgccagccagctcctgtgtcctaccgacctctccactgtatctgggaattgccaaggagaagagtaccaaggctgctagtgaacagcgacgtggtcagtacagggtgctgtgagatctaagaatacaaggctgatgcgttctcattgtggttagggctgctgcattgctttgcgaattcttatgttaaaatatgcattccgtacttccttccatccttctgtccttcatgtctctgcctctcgtgcgtgttccatgtccgctgtggtggggaacttgctgggtgcttcgcctcctgaattggccatcactcatgggattcagcaacgtgcccaagactgaccgctgttcctctggtgcctgttgcagtgggggtgcagagtggaccttcagcaattactgattgtgagaacatttttttccccttttttctctgctgaggaatttgaaagcagatcccgagcgtgtgattgtactcctgcacacttgagtgtgcatttctggaacatgtatgtttttacctagccaccatgacgttatatcaaaaccagtcattttttggaaccttgtattagcaaggccataataaattattcttgattgccttga

SEQ ID NO: 449143 - DNA, 2574 bp, Homo sapiens
tgggcctttctgttttggaggagtaaagcacgtttgctgtcagataaaatgcctgagtacccagggaagttgagccttctgctctctgtagaaacacatcccagaaccagcggtgttggtagggccaggactgccctgtccatccagcgtgacttgggcgtgcgccacacctggcctcatggtcaggtcctgagcacgtgtgcagctcgtgaatgccagggtccttgcgttcttccctcagatggctttctgttggtaaatgaagctggcacacggccacacagctacagcattgatggtgcaggcgtccgtccgcggagcacggcataaggagcggtctgtgacgccccagcacctctcccgtgcagcccctgtgcttgtcctcctggcatcttagggcactggtttcctgcattcgctttgctccccttgtgcacgttctgtcttcccagaagaagagagttagggaattaaaaggagagcgttcttccatgcgcatatcctcttctcagtttattcattgatgcagaaagcaggcagctggtcaccgggtgtgctgacggccaggtgagacagccacagagttaagttccagttcccagacatgcctgaacgtgagcttgtacacaaaggtctttgtcttcatgctactttgtattttcctgcgatttgaaaaaacctgtccacctcagtgctgagaacgtgaccttctgtgggtctcagcgtcactgtgggttcaatatggtcctgggccccctggtctgcggaggagctgggtctgcatgtcccagagctccatgcgtggttctggagtgcagcaaaagtgagggccactcacgtgaccctgaaaacctgctgagaagagggctgtgagcagacgtcccccgctcccacgggtgctgcccgcgccccggagaggcgccctggacggctcctgtgtggcatcccccgtgcccgcacgctgcccgcgccccggagaggcgccctggacggctcctgtgtggcatcccccgtgcccgcacgctgcccgcgccccggagaggcgccctggacggctcctgtgtggcatcccccgtgcccgcacgctgcccgcgccccggagaggcgccctggacggctcctgtgtggcatcccccgtgcccgcacgctgcccgcgccccggagaggcgccctggacggctcctgtgtggcatcccccgtgcttcttgtgctcccctttcctgtcatctttacacactgttgaaaaacctgaagatgttggcctttttcaaaacattttttagggcatgtgggacgtgctcttggctgtgaagctgtggggtgtgtgcagagagcctggggcctggggttcccagaggagcatcttggggaggcctgcacagtaggatcctgcccatgtgccctgagctgatgtgccagccgtgtgaaagtgctctgacaccgtgggccgtacggagggcctccagaggggatgttgaaggcaggagacagctgtgccgggagcctctgcaggccgtggagggcccgtcctgtgacgtgtctgccctccctgctccacctctggtgttgctgcttctgcgtcaggacccttgctgcagcgccatgtctgcatcttctttgcttttgtagctttggatcttcagtttgatggatggacaccattatcgtcgtgtggcacgggttgacctaaggaagaagacagagactttctccacaagaagggttaagtctgggctgtgcaaagaaagccagcttccctctacaagtgctctgggaaaaggagagcaggttgaagtaacatttcctgtactgagacttgcaccctgtgatctctcactcatcccaaattctgcatgtggatgtctttcttctgagaacacccgatgtgtgtggatcggaagctcagtgggcttattcgtatttaacctggcaaacctggaagtggaagctgctttgtattacaaggatttccagagcctcagcatcctgctggccggatcgtgtgccctgaggaaccgcactgcggatcaaaaggtgctgtgcttgctggcctccctctttggcgggaagattgccgtgttggagatcaacccggccgcgctagtcagggctcagcagtgccccagcatggggcagagcctctcggtgccagccagctcctgtgtcctaccgacctctccactgtatctgggaattgccaaggagaagagtaccaaggctgctagtgaacagcgacgtgctgcacggaacgtcatgaaggaccaacgcctggttttccatagtaaagttaggtcatctggttatgcgtcagcaccacatgtaactatgttttcaccaaagaccaacatcaagagtgaggggaaaggatcttcaaggagcaggagcacgtgcgcacgggaggcataccccgtggagtgcgctgtgcccaccaagcccggcccccaggtcgtgccgcccccacctgcacacgtgtatgctgcatccagtactcaggagatgggcagtggctggcctgtgggttggccaaccatctgttactcgtttttgatgccagcctgactgggacacctgctg

SEQ ID NO: 449144 - DNA, 1693 bp, Homo sapiens
ctggtttatactaggtcgcgctaggggcagcgtgaccagccagggcggagagaggatgcttaactccttaggctcgaactcctcccttcctacccacctctctcccttctcgttcgggtattcaggacttccattccccagcccctgcctctccagctttctccttctgtcccataacccctgcgggtcgcgggctggacttccagtccctgcggtagcgagcagctgagggttaagggggcggggctgctgcatttttggggagtgagcgcatcctagtggctgccaagaggggcgcccgacagggacctcacaagcccccaagcaggggcaacaggtgttttggagattagagaccctagccttgttcctcaggctcctcttaaagaatctgacccctgagggtgctgggtagagtgaggtcgacaggagcggaaggtctggagtgggtggggcggagtgggagggacgcctagagatggcaggaggaagacctgggcgctcttaaccacccccaacgcccttgtctgcatgtctttttctctgtctcctccttttctgtttcttctcccagacaggtgaagaaacaagaaaactaagaaatccgagcggttggagggggagtctgtgtggatgggatggggacgccgggggaggggctgggccgctgctcccatgccctgatccggggagtcccagagagcctggcgtcgggggaaggtgcgggggctggccttcccgctctggatctggccaaagctcaaagggagcacggggtgctgggaggtaaactgaggcaacgactggggctacagctgctagaactgccacctgaggagtcattgccgctgggaccgctgcttggcgacacggccgtgatccaaggggacacggccctaatcacgcggccctggagccccgctcgtaggccagaggtcgatggagtccgcaaagccctgcaagacctggggctccgaattgtggaaataggagacgagaacgcgacgctggatggcactgacgttctcttcaccggccgggagtttttcgtaggcctctccaaatggaccaatcaccgaggagctgagatcgtggcggacacgttccgggacttcgccgtctccactgtgccagtctcgggtccctcccacctgcgcggtctctgcggcatggggggacctcgcactgttgtggcaggcagcagcgacgctgcccaaaaggctgtccgggcaatggcagtgctgacagatcacccatatgcctccctgaccctcccagatgacgcagctgctgactgtctctttcttcgtcctgggttgcctggtgtgccccctttcctcctgcaccgtggaggtggggatctgcccaacagccaggaggcactgcagaagctctctgatgtcaccctggtacctgtgtcctgctcagaactggagaaggctggcgccgggctcagctccctctgcttggtgctcagcacacgcccccacagctgagggcctggccttggggtactgctggccaggggtaggatagtataggaagtagaaggggaaggagggttagatagagaatgctgaataggcagtagttgggagagagcctcaatattgggggaggggagagtgtagggaaaaggatccactgggtgaatcctccctctcagaaccaataaaatagaattgacctttta

SEQ ID NO: 449145 - DNA, 1583 bp, Homo sapiens
gcccgcttagacaatgccccggagccgccagaccgtcgcgcccctgccccatcgtagtatatgagctcgcctacacaaggacccccgctaaaagccagagctcccagtccccgaggcttgaagacggggactcccttctccaccaactctgtcctcggggggtggggccccagccgagatcacagcgcgacaggagtgggggtggccgctggagacaggtgaagaaacaagaaaactaagaaatccgagcggttggagggggagtctgtgtggatgggatggggacgccgggggaggggctgggccgctgctcccatgccctgatccggggagtcccagagagcctggcgtcgggggaaggtgcgggggctggccttcccgctctggatctggccaaagctcaaagggagcacggggtgctgggaggtaaactgaggcaacgactggggctacagctgctagaactgccacctgaggagtcattgccgctgggaccgctgcttggcgacacggccgtgatccaaggggacacggccctaatcacgcggccctggagccccgctcgtaggccagaggtcgatggagtccgcaaagccctgcaagacctggggctccgaattgtggaaataggagacgagaacgcgacgctggatggcactgacgttctcttcaccggccgggagtttttcgtaggcctctccaaatggaccaatcaccgaggagctgagatcgtggcggacacgttccgggacttcgccgtctccactgtgccagtctcgggtccctcccacctgcgcggtctctgcggcatggggggacctcgcactgttgtggcaggcagcagcgacgctgcccaaaaggctgtccgggcaatggcagtgctgacagatcacccatatgcctccctgaccctcccagatgacgcagctgctgactgtctctttcttcgtcctgggttgcctggtgtgccccctttcctcctgcaccgtggaggtggggatctgcccaacagccaggaggcactgcagaagctctctgatgtcaccctggtacctgtgtcctgctcagaactggagaaggctggcgccgggctcagctccctctgcttggtgctcagcacacgcccccacagctgagggcctggccttggggtactgctggccaggggtaggatagtataggaagtagaaggggaaggagggttagatagagaatgctgaataggcagtagttgggagagagcctcaatattgggggaggggagagtgtagggaaaaggatccactgggtgaatcctccctctcagaaccaataaaatagaattgaccttttaaaaaaaaaaaaaaaaaaaaagggtcggggcccgcggccaggaaagcttctaaacccacgtgttggcgcgggcccagcggttaggaacgggccaacaggcggtcaagggacccgtcggcagtgggcggggtccccaaaaaagccggggccccgctggcaaccccggggcgggctctggctcccgcccgcgaatcccccgccgccgcgcggaaacacaccacagcgagagaaacgaagaaggacaagacgag

SEQ ID NO: 449146 - DNA, 1557 bp, Homo sapiens
ctggtttatactaggtcgcgctaggggcagcgtgaccagccagggcggagagaggatgcttaactccttaggctcgaactcctcccttcctacccacctctctcccttctcgttcgggtattcaggacttccattccccagcccctgcctctccagctttctccttctgtcccataacccctgcgggtcgcgggctggacttccagtccctgcggtagcgagcagctgagggttaagggggcggggctgctgcatttttggggagtgagcgcatcctagtggctgccaagaggggcgcccgacagggacctcacaagcccccaagcaggggcaacaggtgttttggagattagagaccctagccttgttcctcaggctcctcttaaagaatctgacccctgagggtgctgggtagagtgaggtcgacaggagcggaagacaggtgaagaaacaagaaaactaagaaatccgagcggttggagggggagtctgtgtggatgggatggggacgccgggggaggggctgggccgctgctcccatgccctgatccggggagtcccagagagcctggcgtcgggggaaggtgcgggggctggccttcccgctctggatctggccaaagctcaaagggagcacggggtgctgggaggtaaactgaggcaacgactggggctacagctgctagaactgccacctgaggagtcattgccgctgggaccgctgcttggcgacacggccgtgatccaaggggacacggccctaatcacgcggccctggagccccgctcgtaggccagaggtcgatggagtccgcaaagccctgcaagacctggggctccgaattgtggaaataggagacgagaacgcgacgctggatggcactgacgttctcttcaccggccgggagtttttcgtaggcctctccaaatggaccaatcaccgaggagctgagatcgtggcggacacgttccgggacttcgccgtctccactgtgccagtctcgggtccctcccacctgcgcggtctctgcggcatggggggacctcgcactgttgtggcaggcagcagcgacgctgcccaaaaggctgtccgggcaatggcagtgctgacagatcacccatatgcctccctgaccctcccagatgacgcagctgctgactgtctctttcttcgtcctgggttgcctggtgtgccccctttcctcctgcaccgtggaggtggggatctgcccaacagccaggaggcactgcagaagctctctgatgtcaccctggtacctgtgtcctgctcagaactggagaaggctggcgccgggctcagctccctctgcttggtgctcagcacacgcccccacagctgagggcctggccttggggtactgctggccaggggtaggatagtataggaagtagaaggggaaggagggttagatagagaatgctgaataggcagtagttgggagagagcctcaatattgggggaggggagagtgtagggaaaaggatccactgggtgaatcctccctctcagaaccaataaaatagaattgacctttta

SEQ ID NO: 449147 - DNA, 1092 bp, Homo sapiens
gcccgcttagacaatgccccggagccgccagaccgtcgcgcccctgccccatcgtagtatatgagctcgcctacacaaggacccccgctaaaagccagagctcccagtccccgaggcttgaagacggggactcccttctccaccaactctgtcctcggggggtggggccccagccgagatcacagcgcgacaggagtgggggtggccgctggagctgctagaactgccacctgaggagtcattgccgctgggaccgctgcttggcgacacggccgtgatccaaggggacacggccctaatcacgcggccctggagccccgctcgtaggccagaggtcgatggagtccgcaaagccctgcaagacctggggctccgaattgtggaaataggagacgagaacgcgacgctggatggcactgacgttctcttcaccggccgggagtttttcgtaggcctctccaaatggaccaatcaccgaggagctgagatcgtggcggacacgttccgggacttcgccgtctccactgtgccagtctcgggtccctcccacctgcgcggtctctgcggcatggggggacctcgcactgttgtggcaggcagcagcgacgctgcccaaaaggctgtccgggcaatggcagtgctgacagatcacccatatgcctccctgaccctcccagatgacgcagctgctgactgtctctttcttcgtcctgggttgcctggtgtgccccctttcctcctgcaccgtggaggtggggatctgcccaacagccaggaggcactgcagaagctctctgatgtcaccctggtacctgtgtcctgctcagaactggagaaggctggcgccgggctcagctccctctgcttggtgctcagcacacgcccccacagctgagggcctggccttggggtactgctggccaggggtaggatagtataggaagtagaaggggaaggagggttagatagagaatgctgaataggcagtagttgggagagagcctcaatattgggggaggggagagtgtagggaaaaggatccactgggtgaatcctccctctcagaaccaataaaatagaattgacctttta

SEQ ID NO: 449148 - DNA, 1612 bp, Homo sapiens
gcccgcttagacaatgccccggagccgccagaccgtcgcgcccctgccccatcgtagtatatgagctcgcctacacaaggacccccgctaaaagccagagctcccagtccccgaggcttgaagacggggactcccttctccaccaactctgtcctcggggggtggggccccagccgagatcacagcgcgacaggagtgggggtggccgctggagacaggtgaagaaacaagaaaactaagaaatccgagcggttggagggggagtctgtgtggatgggatggggacgccgggggaggggctgggccgctgctcccatgccctgatccggggagtcccagagagcctggcgtcgggggaaggtgcgggggctggccttcccgctctggatctggccaaagctcaaagggagcacggggtgctgggaggtaaactgaggcaacgactggggctacagctgctagaactgccacctgaggagtcattgccgctgggaccgctgcttggcgacacggccgtgatccaaggggacacggccctaatcacgcggccctggagccccgctcgtaggccagaggtcgatggagtccgcaaagccctgcaagacctggggctccgaattgtggaaataggagacgagaacgcgacgctggatggcactgacgttctcttcaccggtgaggctggggggaggcataggtcttggcacagggaagtagagtttgggagactcggccgtctggagccttgtttctaactcactcccgccctcaaacctccgcggcctcccggactcaggccgggagtttttcgtaggcctctccaaatggaccaatcaccgaggagctgagatcgtggcggacacgttccgggtgcggagcgggaccagcctagggagggagggggtgcaggtgggggtcggaagggcctgggcgcccgctgaggaaatgagaggcagagagcagcctatgtttgaagataccccatcacccctcccgcgcccctgaatacctcccttcgctctccctaggacttcgccgtctccactgtgccagtctcgggtccctcccacctgcgcggtctctgcggcatggggggacctcgcactgttgtggcaggcagcagcgacgctgcccaaaaggctgtccgggcaatggcagtgctgacagatcacccatatgcctccctgaccctcccagatgacgcagctgctgactgtctctttcttcgtcctgggttgcctggtgtgccccctttcctcctgcaccgtggaggtggggatctgcccaacagccaggaggcactgcagaagctctctgatgtcaccctggtacctgtgtcctgctcagaactggagaaggctggcgccgggctcagctccctctgcttggtgctcagcacacgcccccacagctgagggcctggccttggggtactgctggccaggggtaggatagtataggaagtagaaggggaaggagggttagatagagaatgctgaataggcagtagttgggagagagcctcaatattgggggaggggagagtgtagggaaaaggatccactgggtgaatcctccctctcagaaccaataaaatagaattgacctttta

SEQ ID NO: 449149 - DNA, 1292 bp, Homo sapiens
gcccgcttagacaatgccccggagccgccagaccgtcgcgcccctgccccatcgtagtatatgagctcgcctacacaaggacccccgctaaaagccagagctcccagtccccgaggcttgaagacggggactcccttctccaccaactctgtcctcggggggtggggccccagccgagatcacagcgcgacaggagtgggggtggccgctggagacaggtgaagaaacaagaaaactaagaaatccgagcggttggagggggagtctgtgtggatgggatggggacgccgggggaggggctgggccgctgctcccatgccctgatccggggagtcccagagagcctggcgtcgggggaaggtgcgggggctggccttcccgctctggatctggccaaagctcaaagggagcacggggtgctgggaggtaaactgaggcaacgactggggctacagctgctagaactgccacctgaggagtcattgccgctgggaccgctgcttggcgacacggccgtgatccaaggggacacggccctaatcacgcggccctggagccccgctcgtaggccagaggtcgatggagtccgcaaagccctgcaagacctggggctccgaattgtggaaataggagacgagaacgcgacgctggatggcactgacgttctcttcaccggccgggagtttttcgtaggcctctccaaatggaccaatcaccgaggagctgagatcgtggcggacacgttccgggacttcgccgtctccactgtgccagtctcgggtccctcccacctgcgcggtctctgcggcatggggggacctcgcactgttgtggcaggcagcagcgacgctgcccaaaaggctgtccggcctcccagatgacgcagctgctgactgtctctttcttcgtcctgggttgcctggtgtgccccctttcctcctgcaccgtggaggtggggatctgcccaacagccaggaggcactgcagaagctctctgatgtcaccctggtacctgtgtcctgctcagaactggagaaggctggcgccgggctcagctccctctgcttggtgctcagcacacgcccccacagctgagggcctggccttggggtactgctggccaggggtaggatagtataggaagtagaaggggaaggagggttagatagagaatgctgaataggcagtagttgggagagagcctcaatattgggggaggggagagtgtagggaaaaggatccactgggtgaatcctccctctcagaaccaataaaatagaattgacctttta

SEQ ID NO: 449150 - DNA, 1037 bp, Homo sapiens
gcccgcttagacaatgccccggagccgccagaccgtcgcgcccctgccccatcgtagtatatgagctcgcctacacaaggacccccgctaaaagccagagctcccagtccccgaggcttgaagacggggactcccttctccaccaactctgtcctcggggggtggggccccagccgagatcacagcgcgacaggagtgggggtggccgctggagacaggtgaagaaacaagaaaactaagaaatccgagcggttggagggggagtctgtgtggatgggatggggacgccgggggaggggctgggccgctgctcccatgccctgatccggggagtcccagagagcctggcgtcgggggaaggtgcgggggctggccttcccgctctggatctggccaaagctcaaagggagcacggggtgctgggaggtaaactgaggcaacgactggggctacagctgctagaactgccacctgaggagtcattgccgctgggaccgctgcttggcgacacggccgtgatccaaggggacacggccctaatcacgcggccctggagccccgctcgtaggccagaggtcgatggagtccgcaaagccctgcaagacctggggctccgaattgtggaaataggagacgagaacgcgacgctggatggcactgacgttctcttcaccggccgggagtttttcgtaggcctctccaaatggaccaatcaccgaggaggcactgcagaagctctctgatgtcaccctggtacctgtgtcctgctcagaactggagaaggctggcgccgggctcagctccctctgcttggtgctcagcacacgcccccacagctgagggcctggccttggggtactgctggccaggggtaggatagtataggaagtagaaggggaaggagggttagatagagaatgctgaataggcagtagttgggagagagcctcaatattgggggaggggagagtgtagggaaaaggatccactgggtgaatcctccctctcagaaccaataaaatagaattgacctttta

SEQ ID NO: 449151 - DNA, 366 bp, Homo sapiens
tcttggcactttgttgaaatgaatggactaaattcataacttggcctctggggcactgcagaagctctctgatgtcaccctggtacctgtgtcctgctcagaactggagaaggctggcgccgggctcagctccctctgcttggtgctcagcacacgcccccacagctgagggcctggccttggggtactgctggccaggggtaggatagtataggaagtagaaggggaaggagggttagatagagaatgctgaataggcagtagttgggagagagcctcaatattgggggaggggagagtgtagggaaaaggatccactgggtgaatcctccctctcagaaccaataaaatagaattgacctttta

SEQ ID NO: 449152 - DNA, 409 bp, Homo sapiens
tcagcctgaggtctcactcccctctccccactccatgtcttccctgtgcagggcactgcagaagctctctgatgtcaccctggtacctgtgtcctgctcagaactggagaaggctggcgccgggctcagctccctctgcttggtgctcagcacacgcccccacagctgagggcctggccttggggtactgctggccaggggtaggatagtataggaagtagaaggggaaggagggttagatagagaatgctgaataggcagtagttgggagagagcctcaatattgggggaggggagagtgtagggaaaaggatccactgggtgaatcctccctctcagaaccaataaaatagaattgaccttttagactgggctgtgactggtgtcttactggggcaaagggataggg

SEQ ID NO: 449153 - DNA, 1333 bp, Homo sapiens
gcccgcttagacaatgccccggagccgccagaccgtcgcgcccctgccccatcgtagtatatgagctcgcctacacaaggacccccgctaaaagccagagctcccagtccccgaggcttgaagacggggactcccttctccaccaactctgtcctcggggggtggggccccagccgagatcacagcgcgacaggagtgggggtggccgctggagacaggtgaagaaacaagaaaactaagaaatccgagcggttggagggggagtctgtgtggatgggatggggacgccgggggaggggctgggccgctgctcccatgccctgatccggggagtcccagagagcctggcgtcgggggaaggtgcgggggctggccttcccgctctggatctggccaaagctcaaagggagcacggggtgctgggaggtaaactgaggcaacgactggggctacagctgctagaactgccacctgaggagtcattgccgctgggaccgctgcttggcgacacggccgtgatccaaggggacacggccctaatcacgcggccctggagccccgctcgtaggccagaggtcgatggagtccgcaaagccctgcaagacctggggctccgaattgtggaaataggagacgagaacgcgacgctggatggcactgacgttctcttcaccggccgggagtttttcgtaggcctctccaaatggaccaatcaccgaggagctgagatcgtggcggacacgttccgggacttcgccgtctccactgtgccagtctcgggtccctcccacctgcgcggtctctgcggcatggggggacctcgcactgttgtggcaggcagcagcgacgctgcccaaaaggctgtccgggcaatggcagtgctgacagatcacccatatgcctccctgaccctcccagatgacgcagctgctgactgtctctttcttcgtcctgggttgcctggtgtgccccctttcctcctgcaccgtggaggtggggatctgcccaacagccaggaggcactgcagaagctctctgatgtcaccctggtacctgtgtcctgctcagaactggagaaggctggcgccgggctcagctccctctgcttggtgctcagcacacgcccccacagctgagggcctggccttggggtactgctggccaggggtaggatagtataggaagtagaaggggaaggagggttagatagagaatgctgaataggcagtagttgggagagagcctcaatattgggggaggggagagtgtagggaaaaggatccactgggtgaatcctccctctcagaaccaataaaatagaattgacctttta

SEQ ID NO: 449154 - DNA, 1236 bp, Homo sapiens
ctggtttatactaggtcgcgctaggggcagcgtgaccagccagggcggagagaggatgcttaactccttaggctcgaactcctcccttcctacccacctctctcccttctcgttcggacaggtgaagaaacaagaaaactaagaaatccgagcggttggagggggagtctgtgtggatgggatggggacgccgggggaggggctgggccgctgctcccatgccctgatccggggagtcccagagagcctggcgtcgggggaaggtgcgggggctggccttcccgctctggatctggccaaagctcaaagggagcacggggtgctgggaggtaaactgaggcaacgactggggctacagctgctagaactgccacctgaggagtcattgccgctgggaccgctgcttggcgacacggccgtgatccaaggggacacggccctaatcacgcggccctggagccccgctcgtaggccagaggtcgatggagtccgcaaagccctgcaagacctggggctccgaattgtggaaataggagacgagaacgcgacgctggatggcactgacgttctcttcaccggccgggagtttttcgtaggcctctccaaatggaccaatcaccgaggagctgagatcgtggcggacacgttccgggacttcgccgtctccactgtgccagtctcgggtccctcccacctgcgcggtctctgcggcatggggggacctcgcactgttgtggcaggcagcagcgacgctgcccaaaaggctgtccgggcaatggcagtgctgacagatcacccatatgcctccctgaccctcccagatgacgcagctgctgactgtctctttcttcgtcctgggttgcctggtgtgccccctttcctcctgcaccgtggaggtggggatctgcccaacagccaggaggcactgcagaagctctctgatgtcaccctggtacctgtgtcctgctcagaactggagaaggctggcgccgggctcagctccctctgcttggtgctcagcacacgcccccacagctgagggcctggccttggggtactgctggccaggggtaggatagtataggaagtagaaggggaaggagggttagatagagaatgctgaataggcagtagttgggagagagcctcaatattgggggaggggagagtgtagggaaaaggatccactgggtgaatcctccctctcagaaccaataaaatagaattgacctttta

SEQ ID NO: 449155 - DNA, 1387 bp, Homo sapiens
  misc_feature (188)..(188): n is a, c, g, or t
cctcgggggaatacgtatctaagaacctacgtccgtacatgagaggcaccgcgcgcgcctaaaagctcagatgcatccactaggtccactaggagtggtttgcactaacgaggatacctcgcctctctgacataatgttctggtattctcgagcgcgagattgagaggcccacaggccggaggagtcnaccacggcagccggactacgtggaagtcgagaggtgcccgaggaactggtggtagcatcgagcgttgcaatgtaacctcgagagatcatatctaagaagagacctgaaacggcgaggctcgaggtaatgctctgtgtggatgggatggggacgccgggggaggggctgggccgctgctcccatgccctgatccggggagtcccagagagcctggcgtcgggggaaggtgcgggggctggccttcccgctctggatctggccaaagctcaaagggagcacggggtgctgggaggtaaactgaggcaacgactggggctacagctgctagaactgccacctgaggagtcattgccgctgggaccgctgcttggcgacacggccgtgatccaaggggacacggccctaatcacgcggccctggagccccgctcgtaggccagaggtcgatggagtccgcaaagccctgcaagacctggggctccgaattgtggaaataggagacgagaacgcgacgctggatggcactgacgttctcttcaccggccgggagtttttcgtaggcctctccaaatggaccaatcaccgaggagctgagatcgtggcggacacgttccgggacttcgccgtctccactgtgccagtctcgggtccctcccacctgcgcggtctctgcggcatggggggacctcgcactgttgtggcaggcagcagcgacgctgcccaaaaggctgtccgggcaatggcagtgctgacagatcacccatatgcctccctgaccctcccagatgacgcagctgctgactgtctctttcttcgtcctgggttgcctggtgtgccccctttcctcctgcaccgtggaggtggggatctgcccaacagccaggaggcactgcagaagctctctgatgtcaccctggtacctgtgtcctgctcagaactggagaaggctggcgccgggctcagctccctctgcttggtgctcagcacacgcccccacagctgagggcctggccttggggtactgctggccaggggtaggatagtataggaagtagaaggggaaggagggttagatagagaatgctgaataggcagtagttgggagagagcctcaatattgggggaggggagagtgtagggaaaaggatccactgggtgaatcctccctctcagaaccaataaaatagaattgacctttta

SEQ ID NO: 449156 - DNA, 1814 bp, Homo sapiens
ctggtttatactaggtcgcgctaggggcagcgtgaccagccagggcggagagaggatgcttaactccttaggctcgaactcctcccttcctacccacctctctcccttctcgttcgggtattcaggacttccattccccagcccctgcctctccagctttctccttctgtcccataacccctgcgggtcgcgggctggacttccagtccctgcggtagcgagcagctgagggttaagggggcggggctgctgcatttttggggagtgagcgcatcctagtggctgccaagaggggcgcccgacagggacctcacaagcccccaagcaggggcaacaggtgttttggagattagagaccctagccttgttcctcaggctcctcttaaagaatctgacccctgagggtgctgggtagagtgaggtcgacaggagcggaaggtctggagtgggtggggcggagtgggagggacgcctagagatggcaggaggaagacctgggcgctcttaaccacccccaacgcccttgtctgcatgtctttttctctgtctcctccttttctgtttcttctcccagacaggtgaagaaacaagaaaactaagaaatccgagcggttggagggggagtctgtgtggatgggatggggacgccgggggaggggctgggccgctgctcccatgccctgatccggggagtcccagagagcctggcgtcgggggaaggtgcgggggctggccttcccgctctggatctggccaaagctcaaagggagcacggggtgctgggaggtaaactgaggcaacgactggggctacagctgctagaactgccacctgaggagtcattgccgctgggaccgctgcttggcgacacggccgtgatccaaggggacacggccctaatcacgcggccctggagccccgctcgtaggccagaggtcgatggagtccgcaaagccctgcaagacctggggctccgaattgtggaaataggagacgagaacgcgacgctggatggcactgacgttctcttcaccggtgaggctggggggaggcataggtcttggcacagggaagtagagtttgggagactcggccgtctggagccttgtttctaactcactcccgccctcaaacctccgcggcctcccggactcaggccgggagtttttcgtaggcctctccaaatggaccaatcaccgaggagctgagatcgtggcggacacgttccgggacttcgccgtctccactgtgccagtctcgggtccctcccacctgcgcggtctctgcggcatggggggacctcgcactgttgtggcaggcagcagcgacgctgcccaaaaggctgtccgggcaatggcagtgctgacagatcacccatatgcctccctgaccctcccagatgacgcagctgctgactgtctctttcttcgtcctgggttgcctggtgtgccccctttcctcctgcaccgtggaggtggggatctgcccaacagccaggaggcactgcagaagctctctgatgtcaccctggtacctgtgtcctgctcagaactggagaaggctggcgccgggctcagctccctctgcttggtgctcagcacacgcccccacagctgagggcctggccttggggtactgctggccaggggtaggatagtataggaagtagaaggggaaggagggttagatagagaatgctgaataggcagtagttgggagagagcctcaatattgggggaggggagagtgtagggaaaaggatccactgggtgaatcctccctctcagaaccaataaaatagaattgacctttta

SEQ ID NO: 449157 - DNA, 898 bp, Homo sapiens
gcccgcttagacaatgccccggagccgccagaccgtcgcgcccctgccccatcgtagtatatgagctcgcctacacaaggacccccgctaaaagccagagctcccagtccccgaggcttgaagacggggactcccttctccaccaactctgtcctcggggggtggggccccagccgagatcacagcgcgacaggagtgggggtggccgctggaggtcgatggagtccgcaaagccctgcaagacctggggctccgaattgtggaaataggagacgagaacgcgacgctggatggcactgacgttctcttcaccggacttcgccgtctccactgtgccagtctcgggtccctcccacctgcgcggtctctgcggcatggggggacctcgcactgttgtggcaggcagcagcgacgctgcccaaaaggctgtccgggcaatggcagtgctgacagatcacccatatgcctccctgaccctcccagatgacgcagctgctgactgtctctttcttcgtcctgggttgcctggtgtgccccctttcctcctgcaccgtggaggtggggatctgcccaacagccaggaggcactgcagaagctctctgatgtcaccctggtacctgtgtcctgctcagaactggagaaggctggcgccgggctcagctccctctgcttggtgctcagcacacgcccccacagctgagggcctggccttggggtactgctggccaggggtaggatagtataggaagtagaaggggaaggagggttagatagagaatgctgaataggcagtagttgggagagagcctcaatattgggggaggggagagtgtagggaaaaggatccactgggtgaatcctccctctcagaaccaataaaatagaattgacctttta

SEQ ID NO: 449158 - DNA, 2128 bp, Homo sapiens
cctccagctccgccaagtaggtgggatccactactttgcagaggaggaagccgttcaggcctccctctgtgcactttgcaaaagcctctgcccttccatctcgaatcccttggcgccgatcacacttcctctgcctggaaacctggagccgtctctcgcgagacgtcctccgccctgtagaaggccgtttcggttcttcgtgcgcggtagccgccccacttgcgggattccaaggcctcatcgagtgcgggtatctggctgtggattcgccgccgtcctgctggacgcctggaggctcgaaccccgccgcccccctaccccaggctttactcccaccccggcttccgcccactgtgctgcccttcctcggacctgggctgtcgggagagctggagatgttcacccttcctcaaaaggacttcagggctcccaccacctgtctgggccccacctgcatgcaggacctgggcagtagccatggggaagatctggaaggagaatgctccagaaaactggaccagaagctgccagagctccgtggagtgggtgatcctgccatgatctcctctaatacctcctacctgtcctctagaggaagaatgattaaatggttctgggattcagctgaggagggctacaggacctaccacatggatgagtatgatgaggacaagaaccccagtggcatcattaacttgggcaccagtgagaacaaactctgctttgacctgctgtcctggcggctgagtcagcgcgacatgcagagggtggagccatccctgctgcagtatgctgactggaggggacatctgttcctccgggaggaagtggccaagttcctgtctttctactgcaagagcccagtacccctcagaccagagaatgtggttgtcctgaatggtggtgcctcgctcttctctgctctggccacggtgctgtgtgaggccggggaggctttcctgatccccaccccttactatggcgctatcacacagcacgtgtgtctctatggcaacatccggctggcctatgtctacctggacagtgaggtcactgggctagacacacgccccttccagctcacagtggagaagctggagatggccctgagagaagctcactctgagggtgtgaaggtcaaaggcctcatcctcatcagcccccagaaccctctgggtgatgtatactcccctgaagagctacaggagtacctggtatttgccaagaggcacaggctgcatgtgattgtggatgaggtctacatgctgtccgtgtttgagaagtctgttgggtaccgcagtgtcctaagcctggaaaggctccctgacccccagaggacccatgtgatgtgggcaaccagcaaggacttcgggatgtctgggctccgctttggcacgctgtacacagaaaaccaggatgtggccactgccgtggcttccctctgccgctaccacggcctcagtggcttggtccagtaccagatggcacagctgctccgggaccgtgactggatcaaccaggtgtacctgccggaaaaccatgcccggctcaaggctgcccacacctatgtctcagaagagcttagggcattggggatccccttcttgagtcgtggggctggcttcttcatctgggttgacttgagaaagtacctgcccaagggcacctttgaggaggaaatgctgctctggcgccgctttttggacaacaaggtgctgctgtcctttggcaaggccttcgagtgtaaagagcctggttggtttcgctttgtcttctcagaccaggtccaccggctttgcctggggatgcagagggtccagcaggtgcttgcaggcaaatcccaagtggcagaagacccccgtccctctcagagccaggagccaagtgaccaacgcaggtgagctggtcattgtctcgtggccagagggcccagcagccactgtggacctggggcgttctggggctgcagaagactgactgtggatgtgccatttgccaggaaggtatctaacttggctttgtgcctgaagaactgtttcttgtctttcgctgtagcagtgggaaactccttaagctgtggttcagcctgggccctccctctctcctattaaacaaaactaggagagtc

SEQ ID NO: 449159 - DNA, 553 bp, Homo sapiens
gaggggacatctgttcctccgggaggaagtggccaagttcctgtctttctactgcaagacccccgtccctctcagagccaggagccaagtgaccaacgcaggtgagctggtcattgtctcgtggccagagggcccagcagccactgtggacctggggcgttctggggctgcagaagactgactgtggatgtgccatttgccaggaaggtatctaacttggctttgtgcctgaagaactgtttcttgtctttcgctgtagcagtgggaaactccttaagctgtggttcagcctgggccctccctctctcctattaaacaaaactaggagagtccatatgtctccattgtgagttatttagaatggaggagtcgtgactgcttctaaccagagcctcagcccccctgaggatgtgaaaagaaaacaaacaacttgtaccttctttctgatatcaccgtcattcctctttctttgtcaccaaggaaacgagtcaaaggaacagcacatacaggagagtttgtagaaaaataaaaaaaagtgataacttccaaactc

SEQ ID NO: 449160 - DNA, 2349 bp, Homo sapiens
cctccagctccgccaagtaggtgggatccactactttgcagaggaggaagccgttcaggcctccctctgtgcactttgcaaaagcctctgcccttccatctcgaatcccttggcgccgatcacacttcctctgcctggaaacctggagccgtctctcgcgagacgtcctccgccctgtagaaggccgtttcggttcttcgtgcgcggtagccgccccacttgcgggattccaaggcctcatcgagtgcgggtatctggctgtggattcgccgccgtcctgctggacgcctggaggctcgaaccccgccgcccccctaccccaggctttactcccaccccggcttccgcccactgtgctgcccttcctcggacctgggctgtcgggagagctggagatgttcacccttcctcaaaaggacttcagggctcccaccacctgtctgggccccacctgcatgcaggacctgggcagtagccatggggaagatctggaaggagaatgctccagaaaactggaccagaagctgccagagctccgtggagtgggtgatcctgccatgatctcctctaatacctcctacctgtcctctagaggaagaatgattaaatggttctgggattcagctgaggagggctacaggacctaccacatggatgagtatgatgaggacaagaaccccagtggcatcattaacttgggcaccagtgagaacaaactctgctttgacctgctgtcctggcggctgagtcagcgcgacatgcagagggtggagccatccctgctgcagtatgctgactggaggggacatctgttcctccgggaggaagtggccaagttcctgtctttctactgcaagagcccagtacccctcagaccagagaatgtggttgtcctgaatggtggtgcctcgctcttctctgctctggccacggtgctgtgtgaggccggggaggctttcctgatccccaccccttactatggcgctatcacacagcacgtgtgtctctatggcaacatccggctggcctatgtctacctggacagtgaggtcactgggctagacacacgccccttccagctcacagtggagaagctggagatggccctgagagaagctcactctgagggtgtgaaggtcaaaggcctcatcctcatcagcccccagaaccctctgggtgatgtatactcccctgaagagctacaggagtacctggtatttgccaagaggcacaggctgcatgtgattgtggatgaggtctacatgctgtccgtgtttgagaagtctgttgggtaccgcagtgtcctaagcctggaaaggctccctgacccccagaggacccatgtgatgtgggcaaccagcaaggacttcgggatgtctgggctccgctttggcacgctgtacacagaaaaccaggatgtggccactgccgtggcttccctctgccgctaccacggcctcagtggcttggtccagtaccagatggcacagctgctccgggaccgtgactggatcaaccaggtgtacctgccggaaaaccatgcccggctcaaggctgcccacacctatgtctcagaagagcttagggcattggggatccccttcttgagtcgtggggctggcttcttcatctgggttgacttgagaaagtacctgcccaagggcacctttgaggaggaaatgctgctctggcgccgctttttggacaacaaggtgctgctgtcctttggcaaggccttcgagtgtaaagagcctggttggtttcgctttgtcttctcagaccaggtccaccggctttgcctggggatgcagagggtccagcaggtgcttgcaggcaaatcccaagtggcagaagacccccgtccctctcagagccaggagccaagtgaccaacgcaggtgagctggtcattgtctcgtggccagagggcccagcagccactgtggacctggggcgttctggggctgcagaagactgactgtggatgtgccatttgccaggaaggtatctaacttggctttgtgcctgaagaactgtttcttgtctttcgctgtagcagtgggaaactccttaagctgtggttcagcctgggccctccctctctcctattaaacaaaactaggagagtccatatgtctccattgtgagttatttagaatggaggagtcgtgactgcttctaaccagagcctcagcccccctgaggatgtgaaaagaaaacaaacaacttgtaccttctttctgatatcaccgtcattcctctttctttgtcaccaaggaaacgagtcaaaggaacagcacatacaggagagtttgtagaaaaataaaaaaaagtgataacttccaaactc

SEQ ID NO: 449161 - DNA, 2195 bp, Homo sapiens
cctccagctccgccaagtaggtgggatccactactttgcagaggaggaagccgttcaggcctccctctgtgcactttgcaaaagcctctgcccttccatctcgaatcccttggcgccgatcacacttcctctgcctggaaacctggagccgtctctcgcgagacgtcctccgccctgtagaaggccgtttcggttcttcgtgcgcggtagccgccccacttgcgggattccaaggcctcatcgagtgcgggtatctggctgtggattcgccgccgtcctgctggacgcctggaggctcgaaccccgccgcccccctaccccaggctttactcccaccccggcttccgcccactgtgctgcccttcctcggacctgggctgtcgggagagctggagatgttcacccttcctcaaaaggacttcagggctcccaccacctgtctgggccccacctgcatgcaggacctgggcagtagccatggggaagatctggaaggagaatgctccagaaaactggaccagaagctgccagagctccgtggagtgggtgatcctgccatgatctcctctaatacctcctacctgtcctctagaggaagaatgattaaatggttctgggattcagctgaggagggctacaggacctaccacatggatgagtatgatgaggacaagaaccccagtggcatcattaacttgggcaccagtgagaacaaactctgctttgacctgctgtcctggcggctgagtcagcgcgacatgcagagggtggagccatccctgctgcagtatgctgactggaggggacatctgttcctccgggaggaagtggccaagttcctgtctttctactgcaagagcccagtacccctcagaccagagaatgtggttgtcctgaatggtggtgcctcgctcttctctgctctggccacggtgctgtgtgaggccggggaggctttcctgatccccaccccttactatggcgctatcacacagcacgtgtgtctctatggcaacatccggctggcctatgtctacctggacagtgaggtcactgggctagacacacgccccttccagctcacagtggagaagctggagatggccctgagagaagctcactctgagggtgtgaaggtcaaaggcctcatcctcatcagcccccagaaccctctgggtgatgtatactcccctgaagagctacaggagtacctggtatttgccaagaggcacaggctgcatgtgattgtggatgaggtctacatgctgtccgtgtttgagaagtctgttgggtaccgcagtgtcctaagcctggaaaggctccctgacccccagaggacccatgtgatgtgggcaaccagcaaggacttcgggatgtctgggctccgctttggcacgctgtacacagaaaaccaggatgtggccactgccgtggcttccctctgccgctaccacggcctcagtggcttggtccagtaccagatggcacagctgctccgggaccgtgactggatcaaccaggtgtacctgccggaaaaccatgcccggctcaaggctgcccacacctatgtctcagaagagcttagggcattggggatccccttcttgagtcgtggggctggcttcttcatctgggttgacttgagaaagggatgcagagggtccagcaggtgcttgcaggcaaatcccaagtggcagaagacccccgtccctctcagagccaggagccaagtgaccaacgcaggtgagctggtcattgtctcgtggccagagggcccagcagccactgtggacctggggcgttctggggctgcagaagactgactgtggatgtgccatttgccaggaaggtatctaacttggctttgtgcctgaagaactgtttcttgtctttcgctgtagcagtgggaaactccttaagctgtggttcagcctgggccctccctctctcctattaaacaaaactaggagagtccatatgtctccattgtgagttatttagaatggaggagtcgtgactgcttctaaccagagcctcagcccccctgaggatgtgaaaagaaaacaaacaacttgtaccttctttctgatatcaccgtcattcctctttctttgtcaccaaggaaacgagtcaaaggaacagcacatacaggagagtttgtagaaaaataaaaaaaagtgataacttccaaactc

SEQ ID NO: 449162 - DNA, 2124 bp, Homo sapiens
gcctgcacttgtggaggttcccattcctcccttccctcagttcctacccgccatctgcctcagaacaccacataatctcatcctaccctttacaccacaagacccccaggactcccaggcaatactctgctttaactcaggaaattttaacctggcatttggtaattgagatgttcacccttcctcaaaaggacttcagggctcccaccacctgtctgggccccacctgcatgcaggacctgggcagtagccatggggaagatctggaaggagaatgctccagaaaactggaccagaagctgccagagctccgtggagtgggtgatcctgccatgatctcctctaatacctcctacctgtcctctagaggaagaatgattaaatggttctgggattcagctgaggagggctacaggacctaccacatggatgagtatgatgaggacaagaaccccagtggcatcattaacttgggcaccagtgagaacaaactctgctttgacctgctgtcctggcggctgagtcagcgcgacatgcagagggtggagccatccctgctgcagtatgctgactggaggggacatctgttcctccgggaggaagtggccaagttcctgtctttctactgcaagagcccagtacccctcagaccagagaatgtggttgtcctgaatggtggtgcctcgctcttctctgctctggccacggtgctgtgtgaggccggggaggctttcctgatccccaccccttactatggcgctatcacacagcacgtgtgtctctatggcaacatccggctggcctatgtctacctggacagtgaggtcactgggctagacacacgccccttccagctcacagtggagaagctggagatggccctgagagaagctcactctgagggtgtgaaggtcaaaggcctcatcctcatcagcccccagaaccctctgggtgatgtatactcccctgaagagctacaggagtacctggtatttgccaagaggcacaggctgcatgtgattgtggatgaggtctacatgctgtccgtgtttgagaagtctgttgggtaccgcagtgtcctaagcctggaaaggctccctgacccccagaggacccatgtgatgtgggcaaccagcaaggacttcgggatgtctgggctccgctttggcacgctgtacacagaaaaccaggatgtggccactgccgtggcttccctctgccgctaccacggcctcagtggcttggtccagtaccagatggcacagctgctccgggaccgtgactggatcaaccaggtgtacctgccggaaaaccatgcccggctcaaggctgcccacacctatgtctcagaagagcttagggcattggggatccccttcttgagtcgtggggctggcttcttcatctgggttgacttgagaaagtacctgcccaagggcacctttgaggaggaaatgctgctctggcgccgctttttggacaacaaggtgctgctgtcctttggcaaggccttcgagtgtaaagagcctggttggtttcgctttgtcttctcagaccaggtccaccggctttgcctggggatgcagagggtccagcaggtgcttgcaggcaaatcccaagtggcagaagacccccgtccctctcagagccaggagccaagtgaccaacgcaggtgagctggtcattgtctcgtggccagagggcccagcagccactgtggacctggggcgttctggggctgcagaagactgactgtggatgtgccatttgccaggaaggtatctaacttggctttgtgcctgaagaactgtttcttgtctttcgctgtagcagtgggaaactccttaagctgtggttcagcctgggccctccctctctcctattaaacaaaactaggagagtccatatgtctccattgtgagttatttagaatggaggagtcgtgactgcttctaaccagagcctcagcccccctgaggatgtgaaaagaaaacaaacaacttgtaccttctttctgatatcaccgtcattcctctttctttgtcaccaaggaaacgagtcaaaggaacagcacatacaggagagtttgtagaaaaataaaaaaaagtgataacttccaaactc

SEQ ID NO: 449163 - DNA, 2179 bp, Homo sapiens
cctccagctccgccaagtaggtgggatccactactttgcagaggaggaagccgttcaggcctccctctgtgcactttgcaaaagcctctgcccttccatctcgaatcccttggcgccgatcacacttcctctgcctggaaacctggagccgtctctcgcgagacgtcctccgccctgtagaaggccgtttcggttcttcgtgcgcggtagccgccccacttgcgggattccaaggcctcatcgagtgcgggtatctggctgtggattcgccgccgtcctgctggacgcctggaggctcgaaccccgccgcccccctaccccaggctttactcccaccccggcttccgcccactgtgctgcccttcctcggacctgggctgtcgggagagctggagatgttcacccttcctcaaaaggacttcagggctcccaccacctgtctgggccccacctgcatgcaggacctgggcagtagccatggggaagatctggaaggagaatgctccagaaaactggaccagaagctgccagagctccgtggagtgggtgatcctgccatgatctcctctaatacctcctacctgtcctctagaggaagaatgattaaatggttctgggattcagctgaggagggctacaggacctaccacatggatgagtatgatgaggacaagaaccccagtggcatcattaacttgggcaccagtgagaacaaactctgctttgacctgctgtcctggcggctgagtcagcgcgacatgcagagggtggagccatccctgctgcagtatgctgactggaggggacatctgttcctccgggaggaagtggccaagttcctgtctttctactgcaagagcccagtacccctcagaccagagaatgtggttgtcctgaatggtggtgcctcgctcttctctgctctggccacggtgctgtgtgaggccggggaggctttcctgatccccaccccttactatggcgctatcacacagcacgtgtgtctctatggcaacatccggctggcctatgtctacctggacagtgaggtcactgggctagacacacgccccttccagctcacagtggagaagctggagatggccctgagagaagctcactctgagggtgtgaaggtcaaaggcctcatcctcatcagcccccagaaccctctgggtgatgtatactcccctgaagagctacaggagtacctggtatttgccaagaggcacaggctgcatgtgattgtggatgaggtctacatgctgtccgtgtttgagaagtctgttgggtaccgcagtgtcctaagcctggaaaggtgaggctccctgacacagctaactcccccagtccctattatcccacggagccctggccactttctggctcagcccacagggcatggcctgcccagagcaattccatttccacccagctggtcccactggtcctcagatctaatgagaagcagggacggttgggctagattagtgattttcaagttgttctgtggaatttctgagaactccaagaagaggcctcaggatcccttaagttagggctgagtggatggcaaattggcctctttgctgtttcctttacctccagagtcgctccagttttattcattcattcatttactcattcatgctctcattcactcagcacctctggagccccttacacacagagtgtgccaaacacctatggatatttaaatgttgggctttttcattaggtttactgtaagcaaagcatttgtggccaaaatacctttgggaacacttggagcagatcatcctcaaggcacactggcccatgcctgtaatcccagcactttgggaggccaaggtgggaggattgcatgagcccaggagtttgagaccatcctgggcaacatagtgagactctgtttctacgggaaagaaaaagaaagtggggaccagatcatgtgtgtagtctgtgaatctcaccttcaggggttctaacagttccggctgtttgttcagaaccttcagcccagccaagccctttccattagccttctcttcttgtcctcacaaagccttgaggagttgatggagcatggattgtgactctcatctattttttggattaggaaactgaggcacagaaaaaagtgattgtccacgatccttggttagtcattaaaaaaaaa

SEQ ID NO: 449164 - DNA, 1124 bp, Homo sapiens
cctccagctccgccaagtaggtgggatccactactttgcagaggaggaagccgttcaggcctccctctgtgcactttgcaaaagcctctgcccttccatctcgaatcccttggcgccgatcacacttcctctgcctggaaacctggagccgtctctcgcgagacgtcctccgccctgtagaaggccgtttcggttcttcgtgcgcggtagccgccccacttgcgggattccaaggcctcatcgagtgcgggtatctggctgtggattcgccgccgtcctgctggacgcctggaggctcgaaccccgccgcccccctaccccaggctttactcccaccccggcttccgcccactgtgctgcccttcctcggacctgggctgtcgggagagctggagatgttcacccttcctcaaaaggacttcagggctcccaccacctgtctgggccccacctgcatgcaggacctgggcagtagccatggggaagatctggaaggagaatgctccagaaaactggaccagaagctgccagagctccgtggagtgggtgatcctgccatgatctcctctaatacctcctacctgtcctctagaggaagaatgattaaatggttctgggattcagctgaggagggctacaggacctaccacatggatgagtatgatgaggacaagaaccccagtggcatcattaacttgggcaccagtgagaacaaactctgctttgacctgctgtcctggcggcctccgggaggaagtggccaagttcctgtctttctactgcaagagcccagtacccctcagaccagagaatgtggttgtcctgaatggtggtgcctcgctcttctctgctctggccacggtgctgtgtgaggccggggcacgtgtgtctctatggcaacatccggctggcctatgtctacctggacagtgaggtaagagtcttgacttcctaggtggaacctgggcctgcctgtggtcaagagtttcctgggtctgaatttgagggtggtccatgctgagggctctggggttgtgatgagtagggaatggagccttctgttgctgcatggctgcctgtgcctgggttccccagtggctccaaagttccagtctctgagatcc

SEQ ID NO: 449165 - DNA, 857 bp, Homo sapiens
aattttgaaagtgcaaaaggccaacccaaaattcaaccaacaaaggtaacctactggtatttgggtatattttttctctgggccttgtcctccgcctttatctgatgctgcagatgtaattctgtgttccgcttgtttgcttcatgttgtgttatgaacatgtccccctcaaatctccctgggagccttccagcgatcagccccctttgactgtgtggctctggccttggggaagagctgagggtctcctgccctaacggatggtttcagggtgtgaaggtcaaaggcctcatcctcatcagcccccagaaccctctgggtgatgtatactcccctgaagagctacaggagtacctggtatttgccaagaggtgaggcaccccacactggccccgacagagcgtctgggcagcctggggttccaatgcgggtttggtgcaggtttttctactctcttgaccccactgtgggctgctacttgcttgggcccttccttggcagtggagcggggaagcagggatttgtgggatgcccattcctctttatctttcactctttataacaatagctatcaattagcgcacactctaggggccaggcaccatgctaagcactttatgtgcctcatacaatcctcacaacaatgctatcatacaatcctcacaacaaccctttatgtgcctcatacaatcctcacaacaaccctcatacaatccttacaacaatccttacaacaatcctcacaacaaccctactgatgctgttatcacatccagctcactgagccttagagtggtcaagtgaggggtggatccagacttgaacctgggtctctccgactcgagcccttgtgcatg

SEQ ID NO: 449166 - DNA, 203 bp, Homo sapiens
gatattgatcttctggcctctttcacccaaacagactggatcaaccaggtgtacctgccggaaaaccatgcccggctcaaggctgcccacacctatgtctcagaagagcttagggcattggggatccccttcttgagtcgtggggctggcttcttcatctgggttgacttgagaaaggtaatgctggtggaggtgcgggctga

SEQ ID NO: 449167 - DNA, 655 bp, Homo sapiens
gtcacctgctctgtatgtgtggctttctgtttgaaaaaaacagaagaaagaatggtgttcttggaattacctccccaccctgtgggacgcatctgccctacacactaagtctctcctccccacccctgcctcactccaggcacaggctgcatgtgattgtggatgaggtctacatgctgtccgtgtttgagaagtctgttgggtaccgcagtgtcctaagcctggaaaggctacatgatccccagaggacccatgtgatgtgaccaccagcatggactctggatgcctgaagtccgtttgcacgcttgacaccagaaacacgatgtgccacctgcgtgccttaatatgccgatcaacgtagtgatctgtctcttctactcacatgtgacacctgctgcggatgagtgttgaaatccccagactcccttactactgccatgtcctttgagaataacgtctcccacacccttttggatctttaatgcttgctatttgcctttacgcccccccatctttaagacttcttgctgacttactctctatcatcacggttctcaacctctctaacaactctcgctttatcccccttatcaatcttctcctccttgaccgtccctctgcattgtactcacccctctatctctcttctaggccg

SEQ ID NO: 449168 - DNA, 1441 bp, Homo sapiens
gtcacctgctctgtatgtgtggctttctgtttgaaaaaaacagaagaaagaatggtgttcttggaaaaacaagtttggtaaccccgggctagaccccggcccctctggatttctgatgtattacctccccaccctgtgggacgcatctgccctacacactaagtctctcctccccacccctgcctcactccaggcacaggctgcatgtgattgtggatgaggtctacatgctgtccgtgtttgagaagtctgttgggtaccgcagtgtcctaagcctggaaaggctccctgacccccagaggacccatgtgatgtgggcaaccagcaaggacttcgggatgtctgggctccgctttggcacgctgtacacagaaaaccaggatgtggccactgccgtggcttccctctgccgctaccacggcctcagtggcttggtccagtaccagatggcacagctgctccgggaccgtgatgaggaaaatgaggaccagatactaccccactcactatagtagctaaaagttttaaaaatagtgacaacatcaagtgttgacaaagataaggagcagctggaagtctcatacactgctgtaggagtactggatcaaccaggtgtacctgccggaaaaccatgcccggctcaaggctgcccacacctatgtctcagaagagcttagggcattggggatccccttcttgagtcgtggggctggcttcttcatctgggttgacttgagaaagtacctgcccaagggcacctttgaggaggaaatgctgctctggcgccgctttttggacaacaaggtgctgctgtcctttggcaaggccttcgagtgtaaagagcctggttggtttcgctttgtcttctcagaccaggtccaccggctttgcctggggatgcagagggtccagcaggtgcttgcaggcaaatcccaagtggcagaagacccccgtccctctcagagccaggagccaagtgaccaacgcaggtgagctggtcattgtctcgtggccagagggcccagcagccactgtggacctggggcgttctggggctgcagaagactgactgtggatgtgccatttgccaggaaggtatctaacttggctttgtgcctgaagaactgtttcttgtctttcgctgtagcagtgggaaactccttaagctgtggttcagcctgggccctccctctctcctattaaacaaaactaggagagtccatatgtctccattgtgagttatttagaatggaggagtcgtgactgcttctaaccagagcctcagcccccctgaggatgtgaaaagaaaacaaacaacttgtaccttctttctgatatcaccgtcattcctctttctttgtcaccaaggaaacgagtcaaaggaacagcacatacaggagagtttgtagaaaaataaaaaaaagtgataacttccaaactc

SEQ ID NO: 449169 - DNA, 1391 bp, Homo sapiens
gtcacctgctctgtatgtgtggctttctgtttgaaaaaaacagaagaaagaatggtgttcttggaaaaacaagtttggtaaccccgggctagaccccggcccctctggatttctgatgtattacctccccaccctgtgggacgcatctgccctacacactaagtctctcctccccacccctgcctcactccaggcacaggctgcatgtgattgtggatgaggtctacatgctgtccgtgtttgagaagtctgttgggtaccgcagtgtcctaagcctggaaaggctccctgacccccagaggacccatgtgatgtgggcaaccagcaaggacttcgggatgtctgggctccgctttggcacgctgtacacagaaaaccaggatgtggccactgccgtggcttccctctgccgctaccacggcctcagtggcttggtccagtaccagatggcacagctgctccgggaccgtgatgaggaaaatgaggaccagatactaccccactcactatagtagctaaaagttttaaaaatagtgacaacatcaagtactggatcaaccaggtgtacctgccggaaaaccatgcccggctcaaggctgcccacacctatgtctcagaagagcttagggcattggggatccccttcttgagtcgtggggctggcttcttcatctgggttgacttgagaaagtacctgcccaagggcacctttgaggaggaaatgctgctctggcgccgctttttggacaacaaggtgctgctgtcctttggcaaggccttcgagtgtaaagagcctggttggtttcgctttgtcttctcagaccaggtccaccggctttgcctggggatgcagagggtccagcaggtgcttgcaggcaaatcccaagtggcagaagacccccgtccctctcagagccaggagccaagtgaccaacgcaggtgagctggtcattgtctcgtggccagagggcccagcagccactgtggacctggggcgttctggggctgcagaagactgactgtggatgtgccatttgccaggaaggtatctaacttggctttgtgcctgaagaactgtttcttgtctttcgctgtagcagtgggaaactccttaagctgtggttcagcctgggccctccctctctcctattaaacaaaactaggagagtccatatgtctccattgtgagttatttagaatggaggagtcgtgactgcttctaaccagagcctcagcccccctgaggatgtgaaaagaaaacaaacaacttgtaccttctttctgatatcaccgtcattcctctttctttgtcaccaaggaaacgagtcaaaggaacagcacatacaggagagtttgtagaaaaataaaaaaaagtgataacttccaaactc

SEQ ID NO: 449170 - DNA, 1685 bp, Homo sapiens
cctccagctccgccaagtaggtgggatccactactttgcagaggaggaagccgttcaggcctccctctgtgcactttgcaaaagcctctgcccttccatctcgaatcccttggcgccgatcacacttcctctgcctggaaacctggagccgtctctcgcgagacgtcctccgccctgtagaaggccgtttcggttcttcgtgcgcggtagccgccccacttgcgggattccaaggcctcatcgagtgcgggtatctggctgtggattcgccgccgtcctgctggacgcctggaggctcgaaccccgccgcccccctaccccaggctttactcccaccccggcttccgcccactgtgctgcccttcctcggacctgggctgtcgggagagctggagatgttcacccttcctcaaaaggacttcagggctcccaccacctgtctgggccccacctgcatgcaggacctgggcagtagccatggggaagatctggaaggagaatgctccagaaaactggaccagaagctgccagagctccgtggagtgggtgatcctgccatgatctcctctaatacctcctacctgtcctctagaggaagaatgattaaatggttctgggattcagctgaggagggctacaggacctaccacatggatgagtatgatgaggacaagaaccccagtggcatcattaacttgggcaccagtgagaacaaactctgctttgacctgctgtcctggcggctgagtcagcgcgacatgcagagggtggagccatccctgctgcagtatgctgactggaggggacatctgttcctccgggaggaagtggccaagttcctgtctttctactgcaagagcccagtacccctcagaccagagaatgtggttgtcctgaatggtggtgcctcgctcttctctgctctggccacggtgctgtgtgaggccggggaggctttcctgatccccaccccttactatggcgctatcacacagcacgtgtgtctctatggcaacatccggctggcctatgtctacctggacagtgaggtcactgggctagacacacgccccttccagctcacagtggagaagctggagatggccctgagagaagctcactctgagggtgtgaaggtcaaaggcctcatcctcatcagcccccagaaccctctgggtgatgtatactcccctgaagagctacaggagtacctggtatttgccaagaggcacaggctgcatgtgattgtggatgaggtctacatgctgtccgtgtttgagaagtctgttgggtaccgcagtgtcctaagcctggaaaggctccctgacccccagaggacccatgtgatgtgggcaaccagcaaggacttcgggatgtctgggctccgctttggcacgctgtacacagaaaaccaggatgtggccactgccgtggcttccctctgccgctaccacggcctcagtggcttggtccagtaccagatggcacagctgctccgggaccgtgactggatcaaccaggtgtacctgccggaaaaccatgcccggctcaaggctgcccacacctatgtctcagaagagcttagggcattggggatccccttcttgagtcgtggggctggcttcttcatctgggttgacttgagaaagattcagaggtcaagcactatgcagcatggtaccgct

SEQ ID NO: 449171 - DNA, 362 bp, Homo sapiens
aaaggcttggagagggactggggacagtggacagagggtctggggtgttctggccagaaagtgacaggccctcgcccactcctgcccccagaggctttcctgatccccaccccttactatggcgctatcacacagcacgtgtgtctctatggcaacatccggctggcctatgtctacctggacagtgaggtaagagtcttgacttcctaggtggaacctgggcctgcctgtggtcaagagtttcctgggtctgaatttgagggtggtccatgctgagggctctggggttgtgatgagtagggaatggagccttctgttgctgcatggctgcctgtgcctgggttccccagtggctccaaagt

SEQ ID NO: 449172 - DNA, 549 bp, Homo sapiens
acggggcactaagacaaaacaagccaataaagtcaccagcagtattactatcagcaccactgcaggataaccgaactcaaggcttaattaacggggcactaaacaaaacaaccaataaagtcaccagcagtattactatcacaccaacagccacacctcttcctcgacaatcacaaattacagtaagtaatatatataactgaccacgctcaccctcatccagtccatactgatatttttgcaaggaactcaatccttttttaatcatccctccatatcccccaagactgactgaactcgtactttgggaaggtttgtgcatgaactatacaagagtatctgaaactaactgttgcctgcatagtcatatcgagtgtgcacttactgtatatcttttcatttacatacttgtatggaaaatatttagtctgcacttgtataaatacatctttatgtatttcattttccataactcactttaatttgactgcaacttgtcttggtgaaatactttaacattataaaacagtaaataatttgttattttta

SEQ ID NO: 449173 - DNA, 450 bp, Homo sapiens
gcctcccagagtgctgggattacaggcgtgagccaccgcgcccggcctagaaggaggattgagggataaagagaaggtaagagttttgaaggtgatttcaactctttgaatccaagtagctgggagaatgggaataacacaactgagctaggatcacaggaaaagaagaaggtccaggtatgccggcatacctgaccttctggcatacctggaccatctagtcctaagccacacacctgggcagccacttcatataaaggttactccagaccatgtacaaaacacagccactcttgaaatcacaagtccaaccacagagagtcctcactcttacacgagtactgcagtgataccgaactgtggcacgccaaagcaaaggatctgtccacgaactcccccaaagataccctatttttatacagggtatctgtagaagtccagtaagccggg

SEQ ID NO: 449174 - DNA, 3349 bp, Homo sapiens
cgcagcgcggcactacagcggccccggcccggcccccgcccggccccggcgcaggcagttcagattaaagaagctaattgatcaagaaatcaagtctcaggaggagaaggagcaagaaaaggagaaaagggtcaccaccctgaaagaggagctgaccaagctgaagtcttttgctttgatggtggtggatgaacagcaaaggctgacggcacagctcacccttcaaagacagaaaatccaagagctgaccacaaatgcaaaggaaacacataccaaactagcccttgctgaagccagagttcaggaggaagagcagaaggcaaccagactagagaaggaactgcaaacgcagaccacaaagtttcaccaagaccaagacacaattatggcgaagctcaccaatgaggacagtcaaaatcgccagcttcaacaaaagctggcagcactcagccggcagattgatgagttagaagagacaaacaggtctttacgaaaagcagaagaggagctgcaagatataaaagaaaaaatcagtaagggagaatatggaaacgctggtatcatggctgaagtggaagaagctcataaaaatggaggagcagtgcagagatctcaataagaggcttgaaagggagacgttacagagtaaagactttaaactagaggttgaaaaactcagtaaaagaattatggctctggaaaagttagaagacgctttcaacaaaagcaaacaagaatgctactctctgaaatgcaatttagaaaaagaaaggatgaccacaaagcagttgtctcaagaactggagagtttaaaagtaaggatcaaagagctagaagccattgaaagtcggctagaaaagacagaattcactctaaaagaggatttaactaaactgaaaacattaactgtgatgtttgtagatgaacggaaaacaatgagtgaaaaattaaagaaaactgaagataaattacaagctgcttcttctcagcttcaagtggagcaaaataaagtaacaacagttactgagaagttaattgaggaaactaaaagggcgctcaagtccaaaaccgatgtagaagaaaagatgtacagcgtaaccaaggagagagatgatttaaaaaacaaattgaaagcggaagaagagaaaggaaatgatctcctgtcaagagttaatatgttgaaaaataggcttcaatcattggaagcaattgagaaagatttcctaaaaaacaaattaaatcaagactctgggaaatccacaacagcattacaccaagaaaacaataagattaaggagctctctcaagaagtggaaagactgaaactgaagctaaaggacatgaaagccattgaggatgacctcatgaaaacagaagatgaatatgagactctagaacgaaggtatgctaatgaacgagacaaagctcaatttttatctaaagagctagaacatgttaaaatggaacttgctaagtacaagttagcagaaaagacagagaccagccatgaacaatggcttttcaaaaggcttcaagaagaagaagctaagtcagggcacctctcaagagaagtggatgcattaaaagagaaaattcatgaatacatggcaactgaagacctaatatgtcacctccagggagatcactcagtcctgcaaaaaaaactaaatcaacaagaaaacaggaacagagatttaggaagagagattgaaaacctcactaaggagttagagaggtaccggcatttcagtaagagcctcaggcctagtctcaatggaagaagaatttccgatcctcaagtattttctaaagaagttcagacagaagcagtagacaatgaaccacctgattacaagagcctcattcctctggaacgtgcagtcatcaatggtcagttatatgaggagagtgagaatcaagacgaggaccctaatgatgagggatctgtgctgtccttcaaatgcagccagtctactccatgtcctgttaacagaaagctatggattccctggatgaaatccaaggagggccatcttcagaatggaaaaatgcaaactaaacccaatgccaactttgtgcaacctggagatctagtcctaagccacacacctgggcagccacttcatataaaggttactccagaccatgtacaaaacacagccactcttgaaatcacaagtccaaccacagagagtcctcactcttacacgagtactgcagtgataccgaactgtggcacgccaaagcaaaggataaccatcctccaaaacgcctccataacaccagtaaagtccaaaacctctaccgaagacctcatgaatttagaacaaggcatgtccccaattaccatggcaacctttgccagagcacagaccccagagtcttgtggttctctaactccagaaaggacaatgtcccctattcaggttttggctgtgactggttcagctagctctcctgagcagggacgctccccagaaccaacagaaatcagtgccaagcatgcgatattcagagtctccccagaccggcagtcatcatggcagtttcagcgttcaaacagcaatagctcaagtgtgataactactgaggataataaaatccacattcacttaggaagtccttacatgcaagctgtagccagcccttcagcaccactgcaggataaccgaactcaaggcttaattaacggggcactaaacaaaacaaccaataaagtcaccagcagtattactatcacaccaacagccacacctcttcctcgacaatcacaaattacagtaagtaatatatataactgaccacgctcaccctcatccagtccatactgatatttttgcaaggaactcaatccttttttaatcatccctccatatcccccaagactgactgaactcgtactttgggaaggtttgtgcatgaactatacaagagtatctgaaactaactgttgcctgcatagtcatatcgagtgtgcacttactgtatatcttttcatttacatacttgtatggaaaatatttagtctgcacttgtataaatacatctttatgtatttcattttccataactcactttaatttgactgcaacttgtcttggtgaaatactttaacattataaaacagtaaataatttgttatttttaccattgcttgctgaattttcttttggtcattctgtgttatatttctgcatgtacaatagaattttgtcttttgcttatagtctctattaattcttccttaaaaacaaacaggacctatgtcccatttatggtcaacttctaatcacatattagaggagagaaaagtggttcaaataaataaaaattacatctctttgatttc

SEQ ID NO: 449175 - DNA, 712 bp, Homo sapiens
atcagagcaccgatttcgagtggcccgaacaatgaacatagtgccaagcatgcgatattcagagtctccccagaccggcagtcatcatggcagtttcagcgttcaaacagcaatagctcaagtgtgataactactgaggataataaaatccacattcacttaggaagtccttacatgcaagctgtagccagccctgtgagacctgccagcccttcagcaccactgcaggataaccgaactcaaggcttaattaacggggcactaaacaaaacaaccaataaagtcaccagcagtattactatcacaccaacagccacacctcttcctcgacaatcacaaattacagtaagtaatatatataactgaccacgctcaccctcatccagtccatactgatatttttgcaaggaactcaatccttttttaatcatccctccatatcccccaagactgactgaactcgtactttgggaaggtttgtgcatgaactatacaagagtatctgaaactaactgttgcctgcatagtcatatcgagtgtgcacttactgtatatcttttcatttacatacttgtatggaaaatatttagtctgcacttgtataaatacatctttatgtatttcattttccataactcactttaatttgactgcaacttgtcttggtgaaatactttaacattataaaacagtaaataatttgttattttta

SEQ ID NO: 449176 - DNA, 2996 bp, Homo sapiens
cgcagcgcggcactacagcggccccggcccggcccccgcccggccccggcgcaggcagttcagattaaagaagctaattgatcaagaaatcaagtctcaggaggagaaggagcaagaaaaggagaaaagggtcaccaccctgaaagaggagctgaccaagctgaagtcttttgctttgatggtggtggatgaacagcaaaggctgacggcacagctcacccttcaaagacagaaaatccaagagctgaccacaaatgcaaaggaaacacataccaaactagcccttgctgaagccagagttcaggaggaagagcagaaggcaaccagactagagaaggaactgcaaacgcagaccacaaagtttcaccaagaccaagacacaattatggcgaagctcaccaatgaggacagtcaaaatcgccagcttcaacaaaagctggcagcactcagccggcagattgatgagttagaagagacaaacaggtctttacgaaaagcagaagaggagctgcaagatataaaagaaaaaatcagtaagggagaatatggaaacgctggtatcatggctgaagtggaagagctcaggaaacgtgtgctagatatggaagggaaagatgaagagctcataaaaatggaggagcagtgcagagatctcaataagaggcttgaaagggagacgttacagagtaaagactttaaactagaggttgaaaaactcagtaaaagaattatggctctggaaaagttagaagacgctttcaacaaaagcaaacaagaatgctactctctgaaatgcaatttagaaaaagaaaggatgaccacaaagcagttgtctcaagaactggagagtttaaaagtaaggatcaaagagctagaagccattgaaagtcggctagaaaagacagaattcactctaaaagaggatttaactaaactgaaaacattaactgtgatgtttgtagatgaacggaaaacaatgagtgaaaaattaaagaaaactgaagataaattacaagctgcttcttctcagcttcaagtggagcaaaataaagtaacaacagttactgagaagttaattgaggaaactaaaagggcgctcaagtccaaaaccgatgtagaagaaaagatgtacagcgtaaccaaggagagagatgatttaaaaaacaaattgaaagcggaagaagagaaaggaaatgatctcctgtcaagagttaatatgttgaaaaataggcttcaatcattggaagcaattgagaaagatttcctaaaaaacaaattaaatcaagactctgggaaatccacaacagcattacaccaagaaaacaataagattaaggagctctctcaagaagtggaaagactgaaactgaagctaaaggacatgaaagccattgaggatgacctcatgaaaacagaagatgaatatgagactctagaacgaaggtatgctaatgaacgagacaaagctcaatttttatctaaagagctagaacatgttaaaatggaacttgctaagtacaagttagcagaaaagacagagaccagccatgaacaatggcttttcaaaaggcttcaagaagaagaagctaagtcagggcacctctcaagagaagtggatgcattaaaagagaaaattcatgaatacatggcaactgaagacctaatatgtcacctccagggagatcactcagtcctgcaaaaaaaactaaatcaacaagaaaacaggaacagagatttaggaagagagattgaaaacctcactaaggagttagagaggtaccggcatttcagtaagagcctcaggcctagtctcaatggaagaagaatttccgatcctcaagtattttctaaagaagttcagacagaagcagtagacaatgaaccacctgattacaagagcctcattcctctggaacgtgcagtcatcaatggtcagttatatgaggagagtgagaatcaagacgaggaccctaatgatgagggatctgtgctgtccttcaaatgcagccagtctactccatgtcctgttaacagaaagctatggattccctggatgaaatccaaggagggccatcttcagaatggaaaaatgcaaactaaacccaatgccaactttgtgcaacctggagatctagtcctaagccacacacctgggcagccacttcatataaaggttactccagaccatgtacaaaacacagccactcttgaaatcacaagtccaaccacagagagtcctcactcttacacgagtactgcagtgataccgaactgtggcacgccaaagcaaaggataaccatcctccaaaacgcctccataacaccagtaaagtccaaaacctctaccgaagacctcatgaatttagaacaaggcatgtccccaattaccatggcaacctttgccagagcacagaccccagagtcttgtggttctctaactccagaaaggacaatgtcccctattcaggttttggctgtgactggttcagctagctctcctgagcagggacgctccccagaaccaacagaaatcagtgccaagcatgcgatattcagagtctccccagaccggcagtcatcatggcagtttcagcgttcaaacagcaatagctcaagtgtgataactactgaggataataaaatccacattcacttaggaagtccttacatgcaagctgtagccagccctgtgagacctgccagcccttcagcaccactgcaggataaccgaactcaaggctcatggacaatgaccgaagcctaaacgcactaagcaaggcccgggatcgaacccacatccgtaatggatactattagggatcttaacccactgagccacaatgggaacttccaacattctttggtactgtgacatttttatcattaaaatgtctctttctgtgcttaattgcgaaaaaatcaaccttgatatgaaaccttgaaattattgtaatttaaaaatattaaatcctgatatgccattcttgcaggggatc

SEQ ID NO: 449177 - DNA, 3147 bp, Homo sapiens
cgcagcgcggcactacagcggccccggcccggcccccgcccggccccggcgcaggcagttcagattaaagaagctaattgatcaagaaatcaagtctcaggaggagaaggagcaagaaaaggagaaaagggtcaccaccctgaaagaggagctgaccaagctgaagtcttttgctttgatggtggtggatgaacagcaaaggctgacggcacagctcacccttcaaagacagaaaatccaagagctgaccacaaatgcaaaggaaacacataccaaactagcccttgctgaagccagagttcaggaggaagagcagaaggcaaccagactagagaaggaactgcaaacgcagaccacaaagtttcaccaagaccaagacacaattatggcgaagctcaccaatgaggacagtcaaaatcgccagcttcaacaaaagctggcagcactcagccggcagattgatgagttagaagagacaaacaggtctttacgaaaagcagaagaggagctgcaagatataaaagaaaaaatcagtaagggagaatatggaaacgctggtatcatggctgaagtggaagaagctcataaaaatggaggagcagtgcagagatctcaataagaggcttgaaagggagacgttacagagtaaagactttaaactagaggttgaaaaactcagtaaaagaattatggctctggaaaagttagaagacgctttcaacaaaagcaaacaagaatgctactctctgaaatgcaatttagaaaaagaaaggatgaccacaaagcagttgtctcaagaactggagagtttaaaagtaaggatcaaagagctagaagccattgaaagtcggctagaaaagacagaattcactctaaaagaggatttaactaaactgaaaacattaactgtgatgtttgtagatgaacggaaaacaatgagtgaaaaattaaagaaaactgaagataaattacaagctgcttcttctcagcttcaagtggagcaaaataaagtaacaacagttactgagaagttaattgaggaaactaaaagggcgctcaagtccaaaaccgatgtagaagaaaagatgtacagcgtaaccaaggagagagatgatttaaaaaacaaattgaaagcggaagaagagaaaggaaatgatctcctgtcaagagttaatatgttgaaaaataggcttcaatcattggaagcaattgagaaagatttcctaaaaaacaaattaaatcaagactctgggaaatccacaacagcattacaccaagaaaacaataagattaaggagctctctcaagaagtggaaagactgaaactgaagctaaaggacatgaaagccattgaggatgacctcatgaaaacagaagatgaatatgagactctagaacgaaggtatgctaatgaacgagacaaagctcaatttttatctaaagagctagaacatgttaaaatggaacttgctaagtacaagttagcagaaaagacagagaccagccatgaacaatggcttttcaaaaggcttcaagaagaagaagctaagtcagggcacctctcaagagaagtggatgcattaaaagagaaaattcatgaatacatggcaactgaagacctaatatgtcacctccagggagatcactcagtcctgcaaaaaaaactaaatcaacaagaaaacaggaacagagatttaggaagagagattgaaaacctcactaaggagttagagaggtaccggcatttcagtaagagcctcaggcctagtctcaatggaagaagaatttccgatcctcaagtattttctaaagaagttcagacagaagcagtagacaatgaaccacctgattacaagagcctcattcctctggaacgtgcagtcatcaatggtcagttatatgaggagagtgagaatcaagacgaggaccctaatgatgagggatctgtgctgtccttcaaatgcagccagtctactccatgtcctgttaacagaaagctatggattccctggatgaaatccaaggagggccatcttcagaatggaaaaatgcaaactaaacccaatgccaactttgtgcaacctggagatctagtcctaagccacacacctgggcagccacttcatataaaggttactccagaccatgtacaaaacacagccactcttgaaatcacaagtccaaccacagagagtcctcactcttacacgagtactgcagtgataccgaactgtggcacgccaaagcaaaggataaccatcctccaaaacgcctccataacaccagtaaagtccaaaacctctaccgaagacctcatgaatttagaacaaggcatgtccccaattaccatggcaacctttgccagagcacagaccccagagtcttgtggttctctaactccagaaaggacaatgtcccctattcaggttttggctgtgactggttcagctagctctcctgagcagggacgctccccagaaccaacagaaatcagtgccaagcatgcgatattcagagtctccccagaccggcagtcatcatggcagtttcagcgttcaaacagcaatagctcaagtgtgataactactgaggataataaaatccacattcacttaggaagtccttacatgcaagctgtagccagcccttcagcaccactgcaggataaccgaactcaaggcttaattaacggggcactaaacaaaacaaccaataaagtcaccagcagtattactatcacaccaacagccacacctcttcctcgacaatcacaaattacagtaagtaatatatataactgaccacgctcaccctcatccagtccatactgatatttttgcaaggaactcaatccttttttaatcatccctccatatcccccaagactgactgaactcgtactttgggaaggtttgtgcatgaactatacaagagtatctgaaactaactgttgcctgcatagtcatatcgagtgtgcacttactgtatatcttttcatttacatacttgtatggaaaatatttagtctgcacttgtataaatacatctttatgtatttcattttccataactcactttaatttgactgcaacttgtcttggtgaaatactttaacattataaaacagtaaataatttgttattttta

SEQ ID NO: 449178 - DNA, 3206 bp, Homo sapiens
cgcagcgcggcactacagcggccccggcccggcccccgcccggccccggcgcaggcagttcagattaaagaagctaattgatcaagaaatcaagtctcaggaggagaaggagcaagaaaaggagaaaagggtcaccaccctgaaagaggagctgaccaagctgaagtcttttgctttgatggtggtggatgaacagcaaaggctgacggcacagctcacccttcaaagacagaaaatccaagagctgaccacaaatgcaaaggaaacacataccaaactagcccttgctgaagccagagttcaggaggaagagcagaaggcaaccagactagagaaggaactgcaaacgcagaccacaaagtttcaccaagaccaagacacaattatggcgaagctcaccaatgaggacagtcaaaatcgccagcttcaacaaaagctggcagcactcagccggcagattgatgagttagaagagacaaacaggtctttacgaaaagcagaagaggagctgcaagatataaaagaaaaaatcagtaagggagaatatggaaacgctggtatcatggctgaagtggaagagctcaggaaacgtgtgctagatatggaagggaaagatgaagagctcataaaaatggaggagcagtgcagagatctcaataagaggcttgaaagggagacgttacagagtaaagactttaaactagaggttgaaaaactcagtaaaagaattatggctctggaaaagttagaagacgctttcaacaaaagcaaacaagaatgctactctctgaaatgcaatttagaaaaagaaaggatgaccacaaagcagttgtctcaagaactggagagtttaaaagtaaggatcaaagagctagaagccattgaaagtcggctagaaaagacagaattcactctaaaagaggatttaactaaactgaaaacattaactgtgatgtttgtagatgaacggaaaacaatgagtgaaaaattaaagaaaactgaagataaattacaagctgcttcttctcagcttcaagtggagcaaaataaagtaacaacagttactgagaagttaattgaggaaactaaaagggcgctcaagtccaaaaccgatgtagaagaaaagatgtacagcgtaaccaaggagagagatgatttaaaaaacaaattgaaagcggaagaagagaaaggaaatgatctcctgtcaagagttaatatgttgaaaaataggcttcaatcattggaagcaattgagaaagatttcctaaaaaacaaattaaatcaagactctgggaaatccacaacagcattacaccaagaaaacaataagattaaggagctctctcaagaagtggaaagactgaaactgaagctaaaggacatgaaagccattgaggatgacctcatgaaaacagaagatgaatatgagactctagaacgaaggtatgctaatgaacgagacaaagctcaatttttatctaaagagctagaacatgttaaaatggaacttgctaagtacaagttagcagaaaagacagagaccagccatgaacaatggcttttcaaaaggcttcaagaagaagaagctaagtcagggcacctctcaagagaagtggatgcattaaaagagaaaattcatgaatacatggcaactgaagacctaatatgtcacctccagggagatcactcagtcctgcaaaaaaaactaaatcaacaagaaaacaggaacagagatttaggaagagagattgaaaacctcactaaggagttagagaggtaccggcatttcagtaagagcctcaggcctagtctcaatggaagaagaatttccgatcctcaagtattttctaaagaagttcagacagaagcagtagacaatgaaccacctgattacaagagcctcattcctctggaacgtgcagtcatcaatggtcagttatatgaggagagtgagaatcaagacgaggaccctaatgatgagggatctgtgctgtccttcaaatgcagccagtctactccatgtcctgttaacagaaagctatggattccctggatgaaatccaaggagggccatcttcagaatggaaaaatgcaaactaaacccaatgccaactttgtgcaacctggagatctagtcctaagccacacacctgggcagccacttcatataaaggttactccagaccatgtacaaaacacagccactcttgaaatcacaagtccaaccacagagagtcctcactcttacacgagtactgcagtgataccgaactgtggcacgccaaagcaaaggataaccatcctccaaaacgcctccataacaccagtaaagtccaaaacctctaccgaagacctcatgaatttagaacaaggcatgtccccaattaccatggcaacctttgccagagcacagaccccagagtcttgtggttctctaactccagaaaggacaatgtcccctattcaggttttggctgtgactggttcagctagctctcctgagcagggacgctccccagaaccaacagaaatcagtgccaagcatgcgatattcagagtctccccagaccggcagtcatcatggcagtttcagcgttcaaacagcaatagctcaagtgtgataactactgaggataataaaatccacattcacttaggaagtccttacatgcaagctgtagccagccctgtgagacctgccagcccttcagcaccactgcaggataaccgaactcaaggcttaattaacggggcactaaacaaaacaaccaataaagtcaccagcagtattactatcacaccaacagccacacctcttcctcgacaatcacaaattacagtaagtaatatatataactgaccacgctcaccctcatccagtccatactgatatttttgcaaggaactcaatccttttttaatcatccctccatatcccccaagactgactgaactcgtactttgggaaggtttgtgcatgaactatacaagagtatctgaaactaactgttgcctgcatagtcatatcgagtgtgcacttactgtatatcttttcatttacatacttgtatggaaaatatttagtctgcacttgtataaatacatctttatgtatttcattttccataactcactttaatttgactgcaacttgtcttggtgaaatactttaacattataaaacagtaaataatttgttattttta

SEQ ID NO: 449179 - DNA, 1191 bp, Homo sapiens
cgcagcgcggcactacagcggccccggcccggcccccgcccggccccggcgcaggcagttcagattaaagaagctaattgatcaagaaatcaagtctcaggaggagaaggagcaagaaaaggagaaaagggtcaccaccctgaaagaggagctgaccaagctgaagtcttttgctttgatggtggtggatgaacagcaaaggctgacggcacagctcacccttcaaagacagaaaatccaagagctgaccacaaatgcaaaggaaacacataccaaactagcccttgctgaagccagagttcaggaggaagagcagaaggcaaccagactagagaaggaactgcaaacgcagaccacaaagtttcaccaagaccaagacacaattatggcgaagctcaccaatgaggacagtcaaaatcgccagcttcaacaaaagctggcagcactcagccggcagattgatgagttagaagagacaaacaggtctttacgaaaagcagaagaggagctgcaagatataaaagaaaaaatcagtaagggagaatatggaaacgctggtatcatggctgaagtggaagagctcaggaaacgtgtgctagatatggaagggaaagatgaagagctcataaaaatggaggagcagtgcagagatctcaataagaggcttgaaagggagacgttacagagtaaagactttaaactagaggttgaaaaactcagtaaaagaattatggctctggaaaagttagaagacgctttcaacaaaagcaaacaagaatgctactctctgaaatgcaatttagaaaaagaaaggatgaccacaaagcagttgtctcaagaactggagagtttaaaagtaaggatcaaagagctagaagccattgaaagtcggctagaaaagacagaattcactctaaaagaggatttaactaaactgaaaacattaactgtgatgtttgtagatgaactatacaagagtatctgaaactaactgttgcctgcatagtcatatcgagtgtgcacttactgtatatcttttcatttacatacttgtatggaaaatatttagtctgcacttgtataaatacatctttatgtatttcattttccataactcactttaatttgactgcaacttgtcttggtgaaatactttaacattataaaacagtaaataatttgttattttta

SEQ ID NO: 449180 - DNA, 662 bp, Homo sapiens
gggagccgacgtcccgacgcctcccgcccccgcagttccttggagagcttggagccgcgcgccggagggaataggaaagcttggttacaacccgggacacccggagcttcaggatggttcgtactaagacatggaccctgaagaagcactttgttggctatcctactaatagtgactttgagttgaagacatctgagctcccacccttaaaaaatggagaggtcctgcttgaagctttgttcctcaccgtggatccctacatgagagtggcagccaaaagattgaaggaaggtgatacaatgatggggcagcaagtggccaagtaattatttccatttgtcccagtgcttggaaaatatgtctcctctttacctcctgctgggtcctgtctctgtccattgctcctacaatttcttcagcctatgttgttgactcactgtgtgatcttggaatcaacttgggaaattctgtctccttcctaactagctggaaaggagggaaggatgtgaaattgtcattttttcagcttcactttgccatccttacttttaattactaaaaaaaaaaacgtatttgtccaggtcatgatttattgcgggatctggccagcagcccacaatgcaacagggttctctctttgttcccaggtggatcggcaggtt

SEQ ID NO: 449181 - DNA, 770 bp, Homo sapiens
atacgcgcacacacacacacaaacgcactcagatttcccggaccctggttttcctcctgtgaccctttcggggccgggctctcaccctaaagaagcagccccgccctggggtggccccaccctctcttgggacctgtcataagtcggaccccgggcgcccggctgcgcagtcccagccgccttccccaggcagtggaaccttcgggctcctgagcttcaggatggttcgtactaagacatggaccctgaagaagcactttgttggctatcctactaatagtgactttgagttgaagacatctgagctcccacccttaaaaaatggagaggtcctgcttgaagctttgttcctcaccgtggatccctacatgagagtggcagccaaaagattgaaggaaggtgatacaatgatggggcagcaagtggccaagtaattatttccatttgtcccagtgcttggaaaatatgtctcctctttacctcctgctgggtcctgtctctgtccattgctcctacaatttcttcagcctatgttgttgactcactgtgtgatcttggaatcaacttgggaaattctgtctccttcctaactagctggaaaggagggaaggatgtgaaattgtcattttttcagcttcactttgccatccttacttttaattactaaaaaaaaaaacgtatttgtccaggtcatgatttattgcgggatctggccagcagcccacaatgcaacagggttctctctttgttcccaggtggatcggcaggtt

SEQ ID NO: 449182 - DNA, 716 bp, Homo sapiens
atacgcgcacacacacacacaaacgcactcagatttcccggaccctggttttcctcctgtgaccctttcggggccgggctctcaccctaaagaagcagccccgccctggggtggccccaccctctcttgggacctgtcataagtcggaccccgggcgcccggctgcgcagtcccagccgccttccccaggcagtggaaccttcgggctcctgagcttcaggatggttcgtactaagacatggaccctgaagaagcactttgttggctatcctactaatagtgactttgagttgaagacatctgagctcccacccttaaaaaatggagaggtcctgcttgaagctttgttcctcaccgtggatccctacatgagagtggcagccaaaagattgaaggaaggtgatacaatgatggggcagcaagtggccaagtaattatttccatttgtcccagtgcttggaaaatttcttcagcctatgttgttgactcactgtgtgatcttggaatcaacttgggaaattctgtctccttcctaactagctggaaaggagggaaggatgtgaaattgtcattttttcagcttcactttgccatccttacttttaattactaaaaaaaaaaacgtatttgtccaggtcatgatttattgcgggatctggccagcagcccacaatgcaacagggttctctctttgttcccaggtggatcggcaggtt

SEQ ID NO: 449183 - DNA, 1758 bp, Homo sapiens
atacgcgcacacacacacacaaacgcactcagatttcccggaccctggttttcctcctgtgaccctttcggggccgggctctcaccctaaagaagcagccccgccctggggtggccccaccctctcttgggacctgtcataagtcggaccccgggcgcccggctgcgcagtcccagccgccttccccaggcagtggaaccttcgggctcctgagcttcaggatggttcgtactaagacatggaccctgaagaagcactttgttggctatcctactaatagtgactttgagttgaagacatctgagctcccacccttaaaaaatggagaggtcctgcttgaagctttgttcctcaccgtggatccctacatgagagtggcagccaaaagattgaaggaaggtgatacaatgatggggcagcaagtggccaaagttgtggaaagtaaaaatgtagccctaccaaaaggaactattgtactggcttctccaggctggacaacgcactccatttctgatgggaaagatctggaaaagctgctgacagagtggccagacacaataccactgtctttggctctggggacagttggcatgccaggcctgactgcctactttggcctacttgaaatctgtggtgtgaagggtggagaaacagtgatggttaatgcagcagctggagctgtgggctcagtcgtggggcagattgcaaagctcaagggctgcaaagttgttggagcagtagggtctgatgaaaaggttgcctaccttcaaaagcttggatttgatgtcgtctttaactacaagacggtagagtctttggaagaaaccttgaagaaagcgtctcctgatggttatgattgttattttgataatgtaggtggagagttttcaaacactgttatcggccagatgaagaaatttggaaggattgccatatgtggagccatctctacatataacagaaccggcccacttcccccaggcccacccccagagattgttatctatcaggagcttcgcatggaagcttttgtcgtctaccgctggcaaggagatgcccgccaaaaagctctgaaggacttgctgaaatgggtcttagagggtaaaatccagtacaaggaatatatcattgaaggatttgaaaacatgccagctgcatttatgggaatgctgaaaggagataatttggggaagacaatagtgaaagcatgaaaaagaggacacatggaatctggaggccatttagatgattagttaatttgtttttcaccatttagcaaaaatgtatactaccttaaatgtcttaagaaatagtactcataatgagtttgagctacttaataaaatacatttaagtggtatgtaattagtgatggaggatggaagtttcaaagtcaacaacaaccagtcacctcactgttcactacagcttcttctgagttgtggtagaaaataatggctttgaagtgtgaaaattttccaaacactgtatgttttcattcataagtgggagctgaacaatgagaacacatggacatagggaggggaacaacacacgctggggcctgtggaagccggggtgagggagggagagcatcaggataaatagctaatgccttcgggggctaatacctaggtgatgggttgacaggtgaagcaaaccaccatggcacacgtttacctatgtaacaaacctgcacattccacacaattatcccggaactgaaaataaaataaaattaaattaaaaaaaaaagtt

SEQ ID NO: 449184 - DNA, 1756 bp, Homo sapiens
gggagccgacgtcccgacgcctcccgcccccgcagttccttggagagcttggagccgcgcgccggagggaataggaaagcttggttacaacccgggacacccggagcttcaggatggttcgtactaagacatggaccctgaagaagcactttgttggctatcctactaatagtgactttgagttgaagacatctgagctcccacccttaaaaaatggagaggtcctgcttgaagctttgttcctcaccgtggatccctacatgagagtggcagccaaaagattgaaggaaggtgatacaatgatggggcagcaagtggccaaagttgtggaaagtaaaaatgtagccctaccaaaaggaactattgtactggcttctccaggctggacaacgcactccatttctgatgggaaagatctggaaaagctgctgacagagtggccagacacaataccactgtctttggctctggggacagttggcatgccaggcctgactgcctactttggcctacttgaaatctgtggtgtgaagggtggagaaacagtgatggttaatgcagcagctggagctgtgggctcagtcgtggggcagattgcaaagctcaagggctgcaaagttgttggagcagtagggtctgatgaaaaggttgcctaccttcaaaagcttggatttgatgtcgtctttaactacaagacggtagagtctttggaagaaaccttgaagaaagcgtctcctgatggttatgattgttattttgataatgtaggtggagagttttcaaacactgttatcggccagatgaagaaatttggaaggattgccatatgtggagccatctctacatataacagaaccggcccacttcccccaggcccacccccagagattgttatctatcaggagcttcgcatggaagcttttgtcgtctaccgctggcaaggagatgcccgccaaaaagctctgaaggacttgctgaaatgggtcttagagcttccctactttgtaattgactgacttcaagcaaataatcttgtctataaatccatgaagagtgctaagccatcactggaatacattagcgaaaaacttgtatcagggtaaaatccagtacaaggaatatatcattgaaggatttgaaaacatgccagctgcatttatgggaatgctgaaaggagataatttggggaagacaatagtgaaagcatgaaaaagaggacacatggaatctggaggccatttagatgattagttaatttgtttttcaccatttagcaaaaatgtatactaccttaaatgtcttaagaaatagtactcataatgagtttgagctacttaataaaatacatttaagtggtatgtaattagtgatggaggatggaagtttcaaagtcaacaacaaccagtcacctcactgttcactacagcttcttctgagttgtggtagaaaataatggctttgaagtgtgaaaattttccaaacactgtatgttttcattcataagtgggagctgaacaatgagaacacatggacatagggaggggaacaacacacgctggggcctgtggaagccggggtgagggagggagagcatcaggataaatagctaatgccttcgggggctaatacctaggtgatgggttgacaggtgaagcaaaccaccatggcacacgtttacctatgtaacaaacctgcacattccacacaattatcccggaactgaaaataaaataaaattaaattaaaaaaaaaagtt

SEQ ID NO: 449185 - DNA, 1807 bp, Homo sapiens
atacgcgcacacacacacacaaacgcactcagatttcccggaccctggttttcctcctgtgaccctttcggggccgggctctcaccctaaagaagcagccccgccctggggtggccccaccctctcttgggacctgtcataagtcggaccccgggcgcccggctgcgcagtcccagccgccttccccaggcagtggaaccttcgggctcctgagcttcaggatggttcgtactaagacatggaccctgaagaagcactttgttggctatcctactaatagtgactttgagttgaagacatctgagctcccacccttaaaaaatggagaggtcctgcttgaagctttgttcctcaccgtggatccctacatgagagttgtggaaagtaaaaatgtagccctaccaaaaggaactattgtactggcttctccaggctggacaacgcactccatttctgatgggaaagatctggaaaagctgctgacagagtggccagacacaataccactgtctttggctctggggacagttggcatgccaggcctgactgcctactttggcctacttgaaatctgtggtgtgaagggtggagaaacagtgatggttaatgcagcagctggagctgtgggctcagtcgtggggcagattgcaaagctcaagggctgcaaagttgttggagcagtagggtctgatgaaaaggttgcctaccttcaaaagcttggatttgatgtcgtctttaactacaagacggtagagtctttggaagaaaccttgaagaaagcgtctcctgatggttatgattgttattttgataatgtaggtggagagttttcaaacactgttatcggccagatgaagaaatttggaaggattgccatatgtggagccatctctacatataacagaaccggcccacttcccccaggcccacccccagagattgttatctatcaggagcttcgcatggaagcttttgtcgtctaccgctggcaaggagatgcccgccaaaaagctctgaaggacttgctgaaatgggtcttagagcttccctactttgtaattgactgacttcaagcaaataatcttgtctataaatccatgaagagtgctaagccatcactggaatacattagcgaaaaacttgtatcagggtaaaatccagtacaaggaatatatcattgaaggatttgaaaacatgccagctgcatttatgggaatgctgaaaggagataatttggggaagacaatagtgaaagcatgaaaaagaggacacatggaatctggaggccatttagatgattagttaatttgtttttcaccatttagcaaaaatgtatactaccttaaatgtcttaagaaatagtactcataatgagtttgagctacttaataaaatacatttaagtggtatgtaattagtgatggaggatggaagtttcaaagtcaacaacaaccagtcacctcactgttcactacagcttcttctgagttgtggtagaaaataatggctttgaagtgtgaaaattttccaaacactgtatgttttcattcataagtgggagctgaacaatgagaacacatggacatagggaggggaacaacacacgctggggcctgtggaagccggggtgagggagggagagcatcaggataaatagctaatgccttcgggggctaatacctaggtgatgggttgacaggtgaagcaaaccaccatggcacacgtttacctatgtaacaaacctgcacattccacacaattatcccggaactgaaaataaaataaaattaaattaaaaaaaaaagtt

SEQ ID NO: 449186 - DNA, 1519 bp, Homo sapiens
caacactaaccacacagcatcctgactcccttgaaagggaagacatgtcacatgccttaatgccttaatgtgctttatctttcagagttgtggaaagtaaaaatgtagccctaccaaaaggaactattgtactggcttctccaggctggacaacgcactccatttctgatgggaaagatctggaaaagctgctgacagagtggccagacacaataccactgtctttggctctggggacagttggcatgccaggcctgactgcctactttggcctacttgaaatctgtggtgtgaagggtggagaaacagtgatggttaatgcagcagctggagctgtgggctcagtcgtggggcagattgcaaagctcaagggctgcaaagttgttggagcagtagggtctgatgaaaaggttgcctaccttcaaaagcttggatttgatgtcgtctttaactacaagacggtagagtctttggaagaaaccttgaagaaagcgtctcctgatggttatgattgttattttgataatgtaggtggagagttttcaaacactgttatcggccagatgaagaaatttggaaggattgccatatgtggagccatctctacatataacagaaccggcccacttcccccaggcccacccccagagattgttatctatcaggagcttcgcatggaagcttttgtcgtctaccgctggcaaggagatgcccgccaaaaagctctgaaggacttgctgaaatgggtcttagagcttccctactttgtaattgactgacttcaagcaaataatcttgtctataaatccatgaagagtgctaagccatcactggaatacattagcgaaaaacttgtatcagggtaaaatccagtacaaggaatatatcattgaaggatttgaaaacatgccagctgcatttatgggaatgctgaaaggagataatttggggaagacaatagtgaaagcatgaaaaagaggacacatggaatctggaggccatttagatgattagttaatttgtttttcaccatttagcaaaaatgtatactaccttaaatgtcttaagaaatagtactcataatgagtttgagctacttaataaaatacatttaagtggtatgtaattagtgatggaggatggaagtttcaaagtcaacaacaaccagtcacctcactgttcactacagcttcttctgagttgtggtagaaaataatggctttgaagtgtgaaaattttccaaacactgtatgttttcattcataagtgggagctgaacaatgagaacacatggacatagggaggggaacaacacacgctggggcctgtggaagccggggtgagggagggagagcatcaggataaatagctaatgccttcgggggctaatacctaggtgatgggttgacaggtgaagcaaaccaccatggcacacgtttacctatgtaacaaacctgcacattccacacaattatcccggaactgaaaataaaataaaattaaattaaaaaaaaaagtt

SEQ ID NO: 449187 - DNA, 944 bp, Homo sapiens
atattaaccgtatgtccaatacggtccatccctcttttgaatattgttaaaatttatttcagcccacccccagagattgttatctatcaggagcttcgcatggaagcttttgtcgtctaccgctggcaaggagatgcccgccaaaaagctctgaaggacttgctgaaatgggtcttagagcttccctactttgtaattgactgacttcaagcaaataatcttgtctataaatccatgaagagtgctaagccatcactggaatacattagcgaaaaacttgtatcagggtaaaatccagtacaaggaatatatcattgaaggatttgaaaacatgccagctgcatttatgggaatgctgaaaggagataatttggggaagacaatagtgaaagcatgaaaaagaggacacatggaatctggaggccatttagatgattagttaatttgtttttcaccatttagcaaaaatgtatactaccttaaatgtcttaagaaatagtactcataatgagtttgagctacttaataaaatacatttaagtggtatgtaattagtgatggaggatggaagtttcaaagtcaacaacaaccagtcacctcactgttcactacagcttcttctgagttgtggtagaaaataatggctttgaagtgtgaaaattttccaaacactgtatgttttcattcataagtgggagctgaacaatgagaacacatggacatagggaggggaacaacacacgctggggcctgtggaagccggggtgagggagggagagcatcaggataaatagctaatgccttcgggggctaatacctaggtgatgggttgacaggtgaagcaaaccaccatggcacacgtttacctatgtaacaaacctgcacattccacacaattatcccggaactgaaaataaaataaaattaaattaaaaaaaaaagtt

SEQ ID NO: 449188 - DNA, 934 bp, Homo sapiens
ttatcaggttttaaacaaaattacattcatccaatactacattaactttgagcccacccccagagattgttatctatcaggagcttcgcatggaagcttttgtcgtctaccgctggcaaggagatgcccgccaaaaagctctgaaggacttgctgaaatgggtcttagagcttccctactttgtaattgactgacttcaagcaaataatcttgtctataaatccatgaagagtgctaagccatcactggaatacattagcgaaaaacttgtatcagggtaaaatccagtacaaggaatatatcattgaaggatttgaaaacatgccagctgcatttatgggaatgctgaaaggagataatttggggaagacaatagtgaaagcatgaaaaagaggacacatggaatctggaggccatttagatgattagttaatttgtttttcaccatttagcaaaaatgtatactaccttaaatgtcttaagaaatagtactcataatgagtttgagctacttaataaaatacatttaagtggtatgtaattagtgatggaggatggaagtttcaaagtcaacaacaaccagtcacctcactgttcactacagcttcttctgagttgtggtagaaaataatggctttgaagtgtgaaaattttccaaacactgtatgttttcattcataagtgggagctgaacaatgagaacacatggacatagggaggggaacaacacacgctggggcctgtggaagccggggtgagggagggagagcatcaggataaatagctaatgccttcgggggctaatacctaggtgatgggttgacaggtgaagcaaaccaccatggcacacgtttacctatgtaacaaacctgcacattccacacaattatcccggaactgaaaataaaataaaattaaattaaaaaaaaaagtt

SEQ ID NO: 449189 - DNA, 689 bp, Homo sapiens
  misc_feature (31)..(31): n is a, c, g, or t
gcggccgctcccacttcagcaagtccttcanggtaaaatccagtacaaggaatatatcattgaaggatttgaaaacatgccagctgcatttatgggaatgctgaaaggagataatttggggaagacaatagtgaaagcatgaaaaagaggacacatggaatctggaggccatttagatgattagttaatttgtttttcaccatttagcaaaaatgtatactaccttaaatgtcttaagaaatagtactcataatgagtttgagctacttaataaaatacatttaagtggtatgtaattagtgatggaggatggaagtttcaaagtcaacaacaaccagtcacctcactgttcactacagcttcttctgagttgtggtagaaaataatggctttgaagtgtgaaaattttccaaacactgtatgttttcattcataagtgggagctgaacaatgagaacacatggacatagggaggggaacaacacacgctggggcctgtggaagccggggtgagggagggagagcatcaggataaatagctaatgccttcgggggctaatacctaggtgatgggttgacaggtgaagcaaaccaccatggcacacgtttacctatgtaacaaacctgcacattccacacaattatcccggaactgaaaataaaataaaattaaattaaaaaaaaaagtt

SEQ ID NO: 449190 - DNA, 724 bp, Homo sapiens
atacgcgcacacacacacacaaacgcactcagatttcccggaccctggttttcctcctgtgaccctttcggggccgggctctcaccctaaagaagcagccccgccctggggtggccccaccctctcttgggacctgtcataagtcggaccccgggcgcccggctgcgcagtcccagccgccttccccaggcagtggaaccttcgggctcctgagcttcaggatggttcgtactaagacatggaccctgaagaagcactttgttggctatcctactaatagtgactttgagttgaagacatctgagctcccacccttaaaaaatggagagtggcagccaaaagattgaaggaaggtgatacaatgatggggcagcaagtggccaagtaattatttccatttgtcccagtgcttggaaaatatgtctcctctttacctcctgctgggtcctgtctctgtccattgctcctacaatttcttcagcctatgttgttgactcactgtgtgatcttggaatcaacttgggaaattctgtctccttcctaactagctggaaaggagggaaggatgtgaaattgtcattttttcagcttcactttgccatccttacttttaattactaaaaaaaaaaacgtatttgtccaggtcatgatttattgcgggatctggccagcagcccacaatgcaacagggttctctctttgttcccaggtggatcggcaggtt

SEQ ID NO: 449191 - DNA, 402 bp, Homo sapiens
tgagcatggtacctcatgggtggtttctcaacccttgtccctgtctcacccctcctgtctagtggtgctcagtgtctattgttcctctcaggccttgagtttctaattgcctatggaatgctttattttgtagaggtcctgcttgaagctttgttcctcaccgtggatccctacatgaggtattatttatttcgcccctcaaaatgctaatgctgtgttaaatgctatctggaagtagttcatcttctaaaatatccaactgacttaaaacattgtcactttccttctgtttctcccagccagtatcagtgataagattcatgcacgctcgtcttttgcaggcaaaggtctaagtagcttagtgagggatcacctcagtccctttgtcccaaccatctccta

SEQ ID NO: 449192 - DNA, 311 bp, Homo sapiens
atcattgagaatattaaattaagttttaaaatttgttgttgctttgatacaggtaaaatccagtacaaggaatatatcattgaaggatttgaaaacatgccagctgcatttatgggaatgctgaaaggagataatttggggaagacaatagtgaaagcatgaaaaagaggacacatggaatctggaggccatttagatgattagttaatttgtttttcaccatttagcaaaaatgtatactaccttaaatgtcttaagaaatagtactcataatgagtttgagctacttaataaaatacatttaagtggta

SEQ ID NO: 449193 - DNA, 1416 bp, Homo sapiens
atacgcgcacacacacacacaaacgcactcagatttcccggaccctggttttcctcctgtgaccctttcggggccgggctctcaccctaaagaagcagccccgccctggggtggccccaccctctcttgggacctgtcataagtcggaccccgggcgcccggctgcgcagtcccagccgccttccccaggcagtggaaccttcgggctcctgagcttcaggatggttcgtactaagacatggaccctgaagaagcactttgttggctatcctactaatagtgactttgagttgaagacatctgagctcccacccttaaaaaatggagaggtcctgcttgaagctttgttcctcaccgtggatccctacatgagagtggcagccaaaagattgaaggaaggtgatacaatgatggggcagcaagtggccaaagttgtggaaagtaaaaatgtagccctaccaaaaggaactattgtactggcttctccaggctggacaacgcactccatttctgatgggaaagatctggaaaagctgctgacagagtggccagacacaataccactgtctttggctctggggacagttggcatgccaggcctgactgcctactttggcctacttgaaatctgtggtgtgaagggtggagaaacagtgatggttaatgcagcagctggagctgtgggctcagtcgtggggcagattgcaaagctcaagggctgcaaagttgttggagcagtagggtctgatgaaaaggttgcctaccttcaaaagcttggatttgatgtcgtctttaactacaagacggtagagtctttggaagaaaccttgaagaaagcgtctcctgatggttatgattgttattttgataatgtaggtggagagttttcaaacactgttatcggccagatgaagaaatttggaaggattgccatatgtggagccatctctacatataacagaaccggcccacttcccccaggcccacccccagagattgttatctatcaggagcttcgcatggaagcttttgtcgtctaccgctggcaaggagatgcccgccaaaaagctctgaaggacttgctgaaatgggtcttagagggtaaaatccagtacaaggaatatatcattgaaggatttgaaaacatgccagctgcatttatgggaatgctgaaaggagataatttggggaagacaatagtgaaagcatgaaaaagaggacacatggaatctggaggccatttagatgattagttaatttgtttttcaccatttagcaaaaatgtatactaccttaaatgtcttaagaaatagtactcataatgagtttgagctacttaataaaatacatttaagtggtaaaaaaacaaagaaacacgcctctggaatataaagacatcggccctctgggcctaaa

SEQ ID NO: 449194 - DNA, 1983 bp, Homo sapiens
atacgcgcacacacacacacaaacgcactcagatttcccggaccctggttttcctcctgtgaccctttcggggccgggctctcaccctaaagaagcagccccgccctggggtggccccaccctctcttgggacctgtcataagtcggaccccgggcgcccggctgcgcagtcccagccgccttccccaggcagtggaaccttcgggctcctgagcttcaggatggttcgtactaagacatggaccctgaagaagcactttgttggctatcctactaatagtgactttgagttgaagacatctgagctcccacccttaaaaaatggagaggtcctgcttgaagctttgttcctcaccgtggatccctacatgagagtggcagccaaaagattgaaggaaggtgatacaatgatggggcagcaagtggccaaccagttattataataccattggtagaaatcgtctatggatctttactggaatttcagtgaccttacagatttatttagaggaaactgacatctttacaatttctctctccaaacacaagagttgtggaaagtaaaaatgtagccctaccaaaaggaactattgtactggcttctccaggctggacaacgcactccatttctgatgggaaagatctggaaaagctgctgacagagtggccagacacaataccactgtctttggctctggggacagttggcatgccaggcctgactgcctactttggcctacttgaaatctgtggtgtgaagggtggagaaacagtgatggttaatgcagcagctggagctgtgggctcagtcgtggggcagattgcaaagctcaagggctgcaaagttgttggagcagtagggtctgatgaaaaggttgcctaccttcaaaagcttggatttgatgtcgtctttaactacaagacggtagagtctttggaagaaaccttgaagaaagcgtctcctgatggttatgattgttattttgataatgtaggtggagagttttcaaacactgttatcggccagatgaagaaatttggaaggattgccatatgtggagccatctctacatataacagaaccggcccacttcccccaggcccacccccagagattgttatctatcaggagcttcgcatggaagcttttgtcgtctaccgctggcaaggagatgcccgccaaaaagctctgaaggacttgctgaaatgggtcttagagcttccctactttgtaattgactgacttcaagcaaataatcttgtctataaatccatgaagagtgctaagccatcactggaatacattagcgaaaaacttgtatcagggtaaaatccagtacaaggaatatatcattgaaggatttgaaaacatgccagctgcatttatgggaatgctgaaaggagataatttggggaagacaatagtgaaagcatgaaaaagaggacacatggaatctggaggccatttagatgattagttaatttgtttttcaccatttagcaaaaatgtatactaccttaaatgtcttaagaaatagtactcataatgagtttgagctacttaataaaatacatttaagtggtatgtaattagtgatggaggatggaagtttcaaagtcaacaacaaccagtcacctcactgttcactacagcttcttctgagttgtggtagaaaataatggctttgaagtgtgaaaattttccaaacactgtatgttttcattcataagtgggagctgaacaatgagaacacatggacatagggaggggaacaacacacgctggggcctgtggaagccggggtgagggagggagagcatcaggataaatagctaatgccttcgggggctaatacctaggtgatgggttgacaggtgaagcaaaccaccatggcacacgtttacctatgtaacaaacctgcacattccacacaattatcccggaactgaaaataaaataaaattaaattaaaaaaaaaagtt

SEQ ID NO: 449195 - DNA, 1618 bp, Homo sapiens
atggattgcttgaattcaggagttcaagaccagcctgggaaacatggcaaaaccctgtctcttaaaaaaaccaaacatctcattctttatttttttaaattttgtgtctcaatgactagccagttattataataccattggtagaaatcgtctatggatctttactggaatttcagtgaccttacagatttatttagaggaaactgacatctttacaatttctctctccaaacacaagagttgtggaaagtaaaaatgtagccctaccaaaaggaactattgtactggcttctccaggctggacaacgcactccatttctgatgggaaagatctggaaaagctgctgacagacctgactgcctactttggcctacttgaaatctgtggtgtgaagggtggagaaacagtgatggttaatgcagcagctggagctgtgggctcagtcgtggggcagattgcaaagctcaagggctgcaaagttgttggagcagtagggtctgatgaaaaggttgcctaccttcaaaagcttggatttgatgtcgtctttaactacaagacggtagagtctttggaagaaaccttgaagaaagcgtctcctgatggttatgattgttattttgataatgtaggtggagagttttcaaacactgttatcggccagatgaagaaatttggaaggattgccatatgtggagccatctctacatataacagaaccggcccacttcccccaggcccacccccagagattgttatctatcaggagcttcgcatggaagcttttgtcgtctaccgctggcaaggagatgcccgccaaaaagctctgaaggacttgctgaaatgggtcttagagcttccctactttgtaattgactgacttcaagcaaataatcttgtctataaatccatgaagagtgctaagccatcactggaatacattagcgaaaaacttgtatcagggtaaaatccagtacaaggaatatatcattgaaggatttgaaaacatgccagctgcatttatgggaatgctgaaaggagataatttggggaagacaatagtgaaagcatgaaaaagaggacacatggaatctggaggccatttagatgattagttaatttgtttttcaccatttagcaaaaatgtatactaccttaaatgtcttaagaaatagtactcataatgagtttgagctacttaataaaatacatttaagtggtatgtaattagtgatggaggatggaagtttcaaagtcaacaacaaccagtcacctcactgttcactacagcttcttctgagttgtggtagaaaataatggctttgaagtgtgaaaattttccaaacactgtatgttttcattcataagtgggagctgaacaatgagaacacatggacatagggaggggaacaacacacgctggggcctgtggaagccggggtgagggagggagagcatcaggataaatagctaatgccttcgggggctaatacctaggtgatgggttgacaggtgaagcaaaccaccatggcacacgtttacctatgtaacaaacctgcacattccacacaattatcccggaactgaaaataaaataaaattaaattaaaaaaaaaagtt

SEQ ID NO: 449196 - DNA, 2517 bp, Homo sapiens
ctcttctctaagctgcacagcctgaatagaagggctggtccagcggcggcggaggctggcgctgtcctgagagggagggctctgtgcggaagagatgaatcggacaaagggtgatgaggaggagtattggaacagctccaagttcaaggcttttacctttgacgatgaagacgatgagctttcacagttaaaggagtccaagcgggcggtgaacagcctccgagacttcgtggatgatgatgacgatgatgacctggagcgagtcagctggagtggggaacctgtgggaagtatctcatggtccatcagagagactgctggtaatagcggctcaacccacgaggggcgtgaacagctaaagagccgaaacagcttctcctcctatgcacaactacccaagcctacttctacctactccctgagcagcttttttagaggtagaactagacctggaagtttccagtccctttctgatgctctgtcagacacacctgccaaaagctatgctccagagctggggagacccaaaggggagtatagggattacagcaatgactggagccccagtgatacagtgcgacgtctccggaagggcaaggtttgctcactagagagattccgctccttacaggacaaactacaactcctagaagaggcagtaagcatgcatgatggaaacgtcattactgcagttctgattttcctgaagaggacactgagcaaagagatcctcttccgagagctggaggtgcgacaggttgccctgagacatcttattcacttccttaaggaaataggggatcaaaagttgcttttagacctcttcaggttcctagatagaacagaagagcttgcgctatctcattatcgagagcatttgaacattcaggaccctgacaaacgaaaagaatttcttaaaacctgtgttggtttgccattttcagcagaagattccgcacacatacaggaccattacacgctcctggaacgtcagatcattattgaggcaaatgatcgccatctagaatcagcaggacagactgagatcttccgaaagcacccccgcaaagcctccatcctcaacatgccactagtgacaacacttttctactcctgcttctatcactacacagaggctgaggggacattcagcagtcccgtcaacctgaagaagacatttaagatcccagataaacagtatgtgctgacagccctggctgctcgtgccaagcttcgagcctggaatgatgtagatgccctattcaccacaaagaactggctgggctataccaagaagagagcacccattggcttccatcgggttgtcgaaattttgcacaagaacaatgcccctgtgcagatattacaggagtatgtcaatctggtggaagatgtggacacgaagttgaacttagccactaagttcaagtgccatgatgtcgtcattgatacctaccgggacctgaaggatcgtcaacagttgctagcatacaggagtaaggtagataaaggatcagcagaggaggagaagattgatgctcttctcagcagctcgcaaattcgatggaagaattaagtggcattgactaccttgaagcctgcctcatttcctcctctcctgcctgtgaaagcagagagagctcttctttgggagagctgcggcatcacatcgcttgggcccattacccatgggcagtgccagctactcttgacacagataacttcagactgatcttctgtccaaggaacatcatctgaggatcgagatctaaagctttgagtcatgagaatgattctctccacctggtgctcatatgaaggtgggagtgatttctagattgggcccctactgggtaagatctcacttggtctgagaaaagtgactgctccagaaaggaagaggtatgggagtcatagggtggctactgcattccactcagctaattatgatccaggacttggcgctggacattggcagttctgctctgaatgaagtcagaacagaaccaaaatggcctcaggaaggaatgccagtgtttcccaagacctcctggagatgcactcacaccagactgcacagacccctccacattatgccacacacggcctagacgttgtgtttcctcagccattttccctctgctgccccagtttactctgtccaaaaccctaaggttcttctctcacttgaacacagacgaccttgcttgggtgatgagacatcccctttatctcttcctctactgctggccaagacccgtcactttataagaagctcagatgcagcagtgctggagagctctctctttatgcaaaaatctcatttcaccaggagctttcagaagtttcacctgggctaaattcagcagcatttctgttaggatatttagatggaggttttattttcacacttggattcttgctctgtaccaatatttgcctccttttctgtgactgaactgggtttttctgacatgcctagactcctaataaaggtatttcttccttggtgccttc

SEQ ID NO: 449197 - DNA, 2788 bp, Homo sapiens
ctcttctctaagctgcacagcctgaatagaagggctggtccagcggcggcggaggctggcgctgtcctgagagggagggctctgtgcggaagagtcagggcgacccttgggcgctggagtacgcttgggactggggctgcgagtgagcaccagcgattggttcggaagcggacatttggttcagaacgagcatttaactctgccagggatccgctgggctctgacgactgcggtagatccatggcttcctggacgttcacccgtagagtcatcctagcttaactcttgttccctggtctcagttcacaagcctcacctgtatcttcctggctcggaagataattgaaaccaagtctgacttctcaatgaatcggacaaagggtgatgaggaggagtattggaacagctccaagttcaaggcttttacctttgacgatgaagacgatgagctttcacagttaaaggagtccaagcgggcggtgaacagcctccgagacttcgtggatgatgatgacgatgatgacctggagcgagtcagctggagtggggaacctgtgggaagtatctcatggtccatcagagagactgctggtaatagcggctcaacccacgaggggcgtgaacagctaaagagccgaaacagcttctcctcctatgcacaactacccaagcctacttctacctactccctgagcagcttttttagaggtagaactagacctggaagtttccagtccctttctgatgctctgtcagacacacctgccaaaagctatgctccagagctggggagacccaaaggggagtatagggattacagcaatgactggagccccagtgatacagtgcgacgtctccggaagggcaaggtttgctcactagagagattccgctccttacaggacaaactacaactcctagaagaggcagtaagcatgcatgatggaaacgtcattactgcagttctgattttcctgaagaggacactgagcaaagagatcctcttccgagagctggaggtgcgacaggttgccctgagacatcttattcacttccttaaggaaataggggatcaaaagttgcttttagacctcttcaggttcctagatagaacagaagagcttgcgctatctcattatcgagagcatttgaacattcaggaccctgacaaacgaaaagaatttcttaaaacctgtgttggtttgccattttcagcagaagattccgcacacatacaggaccattacacgctcctggaacgtcagatcattattgaggcaaatgatcgccatctagaatcagcaggacagactgagatcttccgaaagcacccccgcaaagcctccatcctcaacatgccactagtgacaacacttttctactcctgcttctatcactacacagaggctgaggggacattcagcagtcccgtcaacctgaagaagacatttaagatcccagataaacagtatgtgctgacagccctggctgctcgtgccaagcttcgagcctggaatgatgtagatgccctattcaccacaaagaactggctgggctataccaagaagagagcacccattggcttccatcgggttgtcgaaattttgcacaagaacaatgcccctgtgcagatattacaggagtatgtcaatctggtggaagatgtggacacgaagttgaacttagccactaagttcaagtgccatgatgtcgtcattgatacctaccgggacctgaaggatcgtcaacagttgctagcatacaggagtaaggtagataaaggatcagcagaggaggagaagattgatgctcttctcagcagctcgcaaattcgatggaagaattaagtggcattgactaccttgaagcctgcctcatttcctcctctcctgcctgtgaaagcagagagagctcttctttgggagagctgcggcatcacatcgcttgggcccattacccatgggcagtgccagctactcttgacacagataacttcagactgatcttctgtccaaggaacatcatctgaggatcgagatctaaagctttgagtcatgagaatgattctctccacctggtgctcatatgaaggtgggagtgatttctagattgggcccctactgggtaagatctcacttggtctgagaaaagtgactgctccagaaaggaagaggtatgggagtcatagggtggctactgcattccactcagctaattatgatccaggacttggcgctggacattggcagttctgctctgaatgaagtcagaacagaaccaaaatggcctcaggaaggaatgccagtgtttcccaagacctcctggagatgcactcacaccagactgcacagacccctccacattatgccacacacggcctagacgttgtgtttcctcagccattttccctctgctgccccagtttactctgtccaaaaccctaaggttcttctctcacttgaacacagacgaccttgcttgggtgatgagacatcccctttatctcttcctctactgctggccaagacccgtcactttataagaagctcagatgcagcagtgctggagagctctctctttatgcaaaaatctcatttcaccaggagctttcagaagtttcacctgggctaaattcagcagcatttctgttaggatatttagatggaggttttattttcacacttggattcttgctctgtaccaatatttgcctccttttctgtgactgaactgggtttttctgacatgcctagactcctaataaaggtatttcttccttggtgccttc

SEQ ID NO: 449198 - DNA, 2211 bp, Homo sapiens
ctcttctctaagctgcacagcctgaatagaagggctggtccagcggcggcggaggctggcgctgtcctgagagggagggctctgtgcggaagagatgaatcggacaaagggtgatgaggaggagtattggaacagctccaagttcaaggcttttacctttgacgatgaagacgatgagctttcacagttaaaggagtccaagcgggcggtgaacagcctccgagacttcgtggatgatgatgacgatgatgacctggagcgagtcagctggagtggggaacctgtgggaagtatctcatggtccatcagagagactgctggtaatagcggctcaacccacgaggggcgtgaacagctaaagagccgaaacagcttctcctcctatgcacaactacccaagcctacttctacctactccctgagcagcttttttagaggtagaactagacctggaagtttccagtccctttctgatgctctgtcagacacacctgccaaaagctatgctccagagctggggagacccaaaggggagtatagggattacagcaatgactggagccccagtgatacagtgcgacgtctccggaagggcaaggtttgctcactagagagattccgctccttacaggacaaactacaactcctagaagaggcagtaagcatgcatgatggaaacgtcattactgcagttctgattttcctgaagaggacactgagcaaagagatcctcttccgagagctggaggtgcgacaggttgccctgagacatcttattcacttccttaaggaaataggggatcaaaagttgcttttagacctcttcaggttcctagatagaacagaagagcttgcgctatctcattatcgagagcatttgaacattcaggaccctgacaaacgaaaagaatttcttaaaacctgtgttggtttgccattttcagcagaagattccgcacacatacaggaccattacacgctcctggaacgtcagatcattattgaggcaaatgatcgccatctagaatcagcaggacagactgagatcttccgaaagcacccccgcaaagcctccatcctcaacatgccactagtgacaacacttttctactcctgcttctatcactacacagaggctgaggggacattcagcagtcccgtcaacctgaagaagacatttaagatcccagataaacagtatgtgctgacagccctggctgctcgtgccaagcttcgagcctggaatgatgtagatgccctattcaccacaaagaactggctgggctataccaagaagagagcacccattggcttccatcgggttgtcgaaattttgcacaagaacaatgcccctgtgcagatattacaggagtatgtcaatctggtggaagatgtggacacgaagttgaacttagccactaagttcaagtgccatgatgtcgtcattgatacctaccgggacctgaaggatcgtcaacagttgctagcatacaggagtaaggtagataaaggatcagcagaggaggagaagattgatgctcttctcagcagctcgcaaattcgatggaagaattaagtggcattgactaccttgaagcctgcctcatttcctcctctcctgcctgtgaaagcagagagagctcttctttgggagagctgcggcatcacatcgcttgggcccattacccatgggcagtgccagctactcttgacacagataacttcagactgatcttctgtccaaggaacatcatctgaggatcgagatctaaagctttgagtcatgagaatgattctctccacctggtgctcatatgaaggtgggagtgatttctagattgggcccctactgggtaagatctcacttggtctgagaaaagtgactgctccagaaaggaagaggtatgggagtcatagggtggctactgcattccactcagctaattatgatccaggacttggcgctggacattggcagttctgctctgaatgaagtcagaacagaaccaaaatggcctcaggaaggaatgccagtgtttcccaagacctcctggagatgcactcacaccagactgcacagacccctccacattatgccacacacagcagcatctacaaacatgttcaaaatcgattggcttaaacaccctttaacatcctcccccaaatattcccaattatcccacactttaaaaattcaacctttaactt

SEQ ID NO: 449199 - DNA, 436 bp, Homo sapiens
ctggtctcagttcacaagcctcacctgtatcttcctggctcggaagataattgaaaccaagtctgacttctcagtaggtggtttttggagttttctgaggcagggagcatgttgtggttttcttgctgattcttctgttttcctttgtaaagttcctgttctcccctgaggtctctcaccctgccttgtgggctgtcagtaaacaagagacgataaagacaaacctctgaagtattttaaatcatgttgaagcacctgtcactcttaagagtgacaatcgtacctgattactttataactctagagccactagatcattatctatacttgccaagtaaacctagcttctcatttggcgttataaatacaaattgatggcagttgtctactgccattgcatggttaaaaagattccagaaatcctctggtagattat

SEQ ID NO: 449200 - DNA, 2612 bp, Homo sapiens
  misc_feature (2260)..(2260): n is a, c, g, or t
  misc_feature (2325)..(2326): n is a, c, g, or t
  misc_feature (2346)..(2346): n is a, c, g, or t
ctcttctctaagctgcacagcctgaatagaagggctggtccagcggcggcggaggctggcgctgtcctgagagggagggctctgtgcggaagagatgaatcggacaaagggtgatgaggaggagtattggaacagctccaagttcaaggcttttacctttgacgatgaagacgatgagctttcacagttaaaggagtccaagcgggcggtgaacagcctccgagacttcgtggatgatgatgacgatgatgacctggagcgagtcagctggagtggggaacctgtgggaagtatctcatggtccatcagagagactgctggtaatagcggctcaacccacgaggggcgtgaacagctaaagagccgaaacagcttctcctcctatgcacaactacccaagcctacttctacctactccctgagcagcttttttagaggtagaactagacctggaagtttccagtccctttctgatgctctgtcagacacacctgccaaaagctatgctccagagctggggagacccaaaggggagtatagggattacagcaatgactggagccccagtgatacagtgcgacgtctccggaagggcaaggtttgctcactagagagattccgctccttacaggacaaactacaactcctagaagaggcagtaagcatgcatgatggaaacgtcattactgcagttctgattttcctgaagaggacactgagcaaagagatcctcttccgagagctggaggtgcgacaggttgccctgagacatcttattcacttccttaaggaaataggggatcaaaagttgcttttagacctcttcaggttcctagatagaacagaagagcttgcgctatctcattatcgagagcatttgaacattcaggaccctgacaaacgaaaagaatttcttaaaacctgtgttggtttgccattttcagcagaagattccgcacacatacaggaccattacacgctcctggaacgtcagatcattattgaggcaaatgatcgccatctagaatcagcaggacagactgagatcttccgaaagcacccccgcaaagcctccatcctcaacatgccactagtgacaacacttttctactcctgcttctatcactacacagaggctgaggggacattcagcagtcccgtcaacctgaagaagacatttaagatcccagataaacagtatgtgctgacagccctggctgctcgtgccaagcttcgagcctggaatgatgtagatgccctattcaccacaaagaactggctgggctataccaagaagagagcacccattggcttccatcgggttgtcgaaattttgcacaagaacaatgcccctgtgcagatattacaggagtatgtcaatctggtggaagatgtggacacgaagttgaacttagccactaagttcaagtgccatgatgtcgtcattgatacctaccgggacctgaaggatcgtcaacagttgctagcatacaggagtaaggtagataaaggatcagcagaggaggagaagattgatgctcttctcagcagctcgcaaattcgatggaagaattaagtggcattgactaccttgaagcctgcctcatttcctcctctcctgcctgtgaaagcagagagagctcttctttgggagagctgcggcatcacatcgcttgggcccattacccatgggcagtgccagctactcttgacacagataacttcagactgatcttctgtccaaggaacatcatctgaggatcgagatctaaagctttgagtcatgagaatgattctctccacctggtgctcatatgaaggtgggagtgatttctagattgggcccctactgggtaagatctcacttggtctgagaaaagtgactgctccagaaaggaagaggtatgggagtcatagggtggctactgcattccactcagctaattatgatccaggacttggcgctggacattggcagttctgctctgaatgaagtcagaacagaaccaaaatggcctcaggaaggaatgccagtgtttcccaagacctcctggagatgcactcacaccagactgcacagacccctccacattatgccacacacggcctagacgttgtgtttcctcagccattttccctctgctgccccagtttactctgtccaaaaccctaaggttcttctctcacttgaacacagacgaccttgcttgggtgatgagacatcccttattttttttttttggcccccccccctttttgntcccttttaaaaaaaaccttttgggggggcctttgggtgggtcccacccaaaaaaagggggaaannccccctttgggttgcccaancctttttttaaataaaaaggaaagctcagatgcagcagtgctggagagctctctctttatgcaaaaatctcatttcaccaggagctttcagaagtttcacctgggctaaattcagcagcatttctgttaggatatttagatggaggttttattttcacacttggattcttgctctgtaccaatatttgcctccttttctgtgactgaactgggtttttctgacatgcctagactcctaataaaggtatttcttccttggtgccttc

SEQ ID NO: 449201 - DNA, 1092 bp, Homo sapiens
ctcttctctaagctgcacagcctgaatagaagggctggtccagcggcggcggaggctggcgctgtcctgagagggagggctctgtgcggaagagatgaatcggacaaagggtgatgaggaggagtattggaacagctccaagttcaaggcttttacctttgacgatgaagacgatgagctttcacagttaaaggagtccaagcgggcggtgaacagcctccgagacttcgtggatgatgatgacgatgatgacctggagcgagtcagctggagtggggaacctgtgggaagtatctcatggtccatcagagagactgctggtaatagcggctcaacccacgaggggcgtgaacagctaaagagccgaaacagcttctcctcctatgcacaactacccaagcctacttctacctactccctgagcagcttttttagaggtagaactagacctggaagtttccagtccctttctgatgctctgtcagacacacctgccaaaagctatgctccagagctggggagacccaaaggggagtatagggattacagcaatgactggagccccagtgatacagtgcgacgtctccggaagggcaaggtttgctcactagagagattccgctccttacaggacaaactacaactcctagaagaggcagtaagcatgcatgatggaaacgtcattactgcagttctgattttcctgaagaggacactgagcaaagagatcctcttccgagagctggaggtgcgacaggttgccctgagacatcttattcacttccttaaggaaataggggatcaaaagttgcttttagacctcttcaggttcctagatagaacagaagagcttgcggtcctggttgttaggagttttggggttttggcttctcacaaagaaaatgttgaaggctaagaggataagaaaccagatataggtcaagaaggaagataggtcaagttgatgatacacccaatacacgttttggctgagaattcaatggccaggtgttaagattaaattttggcagattttcacaatcatggaatgaactcctggaatacaagaataaatctgaaattttaccaaaa

SEQ ID NO: 449202 - DNA, 3207 bp, Homo sapiens
tcaatcgcatatgtgtaaaatgaaggggctggacagagtgatgagtgttctacctgggatggaggccctgggaggtggagaccatggctgtcttgtagtaggcatgtcttaggtatttactgaatggcccgttctggtcctcccaccagcctcttagcagccttttctgcatctcttctaacttcgtgtagatgcctgggcctttgtaactattctctcaactcaccattcatctttcttggagacgttaaaactatccactggattcaatacaactctgctttccactaaaaattctttaaaatgtccctcaacctttttcgtactgtaaccatatgggaggtgatacagtgcctttcctttgtgattaaggtcacggtagtcacttggaaggatcctttaagcttccagaaatgacttaatctctaagatattgcaaattgttcttcactcagtgagttggttttgtttccaagtccgacttctgagtacagcaagtgaggtggcttcgggcagtcagctcctgaaccccctaaaaagaaagggcagggcctgcagtggacagcagccagacagggaggaagactcactgccaagtcagggttctctgccttgattccctcaggatgcacgttgactgagggccccaggggttgccctctcgaaggcgtgtccagagctacgtacctttcctgggactcagcagtaactttaaacgcttgtgctcatgtgaagagcacattggcaggcaagtgcctgactaatgttattttcaggatgaccttttacccattcagatctaccatgtgtaaaaggaaaactatactcctggcactagattcctgcaggcagcccacctcctgagtcatccagacactgacagagaacagccatgctggcagctggtggttagtcctggagtcggagggcagcactgggaaagaaaaataattacctggagataatgtaatcatcgtacattttacaagtaatggtgctttaaaaaaatctcctcaaggtcaaactgatcctcctaatcagtttacatcatggaagagagaattacatcttaaatggattacttcagcagcttcagttaatttatacaaaaatcaaccaactcattaagcctctctattggttaatgattctagcagccagttgaaatggaagaagagaatgaattctagtttaaagtgaagtcttagattgtggcatgattaaaacaaaacagggccaggtgtggtggcttacgcctgtaatcccagcattttgggaggctgaggcgggaggatcacctgaggtcaggagttcgagaccagcctggccaacatgatgaaaccccatctctactaaaaatacgaaaattagccgggtgtggtggagggcacctgtaatcccagctacttgggaggctgaggcaggagaatcacttgaacctgggaggcagagattgcagtgagctgagattgcgccactgcattccagcctgggctacagagcgacactccgtctcaaaaataaataaataaaaataaaacaatacctttaaattatgtgcatgtattctagtcttctggtttctgaagactgtaatgccatccttggtaaagctgaacagtctagttagattatttctaaggtcttcatttctacattatgttcattacctacatttgcatttatcaatgtagtggaaatatcttttaaataaatcaaacttaactgaatgttcttccttacaactgcttttgttgttgatgaagtgagcaacattgtaaaagaggctatagaaagcgcaattggtggtaacgcttatcaacacagcaaagtgaaccagtggaccacaaatgtagtagaacaaactttaagccaactcaccaagctgggaaaaccatttaaatacatcggtaatggagtcttgtttcttttatatttgcgggatggttttttaacactgatcagaggggcatccagtaccagaaacaacagctaacgtggctcaactcaaggaaggctcctggtgggagtcggtcgtgtgtgtagtatacgttagcgtacgcttgaccatttggctgctggtacaattgcagatcgtatgtgaagcgggatcttacaggaggtcccatcagatgcttttagaacaagtgaagcatagaggaagtgtggacagcccccagctgacagtggctcaacttagaatttttcaactttgatggatttaccagggtattaagtgcatttgcaacttacattttcatatattgttgatttatgatgggtttatgggatgttgtaagtcaaggagcacctataatttgtcaatatagtgagacaaggcaatctgtccctataatttttatcgagaacatcaaccacgtggagctacatacattgtacgtttgctaaaagtggacagaatgacatttgtgttacccagtagacttctctaacaaaaatttgttttaacttaagtgacctgtgtaattatgcagaagaatggagctggattacacacagcaagttcctgcttctgggacagctctactgacggtatgattttcattcatgtttgtgaagttttgttgtgtgaaatatatgactggaagtttcctatctttgaatgcaatgcatgtttatcaccttttaaaacatttaataatagacttgccaaggttctttgtgtagcatagagatgggtacttgaatgttggccttattgtgagtaaaacgtcgtcccccagctttccctgccgtaaatgctgctctcttccctcccgcagggagctgcactgtgcgatgggagaataagaccatgtactgcatcgtcagtgccttcggactgtctatttgacctgcagtccagcctatggcctttctccttttgtctctagttcatcctctaaccaccagccatgaattcagtgaactcttttctcattctctttgttttgtggcactttcacaatgtagaggaaaaaaccaaatgaccgcactgtgatgtgaatggcaccgaagtcagatgagtatccctgtaggtcacctgcagcctgcgttgccacttgtcttaactctgaatatttcatttcaaaggtgctaaaatctgaaatctgctagtgtgaaacttgctctactctctgaaatgattcaaatacactaattttccatactttatacttttgttagaataaattattcaaatctaaa

SEQ ID NO: 449203 - DNA, 2412 bp, Homo sapiens
tcaatcgcatatgtgtaaaatgaaggggctggacagagtgatgagtgttctacctgggatggaggccctgggaggtggagaccatggctgtcttgtagtaggcatgtcttaggtatttactgaatggcccgttctggtcctcccaccagcctcttagcagccttttctgcatctcttctaacttcgtgtagatgcctgggcctttgtaactattctctcaactcaccattcatctttcttggagacgttaaaactatccactggattcaatacaactctgctttccactaaaaattctttaaaatgtccctcaacctttttcgtactgtaaccatatgggaggtgatacagtgcctttcctttgtgattaaggtcacggtagtcacttggaaggatcctttaagcttccagaaatgacttaatctctaagatattgcaaattgttcttcactcagtgagttggttttgtttccaagtccgacttctgagtacagcaagtgaggtggcttcgggcagtcagctcctgaaccccctaaaaagaaagggcagggcctgcagtggacagcagccagacagggaggaagactcactgccaagtcagggttctctgccttgattccctcaggatgcacgttgactgagggccccaggggttgccctctcgaaggcgtgtccagagctacgtacctttcctgggactcagcagtaactttaaacgcttgtgctcatgtgaagagcacattggcaggcaagtgcctgactaatgttattttcaggatgaccttttacccattcagatctaccatgtgtaaaaggaaaactatactcctggcactagattcctgcaggcagcccacctcctgagtcatccagacactgacagagaacagccatgctggcagctggtggttagtcctggagtcggagggcagcactgggaaagaaaaataattacctggagataatgtaatcatcgtacattttacaagtaatggtgctttaaaaaaatctcctcaaggtcaaactgatcctcctaatcagtttacatcatggaagagagaattacatcttaaatggattacttcagcagcttcagttaatttatacaaaaatcaaccaactcattaagcctctctattggttaatgattctagcagccagttgaaatggaagaagagaatgaattctagtttaaagtgaagtcttagattgtggcatgattaaaacaaaacagggccaggtgtggtggcttacgcctgtaatcccagcattttgggaggctgaggcgggaggatcacctgaggtcaggagttcgagaccagcctggccaacatgatgaaaccccatctctactaaaaatacgaaaattagccgggtgtggtggagggcacctgtaatcccagctacttgggaggctgaggcaggagaatcacttgaacctgggaggcagagattgcagtgagctgagattgcgccactgcattccagcctgggctacagagcgacactccgtctcaaaaataaataaataaaaataaaacaatacctttaaattatgtgcatgtattctagtcttctggtttctgaagactgtaatgccatccttggtaaagctgaacagtctagttagattatttctaaggtcttcatttctacattatgttcattacctacatttgcatttatcaatgtagtggaaatatcttttaaataaatcaaacttaactgaatgttcttccttacaactgcttttgttgttgatgaagtgagcaacattgtaaaagaggctatagaaagcgcaattggtggtaacgcttatcaacacagcaaagtgaaccagtggaccacaaatgtagtagaacaaactttaagccaactcaccaagctgggaaaaccatttaaatacatcgtgacctgtgtaattatgcagaagaatggagctggattacacacagcaagttcctgcttctgggacagctctactgacgggagctgcactgtgcgatgggagaataagaccatgtactgcatcgtcagtgccttcggactgtctatttgacctgcagtccagcctatggcctttctccttttgtctctagttcatcctctaaccaccagccatgaattcagtgaactcttttctcattctctttgttttgtggcactttcacaatgtagaggaaaaaaccaaatgaccgcactgtgatgtgaatggcaccgaagtcagatgagtatccctgtaggtcacctgcagcctgcgttgccacttgtcttaactctgaatatttcatttcaaaggtgctaaaatctgaaatctgctagtgtgaaacttgctctactctctgaaatgattcaaatacactaattttccatactttatacttttgttagaataaattattcaaatctaaa

SEQ ID NO: 449204 - DNA, 755 bp, Homo sapiens
aatgtcacgcaggacactgccacgcacatgacagcgaagaccatgacggcgcacccgagctcgctgccacctaaatggctgcggaggactgcttttgttgttgatgaagtgagcaacattgtaaaagaggctatagaaagcgcaattggtggtaacgcttatcaacacagcaaagtgaaccagtggaccacaaatgtagtagaacaaactttaagccaactcaccaagctgggaaaaccatttaaatacatcgtgacctgtgtaattatgcagaagaatggagctggattacacacagcaagttcctgcttctgggacagctctactgacgggagctgcactgtgcgatgggagaataagaccatgtactgcatcgtcagtgccttcggactgtctatttgacctgcagtccagcctatggcctttctccttttgtctctagttcatcctctaaccaccagccatgaattcagtgaactcttttctcattctctttgttttgtggcactttcacaatgtagaggaaaaaaccaaatgaccgcactgtgatgtgaatggcaccgaagtcagatgagtatccctgtaggtcacctgcagcctgcgttgccacttgtcttaactctgaatatttcatttcaaaggtgctaaaatctgaaatctgctagtgtgaaacttgctctactctctgaaatgattcaaatacactaattttccatactttatacttttgttagaataaattattcaaatctaaa

SEQ ID NO: 449205 - DNA, 1238 bp, Homo sapiens
  misc_feature (1238)..(1238): n is a, c, g, or t
tgcgcagtccgcgccactcagggagccggaggcgacgcgccggaggaaagatggaagactaccaggctgcggaggagactgcttttgttgttgatgaagtgagcaacattgtaaaagaggctatagaaagcgcaattggtggtaacgcttatcaacacagcaaagtgaaccagtggaccacaaatgtagtagaacaaactttaagccaactcaccaagctgggaaaaccatttaaatacatcgtgacctgtgtaattatgcagaagaatggagctggattacacacagcaagttcctgcttctgggacagctctactgacgggagctgcactgtgcgatgggagaataagaccatgtactgcatcgtcagtgccttcggactgtctatttgacctgcagtccagcctatggcctttctccttttgtctctagttcatcctctaaccaccagccatgaattcagtgaactcttttctcattctctttgttttgtggcactttcacaatgtagaggaaaaaaccaaatgaccgcactgtgatgtgaatggcaccgaagtcagatgagtatccctgtaggtcacctgcagcctgcgttgccacttgtcttaactctgaatatttcatttcaaaggtgctaaaatctgaaatctgctagtgtgaaacttgctctactctctgaaatgattcaaatacactaattttccatactttatacttttgttagaataaattattcaaatctaaaaaaaaaaaaaaaaaaaacaaacaaacaacaccttgtgggccgccttaggagcctttcagaaaaacgggttttctaaaagcccacattcgggtttgggcccgcggggcgccccaattatatggtaactgtgtaacccactgtggggccaaataagcgtgttgtccccctaagggagagaactccgggcgcacatcgagacgaaaggggcgctgggagtttttcctcccaccaattaataaaaaagcgcgccggggcggggaaacacacgagaagcgtgtctcggagaacccaaactctccagaaatgggggagtctcccagagggggcacactacacggggagactcctttctcaacaacgggggggagtcccaaacggaagacctccgaattttctaaaatttaacacgcccgggccctggggggcgaacccactagacacctgaccagccaacacacacaacacaacaacagccacaacacctcaaatcatn

SEQ ID NO: 449206 - DNA, 1310 bp, Homo sapiens
tgcgcagtccgcgccactcagggagccggaggcgacgcgccggaggaaagatggaagactaccaggctgcggaggagactgcttttgttgttgatgaagtgagcaacattgtaaaagaggctatagaaagcgcaattggtggtaacgcttatcaacacagcaaagtgaaccagtggaccacaaatgtagtagaacaaactttaagccaactcaccaagctgggaaaaccatttaaatacatcggtaatggagtcttgtttcttttatatttgcgggatggttttttaacactgatcagaggggcatccagtaccagaaacaacagctaacgtggctcaactcaaggaaggctcctggtgggagtcggtcgtgtgtgtagtatacgttagcgtacgcttgaccatttggctgctggtacaattgcagatcgtatgtgaagcgggatcttacaggaggtcccatcagatgcttttagaacaagtgaagcatagaggaagtgtggacagcccccagctgacagtggctcaacttagaatttttcaactttgatggatttaccagggtattaagtgcatttgcaacttacattttcatatattgttgatttatgatgggtttatgggatgttgtaagtcaaggagcacctataatttgtcaatatagtgagacaaggcaatctgtccctataatttttatcgagaacatcaaccacgtggagctacatacattgtacgtttgctaaaagtggacagaatgacatttgtgttacccagtagacttctctaacaaaaatttgttttaacttaagtgacctgtgtaattatgcagaagaatggagctggattacacacagcaagttcctgcttctgggacagctctactgacgggagctgcactgtgcgatgggagaataagaccatgtactgcatcgtcagtgccttcggactgtctatttgacctgcagtccagcctatggcctttctccttttgtctctagttcatcctctaaccaccagccatgaattcagtgaactcttttctcattctctttgttttgtggcactttcacaatgtagaggaaaaaaccaaatgaccgcactgtgatgtgaatggcaccgaagtcagatgagtatccctgtaggtcacctgcagcctgcgttgccacttgtcttaactctgaatatttcatttcaaaggtgctaaaatctgaaatctgctagtgtgaaacttgctctactctctgaaatgattcaaatacactaattttccatactttatacttttgttagaataaattattcaaatctaaa

SEQ ID NO: 449207 - DNA, 2977 bp, Homo sapiens
tcaatcgcatatgtgtaaaatgaaggggctggacagagtgatgagtgttctacctgggatggaggccctgggaggtggagaccatggctgtcttgtagtaggcatgtcttaggtatttactgaatggcccgttctggtcctcccaccagcctcttagcagccttttctgcatctcttctaacttcgtgtagatgcctgggcctttgtaactattctctcaactcaccattcatctttcttggagacgttaaaactatccactggattcaatacaactctgctttccactaaaaattctttaaaatgtccctcaacctttttcgtactgtaaccatatgggaggtgatacagtgcctttcctttgtgattaaggtcacggtagtcacttggaaggatcctttaagcttccagaaatgacttaatctctaagatattgcaaattgttcttcactcagtgagttggttttgtttccaagtccgacttctgagtacagcaagtgaggtggcttcgggcagtcagctcctgaaccccctaaaaagaaagggcagggcctgcagtggacagcagccagacagggaggaagactcactgccaagtcagggttctctgccttgattccctcaggatgcacgttgactgagggccccaggggttgccctctcgaaggcgtgtccagagctacgtacctttcctgggactcagcagtaactttaaacgcttgtgctcatgtgaagagcacattggcaggcaagtgcctgactaatgttattttcaggatgaccttttacccattcagatctaccatgtgtaaaaggaaaactatactcctggcactagattcctgcaggcagcccacctcctgagtcatccagacactgacagagaacagccatgctggcagctggtggttagtcctggagtcggagggcagcactgggaaagaaaaataattacctggagataatgtaatcatcgtacattttacaagtaatggtgctttaaaaaaatctcctcaaggtcaaactgatcctcctaatcagtttacatcatggaagagagaattacatcttaaatggattacttcagcagcttcagttaatttatacaaaaatcaaccaactcattaagcctctctattggttaatgattctagcagccagttgaaatggaagaagagaatgaattctagtttaaagtgaagtcttagattgtggcatgattaaaacaaaacagggccaggtgtggtggcttacgcctgtaatcccagcattttgggaggctgaggcgggaggatcacctgaggtcaggagttcgagaccagcctggccaacatgatgaaaccccatctctactaaaaatacgaaaattagccgggtgtggtggagggcacctgtaatcccagctacttgggaggctgaggcaggagaatcacttgaacctgggaggcagagattgcagtgagctgagattgcgccactgcattccagcctgggctacagagcgacactccgtctcaaaaataaataaataaaaataaaacaatacctttaaattatgtgcatgtattctagtcttctggtttctgaagactgtaatgccatccttggtaaagctgaacagtctagttagattatttctaaggtcttcatttctacattatgttcattacctacatttgcatttatcaatgtagtggaaatatcttttaaataaatcaaacttaactgaatgttcttccttacaactgcttttgttgttgatgaagtgagcaacattgtaaaagaggctatagaaagcgcaattggtggtaacgcttatcaacacagcaaagtgaaccagtggaccacaaatgtagtagaacaaactttaagccaactcaccaagctgggaaaaccatttaaatacatcggtaatggagtcttgtttcttttatatttgcgggatggttttttaacactgatcagaggggcatccagtaccagaaacaacagctaacgtggctcaactcaaggaaggctcctggtgggagtcggtcgtgtgtgtagtatacgttagcgtacgcttgaccatttggctgctggtacaattgcagatcgtatgtgaagcgggatcttacaggaggtcccatcagatgcttttagaacaagtgaagcatagaggaagtgtggacagcccccagctgacagtggctcaacttagaatttttcaactttgatggatttaccagggtattaagtgcatttgcaacttacattttcatatattgttgatttatgatgggtttatgggatgttgtaagtcaaggagcacctataatttgtcaatatagtgagacaaggcaatctgtccctataatttttatcgagaacatcaaccacgtggagctacatacattgtacgtttgctaaaagtggacagaatgacatttgtgttacccagtagacttctctaacaaaaatttgttttaacttaagtgacctgtgtaattatgcagaagaatggagctggattacacacagcaagttcctgcttctgggacagctctactgacgggagctgcactgtgcgatgggagaataagaccatgtactgcatcgtcagtgccttcggactgtctatttgacctgcagtccagcctatggcctttctccttttgtctctagttcatcctctaaccaccagccatgaattcagtgaactcttttctcattctctttgttttgtggcactttcacaatgtagaggaaaaaaccaaatgaccgcactgtgatgtgaatggcaccgaagtcagatgagtatccctgtaggtcacctgcagcctgcgttgccacttgtcttaactctgaatatttcatttcaaaggtgctaaaatctgaaatctgctagtgtgaaacttgctctactctctgaaatgattcaaatacactaattttccatactttatacttttgttagaataaattattcaaatctaaa

SEQ ID NO: 449208 - DNA, 669 bp, Homo sapiens
  misc_feature (646)..(646): n is a, c, g, or t
tgcgcagtccgcgccactcagggagccggaggcgacgcgccggaggaaagatggaagactaccaggctgcggaggagactgcttttgttgttgatgaagtgagcaacattgtaaaagaggctatagaaagcgcaattggtggtaacgcttatcaacacagcaaagtgaaccagtggaccacaaatgtagtagaacaaactttaagccaactcaccaagctgggaaaaccatttaaatacatcgtgacctgtgtaattatgcagaagaatggagctggattacacacagcaagttcctgcttctgggacagctctactgacgggagctgcactgtgcgatgggagaataagaccatgtactgcatcgtcagtgccttcggactgtctatttgacctgcagtccagcctatggcctttctccttttgtctctagttcatcctctaaccaccagccatgaattcagtgaactcttttctcattctctttgttttgtggcactttcacaatgtagaggaaaaaaccaaatgaccgcactgtgatgtgaatggcaccgaagtcagatgagtatccctgtaggtcacctgcagcctgcgttgccacttgtcttaactctgaatatttcatttcaaaggtgcttacacttttnccatacttatacttctggtagat

SEQ ID NO: 449209 - DNA, 683 bp, Homo sapiens
tgcgcagtccgcgccactcagggagccggaggcgacgcgccggaggaaagatggaagactaccaggctgcggaggagactgcttttgttgttgatgaagtgagcaacattgtaaaagaggctatagaaagcgcaattggtggtaacgcttatcaacacagcaaagtgaaccagtggaccacaaatgtagtagaacaaactttaagccaactcaccaagctgggaaaaccatttaaatacatcgtgacctgtgtaattatgcagaagaatggagctggattacacacagcaagttcctgcttctgggacagctctactgacgggagctgcactgtgcgatgggagaataagaccatgtactgcatcgtcagtgccttcggactgtctatttgacctgcagtccagcctatggcctttctccttttgtctctagttcatcctctaaccaccagccatgaattcagtgaactcttttctcattctctttgttttgtggcactttcacaatgtagaggaacacctgcagcctgcgttgccacttgtcttaactctgaatatttcatttcaaaggtgctaaaatctgaaatctgctagtgtgaaacttgctctactctctgaaatgattcaaatacactaattttccatactttatacttttgttagaataaattattcaaatctaaa

SEQ ID NO: 449210 - DNA, 2033 bp, Homo sapiens
  misc_feature (2033)..(2033): n is a, c, g, or t
tgcgcagtccgcgccactcagggagccggaggcgacgcgccggaggaaagatggaagactaccaggctgcggaggagactgcttttgttgttgatgaagtgagcaacattgtaaaagaggctatagaaagcgcaattggtggtaacgcttatcaacacagcaaagtgaaccagtggaccacaaatgtagtagaacaaactttaagccaactcaccaagctgggaaaaccatttaaatacatcggtaatggagtcttgtttcttttatatttgcgggatggttttttaacactgatcagaggggcatccagtaccagaaacaacagctaacgtggctcaactcaaggaaggctcctggtgggagtcggtcgtgtgtgtagtatacgttagcgtacgcttgaccatttggctgctggtacaattgcagatcgtatgtgaagcgggatcttacaggaggtcccatcagatgcttttagaacaagtgaagcatagaggaagtgtggacagcccccagctgacagtggctcaacttagaatttttcaactttgatggatttaccagggtattaagtgcatttgcaacttacattttcatatattgttgatttatgatgggtttatgggatgttgtaagtcaaggagcacctataatttgtcaatatagtgagacaaggcaatctgtccctataatttttatcgagaacatcaaccacgtggagctacatacattgtacgtttgctaaaagtggacagaatgacatttgtgttacccagtagacttctctaacaaaaatttgttttaacttaagtgacctgtgtaattatgcagaagaatggagctggattacacacagcaagttcctgcttctgggacagctctactgacggtatgattttcattcatgtttgtgaagttttgttgtgtgaaatatatgactggaagtttcctatctttgaatgcaatgcatgtttatcaccttttaaaacatttaataatagacttgccaaggttctttgtgtagcatagagatgggtacttgaatgttggccttattgtgagtaaaacgtcgtcccccagctttccctgccgtaaatgctgctctcttccctcccgcagggagctgcactgtgcgatgggagaataagaccatgtactgcatcgtcagtgccttcggactgtctatttgacctgcagtccagcctatggcctttctccttttgtctctagttcatcctctaaccaccagccatgaattcagtgaactcttttctcattctctttgttttgtggcactttcacaatgtagaggaaaaaaccaaatgaccgcactgtgatgtgaatggcaccgaagtcagatgagtatccctgtaggtcacctgcagcctgcgttgccacttgtcttaactctgaatatttcatttcaaaggtgctaaaatctgaaatctgctagtgtgaaacttgctctactctctgaaatgattcaaatacactaattttccatactttatacttttgttagaataaattattcaaatctaaaaaaaaaaaaaaaaaaaacaaacaaacaacaccttgtgggccgccttaggagcctttcagaaaaacgggttttctaaaagcccacattcgggtttgggcccgcggggcgccccaattatatggtaactgtgtaacccactgtggggccaaataagcgtgttgtccccctaagggagagaactccgggcgcacatcgagacgaaaggggcgctgggagtttttcctcccaccaattaataaaaaagcgcgccggggcggggaaacacacgagaagcgtgtctcggagaacccaaactctccagaaatgggggagtctcccagagggggcacactacacggggagactcctttctcaacaacgggggggagtcccaaacggaagacctccgaattttctaaaatttaacacgcccgggccctggggggcgaacccactagacacctgaccagccaacacacacaacacaacaacagccacaacacctcaaatcatn

SEQ ID NO: 449211 - DNA, 745 bp, Homo sapiens
tgcgcagtccgcgccactcagggagccggaggcgacgcgccggaggaaagatggaagactaccaggctgcggaggagactgcttttgttgttgatgaagtgagcaacattgtaaaagaggctatagaaagcgcaattggtggtaacgcttatcaacacagcaaagtgaaccagtggaccacaaatgtagtagaacaaactttaagccaactcaccaagctgggaaaaccatttaaatacatcgtgacctgtgtaattatgcagaagaatggagctggattacacacagcaagttcctgcttctgggacagctctactgacgggagctgcactgtgcgatgggagaataagaccatgtactgcatcgtcagtgccttcggactgtctatttgacctgcagtccagcctatggcctttctccttttgtctctagttcatcctctaaccaccagccatgaattcagtgaactcttttctcattctctttgttttgtggcactttcacaatgtagaggaaaaaaccaaatgaccgcactgtgatgtgaatggcaccgaagtcagatgagtatccctgtaggtcacctgcagcctgcgttgccacttgtcttaactctgaatatttcatttcaaaggtgctaaaatctgaaatctgctagtgtgaaacttgctctactctctgaaatgattcaaatacactaattttccatactttatacttttgttagaataaattattcaaatctaaa

SEQ ID NO: 449212 - DNA, 703 bp, Homo sapiens
tgcgcagtccgcgccactcagggagccggaggcgacgcgccggaggaaagatggaagactaccaggctgcggaggaggctatagaaagcgcaattggtggtaacgcttatcaacacagcaaagtgaaccagtggaccacaaatgtagtagaacaaactttaagccaactcaccaagctgggaaaaccatttaaatacatcgtgacctgtgtaattatgcagaagaatggagctggattacacacagcaagttcctgcttctgggacagctctactgacgggagctgcactgtgcgatgggagaataagaccatgtactgcatcgtcagtgccttcggactgtctatttgacctgcagtccagcctatggcctttctccttttgtctctagttcatcctctaaccaccagccatgaattcagtgaactcttttctcattctctttgttttgtggcactttcacaatgtagaggaaaaaaccaaatgaccgcactgtgatgtgaatggcaccgaagtcagatgagtatccctgtaggtcacctgcagcctgcgttgccacttgtcttaactctgaatatttcatttcaaaggtgctaaaatctgaaatctgctagtgtgaaacttgctctactctctgaaatgattcaaatacactaattttccatactttatacttttgttagaataaattattcaaatctaaa

SEQ ID NO: 449213 - DNA, 691 bp, Homo sapiens
tgcgcagtccgcgccactcagggagccggaggcgacgcgccggaggaaagatggaagactaccaggctgcggaggagactgcttttgttgttgatgaagtgagcaacattgtaaaagaggctatagaaagcgcaattggtggtaacgcttatcaacacagcaaagtgaaccagtggaccacaaatgtagtagaacaaactttaagccaactcaccaagctgggattacacacagcaagttcctgcttctgggacagctctactgacgggagctgcactgtgcgatgggagaataagaccatgtactgcatcgtcagtgccttcggactgtctatttgacctgcagtccagcctatggcctttctccttttgtctctagttcatcctctaaccaccagccatgaattcagtgaactcttttctcattctctttgttttgtggcactttcacaatgtagaggaaaaaaccaaatgaccgcactgtgatgtgaatggcaccgaagtcagatgagtatccctgtaggtcacctgcagcctgcgttgccacttgtcttaactctgaatatttcatttcaaaggtgctaaaatctgaaatctgctagtgtgaaacttgctctactctctgaaatgattcaaatacactaattttccatactttatacttttgttagaataaattattcaaatctaaa

SEQ ID NO: 449214 - DNA, 985 bp, Homo sapiens
aatgtcacgcaggacactgccacgcacatgacagcgaagaccatgacggcgcacccgagctcgctgccacctaaatggctgcggaggactgcttttgttgttgatgaagtgagcaacattgtaaaagaggctatagaaagcgcaattggtggtaacgcttatcaacacagcaaagtgaaccagtggaccacaaatgtagtagaacaaactttaagccaactcaccaagctgggaaaaccatttaaatacatcgtgacctgtgtaattatgcagaagaatggagctggattacacacagcaagttcctgcttctgggacagctctactgacggtatgattttcattcatgtttgtgaagttttgttgtgtgaaatatatgactggaagtttcctatctttgaatgcaatgcatgtttatcaccttttaaaacatttaataatagacttgccaaggttctttgtgtagcatagagatgggtacttgaatgttggccttattgtgagtaaaacgtcgtcccccagctttccctgccgtaaatgctgctctcttccctcccgcagggagctgcactgtgcgatgggagaataagaccatgtactgcatcgtcagtgccttcggactgtctatttgacctgcagtccagcctatggcctttctccttttgtctctagttcatcctctaaccaccagccatgaattcagtgaactcttttctcattctctttgttttgtggcactttcacaatgtagaggaaaaaaccaaatgaccgcactgtgatgtgaatggcaccgaagtcagatgagtatccctgtaggtcacctgcagcctgcgttgccacttgtcttaactctgaatatttcatttcaaaggtgctaaaatctgaaatctgctagtgtgaaacttgctctactctctgaaatgattcaaatacactaattttccatactttatacttttgttagaataaattattcaaatctaaa

SEQ ID NO: 449215 - DNA, 618 bp, Homo sapiens
tgcgcagtccgcgccactcagggagccggaggcgacgcgccggaggaaagatggaagactaccaggctgcggaggagactgcttttgttgttgatgaagtgagcaacattgtaaaagaggctatagaaagcgcaattggtggtaacgcttatcaacacagcaaagtgaaccagtggaccacaaatgtagtagaacaaactttaagccaactcaccaagctgggaaaaccatttaaatacatcgtgacctgtgtaattatgcagaagaatggagctggattacacacagcaagttcctgcttctgggacagctctactgacgggagctgcactgtgcgatgggagaataagaccatgtactgcatcgtcagtgccttcggactgtctatttgacctgcagtccagcctatggcctttctccttttgtctctagttcatcctctaaccaccagcacctgcagcctgcgttgccacttgtcttaactctgaatatttcatttcaaaggtgctaaaatctgaaatctgctagtgtgaaacttgctctactctctgaaatgattcaaatacactaattttccatactttatacttttgttagaataaattattcaaatctaaa

SEQ ID NO: 449216 - DNA, 440 bp, Homo sapiens
tcggcctgcatcacgcgtgagggggcgcgcggtgctggaagctgccgcacctgcggggagccgagccgccggcgctcgacgcgcgcgctctcgcgagacccgcgggatcacgtgacgcccgggcgcggcgcagctcacgtgacaagcgctgccggccgcggtgtcttcttcgtgccggcgtcgcagtggccgggcctcttgcgtctggtaacgccgctggctggcacttttttaaatataaaaatgggtgttatttttatttttttttgtaaagtgatttttggtcttctgttgacattcggggtgatcctgttctgcgctgtgtacaatgtgagatcggtgcgttctcctgatgttttgccgtggcttggggattgtacacgggaccagctcacgtaatgcattgcctgtaacaatgtaataaaaagcctctttctttt

SEQ ID NO: 449217 - DNA, 2591 bp, Homo sapiens
tcggcctgcatcacgcgtgagggggcgcgcggtgctggaagctgccgcacctgcggggagccgagccgccggcgctcgacgcgcgcgctctcgcgagacccgcgggatcacgtgacgcccgggcgcggcgcagctcacgtgacaagcgctgccggccgcggtgtcttcttcgtgccggcgtcgcagtggccgggcctcttgcgtctggtaacgccgctgtctctaacgccagcccttggcgcccgcgccccgccaccgcagcgcccggcagtccgcggcccaaccgccgcccgcgcccccgctctccgcaccgtacccggccgcctcgcgccatggcggcccccggcagcgcccggcgacccctgctgctgctactgctgttgctgctgctcggcctcatgcattgtgcgtcagcagcaatgtttatggtgaaaaatggcaacgggaccgcgtgcataatggccaacttctctgctgccttctcagtgaactacgacaccaagagtggccctaagaacatgacctttgacctgccatcagatgccacagtggtgctcaaccgcagctcctgtggaaaagagaacacttctgaccccagtctcgtgattgcttttggaagaggacatacactcactctcaatttcacgagaaatgcaacacgttacagcgtccagctcatgagttttgtttataacttgtcagacacacaccttttccccaatgcgagctccaaagaaatcaagactgtggaatctataactgacatcagggcagatatagataaaaaatacagatgtgttagtggcacccaggtccacatgaacaacgtgaccgtaacgctccatgatgccaccatccaggcgtacctttccaacagcagcttcagcaggggagagacacgctgtgaacaagacaggccttccccaaccacagcgccccctgcgccacccagcccctcgccctcacccgtgcccaagagcccctctgtggacaagtacaacgtgagcggcaccaacgggacctgcctgctggccagcatggggctgcagctgaacctcacctatgagaggaaggacaacacgacggtgacaaggcttctcaacatcaaccccaacaagacctcggccagcgggagctgcggcgcccacctggtgactctggagctgcacagcgagggcaccaccgtcctgctcttccagttcgggatgaatgcaagttctagccggtttttcctacaaggaatccagttgaatacaattcttcctgacgccagagaccctgcctttaaagctgccaacggctccctgcgagcgctgcaggccacagtcggcaattcctacaagtgcaacgcggaggagcacgtccgtgtcacgaaggcgttttcagtcaatatattcaaagtgtgggtccaggctttcaaggtggaaggtggccagtttggctctgtggaggagtgtctgctggacgagaacagcatgctgatccccatcgctgtgggtggtgccctggcggggctggtcctcatcgtcctcatcgcctacctcgtcggcaggaagaggagtcacgcaggctaccagactatctagcctggtgcacgcaggcacagcagctgcaggggcctctgttcctttctctgggcttagggtcctgtcgaaggggaggcacactttctggcaaacgtttctcaaatctgcttcatccaatgtgaagttcatcttgcagcatttactatgcacaacagagtaactatcgaaatgacggtgttaattttgctaactgggttaaatattttgctaactggttaaacattaatatttaccaaagtaggattttgagggtgggggtgctctctctgagggggtgggggtgccgctgtctctgaggggtgggggtgccgctgtctctgaggggtgggggtgccgctctctctgagggggtgggggtgccgctttctctgagggggtgggggtgccgctctctctgagggggtgggggtgctgctctctccgaggggtggaatgccgctgtctctgaggggtgggggtgccgctctaaattggctccatatcatttgagtttagggttctggtgtttggtttcttcattctttactgcactcagatttaagccttacaaagggaaagcctctggccgtcacacgtaggacgcatgaaggtcactcgtggtgaggctgacatgctcacacattacaacagtagagagggaaaatcctaagacagaggaactccagagatgagtgtctggagcgcttcagttcagctttaaaggccaggacgggccacacgtggctggcggcctcgttccagtggcggcacgtccttgggcgtctctaatgtctgcagctcaagggctggcacttttttaaatataaaaatgggtgttatttttatttttttttgtaaagtgatttttggtcttctgttgacattcggggtgatcctgttctgcgctgtgtacaatgtgagatcggtgcgttctcctgatgttttgccgtggcttggggattgtacacgggaccagctcacgtaatgcattgcctgtaacaatgtaataaaaagcctctttctttt

SEQ ID NO: 449218 - DNA, 2188 bp, Homo sapiens
cgccggcgctgccggggggccgccatggcgcgaggcggccgggtacgcgtgcataatggccaacttctctgctgccttctcagtgaactacgacaccaagagtggccctaagaacatgacctttgacctgccatcagatgccacagtggtgctcaaccgcagctcctgtggaaaagagaacacttctgaccccagtctcgtgattgcttttggaagaggacatacactcactctcaatttcacgagaaatgcaacacgttacagcgtccagctcatgagttttgtttataacttgtcagacacacaccttttccccaatgcgagctccaaagaaatcaagactgtggaatctataactgacatcagggcagatatagataaaaaatacagatgtgttagtggcacccaggtccacatgaacaacgtgaccgtaacgctccatgatgccaccatccaggcgtacctttccaacagcagcttcagcaggggagagacacgctgtgaacaagacaggccttccccaaccacagcgccccctgcgccacccagcccctcgccctcacccgtgcccaagagcccctctgtggacaagtacaacgtgagcggcaccaacgggacctgcctgctggccagcatggggctgcagctgaacctcacctatgagaggaaggacaacacgacggtgacaaggcttctcaacatcaaccccaacaagacctcggccagcgggagctgcggcgcccacctggtgactctggagctgcacagcgagggcaccaccgtcctgctcttccagttcgggatgaatgcaagttctagccggtttttcctacaaggaatccagttgaatacaattcttcctgacgccagagaccctgcctttaaagctgccaacggctccctgcgagcgctgcaggccacagtcggcaattcctacaagtgcaacgcggaggagcacgtccgtgtcacgaaggcgttttcagtcaatatattcaaagtgtgggtccaggctttcaaggtggaaggtggccagtttggctctgtggaggagtgtctgctggacgagaacagcatgctgatccccatcgctgtgggtggtgccctggcggggctggtcctcatcgtcctcatcgcctacctcgtcggcaggaagaggagtcacgcaggctaccagactatctagcctggtgcacgcaggcacagcagctgcaggggcctctgttcctttctctgggcttagggtcctgtcgaaggggaggcacactttctggcaaacgtttctcaaatctgcttcatccaatgtgaagttcatcttgcagcatttactatgcacaacagagtaactatcgaaatgacggtgttaattttgctaactgggttaaatattttgctaactggttaaacattaatatttaccaaagtaggattttgagggtgggggtgctctctctgagggggtgggggtgccgctgtctctgaggggtgggggtgccgctgtctctgaggggtgggggtgccgctctctctgagggggtgggggtgccgctttctctgagggggtgggggtgccgctctctctgagggggtgggggtgctgctctctccgaggggtggaatgccgctgtctctgaggggtgggggtgccgctctaaattggctccatatcatttgagtttagggttctggtgtttggtttcttcattctttactgcactcagatttaagccttacaaagggaaagcctctggccgtcacacgtaggacgcatgaaggtcactcgtggtgaggctgacatgctcacacattacaacagtagagagggaaaatcctaagacagaggaactccagagatgagtgtctggagcgcttcagttcagctttaaaggccaggacgggccacacgtggctggcggcctcgttccagtggcggcacgtccttgggcgtctctaatgtctgcagctcaagggctggcacttttttaaatataaaaatgggtgttatttttatttttttttgtaaagtgatttttggtcttctgttgacattcggggtgatcctgttctgcgctgtgtacaatgtgagatcggtgcgttctcctgatgttttgccgtggcttggggattgtacacgggaccagctcacgtaatgcattgcctgtaacaatgtaataaaaagcctctttctttt

SEQ ID NO: 449219 - DNA, 1765 bp, Homo sapiens
ggaccataactagtctcgagtagtgcgtatctttccaacaggtgttgacgagggagagggagagacacgcggtgaggatgagaggccttgcccaatcagaatgaaggcgccccctgcgccacccagcccctcgccctcacccgtgcccaagagcccctctgtggacaagtacaacgtgagcggcaccaacgggacctgcctgctggccagcatggggctgcagctgaacctcacctatgagaggaaggacaacacgacggtgacaaggcttctcaacatcaaccccaacaagacctcggccagcgggagctgcggcgcccacctggtgactctggagctgcacagcgagggcaccaccgtcctgctcttccagttcgggatgaatgcaagttctagccggtttttcctacaaggaatccagttgaatacaattcttcctgacgccagagaccctgcctttaaagctgccaacggctccctgcgagcgctgcaggccacagtcggcaattcctacaagtgcaacgcggaggagcacgtccgtgtcacgaaggcgttttcagtcaatatattcaaagtgtgggtccaggctttcaaggtggaaggtggccagtttggctctgtggaggagtgtctgctggacgagaacagcatgctgatccccatcgctgtgggtggtgccctggcggggctggtcctcatcgtcctcatcgcctacctcgtcggcaggaagaggagtcacgcaggctaccagactatctagcctggtgcacgcaggcacagcagctgcaggggcctctgttcctttctctgggcttagggtcctgtcgaaggggaggcacactttctggcaaacgtttctcaaatctgcttcatccaatgtgaagttcatcttgcagcatttactatgcacaacagagtaactatcgaaatgacggtgttaattttgctaactgggttaaatattttgctaactggttaaacattaatatttaccaaagtaggattttgagggtgggggtgctctctctgagggggtgggggtgccgctgtctctgaggggtgggggtgccgctgtctctgaggggtgggggtgccgctctctctgagggggtgggggtgccgctttctctgagggggtgggggtgccgctctctctgagggggtgggggtgctgctctctccgaggggtggaatgccgctgtctctgaggggtgggggtgccgctctaaattggctccatatcatttgagtttagggttctggtgtttggtttcttcattctttactgcactcagatttaagccttacaaagggaaagcctctggccgtcacacgtaggacgcatgaaggtcactcgtggtgaggctgacatgctcacacattacaacagtagagagggaaaatcctaagacagaggaactccagagatgagtgtctggagcgcttcagttcagctttaaaggccaggacgggccacacgtggctggcggcctcgttccagtggcggcacgtccttgggcgtctctaatgtctgcagctcaagggctggcacttttttaaatataaaaatgggtgttatttttatttttttttgtaaagtgatttttggtcttctgttgacattcggggtgatcctgttctgcgctgtgtacaatgtgagatcggtgcgttctcctgatgttttgccgtggcttggggattgtacacgggaccagctcacgtaatgcattgcctgtaacaatgtaataaaaagcctctttctttt

SEQ ID NO: 449220 - DNA, 2441 bp, Homo sapiens
tcggcctgcatcacgcgtgagggggcgcgcggtgctggaagctgccgcacctgcggggagccgagccgccggcgctcgacgcgcgcgctctcgcgagacccgcgggatcacgtgacgcccgggcgcggcgcagctcacgtgacaagcgctgccggccgcggtgtcttcttcgtgccggcgtcgcagtggccgggcctcttgcgtctggtaacgccgctgtctctaacgccagcccttggcgcccgcgccccgccaccgcagcgcccggcagtccgcggcccaaccgccgcccgcgcccccgctctccgcaccgtacccggccgcctcgcgccatggcggcccccggcagcgcccggcgacccctgctgctgctactgctgttgctgctgctcggcctcatgcattgtgcgtcagcagcaatgtttatggtgaaaaatggcaacgggaccgcgtgcataatggccaacttctctgctgccttctcagtgaactacgacaccaagagtggccctaagaacatgacctttgacctgccatcagatgccacagtggtgctcaaccgcagctcctgtggaaaagagaacacttctgaccccagtctcgtgattgcttttggaagaggacatacactcactctcaatttcacgagaaatgcaacacgttacagcgtccagctcatgagttttgtttataacttgtcagacacacaccttttccccaatgcgagctccaaagaaatcaagactgtggaatctataactgacatcagggcagatatagataaaaaatacagatgtgttagtggcacccaggtccacatgaacaacgtgaccgtaacgctccatgatgccaccatccaggcgtacctttccaacagcagcttcagcaggggagagacacgctgtgaacaagacaggccttccccaaccacagcgccccctgcgccacccagcccctcgccctcacccgtgcccaagagcccctctgtggacaagtacaacgtgagcggcaccaacgggacctgcctgctggccagcatggggctgcagctgaacctcacctatgagaggaaggacaacacgacggtgacaaggcttctcaacatcaaccccaacaagacctcggccagcgggagctgcggcgcccacctggtgactctggagctgcacagcgagggcaccaccgtcctgctcttccagttcgggatgaatgcaagttctagccggtttttcctacaaggaatccagttgaatacaattcttcctgacgccagagaccctgcctttaaagctgccaacggctccctgcgagcgctgcaggccacagtcggcaattcctacaagtgcaacgcggaggagcacgtccgtgtcacgaaggcgttttcagtcaatatattcaaagtgtgggtccaggctttcaaggtggaaggtggccagtttggctctgtggaggagtgtctgctggacgagaacagcatgctgatccccatcgctgtgggtggtgccctggcggggctggtcctcatcgtcctcatcgcctacctcgtcggcaggaagaggagtcacgcaggctaccagactatctagcctggtgcacgcaggcacagcagctgcaggggcctctgttcctttctctgggcttagggtcctgtcgaaggggaggcacactttctggcaaacgtttctcaaatctgcttcatccaatgtgaagttcatcttgcagcatttactatgcacaacagagtaactatcgaaatgacggtgttaattttgctaactgggttaaatattttgctaactggttaaacattaatatttaccaaagtaggattttgagggtgggggtgctctctctgagggggtgggggtgccgcgctgtctctgaggggtgggggtgccgctctaaattggctccatatcatttgagtttagggttctggtgtttggtttcttcattctttactgcactcagatttaagccttacaaagggaaagcctctggccgtcacacgtaggacgcatgaaggtcactcgtggtgaggctgacatgctcacacattacaacagtagagagggaaaatcctaagacagaggaactccagagatgagtgtctggagcgcttcagttcagctttaaaggccaggacgggccacacgtggctggcggcctcgttccagtggcggcacgtccttgggcgtctctaatgtctgcagctcaagggctggcacttttttaaatataaaaatgggtgttatttttatttttttttgtaaagtgatttttggtcttctgttgacattcggggtgatcctgttctgcgctgtgtacaatgtgagatcggtgcgttctcctgatgttttgccgtggcttggggattgtacacgggaccagctcacgtaatgcattgcctgtaacaatgtaataaaaagcctctttctttt

SEQ ID NO: 449221 - DNA, 1624 bp, Homo sapiens
gagcaagactctcagagaagggtctggaaggaactaaccaaaattttcattccccagagatacacaacgccttttatagacaagatcttttgcagttttgttctaatactagaaatgtaggaagtcaggtttattacccaatgaccattcacgtttgatgataaatgtgtgaatctactggggttaaagatcatctttctatgaatctgctccgtgattaaagatcatttttctttttaagaatgcaagttctagccggtttttcctacaaggaatccagttgaatacaattcttcctgacgccagagaccctgcctttaaagctgccaacggctccctgcgagcgctgcaggccacagtcggcaattcctacaagtgcaacgcggaggagcacgtccgtgtcacgaaggcgttttcagtcaatatattcaaagtgtgggtccaggctttcaaggtggaaggtggccagtttggctctgtggaggagtgtctgctggacgagaacagcatgctgatccccatcgctgtgggtggtgccctggcggggctggtcctcatcgtcctcatcgcctacctcgtcggcaggaagaggagtcacgcaggctaccagactatctagcctggtgcacgcaggcacagcagctgcaggggcctctgttcctttctctgggcttagggtcctgtcgaaggggaggcacactttctggcaaacgtttctcaaatctgcttcatccaatgtgaagttcatcttgcagcatttactatgcacaacagagtaactatcgaaatgacggtgttaattttgctaactgggttaaatattttgctaactggttaaacattaatatttaccaaagtaggattttgagggtgggggtgctctctctgagggggtgggggtgccgctgtctctgaggggtgggggtgccgctgtctctgaggggtgggggtgccgctctctctgagggggtgggggtgccgctttctctgagggggtgggggtgccgctctctctgagggggtgggggtgctgctctctccgaggggtggaatgccgctgtctctgaggggtgggggtgccgctctaaattggctccatatcatttgagtttagggttctggtgtttggtttcttcattctttactgcactcagatttaagccttacaaagggaaagcctctggccgtcacacgtaggacgcatgaaggtcactcgtggtgaggctgacatgctcacacattacaacagtagagagggaaaatcctaagacagaggaactccagagatgagtgtctggagcgcttcagttcagctttaaaggccaggacgggccacacgtggctggcggcctcgttccagtggcggcacgtccttgggcgtctctaatgtctgcagctcaagggctggcacttttttaaatataaaaatgggtgttatttttatttttttttgtaaagtgatttttggtcttctgttgacattcggggtgatcctgttctgcgctgtgtacaatgtgagatcggtgcgttctcctgatgttttgccgtggcttggggattgtacacgggaccagctcacgtaatgcattgcctgtaacaatgtaataaaaagcctctttctttt

SEQ ID NO: 449222 - DNA, 1751 bp, Homo sapiens
gcgccacacatatccctcgcagctcgacccgtgtccaagcatcacccgtctgttgtgaatctgatgtacaagctggtgtaccgtgtacctgacgtcggatctgactatgccttgaggcagctagtggcggtctgtattatgaacctcatcatatgagaaggaatggataacatcgagggtttacgatggcttgcatcacattatctaactcgctgaatgatgaacctacggttgaagcgggagtactgtagacgcccatctcatggtgatctctggatgcatgcatcagcgtatgggacacctagctcgtataccttgtgtcttatccatgattctggcgattgtagactgtcacatgtttctaagcacgttttgctcctacgagggaatgtccagattgaaatacctaattttattccatgaacgctcaagatgaccctgcctttaaagctgccaacggctccctgcgagcgctgcaggccacagtcggcaattcctacaagtgcaacgcggaggagcacgtccgtgtcacgaaggcgttttcagtcaatatattcaaagtgtgggtccaggctttcaaggtggaaggtggccagtttggctctgtggaggagtgtctgctggacgagaacagcatgctgatccccatcgctgtgggtggtgccctggcggggctggtcctcatcgtcctcatcgcctacctcgtcggcaggaagaggagtcacgcaggctaccagactatctagcctggtgcacgcaggcacagcagctgcaggggcctctgttcctttctctgggcttagggtcctgtcgaaggggaggcacactttctggcaaacgtttctcaaatctgcttcatccaatgtgaagttcatcttgcagcatttactatgcacaacagagtaactatcgaaatgacggtgttaattttgctaactgggttaaatattttgctaactggttaaacattaatatttaccaaagtaggattttgagggtgggggtgctctctctgagggggtgggggtgccgctgtctctgaggggtgggggtgccgctgtctctgaggggtgggggtgccgctctctctgagggggtgggggtgccgctttctctgagggggtgggggtgccgctctctctgagggggtgggggtgctgctctctccgaggggtggaatgccgctgtctctgaggggtgggggtgccgctctaaattggctccatatcatttgagtttagggttctggtgtttggtttcttcattctttactgcactcagatttaagccttacaaagggaaagcctctggccgtcacacgtaggacgcatgaaggtcactcgtggtgaggctgacatgctcacacattacaacagtagagagggaaaatcctaagacagaggaactccagagatgagtgtctggagcgcttcagttcagctttaaaggccaggacgggccacacgtggctggcggcctcgttccagtggcggcacgtccttgggcgtctctaatgtctgcagctcaagggctggcacttttttaaatataaaaatgggtgttatttttatttttttttgtaaagtgatttttggtcttctgttgacattcggggtgatcctgttctgcgctgtgtacaatgtgagatcggtgcgttctcctgatgttttgccgtggcttggggattgtacacgggaccagctcacgtaatgcattgcctgtaacaatgtaataaaaagcctctttctttt

SEQ ID NO: 449223 - DNA, 1420 bp, Homo sapiens
aacaacatatctggaaatagatgaccttatttcatattcattacagtcttgtatgttagaagaggtattctatgctggtatacttataagaaagaaagaggagtcttaaaaactcaagcatgttacatactagaatggaattggagcaccagaattaaaatttttccatggggaatttcacagcagtaaggctactcagtcactcattgagttcagagtttgtaatcacccccacatggtgctaaaaacttaaacctccaaagtgttcccaggactggaggagtgtctgctggacgagaacagcatgctgatccccatcgctgtgggtggtgccctggcggggctggtcctcatcgtcctcatcgcctacctcgtcggcaggaagaggagtcacgcaggctaccagactatctagcctggtgcacgcaggcacagcagctgcaggggcctctgttcctttctctgggcttagggtcctgtcgaaggggaggcacactttctggcaaacgtttctcaaatctgcttcatccaatgtgaagttcatcttgcagcatttactatgcacaacagagtaactatcgaaatgacggtgttaattttgctaactgggttaaatattttgctaactggttaaacattaatatttaccaaagtaggattttgagggtgggggtgctctctctgagggggtgggggtgccgctgtctctgaggggtgggggtgccgctgtctctgaggggtgggggtgccgctctctctgagggggtgggggtgccgctttctctgagggggtgggggtgccgctctctctgagggggtgggggtgctgctctctccgaggggtggaatgccgctgtctctgaggggtgggggtgccgctctaaattggctccatatcatttgagtttagggttctggtgtttggtttcttcattctttactgcactcagatttaagccttacaaagggaaagcctctggccgtcacacgtaggacgcatgaaggtcactcgtggtgaggctgacatgctcacacattacaacagtagagagggaaaatcctaagacagaggaactccagagatgagtgtctggagcgcttcagttcagctttaaaggccaggacgggccacacgtggctggcggcctcgttccagtggcggcacgtccttgggcgtctctaatgtctgcagctcaagggctggcacttttttaaatataaaaatgggtgttatttttatttttttttgtaaagtgatttttggtcttctgttgacattcggggtgatcctgttctgcgctgtgtacaatgtgagatcggtgcgttctcctgatgttttgccgtggcttggggattgtacacgggaccagctcacgtaatgcattgcctgtaacaatgtaataaaaagcctctttctttt

SEQ ID NO: 449224 - DNA, 1256 bp, Homo sapiens
acgtgcttcagactccgcctgtggacgtttagtcgcttccgtgtgggctggggcgacgcccctgttcctctgcaaggagctgtttcttcttgccggtctgagattctagagtggaggagtgtctgctggacgagaacagcatgctgatccccatcgctgtgggtggtgccctggcggggctggtcctcatcgtcctcatcgcctacctcgtcggcaggaagaggagtcacgcaggctaccagactatctagcctggtgcacgcaggcacagcagctgcaggggcctctgttcctttctctgggcttagggtcctgtcgaaggggaggcacactttctggcaaacgtttctcaaatctgcttcatccaatgtgaagttcatcttgcagcatttactatgcacaacagagtaactatcgaaatgacggtgttaattttgctaactgggttaaatattttgctaactggttaaacattaatatttaccaaagtaggattttgagggtgggggtgctctctctgagggggtgggggtgccgctgtctctgaggggtgggggtgccgctgtctctgaggggtgggggtgccgctctctctgagggggtgggggtgccgctttctctgagggggtgggggtgccgctctctctgagggggtgggggtgctgctctctccgaggggtggaatgccgctgtctctgaggggtgggggtgccgctctaaattggctccatatcatttgagtttagggttctggtgtttggtttcttcattctttactgcactcagatttaagccttacaaagggaaagcctctggccgtcacacgtaggacgcatgaaggtcactcgtggtgaggctgacatgctcacacattacaacagtagagagggaaaatcctaagacagaggaactccagagatgagtgtctggagcgcttcagttcagctttaaaggccaggacgggccacacgtggctggcggcctcgttccagtggcggcacgtccttgggcgtctctaatgtctgcagctcaagggctggcacttttttaaatataaaaatgggtgttatttttatttttttttgtaaagtgatttttggtcttctgttgacattcggggtgatcctgttctgcgctgtgtacaatgtgagatcggtgcgttctcctgatgttttgccgtggcttggggattgtacacgggaccagctcacgtaatgcattgcctgtaacaatgtaataaaaagcctctttctttt

SEQ ID NO: 449225 - DNA, 1137 bp, Homo sapiens
aggacagccccgggcctgcctccgctggctcaaccacatccagccccaggctttgctcacggtttgtgggctaaatggtagcagatggaagaagtagtttcctagtgccgcccccaccccaaccccatacatcctggtgcacgcaggcacagcagctgcaggggcctctgttcctttctctgggcttagggtcctgtcgaaggggaggcacactttctggcaaacgtttctcaaatctgcttcatccaatgtgaagttcatcttgcagcatttactatgcacaacagagtaactatcgaaatgacggtgttaattttgctaactgggttaaatattttgctaactggttaaacattaatatttaccaaagtaggattttgagggtgggggtgctctctctgagggggtgggggtgccgctgtctctgaggggtgggggtgccgctgtctctgaggggtgggggtgccgctctctctgagggggtgggggtgccgctttctctgagggggtgggggtgccgctctctctgagggggtgggggtgctgctctctccgaggggtggaatgccgctgtctctgaggggtgggggtgccgctctaaattggctccatatcatttgagtttagggttctggtgtttggtttcttcattctttactgcactcagatttaagccttacaaagggaaagcctctggccgtcacacgtaggacgcatgaaggtcactcgtggtgaggctgacatgctcacacattacaacagtagagagggaaaatcctaagacagaggaactccagagatgagtgtctggagcgcttcagttcagctttaaaggccaggacgggccacacgtggctggcggcctcgttccagtggcggcacgtccttgggcgtctctaatgtctgcagctcaagggctggcacttttttaaatataaaaatgggtgttatttttatttttttttgtaaagtgatttttggtcttctgttgacattcggggtgatcctgttctgcgctgtgtacaatgtgagatcggtgcgttctcctgatgttttgccgtggcttggggattgtacacgggaccagctcacgtaatgcattgcctgtaacaatgtaataaaaagcctctttctttt

SEQ ID NO: 449226 - DNA, 3092 bp, Homo sapiens
tcggcctgcatcacgcgtgagggggcgcgcggtgctggaagctgccgcacctgcggggagccgagccgccggcgctcgacgcgcgcgctctcgcgagacccgcgggatcacgtgacgcccgggcgcggcgcagctcacgtgacaagcgctgccggccgcggtgtcttcttcgtgccggcgtcgcagtggccgggcctcttgcgtctggtaacgccgctgtctctaacgccagcccttggcgcccgcgccccgccaccgcagcgcccggcagtccgcggcccaaccgccgcccgcgcccccgctctccgcaccgtacccggccgcctcgcgccatggcggcccccggcagcgcccggcgacccctgctgctgctactgctgttgctgctgctcggcctcatgcattgtgcgtcagcagcaatgtttatggtgaaaaatggcaacgggaccgcgtgcataatggccaacttctctgctgccttctcagtgaactacgacaccaagagtggccctaagaacatgacctttgacctgccatcagatgccacagtggtgctcaaccgcagctcctgtggaaaagagaacacttctgaccccagtctcgtgattgcttttggaagaggacatacactcactctcaatttcacgagaaatgcaacacgttacagcgtccagctcatgagttttgtttataacttgtcagacacacaccttttccccaatgcgagctccaaagaaatcaagactgtggaatctataactgacatcagggcagatatagataaaaaatacagatgtgttagtggcacccaggtccacatgaacaacgtgaccgtaacgctccatgatgccaccatccaggcgtacctttccaacagcagcttcagcaggggagagacacgctgtgaacaagacaggccttccccaaccacagcgccccctgcgccacccagcccctcgccctcacccgtgcccaagagcccctctgtggacaagtacaacgtgagcggcaccaacgggacctgcctgctggccagcatggggctgcagctgaacctcacctatgagaggaaggacaacacgacggtgacaaggcttctcaacatcaaccccaacaagacctcggccagcgggagctgcggcgcccacctggtgactctggagctgcacagcgagggcaccaccgtcctgctcttccagttcgggatgaatgcaagttctagccggtttttcctacaaggaatccagttgaatacaattcttcctgacgccagagaccctgcctttaaagctgccaacggctccctgcgagcgctgcaggccacagtcggcaattcctacaagtgcaacgcggaggagcacgtccgtgtcacgaaggcgttttcagtcaatatattcaaagtgtgggtccaggctttcaaggtggaaggtggccagtttggctctgtggaggagtgtctgctggacgagaacagcatgctgatccccatcgctgtgggtggtgccctggcggggctggtcctcatcgtcctcatcgcctacctcgtcggcaggaagaggagtcacgcaggctaccagactatctagcctggtgcacgcaggcacagcagctgcaggggcctctgttcctttctctgggcttagggtcctgtcgaaggggaggcacactttctggcaaacgtttctcaaatctgcttcatccaatgtgaagttcatcttgcagcatttactatgcacaacagagtaactatcgaaatgacggtgttaattttgctaactgggttaaatattttgctaactggttaaacattaatatttaccaaagtaggattttgagggtgggggtgctctctctgagggggtgggggtgccgctgtctctgaggggtgggggtgccgctgtctctgaggggtgggggtgccgctctctctgagggggtgggggtgccgctttctctgagggggtgggggtgccgctctctctgagggggtgggggtgctgctctctccgaggggtggaatgccgctgtctctgaggggtgggggtgccgctctaaattggctccatatcatttgagtttagggttctggtgtttggtttcttcattctttactgcactcagatttaagccttacaaagggaaagcctctggccgtcacacgtaggacgcatgaaggtcactcgtggtgaggctgacatgctcacacattacaacagtagagagggaaaatcctaagacagaggaactccagagatgagtgtctggagcgcttcagttcagctttaaaggccaggacgggccacacgtggctggcggcctcgttccagtggcggcacgtccttgggcgtctctaatgtctgcagctcaagggctggcacttttttaaatataaaaatgggtgttatttttatttttttttgtaaagtgatttttggtcttctgttgacattcggggtgatcctgttctgcgctgtgtacaatgtgagatcggtgcgttctcctgatgttttgccgtggcttggggattgtacacgggaccagctcacgtaatgcattgcctgtaacaatgtaataaaaagcctctttcttttggggtgggccttgtccttctgtcagctaaaatgggagctcatgagagaaggacgtcagggaaacggggttgagggtggtctcggtgcagagagaagggtgtcagggaaacggggggtgagggtggtcttggtgccagacgtagggaatggtgttgggagtggcccgagtgcctggcacagttgtctggttcattcatgtaacatgataatttttaaatcattaaaaaaattacctttcatacagataccatggaatactatgcagccataaagaggtatgagatcttgtcccctgcagggacacggatagagctggaagccattattctcagcaaactaacacaggagcagaaaaccagacaccacttgttctcacttgtaagtgggagcttctgatgagaacacatggacacaaggaggggaacatcacacactggggcccgttgggtcgggggcagggagagcatcaggaagaatagctaagggatgctggcttcatac

SEQ ID NO: 449227 - DNA, 2738 bp, Homo sapiens
tcggcctgcatcacgcgtgagggggcgcgcggtgctggaagctgccgcacctgcggggagccgagccgccggcgctcgacgcgcgcgctctcgcgagacccgcgggatcacgtgacgcccgggcgcggcgcagctcacgtgacaagcgctgccggccgcggtgtcttcttcgtgccggcgtcgcagtggccgggcctcttgcgtctggtaacgccgctgtctctaacgccagcccttggcgcccgcgccccgccaccgcagcgcccggcagtccgcggcccaaccgccgcccgcgcccccgctctccgcaccgtacccggccgcctcgcgccatggcggcccccggcagcgcccggcgacccctgctgctgctactgctgttgctgctgctcggcctcatgcattgtgcgtcagcagcaatgtttatggtgaaaaatggcaacgggaccgcgtgcataatggccaacttctctgctgccttctcagtgaactacgacaccaagagtggccctaagaacatgacctttgacctgccatcagatgccacagtggtgctcaaccgcagctcctgtggaaaagagaacacttctgaccccagtctcgtgattgcttttggaagaggacatacactcactctcaatttcacgagaaatgcaacacgttacagcgtccagctcatgagttttgtttataacttgtcagacacacaccttttccccaatgcgagctccaaagaaatcaagactgtggaatctataactgacatcagggcagatatagataaaaaatacagatgtgttagtggcacccaggtccacatgaacaacgtgaccgtaacgctccatgatgccaccatccaggcgtacctttccaacagcagcttcagcaggggagagacacgctgtgaacaagacaggccttccccaaccacagcgccccctgcgccacccagcccctcgccctcacccgtgcccaagagcccctctgtggacaagtacaacgtgagcggcaccaacgggacctgcctgctggccagcatggggctgcagctgaacctcacctatgagaggaaggacaacacgacggtgacaaggcttctcaacatcaaccccaacaagacctcggccagcgggagctgcggcgcccacctggtgactctggagctgcacagcgagggcaccaccgtcctgctcttccagttcgggatgaatgcaagttctagccggtttttcctacaaggaatccagttgaatacaattcttcctgacgccagagaccctgcctttaaagctgccaacggctccctgcgagcgctgcaggccacagtcggcaattcctacaagtgcaacgcggaggagcacgtccgtgtcacgaaggcgttttcagtcaatatattcaaagtgtgggtccaggctttcaaggtggaaggtggccagtttggctctgtggaggagtgtctgctggacgagaacagcatgctgatccccatcgctgtgggtggtgccctggcggggctggtcctcatcgtcctcatcgcctacctcgtcggcaggaagaggagtcacgcaggctaccagactatctagcctggtgcacgcaggcacagcagctgcaggggcctctgttcctttctctgggcttagggtcctgtcgaaggggaggcacactttctggcaaacgtttctcaaatctgcttcatccaatgtgaagttcatcttgcagcatttactatgcacaacagagtaactatcgaaatgacggtgttaattttgctaactgggttaaatattttgctaactggttaaacattaatatttaccaaagtaggattttgagggtgggggtgctctctctgagggggtgggggtgccgctgtctctgaggggtgggggtgccgctgtctctgaggggtgggggtgccgctctctctgagggggtgggggtgccgctttctctgagggggtgggggtgccgctctctctgagggggtgggggtgctgctctctccgaggggtggaatgccgctgtctctgaggggtgggggtgccgctctaaattggctccatatcatttgagtttagggttctggtgtttggtttcttcattctttactgcactcagatttaagccttacaaagggaaagcctctggccgtcacacgtaggacgcatgaaggtcactcgtggtgaggctgacatgctcacacattacaacagtagagagggaaaatcctaagacagaggaactccagagatgagtgtctggagcgcttcagttcagctttaaaggccaggacgggccacacgtggctggcggcctcgttccagtggcggcacgtccttgggcgtctctaatgtctgcagctcaagggctggcacttttttaaatataaaaatgggtgttatttttatttttttttgtaaagtgatttttggtcttctgttgacattcggggtgatcctgttctgcgctgtgtacaatgtgagatcggtgcgttctcctgatgttttgccgtggcttggggattgtacacgggaccagctcacgtaatgcattgcctgtaacaatgtaataaaaagcctctttcttttacaaaaaaaaaaaaaaaaacccgggggctctatttgcggggggggggaaaaagaggttcaagggggcctgttctctttgtttcctacccctttttgtaaaggggaaacgggggccccaaggggcgaaatcgaaccgtcggaaaggag

SEQ ID NO: 449228 - DNA, 2620 bp, Homo sapiens
tcggcctgcatcacgcgtgagggggcgcgcggtgctggaagctgccgcacctgcggggagccgagccgccggcgctcgacgcgcgcgctctcgcgagacccgcgggatcacgtgacgcccgggcgcggcgcagctcacgtgacaagcgctgccggccgcggtgtcttcttcgtgccggcgtcgcagtggccgggcctcttgcgtctggtaacgccgctgtctctaacgccagcccttggcgcccgcgccccgccaccgcagcgcccggcagtccgcggcccaaccgccgcccgcgcccccgctctccgcaccgtacccggccgcctcgcgccatggcggcccccggcagcgcccggcgacccctgctgctgctactgctgttgctgctgctcggcctcatgcattgtgcgtcagcagcaatgtttatggtgaaaaatggcaacgggaccgcgtgcataatggccaacttctctgctgccttctcagtgaactacgacaccaagagtggccctaagaacatgacctttgacctgccatcagatgccacagtggtgctcaaccgcagctcctgtggaaaagagaacacttctgaccccagtctcgtgattgcttttggaagaggacatacactcactctcaatttcacgagaaatgcaacacgttacagcgtccagctcatgagttttgtttataacttgtcagacacacaccttttccccaatgcgagctccaaagaaatcaagactgtggaatctataactgacatcagggcagatatagataaaaaatacagatgtgttagtggcacccaggtccacatgaacaacgtgaccgtaacgctccatgatgccaccatccaggcgtacctttccaacagcagcttcagcaggggagagacacgctgtgaacaagacaggccttccccaaccacagcgccccctgcgccacccagcccctcgccctcacccgtgcccaagagcccctctgtggacaagtacaacgtgagcggcaccaacgggacctgcctgctggccagcatggggctgcagctgaacctcacctatgagaggaaggacaacacgacggtgacaaggcttctcaacatcaaccccaacaagacctcggccagcgggagctgcggcgcccacctggtgactctggagctgcacagcgagggcaccaccgtcctgctcttccagttcgggatgaatgcaagttctagccggtttttcctacaaggaatccagttgaatacaattcttcctgacgccagagaccctgcctttaaagctgccaacggctccctgcgagcgctgcaggccacagtcggcaattcctacaagtgcaacgcggaggagcacgtccgtgtcacgaaggcgttttcagtcaatatattcaaagtgtgggtccaggctttcaaggtggaaggtggccagtttggctctgtggaggagtgtctgctggacgagaacagcatgctgatccccatcgctgtgggtggtgccctggcggggctggtcctcatcgtcctcatcgcctacctcgtcggcaggaagaggagtcacgcaggctaccagactatctagcctggtgcacgcaggcacagcagctgcaggggcctctgttcctttctctgggcttagggtcctgtcgaaggggaggcacactttctggcaaacgtttctcaaatctgcttcatccaatgtgaagttcatcttgcagcatttactatgcacaacagagtaactatcgaaatgacggtgttaattttgctaactgggttaaatattttgctaactggttaaacattaatatttaccaaagtaggattttgagggtgggggtgctctctctgagggggtgggggtgccgctgtctctgaggggtgggggtgccgctgtctctgaggggtgggggtgccgctctctctgagggggtgggggtgccgctttctctgagggggtgggggtgccgctctctctgagggggtgggggtgctgctctctccgaggggtggaatgccgctgtctctgaggggtgggggtgccgctctaaattggctccatatcatttgagtttagggttctggtgtttggtttcttcattctttactgcactcagatttaagccttacaaagggaaagcctctggccgtcacacgtaggacgcatgaaggtcactcgtggtgaggctgacatgctcacacattacaacagtagagagggaaaatcctaagacagaggaactccagagatgagtgtctggagcgcttcagttcagctttaaaggccaggacgggccacacgtggctggcggcctcgttccagtggcggcacgtccttgggcgtctctaatgtctgcagctcaagggctggcacttttttaaatataaaaatgggtgttatttttatttttttttgtaaagtgatttttggtcttctgttgacattcggggtgatcctgttctgcgctgtgtacaatgtgagatcggtgcgttctcctgatgttttgccgtggcttggggattgtacacgggaccagctacgaatactgcgtgtaccatgtatcacctgtgttttgggtggtgtgggggggtggggggggggtggggttgggggga

SEQ ID NO: 449229 - DNA, 2664 bp, Homo sapiens
tcggcctgcatcacgcgtgagggggcgcgcggtgctggaagctgccgcacctgcggggagccgagccgccggcgctcgacgcgcgcgctctcgcgagacccgcgggatcacgtgacgcccgggcgcggcgcagctcacgtgacaagcgctgccggccgcggtgtcttcttcgtgccggcgtcgcagtggccgggcctcttgcgtctggtaacgccgctgtctctaacgccagcccttggcgcccgcgccccgccaccgcagcgcccggcagtccgcggcccaaccgccgcccgcgcccccgctctccgcaccgtacccggccgcctcgcgccatggcggcccccggcagcgcccggcgacccctgctgctgctactgctgttgctgctgctcggcctcatgcattgtgcgtcagcagcaatgtttatggtgaaaaatggcaacgggaccgcgtgcataatggccaacttctctgctgccttctcagtgaactacgacaccaagagtggccctaagaacatgacctttgacctgccatcagatgccacagtggtgctcaaccgcagctcctgtggaaaagagaacacttctgaccccagtctcgtgattgcttttggaagaggacatacactcactctcaatttcacgagaaatgcaacacgttacagcgtccagctcatgagttttgtttataacttgtcagacacacaccttttccccaatgcgagctccaaagaaatcaagactgtggaatctataactgacatcagggcagatatagataaaaaatacagatgtgttagtggcacccaggtccacatgaacaacgtgaccgtaacgctccatgatgccaccatccaggcgtacctttccaacagcagcttcagcaggggagagacacgctgtgaacaagacaggccttccccaaccacagcgccccctgcgccacccagcccctcgccctcacccgtgcccaagagcccctctgtggacaagtacaacgtgagcggcaccaacgggacctgcctgctggccagcatggggctgcagctgaacctcacctatgagaggaaggacaacacgacggtgacaaggcttctcaacatcaaccccaacaagacctcggccagcgggagctgcggcgcccacctggtgactctggagctgcacagcgagggcaccaccgtcctgctcttccagttcgggatgaatgcaagttctagccggtttttcctacaaggaatccagttgaatacaattcttcctgacgccagagaccctgcctttaaagctgccaacggctccctgcgagcgctgcaggccacagtcggcaattcctacaagtgcaacgcggaggagcacgtccgtgtcacgaaggcgttttcagtcaatatattcaaagtgtgggtccaggctttcaaggtggaaggtggccagtttggctctgtggaggagtgtctgctggacgagaacagcatgctgatccccatcgctgtgggtggtgccctggcggggctggtcctcatcgtcctcatcgcctacctcgtcggcaggaagaggagtcacgcaggctaccagactatctagcctggtgcacgcaggcacagcagctgcaggggcctctgttcctttctctgggcttagggtcctgtcgaaggggaggcacactttctggcaaacgtttctcaaatctgcttcatccaatgtgaagttcatcttgcagcatttactatgcacaacagagtaactatcgaaatgacggtgttaattttgctaactgggttaaatattttgctaactggttaaacattaatatttaccaaagtaggattttgagggtgggggtgctctctctgagggggtgggggtgccgctgtctctgaggggtgggggtgccgctgtctctgaggggtgggggtgccgctctctctgagggggtgggggtgccgctttctctgagggggtgggggtgccgctctctctgagggggtgggggtgctgctctctccgaggggtggaatgccgctgtctctgaggggtgggggtgccgctctaaattggctccatatcatttgagtttagggttctggtgtttggtttcttcattctttactgcactcagatttaagccttacaaagggaaagcctctggccgtcacacgtaggacgcatgaaggtcactcgtggtgaggctgacatgctcacacattacaacagtagagagggaaaatcctaagacagaggaactccagagatgagtgtctggagcgcttcagttcagctttaaaggccaggacgggccacacgtggctggcggcctcgttccagtggcggcacgtccttgggcgtctctaatgtctgcagctcaagggctggcacttttttaaatataaaaatgggtgttatttttatttttttttgtaaagtgatttttggtcttctgttgacattcggggtgatcctgttctgcgctgtgtacaatgtgagatcggtgcgttctcctgatgtacaaaaaaaaaaaaaaaaaaaaaaaaaaaaaaaaaaaaaaaaaaagaaggggggggggggaaaaaagatctccccgaggggggccaagttaaggcagcgacccgtgtttcgggtaacgagggggtcccctataggggagtcaatataaacaagggag

SEQ ID NO: 449230 - DNA, 2532 bp, Homo sapiens
tcggcctgcatcacgcgtgagggggcgcgcggtgctggaagctgccgcacctgcggggagccgagccgccggcgctcgacgcgcgcgctctcgcgagacccgcgggatcacgtgacgcccgggcgcggcgcagctcacgtgacaagcgctgccggccgcggtgtcttcttcgtgccggcgtcgcagtggccgggcctcttgcgtctggtaacgccgctgtctctaacgccagcccttggcgcccgcgccccgccaccgcagcgcccggcagtccgcggcccaaccgccgcccgcgcccccgctctccgcaccgtacccggccgcctcgcgccatggcggcccccggcagcgcccggcgacccctgctgctgctactgctgttgctgctgctcggcctcatgcattgtgcgtcagcagcaatgtttatggtgaaaaatggcaacgggaccgcgtgcataatggccaacttctctgctgccttctcagtgaactacgacaccaagagtggccctaagaacatgacctttgacctgccatcagatgccacagtggtgctcaaccgcagctcctgtggaaaagagaacacttctgaccccagtctcgtgattgcttttggaagaggacatacactcactctcaatttcacgagaaatgcaacacgttacagcgtccagctcatgagttttgtttataacttgtcagacacacaccttttccccaatgcgagctccaaagaaatcaagactgtggaatctataactgacatcagggcagatatagataaaaaatacagatgtgttagtggcacccaggtccacatgaacaacgtgaccgtaacgctccatgatgccaccatccaggcgtacctttccaacagcagcttcagcaggggagagacacgctgtgaacaagacaggccttccccaaccacagcgccccctgcgccacccagcccctcgccctcacccgtgcccaagagcccctctgtggacaagtacaacgtgagcggcaccaacgggacctgcctgctggccagcatggggctgcagctgaacctcacctatgagaggaaggacaacacgacggtgacaaggcttctcaacatcaaccccaacaagacctcggccagcgggagctgcggcgcccacctggtgactctggagctgcacagcgagggcaccaccgtcctgctcttccagttcgggatgaatgcaagttctagccggtttttcctacaaggaatccagttgaatacaattcttcctgacgccagagaccctgcctttaaagctgccaacggctccctgcgagcgctgcaggccacagtcggcaattcctacaagtgcaacgcggaggagcacgtccgtgtcacgaaggcgttttcagtcaatatattcaaagtgtgggtccaggctttcaaggtggaaggtggccagtttggctctgtggaggagtgtctgctggacgagaacagcatgctgatccccatcgctgtgggtggtgccctggcggggctggtcctcatcgtcctcatcgcctacctcgtcggcaggaagaggagtcacgcaggctaccagactatctagcctggtgcacgcaggcacagcagctgcaggggcctctgttcctttctctgggcttagggtcctgtcgaaggggaggcacactttctggcaaacgtttctcaaatctgcttcatccaatgtgaagttcatcttgcagcatttactatgcacaacagagtaactatcgaaatgacggtgttaattttgctaactgggttaaatattttgctaactggttaaacattaatatttaccaaagtaggattttgagggtgggggtgctctctctgagggggtgggggtgccgctgtctctgaggggtgggggtgccgctgtctctgaggggtgggggtgccgctctctctgagggggtgggggtgccgctttctctgagggggtgggggtgccgctctctctgagggggtgggggtgctgctctctccgaggggtggaatgccgctgtctctgaggggtgggggtgccgctctaaattggctccatatcatttgagtttagggttctggtgtttggtttcttcattctttactgcactcagatttaagccttacaaagggaaagcctctggccgtcacacgtaggacgcatgaaggtcactcgtggtgaggctgacatgctcacacattacaacagtagagagggaaaatcctaagacagaggaactccagagatgagtgtctggagcgcttcagttcagctttaaaggccaggacgggccacacgtggctggcggcctcgttccagtggcggcacgtccttgggcgtctctaatgtctgcagctcaagggctggcacttttttaaatataaaaatgggtgttattaaaagaaagagagcttttggtcatcatggtgacaaggcgaggcatcacgtgacgtgcgctgcggacaactatagatcaggccgtctcaaatgtgggcacgaccgaggacaccagggccgcgctaca

SEQ ID NO: 449231 - DNA, 2305 bp, Homo sapiens
tcggcctgcatcacgcgtgagggggcgcgcggtgctggaagctgccgcacctgcggggagccgagccgccggcgctcgacgcgcgcgctctcgcgagacccgcgggatcacgtgacgcccgggcgcggcgcagctcacgtgacaagcgctgccggccgcggtgtcttcttcgtgccggcgtcgcagtggccgggcctcttgcgtctggtaacgccgctgtctctaacgccagcccttggcgcccgcgccccgccaccgcagcgcccggcagtccgcggcccaaccgccgcccgcgcccccgctctccgcaccgtacccggccgcctcgcgccatggcggcccccggcagcgcccggcgacccctgctgctgctactgctgttgctgctgctcggcctcatgcattgtgcgtcagcagcaatgtttatggtgaaaaatggcaacgggaccgcgtgcataatggccaacttctctgctgccttctcagtgaactacgacaccaagagtggccctaagaacatgacctttgacctgccatcagatgccacagtggtgctcaaccgcagctcctgtggaaaagagaacacttctgaccccagtctcgtgattgcttttggaagaggacatacactcactctcaatttcacgagaaatgcaacacgttacagcgtccagctcatgagttttgtttataacttgtcagacacacaccttttccccaatgcgagctccaaagaaatcaagactgtggaatctataactgacatcagggcagatatagataaaaaatacagatgtgttagtggcacccaggtccacatgaacaacgtgaccgtaacgctccatgatgccaccatccaggcgtacctttccaacagcagcttcagcaggggagagacacgctgtgaacaagacaggccttccccaaccacagcgccccctgcgccacccagcccctcgccctcacccgtgcccaagagcccctctgtggacaagtacaacgtgagcggcaccaacgggacctgcctgctggccagcatggggctgcagctgaacctcacctatgagaggaaggacaacacgacggtgacaaggcttctcaacatcaaccccaacaagacctcggccagcgggagctgcggcgcccacctggtgactctggagctgcacagcgagggcaccaccgtcctgctcttccagttcgggatgaatgcaagttctagccggtttttcctacaaggaatccagttgaatacaattcttcctgacgccagagaccctgcctttaaagctgccaacggctccctgcgagcgctgcaggccacagtcggcaattcctacaagtgcaacgcggaggagcacgtccgtgtcacgaaggcgttttcagtcaatatattcaaagtgtgggtccaggctttcaaggtggaaggtggccagtttggctctgtggaggagtgtctgctggacgagaacagcatgctgatccccatcgctgtgggtggtgccctggcggggctggtcctcatcgtcctcatcgcctacctcgtcggcaggaagaggagtcacgcaggctaccagactatctagcctggtgcacgcaggcacagcagctgcaggggcctctgttcctttctctgggcttagggtcctgtcgaaggggaggcacactttctggcaaacgtttctcaaatctgcttcatccaatgtgaagttcatcttgcagcatttactatgcacaacagagtaactatcgaaatgacggtgttaattttgctaactgggttaaatattttgctaactggttaaacattaatatttaccaaagtaggattttgagggtgggggtgctctctctgagggggtgggggtgccgctgtctctgaggggtgggggtgccgctgtctctgaggggtgggggtgccgctctctctgagggggtgggggtgccgctttctctgagggggtgggggtgccgctctctctgagggggtgggggtgctgctctctccgaggggtggaatgccgctgtctctgaggggtgggggtgccgctctaaattggctccatatcatttgagtttagggttctggtgtttggtttcttcattctttactgcactcagatttaagccttacaaagggaaagcctctggccgtcacacgtaggacgcatgaaggtcactcgtggtgaggctgacatgctcacacattacaacagtagagagggaaaatcctaagacagaggaactccagagatgagtgtctggagcgcttcagttcagcacctttccggtccgtacatcgcat

SEQ ID NO: 449232 - DNA, 1892 bp, Homo sapiens
tcggcctgcatcacgcgtgagggggcgcgcggtgctggaagctgccgcacctgcggggagccgagccgccggcgctcgacgcgcgcgctctcgcgagacccgcgggatcacgtgacgcccgggcgcggcgcagctcacgtgacaagcgctgccggccgcggtgtcttcttcgtgccggcgtcgcagtggccgggcctcttgcgtctggtaacgccgctgtctctaacgccagcccttggcgcccgcgccccgccaccgcagcgcccggcagtccgcggcccaaccgccgcccgcgcccccgctctccgcaccgtacccggccgcctcgcgccatggcggcccccggcagcgcccggcgacccctgctgctgctactgctgttgctgctgctcggcctcatgcattgtgcgtcagcagcaatgtttatggtgaaaaatggcaacgggaccgcgtgcataatggccaacttctctgctgccttctcagtgaactacgacaccaagagtggccctaagaacatgacctttgacctgccatcagatgccacagtggtgctcaaccgcagctcctgtggaaaagagaacacttctgaccccagtctcgtgattgcttttggaagaggacatacactcactctcaatttcacgagaaatgcaacacgttacagcgtccagctcatgagttttgtttataacttgtcagacacacaccttttccccaatgcgagctccaaagaaatcaagactgtggaatctataactgacatcagggcagatatagataaaaaatacagatgtgttagtggcacccaggtccacatgaacaacgtgaccgtaacgctccatgatgccaccatccaggcgtacctttccaacagcagcttcagcaggggagagacacgctgtgaacaagacaggccttccccaaccacagcgccccctgcgccacccagcccctcgccctcacccgtgcccaagagcccctctgtggacaagtacaacgtgagcggcaccaacgggacctgcctgctggccagcatggggctgcagctgaacctcacctatgagaggaaggacaacacgacggtgacaaggcttctcaacatcaaccccaacaagacctcggccagcgggagctgcggcgcccacctggtgactctggagctgcacagcgagggcaccaccgtcctgctcttccagttcgggatgaatgcaagttctagccggtttttcctacaaggaatccagttgaatacaattcttcctgacgccagagaccctgcctttaaagctgccaacggctccctgcgagcgctgcaggccacagtcggcaattcctacaagtgcaacgcggaggagcacgtccgtgtcacgaaggcgttttcagtcaatatattcaaagtgtgggtccaggctttcaaggtggaaggtggccagtttggctctgtggaggagtgtctgctggacgagaacagcatgctgatccccatcgctgtgggtggtgccctggcggggctggtcctcatcgtcctcatcgcctacctcgtcggcaggaagaggagtcacgcaggctaccagactatctagcctggtgcacgcaggcacagcagctgcaggggcctctgttcctttctctgggcttagggtcctgtcgaaggggaggcacactttggctggcacttttttaaatataaaaatgggtgttatttttatttttttttgtaaagtgatttttggtcttctgttgacattcggggtgatcctgttctgcgctgtgtacaatgtgagatcggtgcgttctcctgatgttttgccgtggcttggggattgtacacgggaccagctcacgtaatgcattgcctgtaacaatgtaataaaaagcctctttctttt

SEQ ID NO: 449233 - DNA, 1511 bp, Homo sapiens
tcggcctgcatcacgcgtgagggggcgcgcggtgctggaagctgccgcacctgcggggagccgagccgccggcgctcgacgcgcgcgctctcgcgagacccgcgggatcacgtgacgcccgggcgcggcgcagctcacgtgacaagcgctgccggccgcggtgtcttcttcgtgccggcgtcgcagtggccgggcctcttgcgtctggtaacgccgctgtctctaacgccagcccttggcgcccgcgccccgccaccgcagcgcccggcagtccgcggcccaaccgccgcccgcgcccccgctctccgcaccgtacccggccgcctcgcgccatggcggcccccggcagcgcccggcgacccctgctgctgctactgctgttgctgctgctcggcctcatgcattgtgcgtcagcagcaatgtttatggtgaaaaatggcaacgggaccgcgtgcataatggccaacttctctgctgccttctcagtgaactacgacaccaagagtggccctaagaacatgacctttgacctgccatcagatgccacagtggtgctcaaccgcagctcctgtggaaaagagaacacttctgaccccagtctcgtgattgcttttggaagaggacatacactcactctcaatttcacgagaaatgcaacacgttacagcgtccagctcatgagttttgtttataacttgtcagacacacaccttttccccaatgcgagctccaaagaaatcaagactgtggaatctataactgacatcagggcagatatagataaaaaatacagatgtgttagtggcacccaggtccacatgaacaacgtgaccgtaacgctccatgatgccaccatccaggcgtacctttccaacagcagcttcagcaggggagagacacgctgtgaacaagacaggccttccccaaccacagcgccccctgcgccacccagcccctcgccctcacccgtgcccaagagcccctctgtggacaagtacaacgtgagcggcaccaacgggacctgcctgctggccagcatggggctgcagctgaacctcacctatgagaggaaggacaacacgacggtgacaaggcttctcaacatcaaccccaacaagacctcggccagcgggagctgcggcgcccacctggtgactctggagctgcacagcgagggcaccaccgtcctgctcttccagttcgggatgaatgcaagttctagccggtttttcctacaaggaatccagttgaatacaattcttcctgacgccagagaccctgcctttaaagctgccaacggctccctgcgagcgctgcaggccacagtcggcaattcctacaagtgcaacgcggaggagcacgtccgtgtcacgaaggcgttttcagtcaatatattcaaagtgtgggtccaggctttcaaggtggaaggtggccagtttggctctgtggaggagtgtctgctgacgagacagatacagatcccatgccgccgggatcctcagagtcacctc

SEQ ID NO: 449234 - DNA, 505 bp, Homo sapiens
tcggcctgcatcacgcgtgagggggcgcgcggtgctggaagctgccgcacctgcggggagccgagccgccggcgctcgacgcgcgcgctctcgcgagacccgcgggatcacgtgacgcccgggcgcggcgcagctcacgtgacaagcgctgccggccgcggtgtcttcttcgtgccggcgtcgcagtggccgggcctcttgcgtctggtaacgccgctgtctctaacgccagcccttggcgcccgcgccccgccaccgcagcgcccggcagtccgcggcccaaccgccgcccgcgcccccgctctccgcaccgtacccggccgcctcgcgccatggcggcccccggcagcgcccggcgacccctgctgctgctactgctgttgctgctgctcggtctcatgcattgtgcgtcagcagcaatgtgttatggcgatgaactacgacaccaagagtggccctaagaacatgaactttgacctgtcattagatgccacagggtgctccc

SEQ ID NO: 449235 - DNA, 206 bp, Homo sapiens
acccaatgaccattcacgtttgatgataaatgtgtgaatctactggggttaaagatcatctttctatgaatctgctccgtgattaaagatcatttttctttttaagaatgcaagttctagccggtttttcctacaaggaatccagttgaatacaattcttcctgacgccagaggtgagaacccacaatctctgcgagccccgcccc

SEQ ID NO: 449236 - DNA, 399 bp, Homo sapiens
tcctggtggtgctgctgtcctggtggtgtgcactgctgttgctgctgctcgcctcatgcattgtgcgtcagcagcaatgtttatggtgaaaaatggcaacgggaccgcgtgcataatggccaacttctctgctgccttctcagtgaactacgacaccaagagtggccctaagaacatgacctttgacctgccatcagatgccacagtggtgctcaaccgcagctcctgtggaaaagagaacacttctgaccccagtctcgtgattgcttttggaagaggacatacactcactctcaatttcacgagaaatgcaacacgttacagcaccagcacgaattcccttagcaccagcacgaattcccttagcaccagcacaatagcaccagcacgaattccctt

SEQ ID NO: 449237 - DNA, 2248 bp, Homo sapiens
tcctggtggtgctgctgtcctggtggtgtgcactgctgttgctgctgctcgcctcatgcattgtgcgtcagcagcaatgtttatggtgaaaaatggcaacgggaccgcgtgcataatggccaacttctctgctgccttctcagtgaactacgacaccaagagtggccctaagaacatgacctttgacctgccatcagatgccacagtggtgctcaaccgcagctcctgtggaaaagagaacacttctgaccccagtctcgtgattgcttttggaagaggacatacactcactctcaatttcacgagaaatgcaacacgttacagcgtccagctcatgagttttgtttataacttgtcagacacacaccttttccccaatgcgagctccaaagaaatcaagactgtggaatctataactgacatcagggcagatatagataaaaaatacagatgtgttagtggcacccaggtccacatgaacaacgtgaccgtaacgctccatgatgccaccatccaggcgtacctttccaacagcagcttcagcaggggagagacacgctgtgaacaagacaggccttccccaaccacagcgccccctgcgccacccagcccctcgccctcacccgtgcccaagagcccctctgtggacaagtacaacgtgagcggcaccaacgggacctgcctgctggccagcatggggctgcagctgaacctcacctatgagaggaaggacaacacgacggtgacaaggcttctcaacatcaaccccaacaagacctcggccagcgggagctgcggcgcccacctggtgactctggagctgcacagcgagggcaccaccgtcctgctcttccagttcgggatgaatgcaagttctagccggtttttcctacaaggaatccagttgaatacaattcttcctgacgccagagaccctgcctttaaagctgccaacggctccctgcgagcgctgcaggccacagtcggcaattcctacaagtgcaacgcggaggagcacgtccgtgtcacgaaggcgttttcagtcaatatattcaaagtgtgggtccaggctttcaaggtggaaggtggccagtttggctctgtggaggagtgtctgctggacgagaacagcatgctgatccccatcgctgtgggtggtgccctggcggggctggtcctcatcgtcctcatcgcctacctcgtcggcaggaagaggagtcacgcaggctaccagactatctagcctggtgcacgcaggcacagcagctgcaggggcctctgttcctttctctgggcttagggtcctgtcgaaggggaggcacactttctggcaaacgtttctcaaatctgcttcatccaatgtgaagttcatcttgcagcatttactatgcacaacagagtaactatcgaaatgacggtgttaattttgctaactgggttaaatattttgctaactggttaaacattaatatttaccaaagtaggattttgagggtgggggtgctctctctgagggggtgggggtgccgctgtctctgaggggtgggggtgccgctgtctctgaggggtgggggtgccgctctctctgagggggtgggggtgccgctttctctgagggggtgggggtgccgctctctctgagggggtgggggtgctgctctctccgaggggtggaatgccgctgtctctgaggggtgggggtgccgctctaaattggctccatatcatttgagtttagggttctggtgtttggtttcttcattctttactgcactcagatttaagccttacaaagggaaagcctctggccgtcacacgtaggacgcatgaaggtcactcgtggtgaggctgacatgctcacacattacaacagtagagagggaaaatcctaagacagaggaactccagagatgagtgtctggagcgcttcagttcagctttaaaggccaggacgggccacacgtggctggcggcctcgttccagtggcggcacgtccttgggcgtctctaatgtctgcagctcaagggctggcacttttttaaatataaaaatgggtgttatttttatttttttttgtaaagtgatttttggtcttctgttgacattcggggtgatcctgttctgcgctgtgtacaatgtgagatcggtgcgttctcctgatgttttgccgtggcttggggattgtacacgggaccagctcacgtaatgcattgcctgtaacaatgtaataaaaagcctctttctttt

SEQ ID NO: 449238 - DNA, 1684 bp, Homo sapiens
tgtgtaaggcatgcagcttgatgctgaggtgattaaggatccccttgccaagacctcacccgtgcccaagagcccctctgtggacaagtacaacgtgagcggcaccaacgggacctgcctgctggccagcatggggctgcagctgaacctcacctatgagaggaaggacaacacgacggtgacaaggcttctcaacatcaaccccaacaagacctcggccagcgggagctgcggcgcccacctggtgactctggagctgcacagcgagggcaccaccgtcctgctcttccagttcgggatgaatgcaagttctagccggtttttcctacaaggaatccagttgaatacaattcttcctgacgccagagaccctgcctttaaagctgccaacggctccctgcgagcgctgcaggccacagtcggcaattcctacaagtgcaacgcggaggagcacgtccgtgtcacgaaggcgttttcagtcaatatattcaaagtgtgggtccaggctttcaaggtggaaggtggccagtttggctctgtggaggagtgtctgctggacgagaacagcatgctgatccccatcgctgtgggtggtgccctggcggggctggtcctcatcgtcctcatcgcctacctcgtcggcaggaagaggagtcacgcaggctaccagactatctagcctggtgcacgcaggcacagcagctgcaggggcctctgttcctttctctgggcttagggtcctgtcgaaggggaggcacactttctggcaaacgtttctcaaatctgcttcatccaatgtgaagttcatcttgcagcatttactatgcacaacagagtaactatcgaaatgacggtgttaattttgctaactgggttaaatattttgctaactggttaaacattaatatttaccaaagtaggattttgagggtgggggtgctctctctgagggggtgggggtgccgctgtctctgaggggtgggggtgccgctgtctctgaggggtgggggtgccgctctctctgagggggtgggggtgccgctttctctgagggggtgggggtgccgctctctctgagggggtgggggtgctgctctctccgaggggtggaatgccgctgtctctgaggggtgggggtgccgctctaaattggctccatatcatttgagtttagggttctggtgtttggtttcttcattctttactgcactcagatttaagccttacaaagggaaagcctctggccgtcacacgtaggacgcatgaaggtcactcgtggtgaggctgacatgctcacacattacaacagtagagagggaaaatcctaagacagaggaactccagagatgagtgtctggagcgcttcagttcagctttaaaggccaggacgggccacacgtggctggcggcctcgttccagtggcggcacgtccttgggcgtctctaatgtctgcagctcaagggctggcacttttttaaatataaaaatgggtgttatttttatttttttttgtaaagtgatttttggtcttctgttgacattcggggtgatcctgttctgcgctgtgtacaatgtgagatcggtgcgttctcctgatgttttgccgtggcttggggattgtacacgggaccagctcacgtaatgcattgcctgtaacaatgtaataaaaagcctctttctttt

SEQ ID NO: 449239 - DNA, 2015 bp, Homo sapiens
tcggcctgcatcacgcgtgagggggcgcgcggtgctggaagctgccgcacctgcggggagccgagccgccggcgctcgacgcgcgcgctctcgcgagacccgcgggatcacgtgacgcccgggcgcggcgcagctcacgtgacaagcgctgccggccgcggtgtcttcttcgtgccggcgtcgcagtggccgggcctcttgcgtctggtaacgccgctgtctctaacgccagcccttggcgcccgcgccccgccaccgcagcgcccggcagtccgcggcccaaccgccgcccgcgcccccgctctccgcaccgtacccggccgcctcgcgccatggcggcccccggcagcgcccggcgacccctgctgctgctactgctgttgctgctgctcggcctcatgcattgtgcgtcagcagcaatgtttatggtgaaaaatggcaacgggaccgcgtgcataatggccaacttctctgctgccttctcagtgaactacgacaccaagagtggccctaagaacatgacctttgacctgccatcagatgccacagtggtgctcaaccgcagctcctgtggaaaagagaacacttctgaccccagtctcgtgattgcttttggaagaggacatacactcactctcaatttcacgagaaatgcaacacgttacagcgtccagctcatgagttttgtttataacttgtcagacacacaccttttccccaatgcgagctccaaagaaatcaagactgtggaatctataactgacatcagggcagatatagataaaaaatacagatgtgttagtggcacccaggtccacatgaacaacgtgaccgtaacgctccatgatgccaccatccaggcgtacctttccaacagcagcttcagcaggggagagacacgctgtgaacaagacaggccttccccaaccacagcgccccctgcgccacccagcccctcgccctcacccgtgcccaagagcccctctgtggacaagtacaacgtgagcggcaccaacgggacctgcctgctggccagcatggggctgcagctgaacctctgggcttagggtcctgtcgaaggggaggcacactttctggcaaacgtttctcaaatctgcttcatccaatgtgaagttcatcttgcagcatttactatgcacaacagagtaactatcgaaatgacggtgttaattttgctaactgggttaaatattttgctaactggttaaacattaatatttaccaaagtaggattttgagggtgggggtgctctctctgagggggtgggggtgccgctgtctctgaggggtgggggtgccgctgtctctgaggggtgggggtgccgctctctctgagggggtgggggtgccgctttctctgagggggtgggggtgccgctctctctgagggggtgggggtgctgctctctccgaggggtggaatgccgctgtctctgaggggtgggggtgccgctctaaattggctccatatcatttgagtttagggttctggtgtttggtttcttcattctttactgcactcagatttaagccttacaaagggaaagcctctggccgtcacacgtaggacgcatgaaggtcactcgtggtgaggctgacatgctcacacattacaacagtagagagggaaaatcctaagacagaggaactccagagatgagtgtctggagcgcttcagttcagctttaaaggccaggacgggccacacgtggctggcggcctcgttccagtggcggcacgtccttgggcgtctctaatgtctgcagctcaagggctggcacttttttaaatataaaaatgggtgttatttttatttttttttgtaaagtgatttttggtcttctgttgacattcggggtgatcctgttctgcgctgtgtacaatgtgagatcggtgcgttctcctgatgttttgccgtggcttggggattgtacacgggaccagctcacgtaatgcattgcctgtaacaatgtaataaaaagcctctttctttt

SEQ ID NO: 449240 - DNA, 2830 bp, Homo sapiens
tcggcctgcatcacgcgtgagggggcgcgcggtgctggaagctgccgcacctgcggggagccgagccgccggcgctcgacgcgcgcgctctcgcgagacccgcgggatcacgtgacgcccgggcgcggcgcagctcacgtgacaagcgctgccggccgcggtgtcttcttcgtgccggcgtcgcagtggccgggcctcttgcgtctggtaacgccgctgtctctaacgccagcccttggcgcccgcgccccgccaccgcagcgcccggcagtccgcggcccaaccgccgcccgcgcccccgctctccgcaccgtacccggccgcctcgcgccatggcggcccccggcagcgcccggcgacccctgctgctgctactgctgttgctgctgctcggcctcatgcattgtgcgtcagcagcaatgtttatggtgaaaaatggcaacgggaccgcgtgcataatggccaacttctctgctgccttctcagtgaactacgacaccaagagtggccctaagaacatgacctttgacctgccatcagatgccacagtggtgctcaaccgcagctcctgtggaaaagagaacacttctgaccccagtctcgtgattgcttttggaagaggacatacactcactctcaatttcacgagaaatgcaacacgttacagcgtccagctcatgagttttgtttataacttgtcagacacacaccttttccccaatgcgagctccaaagaaatcaagactgtggaatctataactgacatcagggcagatatagataaaaaatacagatgtgttagtggcacccaggtccacatgaacaacgtgaccgtaacgctccatgatgccaccatccaggcgtacctttccaacagcagcttcagcaggggagagacacgctgtgaacaagacaggccttccccaaccacagcgccccctgcgccacccagcccctcgccctcacccgtgcccaagagcccctctgtggacaagtacaacgtgagcggcaccaacgggacctgcctgctggccagcatggggctgcagctgaacctcacctatgagaggaaggacaacacgacggtgacaaggcttctcaacatcaaccccaacaagacctcggccagcgggagctgcggcgcccacctggtgactctggagctgcacagcgagggcaccaccgtcctgctcttccagttcgggatgaatgcaagttctagccggtttttcctacaaggaatccagttgaatacaattcttcctgacgccagagaccctgcctttaaagctgccaacggctccctgcgagcgctgcaggccacagtcggcaattcctacaagtgcaacgcggaggagcacgtccgtgtcacgaaggcgttttcagtcaatatattcaaagtgtgggtccaggctttcaaggtggaaggtggccagtttggctctgtggaggagtgtctgctggacgagaacagcatgctgatccccatcgctgtgggtggtgccctggcggggctggtcctcatcgtcctcatcgcctacctcgtcggcaggaagaggagtcacgcaggctaccagactatctagcctggtgcacgcaggcacagcagctgcaggggcctctgttcctttctctgggcttagggtcctgtcgaaggggaggcacactttctggcaaacgtttctcaaatctgcttcatccaatgtgaagttcatcttgcagcatttactatgcacaacagagtaactatcgaaatgacggtgttaattttgctaactgggttaaatattttgctaactggttaaacattaatatttaccaaagtaggattttgagggtgggggtgctctctctgagggggtgggggtgccgctgtctctgaggggtgggggtgccgctgtctctgaggggtgggggtgccgctctctctgagggggtgggggtgccgctttctctgagggggtgggggtgccgctctctctgagggggtgggggtgctgctctctccgaggggtggaatgccgctgtctctgaggggtgggggtgccgctctaaattggctccatatcatttgagtttagggttctggtgtttggtttcttcattctttactgcactcagatttaagccttacaaagggaaagcctctggccgtcacacgtaggacgcatgaaggtcactcgtggtgaggctgacatgctcacacattacaacagtagagagggaaaatcctaagacagaggaactccagagatgagtgtctggagcgcttcagttcagctttaaaggccaggacgggccacacgtggctggcggcctcgttccagtggcggcacgtccttgggcgtctctaatgtctgcagctcaagggctggcacttttttaaatataaaaatgggtgttatttttatttttttttgtaaagtgatttttggtcttctgttgacattcggggtgatcctgttctgcgctgtgtacaatgtgagatcggtgcgttctcctgatgttttgccgtggcttggggattgtacacgggaccagctcacgtaatgcattgcctgtaacaatgtaataaaaagcctctttcttttggggtgggccttgtccttctgtcagctaaaatgggagctcatgagagaaggacgtcagggaaacggggttgagggtggtctcggtgcagagagaagggtgtcagggaaacggggggtgagggtggtcttggtgccagacgtagggaatggtgttgggagtggcccgagtgcctggcacagttgtctggttcattcatgtaacatgataatttttaaatcattaaaaaaattacctttca

SEQ ID NO: 449241 - DNA, 2644 bp, Homo sapiens
tcggcctgcatcacgcgtgagggggcgcgcggtgctggaagctgccgcacctgcggggagccgagccgccggcgctcgacgcgcgcgctctcgcgagacccgcgggatcacgtgacgcccgggcgcggcgcagctcacgtgacaagcgctgccggccgcggtgtcttcttcgtgccggcgtcgcagtggccgggcctcttgcgtctggtaacgccgctgtctctaacgccagcccttggcgcccgcgccccgccaccgcagcgcccggcagtccgcggcccaaccgccgcccgcgcccccgctctccgcaccgtacccggccgcctcgcgccatggcggcccccggcagcgcccggcgacccctgctgctgctactgctgttgctgctgctcggcctcatgcattgtgcgtcagcagcaatgtttatggtgaaaaatggcaacgggaccgcgtgcataatggccaacttctctgctgccttctcagtgaactacgacaccaagagtggccctaagaacatgacctttgacctgccatcagatgccacagtggtgctcaaccgcagctcctgtggaaaagagaacacttctgaccccagtctcgtgattgcttttggaagaggacatacactcactctcaatttcacgagaaatgcaacacgttacagcgtccagctcatgagttttgtttataacttgtcagacacacaccttttccccaatgcgagctccaaagaaatcaagactgtggaatctataactgacatcagggcagatatagataaaaaatacagatgtgttagtggcacccaggtccacatgaacaacgtgaccgtaacgctccatgatgccaccatccaggcgtacctttccaacagcagcttcagcaggggagagacacgctgtgaacaagacaggccttccccaaccacagcgccccctgcgccacccagcccctcgccctcacccgtgcccaagagcccctctgtggacaagtacaacgtgagcggcaccaacgggacctgcctgctggccagcatggggctgcagctgaacctcacctatgagaggaaggacaacacgacggtgacaaggcttctcaacatcaaccccaacaagacctcggccagcgggagctgcggcgcccacctggtgactctggagctgcacagcgagggcaccaccgtcctgctcttccagttcgggatgaatgcaagttctagccggtttttcctacaaggaatccagttgaatacaattcttcctgacgccagagaccctgcctttaaagctgccaacggctccctgcgagcgctgcaggccacagtcggcaattcctacaagtgcaacgcggaggagcacgtccgtgtcacgaaggcgttttcagtcaatatattcaaagtgtgggtccaggctttcaaggtggaaggtggccagtttggctctgtggaggagtgtctgctggacgagaacagcatgctgatccccatcgctgtgggtggtgccctggcggggctggtcctcatcgtcctcatcgcctacctcgtcggcaggaagaggagtcacgcaggctaccagactatctagcctggtgcacgcaggcacagcagctgcaggggcctctgttcctttctctgggcttagggtcctgtcgaaggggaggcacactttctggcaaacgtttctcaaatctgcttcatccaatgtgaagttcatcttgcagcatttactatgcacaacagagtaactatcgaaatgacggtgttaattttgctaactgggttaaatattttgctaactggttaaacattaatatttaccaaagtaggattttgagggtgggggtgctctctctgagggggtgggggtgccgctgtctctgaggggtgggggtgccgctgtctctgaggggtgggggtgccgctctctctgagggggtgggggtgccgctttctctgagggggtgggggtgccgctctctctgagggggtgggggtgctgctctctccgaggggtggaatgccgctgtctctgaggggtgggggtgccgctctaaattggctccatatcatttgagtttagggttctggtgtttggtttcttcattctttactgcactcagatttaagccttacaaagggaaagcctctggccgtcacacgtaggacgcatgaaggtcactcgtggtgaggctgacatgctcacacattacaacagtagagagggaaaatcctaagacagaggaactccagagatgagtgtctggagcgcttcagttcagctttaaaggccaggacgggccacacgtggctggcggcctcgttccagtggcggcacgtccttgggcgtctctaatgtctgcagctcaagggctggcacttttttaaatataaaaatgggtgttatttttatttttttttgtaaagtgatttttggtcttctgttgacattcggggtgatcctgttctgcgctgtgtacaatgtgagatcggtgcgttctcctgatgttttgccgtggcttggggattgtacacgggaccagctcacgtaatgcattgcctgtaacaatgtaataaaaagcctctttcttttaaaaaaccctggggggggcccgtccccatttgccctatggggcggtttctccc

SEQ ID NO: 449242 - DNA, 2655 bp, Homo sapiens
tcggcctgcatcacgcgtgagggggcgcgcggtgctggaagctgccgcacctgcggggagccgagccgccggcgctcgacgcgcgcgctctcgcgagacccgcgggatcacgtgacgcccgggcgcggcgcagctcacgtgacaagcgctgccggccgcggtgtcttcttcgtgccggcgtcgcagtggccgggcctcttgcgtctggtaacgccgctgtctctaacgccagcccttggcgcccgcgccccgccaccgcagcgcccggcagtccgcggcccaaccgccgcccgcgcccccgctctccgcaccgtacccggccgcctcgcgccatggcggcccccggcagcgcccggcgacccctgctgctgctactgctgttgctgctgctcggcctcatgcattgtgcgtcagcagcaatgtttatggtgaaaaatggcaacgggaccgcgtgcataatggccaacttctctgctgccttctcagtgaactacgacaccaagagtggccctaagaacatgacctttgacctgccatcagatgccacagtggtgctcaaccgcagctcctgtggaaaagagaacacttctgaccccagtctcgtgattgcttttggaagaggacatacactcactctcaatttcacgagaaatgcaacacgttacagcgtccagctcatgagttttgtttataacttgtcagacacacaccttttccccaatgcgagctccaaagaaatcaagactgtggaatctataactgacatcagggcagatatagataaaaaatacagatgtgttagtggcacccaggtccacatgaacaacgtgaccgtaacgctccatgatgccaccatccaggcgtacctttccaacagcagcttcagcaggggagagacacgctgtgaacaagacaggccttccccaaccacagcgccccctgcgccacccagcccctcgccctcacccgtgcccaagagcccctctgtggacaagtacaacgtgagcggcaccaacgggacctgcctgctggccagcatggggctgcagctgaacctcacctatgagaggaaggacaacacgacggtgacaaggcttctcaacatcaaccccaacaagacctcggccagcgggagctgcggcgcccacctggtgactctggagctgcacagcgagggcaccaccgtcctgctcttccagttcgggatgaatgcaagttctagccggtttttcctacaaggaatccagttgaatacaattcttcctgacgccagagaccctgcctttaaagctgccaacggctccctgcgagcgctgcaggccacagtcggcaattcctacaagtgcaacgcggaggagcacgtccgtgtcacgaaggcgttttcagtcaatatattcaaagtgtgggtccaggctttcaaggtggaaggtggccagtttggctctgtggaggagtgtctgctggacgagaacagcatgctgatccccatcgctgtgggtggtgccctggcggggctggtcctcatcgtcctcatcgcctacctcgtcggcaggaagaggagtcacgcaggctaccagactatctagcctggtgcacgcaggcacagcagctgcaggggcctctgttcctttctctgggcttagggtcctgtcgaaggggaggcacactttctggcaaacgtttctcaaatctgcttcatccaatgtgaagttcatcttgcagcatttactatgcacaacagagtaactatcgaaatgacggtgttaattttgctaactgggttaaatattttgctaactggttaaacattaatatttaccaaagtaggattttgagggtgggggtgctctctctgagggggtgggggtgccgctgtctctgaggggtgggggtgccgctgtctctgaggggtgggggtgccgctctctctgagggggtgggggtgccgctttctctgagggggtgggggtgccgctctctctgagggggtgggggtgctgctctctccgaggggtggaatgccgctgtctctgaggggtgggggtgccgctctaaattggctccatatcatttgagtttagggttctggtgtttggtttcttcattctttactgcactcagatttaagccttacaaagggaaagcctctggccgtcacacgtaggacgcatgaaggtcactcgtggtgaggctgacatgctcacacattacaacagtagagagggaaaatcctaagacagaggaactccagagatgagtgtctggagcgcttcagttcagctttaaaggccaggacgggccacacgtggctggcggcctcgttccagtggcggcacgtccttgggcgtctctaatgtctgcagctcaagggctggcacttttttaaatataaaaatgggtgttatttttatttttttttgtaaagtgatttttggtcttctgttgacattcggggtgatcctgttctgcgctgtgtacaatgtgagatcggtgcgttctcctgatgttttgccgtggcttggggattgtacacgggaccagctcacgtaatgcattgcctgtaacaatgtaataaaaagcctctttcttttaaaattaaacttgagcaagtttttgcatgcggccggaatttgagcttactgggccatttgccct

SEQ ID NO: 449243 - DNA, 3050 bp, Homo sapiens
tcggcctgcatcacgcgtgagggggcgcgcggtgctggaagctgccgcacctgcggggagccgagccgccggcgctcgacgcgcgcgctctcgcgagacccgcgggatcacgtgacgcccgggcgcggcgcagctcacgtgacaagcgctgccggccgcggtgtcttcttcgtgccggcgtcgcagtggccgggcctcttgcgtctggtaacgccgctgtctctaacgccagcccttggcgcccgcgccccgccaccgcagcgcccggcagtccgcggcccaaccgccgcccgcgcccccgctctccgcaccgtacccggccgcctcgcgccatggcggcccccggcagcgcccggcgacccctgctgctgctactgctgttgctgctgctcggcctcatgcattgtgcgtcagcagcaatgtttatggtgaaaaatggcaacgggaccgcgtgcataatggccaacttctctgctgccttctcagtgaactacgacaccaagagtggccctaagaacatgacctttgacctgccatcagatgccacagtggtgctcaaccgcagctcctgtggaaaagagaacacttctgaccccagtctcgtgattgcttttggaagaggacatacactcactctcaatttcacgagaaatgcaacacgttacagcgtccagctcatgagttttgtttataacttgtcagacacacaccttttccccaatgcgagctccaaagaaatcaagactgtggaatctataactgacatcagggcagatatagataaaaaatacagatgtgttagtggcacccaggtccacatgaacaacgtgaccgtaacgctccatgatgccaccatccaggcgtacctttccaacagcagcttcagcaggggagagacacgctgtgaacaagacaggccttccccaaccacagcgccccctgcgccacccagcccctcgccctcacccgtgcccaagagcccctctgtggacaagtacaacgtgagcggcaccaacgggacctgcctgctggccagcatggggctgcagctgaacctcacctatgagaggaaggacaacacgacggtgacaaggcttctcaacatcaaccccaacaagacctcggccagcgggagctgcggcgcccacctggtgactctggagctgcacagcgagggcaccaccgtcctgctcttccagttcgggatgaatgcaagttctagccggtttttcctacaaggaatccagttgaatacaattcttcctgacgccagagaccctgcctttaaagctgccaacggctccctgcgagcgctgcaggccacagtcggcaattcctacaagtgcaacgcggaggagcacgtccgtgtcacgaaggcgttttcagtcaatatattcaaagtgtgggtccaggctttcaaggtggaaggtggccagtttggctctgtggaggagtgtctgctggacgagaacagcatgctgatccccatcgctgtgggtggtgccctggcggggctggtcctcatcgtcctcatcgcctacctcgtcggcaggaagaggagtcacgcaggctaccagactatctagcctggtgcacgcaggcacagcagctgcaggggcctctgttcctttctctgggcttagggtcctgtcgaaggggaggcacactttctggcaaacgtttctcaaatctgcttcatccaatgtgaagttcatcttgcagcatttactatgcacaacagagtaactatcgaaatgacggtgttaattttgctaactgggttaaatattttgctaactggttaaacattaatatttaccaaagtaggattttgagggtgggggtgctctctctgagggggtgggggtgccgctgtctctgaggggtgggggtgccgctgtctctgaggggtgggggtgccgctctctctgagggggtgggggtgccgctttctctgagggggtgggggtgccgctctctctgagggggtgggggtgctgctctctccgaggggtggaatgccgctgtctctgaggggtgggggtgccgctctaaattggctccatatcatttgagtttagggttctggtgtttggtttcttcattctttactgcactcagatttaagccttacaaagggaaagcctctggccgtcacacgtaggacgcatgaaggtcactcgtggtgaggctgacatgctcacacattacaacagtagagagggaaaatcctaagacagaggaactccagagatgagtgtctggagcgcttcagttcagctttaaaggccaggacgggccacacgtggctggcggcctcgttccagtggcggcacgtccttgggcgtctctaatgtctgcagctcaagggctggcacttttttaaatataaaaatgggtgttatattcggggtgatcctgttctgcgctgtgtacaatgtgagatcggtgcgttctcctgatgttttgccgtggcttggggattgtacacgggaccagctcacgtaatgcattgcctgtaacaatgtaataaaaagcctctttcttttggggtgggccttgtccttctgtcagctaaaatgggagctcatgagagaaggacgtcagggaaacggggttgagggtggtctcggtgcagagagaagggtgtcagggaaacggggggtgagggtggtcttggtgccagacgtagggaatggtgttgggagtggcccgagtgcctggcacagttgtctggttcattcatgtaacatgataatttttaaatcattaaaaaaattacctttcatacagataccatggaatactatgcagccataaagaggtatgagatcttgtcccctgcagggacacggatagagctggaagccattattctcagcaaactaacacaggagcagaaaaccagacaccacttgttctcacttgtaagtgggagcttctgatgagaacacatggacacaaggaggggaacatcacacactggggcccgttgggtcgggggcagggagagcatcaggaagaatagctaagggatgctggcttcatac

SEQ ID NO: 449244 - DNA, 2471 bp, Homo sapiens
tcggcctgcatcacgcgtgagggggcgcgcggtgctggaagctgccgcacctgcggggagccgagccgccggcgctcgacgcgcgcgctctcgcgagacccgcgggatcacgtgacgcccgggcgcggcgcagctcacgtgacaagcgctgccggccgcggtgtcttcttcgtgccggcgtcgcagtggccgggcctcttgcgtctggtaacgccgctgtctctaacgccagcccttggcgcccgcgccccgccaccgcagcgcccggcagtccgcggcccaaccgccgcccgcgcccccgctctccgcaccgtacccggccgcctcgcgccatggcggcccccggcagcgcccggcgacccctgctgctgctactgctgttgctgctgctcggcctcatgcattgtgcgtcagcagcaatgtttatggtgaaaaatggcaacgggaccgcgtgcataatggccaacttctctgctgccttctcagtgaactacgacaccaagagtggccctaagaacatgacctttgacctgccatcagatgccacagtggtgctcaaccgcagctcctgtggaaaagagaacacttctgaccccagtctcgtgattgcttttggaagaggacatacactcactctcaatttcacgagaaatgcaacacgttacagcgtccagctcatgagttttgtttataacttgtcagacacacaccttttccccaatgcgagctccaaagaaatcaagactgtggaatctataactgacatcagggcagatatagataaaaaatacagatgtgttagtggcacccaggtccacatgaacaacgtgaccgtaacgctccatgatgccaccatccaggcgtacctttccaacagcagcttcagcaggggagagacacgctgtgaacaagacaggccttccccaaccacagcgccccctgcgccacccagcccctcgccctcacccgtgcccaagagcccctctgtggacaagtacaacgtgagcggcaccaacgggacctgcctgctggccagcatggggctgcagctgaacctcacctatgagaggaaggacaacacgacggtgacaaggcttctcaacatcaaccccaacaagacctcggccagcgggagctgcggcgcccacctggtgactctggagctgcacagcgagggcaccaccgtcctgctcttccagttcgggatgaatgcaagttctagccggtttttcctacaaggaatccagttgaatacaattcttcctgacgccagagaccctgcctttaaagctgccaacggctccctgcgagcgctgcaggccacagtcggcaattcctacaagtgcaacgcggaggagcacgtccgtgtcacgaaggcgttttcagtcaatatattcaaagtgtgggtccaggctttcaaggtggaaggtggccagtttggctctgtggaggagtgtctgctggacgagaacagcatgctgatccccatcgctgtgggtggtgccctggcggggctggtcctcatcgtcctcatcgcctacctcgtcggcaggaagaggagtcacgcaggctaccagactatctagcctggtgcacgcaggcacagcagctgcaggggcctctgttcctttctctgggcttagggtcctgtcgaaggggaggcacactttctggcaaacgtttctcaaatctgcttcatccaatgtgaagttcatcttgcagcatttactatgcacaacagagtaactatcgaaatgacggtgttaattttgctaactgggttaaatattttgctaactggttaaacattaatatttaccaaagtaggattttgagggtgggggtgctctctctgagggggtgggggtgccgctgtctctgaggggtgggggtgccgctgtctctgaggggtgggggtgccgctctctctgagggggtgggggtgccgctttctctgagggggtgggggtgccgctctctctgagggggtgggggtgctgctctctccgaggggtggaatgccgctgtctctgaggggtgggggtgccgctctaaattggctccatatcatttgagtttagggttctggtgtttggtttcttcattctttactgcactcagatttaagccttacaaagggaaagcctctggccgtcacacgtaggacgcatgaaggtcactcgtggtgaggctgacatgctcacacattacaacagtagagagggaaaatcctaagacagaggaactccagagatgagtgtctggagcgcttcagttcagctttaaaggccaggacgggccacacgtggctggcggcctcgttccagtggcggcacgtccttgggcgtctctaatgtctgcagctcaagggctggcacttttttaaatataaaaatgggtgttatggtggaggaggagagcagcgtggttagctaacggttattgcttttgtggcaaatccaatgtaatga

SEQ ID NO: 449245 - DNA, 2308 bp, Homo sapiens
tcggcctgcatcacgcgtgagggggcgcgcggtgctggaagctgccgcacctgcggggagccgagccgccggcgctcgacgcgcgcgctctcgcgagacccgcgggatcacgtgacgcccgggcgcggcgcagctcacgtgacaagcgctgccggccgcggtgtcttcttcgtgccggcgtcgcagtggccgggcctcttgcgtctggtaacgccgctgtctctaacgccagcccttggcgcccgcgccccgccaccgcagcgcccggcagtccgcggcccaaccgccgcccgcgcccccgctctccgcaccgtacccggccgcctcgcgccatggcggcccccggcagcgcccggcgacccctgctgctgctactgctgttgctgctgctcggcctcatgcattgtgcgtcagcagcaatgtttatggtgaaaaatggcaacgggaccgcgtgcataatggccaacttctctgctgccttctcagtgaactacgacaccaagagtggccctaagaacatgacctttgacctgccatcagatgccacagtggtgctcaaccgcagctcctgtggaaaagagaacacttctgaccccagtctcgtgattgcttttggaagaggacatacactcactctcaatttcacgagaaatgcaacacgttacagcgtccagctcatgagttttgtttataacttgtcagacacacaccttttccccaatgcgagctccaaagaaatcaagactgtggaatctataactgacatcagggcagatatagataaaaaatacagatgtgttagtggcacccaggtccacatgaacaacgtgaccgtaacgctccatgatgccaccatccaggcgtacctttccaacagcagcttcagcaggggagagacacgctgtgaacaagacaggccttccccaaccacagcgccccctgcgccacccagcccctcgccctcacccgtgcccaagagcccctctgtggacaagtacaacgtgagcggcaccaacgggacctgcctgctggccagcatggggctgcagctgaacctcacctatgagaggaaggacaacacgacggtgacaaggcttctcaacatcaaccccaacaagacctcggccagcgggagctgcggcgcccacctggtgactctggagctgcacagcgagggcaccaccgtcctgctcttccagttcgggatgaatgcaagttctagccggtttttcctacaaggaatccagttgaatacaattcttcctgacgccagagaccctgcctttaaagctgccaacggctccctgcgagcgctgcaggccacagtcggcaattcctacaagtgcaacgcggaggagcacgtccgtgtcacgaaggcgttttcagtcaatatattcaaagtgtgggtccaggctttcaaggtggaaggtggccagtttggctctgtggaggagtgtctgctggacgagaacagcatgctgatccccatcgctgtgggtggtgccctggcggggctggtcctcatcgtcctcatcgcctacctcgtcggcaggaagaggagtcacgcaggctaccagactatctagcctggtgcacgcaggcacagcagctgcaggggcctctgttcctttctctgggcttagggtcctgtcgaaggggaggcacactttctggcaaacgtttctcaaatctgcttcatccaatgtgaagttcatcttgcagcatttactatgcacaacagagtaactatcgaaatgacggtgttaattttgctaactgggttaaatattttgctaactggttaaacattaatatttaccaaagtaggattttgagggtgggggtgctctctctgagggggtgggggtgccgctgtctctgaggggtgggggtgccgctgtctctgaggggtgggggtgccgctctctctgagggggtgggggtgccgctttctctgagggggtgggggtgccgctctctctgagggggtgggggtgctgctctctccgaggggtggaatgccgctgtctctgaggggtgggggtgccgctctaaattggctccatatcatttgagtttagggttctggtgtttggtttcttcattctttactgcactcagatttaagccttacaaagggaaagcctctggccgtcacacgtaggacgcatgaaggtcactcgtggtgaggctgacatgctcacacattacaacagtagagagggaaaatcctaagacagaggaactccagagatgagtgtctggagcgcttcagttcagcaccgcgcctgggatcctctagatccac

SEQ ID NO: 449246 - DNA, 1105 bp, Homo sapiens
tcggcctgcatcacgcgtgagggggcgcgcggtgctggaagctgccgcacctgcggggagccgagccgccggcgctcgacgcgcgcgctctcgcgagacccgcgggatcacgtgacgcccgggcgcggcgcagctcacgtgacaagcgctgccggccgcggtgtcttcttcgtgccggcgtcgcagtggccgggcctcttgcgtctggtaacgccgctgtctctaacgccagcccttggcgcccgcgccccgccaccgcagcgcccggcagtccgcggcccaaccgccgcccgcgcccccgctctccgcaccgtacccggccgcctcgcgccatggcggcccccggcagcgcccggcgacccctgctgctgctactgctgttgctgctgctcggcctcatgcattgtgcgtcagcagcaatgtttatggtgaaaaatggcaacgggaccgcgtgcataatggccaacttctctgctgccttctcagtgaactacgacaccaagagtggccctaagaacatgacctttgacctgccatcagatgccacagtggtgctcaaccgcagctcctgtggaaaagagaacacttctgaccccagtctcgtgattgcttttggaagaggacatacactcactctcaatttcacgagaaatgcaacacgttacagcgtccagctcatgagttttgtttataacttgtcagacacacaccttttccccaatgcgagctccaaagaaatcaagactgtggaatctataactgacatcagggcagatatagataaaaaatacagatgtgttagtggcacccaggtccacatgaacaacgtgaccgtaacgctccatgatgccaccatccaggcgtacctttccaacagcagcttcagcaggggagagacacgctgtgaacaagacaggccttccccaaccacagcgccccctgcgccacccagcccctcgccctcacccgtgcccaagagcccctctgtggacaagtacaacgtgagcggcaccaacgggacctgcctgctggccagcatggggctgcagctgaacctcacctatgagaggaaggacaacacggtagggctggggcctcacctggg

SEQ ID NO: 449247 - DNA, 503 bp, Homo sapiens
ctgggagcccctggtaccatttgagagtaagggaatcattttaagaaacagtggtggcgcttctcccatgaacgttgaatacaacactgtcatctgatgtgcacagaggccctggacgcagcacagctgtccggccacagcccctgattccagacgggggagagacgtgtgtggtttcctcgccgtgcagagagcaccagtctctgcagcggcttccccaagtgacaattccagctagagctggaaccttccgccagggttcctctttgccttttggctgatgtgggggagtggtggggagagaggcctgtttgcaggcccctgtgtgagcagagccctgacaccatccgtctgtcttggcagtggaggagtgtctgctggacgagaacagcatgctgatccccatcgctgtgggtggtgccctggcggggctggtcctcatcgtcctcatcgcctacctcgtcggcaggaagaggagtcacgcaggctaccagactatctag

SEQ ID NO: 449248 - DNA, 1390 bp, Homo sapiens
caaaagattttctttaatatcataaaatattttcatggacaagtgagctagcaaacacacatgcaccaatgtgccttttgacaagagtaccccctaccccgactcccacaccaaaatggacatgagattggagaaatgaatacagcagatggaacagatagaagaaaaaaaaatcagtaaaaaggatggaatataactttgtgcttggttattttcctatgtcgcaacaaaacaagacatttcggtgcaaatagttaatctttcctctttttttccatttgtcgaaaatatcattttatattccctaatctatatagctgaaaaagggttgtattttcttagctgaatatgaatacctcttaaacataaattagttcctctccagtgaagtatcttattttaccaatccatttcaggaaagaggttctgctgccgtaaaggcagaaattttatttttatcccttttatttgaatgagagatttgaaaatcgaattatgtaaatatttcaatgcatctgctattattttgtggagtttattaaactactttaaaaaaaaaaaaaaaaaaaatggagcctctcgggaggcgggtaacgttatagtatttgtcagaagttggggtctccgtgggcattgtgatccgtcccaggcagtggattaggaggccagaaggagatcccttccacggtgctaggctgagatggatcctctcagggcccaacagctggctgcggagctggaggtggagatgatggccgatatgtacaacagaatgaccagtgcctgccaccggaagtgtgtgcctcctcactacaaggaagcagagctctccaagggcgagtctgtgtgcctggaccgatgtgtctctaagtacctggacatccatgagcggatgggcaaaaagttgacagagttgtctatgcaggatgaagagctgatgaagagggtgcagcagagctctgggcctgcatgaggtccctgtcagtatacaccctggggtgtaccccaccccttcccactttaataaacgtgctccctgttgggtgtcatctgtgaagactgccaggcctaggctctctgtagagagtcttcaagatcccggagtggtagcgctgtctcctggtgaaggagtatttgtcacactggaatgtgactgtgtgtgtatgtatgtgtatatatatatatatatatatatataaacaagtttgttgacacctacaaaaaaaatataaaaccactacaacaaaaaaaacgcggcgcttcatttccggggcgcgaaacaaagggttttgaaagggccctcggtccaaggtgtatcggaacccccttttttgacaaaggtgaactgggcgggcccaatagaggggcgaaaatcgaaaacggtacttac

SEQ ID NO: 449249 - DNA, 1422 bp, Homo sapiens
agcagtaatcgcacaacgtcccgtggagcactgcttctcaaatttggctgtacatacgaatcacctggggaattttaaattgtattgctgcctgaggaattttaaactgtactcccagagattctgatttaattgaaatgaggtgagtcctgggcactgggatgtttaaaaacgttccaggtgattttaacgcgaaacaaaaacagaaccgctgtttgggggcgttcttccttctccacgcctgatttgcgcacaggagtcggctgtctggaacgggggtgaggttcacaggtgtctgtcgccacgcctcttcctacagaaccaataaactgaagccgctcggtgacatcccaaaggacttgaattctgatcgggctgcagacgctctgcaccccgcccaagcttctatggtactttgggtgtcctctctaggcactgggcaagtcgccttcctcttcgcccggcgccagccgctccttctctatgatcgccgagttcccggcgccgtctcgttggtatttaattccggaagcgagtttgaatcaaagaagaggcgggactttcctcccggaagtaacccacgtgcttccgctggagcctcttggagcctctcgggaggcgggtaacgttatagtatttgtcagaagttggggtctccgtgggcattgtgatccgtcccaggcagtggattaggaggccagaaggagatcccttccacggtgctaggctgagatggatcctctcagggcccaacagctggctgcggagctggaggtggagatgatggccgatatgtacaacagaatgaccagtgcctgccaccggaagtgtgtgcctcctcactacaaggaagcagagctctccaagggcgagtctgtgtgcctggaccgatgtgtctctaagtacctggacatccatgagcggatgggcaaaaagttgacagagttgtctatgcaggatgaagagctgatgaagagggtgcagcagagctctgggcctgcatgaggtccctgtcagtatacaccctggggtgtaccccaccccttcccactttaataaacgtgctccctgttgggtgtcatctgtgaagactgccaggcctaggctctctgtagagagtcttcaagatcccggagtggtagcgctgtctcctggtgaaggagtatttgtcacactggaatgtgactgtgtgtgtatgtatgtgtatatatatatatatatatatatataaacaagtttgttgacacctacaaaaaaaatataaaaccactacaacaaaaaaaacgcggcgcttcatttccggggcgcgaaacaaagggttttgaaagggccctcggtccaaggtgtatcggaacccccttttttgacaaaggtgaactgggcgggcccaatagaggggcgaaaatcgaaaacggtacttac

SEQ ID NO: 449250 - DNA, 1283 bp, Homo sapiens
caaaagattttctttaatatcataaaatattttcatggacaagtgagctagcaaacacacatgcaccaatgtgccttttgacaagagtaccccctaccccgactcccacaccaaaatggacatgagattggagaaatgaatacagcagatggaacagatagaagaaaaaaaaatcagtaaaaaggatggaatataactttgtgcttggttattttcctatgtcgcaacaaaacaagacatttcggtgcaaatagttaatctttcctctttttttccatttgtcgaaaatatcattttatattccctaatctatatagctgaaaaagggttgtattttcttagctgaatatgaatacctcttaaacataaattagttcctctccagtgaagtatcttattttaccaatccatttcaggaaagaggttctgctgccgtaaaggcagaaattttatttttatcccttttatttgaatgagagatttgaaaatcgaattatgtaaatatttcaatgcatctgctattattttgtggagtttattaaactactttaaaaaaaaaaaaaaaaaaaatggagcctctcgggaggcgggtaacgttatagtatttgtcagaagttggggtctccgtgggcattgtgatccgtcccaggcagtggattaggaggccagaaggagatcccttccacggtgctaggctgagatggatcctctcagggcccaacagctggctgcggagctggaggtggagatgatggccgatatgtacaacagaatgaccagtgcctgccaccggaagtgtgtgcctcctcactacaaggaagcagagctctccaagggcgagtctgtgtgcctggaccgatgtgtctctaagtacctggacatccatgagcggatgggcaaaaagttgacagagttgtctatgcaggatgaagagctgatgaagagggtgcagcagagctctgggcctgcatgaggtccctgtcagtatacaccctggggtgtaccccaccccttcccactttaataaacgtgctccctgttgggtgtcatctgtgaagactgccaggcctaggctctctgtagagagtcttcaagatcccggagtggtagcgctgtctcctggtgaaggagtatttgtcacactggaatgtgactgtgtgtgtatgtatgtgtatatatatatatatatatatatatatatatataaacaagtttgttgacacctactatgtgcaaagcagtgtgcttggcatttgagagtaaagaaaacagacacagcccct

SEQ ID NO: 449251 - DNA, 1845 bp, Homo sapiens
agcagtaatcgcacaacgtcccgtggagcactgcttctcaaatttggctgtacatacgaatcacctggggaattttaaattgtattgctgcctgaggaattttaaactgtactcccagagattctgatttaattgaaatgaggtgagtcctgggcactgggatgtttaaaaacgttccaggtgattttaacgcgaaacaaaaacagaaccgctgtttgggggcgttcttccttctccacgcctgatttgcgcacaggagtcggctgtctggaacgggggtgaggttcacaggtgtctgtcgccacgcctcttcctacagaaccaataaactgaagccgctcggtgacatcccaaaggacttgaattctgatcgggctgcagacgctctgcaccccgcccaagcttctatggtactttgggtgtcctctctaggcactgggcaagtcgccttcctcttcgcccggcgccagccgctccttctctatgatcgccgagttcccggcgccgtctcgttggtatttaattccggaagcgagtttgaatcaaagaagaggcgggactttcctcccggaagtaacccacgtgcttccgctggagcctcttggagcctctcgggaggcgggtaacgttatagtatttgtcagaagttggggtctccgtgggcattgtgatccgtcccaggcagtggtaagtgacacatgacctctgaattcaatgtggccctgatgatggcgtcgccatttcagaggtgtagcctttgggctgggtcccggtcgcctctgttcagcgtatgatcccattcccagggccctggaggttcaggttcgtgggttagagagttctcctccggtcctcgatctcctgaatagaggtgacctccaggaactggggcatcagagatccggggctcgatttccaggctcgccatagacgtcctgtgcgaccttgggctaggcctcagtttccacatccgtgaaatggggtggttaagctcactgaggttagtggcccgtggtggtctggcgccctgtgagtcctctgtatcctctagccccaggggtaggagagtgaacggcggcggtgggtgctgatggtgatgtctgctcccaggattaggaggccagaaggagatcccttccacggtgctaggctgagatggatcctctcagggcccaacagctggctgcggagctggaggtggagatgatggccgatatgtacaacagaatgaccagtgcctgccaccggaagtgtgtgcctcctcactacaaggaagcagagctctccaagggcgagtctgtgtgcctggaccgatgtgtctctaagtacctggacatccatgagcggatgggcaaaaagttgacagagttgtctatgcaggatgaagagctgatgaagagggtgcagcagagctctgggcctgcatgaggtccctgtcagtatacaccctggggtgtaccccaccccttcccactttaataaacgtgctccctgttgggtgtcatctgtgaagactgccaggcctaggctctctgtagagagtcttcaagatcccggagtggtagcgctgtctcctggtgaaggagtatttgtcacactggaatgtgactgtgtgtgtatgtatgtgtatatatatatatatatatatatataaacaagtttgttgacacctacaaaaaaaatataaaaccactacaacaaaaaaaacgcggcgcttcatttccggggcgcgaaacaaagggttttgaaagggccctcggtccaaggtgtatcggaacccccttttttgacaaaggtgaactgggcgggcccaatagaggggcgaaaatcgaaaacggtacttac

SEQ ID NO: 449252 - DNA, 1337 bp, Homo sapiens
agcagtaatcgcacaacgtcccgtggagcactgcttctcaaatttggctgtacatacgaatcacctggggaattttaaattgtattgctgcctgaggaattttaaactgtactcccagagattctgatttaattgaaatgaggtgagtcctgggcactgggatgtttaaaaacgttccaggtgattttaacgcgaaacaaaaacagaaccgctgtttgggggcgttcttccttctccacgcctgatttgcgcacaggagtcggctgtctggaacgggggtgaggttcacaggtgtctgtcgccacgcctcttcctacagaaccaataaactgaagccgctcggtgacatcccaaaggacttgaattctgatcgggctgcagacgctctgcaccccgcccaagcttctatggtactttgggtgtcctctctaggcactgggcaagtcgccttcctcttcgcccggcgccagccgctccttctctatgatcgccgagttcccggcgccgtctcgttggtatttaattccggaagcgagtttgaatcaaagaagaggcgggactttcctcccggaagtaacccacgtgcttccgctggagcctctgattaggaggccagaaggagatcccttccacggtgctaggctgagatggatcctctcagggcccaacagctggctgcggagctggaggtggagatgatggccgatatgtacaacagaatgaccagtgcctgccaccggaagtgtgtgcctcctcactacaaggaagcagagctctccaagggcgagtctgtgtgcctggaccgatgtgtctctaagtacctggacatccatgagcggatgggcaaaaagttgacagagttgtctatgcaggatgaagagctgatgaagagggtgcagcagagctctgggcctgcatgaggtccctgtcagtatacaccctggggtgtaccccaccccttcccactttaataaacgtgctccctgttgggtgtcatctgtgaagactgccaggcctaggctctctgtagagagtcttcaagatcccggagtggtagcgctgtctcctggtgaaggagtatttgtcacactggaatgtgactgtgtgtgtatgtatgtgtatatatatatatatatatatatataaacaagtttgttgacacctacaaaaaaaatataaaaccactacaacaaaaaaaacgcggcgcttcatttccggggcgcgaaacaaagggttttgaaagggccctcggtccaaggtgtatcggaacccccttttttgacaaaggtgaactgggcgggcccaatagaggggcgaaaatcgaaaacggtacttac

SEQ ID NO: 449253 - DNA, 1079 bp, Homo sapiens
agcagtaatcgcacaacgtcccgtggagcactgcttctcaaatttggctgtacatacgaatcacctggggaattttaaattgtattgctgcctgaggaattttaaactgtactcccagagattctgatttaattgaaatgaggtgagtcctgggcactgggatgtttaaaaacgttccaggtgattttaacgcgaaacaaaaacagaaccgctgtttgggggcgttcttccttctccacgcctgatttgcgcacaggagtcggctgtctggaacgggggtgaggttcacaggtgtctgtcgccacgcctcttcctacagaaccaataaactgaagccgctcggtgacatcccaaaggacttgaattctgatcgggctgcagacgctctgcaccccgcccaagcttctatggtactttgggtgtcctctctaggcactgggcaagtcgccttcctcttcgcccggcgccagccgctccttctctatgatcgccgagttcccggcgccgtctcgttggtatttaattccggaagcgagtttgaatcaaagaagaggcgggactttcctcccggaagtaacccacgtgcttccgctggagcctcttggagcctctcgggaggcgggtaacgttatagtatttgtcagaagttggggtctccgtgggcattgtgatccgtcccaggcagtggattaggaggccagaaggagatcccttccacggtgctaggctgagatggatcctctcagggcccaacagctggctgcggagctggaggtggagatgatggccgatatgtacaacagaatgaccagtgcctgccaccggaagtgtgtgcctcctcactacaaggaagcagagctctccaagggcgagtctgtgtgcctggaccgatgtgtctctaagtacctggacatccatgagcggatgggcaaaaagttgacagagttgtctatgcaggatgaagagctgatgaagagggtgcagcagagctctgggcctgcatgaggtccctgtcagtatacaccctggggtgtaccccaccccttcccactttaataaacgtgctccctgttgggtgt

SEQ ID NO: 449254 - DNA, 2475 bp, Homo sapiens
tccctaagaacccggaagtggtggagccaacggccagccagacctgtggcagtcccagccccagggtgctctccgcggtcggccatttatcggtgaagcaacagccccttgacgtcaagcttgacgcattggagataaagtccgaggaggtgaactaacctttgaacgtgccagtaagtaagatggcgagaaaagcaagagagagtgggaccgatcgatagcgcagcggtcggcttggcgccctttcagcgtgcgcagtgaacgtgcgctcggagcggtagattgggcaggattcgcgcctccatttttccaggagagagcgggataccaagagaaccggaccagctgctggcagggaaactgtcttccttttctccaagatgtacagaaccaaagtgggcttgaaggaccgccagcagctctacaagctgatcattagccagctgctatatgacggctacatcagcatcgccaatggcctcatcaatgaaatcaagcctcagtctgtgtgtgcaccctcggagcagctcctgcatctcatcaaactcggaatggaaaacgatgacaccgcagttcagtatgcaattggtcgttcagatactgttgcccctggcacagggattgacctggaatttgatgcagatgttcagactatgtccccagaggcttctgagtacgaaacatgctatgtcacatcacataaaggaccatgccgtgtagctacctatagtagagatggacagttaatagctactgggtctgctgatgcttcgataaagatacttgacacagagaggatgttggccaaaagtgccatgccaatagaggtcatgatgaatgagaccgcacaacaaaatatggaaaaccacccagtgattcgaactctttatgaccatgtggatgaagtcacgtgccttgctttccacccaacagaacagatcctggcttctggttcaagggattatactcttaaattatttgattattccaaaccatcagcaaaaagagccttcaaatacattcaggaagctgaaatgttacgttccatctcttttcatccttctggagactttatacttgtcggaactcagcatcctactcttcgcctttatgatatcaacacctttcaatgttttgtctcttgcaatcctcaagatcaacacaccgatgctatatgttccgttaattacaattctagtgccaatatgtacgtaactggaagcaaggacggctgcatcaaattatgggatggtgtttcaaatcgatgcatcacaacttttgagaaagcacatgacggtgctgaagtttgttctgccattttttccaaaaattctaaatacattctctcaagtggaaaagactctgtagctaaactttgggaaatatcaacgggacgaacactggtcagatacacgggcgcgggtttaagtggacgccaggtgcaccggacacaggctgtgtttaaccacaccgaggactatgtgttgctgcccgacgagaggacgatcagtctttgctgctgggactcgaggacagccgagcggagaaacctgctgtcgttggggcacaacaatattgtacgctgcatagtgcactcccccaccaaccccgggttcatgacgtgcagcgatgacttcagagcgcggttttggtaccggagatcgaccactgactgagccaccctctccgtagggttctttctcgaggactctaccctcctcccccacgtcctgtctcagctgcagtcgtaagtccgtgcaccatccttgacgttttgctgccacctctgtccacattcttcttggatttgtataaaagaatctttttttaccttgatgtagaatcatggtggaaaaagttggaaacacagatctgtgcagttctacattcactgattattacagtgtgattttcatcggttttgtaagtacaggacttgccgtttcttttgatctcttgattgaaggaggatagggcattaaagtgcttttgacatgaggaattttcatttggttcttctgtcaactttcttgcttattctgctgaaccctctgtgtatttcccttccaggtatatttgaacagataagcaggcatgcagctctgagactcctgagttttatgccattatcaaaagcattttcaagaatccctcaattctatcctgaaatgatgttattctgataataaagctcagatctgcaactttattgttatatatttttcacttctgtaaaattaatggccagtttttcctgacaatttataggaacagtatctttcaacatactccctacattatccttcaatatctgcaatacttgtctttagtaactgtatttctggtaagattatgatttcatgagaaacaattgaaaatatatccgatctaattaaattaggtcagcctgctattgctctcaggtgttgcctgtcttcacgaatgattagtatcgattgacctctttcttaggtg

SEQ ID NO: 449255 - DNA, 2553 bp, Homo sapiens
tccctaagaacccggaagtggtggagccaacggccagccagacctgtggcagtcccagccccagggtgctctccgcggtcggccatttatcggtgaagcaacagccccttgacgtcaagcttgacgcattggagataaagtccgaggaggtgaactaacctttgaacgtgccagtaagtaagatggcgagaaaagcaagagagagtgggaccgatcgatagcgcagcggtcggcttggcgccctttcagcgtgcgcagtgaacgtgcgctcggagcggtagattgggcaggattcgcgcctccatttttccaggagagagcgggataccaagagaaccggaccagctgctggcagggaaactgtcttccttttctccaagatgtacagaaccaaagtgggcttgaaggaccgccagcagctctacaagctgatcattagccagctgctatatgacggctacatcagcatcgccaatggcctcatcaatgaaatcaagcctcagtctgtgtgtgcaccctcggagcagctcctgcatctcatcaaactcggaatggaaaacgatgacaccgcagttcagtatgcaattggtcgttcagatactgttgcccctggcacagggattgacctggaatttgatgcagatgttcagactatgtccccagaggcttctgagtacgaaacatgctatgtcacatcacataaaggaccatgccgtgtagctacctatagtagagatggacagttaatagctactgggtctgctgatgcttcgataaagatacttgacacagagaggatgttggccaaaagtgccatgccaatagaggtcatgatgaatgagaccgcacaacaaaatatggaaaaccacccagtgattcgaactctttatgaccatgtggatgaagtcacgtgccttgctttccacccaacagaacagatcctggcttctggttcaagggattatactcttaaattatttgattattccaaaccatcagcaaaaagagccttcaaatacattcaggaagctgaaatgttacgttccatctcttttcatccttctggagactttatacttgtcggaactcagcatcctactcttcgcctttatgatatcaacacctttcaatgttttgtctcttgcaatcctcaagatcaacacaccgatgctatatgttccgttaattacaattctagtgccaatatgtacgtaactggaagcaaggacggctgcatcaaattatgggatggtgtttcaaatcgatgcatcacaacttttgagaaagcacatgacggtgctgaagtttgttctgccattttttccaaaaattctaaatacattctctcaagtggaaaagactctgtagctaaactttgggaaatatcaacgggacgaacactggtcagatacacgggcgcgggtttaagtggacgccaggtgcaccggacacaggctgtgtttaaccacaccgaggactatgtgttgctgcccgacgagaggacgatcagtctttgctgctgggactcgaggacagccgagcggagaaacctgctgtcgttggggcacaacaatattgtacgctgcatagtgcactcccccaccaaccccgggttcatgacgtgcagcgatgacttcagagcgcggttttggtaccggagatcgaccactgactgagccaccctctccgtagggttctttctcgaggactctaccctcctcccccacgtcctgtctcagctgcagtcgtaagtccgtgcaccatccttgacgttttgctgccacctctgtccacattcttcttggatttgtataaaagaatctttttttaccttgatgtagaatcatggtggaaaaagttggaaacacagatctgtgcagttctacattcactgattattacagtgtgattttcatcggttttgtaagtacaggacttgccgtttcttttgatctcttgattgaaggaggatagggcattaaagtgcttttgacatgaggaattttcatttggttcttctgtcaactttcttgcttattctgctgaaccctctgtgtatttcccttccaggtatatttgaacagataagcaggcatgcagctctgagactcctgagttttatgccattatcaaaagcattttcaagaatccctcaattctatcctgaaatgatgttattctgataataaagctcagatctgcaaaaaaaaaaaaaaagggcggccgccctttttttttttttttttttaccaaaagccaaaccattcatatgtatggatttcataaacatttattgatccttttttgaggtaagtataaatacctttacatggctacccttctaacgcttgaaaaatcaatttcaagggactctttaatcagttaaataatctgctttagaaggcacaaatgatcatacttcagattaaaatacaggtaagtattcagggataaaatggtacaaaaaaggctgtaactcttttacttcacattgatcacagacagaacttacatcctttcagaaagatgatgtatcagcactgaacatttctc

SEQ ID NO: 449256 - DNA, 1998 bp, Homo sapiens
tccctaagaacccggaagtggtggagccaacggccagccagacctgtggcagtcccagccccagggtgctctccgcggtcggccatttatcggtgaagcaacagccccttgacgtcaagcttgacgcattggagataaagtccgaggaggtgaactaacctttgaacgtgccagtaagtaagatggcgagaaaagcaagagagagtgggaccgatcgatagcgcagcggtcggcttggcgccctttcagcgtgcgcagtgaacgtgcgctcggagcggtagattgggcaggattcgcgcctccatttttccaggagagagcgggataccaagagaaccggaccagctgctggcagggaaactgtcttccttttctccaagatgtacagaaccaaagtgggcttgaaggaccgccagcagctctacaagctgatcattagccagctgctatatgacggctacatcagcatcgccaatggcctcatcaatgaaatcaagcctcagtctgtgtgtgcaccctcggagcagctcctgcatctcatcaaactcggaatggaaaacgatgacaccgcagttcagtatgcaattggtcgttcagatactgttgcccctggcacagggattgacctggaatttgatgcagatgttcagactatgtccccagaggcttctgagtacgaaacatgctatgtcacatcacataaaggaccatgccgtgtagctacctatagtagagatggacagttaatagctactgggtctgctgatgcttcgataaagatacttgacacagagaggatgttggccaaaagtgccatgccaatagaggtcatgatgaatgagaccgcacaacaaaatatggaaaaccacccagtgattcgaactctttatgaccatgtggatgaagtcacgtgccttgctttccacccaacagaacagatcctggcttctggttcaagggattatactcttaaattatttgattattccaaaccatcagcaaaaagagccttcaaatacattcaggaagctgaaatgttacgttccatctcttttcatccttctggagactttatacttgtcggaactcagcatcctactcttcgcctttatgatatcaacacctttcaatgttttgtctcttgcaatcctcaagatcaacacaccgatgctatatgttccgttaattacaattctagtgccaatatgtacgtaactggaagcaaggacggctgcatcaaattatgggatggtgtttcaaatcgatgcatcacaacttttgagaaagcacatgacggtgctgaagtttgttctgccattttttccaaaaattctaaatacattctctcaagtggaaaagactctgtagctaaactttgggaaatatcaacgggacgaacactggtcagatacacgggcgcgggtttaagtggacgccaggtgcaccggacacaggctgtgtttaaccacaccgaggactatgtgttgctgcccgacgagaggacgatcagtctttgctgctgggactcgaggacagccgagcggagaaacctgctgtcgttggggcacaacaatattgtacgctgcatagtgcactcccccaccaaccccgggttcatgacgtgcagcgatgacttcagagcgcggttttggtaccggagatcgaccactgactgagccaccctctccgtagggttctttctcgaggactctaccctcctcccccacgtcctgtctcagctgcagtcgtaagtccgtgcaccatccttgacgttttgctgccacctctgtccacattcttcttggatttgtataaaagaatctttttttaccttgatgtagaatcatggtggaaaaagttggaaacacagatctgtgcagttctacattcactgattattacagtgtgattttcatcggttttgtaagtacaggacttgccgtttcttttgatctcttgattgaaggaggatagggcattaaagtgcttttgacatga

SEQ ID NO: 449257 - DNA, 2398 bp, Homo sapiens
tccctaagaacccggaagtggtggagccaacggccagccagacctgtggcagtcccagccccagggtgctctccgcggtcggccatttatcggtgaagcaacagccccttgacgtcaagcttgacgcattggagataaagtccgaggaggtgaactaacctttgaacgtgccagtaagtaagatggcgagaaaagcaagagagagtgggaccgatcgatagcgcagcggtcggcttggcgccctttcagcgtgcgcagtgaacgtgcgctcggagcggtagattgggcaggattcgcgcctccatttttccaggagagagcgggataccaagagaaccggaccagctgctggcagggaaactgtcttccttttctccaagatgtacagaaccaaagtgggcttgaaggaccgccagcagctctacaagctgatcattagccagctgctatatgacggctacatcagcatcgccaatggcctcatcaatgaaatcaagcctcagtctgtgtgtgcaccctcggagcagctcctgcatctcatcaaactcggaatggaaaacgatgacaccgcagttcagtatgcaattggtcgttcagatactgttgcccctggcacagggattgacctggaatttgatgcagatgttcagactatgtccccagaggcttctgagtacgaaacatgctatgtcacatcacataaaggaccatgccgtgtagctacctatagtagagatggacagttaatagctactgggtctgctgatgcttcgataaagatacttgacacagagaggatgttggccaaaagtgccatgccaatagaggtcatgatgaatgagaccgcacaacaaaatatggaaaaccacccagtgattcgaactctttatgaccatgtggatgaagtcacgtgccttgctttccacccaacagaacagatcctggcttctggttcaagggattatactcttaaattatttgattattccaaaccatcagcaaaaagagccttcaaatacattcaggaagctgaaatgttacgttccatctcttttcatccttctggagactttatacttgtcggaactcagcatcctactcttcgcctttatgatatcaacacctttcaatgttttgtctcttgcaatcctcaagatcaacacaccgatgctatatgttccgttaattacaattctagtgccaatatgtacgtaactggaagcaaggacggctgcatcaaattatgggatggtgtttcaaatcgatgcatcacaacttttgagaaagcacatgacggtgctgaagtttgttctgccattttttccaaaaattctaaatacattctctcaagtggaaaagactctgtagctaaactttgggaaatatcaacgggacgaacactggtcagatacacgggcgcgggtttaagtggacgccaggtgcaccggacacaggctgtgtttaaccacaccgaggactatgtgttgctgcccgacgagaggacgatcagtctttgctgctgggactcgaggacagccgagcggagaaacctgctgtcgttggggcacaacaatattgtacgctgcatagtgcactcccccaccaaccccgggttcatgacgtgcagcgatgacttcagagcgcggttttggtaccggagatcgaccactgactgagccaccctctccgtagggttctttctcgaggactctaccctcctcccccacgtcctgtctcagctgcagtcgtaagtccgtgcaccatccttgacgttttgctgccacctctgtccacattcttcttggatttgtataaaagaatctttttttaccttgatgtagaatcatggtggaaaaagttggaaacacagatctgtgcagttctacattcactgattattacagtgtgattttcagtatatttgaacagataagcaggcatgcagctctgagactcctgagttttatgccattatcaaaagcattttcaagaatccctcaattctatcctgaaatgatgttattctgataataaagctcagatctgcaaaaaaaaaaaaaaagggcggccgccctttttttttttttttttttaccaaaagccaaaccattcatatgtatggatttcataaacatttattgatccttttttgaggtaagtataaatacctttacatggctacccttctaacgcttgaaaaatcaatttcaagggactctttaatcagttaaataatctgctttagaaggcacaaatgatcatacttcagattaaaatacaggtaagtattcagggataaaatggtacaaaaaaggctgtaactcttttacttcacattgatcacagacagaacttacatcctttcagaaagatgatgtatcagcactgaacatttctc

SEQ ID NO: 449258 - DNA, 1848 bp, Homo sapiens
tccctaagaacccggaagtggtggagccaacggccagccagacctgtggcagtcccagccccagggtgctctccgcggtcggccatttatcggtgaagcaacagccccttgacgtcaagcttgacgcattggagataaagtccgaggaggtgaactaacctttgaacgtgccagtaagtaagatggcgagaaaagcaagagagagtgggaccgatcgatagcgcagcggtcggcttggcgccctttcagcgtgcgcagtgaacgtgcgctcggagcggtagattgggcaggattcgcgcctccatttttccaggagagagcgggataccaagagaaccggaccagctgctggcagggaaactgtcttccttttctccaagatgtacagaaccaaagtgggcttgaaggaccgccagcagctctacaagctgatcattagccagctgctatatgacggctacatcagcatcgccaatggcctcatcaatgaaatcaagcctcagtctgtgtgtgcaccctcggagcagctcctgcatctcatcaaactcggaatggaaaacgatgacaccgcagttcagtatgcaattggtcgttcagatactgttgcccctggcacagggattgacctggaatttgatgcagatgttcagactatgtccccagaggcttctgagtacgaaacatgctatgtcacatcacataaaggaccatgccgtgtagctacctatagtagagatggacagttaatagctactgggtctgctgatgcttcgataaagatacttgacacagagaggatgttggccaaaagtgccatgccaatagaggtcatgatgaatgagaccgcacaacaaaatatggaaaaccacccagtgattcgaactctttatgaccatgtggatgaagtcacgtgccttgctttccacccaacagaacagatcctggcttctggttcaagggattatactcttaaattatttgattattccaaaccatcagcaaaaagagccttcaaatacattcaggaagctgaaatgttacgttccatctcttttcatccttctggagactttatacttgtcggaactcagcatcctactcttcgcctttatgatatcaacacctttcaatgttttgtctcttgcaatcctcaagatcaacacaccgatgctatatgttccgttaattacaattctagtgccaatatgtacgtaactggaagcaaggacggctgcatcaaattatgggatggtgtttcaaatcgatgcatcacaacttttgagaaagcacatgacggtgctgaagtttgttctgccattttttccaaaaattctaaatacattctctcaagtggaaaagactctgtagctaaactttgggaaatatcaacgggacgaacactggtcagatacacgggcgcgggtttaagtggacgccaggtgcaccggacacaggctgtgtttaaccacaccgaggactatgtgttgctgcccgacgagaggacgatcagtctttgctgctgggactcgaggacagccgagcggagaaacctgctgtcgttggggcacaacaatattgtacgctgcatagtgcactcccccaccaaccccgggttcatgacgtgcagcgatgacttcagagcgcggttttggtaccggagatcgaccactgactgagccaccctctccgtagggttctttctcgaggactctaccctcctcccccacgtcctgtctcagctgcagtcgtaagtccgtgcaccatctcggttttgtaagtacaggacttgccgtttcttttgatctcttgattgaaggaggatagggcattaaagtgcttttgacatga

SEQ ID NO: 449259 - DNA, 2230 bp, Homo sapiens
tccctaagaacccggaagtggtggagccaacggccagccagacctgtggcagtcccagccccagggtgctctccgcggtcggccatttatcggtgaagcaacagccccttgacgtcaagcttgacgcattggagataaagtccgaggaggtgaactaacctttgaacgtgccagtaagtaagatggcgagaaaagcaagagagagtgggaccgatcgatagcgcagcggtcggcttggcgccctttcagcgtgcgcagtgaacgtgcgctcggagcggtagattgggcaggattcgcgcctccatttttccaggagagagcgggataccaagagaaccggaccagctgctggcagggaaactgtcttccttttctccaagatgtacagaaccaaagtgggcttgaaggaccgccagcagctctacaagctgatcattagccagctgctatatgacggctacatcagcatcgccaatggcctcatcaatgaaatcaagcctcagtctgtgtgtgcaccctcggagcagctcctgcatctcatcaaactcggaatggaaaacgatgacaccgcagttcagtatgcaattggtcgttcagatactgttgcccctggcacagggattgacctggaatttgatgcagatgttcagactatgtccccagaggcttctgagtacgaaacatgctatgtcacatcacataaaggaccatgccgtgtagctacctatagtagagatggacagttaatagctactgggtctgctgatgcttcgataaagatacttgacacagagaggatgttggccaaaagtgccatgccaatagaggtcatgatgaatgagaccgcacaacaaaatatggaaaaccacccagtgattcgaactctttatgaccatgtggatgaagtcacgtgccttgctttccacccaacagaacagatcctggcttctggttcaagggattatactcttaaattatttgattattccaaaccatcagcaaaaagagccttcaaatacattcaggaagctgaaatgttacgttccatctcttttcatccttctggagactttatacttgtcggaactcagcatcctactcttcgcctttatgatatcaacacctttcaatgttttgtctcttgcaatcctcaagatcaacacaccgatgctatatgttccgttaattacaattctagtgccaatatgtacgtaactggaagcaaggacggctgcatcaaattatgggatggtgtttcaaatcgatgcatcacaacttttgagaaagcacatgacggtgctgaagtttgttctgccattttttccaaaaattctaaatacattctctcaagtggaaaagactctgtagctaaactttgggaaatatcaacgggacgaacactggtcagatacacgggcgcgggtttaagtggacgccaggtgcaccggacacaggctgtgtttaaccacaccgaggactatgtgttgctgcccgacgagaggacgatcagtctttgctgctgggactcgaggacagccgagcggagaaacctgctgtcgttggggcacaacaatattgtacgctgcatagtgcactcccccaccaaccccgggttcatgacgtgcagcgatgacttcagagcgcggttttggtaccggagatcgaccactgactgagccaccctctccgtagggttctttctcgaggactctaccctcctcccccacgtcctgtctcagctgcagtcgtatatttgaacagataagcaggcatgcagctctgagactcctgagttttatgccattatcaaaagcattttcaagaatccctcaattctatcctgaaatgatgttattctgataataaagctcagatctgcaaaaaaaaaaaaaaagggcggccgccctttttttttttttttttttaccaaaagccaaaccattcatatgtatggatttcataaacatttattgatccttttttgaggtaagtataaatacctttacatggctacccttctaacgcttgaaaaatcaatttcaagggactctttaatcagttaaataatctgctttagaaggcacaaatgatcatacttcagattaaaatacaggtaagtattcagggataaaatggtacaaaaaaggctgtaactcttttacttcacattgatcacagacagaacttacatcctttcagaaagatgatgtatcagcactgaacatttctc

SEQ ID NO: 449260 - DNA, 1764 bp, Homo sapiens
tccctaagaacccggaagtggtggagccaacggccagccagacctgtggcagtcccagccccagggtgctctccgcggtcggccatttatcggtgaagcaacagccccttgacgtcaagcttgacgcattggagataaagtccgaggaggtgaactaacctttgaacgtgccagtaagtaagatggcgagaaaagcaagagagagtgggaccgatcgatagcgcagcggtcggcttggcgccctttcagcgtgcgcagtgaacgtgcgctcggagcggtagattgggcaggattcgcgcctccatttttccaggagagagcgggataccaagagaaccggaccagctgctggcagggaaactgtcttccttttctccaagatgtacagaaccaaagtgggcttgaaggaccgccagcagctctacaagctgatcattagccagctgctatatgacggctacatcagcatcgccaatggcctcatcaatgaaatcaagcctcagtctgtgtgtgcaccctcggagcagctcctgcatctcatcaaactcggaatggaaaacgatgacaccgcagttcagtatgcaattggtcgttcagatactgttgcccctggcacagggattgacctggaatttgatgcagatgttcagactatgtccccagaggcttctgagtacgaaacatgctatgtcacatcacataaaggaccatgccgtgtagctacctatagtagagatggacagttaatagctactgggtctgctgatgcttcgataaagatacttgacacagagaggatgttggccaaaagtgccatgccaatagaggtcatgatgaatgagaccgcacaacaaaatatggaaaaccacccagtgattcgaactctttatgaccatgtggatgaagtcacgtgccttgctttccacccaacagaacagatcctggcttctggttcaagggattatactcttaaattatttgattattccaaaccatcagcaaaaagagccttcaaatacattcaggaagctgaaatgttacgttccatctcttttcatccttctggagactttatacttgtcggaactcagcatcctactcttcgcctttatgatatcaacacctttcaatgttttgtctcttgcaatcctcaagatcaacacaccgatgctatatgttccgttaattacaattctagtgccaatatgtacgtaactggaagcaaggacggctgcatcaaattatgggatggtgtttcaaatcgatgcatcacaacttttgagaaagcacatgacggtgctgaagtttgttctgccattttttccaaaaattctaaatacattctctcaagtggaaaagactctgtagctaaactttgggaaatatcaacgggacgaacactggtcagatacacgggcgcgggtttaagtggacgccaggtgcaccggacacaggctgtgtttaaccacaccgaggactatgtgttgctgcccgacgagaggacgatcagtctttgctgctgggactcgaggacagccgagcggagaaacctgctgtcgttggggcacaacaatattgtacgctgcatagtgcactcccccaccaaccccgggttcatgacgtgcagcgatgacttcagagcgcggttttggtaccggagatcgaccactgactgagccaccctctccgtagggttctttctcgaggactctaccctcctcccccacctctccccgtgtccaacctcggtaccgagctcgattc

SEQ ID NO: 449261 - DNA, 2443 bp, Homo sapiens
tccctaagaacccggaagtggtggagccaacggccagccagacctgtggcagtcccagccccagggtgctctccgcggtcggccatttatcggtgaagcaacagccccttgacgtcaagcttgacgcattggagataaagtccgaggaggtgaactaacctttgaacgtgccagtaagtaagatggcgagaaaagcaagagagagtgggaccgatcgatagcgcagcggtcggcttggcgccctttcagcgtgcgcagtgaacgtgcgctcggagcggtagattgggcaggattcgcgcctccatttttccaggagagagcgggataccaagagaaccggaccagctgatgtacagaaccaaagtgggcttgaaggaccgccagcagctctacaagctgatcattagccagctgctatatgacggctacatcagcatcgccaatggcctcatcaatgaaatcaagcctcagtctgtgtgtgcaccctcggagcagctcctgcatctcatcaaactcggaatggaaaacgatgacaccgcagttcagtatgcaattggtcgttcagatactgttgcccctggcacagggattgacctggaatttgatgcagatgttcagactatgtccccagaggcttctgagtacgaaacatgctatgtcacatcacataaaggaccatgccgtgtagctacctatagtagagatggacagttaatagctactgggtctgctgatgcttcgataaagatacttgacacagagaggatgttggccaaaagtgccatgccaatagaggtcatgatgaatgagaccgcacaacaaaatatggaaaaccacccagtgattcgaactctttatgaccatgtggatgaagtcacgtgccttgctttccacccaacagaacagatcctggcttctggttcaagggattatactcttaaattatttgattattccaaaccatcagcaaaaagagccttcaaatacattcaggaagctgaaatgttacgttccatctcttttcatccttctggagactttatacttgtcggaactcagcatcctactcttcgcctttatgatatcaacacctttcaatgttttgtctcttgcaatcctcaagatcaacacaccgatgctatatgttccgttaattacaattctagtgccaatatgtacgtaactggaagcaaggacggctgcatcaaattatgggatggtgtttcaaatcgatgcatcacaacttttgagaaagcacatgacggtgctgaagtttgttctgccattttttccaaaaattctaaatacattctctcaagtggaaaagactctgtagctaaactttgggaaatatcaacgggacgaacactggtcagatacacgggcgcgggtttaagtggacgccaggtgcaccggacacaggctgtgtttaaccacaccgaggactatgtgttgctgcccgacgagaggacgatcagtctttgctgctgggactcgaggacagccgagcggagaaacctgctgtcgttggggcacaacaatattgtacgctgcatagtgcactcccccaccaaccccgggttcatgacgtgcagcgatgacttcagagcgcggttttggtaccggagatcgaccactgactgagccaccctctccgtagggttctttctcgaggactctaccctcctcccccacgtcctgtctcagctgcagtcgtaagtccgtgcaccatccttgacgttttgctgccacctctgtccacattcttcttggatttgtataaaagaatctttttttaccttgatgtagaatcatggtggaaaaagttggaaacacagatctgtgcagttctacattcactgattattacagtgtgattttcatcggttttgtaagtacaggacttgccgtttcttttgatctcttgattgaaggaggatagggcattaaagtgcttttgacatgaggaattttcatttggttcttctgtcaactttcttgcttattctgctgaaccctctgtgtatttcccttccaggtatatttgaacagataagcaggcatgcagctctgagactcctgagttttatgccattatcaaaagcattttcaagaatccctcaattctatcctgaaatgatgttattctgataataaagctcagatctgcaactttattgttatatatttttcacttctgtaaaattaatggccagtttttcctgacaatttataggaacagtatctttcaacatactccctacattatccttcaatatctgcaatacttgtctttagtaactgtatttctggtaagattatgatttcatgagaaacaattgaaaatatatccgatctaattaaattaggtcagcctgctattgctctcaggtgttgcctgtcttcacgaatgattagtatcgattgacctctttcttaggtg

SEQ ID NO: 449262 - DNA, 2413 bp, Homo sapiens
tccctaagaacccggaagtggtggagccaacggccagccagacctgtggcagtcccagccccagggtgctctccgcggtcggccatttatcggtgaagcaacagccccttgacgtcaagcttgacgcattggagataaagtccgaggaggtgaactaacctttgaacgtgccagtaagtaagatggcgagaaaagcaagagagagtgggaccgatcgatagcgcagcggtcggcttggcgccctttcagcgtgcgcagtgaacgtgcgctcggagcggtagattgggcaggattcgcgcctccatttttccaggagagagcgggataccaagagaaccggaccagctgctggcagggaaactgtcttccttttctccaagatgtacagaaccaaagtgggcttgaaggaccgccagcagctctacaagctgatcattagccagctgctatatgacggctacatcagcatcgccaatggcctcatcaatgaaatcaagcctcagtctgtgtgtgcaccctcggagcagctcctgcatctcatcaaactcggaatggaaaacgatgacaccgcagttcagtatgcaattggtcgttcagatactgttgcccctggcacagggattgacctggaatttgatgcagatgttcagactatgtccccagaggcttctgagtacgaaacatgctatgtcacatcacataaaggaccatgccgtgtagctacctatagtagagatgttggccaaaagtgccatgccaatagaggtcatgatgaatgagaccgcacaacaaaatatggaaaaccacccagtgattcgaactctttatgaccatgtggatgaagtcacgtgccttgctttccacccaacagaacagatcctggcttctggttcaagggattatactcttaaattatttgattattccaaaccatcagcaaaaagagccttcaaatacattcaggaagctgaaatgttacgttccatctcttttcatccttctggagactttatacttgtcggaactcagcatcctactcttcgcctttatgatatcaacacctttcaatgttttgtctcttgcaatcctcaagatcaacacaccgatgctatatgttccgttaattacaattctagtgccaatatgtacgtaactggaagcaaggacggctgcatcaaattatgggatggtgtttcaaatcgatgcatcacaacttttgagaaagcacatgacggtgctgaagtttgttctgccattttttccaaaaattctaaatacattctctcaagtggaaaagactctgtagctaaactttgggaaatatcaacgggacgaacactggtcagatacacgggcgcgggtttaagtggacgccaggtgcaccggacacaggctgtgtttaaccacaccgaggactatgtgttgctgcccgacgagaggacgatcagtctttgctgctgggactcgaggacagccgagcggagaaacctgctgtcgttggggcacaacaatattgtacgctgcatagtgcactcccccaccaaccccgggttcatgacgtgcagcgatgacttcagagcgcggttttggtaccggagatcgaccactgactgagccaccctctccgtagggttctttctcgaggactctaccctcctcccccacgtcctgtctcagctgcagtcgtaagtccgtgcaccatccttgacgttttgctgccacctctgtccacattcttcttggatttgtataaaagaatctttttttaccttgatgtagaatcatggtggaaaaagttggaaacacagatctgtgcagttctacattcactgattattacagtgtgattttcatcggttttgtaagtacaggacttgccgtttcttttgatctcttgattgaaggaggatagggcattaaagtgcttttgacatgaggaattttcatttggttcttctgtcaactttcttgcttattctgctgaaccctctgtgtatttcccttccaggtatatttgaacagataagcaggcatgcagctctgagactcctgagttttatgccattatcaaaagcattttcaagaatccctcaattctatcctgaaatgatgttattctgataataaagctcagatctgcaactttattgttatatatttttcacttctgtaaaattaatggccagtttttcctgacaatttataggaacagtatctttcaacatactccctacattatccttcaatatctgcaatacttgtctttagtaactgtatttctggtaagattatgatttcatgagaaacaattgaaaatatatccgatctaattaaattaggtcagcctgctattgctctcaggtgttgcctgtcttcacgaatgattagtatcgattgacctctttcttaggtg

SEQ ID NO: 449263 - DNA, 1714 bp, Homo sapiens
tacggaacgggaaccagagtcaacctagttaacccggtttcaggtagcgaggctgggtggcgtgaggtcatgatgaatgagaccgcacaacaaaatatggaaaaccacccagtgattcgaactctttatgaccatgtggatgaagtcacgtgccttgctttccacccaacagaacagatcctggcttctggttcaagggattatactcttaaattatttgattattccaaaccatcagcaaaaagagccttcaaatacattcaggaagctgaaatgttacgttccatctcttttcatccttctggagactttatacttgtcggaactcagcatcctactcttcgcctttatgatatcaacacctttcaatgttttgtctcttgcaatcctcaagatcaacacaccgatgctatatgttccgttaattacaattctagtgccaatatgtacgtaactggaagcaaggacggctgcatcaaattatgggatggtgtttcaaatcgatgcatcacaacttttgagaaagcacatgacggtgctgaagtttgttctgccattttttccaaaaattctaaatacattctctcaagtggaaaagactctgtagctaaactttgggaaatatcaacgggacgaacactggtcagatacacgggcgcgggtttaagtggacgccaggtgcaccggacacaggctgtgtttaaccacaccgaggactatgtgttgctgcccgacgagaggacgatcagtctttgctgctgggactcgaggacagccgagcggagaaacctgctgtcgttggggcacaacaatattgtacgctgcatagtgcactcccccaccaaccccgggttcatgacgtgcagcgatgacttcagagcgcggttttggtaccggagatcgaccactgactgagccaccctctccgtagggttctttctcgaggactctaccctcctcccccacgtcctgtctcagctgcagtcgtaagtccgtgcaccatccttgacgttttgctgccacctctgtccacattcttcttggatttgtataaaagaatctttttttaccttgatgtagaatcatggtggaaaaagttggaaacacagatctgtgcagttctacattcactgattattacagtgtgattttcatcggttttgtaagtacaggacttgccgtttcttttgatctcttgattgaaggaggatagggcattaaagtgcttttgacatgaggaattttcatttggttcttctgtcaactttcttgcttattctgctgaaccctctgtgtatttcccttccaggtatatttgaacagataagcaggcatgcagctctgagactcctgagttttatgccattatcaaaagcattttcaagaatccctcaattctatcctgaaatgatgttattctgataataaagctcagatctgcaactttattgttatatatttttcacttctgtaaaattaatggccagtttttcctgacaatttataggaacagtatctttcaacatactccctacattatccttcaatatctgcaatacttgtctttagtaactgtatttctggtaagattatgatttcatgagaaacaattgaaaatatatccgatctaattaaattaggtcagcctgctattgctctcaggtgttgcctgtcttcacgaatgattagtatcgattgacctctttcttaggtg

SEQ ID NO: 449264 - DNA, 2460 bp, Homo sapiens
tccctaagaacccggaagtggtggagccaacggccagccagacctgtggcagtcccagccccagggtgctctccgcggtcggccatttatcggtgaagcaacagccccttgacgtcaagcttgacgcattggagataaagtccgaggaggtgaactaacctttgaacgtgccagtaagtaagatggcgagaaaagcaagagagagtgggaccgatcgatagcgcagcggtcggcttggcgccctttcagcgtgcgcagtgaacgtgcgctcggagcggtagattgggcaggattcgcgcctccatttttccaggagagagcgggataccaagagaaccggaccagctgctggcagggaaactgtcttccttttctccaagatgtacagaaccaaagtgggcttgaaggaccgccagcagctctacaagctgatcattagccagctgctatatgacggctacatcagcatcgccaatggcctcatcaatgaaatcaagcctcagtctgtgtgtgcaccctcggagcagctcctgcatctcatcaaactcggtagattgtgaacacaaatccatacgtcccatggcaaggaatggaaaacgatgacaccgcagttcagtatgcaattggtcgttcagatactgttgcccctggcacagggattgacctggaatttgatgcagatgttcagactatgtccccagaggcttctgagtacgaaacatgctatgtcacatcacataaaggaccatgccgtgtagctacctatagtagagatggacagttaatagctactgggtctgctgatgcttcgataaagatacttgacacagagaggatgttggccaaaagtgccatgccaatagaggtcatgatgaatgagaccgcacaacaaaatatggcttgctttccacccaacagaacagatcctggcttctggttcaagggattatactcttaaattatttgattattccaaaccatcagcaaaaagagccttcaaatacattcaggaagctgaaatgttacgttccatctcttttcatccttctggagactttatacttgtcggaactcagcatcctactcttcgcctttatgatatcaacacctttcaatgttttgtctcttgcaatcctcaagatcaacacaccgatgctatatgttccgttaattacaattctagtgccaatatgtacgtaactggaagcaaggacggctgcatcaaattatgggatggtgtttcaaatcgatgcatcacaacttttgagaaagcacatgacggtgctgaagtttgttctgccattttttccaaaaattctaaatacattctctcaagtggaaaagactctgtagctaaactttgggaaatatcaacgggacgaacactggtcagatacacgggcgcgggtttaagtggacgccaggtgcaccggacacaggctgtgtttaaccacaccgaggactatgtgttgctgcccgacgagaggacgatcagtctttgctgctgggactcgaggacagccgagcggagaaacctgctgtcgttggggcacaacaatattgtacgctgcatagtgcactcccccaccaaccccgggttcatgacgtgcagcgatgacttcagagcgcggttttggtaccggagatcgaccactgactgagccaccctctccgtagggttctttctcgaggactctaccctcctcccccacgtcctgtctcagctgcagtcgtaagtccgtgcaccatccttgacgttttgctgccacctctgtccacattcttcttggatttgtataaaagaatctttttttaccttgatgtagaatcatggtggaaaaagttggaaacacagatctgtgcagttctacattcactgattattacagtgtgattttcatcggttttgtaagtacaggacttgccgtttcttttgatctcttgattgaaggaggatagggcattaaagtgcttttgacatgaggaattttcatttggttcttctgtcaactttcttgcttattctgctgaaccctctgtgtatttcccttccaggtatatttgaacagataagcaggcatgcagctctgagactcctgagttttatgccattatcaaaagcattttcaagaatccctcaattctatcctgaaatgatgttattctgataataaagctcagatctgcaactttattgttatatatttttcacttctgtaaaattaatggccagtttttcctgacaatttataggaacagtatctttcaacatactccctacattatccttcaatatctgcaatacttgtctttagtaactgtatttctggtaagattatgatttcatgagaaacaattgaaaatatatccgatctaattaaattaggtcagcctgctattgctctcaggtgttgcctgtcttcacgaatgattagtatcgattgacctctttcttaggtg

SEQ ID NO: 449265 - DNA, 2341 bp, Homo sapiens
  misc_feature (2296)..(2296): n is a, c, g, or t
tccctaagaacccggaagtggtggagccaacggccagccagacctgtggcagtcccagccccagggtgctctccgcggtcggccatttatcggtgaagcaacagccccttgacgtcaagcttgacgcattggagataaagtccgaggaggtgaactaacctttgaacgtgccagtaagtaagatggcgagaaaagcaagagagagtgggaccgatcgatagcgcagcggtcggcttggcgccctttcagcgtgcgcagtgaacgtgcgctcggagcggtagattgggcaggattcgcgcctccatttttccaggagagagcgggataccaagagaaccggaccagctgctggcagggaaactgtcttccttttctccaagatgtacagaaccaaagtgggcttgaaggaccgccagcagctctacaagctgatcattagccagctgctatatgacggctacatcagcatcgccaatggcctcatcaatgaaatcaagcctcagtctgtgtgtgcaccctcggagcagctcctgcatctcatcaaactcggaatggaaaacgatgacaccgcagttcagtatgcaattggtcgttcagatactgttgcccctggcacagggattgacctggaatttgatgcagatgttcagactatgtccccagaggcttctgagtacgaaacatgctatgtcacatcacataaaggaccatgccgtgtagctacctatagtagagatggacagttaatagctactgggtctgctgatgcttcgataaagatacttgacacagagaggatgttggccaaaagtgccatgccaatagaggtcatgatgaatgagaccgcacaacaaaatatggaaaaccacccagtgattcgaactctttatgaccatgtggatgaagtcacgtgccttgctttccacccaacagaacagatcctggcttctggttcaagggattatactcttaaattatttgattattccaaaccatcagcaaaaagagccttcaaatacattcaggaagctgaaatgttacgttccatctcttttcatccttctggagactttatacttgtcggaactcagcatcctactcttcgcctttatgatatcaacacctttcaatgttttgtctcttgcaatcctcaagatcaacacaccgatgctatatgttccgttaattacaattctagtgccaatatgtacgtaactggaagcaaggacggctgcatcaaattatgggatggtgtttcaaatcgatgcatcacaacttttgagaaagcacatgacggtgctgaagtttgttctgccattttttccaaaaattctaaatacattctctcaagtggaaaagactctgtagctaaactttgggaaatatcaacgggacgaacactggtcagatacacgggcgcgggtttaagtggacgccaggtgcaccggacacaggctgtgtttaaccacaccgaggactatgtgttgctgcccgacgagaggacgatcagtctttgctgctgggactcgaggacagccgagcggagaaacctgctgtcgttggggcacaacaatattgtacgctgcatagtgcactcccccaccaaccccgggttcatgacgtgcagcgatgacttcagagcgcggttttggtaccggagatcgaccactgactgagccaccctctccgtagggttctttctcgaggactctaccctcctcccccacgtcctgtctcagctgcagtcgtaagtccgtgcaccatccttgacgttttgctgccacctctgtccacattcttcttggatttgtataaaagaatctttttttaccttgatgtagaatcatggtggaaaaagttggaaacacagatctgtgcagttctacattcactgattattacagtgtgattttcatcggttttgtaagtacaggacttgccgtttcttttgatctcttgattgaaggaggatagggcattaaagtgcttttgacatgaggaattttcatttggttcttctgtcaactttcttgcttattctgctgaaccctctgtgtatttcccttccaggtatatttgaacagataagcaggcatgcagctctgagactcctgagttttatgccattatcaaaagcattttcaagaatccctcaattctatcctgaaatgatgttattctgataataaagctcagatctgcaactttattgttatatatttttcacttctgtaaaattaatggccagtttttcctgacaatttataggaacagtatctttcaacatactcctaantttcttatatttggaactggttttgacgttttgggagagttgttc

SEQ ID NO: 449266 - DNA, 2445 bp, Homo sapiens
tccctaagaacccggaagtggtggagccaacggccagccagacctgtggcagtcccagccccagggtgctctccgcggtcggccatttatcggtgaagcaacagccccttgacgtcaagcttgacgcattggagataaagtccgaggaggtgaactaacctttgaacgtgccagtaagtaagatggcgagaaaagcaagagagagtgggaccgatcgatagcgcagcggtcggcttggcgccctttcagcgtgcgcagtgaacgtgcgctcggagcggtagattgggcaggattcgcgcctccatttttccaggagagagcgggataccaagagaaccggaccagctgctggcagggaaactgtcttccttttctccaagatgtacagaaccaaagtgggcttgaaggaccgccagcagctctacaagctgatcattagccagctgctatatgacggctacatcagcatcgccaatggcctcatcaatgaaatcaagcctcagtctgtgtgtgcaccctcggagcagctcctgcatctcatcaaactcggaatggaaaacgatgacaccgcagttcagtatgcaattggtcgttcagatactgttgcccctggcacagggattgacctggaatttgatgcagatgttcagactatgtccccagaggcttctgagtacgaaacatgctatgtcacatcacataaaggaccatgccgtgtagctacctatagtagagatggacagttaatagctactgggtctgctgatgcttcgataaagatacttgacacagagaggatgttggccaaaagtgccatgccaatagaggtcatgatgaatgagaccgcacaacaaaatatggaaaaccacccagtgattcgaactctttatgaccatgtggatgaagtcacgtgccttgctttccacccaacagaacagatcctggcttctggttcaagggattatactcttaaattatttgattattccaaaccatcagcaaaaagagccttcaaatacattcagcatccttctggagactttatacttgtcggaactcagcatcctactcttcgcctttatgatatcaacacctttcaatgttttgtctcttgcaatcctcaagatcaacacaccgatgctatatgttccgttaattacaattctagtgccaatatgtacgtaactggaagcaaggacggctgcatcaaattatgggatggtgtttcaaatcgatgcatcacaacttttgagaaagcacatgacggtgctgaagtttgttctgccattttttccaaaaattctaaatacattctctcaagtggaaaagactctgtagctaaactttgggaaatatcaacgggacgaacactggtcagatacacgggcgcgggtttaagtggacgccaggtgcaccggacacaggctgtgtttaaccacaccgaggactatgtgttgctgcccgacgagaggacgatcagtctttgctgctgggactcgaggacagccgagcggagaaacctgctgtcgttggggcacaacaatattgtacgctgcatagtgcactcccccaccaaccccgggttcatgacgtgcagcgatgacttcagagcgcggttttggtaccggagatcgaccactgactgagccaccctctccgtagggttctttctcgaggactctaccctcctcccccacgtcctgtctcagctgcagtcgtaagtccgtgcaccatccttgacgttttgctgccacctctgtccacattcttcttggatttgtataaaagaatctttttttaccttgatgtagaatcatggtggaaaaagttggaaacacagatctgtgcagttctacattcactgattattacagtgtgattttcatcggttttgtaagtacaggacttgccgtttcttttgatctcttgattgaaggaggatagggcattaaagtgcttttgacatgaggaattttcatttggttcttctgtcaactttcttgcttattctgctgaaccctctgtgtatttcccttccaggtatatttgaacagataagcaggcatgcagctctgagactcctgagttttatgccattatcaaaagcattttcaagaatccctcaattctatcctgaaatgatgttattctgataataaagctcagatctgcaactttattgttatatatttttcacttctgtaaaattaatggccagtttttcctgacaatttataggaacagtatctttcaacatactccctacattatccttcaatatctgcaatacttgtctttagtaactgtatttctggtaagattatgatttcatgagaaacaattgaaaatatatccgatctaattaaattaggtcagcctgctattgctctcaggtgttgcctgtcttcacgaatgattagtatcgattgacctctttcttaggtg

SEQ ID NO: 449267 - DNA, 2300 bp, Homo sapiens
tccctaagaacccggaagtggtggagccaacggccagccagacctgtggcagtcccagccccagggtgctctccgcggtcggccatttatcggtgaagcaacagccccttgacgtcaagcttgacgcattggagataaagtccgaggaggtgaactaacctttgaacgtgccactggcagggaaactgtcttccttttctccaagatgtacagaaccaaagtgggcttgaaggaccgccagcagctctacaagctgatcattagccagctgctatatgacggctacatcagcatcgccaatggcctcatcaatgaaatcaagcctcagtctgtgtgtgcaccctcggagcagctcctgcatctcatcaaactcggaatggaaaacgatgacaccgcagttcagtatgcaattggtcgttcagatactgttgcccctggcacagggattgacctggaatttgatgcagatgttcagactatgtccccagaggcttctgagtacgaaacatgctatgtcacatcacataaaggaccatgccgtgtagctacctatagtagagatggacagttaatagctactgggtctgctgatgcttcgataaagatacttgacacagagaggatgttggccaaaagtgccatgccaatagaggtcatgatgaatgagaccgcacaacaaaatatggaaaaccacccagtgattcgaactctttatgaccatgtggatgaagtcacgtgccttgctttccacccaacagaacagatcctggcttctggttcaagggattatactcttaaattatttgattattccaaaccatcagcaaaaagagccttcaaatacattcaggaagctgaaatgttacgttccatctcttttcatccttctggagactttatacttgtcggaactcagcatcctactcttcgcctttatgatatcaacacctttcaatgttttgtctcttgcaatcctcaagatcaacacaccgatgctatatgttccgttaattacaattctagtgccaatatgtacgtaactggaagcaaggacggctgcatcaaattatgggatggtgtttcaaatcgatgcatcacaacttttgagaaagcacatgacggtgctgaagtttgttctgccattttttccaaaaattctaaatacattctctcaagtggaaaagactctgtagctaaactttgggaaatatcaacgggacgaacactggtcagatacacgggcgcgggtttaagtggacgccaggtgcaccggacacaggctgtgtttaaccacaccgaggactatgtgttgctgcccgacgagaggacgatcagtctttgctgctgggactcgaggacagccgagcggagaaacctgctgtcgttggggcacaacaatattgtacgctgcatagtgcactcccccaccaaccccgggttcatgacgtgcagcgatgacttcagagcgcggttttggtaccggagatcgaccactgactgagccaccctctccgtagggttctttctcgaggactctaccctcctcccccacgtcctgtctcagctgcagtcgtaagtccgtgcaccatccttgacgttttgctgccacctctgtccacattcttcttggatttgtataaaagaatctttttttaccttgatgtagaatcatggtggaaaaagttggaaacacagatctgtgcagttctacattcactgattattacagtgtgattttcatcggttttgtaagtacaggacttgccgtttcttttgatctcttgattgaaggaggatagggcattaaagtgcttttgacatgaggaattttcatttggttcttctgtcaactttcttgcttattctgctgaaccctctgtgtatttcccttccaggtatatttgaacagataagcaggcatgcagctctgagactcctgagttttatgccattatcaaaagcattttcaagaatccctcaattctatcctgaaatgatgttattctgataataaagctcagatctgcaactttattgttatatatttttcacttctgtaaaattaatggccagtttttcctgacaatttataggaacagtatctttcaacatactccctacattatccttcaatatctgcaatacttgtctttagtaactgtatttctggtaagattatgatttcatgagaaacaattgaaaatatatccgatctaattaaattaggtcagcctgctattgctctcaggtgttgcctgtcttcacgaatgattagtatcgattgacctctttcttaggtg

SEQ ID NO: 449268 - DNA, 2577 bp, Homo sapiens
tccctaagaacccggaagtggtggagccaacggccagccagacctgtggcagtcccagccccagggtgctctccgcggtcggccatttatcggtgaagcaacagccccttgacgtcaagcttgacgcattggagataaagtccgaggaggtgaactaacctttgaacgtgccagtaagtaagatggcgagaaaagcaagagagagtgggaccgatcgatagcgcagcggtcggcttggcgccctttcagcgtgcgcagtgaacgtgcgctcggagcggtagattgggcaggattcgcgcctccatttttccaggagagagcgggataccaagagaaccggaccagctggtactgggacacggggagagtagctggtgcggtcggctggggcatttagagaaaaccacagaaacgactggggcgagactggaagagtcgagagttagcaagctggcagggaaactgtcttccttttctccaagatgtacagaaccaaagtgggcttgaaggaccgccagcagctctacaagctgatcattagccagctgctatatgacggctacatcagcatcgccaatggcctcatcaatgaaatcaagcctcagtctgtgtgtgcaccctcggagcagctcctgcatctcatcaaactcggaatggaaaacgatgacaccgcagttcagtatgcaattggtcgttcagatactgttgcccctggcacagggattgacctggaatttgatgcagatgttcagactatgtccccagaggcttctgagtacgaaacatgctatgtcacatcacataaaggaccatgccgtgtagctacctatagtagagatggacagttaatagctactgggtctgctgatgcttcgataaagatacttgacacagagaggatgttggccaaaagtgccatgccaatagaggtcatgatgaatgagaccgcacaacaaaatatggaaaaccacccagtgattcgaactctttatgaccatgtggatgaagtcacgtgccttgctttccacccaacagaacagatcctggcttctggttcaagggattatactcttaaattatttgattattccaaaccatcagcaaaaagagccttcaaatacattcaggaagctgaaatgttacgttccatctcttttcatccttctggagactttatacttgtcggaactcagcatcctactcttcgcctttatgatatcaacacctttcaatgttttgtctcttgcaatcctcaagatcaacacaccgatgctatatgttccgttaattacaattctagtgccaatatgtacgtaactggaagcaaggacggctgcatcaaattatgggatggtgtttcaaatcgatgcatcacaacttttgagaaagcacatgacggtgctgaagtttgttctgccattttttccaaaaattctaaatacattctctcaagtggaaaagactctgtagctaaactttgggaaatatcaacgggacgaacactggtcagatacacgggcgcgggtttaagtggacgccaggtgcaccggacacaggctgtgtttaaccacaccgaggactatgtgttgctgcccgacgagaggacgatcagtctttgctgctgggactcgaggacagccgagcggagaaacctgctgtcgttggggcacaacaatattgtacgctgcatagtgcactcccccaccaaccccgggttcatgacgtgcagcgatgacttcagagcgcggttttggtaccggagatcgaccactgactgagccaccctctccgtagggttctttctcgaggactctaccctcctcccccacgtcctgtctcagctgcagtcgtaagtccgtgcaccatccttgacgttttgctgccacctctgtccacattcttcttggatttgtataaaagaatctttttttaccttgatgtagaatcatggtggaaaaagttggaaacacagatctgtgcagttctacattcactgattattacagtgtgattttcatcggttttgtaagtacaggacttgccgtttcttttgatctcttgattgaaggaggatagggcattaaagtgcttttgacatgaggaattttcatttggttcttctgtcaactttcttgcttattctgctgaaccctctgtgtatttcccttccaggtatatttgaacagataagcaggcatgcagctctgagactcctgagttttatgccattatcaaaagcattttcaagaatccctcaattctatcctgaaatgatgttattctgataataaagctcagatctgcaactttattgttatatatttttcacttctgtaaaattaatggccagtttttcctgacaatttataggaacagtatctttcaacatactccctacattatccttcaatatctgcaatacttgtctttagtaactgtatttctggtaagattatgatttcatgagaaacaattgaaaatatatccgatctaattaaattaggtcagcctgctattgctctcaggtgttgcctgtcttcacgaatgattagtatcgattgacctctttcttaggtg

SEQ ID NO: 449269 - DNA, 2422 bp, Homo sapiens
tccctaagaacccggaagtggtggagccaacggccagccagacctgtggcagtcccagccccagggtgctctccgcggtcggccatttatcggtgaagcaacagccccttgacgtcaagcttgacgcattggagataaagtccgaggaggtgaactaacctttgaacgtgccagtaagtaagatggcgagaaaagcaagagagagtgggaccgatcgatagcgcagcggtcggcttggcgccctttcagcgtgcgcagtgaacgtgcgctcggagcggtagattgggcaggattcgcgcctccatttttccaggagagagcgggataccaagagaaccggaccagctgctggcagggaaactgtcttccttttctccaagatgtacagaaccaaagtgggcttgaaggaccgccagcagctctacaagctgatcattagccagctgctatatgacggctacatcagcatcgccaatggcctcatcaatgaaatcaagcctcagtctgtgtgtgcaccctcggagcagctcctgcatctcatcaaactcggaatggaaaacgatgacaccgcagttcagtatgcaattggtcgttcagatactgttgcccctggcacagggattgacctggaatttgatgcagatgttcagactatgtccccagaggcttctgagtacgaaacatgctatgtcacatcacataaaggaccatgccgtgtagctacctatagtagagatggacagttaatagctactgggtctgctgatgcttcgataaagatacttgacacagagaggatgttggccaaaagtgccatgccaatagaggtcatgatgaatgagaccgcacaacaaaatatggcttgctttccacccaacagaacagatcctggcttctggttcaagggattatactcttaaattatttgattattccaaaccatcagcaaaaagagccttcaaatacattcaggaagctgaaatgttacgttccatctcttttcatccttctggagactttatacttgtcggaactcagcatcctactcttcgcctttatgatatcaacacctttcaatgttttgtctcttgcaatcctcaagatcaacacaccgatgctatatgttccgttaattacaattctagtgccaatatgtacgtaactggaagcaaggacggctgcatcaaattatgggatggtgtttcaaatcgatgcatcacaacttttgagaaagcacatgacggtgctgaagtttgttctgccattttttccaaaaattctaaatacattctctcaagtggaaaagactctgtagctaaactttgggaaatatcaacgggacgaacactggtcagatacacgggcgcgggtttaagtggacgccaggtgcaccggacacaggctgtgtttaaccacaccgaggactatgtgttgctgcccgacgagaggacgatcagtctttgctgctgggactcgaggacagccgagcggagaaacctgctgtcgttggggcacaacaatattgtacgctgcatagtgcactcccccaccaaccccgggttcatgacgtgcagcgatgacttcagagcgcggttttggtaccggagatcgaccactgactgagccaccctctccgtagggttctttctcgaggactctaccctcctcccccacgtcctgtctcagctgcagtcgtaagtccgtgcaccatccttgacgttttgctgccacctctgtccacattcttcttggatttgtataaaagaatctttttttaccttgatgtagaatcatggtggaaaaagttggaaacacagatctgtgcagttctacattcactgattattacagtgtgattttcatcggttttgtaagtacaggacttgccgtttcttttgatctcttgattgaaggaggatagggcattaaagtgcttttgacatgaggaattttcatttggttcttctgtcaactttcttgcttattctgctgaaccctctgtgtatttcccttccaggtatatttgaacagataagcaggcatgcagctctgagactcctgagttttatgccattatcaaaagcattttcaagaatccctcaattctatcctgaaatgatgttattctgataataaagctcagatctgcaactttattgttatatatttttcacttctgtaaaattaatggccagtttttcctgacaatttataggaacagtatctttcaacatactccctacattatccttcaatatctgcaatacttgtctttagtaactgtatttctggtaagattatgatttcatgagaaacaattgaaaatatatccgatctaattaaattaggtcagcctgctattgctctcaggtgttgcctgtcttcacgaatgattagtatcgattgacctctttcttaggtg

SEQ ID NO: 449270 - DNA, 2513 bp, Homo sapiens
tccctaagaacccggaagtggtggagccaacggccagccagacctgtggcagtcccagccccagggtgctctccgcggtcggccatttatcggtgaagcaacagccccttgacgtcaagcttgacgcattggagataaagtccgaggaggtgaactaacctttgaacgtgccagtaagtaagatggcgagaaaagcaagagagagtgggaccgatcgatagcgcagcggtcggcttggcgccctttcagcgtgcgcagtgaacgtgcgctcggagcggtagattgggcaggattcgcgcctccatttttccaggagagagcgggataccaagagaaccggaccagctgctggcagggaaactgtcttccttttctccaagatgtacagaaccaaagtgggcttgaaggaccgccagcagctctacaagctgatcattagccagctgctatatgacggctacatcagcatcgccaatggcctcatcaatgaaatcaagcctcagtctgtgtgtgcaccctcggagcagctcctgcatctcatcaaactcggtagattgtgaacacaaatccatacgtcccatggcaaggaatggaaaacgatgacaccgcagttcagtatgcaattggtcgttcagatactgttgcccctggcacagggattgacctggaatttgatgcagatgttcagactatgtccccagaggcttctgagtacgaaacatgctatgtcacatcacataaaggaccatgccgtgtagctacctatagtagagatggacagttaatagctactgggtctgctgatgcttcgataaagatacttgacacagagaggatgttggccaaaagtgccatgccaatagaggtcatgatgaatgagaccgcacaacaaaatatggaaaaccacccagtgattcgaactctttatgaccatgtggatgaagtcacgtgccttgctttccacccaacagaacagatcctggcttctggttcaagggattatactcttaaattatttgattattccaaaccatcagcaaaaagagccttcaaatacattcaggaagctgaaatgttacgttccatctcttttcatccttctggagactttatacttgtcggaactcagcatcctactcttcgcctttatgatatcaacacctttcaatgttttgtctcttgcaatcctcaagatcaacacaccgatgctatatgttccgttaattacaattctagtgccaatatgtacgtaactggaagcaaggacggctgcatcaaattatgggatggtgtttcaaatcgatgcatcacaacttttgagaaagcacatgacggtgctgaagtttgttctgccattttttccaaaaattctaaatacattctctcaagtggaaaagactctgtagctaaactttgggaaatatcaacgggacgaacactggtcagatacacgggcgcgggtttaagtggacgccaggtgcaccggacacaggctgtgtttaaccacaccgaggactatgtgttgctgcccgacgagaggacgatcagtctttgctgctgggactcgaggacagccgagcggagaaacctgctgtcgttggggcacaacaatattgtacgctgcatagtgcactcccccaccaaccccgggttcatgacgtgcagcgatgacttcagagcgcggttttggtaccggagatcgaccactgactgagccaccctctccgtagggttctttctcgaggactctaccctcctcccccacgtcctgtctcagctgcagtcgtaagtccgtgcaccatccttgacgttttgctgccacctctgtccacattcttcttggatttgtataaaagaatctttttttaccttgatgtagaatcatggtggaaaaagttggaaacacagatctgtgcagttctacattcactgattattacagtgtgattttcatcggttttgtaagtacaggacttgccgtttcttttgatctcttgattgaaggaggatagggcattaaagtgcttttgacatgaggaattttcatttggttcttctgtcaactttcttgcttattctgctgaaccctctgtgtatttcccttccaggtatatttgaacagataagcaggcatgcagctctgagactcctgagttttatgccattatcaaaagcattttcaagaatccctcaattctatcctgaaatgatgttattctgataataaagctcagatctgcaactttattgttatatatttttcacttctgtaaaattaatggccagtttttcctgacaatttataggaacagtatctttcaacatactccctacattatccttcaatatctgcaatacttgtctttagtaactgtatttctggtaagattatgatttcatgagaaacaattgaaaatatatccgatctaattaaattaggtcagcctgctattgctctcaggtgttgcctgtcttcacgaatgattagtatcgattgacctctttcttaggtg

SEQ ID NO: 449271 - DNA, 2416 bp, Homo sapiens
tccctaagaacccggaagtggtggagccaacggccagccagacctgtggcagtcccagccccagggtgctctccgcggtcggccatttatcggtgaagcaacagccccttgacgtcaagcttgacgcattggagataaagtccgaggaggtgaactaacctttgaacgtgccagtaagtaagatggcgagaaaagcaagagagagtgggaccgatcgatagcgcagcggtcggcttggcgccctttcagcgtgcgcagtgaacgtgcgctcggagcggtagattgggcaggattcgcgcctccatttttccaggagagagcgggataccaagagaaccggaccagctgctggcagggaaactgtcttccttttctccaagatgtacagaaccaaagtgggcttgaaggaccgccagcagctctacaagctgatcattagccagctgctatatgacggctacatcagcatcgccaatggcctcatcaatgaaatcaagcctcagtctgtgtgtgcaccctcggagcagctcctgcatctcatcaaactcgcctggcacagggattgacctggaatttgatgcagatgttcagactatgtccccagaggcttctgagtacgaaacatgctatgtcacatcacataaaggaccatgccgtgtagctacctatagtagagatggacagttaatagctactgggtctgctgatgcttcgataaagatacttgacacagagaggatgttggccaaaagtgccatgccaatagaggtcatgatgaatgagaccgcacaacaaaatatggaaaaccacccagtgattcgaactctttatgaccatgtggatgaagtcacgtgccttgctttccacccaacagaacagatcctggcttctggttcaagggattatactcttaaattatttgattattccaaaccatcagcaaaaagagccttcaaatacattcaggaagctgaaatgttacgttccatctcttttcatccttctggagactttatacttgtcggaactcagcatcctactcttcgcctttatgatatcaacacctttcaatgttttgtctcttgcaatcctcaagatcaacacaccgatgctatatgttccgttaattacaattctagtgccaatatgtacgtaactggaagcaaggacggctgcatcaaattatgggatggtgtttcaaatcgatgcatcacaacttttgagaaagcacatgacggtgctgaagtttgttctgccattttttccaaaaattctaaatacattctctcaagtggaaaagactctgtagctaaactttgggaaatatcaacgggacgaacactggtcagatacacgggcgcgggtttaagtggacgccaggtgcaccggacacaggctgtgtttaaccacaccgaggactatgtgttgctgcccgacgagaggacgatcagtctttgctgctgggactcgaggacagccgagcggagaaacctgctgtcgttggggcacaacaatattgtacgctgcatagtgcactcccccaccaaccccgggttcatgacgtgcagcgatgacttcagagcgcggttttggtaccggagatcgaccactgactgagccaccctctccgtagggttctttctcgaggactctaccctcctcccccacgtcctgtctcagctgcagtcgtaagtccgtgcaccatccttgacgttttgctgccacctctgtccacattcttcttggatttgtataaaagaatctttttttaccttgatgtagaatcatggtggaaaaagttggaaacacagatctgtgcagttctacattcactgattattacagtgtgattttcatcggttttgtaagtacaggacttgccgtttcttttgatctcttgattgaaggaggatagggcattaaagtgcttttgacatgaggaattttcatttggttcttctgtcaactttcttgcttattctgctgaaccctctgtgtatttcccttccaggtatatttgaacagataagcaggcatgcagctctgagactcctgagttttatgccattatcaaaagcattttcaagaatccctcaattctatcctgaaatgatgttattctgataataaagctcagatctgcaactttattgttatatatttttcacttctgtaaaattaatggccagtttttcctgacaatttataggaacagtatctttcaacatactccctacattatccttcaatatctgcaatacttgtctttagtaactgtatttctggtaagattatgatttcatgagaaacaattgaaaatatatccgatctaattaaattaggtcagcctgctattgctctcaggtgttgcctgtcttcacgaatgattagtatcgattgacctctttcttaggtg

SEQ ID NO: 449272 - DNA, 1002 bp, Homo sapiens
tcgagctcggtaccggctcattgtgtactggcgtggcgctttgggtggactcgggaggctctttgtgaggccctttgcgtggctcgttggggcacaacaatattgtacgctgcatagtgcactcccccaccaaccccgggttcatgacgtgcagcgatgacttcagagcgcggttttggtaccggagatcgaccactgactgagccaccctctccgtagggttctttctcgaggactctaccctcctcccccacgtcctgtctcagctgcagtcgtaagtccgtgcaccatccttgacgttttgctgccacctctgtccacattcttcttggatttgtataaaagaatctttttttaccttgatgtagaatcatggtggaaaaagttggaaacacagatctgtgcagttctacattcactgattattacagtgtgattttcatcggttttgtaagtacaggacttgccgtttcttttgatctcttgattgaaggaggatagggcattaaagtgcttttgacatgaggaattttcatttggttcttctgtcaactttcttgcttattctgctgaaccctctgtgtatttcccttccaggtatatttgaacagataagcaggcatgcagctctgagactcctgagttttatgccattatcaaaagcattttcaagaatccctcaattctatcctgaaatgatgttattctgataataaagctcagatctgcaactttattgttatatatttttcacttctgtaaaattaatggccagtttttcctgacaatttataggaacagtatctttcaacatactccctacattatccttcaatatctgcaatacttgtctttagtaactgtatttctggtaagattatgatttcatgagaaacaattgaaaatatatccgatctaattaaattaggtcagcctgctattgctctcaggtgttgcctgtcttcacgaatgattagtatcgattgacctctttcttaggtg

SEQ ID NO: 449273 - DNA, 355 bp, Homo sapiens
tgggattacaggcgtgaaccaccgtgcctggcccttagtgtcttctatatgcctggccctatgttgatgctgggtccttgtcccgaaaaagtatcctggattttggtatgctaagaattctttaaaagcctttgaaagggctcagcattcccatatccctgaaagccaggtagcagcctctgttttataataaagtcaccctcggacagccctcaccagtcacaagcaggcatagtgaatggggagcgtgttgggagcggaggtccgtgctggagaggagggatgctggcccgtgctcctgccgcagctcctgaggagctgtgaccttggaaattcctgccccggcatcagctga

SEQ ID NO: 449274 - DNA, 4049 bp, Homo sapiens
attgatgttcctttcctcacagcaacagataccacactacagtgggacaatttagacactcctgttaacctaacgtatgggtcatcttactctggaagactatcagatctggagtgtgaaaaatgttcttgccaatgagtttttgaacctccttttccaggtgtgtcacatagttctggggttaagaccagctactccggaagaagaaggacaaattattagaggatggttagaacgagagagcaggtatggtctgcaagcaggacacaactggtttatcatctccatgcagtggtggcaacagtggaaagaatatgtcaaatacgatgccaaccctgtggtaattgagccatcatctgttttgaatggaggaaaatactcatttggaactgcagcccatcctatggagcaggtcgaagatagaattggaagcagcctcagttacgtgaatactacagaagagaaattttcagacaacatttctactgcatctgaagcctcagaaactgctggcagcggctttctgtattctgccacaccaggggcagatgtttgctttgctcgacaacataacacttctgacaataacaaccagtgtttgctgggagccaatgggaatattttgttgcaccttaaccctcagaaaccaggggctattgataatcagccattagtaactcaagaaccagtaaaggctacatcattaacactagaaggaggacgattaaaacgaactccacagctgattcatggaagagactatgaaatggtcccagaacctgtgtggagagcactttatcactggtatggagcaaacctggccttacctagaccagttatcaagaacagcaagacagacatcccagagctggaattatttccccgctatcttctcttcctgagacagcagcctgccactcggacacagcagtctaacatctgggtgaatatgggaaatgtaccttctccgaatgcacctttaaagcgggtattagcctatacaggctgttttagtcgaatgcagaccatcaaggaaattcacgaatatctatctcaaaggctgcgcattaaagaggaagatatgcgcctgtggctatacaacagtgagaactaccttactcttctggatgatgaggatcataaattggaatatttgaaaatccaggatgaacaacacctggtaattgaagttcgcaacaaagatatgagttggcctgaggagatgtcttttatagcaaatagtagtaaaatagatagacacaaggttcccacagaaaagggagccacaggtctaagcaatctgggaaacacatgcttcatgaactcaagcatccagtgtgttagtaacacacagccactgacacagtattttatctcagggagacatctttatgaactcaacaggacaaatcccattggtatgaaggggcatatggctaaatgctatggtgatttagtgcaggaactttggagtggaactcagaagaatgttgccccattaaagcttcggtggaccatagcaaaatatgctcccaggtttaatgggtttcagcaacaggactcccaagaacttctggcttttctcttggatggtcttcatgaagatcttaatcgagtccatgaaaagccatatgtggaactgaaggacagtgatgggcgaccagactgggaagtagctgcagaggcctgggacaaccatctaagaagaaatagatcaattgttgtggatttgttccatgggcagctaagatctcaagtaaaatgcaagacatgtgggcatataagtgtccgatttgaccctttcaattttttgtctttgccactaccaatggacagttatatgcacttagaaataacagtgattaagttagatggtactacccctgtacggtatggactaagactgaatatggatgaaaagtacacaggtttaaaaaaacagctgagtgatctctgtggacttaattcagaacaaatccttctagcagaagtacatggttccaacataaagaactttcctcaggacaaccaaaaagtacgactctcagtgagtggatttttgtgtgcatttgaaattcctgtccctgtgtctccaatttcagcttctagtccaacacagacagatttctcctcttcgccatctacaaatgaaatgttcaccctaactaccaatggggacctaccccgaccaatattcatccccaatggaatgccaaacactgttgtgccatgtggaactgagaagaacttcacaaatggaatggttaatggtcacatgccatctcttcctgacagcccctttacaggttacatcattgcagtccaccgaaaaatgatgaggacagaactgtatttcctgtcatctcagaagaatcgccccagcctctttggaatgccattgattgttccatgtactgtgcatacccggaagaaagacctatatgatgcggtttggattcaagtatcccggttagcgagcccactcccacctcaggaagctagtaatcatgcccaggattgtgacgacagtatgggctatcaatatccattcactctacgagttgtgcagaaagatgggaactcctgtgcttggtgcccatggtatagattttgcagaggctgtaaaattgattgtggggaagacagagctttcattggaaatgcctatatcgctgtggattgggatcccacagcccttcaccttcgctatcaaacatcccaggaaagggttgtagatgagcatgagagtgtggagcagagtcggcgagcgcaagccgagcccatcaacctggacagctgtctccgtgctttcaccagtgaggaagagctaggggaaaatgagatgtactactgttccaagtgtaagacccactgcttagcaacaaagaagctggatctctggaggcttccacccatcctgattattcaccttaagcgatttcaatttgtaaatggtcggtggataaaatcacagaaaattgtcaaatttcctcgggaaagttttgatccaagtgcttttttggtaccaagagacccggctctctgccagcataaaccactcacaccccagggggatgagctctctgagcccaggattctggcaagggaggtgaagaaagtggatgcgcagagttcggctggggaagaggacgtgctcctgagcaaaagcccatcctcactcagcgctaacatcatcagcagcccgaaaggttctccttcttcatcaagaaaaagtggaaccagctgtccctccagcaaaaacagcagccctaatagcagcccacggactttggggaggagcaaagggaggctccggctgccccagattggcagcaaaaataaactgtcaagtagtaaagagaacttggatgccagcaaagaaaatggggctgggcagatatgtgagctggctgacgccttgagtcgagggcatgtgctggggggcagccaaccagagttggtcactcctcaggaccatgaggtagctttggccaatggattcctttatgagcatgaagcatgtggcaatggctacagcaatggtcagcttggaaaccacagtgaagaagacagcactgatgaccaaagagaagatactcgtattaagcctatttataatctatatgcaatttcgtgccattcaggaattctgggtgggggccattacgtcacttatgccaaaaacccaaactgcaagtggtactgttacaatgacagcagctgtaaggaacttcacccggatgaaattgacaccgactctgcctacattcttttctatgagcagcaggggatagactatgcacaatttctgccaaagactgatggcaaaaagatggcagacacaagcagtatggatgaagactttgagtctgattacaaaaagtactgtgtgttacagtaaagctaccactctggctgctagacagcttggcggtgagggagatgactccttgtagctgacatttggcaaaagcgtcactgaaaggcaagctaaatgtagttattttatcctgtggccctgaagcacaaaataaaaattctaattaaaa

SEQ ID NO: 449275 - DNA, 1444 bp, Homo sapiens
  misc_feature (1105)..(1105): n is a, c, g, or t
  misc_feature (1165)..(1165): n is a, c, g, or t
tggttaatcatcttctgtgcatattttcgtattgtaaagatcatgtatttctttcaaaagaacttgtggacattgagttcatagatacaataggatctagcccccattactcttttgttggagttcttgttttagttttcttttaatttagtgacttcatatcaccattatctaccaagaacatttggaatatttttctagtttgaggaaaataattaaaggatgctatgtagaagcccagccacttagcccagctcttcccttccagtcggaggacatataattctcattatgaattattagatattctaggagggtggccaaatgttcatttggtaataattttaaaagctcttatttttagtaccatgccatgtattgttcagagaaggataacatttcctgtcttctacagaattaccagaatcttaatctgtactgacatgtcaacagagtaatacaatacatgggcattgagttcatatcctcaagcctgtttatgtataataactaaaaataagagattctatcctcttttttttttataggctttctgtattctgccacaccaggggcagatgtttgctttgctcgacaacataacacttctgacaataacaaccagtgtttgctgggagccaatgggaatattttgttgcaccttaaccctcagaaaccaggggctattgataatcagccattagtaactcaagaaccagtaaaggctacatcattaacactagaaggaggacgattaaaacgaactccacagctgattcatggaagagactatgaaatggtcccagaacctgtgtggagagcactttatcactggtatggagcaaacctggccttacctagaccagttatcaagaacagcaagacagacatcccagagctggaattatttccccgctatcttctcttcctgagacagcagcctgccactcggacacagcagtctaacatctgggtgaatatgggtatgatgagcctgagaatgtttcctcagcatttaccgagaggtaacttaagaatgcagcaagaataccatgcatttccttaaaaaaaaaaaaaaaaaaaaaaaaatgggtgaaaactacgnttgctcgaagtctggtgccactgtattgatacacattcccatcagctttcctacagactncagtaattaatttttacagggcttagaactatggtcatgcacaagactagatgaggggttgaagcaaacattccaacagcaaactgagatgggatgtttccttttctacttacaaagaaaataaatagaaatagattttacatgctttatttctttgagacaagccattgtaaattgttactagactaagtagtagtataccagtcattgactggtcttttcaactccactcaaatttgtaaaaagcaattcctcttatactatcatcttttttgtttt

SEQ ID NO: 449276 - DNA, 4404 bp, Homo sapiens
ggagcggggtaagagggcgtgaggagggaaggagagggaggagagagaggagagagaagggcggagtaggaggcaggggaagggggcggggcggaagagtcacgtgatccggcatggaggcggtggcggcgaccgggaggagccgccggggcagaagccgcacttgttagtgtggggggaggtgggggcgggggacgccgacaccgtcaccgtcacccagggacgccgaggagaaggcgggaggggggtgggggcgagatcaggctccgaccccccgccgaggggatgaggggagcatgggtgccaaggagtcacggatcggattcctcagctacgaggaggcgctgaggagagttacagatgtagagctaaaacgactgaaggatgctttcaagaggacctgtggactctcatattacatgggccagcactgcttcatccgggaagtgcttggggatggagtgcctccaaaggttgctgaggtgtgtcacatagttctggggttaagaccagctactccggaagaagaaggacaaattattagaggatggttagaacgagagagcaggtatggtctgcaagcaggacacaactggtttatcatctccatgcagtggtggcaacagtggaaagaatatgtcaaatacgatgccaaccctgtggtaattgagccatcatctgttttgaatggaggaaaatactcatttggaactgcagcccatcctatggagcaggtcgaagatagaattggaagcagcctcagttacgtgaatactacagaagagaaattttcagacaacatttctactgcatctgaagcctcagaaactgctggcagcggctttctgtattctgccacaccaggggcagatgtttgctttgctcgacaacataacacttctgacaataacaaccagtgtttgctgggagccaatgggaatattttgttgcaccttaaccctcagaaaccaggggctattgataatcagccattagtaactcaagaaccagtaaaggctacatcattaacactagaaggaggacgattaaaacgaactccacagctgattcatggaagagactatgaaatggtcccagaacctgtgtggagagcactttatcactggtatggagcaaacctggccttacctagaccagttatcaagaacagcaagacagacatcccagagctggaattatttccccgctatcttctcttcctgagacagcagcctgccactcggacacagcagtctaacatctgggtgaatatgggaaatgtaccttctccgaatgcacctttaaagcgggtattagcctatacaggctgttttagtcgaatgcagaccatcaaggaaattcacgaatatctatctcaaaggctgcgcattaaagaggaagatatgcgcctgtggctatacaacagtgagaactaccttactcttctggatgatgaggatcataaattggaatatttgaaaatccaggatgaacaacacctggtaattgaagttcgcaacaaagatatgagttggcctgaggagatgtcttttatagcaaatagtagtaaaatagatagacacaaggttcccacagaaaagggagccacaggtctaagcaatctgggaaacacatgcttcatgaactcaagcatccagtgtgttagtaacacacagccactgacacagtattttatctcagggagacatctttatgaactcaacaggacaaatcccattggtatgaaggggcatatggctaaatgctatggtgatttagtgcaggaactttggagtggaactcagaagaatgttgccccattaaagcttcggtggaccatagcaaaatatgctcccaggtttaatgggtttcagcaacaggactcccaagaacttctggcttttctcttggatggtcttcatgaagatcttaatcgagtccatgaaaagccatatgtggaactgaaggacagtgatgggcgaccagactgggaagtagctgcagaggcctgggacaaccatctaagaagaaatagatcaattgttgtggatttgttccatgggcagctaagatctcaagtaaaatgcaagacatgtgggcatataagtgtccgatttgaccctttcaattttttgtctttgccactaccaatggacagttatatgcacttagaaataacagtgattaagttagatggtactacccctgtacggtatggactaagactgaatatggatgaaaagtacacaggtttaaaaaaacagctgagtgatctctgtggacttaattcagaacaaatccttctagcagaagtacatggttccaacataaagaactttcctcaggacaaccaaaaagtacgactctcagtgagtggatttttgtgtgcatttgaaattcctgtccctgtgtctccaatttcagcttctagtccaacacagacagatttctcctcttcgccatctacaaatgaaatgttcaccctaactaccaatggggacctaccccgaccaatattcatccccaatggaatgccaaacactgttgtgccatgtggaactgagaagaacttcacaaatggaatggttaatggtcacatgccatctcttcctgacagcccctttacaggttacatcattgcagtccaccgaaaaatgatgaggacagaactgtatttcctgtcatctcagaagaatcgccccagcctctttggaatgccattgattgttccatgtactgtgcatacccggaagaaagacctatatgatgcggtttggattcaagtatcccggttagcgagcccactcccacctcaggaagctagtaatcatgcccaggattgtgacgacagtatgggctatcaatatccattcactctacgagttgtgcagaaagatgggaactcctgtgcttggtgcccatggtatagattttgcagaggctgtaaaattgattgtggggaagacagagctttcattggaaatgcctatatcgctgtggattgggatcccacagcccttcaccttcgctatcaaacatcccaggaaagggttgtagatgagcatgagagtgtggagcagagtcggcgagcgcaagccgagcccatcaacctggacagctgtctccgtgctttcaccagtgaggaagagctaggggaaaatgagatgtactactgttccaagtgtaagacccactgcttagcaacaaagaagctggatctctggaggcttccacccatcctgattattcaccttaagcgatttcaatttgtaaatggtcggtggataaaatcacagaaaattgtcaaatttcctcgggaaagttttgatccaagtgcttttttggtaccaagagacccggctctctgccagcataaaccactcacaccccagggggatgagctctctgagcccaggattctggcaagggaggtgaagaaagtggatgcgcagagttcggctggggaagaggacgtgctcctgagcaaaagcccatcctcactcagcgctaacatcatcagcagcccgaaaggttctccttcttcatcaagaaaaagtggaaccagctgtccctccagcaaaaacagcagccctaatagcagcccacggactttggggaggagcaaagggaggctccggctgccccagattggcagcaaaaataaactgtcaagtagtaaagagaacttggatgccagcaaagaaaatggggctgggcagatatgtgagctggctgacgccttgagtcgagggcatgtgctggggggcagccaaccagagttggtcactcctcaggaccatgaggtagctttggccaatggattcctttatgagcatgaagcatgtggcaatggctacagcaatggtcagcttggaaaccacagtgaagaagacagcactgatgaccaaagagaagatactcgtattaagcctatttataatctatatgcaatttcgtgccattcaggaattctgggtgggggccattacgtcacttatgccaaaaacccaaactgcaagtggtactgttacaatgacagcagctgtaaggaacttcacccggatgaaattgacaccgactctgcctacattcttttctatgagcagcaggggatagactatgcacaatttctgccaaagactgatggcaaaaagatggcagacacaagcagtatggatgaagactttgagtctgattacaaaaagtactgtgtgttacagtaaagctaccactctggctgctagacagcttggcggtgagggagatgactccttgtagctgacatttggcaaaagcgtcactgaaaggcaagctaaatgtagttattttatcctgtggccctgaagcacaaaataaaaattctaattaaaatagttaactttaagagtagtaatcattttattt

SEQ ID NO: 449277 - DNA, 4197 bp, Homo sapiens
ggagcggggtaagagggcgtgaggagggaaggagagggaggagagagaggagagagaagggcggagtaggaggcaggggaagggggcggggcggaagagtcacgtgatccggcatggaggcggtggcggcgaccgggaggagccgccggggcagaagccgcacttgttagtgtggggggaggtgggggcgggggacgccgacaccgtcaccgtcacccagggacgccgaggagaaggcgggaggggggtgggggcgagatcaggctccgaccccccgccgaggggatgaggggagcatgggtgccaaggagtcacggatcggattcctcagctacgaggaggcgctgaggagagttacagatgtagagctaaaacgactgaaggatgctttcaagaggacctgtggactctcatattacatgggccagcactgcttcatccgggaagtgcttggggatggagtgcctccaaaggttgctgaggtgtgtcacatagttctggggttaagaccagctactccggaagaagaaggacaaattattagaggatggttagaacgagagagcaggtatggtctgcaagcaggacacaactggtttatcatctccatgcagtggtggcaacagtggaaagaatatgtcaaatacgatgccaaccctgtggtaattgagccatcatctgttttgaatggaggaaaatactcatttggaactgcagcccatcctatggagcaggtcgaagatagaattggaagcagcctcagttacgtgaatactacagaagagaaattttcagacaacatttctactgcatctgaagcctcagaaactgctggcagcggctttctgtattctgccacaccaggggcagatgtttgctttgctcgacaacataacacttctgacaataacaaccagtgtttgctgggagccaatgggaatattttgttgcaccttaaccctcagaaaccaggggctattgataatcagccattagtaactcaagaaccagtaaaggctacatcattaacactagaaggaggacgattaaaacgaactccacagctgattcatggaagagactatgaaatggtcccagaacctgtgtggagagcactttatcactggtatggagcaaacctggccttacctagaccagttatcaagaacagcaagacagacatcccagagctggaattatttccccgctatcttctcttcctgagacagcagcctgccactcggacacagcagtctaacatctgggtgaatatgggaaatgtaccttctccgaatgcacctttaaagcgggtattagcctatacaggctgttttagtcgaatgcagaccatcaaggaaattcacgaatatctatctcaaaggctgcgcattaaagaggaagatatgcgcctgtggctatacaacagtgagaactaccttactcttctggatgatgaggatcataaattggaatatttgaaaatccaggatgaacaacacctggtaattgaagttcgcaacaaagatatgagttggcctgaggagatgtcttttatagcaaatagtagtaaaatagatagacacaaggttcccacagaaaagggagccacaggtctaagcaatctgggaaacacatgcttcatgaactcaagcatccagtgtgttagtaacacacagccactgacacagtattttatctcagggagacatctttatgaactcaacaggacaaatcccattggtatgaaggggcatatggctaaatgctatggtgatttagtgcaggaactttggagtggaactcagaagaatgttgccccattaaagcttcggtggaccatagcaaaatatgctcccaggtttaatgggtttcagcaacaggactcccaagaacttctggcttttctcttggatggtcttcatgaagatcttaatcgagtccatgaaaagccatatgtggaactgaaggacagtgatgggcgaccagactgggaagtagctgcagaggcctgggacaaccatctaagaagaaatagatcaattgttgtggatttgttccatgggcagctaagatctcaagtaaaatgcaagacatgtgggcatataagtgtccgatttgaccctttcaattttttgtctttgccactaccaatggacagttatatgcacttagaaataacagtgattaagttagatggtactacccctgtacggtatggactaagactgaatatggatgaaaagtacacaggtttaaaaaaacagctgagtgatctctgtggacttaattcagaacaaatccttctagcagaagtacatggttccaacataaagaactttcctcaggacaaccaaaaagtacgactctcagtgagtggatttttgtgtgcatttgaaattcctgtccctgtgtctccaatttcagcttctagtccaacacagacagatttctcctcttcgccatctacaaatgaaatgttcaccctaactaccaatggggacctaccccgaccaatattcatccccaatggaatgccaaacactgttgtgccatgtggaactgagaagaacttcacaaatggaatggttaatggtcacatgccatctcttcctgacagcccctttacaggttacatcattgcagtccaccgaaaaatgatgaggacagaactgtatttcctgtcatctcagaagaatcgccccagcctctttggaatgccattgattgttccatgtactgtgcatacccggaagaaagacctatatgatgcggtttggattcaagtatcccggttagcgagcccactcccacctcaggaagctagtaatcatgcccaggattgtgacgacagtatgggctatcaatatccattcactctacgagttgtgcagaaagatgggaactcctgtgcttggtgcccatggtatagattttgcagaggctgtaaaattgattgtggggaagacagagctttcattggaaatgcctatatcgctgtggattgggatcccacagcccttcaccttcgctatcaaacatcccaggaaagggttgtagatgagcatgagagtgtggagcagagtcggcgagcgcaagccgagcccatcaacctggacagctgtctccgtgctttcaccagtgaggaagagctaggggaaaatgagatgtactactgttccaagtgtaagacccactgcttagcaacaaagaagctggatctctggaggcttccacccatcctgattattcaccttaagcgatttcaatttgtaaatggtcggtggataaaatcacagaaaattgtcaaatttcctcgggaaagttttgatccaagtgcttttttggtaccaagagacccggctctctgccagcataaaccactcacaccccagggggatgagctctctgagcccaggattctggcaagggaggtgaagaaagtggatgcgcagagttcggctggggaagaggacgtgctcctgagcaaaagcccatcctcactcagcgctaacatcatcagcagcccgaaaggttctccttcttcatcaagaaaaagtggaaccagctgtccctccagcaaaaacagcagccctaatagcagcccacggactttggggaggagcaaagggaggctccggctgccccagattggcagcaaaaataaactgtcaagtagtaaagagaacttggatgccagcaaagaaaatggggctgggcagatatgtgagctggctgacgccttgagtcgagggcatgtgctggggggcagccaaccagagttggtcactcctcaggaccatgaggtagctttggccaatggattcctttatgagcatgaagcatgtggcaatggctacagcaatggtcagcttggaaaccacagtgaagaagacagcactgatgaccaaagagaagatactcgtattaagcctatttataatctatatgcaatttcgtcccattggcacagcggggcctcccggtcagtcccaggctgcagctgtccaatgacaacaggaccctcactctactcagtgtcacaaggaatgatgtaggaccctatgagtgtggaatccagaacgaattaagtgttgaccacagcagacccagtcatcctgaatgtcctcatatgcccagacgaccccaccatttccccctcatacacctagcgtaccaggggtgaacctcagcctctcc

SEQ ID NO: 449278 - DNA, 3734 bp, Homo sapiens
ctactcttcttggtatccaaatattgccaataatttggaccttgggccttgggcctttgctcatcttttcaaagttgaggctttggactcactttaaaacacctggaaggctgggcttggtggctcacacctgtaatcccagcactttgggaagccgaggcaggtggatcgcttgagcccaggagttagagaccagccagggcaatatggccaagaccctgtctctacccaaaaatgtacaaaaattagccagatgtggtggcgtgcacctgtagtaccagctactcaggaggctgaggtgggaggattgcttgagccttggaggtggaggctgcagtgagccaaaatcacagcaccgcactctagtctggcaacataacaagactccatctattaaaaacaaacaaacaaacaaacaaacaaaaagaacttgggtctcctgcctgcattttaaagcgttttggtactcttcatttataaaattattacacctgtaattctcatttctcattattatttcctaaaatagtatggtccccattgctgagaggggtgcttctttttcacatctgccttttttcttactgtgattactgtaaccataggaaatgtaccttctccgaatgcacctttaaagcgggtattagcctatacaggctgttttagtcgaatgcagaccatcaaggaaattcacgaatatctatctcaaaggctgcgcattaaagaggaagatatgcgcctgtggctatacaacagtgagaactaccttactcttctggatgatgaggatcataaattggaatatttgaaaatccaggatgaacaacacctggtaattgaagttcgcaacaaagatatgagttggcctgaggagatgtcttttatagcaaatagtagtaaaatagatagacacaaggttcccacagaaaagggagccacaggtctaagcaatctgggaaacacatgcttcatgaactcaagcatccagtgtgttagtaacacacagccactgacacagtattttatctcagggagacatctttatgaactcaacaggacaaatcccattggtatgaaggggcatatggctaaatgctatggtgatttagtgcaggaactttggagtggaactcagaagaatgttgccccattaaagcttcggtggaccatagcaaaatatgctcccaggtttaatgggtttcagcaacaggactcccaagaacttctggcttttctcttggatggtcttcatgaagatcttaatcgagtccatgaaaagccatatgtggaactgaaggacagtgatgggcgaccagactgggaagtagctgcagaggcctgggacaaccatctaagaagaaatagatcaattgttgtggatttgttccatgggcagctaagatctcaagtaaaatgcaagacatgtgggcatataagtgtccgatttgaccctttcaattttttgtctttgccactaccaatggacagttatatgcacttagaaataacagtgattaagttagatggtactacccctgtacggtatggactaagactgaatatggatgaaaagtacacaggtttaaaaaaacagctgagtgatctctgtggacttaattcagaacaaatccttctagcagaagtacatggttccaacataaagaactttcctcaggacaaccaaaaagtacgactctcagtgagtggatttttgtgtgcatttgaaattcctgtccctgtgtctccaatttcagcttctagtccaacacagacagatttctcctcttcgccatctacaaatgaaatgttcaccctaactaccaatggggacctaccccgaccaatattcatccccaatggaatgccaaacactgttgtgccatgtggaactgagaagaacttcacaaatggaatggttaatggtcacatgccatctcttcctgacagcccctttacaggttacatcattgcagtccaccgaaaaatgatgaggacagaactgtatttcctgtcatctcagaagaatcgccccagcctctttggaatgccattgattgttccatgtactgtgcatacccggaagaaagacctatatgatgcggtttggattcaagtatcccggttagcgagcccactcccacctcaggaagctagtaatcatgcccaggattgtgacgacagtatgggctatcaatatccattcactctacgagttgtgcagaaagatgggaactcctgtgcttggtgcccatggtatagattttgcagaggctgtaaaattgattgtggggaagacagagctttcattggaaatgcctatatcgctgtggattgggatcccacagcccttcaccttcgctatcaaacatcccaggaaagggttgtagatgagcatgagagtgtggagcagagtcggcgagcgcaagccgagcccatcaacctggacagctgtctccgtgctttcaccagtgaggaagagctaggggaaaatgagatgtactactgttccaagtgtaagacccactgcttagcaacaaagaagctggatctctggaggcttccacccatcctgattattcaccttaagcgatttcaatttgtaaatggtcggtggataaaatcacagaaaattgtcaaatttcctcgggaaagttttgatccaagtgcttttttggtaccaagagacccggctctctgccagcataaaccactcacaccccagggggatgagctctctgagcccaggattctggcaagggaggtgaagaaagtggatgcgcagagttcggctggggaagaggacgtgctcctgagcaaaagcccatcctcactcagcgctaacatcatcagcagcccgaaaggttctccttcttcatcaagaaaaagtggaaccagctgtccctccagcaaaaacagcagccctaatagcagcccacggactttggggaggagcaaagggaggctccggctgccccagattggcagcaaaaataaactgtcaagtagtaaagagaacttggatgccagcaaagaaaatggggctgggcagatatgtgagctggctgacgccttgagtcgagggcatgtgctggggggcagccaaccagagttggtcactcctcaggaccatgaggtagctttggccaatggattcctttatgagcatgaagcatgtggcaatggctacagcaatggtcagcttggaaaccacagtgaagaagacagcactgatgaccaaagagaagatactcgtattaagcctatttataatctatatgcaatttcgtgccattcaggaattctgggtgggggccattacgtcacttatgccaaaaacccaaactgcaagtggtactgttacaatgacagcagctgtaaggaacttcacccggatgaaattgacaccgactctgcctacattcttttctatgagcagcaggggatagactatgcacaatttctgccaaagactgatggcaaaaagatggcagacacaagcagtatggatgaagactttgagtctgattacaaaaagtactgtgtgttacagtaaagctaccactctggctgctagacagcttggcggtgagggagatgactccttgtagctgacatttggcaaaagcgtcactgaaaggcaagctaaatgtagttattttatcctgtggccctgaagcacaaaataaaaattctaattaaaatagttaactttaagagtagtaatcattttattt

SEQ ID NO: 449279 - DNA, 3436 bp, Homo sapiens
ggagcggggtaagagggcgtgaggagggaaggagagggaggagagagaggagagagaagggcggagtaggaggcaggggaagggggcggggcggaagagtcacgtgatccggcatggaggcggtggcggcgaccgggaggagccgccggggcagaagccgcacttgttagtgtggggggaggtgggggcgggggacgccgacaccgtcaccgtcacccagggacgccgaggagaaggcgggaggggggtgggggcgagatcaggctccgaccccccgccgaggggatgaggggagcatgggtgccaaggagtcacggatcggattcctcagctacgaggaggcgctgaggagagttacagatgtagagctaaaacgactgaaggatgctttcaagaggacctgtggactctcatattacatgggccagcactgcttcatccgggaagtgcttggggatggagtgcctccaaaggttgctgaggtgtgtcacatagttctggggttaagaccagctactccggaagaagaaggacaaattattagaggatggttagaacgagagagcaggtatggtctgcaagcaggacacaactggtttatcatctccatgcagtggtggcaacagtggaaagaatatgtcaaatacgatgccaaccctgtggtaattgagccatcatctgttttgaatggaggaaaatactcatttggaactgcagcccatcctatggagcaggtcgaagatagaattggaagcagcctcagttacgtgaatactacagaagagaaattttcagacaacatttctactgcatctgaagcctcagaaactgctggcagcggctttctgtattctgccacaccaggggcagatgtttgctttgctcgacaacataacacttctgacaataacaaccagtgtttgctgggagccaatgggaatattttgttgcaccttaaccctcagaaaccaggggctattgataatcagccattagtaactcaagaaccagtaaaggctacatcattaacactagaaggaggacgattaaaacgaactccacagctgattcatggaagagactatgaaatggtcccagaacctgtgtggagagcactttatcactggtatggagcaaacctggccttacctagaccagttatcaagaacagcaagacagacatcccagagctggaattatttccccgctatcttctcttcctgagacagcagcctgccactcggacacagcagtctaacatctgggtgaatatgggaaatgtaccttctccgaatgcacctttaaagcgggtattagcctatacaggctgttttagtcgaatgcagaccatcaaggaaattcacgaatatctatctcaaaggctgcgcattaaagaggaagatatgcgcctgtggctatacaacagtgagaactaccttactcttctggatgatgaggatcataaattggaatatttgaaaatccaggatgaacaacacctggtaattgaagttcgcaacaaagatatgagttggcctgaggagatgtcttttatagcaaatagtagtaaaatagatagacacaaggttcccacagaaaagggagccacaggtctaagcaatctgggaaacacatgcttcatgaactcaagcatccagtgtgttagtaacacacagccactgacacagtattttatctcagggagacatctttatgaactcaacaggacaaatcccattggtatgaaggggcatatggctaaatgctatggtgatttagtgcaggaactttggagtggaactcagaagaatgttgccccattaaagcttcggtggaccatagcaaaatatgctcccaggtttaatgggtttcagcaacaggactcccaagaacttctggcttttctcttggatggtcttcatgaagatcttaatcgagtccatgaaaagccatatgtggaactgaaggacagtgatgggcgaccagactgggaagtagctgcagaggcctgggacaaccatctaagaagaaatagatcaattgttgtggatttgttccatgggcagctaagatctcaagtaaaatgcaagacatgtgggcatataagtgtccgatttgaccctttcaattttttgtctttgccactaccaatggacagttatatgcacttagaaataacagtgattaagttagatggtactacccctgtacggtatggactaagactgaatatggatgaaaagtacacaggtttaaaaaaacagctgagtgatctctgtggacttaattcagaacaaatccttctagcagaagtacatggttccaacataaagaactttcctcaggacaaccaaaaagtacgactctcagtgagtggatttttgtgtgcatttgaaattcctgtccctgtgtctccaatttcagcttctagtccaacacagacagatttctcctcttcgccatctacaaatgaaatgttcaccctaactaccaatggggacctaccccgaccaatattcatccccaatggaatgccaaacactgttgtgccatgtggaactgagaagaacttcacaaatggaatggttaatggtcacatgccatctcttcctgacagcccctttacaggttacatcattgcagtccaccgaaaaatgatgaggacagaactgtatttcctgtcatctcagaagaatcgccccagcctctttggaatgccattgattgttccatgtactgtgcatacccggaagaaagacctatatgatgcggtttggattcaagtatcccggttagcgagcccactcccacctcaggaagctagtaatcatgcccaggattgtgacgacagtatgggctatcaatatccattcactctacgagttgtgcagaaagatgggaactcctgtgcttggtgcccatggtatagattttgcagaggctgtaaaattgattgtggggaagacagagctttcattggaaatgcctatatcgctgtggattgggatcccacagcccttcaccttcgctatcaaacatcccaggaaagggttgtagatgagcatgagagtgtggagcagagtcggcgagcgcaagccgagcccatcaacctggacagctgtctccgtgctttcaccagtgaggaagagctaggggaaaatgagatgtactactgttccaagtgtaagacccactgcttagcaacaaagaagctggatctctggaggcttccacccatcctgattattcaccttaagcgatttcaatttgtaaatggtcggtggataaaatcacagaaaattgtcaaatttcctcgggaaagttttgatccaagtgcttttttggtaccaagagacccggctctctgcgcatccactttcttcacctcccttgccagaatcctgggctcagagagctcatccccctggggtgtgag

SEQ ID NO: 449280 - DNA, 3168 bp, Homo sapiens
ggagcggggtaagagggcgtgaggagggaaggagagggaggagagagaggagagagaagggcggagtaggaggcaggggaagggggcggggcggaagagtcacgtgatccggcatggaggcggtggcggcgaccgggaggagccgccggggcagaagccgcacttgttagtgtggggggaggtgggggcgggggacgccgacaccgtcaccgtcacccagggacgccgaggagaaggcgggaggggggtgggggcgagatcaggctccgaccccccgccgaggggatgaggggagcatgggtgccaaggagtcacggatcggattcctcagctacgaggaggcgctgaggagagttacagatgtagagctaaaacgactgaaggatgctttcaagaggacctgtggactctcatattacatgggccagcactgcttcatccgggaagtgcttggggatggagtgcctccaaaggttgctgaggtgtgtcacatagttctggggttaagaccagctactccggaagaagaaggacaaattattagaggatggttagaacgagagagcaggtatggtctgcaagcaggacacaactggtttatcatctccatgcagtggtggcaacagtggaaagaatatgtcaaatacgatgccaaccctgtggtaattgagccatcatctgttttgaatggaggaaaatactcatttggaactgcagcccatcctatggagcaggtcgaagatagaattggaagcagcctcagttacgtgaatactacagaagagaaattttcagacaacatttctactgcatctgaagcctcagaaactgctggcagcggctttctgtattctgccacaccaggggcagatgtttgctttgctcgacaacataacacttctgacaataacaaccagtgtttgctgggagccaatgggaatattttgttgcaccttaaccctcagaaaccaggggctattgataatcagccattagtaactcaagaaccagtaaaggctacatcattaacactagaaggaggacgattaaaacgaactccacagctgattcatggaagagactatgaaatggtcccagaacctgtgtggagagcactttatcactggtatggagcaaacctggccttacctagaccagttatcaagaacagcaagacagacatcccagagctggaattatttccccgctatcttctcttcctgagacagcagcctgccactcggacacagcagtctaacatctgggtgaatatgggaaatgtaccttctccgaatgcacctttaaagcgggtattagcctatacaggctgttttagtcgaatgcagaccatcaaggaaattcacgaatatctatctcaaaggctgcgcattaaagaggaagatatgcgcctgtggctatacaacagtgagaactaccttactcttctggatgatgaggatcataaattggaatatttgaaaatccaggatgaacaacacctggtaattgaagttcgcaacaaagatatgagttggcctgaggagatgtcttttatagcaaatagtagtaaaatagatagacacaaggttcccacagaaaagggagccacaggtctaagcaatctgggaaacacatgcttcatgaactcaagcatccagtgtgttagtaacacacagccactgacacagtattttatctcagggagacatctttatgaactcaacaggacaaatcccattggtatgaaggggcatatggctaaatgctatggtgatttagtgcaggaactttggagtggaactcagaagaatgttgccccattaaagcttcggtggaccatagcaaaatatgctcccaggtttaatgggtttcagcaacaggactcccaagaacttctggcttttctcttggatggtcttcatgaagatcttaatcgagtccatgaaaagccatatgtggaactgaaggacagtgatgggcgaccagactgggaagtagctgcagaggcctgggacaaccatctaagaagaaatagatcaattgttgtggatttgttccatgggcagctaagatctcaagtaaaatgcaagacatgtgggcatataagtgtccgatttgaccctttcaattttttgtctttgccactaccaatggacagttatatgcacttagaaataacagtgattaagttagatggtactacccctgtacggtatggactaagactgaatatggatgaaaagtacacaggtttaaaaaaacagctgagtgatctctgtggacttaattcagaacaaatccttctagcagaagtacatggttccaacataaagaactttcctcaggacaaccaaaaagtacgactctcagtgagtggatttttgtgtgcatttgaaattcctgtccctgtgtctccaatttcagcttctagtccaacacagacagatttctcctcttcgccatctacaaatgaaatgttcaccctaactaccaatggggacctaccccgaccaatattcatccccaatggaatgccaaacactgttgtgccatgtggaactgagaagaacttcacaaatggaatggttaatggtcacatgccatctcttcctgacagcccctttacaggttacatcattgcagtccaccgaaaaatgatgaggacagaactgtatttcctgtcatctcagaagaatcgccccagcctctttggaatgccattgattgttccatgtactgtgcatacccggaagaaagacctatatgatgcggtttggattcaagtatcccggttagcgagcccactcccacctcaggaagctagtaatcatgcccaggattgtgacgacagtatgggctatcaatatccattcacttctgcctacattcttttctatgagcagcaggggatagactatgcacaatttctgccaaagactgatggcaaaaagatggcagacacaagcagtatggatgaagactttgagtctgattacaaaaagtactgtgtgttacagtaaagctaccactctggctgctagacagcttggcggtgagggagatgactccttgtagctgacatttggcaaaagcgtcactgaaaggcaagctaaatgtagttattttatcctgtggccctgaagcacaaaataaaaattctaattaaaa

SEQ ID NO: 449281 - DNA, 1560 bp, Homo sapiens
  misc_feature (1221)..(1221): n is a, c, g, or t
  misc_feature (1281)..(1281): n is a, c, g, or t
ggagcggggtaagagggcgtgaggagggaaggagagggaggagagagaggagagagaagggcggagtaggaggcaggggaagggggcggggcggaagagtcacgtgatccggcatggaggcggtggcggcgaccgggaggagccgccggggcagaagccgcacttgttagtgtggggggaggtgggggcgggggacgccgacaccgtcaccgtcacccagggacgccgaggagaaggcgggaggggggtgggggcgagatcaggctccgaccccccgccgaggggatgaggggagcatgggtgccaaggagtcacggatcggattcctcagctacgaggaggcgctgaggagagttacagatgtagagctaaaacgactgaaggatgctttcaagaggacctgtggactctcatattacatgggccagcactgcttcatccgggaagtgcttggggatggagtgcctccaaaggttgctgaggtgtgtcacatagttctggggttaagaccagctactccggaagaagaaggacaaattattagaggatggttagaacgagagagcaggtatggtctgcaagcaggacacaactggtttatcatctccatgcagtggtggcaacagtggaaagaatatgtcaaatacgatgccaaccctgtggtaattgagccatcatctgttttgaatggaggaaaatactcatttggaactgcagcccatcctatggagcaggtcgaagatagaattggaagcagcctcagttacgtgaatactacagaagagaaattttcagacaacatttctactgcatctgaagcctcagaaactgctggcagcggctacatcattaacactagaaggaggacgattaaaacgaactccacagctgattcatggaagagactatgaaatggtcccagaacctgtgtggagagcactttatcactggtatggagcaaacctggccttacctagaccagttatcaagaacagcaagacagacatcccagagctggaattatttccccgctatcttctcttcctgagacagcagcctgccactcggacacagcagtctaacatctgggtgaatatgggtatgatgagcctgagaatgtttcctcagcatttaccgagaggtaacttaagaatgcagcaagaataccatgcatttccttaaaaaaaaaaaaaaaaaaaaaaaaatgggtgaaaactacgnttgctcgaagtctggtgccactgtattgatacacattcccatcagctttcctacagactncagtaattaatttttacagggcttagaactatggtcatgcacaagactagatgaggggttgaagcaaacattccaacagcaaactgagatgggatgtttccttttctacttacaaagaaaataaatagaaatagattttacatgctttatttctttgagacaagccattgtaaattgttactagactaagtagtagtataccagtcattgactggtcttttcaactccactcaaatttgtaaaaagcaattcctcttatactatcatcttttttgtttt

SEQ ID NO: 449282 - DNA, 1360 bp, Homo sapiens
ggagcggggtaagagggcgtgaggagggaaggagagggaggagagagaggagagagaagggcggagtaggaggcaggggaagggggcggggcggaagagtcacgtgatccggcatggaggcggtggcggcgaccgggaggagccgccggggcagaagccgcacttgttagtgtggggggaggtgggggcgggggacgccgacaccgtcaccgtcacccagggacgccgaggagaaggcgggaggggggtgggggcgagatcaggctccgaccccccgccgaggggatgaggggagcatgggtgccaaggagtcacggatcggattcctcagctacgaggaggcgctgaggagagttacagatgtagagctaaaacgactgaaggatgctttcaagaggacctgtggactctcatattacatgggccagcactgcttcatccgggaagtgcttggggatggagtgcctccaaaggttgctgaggtgtgtcacatagttctggggttaagaccagctactccggaagaagaaggacaaattattagaggatggttagaacgagagagcaggtatggtctgcaagcaggacacaactggtttatcatctccatgcagtggtggcaacagtggaaagaatatgtcaaatacgtgagttagattcctgtctatttacatttttcacaggattttcagctgcgtgagacttccagccaataataaaatgctatgactaccagccaataataaaatgctccaacttaaataaagattcgaagggaaaggaaatgagtgtttatatgatacttgctatggtctaggctttgtgattacacttccacatacatttctttccttgcaacaaccctaaaaaaagataatattgggtacgggggtacctgcatatgtcacatacatcacatctcatttatttctcgcaccacccttgtgaggaagataatattatacccattttacctgtggggaacctggtgctgaaagaaaaagtaacctgaatgtcatgatcagggtggaagatctgggatcaaaccgaaggactgactttaaagcttatattctctcaactacatcatttacattgtcctttattttaccttttccattaaaatggaatttttttcagaactagaaaattgaaaagagtaatgccaagaatcaagtatttgccttcttggagagccaactgatatatacactcattgccaaatgatcactaacgaaaattctaatcatttgattcctatttgcctgtatttcctctgtcactgcttattatcagaatattggtagttacatactttttacattatctatctcatcattctttctcatcctttttccat

SEQ ID NO: 449283 - DNA, 630 bp, Homo sapiens
ggagcggggtaagagggcgtgaggagggaaggagagggaggagagagaggagagagaagggcggagtaggaggcaggggaagggggcggggcggaagagtcacgtgatccggcatggaggcggtggcggcgaccgggaggagccgccggggcagaagccgcacttgttagtgtggggggaggtgggggcgggggacgccgacaccgtcaccgtcacccagggacgccgaggagaaggcgggaggggggtgggggcgagatcaggctccgaccccccgccgaggggatgaggggagcatgggtgccaaggagtcacggatcggattcctcagctacgaggaggcgctgaggagagttacagatgtagagctaaaacgactgaaggatgctttcaagaggacctgtggactctcatattacatgggccagcactgcttcatccgggaagtgcttggggatggagtgcctccaaaggttgctgaggtgatttactgttcttttggtggaacatccaaagggctgcacttcaataatttaatagttggacttgtcctccttacaagaggcaaagatgaagagaaagcaaaatacatttttagtcttttttcaagtgaatctgggaactatgtta

SEQ ID NO: 449284 - DNA, 289 bp, Homo sapiens
ttttggattttgagagaaaattctcatcttttttattgctaggcctgggacaaccatctaagaagaaatagatcaattgttgtggatttgttccatgggcagctaagatctcaagtaaaatgcaagacatgtgggcatataagtgtccgatttgaccctttcaattttttgtctttgccactaccaatggacagttatatgcacttagaaataacaggtaggtcagaaagttctgaaaaattacttgactccattaaatttactttatttaaatagcctgaatttgtaa

SEQ ID NO: 449285 - DNA, 313 bp, Homo sapiens
tcagtgagccaagatcgtgccattgcactccagcccaggcaacagtatgagactccgtctcaaaaaaaaaaaaaaaaagaaaaaaaagatgttcctaacatgagtgtctctgtttcagatgggtcatcttactctggaagactatcagatctggagtgtgaaaaatgttcttgccaatgagtttttgaacctccttttccaggtatgtttaaggtaaatgacagcaacagagggtagtagtaccagtacttctacatcttttccatcatatagtagccagagttgttgtatctaggctgcaaaaccatatatt

SEQ ID NO: 449286 - DNA, 416 bp, Homo sapiens
acaaggagttataatcttaggaaatgggtttcggagcaggaattttaacagtaatcagatccatgtaacttaaatgtgtgagtttcagtaattactgaaatgtagctagtgaacttgttggacattttggtttagaaataaatctcagaagttagattaaaatggcaagttttgtttctttttttagtgatctctttttatcttttaaaacaataggttatcaagaacagcaagacagacatcccagagctggaattatttccccgctatcttctcttcctgagacagcagcctgccactcggacacagcagtctaacatctgggtgaatatgggtatgatgagcctgagaatgtttcctcagcatttaccgagaggtaacttaagaatgcagcaagaataccatgcatttcctta

SEQ ID NO: 449287 - DNA, 4082 bp, Homo sapiens
attgatgttcctttcctcacagcaacagataccacactacagtgggacaatttagacactcctgttaacctaacgtatgggtcatcttactctggaagactatcagatctggagtgtgaaaaatgttcttgccaatgagtttttgaacctccttttccaggtgtgtcacatagttctggggttaagaccagctactccggaagaagaaggacaaattattagaggatggttagaacgagagagcaggtatggtctgcaagcaggacacaactggtttatcatctccatgcagtggtggcaacagtggaaagaatatgtcaaatacgatgccaaccctgtggtaattgagccatcatctgttttgaatggaggaaaatactcatttggaactgcagcccatcctatggagcaggtcgaagatagaattggaagcagcctcagttacgtgaatactacagaagagaaattttcagacaacatttctactgcatctgaagcctcagaaactgctggcagcggctttctgtattctgccacaccaggggcagatgtttgctttgctcgacaacataacacttctgacaataacaaccagtgtttgctgggagccaatgggaatattttgttgcaccttaaccctcagaaaccaggggctattgataatcagccattagtaactcaagaaccagtaaaggctacatcattaacactagaaggaggacgattaaaacgaactccacagctgattcatggaagagactatgaaatggtcccagaacctgtgtggagagcactttatcactggtatggagcaaacctggccttacctagaccagttatcaagaacagcaagacagacatcccagagctggaattatttccccgctatcttctcttcctgagacagcagcctgccactcggacacagcagtctaacatctgggtgaatatgggaaatgtaccttctccgaatgcacctttaaagcgggtattagcctatacaggctgttttagtcgaatgcagaccatcaaggaaattcacgaatatctatctcaaaggctgcgcattaaagaggaagatatgcgcctgtggctatacaacagtgagaactaccttactcttctggatgatgaggatcataaattggaatatttgaaaatccaggatgaacaacacctggtaattgaagttcgcaacaaagatatgagttggcctgaggagatgtcttttatagcaaatagtagtaaaatagatagacacaaggttcccacagaaaagggagccacaggtctaagcaatctgggaaacacatgcttcatgaactcaagcatccagtgtgttagtaacacacagccactgacacagtattttatctcagggagacatctttatgaactcaacaggacaaatcccattggtatgaaggggcatatggctaaatgctatggtgatttagtgcaggaactttggagtggaactcagaagaatgttgccccattaaagcttcggtggaccatagcaaaatatgctcccaggtttaatgggtttcagcaacaggactcccaagaacttctggcttttctcttggatggtcttcatgaagatcttaatcgagtccatgaaaagccatatgtggaactgaaggacagtgatgggcgaccagactgggaagtagctgcagaggcctgggacaaccatctaagaagaaatagatcaattgttgtggatttgttccatgggcagctaagatctcaagtaaaatgcaagacatgtgggcatataagtgtccgatttgaccctttcaattttttgtctttgccactaccaatggacagttatatgcacttagaaataacagtgattaagttagatggtactacccctgtacggtatggactaagactgaatatggatgaaaagtacacaggtttaaaaaaacagctgagtgatctctgtggacttaattcagaacaaatccttctagcagaagtacatggttccaacataaagaactttcctcaggacaaccaaaaagtacgactctcagtgagtggatttttgtgtgcatttgaaattcctgtccctgtgtctccaatttcagcttctagtccaacacagacagatttctcctcttcgccatctacaaatgaaatgttcaccctaactaccaatggggacctaccccgaccaatattcatccccaatggaatgccaaacactgttgtgccatgtggaactgagaagaacttcacaaatggaatggttaatggtcacatgccatctcttcctgacagcccctttacaggttacatcattgcagtccaccgaaaaatgatgaggacagaactgtatttcctgtcatctcagaagaatcgccccagcctctttggaatgccattgattgttccatgtactgtgcatacccggaagaaagacctatatgatgcggtttggattcaagtatcccggttagcgagcccactcccacctcaggaagctagtaatcatgcccaggattgtgacgacagtatgggctatcaatatccattcactctacgagttgtgcagaaagatgggaactcctgtgcttggtgcccatggtatagattttgcagaggctgtaaaattgattgtggggaagacagagctttcattggaaatgcctatatcgctgtggattgggatcccacagcccttcaccttcgctatcaaacatcccaggaaagggttgtagatgagcatgagagtgtggagcagagtcggcgagcgcaagccgagcccatcaacctggacagctgtctccgtgctttcaccagtgaggaagagctaggggaaaatgagatgtactactgttccaagtgtaagacccactgcttagcaacaaagaagctggatctctggaggcttccacccatcctgattattcaccttaagcgatttcaatttgtaaatggtcggtggataaaatcacagaaaattgtcaaatttcctcgggaaagttttgatccaagtgcttttttggtaccaagagacccggctctctgccagcataaaccactcacaccccagggggatgagctctctgagcccaggattctggcaagggaggtgaagaaagtggatgcgcagagttcggctggggaagaggacgtgctcctgagcaaaagcccatcctcactcagcgctaacatcatcagcagcccgaaaggttctccttcttcatcaagaaaaagtggaaccagctgtccctccagcaaaaacagcagccctaatagcagcccacggactttggggaggagcaaagggaggctccggctgccccagattggcagcaaaaataaactgtcaagtagtaaagagaacttggatgccagcaaagaaaatggggctgggcagatatgtgagctggctgacgccttgagtcgagggcatgtgctggggggcagccaaccagagttggtcactcctcaggaccatgaggtagctttggccaatggattcctttatgagcatgaagcatgtggcaatggctacagcaatggtcagcttggaaaccacagtgaagaagacagcactgatgaccaaagagaagatactcgtattaagcctatttataatctatatgcaatttcgtgccattcaggaattctgggtgggggccattacgtcacttatgccaaaaacccaaactgcaagtggtactgttacaatgacagcagctgtaaggaacttcacccggatgaaattgacaccgactctgcctacattcttttctatgagcagcaggggatagactatgcacaatttctgccaaagactgatggcaaaaagatggcagacacaagcagtatggatgaagactttgagtctgattacaaaaagtactgtgtgttacagtaaagctaccactctggctgctagacagcttggcggtgagggagatgactccttgtagctgacatttggcaaaagcgtcactgaaaggcaagctaaatgtagttattttatcctgtggccctgaagcacaaaataaaaattctaattaaaatagttaactttaagagtagtaatcattttattt

SEQ ID NO: 449288 - DNA, 4112 bp, Homo sapiens
tggttaatcatcttctgtgcatattttcgtattgtaaagatcatgtatttctttcaaaagaacttgtggacattgagttcatagatacaataggatctagcccccattactcttttgttggagttcttgttttagttttcttttaatttagtgacttcatatcaccattatctaccaagaacatttggaatatttttctagtttgaggaaaataattaaaggatgctatgtagaagcccagccacttagcccagctcttcccttccagtcggaggacatataattctcattatgaattattagatattctaggagggtggccaaatgttcatttggtaataattttaaaagctcttatttttagtaccatgccatgtattgttcagagaaggataacatttcctgtcttctacagaattaccagaatcttaatctgtactgacatgtcaacagagtaatacaatacatgggcattgagttcatatcctcaagcctgtttatgtataataactaaaaataagagattctatcctcttttttttttataggctttctgtattctgccacaccaggggcagatgtttgctttgctcgacaacataacacttctgacaataacaaccagtgtttgctgggagccaatgggaatattttgttgcaccttaaccctcagaaaccaggggctattgataatcagccattagtaactcaagaaccagtaaaggctacatcattaacactagaaggaggacgattaaaacgaactccacagctgattcatggaagagactatgaaatggtcccagaacctgtgtggagagcactttatcactggtatggagcaaacctggccttacctagaccagttatcaagaacagcaagacagacatcccagagctggaattatttccccgctatcttctcttcctgagacagcagcctgccactcggacacagcagtctaacatctgggtgaatatgggaaatgtaccttctccgaatgcacctttaaagcgggtattagcctatacaggctgttttagtcgaatgcagaccatcaaggaaattcacgaatatctatctcaaaggctgcgcattaaagaggaagatatgcgcctgtggctatacaacagtgagaactaccttactcttctggatgatgaggatcataaattggaatatttgaaaatccaggatgaacaacacctggtaattgaagttcgcaacaaagatatgagttggcctgaggagatgtcttttatagcaaatagtagtaaaatagatagacacaaggttcccacagaaaagggagccacaggtctaagcaatctgggaaacacatgcttcatgaactcaagcatccagtgtgttagtaacacacagccactgacacagtattttatctcagggagacatctttatgaactcaacaggacaaatcccattggtatgaaggggcatatggctaaatgctatggtgatttagtgcaggaactttggagtggaactcagaagaatgttgccccattaaagcttcggtggaccatagcaaaatatgctcccaggtttaatgggtttcagcaacaggactcccaagaacttctggcttttctcttggatggtcttcatgaagatcttaatcgagtccatgaaaagccatatgtggaactgaaggacagtgatgggcgaccagactgggaagtagctgcagaggcctgggacaaccatctaagaagaaatagatcaattgttgtggatttgttccatgggcagctaagatctcaagtaaaatgcaagacatgtgggcatataagtgtccgatttgaccctttcaattttttgtctttgccactaccaatggacagttatatgcacttagaaataacagtgattaagttagatggtactacccctgtacggtatggactaagactgaatatggatgaaaagtacacaggtttaaaaaaacagctgagtgatctctgtggacttaattcagaacaaatccttctagcagaagtacatggttccaacataaagaactttcctcaggacaaccaaaaagtacgactctcagtgagtggatttttgtgtgcatttgaaattcctgtccctgtgtctccaatttcagcttctagtccaacacagacagatttctcctcttcgccatctacaaatgaaatgttcaccctaactaccaatggggacctaccccgaccaatattcatccccaatggaatgccaaacactgttgtgccatgtggaactgagaagaacttcacaaatggaatggttaatggtcacatgccatctcttcctgacagcccctttacaggttacatcattgcagtccaccgaaaaatgatgaggacagaactgtatttcctgtcatctcagaagaatcgccccagcctctttggaatgccattgattgttccatgtactgtgcatacccggaagaaagacctatatgatgcggtttggattcaagtatcccggttagcgagcccactcccacctcaggaagctagtaatcatgcccaggattgtgacgacagtatgggctatcaatatccattcactctacgagttgtgcagaaagatgggaactcctgtgcttggtgcccatggtatagattttgcagaggctgtaaaattgattgtggggaagacagagctttcattggaaatgcctatatcgctgtggattgggatcccacagcccttcaccttcgctatcaaacatcccaggaaagggttgtagatgagcatgagagtgtggagcagagtcggcgagcgcaagccgagcccatcaacctggacagctgtctccgtgctttcaccagtgaggaagagctaggggaaaatgagatgtactactgttccaagtgtaagacccactgcttagcaacaaagaagctggatctctggaggcttccacccatcctgattattcaccttaagcgatttcaatttgtaaatggtcggtggataaaatcacagaaaattgtcaaatttcctcgggaaagttttgatccaagtgcttttttggtaccaagagacccggctctctgccagcataaaccactcacaccccagggggatgagctctctgagcccaggattctggcaagggaggtgaagaaagtggatgcgcagagttcggctggggaagaggacgtgctcctgagcaaaagcccatcctcactcagcgctaacatcatcagcagcccgaaaggttctccttcttcatcaagaaaaagtggaaccagctgtccctccagcaaaaacagcagccctaatagcagcccacggactttggggaggagcaaagggaggctccggctgccccagattggcagcaaaaataaactgtcaagtagtaaagagaacttggatgccagcaaagaaaatggggctgggcagatatgtgagctggctgacgccttgagtcgagggcatgtgctggggggcagccaaccagagttggtcactcctcaggaccatgaggtagctttggccaatggattcctttatgagcatgaagcatgtggcaatggctacagcaatggtcagcttggaaaccacagtgaagaagacagcactgatgaccaaagagaagatactcgtattaagcctatttataatctatatgcaatttcgtgccattcaggaattctgggtgggggccattacgtcacttatgccaaaaacccaaactgcaagtggtactgttacaatgacagcagctgtaaggaacttcacccggatgaaattgacaccgactctgcctacattcttttctatgagcagcaggggatagactatgcacaatttctgccaaagactgatggcaaaaagatggcagacacaagcagtatggatgaagactttgagtctgattacaaaaagtactgtgtgttacagtaaagctaccactctggctgctagacagcttggcggtgagggagatgactccttgtagctgacatttggcaaaagcgtcactgaaaggcaagctaaatgtagttattttatcctgtggccctgaagcacaaaataaaaattctaattaaaatagttaactttaagagtagtaatcattttattt

SEQ ID NO: 449289 - DNA, 810 bp, Homo sapiens
ttagtagaggtccacggatctgggatgaacacaggcgcgcgtaatgccacaggtagggagacaaaaataaactgtcaagtagtaaagagaacttggatgccagcaaagaaaatggggctgggcagatatgtgagctggctgacgccttgagtcgagggcatgtgctggggggcagccaaccagagttggtcactcctcaggaccatgaggtagctttggccaatggattcctttatgagcatgaagcatgtggcaatggctacagcaatggtcagcttggaaaccacagtgaagaagacagcactgatgaccaaagagaagatactcgtattaagcctatttataatctatatgcaatttcgtgccattcaggaattctgggtgggggccattacgtcacttatgccaaaaacccaaactgcaagtggtactgttacaatgacagcagctgtaaggaacttcacccggatgaaattgacaccgactctgcctacattcttttctatgagcagcaggggatagactatgcacaatttctgccaaagactgatggcaaaaagatggcagacacaagcagtatggatgaagactttgagtctgattacaaaaagtactgtgtgttacagtaaagctaccactctggctgctagacagcttggcggtgagggagatgactccttgtagctgacatttggcaaaagcgtcactgaaaggcaagctaaatgtagttattttatcctgtggccctgaagcacaaaataaaaattctaattaaaatagttaactttaagagtagtaatcattttattt

SEQ ID NO: 449290 - DNA, 3336 bp, Homo sapiens
ggagcggggtaagagggcgtgaggagggaaggagagggaggagagagaggagagagaagggcggagtaggaggcaggggaagggggcggggcggaagagtcacgtgatccggcatggaggcggtggcggcgaccgggaggagccgccggggcagaagccgcacttgttagtgtggggggaggtgggggcgggggacgccgacaccgtcaccgtcacccagggacgccgaggagaaggcgggaggggggtgggggcgagatcaggctccgaccccccgccgaggggatgaggggagcatgggtgccaaggagtcacggatcggattcctcagctacgaggaggcgctgaggagagttacagatgtagagctaaaacgactgaaggatgctttcaagaggacctgtggactctcatattacatgggccagcactgcttcatccgggaagtgcttggggatggagtgcctccaaaggttgctgaggtgtgtcacatagttctggggttaagaccagctactccggaagaagaaggacaaattattagaggatggttagaacgagagagcaggtatggtctgcaagcaggacacaactggtttatcatctccatgcagtggtggcaacagtggaaagaatatgtcaaatacgatgccaaccctgtggtaattgagccatcatctgttttgaatggaggaaaatactcatttggaactgcagcccatcctatggagcaggtcgaagatagaattggaagcagcctcagttacgtgaatactacagaagagaaattttcagacaacatttctactgcatctgaagcctcagaaactgctggcagcggctttctgtattctgccacaccaggggcagatgtttgctttgctcgacaacataacacttctgacaataacaaccagtgtttgctgggagccaatgggaatattttgttgcaccttaaccctcagaaaccaggggctattgataatcagccattagtaactcaagaaccagtaaaggctacatcattaacactagaaggaggacgattaaaacgaactccacagctgattcatggaagagactatgaaatggtcccagaacctgtgtggagagcactttatcactggtatggagcaaacctggccttacctagaccagttatcaagaacagcaagacagacatcccagagctggaattatttccccgctatcttctcttcctgagacagcagcctgccactcggacacagcagtctaacatctgggtgaatatgggaaatgtaccttctccgaatgcacctttaaagcgggtattagcctatacaggctgttttagtcgaatgcagaccatcaaggaaattcacgaatatctatctcaaaggctgcgcattaaagaggaagatatgcgcctgtggctatacaacagtgagaactaccttactcttctggatgatgaggatcataaattggaatatttgaaaatccaggatgaacaacacctggtaattgaagttcgcaacaaagatatgagttggcctgaggagatgtcttttatagcaaatagtagtaaaatagatagacacaaggttcccacagaaaagggagccacaggtctaagcaatctgggaaacacatgcttcatgaactcaagcatccagtgtgttagtaacacacagccactgacacagtattttatctcagggagacatctttatgaactcaacaggacaaatcccattggtatgaaggggcatatggctaaatgctatggtgatttagtgcaggaactttggagtggaactcagaagaatgttgccccattaaagcttcggtggaccatagcaaaatatgctcccaggtttaatgggtttcagcaacaggactcccaagaacttctggcttttctcttggatggtcttcatgaagatcttaatcgagtccatgaaaagccatatgtggaactgaaggacagtgatgggcgaccagactgggaagtagctgcagaggcctgggacaaccatctaagaagaaatagatcaattgttgtggatttgttccatgggcagctaagatctcaagtaaaatgcaagacatgtgggcatataagtgtccgatttgaccctttcaattttttgtctttgccactaccaatggacagttatatgcacttagaaataacagtgattaagttagatggtactacccctgtacggtatggactaagactgaatatggatgaaaagtacacaggtttaaaaaaacagctgagtgatctctgtggacttaattcagaacaaatccttctagcagaagtacatggttccaacataaagaactttcctcaggacaaccaaaaagtacgactctcagtgagtggatttttgtgtgcatttgaaattcctgtccctgtgtctccaatttcagcttctagtccaacacagacagatttctcctcttcgccatctacaaatgaaatgttcaccctaactaccaatggggacctaccccgaccaatattcatccccaatggaatgccaaacactgttgtgccatgtggaactgagaagaacttcacaaatggaatggttaatggtcacatgccatctcttcctgacagcccctttacaggttacatcattgcagtccaccgaaaaatgatgaggacagaactgtatttcctgtcatctcagaagaatcgccccagcctctttggaatgccattgattgttccatgtactgtgcatacccggaagaaagacctatatgatgcggtttggattcaagtatcccggttagcgagcccactcccacctcaggaagctagtaatcatgcccaggattgtgacgacagtatgggctatcaatatccattcactctacgagttgtgcagaaagatgggaactcctgtgcttggtgcccatggtatagattttgcagaggctgtaaaattgattgtggggaagacagagctttcattggaaatgcctatatcgctgtggattgggatcccacagcccttcaccttcgctatcaaacatcccaggaaagggttgtagatgagcatgagagtgtggagcagagtcggcgagcgcaagccgagcccatcaacctggacagctgtctccgtgctttcaccagtgaggaagagctaggggaaaatgagatgtactactgttccaagtgtaagacccactgcttagcaacaaagaagctggatctctggaggcttccacccatcctgattattcaccttaagcgatttcaatttgtaaatggtcggtggataaaactttcccgaggcaatttgacaattttctgtgattttatcgtcgacc

SEQ ID NO: 449291 - DNA, 3132 bp, Homo sapiens
ggagcggggtaagagggcgtgaggagggaaggagagggaggagagagaggagagagaagggcggagtaggaggcaggggaagggggcggggcggaagagtcacgtgatccggcatggaggcggtggcggcgaccgggaggagccgccggggcagaagccgcacttgttagtgtggggggaggtgggggcgggggacgccgacaccgtcaccgtcacccagggacgccgaggagaaggcgggaggggggtgggggcgagatcaggctccgaccccccgccgaggggatgaggggagcatgggtgccaaggagtcacggatcggattcctcagctacgaggaggcgctgaggagagttacagatgtagagctaaaacgactgaaggatgctttcaagaggacctgtggactctcatattacatgggccagcactgcttcatccgggaagtgcttggggatggagtgcctccaaaggttgctgaggtgtgtcacatagttctggggttaagaccagctactccggaagaagaaggacaaattattagaggatggttagaacgagagagcaggtatggtctgcaagcaggacacaactggtttatcatctccatgcagtggtggcaacagtggaaagaatatgtcaaatacgatgccaaccctgtggtaattgagccatcatctgttttgaatggaggaaaatactcatttggaactgcagcccatcctatggagcaggtcgaagatagaattggaagcagcctcagttacgtgaatactacagaagagaaattttcagacaacatttctactgcatctgaagcctcagaaactgctggcagcggctttctgtattctgccacaccaggggcagatgtttgctttgctcgacaacataacacttctgacaataacaaccagtgtttgctgggagccaatgggaatattttgttgcaccttaaccctcagaaaccaggggctattgataatcagccattagtaactcaagaaccagtaaaggctacatcattaacactagaaggaggacgattaaaacgaactccacagctgattcatggaagagactatgaaatggtcccagaacctgtgtggagagcactttatcactggtatggagcaaacctggccttacctagaccagttatcaagaacagcaagacagacatcccagagctggaattatttccccgctatcttctcttcctgagacagcagcctgccactcggacacagcagtctaacatctgggtgaatatgggaaatgtaccttctccgaatgcacctttaaagcgggtattagcctatacaggctgttttagtcgaatgcagaccatcaaggaaattcacgaatatctatctcaaaggctgcgcattaaagaggaagatatgcgcctgtggctatacaacagtgagaactaccttactcttctggatgatgaggatcataaattggaatatttgaaaatccaggatgaacaacacctggtaattgaagttcgcaacaaagatatgagttggcctgaggagatgtcttttatagcaaatagtagtaaaatagatagacacaaggttcccacagaaaagggagccacaggtctaagcaatctgggaaacacatgcttcatgaactcaagcatccagtgtgttagtaacacacagccactgacacagtattttatctcagggagacatctttatgaactcaacaggacaaatcccattggtatgaaggggcatatggctaaatgctatggtgatttagtgcaggaactttggagtggaactcagaagaatgttgccccattaaagcttcggtggaccatagcaaaatatgctcccaggtttaatgggtttcagcaacaggactcccaagaacttctggcttttctcttggatggtcttcatgaagatcttaatcgagtccatgaaaagccatatgtggaactgaaggacagtgatgggcgaccagactgggaagtagctgcagaggcctgggacaaccatctaagaagaaatagatcaattgttgtggatttgttccatgggcagctaagatctcaagtaaaatgcaagacatgtgggcatataagtgtccgatttgaccctttcaattttttgtctttgccactaccaatggacagttatatgcacttagaaataacagtgattaagttagatggtactacccctgtacggtatggactaagactgaatatggatgaaaagtacacaggtttaaaaaaacagctgagtgatctctgtggacttaattcagaacaaatccttctagcagaagtacatggttccaacataaagaactttcctcaggacaaccaaaaagtacgactctcagtgagtggatttttgtgtgcatttgaaattcctgtccctgtgtctccaatttcagcttctagtccaacacagacagatttctcctcttcgccatctacaaatgaaatgttcaccctaactaccaatggggacctaccccgaccaatattcatccccaatggaatgccaaacactgttgtgccatgtggaactgagaagaacttcacaaatggaatggttaatggtcacatgccatctcttcctgacagcccctttacaggttacatcattgcagtccaccgaaaaatggttagttaaatgttaggcaactcactgccagtcttgctagtgtcatttgtgaaatagtcattttctgtctttgcaacatcattgaatgcattttcttctcttcttttctttaattttttaaaatttaataattttacaaattttatttttttacttttttatcctgtcctcaaaatctgttgctgtgaatgcattttcaatgtattatatatgctaatataagtgatcagagccaggatttagtattactcatggtggctaatgtatgaaatgacattccttatccgtatattaagaggcaacaggatagtcagtgcatctgagtactactttctttagaaatttgtgtctcctggccgggtgcagtggctcacacctgtaatcccaacactttgggaggctgaagcaggaggatcaccttagctcaggagttcaaggctagcctgggcaacatagtgagacctcgtctcttcta

SEQ ID NO: 449292 - DNA, 741 bp, Homo sapiens
ggagcggggtaagagggcgtgaggagggaaggagagggaggagagagaggagagagaagggcggagtaggaggcaggggaagggggcggggcggaagagtcacgtgatccggcatggaggcggtggcggcgaccgggaggagccgccggggcagaagccgcacttgttagtgtggggggaggtgggggcgggggacgccgacaccgtcaccgtcacccagggacgccgaggagaaggcgggaggggggtgggggcgagatcaggctccgaccccccgccgaggggatgaggggagcatgggtgccaaggagtcacggatcggattcctcagctacgaggaggcgctgaggagagttacagatgtagagctaaaacgactgaaggatgctttcaagaggacctgtggactctcatattacatgggccagcactgcttcatccgggaagtgcttggggatggagtgcctccaaaggttgctgaggtgatttactgttcttttggtggaacatccaaagggctgcacttcaataatttaatagttggacttgtcctccttacaagaggcaaagatgaagagaaagcaaaatgtaagtacttttattatctcaaaaataattcgtctatgtacagaataatttatctcaaaattctgatgacaggtagaggatttgaattgacattttcccaaagaagatatacaagtggtaaataaacacctaaaaaatgtgcaacataattag

SEQ ID NO: 449293 - DNA, 3917 bp, Homo sapiens
gatgacaggttcttggagacccagctgtgtgctgtgttgatgggcaaacatgaggtgggccccaggggaaaggagctgttctggactctgtgaatgctgctgctcccaagggcggtgcccaggtgagatgcctgcgggggaagcagcaggagctaccacctccacccagccactgcattctggagcagcgcttcccaaacttcagtgtgtgcaccgatcacctagggccttttttttttttttcctttttgtggagaacgggtctcgctagattgcccaggcaggtctcaaactcctgggctcaagccatcctcctgcctctgcctccctaagagttgggattaccggcttgagccactgtgcctggcttgtttgttttgtattaattacatttttatagagagagatggggtcttactttgttgcccgggctggttgcaaactcctgggcctcaagggaacctcccatttcagcctcccaaagtgccggaattgcaggcgtgagccactgcctggcttgttttttttgttttttgtttttttttttctgagacggagtcttgctctgtcgcccaggctggagtgcagtggtgcgatcgtggctcactgcaagctcggcctcccgggttcgctccattctcctgcctcagcctcccaagtagctgggactataggcacctgccataacacccggataattttttgtattttagtagagacggggtttcaccgtgttagccaggatggtgtcgatctcctgaccttgtgatctgcccacctcggcctcctgagtaccttgttaaacacccaagtctaggccccatcctagacctacagaatcagaattcctagtgttaggctgggtgcagtggctcgcacctgtggtctcagcactttgggaggctcaagtgggaggatcatttgagcccaggagttcgagaccagcctgggcaacatagtgaaaccctctctacaaaaaatttaaaacttagctgggtggtgcatgcctgtggtcccagctccttgggatgctgaggtgggaggatcgcctgagcctgggaggttgcggctacagtgagctgtgatcatgctactgcactccagcctgggcgagagcaagatctcttctcttaaataaatttaaaaaaagaatccctgggccaggtgtggtggctcatgcctgtaatcacttttgggagcccaaggtaggtggatcacctgagatcaggagttcaagaccagcttggccaacacggtgaaacccccatctctaaaaatataaaaaaaattagctggacatggtggcctgcagtgcaatcccagctactctggaggctgaggcagggagaatcgcttaaacccgggagctggaggttgtagtgagccgagatcacgccattgcactccatcctgggcgacagagtgagactctgtctcaaaaaaaaaaaaaaaaggaatccgtggtgtagtccgagcgcggtggctcacgcctgtaatcccagcattttgggaagctgaggcaggcagatcccttgaggtcaggagttcgagaccagcctggccaacatggcgaaaccccatctctactaaaaatacaaaaattagccaggtgtggtggcacatgcctgtaattccagttactcaggaggctgaggcaggagaattgcttgaacccaggaggcggaagtagtggtgagctgagatcataccactgcactccagcctgggtgacagagggagactctgttgcaaaaaaaaaaaagaatccctgatgatagaacctgagaatctgtagttaagaggctccccgggtggtcatgcaaaccagtgtgtgggaagcagtgttgagagtgcctcagagaagctcgttccatgaaaattgtgtgcagaccccagggccccattttcagaggattatgcagcttgacctgcaggaagccactgctgatgcctgttgagtggctgcctggggatgggcactgcccgatgacgggcaggaggaccactacctacacctggctgtcctacagtagttttcaggtgtctgtgcctggcaccagccaccagcagtatccctgcgtctggccctggtcctctaggagcggaaggggagaagggcactgccgtgggagagagacctgccatttagattacatttggctttgagggttgaatggtgtgtttgcaaagccaggaatgatcatgagctctgtctgctcccataggcccatcaaatggctccagacatgttctactgcatgaagctcctggaggagactggcatctgtgtcgtgcccggcagtggctttgggcagagggaaggcacttaccacttcaggtatgacttcctctccgcactaggggctggtccgggtcttgtccagggaaatgtggacttcttgacatggagcagaggactacttcaaagagagaggtgcggagaccctgtcctctctcgagtcacccctactctgtcctgctgcagacccaagctcagaccctgcccagggattaagaaaatctgggtggttgtctgctcagggttatattccctgaaaggtcttccttgactattctgtctctcccctctgccatcggtcccatcgctgtctgaaatgttcctaatagggtgttttcttattttgctgtccgttttcaactctgcgatggcagcacacagctgccagtgcctggagtggtgctggcatgtgcttagtagctcctggcagcaccctgggccatggcactgcctgtgatcccagagcctgccgaggaactgcaggggaatttgctccactcatgcccagggcataccccgttctggccctgcatggatgggaatgccggtgcccagagctgagctggctggagcagaggttttccactgaggccagttctcttcagaacaacatcttccccatacatgttgctctcagaggtctcctgcggcagatgctaaaaaaaagaaatggcatgagctgttagcacccggagccaagtcttgacttaggcaaggttgtgggttgtgtcccctgatggacaaaccttgtccggttggccttcccacccctggtcaggctcatctcggtggttgatggcttgatgagaaagtgatttaagcaagagggctgccaggaaggccagggagcattttggtgcaccagagggaggtgttagttactgtggcaacttggaaattcctttggagcagagttgtgactggagggtgtctcactgtcagactgactagagataaaaaaggcccctcaggtaggagtgaaatctctctctcaaactctaggaaagcccgagtcatactctagagaaagttctgatcagtggtcaaaatgttccagagggctgagtgcagtggctcacacgctttgggaggccaaattcaggatggcttgagtccaggagttcaagaccagcctgggcaacatagcaagaccctgtctctacaaaaaattgtttaaaaactagccagggatgttggcgcatgcccgtaatcctagctactcgggaggctgagatgggaggatcacctgagcccaagagtttgaggctgcagtgagctatgatcactctactgcattcaagctggggcagcagagtgagaccctatctccaaaaaaaaaaatatggccaggtgcagtggctcatgcctgtaatcccagcactttgggaggccaaggtgagcagatcatgaggtcaggagttcgagaccagcctggtcaacatggtgaaaccccgtctcttctaaaaatacaaaaattagctgggcgtggtggcaggcatctgtaatcccagctactcgggaggctgaggcaggacaattgtttgaacctgggaggtggaggttgcagtgttcgcgcaattgcactccagcctgggcaacaagagcaaaattccatctc

SEQ ID NO: 449294 - DNA, 3979 bp, Homo sapiens
gcgcggggatgcggctgtgggcgccggggccgggtagctgctccaggcgcgcgagctaaccgagtgcggcgagggcctaccaggggcgacagggtttctctccgcaagcgcgcgatgcagcgggcggcggcgctggtccggcggggctgtggtccccggacccccagctcctggggccgcagccagagcagcgcggccgccgaggcctcggcggtgctcaaggtgcggcccgagcgcagccggcgcgagcgcatcctcacgctggagtccatgaacccgcaggtgaaggcggtggagtacgccgtgcggggacccatcgtgctcaaggccggcgagatcgagctcgagctgcagcggggtatcaaaaagccattcacagaggtcatccgagccaacatcggggacgcccaggctatggggcagcagccaatcaccttcctccggcaggtgatggcactatgcacctacccaaacctgctggacagccccagcttcccagaagatgctaagaaacgtgcccggcggatcctgcaggcttgtggcgggaacagcctggggtcctacagtgctagccagggtgtcaactgcatccgtgaagatgtggctgcctacatcaccaggagggatggcggtgtgcctgcggaccccgacaacatctacctgaccacgggagctagtgacggcatttctacgatcctgaagatcctcgtctccgggggcggcaagtcacggacaggtgtgatgatccccatcccacaatatcccctctattcagctgtcatctctgagctcgacgccatccaggtgaattactacctggacgaggagaactgctgggcgctgaatgtgaatgagctccggcgggcggtgcaggaggccaaagaccactgtgatcctaaggtgctctgcataatcaaccctgggaaccccacaggccaggtacaaagcagaaagtgcatagaagatgtgatccactttgcctgggaagagaagctctttctcctggctgatgaggtgtaccaggacaacgtgtactctccagattgcagattccactccttcaagaaggtgctgtacgagatggggcccgagtactccagcaacgtggagctcgcctccttccactccacctccaagggctacatgggcgagtgtggttacagaggaggctacatggaggtgatcaacctgcaccctgagatcaagggccagctggtgaagctgctgtcggtgcgcctgtgccccccagtgtctgggcaggccgccatggacattgtcgtgaaccccccggtggcaggagaggagtcctttgagcaattcagccgagagaaggagtcggtcctgggtaatctggccaaaaaagcaaagctgacggaagacctgtttaaccaagtcccaggaattcactgcaaccccttgcagggggccatgtacgccttccctcggatcttcattcctgccaaagctgtggaggctgctcaggcccatcaaatggctccagacatgttctactgcatgaagctcctggaggagactggcatctgtgtcgtgcccggcagtggctttgggcagagggaaggcacttaccacttcaggatgactatcctccctccagtggagaagctgaaaacggtgctgcagaaggtgaaagacttccacatcaacttcctggagaagtacgcgtgaggacgcctgagccccagcgggagacctgtccttggctcttcctcccaatgcccgtcaggctgaactcgcctcccccgtgactctgcctcgggcctcgcagaggccgctggtcacttcgtcatcattttgcccctggagacgtctttctttgtgccttgatgttgagagcgcctctcttttgagcaaacaagcattctatatgcaaccagagtagaggggacctgctcagcaggtgtgaccagggttctctgaatctgttattgtttttgcttctggaaagttcatttggggtttacaacaactaggatgtgttgggtgagatgtttcagatctggagaaatgagcaggtgtcgggaaatgtgtgacttaaccgtggtgagggctggaaatccaaactcaccaccatgatctgtgaaataaagcccttagcggtgtgaagcatccggtcctttgaacagaagggcctggaaggcccctggggctgagaaagggtccgcccggtggcctggaggcaggcgccgggagcgcagtagcacgtggactgggcaggatgttgcactagcttggggtagatgctgggggctgcggccacggtcagagggccccactgtgaggcgtgggtgtgagccaggctgcaggaggaactgggcctccgcttcccagcaacgcagccaggcctgagaattctgtgcgcccggcgggctttgggaatgaggggttcccttgaacatgcgtaggctggaaccccgtctgagaggtctccctgaatttcagtgacacatagtgcagcccggcagtgtcccacttccgtggagagagccgctggaatggtgtggacccatcccgcgggtgaccggtgcctgttctcccctgaccgagcctgtgagcacatcgccccctgctggcgacagcggggaaatgagggctgaaaatatcctccccacaagggcaatccccgggacctgccgagcagccaaggccctgtcctttcttgaatggtggcgagctgaatctggtcggtttcctagcttttaggtggtaaaagtgcctggcagcttggctgccgtggaggagtcagtcgtggttggaggttcattgccgtgctttcatgcagagtgttttgccttcatgttagcttccggctcccctcccaggctgcagactctgacctgtggcatcaggcttctcccagtacaggagggtgccatcccccagcatgcggcttctctgccattagcagccctgggcgggccgaccacactcgaggctgcggtgctacgggcttagccctcgcctccctcactgggagcttccccatcctccctgccttccccagtgggaagttagggaagctcaggagcctgggaccccgcatgtcccaaaatgggattggagaagctggagagaaagcagaagaggccgaggagtgaggcagcagcctctatgctgtgatttccacaccgggtccgtgcagaggaaacagaaactcccaactgtccttacccaccgacatcacagcccctatgaagaaagtagccacaatctcaaataacaaaagggaatgttctaaaactttttcttccttaaaaaatggagaaaattgcacttgtgcttgctgtgtggtatataaaccaggattagtcccagggtcgtgaggtttctggtgaaaaggttaaatcgtagaagctagtatattttttatatttttgtaacaattgcttttttcatgggggaggcggggttagtatttatagtcctaacaagtccagtaattttttataaatcttcagattataaacagcccctaaaaactttacaacgtttacacagttttttaaaaagagactgtatacacttgatttgctttcaaaataaataaggtcagctagtctaggaggttaacgtcgggtaggaatgctgatcatgataggtttggttttctacagattctgttccggtgcctttcctatccaggcaccacctgagaaagttgtcatttgaggtcgcacttggaagttacatctgtgaagtttctgtcattcgtccagatctgtgtgtgtagcatgtgctgaggaagcacgtgctgggctgtgcctcagacagtgcatcaccgggcacccagaggcttgcctggctattcctgttctggtgtgtgtggagtgttggggaggaacagatgcagatcaacctgtggctgttttcccgtctaggttctcacaggtatctcctgacagaggtacttaacaatggctctgctggaaatttctataaataaaatgtccaaaatggtgac

SEQ ID NO: 449295 - DNA, 4077 bp, Homo sapiens
gcgcggggatgcggctgtgggcgccggggccgggtagctgctccaggcgcgcgagctaaccgagtgcggcgagggcctaccaggggcgacagggtttctctccgcaagcgcgcgatgcagcgggcggcggcgctggtccggcggggctgtggtccccggacccccagctcctggggccgcagccagagcagcgcggccgccgaggcctcggcggtgctcaaggtgcggcccgagcgcagccggcgcgagcgcatcctcacgctggagtccatgaacccgcaggtgaaggcggtggagtacgccgtgcggggacccatcgtgctcaaggccggcgagatcgagctcgagctgcagcgggctggagtgcagtggtgcagttatagctcactgtggcctcaaattcctgggctcaagtgatcctcctgcctcagcctcttcagaagctaggactacagggtatcaaaaagccattcacagaggtcatccgagccaacatcggggacgcccaggctatggggcagcagccaatcaccttcctccggcaggtgatggcactatgcacctacccaaacctgctggacagccccagcttcccagaagatgctaagaaacgtgcccggcggatcctgcaggcttgtggcgggaacagcctggggtcctacagtgctagccagggtgtcaactgcatccgtgaagatgtggctgcctacatcaccaggagggatggcggtgtgcctgcggaccccgacaacatctacctgaccacgggagctagtgacggcatttctacgatcctgaagatcctcgtctccgggggcggcaagtcacggacaggtgtgatgatccccatcccacaatatcccctctattcagctgtcatctctgagctcgacgccatccaggtgaattactacctggacgaggagaactgctgggcgctgaatgtgaatgagctccggcgggcggtgcaggaggccaaagaccactgtgatcctaaggtgctctgcataatcaaccctgggaaccccacaggccaggtacaaagcagaaagtgcatagaagatgtgatccactttgcctgggaagagaagctctttctcctggctgatgaggtgtaccaggacaacgtgtactctccagattgcagattccactccttcaagaaggtgctgtacgagatggggcccgagtactccagcaacgtggagctcgcctccttccactccacctccaagggctacatgggcgagtgtggttacagaggaggctacatggaggtgatcaacctgcaccctgagatcaagggccagctggtgaagctgctgtcggtgcgcctgtgccccccagtgtctgggcaggccgccatggacattgtcgtgaaccccccggtggcaggagaggagtcctttgagcaattcagccgagagaaggagtcggtcctgggtaatctggccaaaaaagcaaagctgacggaagacctgtttaaccaagtcccaggaattcactgcaaccccttgcagggggccatgtacgccttccctcggatcttcattcctgccaaagctgtggaggctgctcaggcccatcaaatggctccagacatgttctactgcatgaagctcctggaggagactggcatctgtgtcgtgcccggcagtggctttgggcagagggaaggcacttaccacttcaggatgactatcctccctccagtggagaagctgaaaacggtgctgcagaaggtgaaagacttccacatcaacttcctggagaagtacgcgtgaggacgcctgagccccagcgggagacctgtccttggctcttcctcccaatgcccgtcaggctgaactcgcctcccccgtgactctgcctcgggcctcgcagaggccgctggtcacttcgtcatcattttgcccctggagacgtctttctttgtgccttgatgttgagagcgcctctcttttgagcaaacaagcattctatatgcaaccagagtagaggggacctgctcagcaggtgtgaccagggttctctgaatctgttattgtttttgcttctggaaagttcatttggggtttacaacaactaggatgtgttgggtgagatgtttcagatctggagaaatgagcaggtgtcgggaaatgtgtgacttaaccgtggtgagggctggaaatccaaactcaccaccatgatctgtgaaataaagcccttagcggtgtgaagcatccggtcctttgaacagaagggcctggaaggcccctggggctgagaaagggtccgcccggtggcctggaggcaggcgccgggagcgcagtagcacgtggactgggcaggatgttgcactagcttggggtagatgctgggggctgcggccacggtcagagggccccactgtgaggcgtgggtgtgagccaggctgcaggaggaactgggcctccgcttcccagcaacgcagccaggcctgagaattctgtgcgcccggcgggctttgggaatgaggggttcccttgaacatgcgtaggctggaaccccgtctgagaggtctccctgaatttcagtgacacatagtgcagcccggcagtgtcccacttccgtggagagagccgctggaatggtgtggacccatcccgcgggtgaccggtgcctgttctcccctgaccgagcctgtgagcacatcgccccctgctggcgacagcggggaaatgagggctgaaaatatcctccccacaagggcaatccccgggacctgccgagcagccaaggccctgtcctttcttgaatggtggcgagctgaatctggtcggtttcctagcttttaggtggtaaaagtgcctggcagcttggctgccgtggaggagtcagtcgtggttggaggttcattgccgtgctttcatgcagagtgttttgccttcatgttagcttccggctcccctcccaggctgcagactctgacctgtggcatcaggcttctcccagtacaggagggtgccatcccccagcatgcggcttctctgccattagcagccctgggcgggccgaccacactcgaggctgcggtgctacgggcttagccctcgcctccctcactgggagcttccccatcctccctgccttccccagtgggaagttagggaagctcaggagcctgggaccccgcatgtcccaaaatgggattggagaagctggagagaaagcagaagaggccgaggagtgaggcagcagcctctatgctgtgatttccacaccgggtccgtgcagaggaaacagaaactcccaactgtccttacccaccgacatcacagcccctatgaagaaagtagccacaatctcaaataacaaaagggaatgttctaaaactttttcttccttaaaaaatggagaaaattgcacttgtgcttgctgtgtggtatataaaccaggattagtcccagggtcgtgaggtttctggtgaaaaggttaaatcgtagaagctagtatattttttatatttttgtaacaattgcttttttcatgggggaggcggggttagtatttatagtcctaacaagtccagtaattttttataaatcttcagattataaacagcccctaaaaactttacaacgtttacacagttttttaaaaagagactgtatacacttgatttgctttcaaaataaataaggtcagctagtctaggaggttaacgtcgggtaggaatgctgatcatgataggtttggttttctacagattctgttccggtgcctttcctatccaggcaccacctgagaaagttgtcatttgaggtcgcacttggaagttacatctgtgaagtttctgtcattcgtccagatctgtgtgtgtagcatgtgctgaggaagcacgtgctgggctgtgcctcagacagtgcatcaccgggcacccagaggcttgcctggctattcctgttctggtgtgtgtggagtgttggggaggaacagatgcagatcaacctgtggctgttttcccgtctaggttctcacaggtatctcctgacagaggtacttaacaatggctctgctggaaatttctataaataaaatgtccaaaatggtgac

SEQ ID NO: 449296 - DNA, 3582 bp, Homo sapiens
tttggaccctcctcagctcccaaagtgctaggattttagacgtgagccaccgtgccagcctaagtactgagtcattaactacacgttctgcactgtgctgagaactttagaatgttgtattttgcttactcctcgcagctgccctcattttacagatgaggaaactgagactcggggaagtaaagcgacttgcacagagttggactggaggcatgcagtggggccacgggtgaaaggctaggtcagggatgggaagtagtgctggctttctagatgtgaattctctgttgcagacgatcctgaagatcctcgtctccgggggcggcaagtcacggacaggtgtgatgatccccatcccacaatatcccctctattcagctgtcatctctgagctcgacgccatccaggtgaattactacctggacgaggagaactgctgggcgctgaatgtgaatgagctccggcgggcggtgcaggaggccaaagaccactgtgatcctaaggtgctctgcataatcaaccctgggaaccccacaggccaggtacaaagcagaaagtgcatagaagatgtgatccactttgcctgggaagagaagctctttctcctggctgatgaggtgtaccaggacaacgtgtactctccagattgcagattccactccttcaagaaggtgctgtacgagatggggcccgagtactccagcaacgtggagctcgcctccttccactccacctccaagggctacatgggcgagtgtggttacagaggaggctacatggaggtgatcaacctgcaccctgagatcaagggccagctggtgaagctgctgtcggtgcgcctgtgccccccagtgtctgggcaggccgccatggacattgtcgtgaaccccccggtggcaggagaggagtcctttgagcaattcagccgagagaaggagtcggtcctgggtaatctggccaaaaaagcaaagctgacggaagacctgtttaaccaagtcccaggaattcactgcaaccccttgcagggggccatgtacgccttccctcggatcttcattcctgccaaagctgtggaggctgctcaggcccatcaaatggctccagacatgttctactgcatgaagctcctggaggagactggcatctgtgtcgtgcccggcagtggctttgggcagagggaaggcacttaccacttcaggatgactatcctccctccagtggagaagctgaaaacggtgctgcagaaggtgaaagacttccacatcaacttcctggagaagtacgcgtgaggacgcctgagccccagcgggagacctgtccttggctcttcctcccaatgcccgtcaggctgaactcgcctcccccgtgactctgcctcgggcctcgcagaggccgctggtcacttcgtcatcattttgcccctggagacgtctttctttgtgccttgatgttgagagcgcctctcttttgagcaaacaagcattctatatgcaaccagagtagaggggacctgctcagcaggtgtgaccagggttctctgaatctgttattgtttttgcttctggaaagttcatttggggtttacaacaactaggatgtgttgggtgagatgtttcagatctggagaaatgagcaggtgtcgggaaatgtgtgacttaaccgtggtgagggctggaaatccaaactcaccaccatgatctgtgaaataaagcccttagcggtgtgaagcatccggtcctttgaacagaagggcctggaaggcccctggggctgagaaagggtccgcccggtggcctggaggcaggcgccgggagcgcagtagcacgtggactgggcaggatgttgcactagcttggggtagatgctgggggctgcggccacggtcagagggccccactgtgaggcgtgggtgtgagccaggctgcaggaggaactgggcctccgcttcccagcaacgcagccaggcctgagaattctgtgcgcccggcgggctttgggaatgaggggttcccttgaacatgcgtaggctggaaccccgtctgagaggtctccctgaatttcagtgacacatagtgcagcccggcagtgtcccacttccgtggagagagccgctggaatggtgtggacccatcccgcgggtgaccggtgcctgttctcccctgaccgagcctgtgagcacatcgccccctgctggcgacagcggggaaatgagggctgaaaatatcctccccacaagggcaatccccgggacctgccgagcagccaaggccctgtcctttcttgaatggtggcgagctgaatctggtcggtttcctagcttttaggtggtaaaagtgcctggcagcttggctgccgtggaggagtcagtcgtggttggaggttcattgccgtgctttcatgcagagtgttttgccttcatgttagcttccggctcccctcccaggctgcagactctgacctgtggcatcaggcttctcccagtacaggagggtgccatcccccagcatgcggcttctctgccattagcagccctgggcgggccgaccacactcgaggctgcggtgctacgggcttagccctcgcctccctcactgggagcttccccatcctccctgccttccccagtgggaagttagggaagctcaggagcctgggaccccgcatgtcccaaaatgggattggagaagctggagagaaagcagaagaggccgaggagtgaggcagcagcctctatgctgtgatttccacaccgggtccgtgcagaggaaacagaaactcccaactgtccttacccaccgacatcacagcccctatgaagaaagtagccacaatctcaaataacaaaagggaatgttctaaaactttttcttccttaaaaaatggagaaaattgcacttgtgcttgctgtgtggtatataaaccaggattagtcccagggtcgtgaggtttctggtgaaaaggttaaatcgtagaagctagtatattttttatatttttgtaacaattgcttttttcatgggggaggcggggttagtatttatagtcctaacaagtccagtaattttttataaatcttcagattataaacagcccctaaaaactttacaacgtttacacagttttttaaaaagagactgtatacacttgatttgctttcaaaataaataaggtcagctagtctaggaggttaacgtcgggtaggaatgctgatcatgataggtttggttttctacagattctgttccggtgcctttcctatccaggcaccacctgagaaagttgtcatttgaggtcgcacttggaagttacatctgtgaagtttctgtcattcgtccagatctgtgtgtgtagcatgtgctgaggaagcacgtgctgggctgtgcctcagacagtgcatcaccgggcacccagaggcttgcctggctattcctgttctggtgtgtgtggagtgttggggaggaacagatgcagatcaacctgtggctgttttcccgtctaggttctcacaggtatctcctgacagaggtacttaacaatggctctgctggaaatttctataaataaaatgtccaaaatggtgac

SEQ ID NO: 449297 - DNA, 4722 bp, Homo sapiens
gatgacaggttcttggagacccagctgtgtgctgtgttgatgggcaaacatgaggtgggccccaggggaaaggagctgttctggactctgtgaatgctgctgctcccaagggcggtgcccaggtgagatgcctgcgggggaagcagcaggagctaccacctccacccagccactgcattctggagcagcgcttcccaaacttcagtgtgtgcaccgatcacctagggccttttttttttttttcctttttgtggagaacgggtctcgctagattgcccaggcaggtctcaaactcctgggctcaagccatcctcctgcctctgcctccctaagagttgggattaccggcttgagccactgtgcctggcttgtttgttttgtattaattacatttttatagagagagatggggtcttactttgttgcccgggctggttgcaaactcctgggcctcaagggaacctcccatttcagcctcccaaagtgccggaattgcaggcgtgagccactgcctggcttgttttttttgttttttgtttttttttttctgagacggagtcttgctctgtcgcccaggctggagtgcagtggtgcgatcgtggctcactgcaagctcggcctcccgggttcgctccattctcctgcctcagcctcccaagtagctgggactataggcacctgccataacacccggataattttttgtattttagtagagacggggtttcaccgtgttagccaggatggtgtcgatctcctgaccttgtgatctgcccacctcggcctcctgagtaccttgttaaacacccaagtctaggccccatcctagacctacagaatcagaattcctagtgttaggctgggtgcagtggctcgcacctgtggtctcagcactttgggaggctcaagtgggaggatcatttgagcccaggagttcgagaccagcctgggcaacatagtgaaaccctctctacaaaaaatttaaaacttagctgggtggtgcatgcctgtggtcccagctccttgggatgctgaggtgggaggatcgcctgagcctgggaggttgcggctacagtgagctgtgatcatgctactgcactccagcctgggcgagagcaagatctcttctcttaaataaatttaaaaaaagaatccctgggccaggtgtggtggctcatgcctgtaatcacttttgggagcccaaggtaggtggatcacctgagatcaggagttcaagaccagcttggccaacacggtgaaacccccatctctaaaaatataaaaaaaattagctggacatggtggcctgcagtgcaatcccagctactctggaggctgaggcagggagaatcgcttaaacccgggagctggaggttgtagtgagccgagatcacgccattgcactccatcctgggcgacagagtgagactctgtctcaaaaaaaaaaaaaaaaggaatccgtggtgtagtccgagcgcggtggctcacgcctgtaatcccagcattttgggaagctgaggcaggcagatcccttgaggtcaggagttcgagaccagcctggccaacatggcgaaaccccatctctactaaaaatacaaaaattagccaggtgtggtggcacatgcctgtaattccagttactcaggaggctgaggcaggagaattgcttgaacccaggaggcggaagtagtggtgagctgagatcataccactgcactccagcctgggtgacagagggagactctgttgcaaaaaaaaaaaagaatccctgatgatagaacctgagaatctgtagttaagaggctccccgggtggtcatgcaaaccagtgtgtgggaagcagtgttgagagtgcctcagagaagctcgttccatgaaaattgtgtgcagaccccagggccccattttcagaggattatgcagcttgacctgcaggaagccactgctgatgcctgttgagtggctgcctggggatgggcactgcccgatgacgggcaggaggaccactacctacacctggctgtcctacagtagttttcaggtgtctgtgcctggcaccagccaccagcagtatccctgcgtctggccctggtcctctaggagcggaaggggagaagggcactgccgtgggagagagacctgccatttagattacatttggctttgagggttgaatggtgtgtttgcaaagccaggaatgatcatgagctctgtctgctcccataggcccatcaaatggctccagacatgttctactgcatgaagctcctggaggagactggcatctgtgtcgtgcccggcagtggctttgggcagagggaaggcacttaccacttcaggatgactatcctccctccagtggagaagctgaaaacggtgctgcagaaggtgaaagacttccacatcaacttcctggagaagtacgcgtgaggacgcctgagccccagcgggagacctgtccttggctcttcctcccaatgcccgtcaggctgaactcgcctcccccgtgactctgcctcgggcctcgcagaggccgctggtcacttcgtcatcattttgcccctggagacgtctttctttgtgccttgatgttgagagcgcctctcttttgagcaaacaagcattctatatgcaaccagagtagaggggacctgctcagcaggtgtgaccagggttctctgaatctgttattgtttttgcttctggaaagttcatttggggtttacaacaactaggatgtgttgggtgagatgtttcagatctggagaaatgagcaggtgtcgggaaatgtgtgacttaaccgtggtgagggctggaaatccaaactcaccaccatgatctgtgaaataaagcccttagcggtgtgaagcatccggtcctttgaacagaagggcctggaaggcccctggggctgagaaagggtccgcccggtggcctggaggcaggcgccgggagcgcagtagcacgtggactgggcaggatgttgcactagcttggggtagatgctgggggctgcggccacggtcagagggccccactgtgaggcgtgggtgtgagccaggctgcaggaggaactgggcctccgcttcccagcaacgcagccaggcctgagaattctgtgcgcccggcgggctttgggaatgaggggttcccttgaacatgcgtaggctggaaccccgtctgagaggtctccctgaatttcagtgacacatagtgcagcccggcagtgtcccacttccgtggagagagccgctggaatggtgtggacccatcccgcgggtgaccggtgcctgttctcccctgaccgagcctgtgagcacatcgccccctgctggcgacagcggggaaatgagggctgaaaatatcctccccacaagggcaatccccgggacctgccgagcagccaaggccctgtcctttcttgaatggtggcgagctgaatctggtcggtttcctagcttttaggtggtaaaagtgcctggcagcttggctgccgtggaggagtcagtcgtggttggaggttcattgccgtgctttcatgcagagtgttttgccttcatgttagcttccggctcccctcccaggctgcagactctgacctgtggcatcaggcttctcccagtacaggagggtgccatcccccagcatgcggcttctctgccattagcagccctgggcgggccgaccacactcgaggctgcggtgctacgggcttagccctcgcctccctcactgggagcttccccatcctccctgccttccccagtgggaagttagggaagctcaggagcctgggaccccgcatgtcccaaaatgggattggagaagctggagagaaagcagaagaggccgaggagtgaggcagcagcctctatgctgtgatttccacaccgggtccgtgcagaggaaacagaaactcccaactgtccttacccaccgacatcacagcccctatgaagaaagtagccacaatctcaaataacaaaagggaatgttctaaaactttttcttccttaaaaaatggagaaaattgcacttgtgcttgctgtgtggtatataaaccaggattagtcccagggtcgtgaggtttctggtgaaaaggttaaatcgtagaagctagtatattttttatatttttgtaacaattgcttttttcatgggggaggcggggttagtatttatagtcctaacaagtccagtaattttttataaatcttcagattataaacagcccctaaaaactttacaacgtttacacagttttttaaaaagagactgtatacacttgatttgctttcaaaataaataaggtcagctagtctaggaggttaacgtcgggtaggaatgctgatcatgataggtttggttttctacagattctgttccggtgcctttcctatccaggcaccacctgagaaagttgtcatttgaggtcgcacttggaagttacatctgtgaagtttctgtcattcgtccagatctgtgtgtgtagcatgtgctgaggaagcacgtgctgggctgtgcctcagacagtgcatcaccgggcacccagaggcttgcctggctattcctgttctggtgtgtgtggagtgttggggaggaacagatgcagatcaacctgtggctgttttcccgtctaggttctcacaggtatctcctgacagaggtacttaacaatggctctgctggaaatttctataaataaaatgtccaaaatggtgac

SEQ ID NO: 449298 - DNA, 2852 bp, Homo sapiens
gcgcggggatgcggctgtgggcgccggggccgggtagctgctccaggcgcgcgagctaaccgagtgcggcgagggcctaccaggggcgacagggtttctctccgcaagcgcgcgatgcagcgggcggcggcgctggtccggcggggctgtggtccccggacccccagctcctggggccgcagccagagcagcgcggccgccgaggcctcggcggtgctcaaggtgcggcccgagcgcagccggcgcgagcgcatcctcacgctggagtccatgaacccgcaggtgaaggcggtggagtacgccgtgcggggacccatcgtgctcaaggccggcgagatcgagctcgagctgcagcggggtatcaaaaagccattcacagaggtcatccgagccaacatcggggacgcccaggctatggggcagcagccaatcaccttcctccggcaggtgatggcactatgcacctacccaaacctgctggacagccccagcttcccagaagatgctaagaaacgtgcccggcggatcctgcaggcttgtggcgggaacagcctggggtcctacagtgctagccagggtgtcaactgcatccgtgaagatgtggctgcctacatcaccaggagggatggcggtgtgcctgcggaccccgacaacatctacctgaccacgggagctagtgacggcatttctcctggagacgtctttctttgtgccttgatgttgagagcgcctctcttttgagcaaacaagcattctatatgcaaccagagtagaggggacctgctcagcaggtgtgaccagggttctctgaatctgttattgtttttgcttctggaaagttcatttggggtttacaacaactaggatgtgttgggtgagatgtttcagatctggagaaatgagcaggtgtcgggaaatgtgtgacttaaccgtggtgagggctggaaatccaaactcaccaccatgatctgtgaaataaagcccttagcggtgtgaagcatccggtcctttgaacagaagggcctggaaggcccctggggctgagaaagggtccgcccggtggcctggaggcaggcgccgggagcgcagtagcacgtggactgggcaggatgttgcactagcttggggtagatgctgggggctgcggccacggtcagagggccccactgtgaggcgtgggtgtgagccaggctgcaggaggaactgggcctccgcttcccagcaacgcagccaggcctgagaattctgtgcgcccggcgggctttgggaatgaggggttcccttgaacatgcgtaggctggaaccccgtctgagaggtctccctgaatttcagtgacacatagtgcagcccggcagtgtcccacttccgtggagagagccgctggaatggtgtggacccatcccgcgggtgaccggtgcctgttctcccctgaccgagcctgtgagcacatcgccccctgctggcgacagcggggaaatgagggctgaaaatatcctccccacaagggcaatccccgggacctgccgagcagccaaggccctgtcctttcttgaatggtggcgagctgaatctggtcggtttcctagcttttaggtggtaaaagtgcctggcagcttggctgccgtggaggagtcagtcgtggttggaggttcattgccgtgctttcatgcagagtgttttgccttcatgttagcttccggctcccctcccaggctgcagactctgacctgtggcatcaggcttctcccagtacaggagggtgccatcccccagcatgcggcttctctgccattagcagccctgggcgggccgaccacactcgaggctgcggtgctacgggcttagccctcgcctccctcactgggagcttccccatcctccctgccttccccagtgggaagttagggaagctcaggagcctgggaccccgcatgtcccaaaatgggattggagaagctggagagaaagcagaagaggccgaggagtgaggcagcagcctctatgctgtgatttccacaccgggtccgtgcagaggaaacagaaactcccaactgtccttacccaccgacatcacagcccctatgaagaaagtagccacaatctcaaataacaaaagggaatgttctaaaactttttcttccttaaaaaatggagaaaattgcacttgtgcttgctgtgtggtatataaaccaggattagtcccagggtcgtgaggtttctggtgaaaaggttaaatcgtagaagctagtatattttttatatttttgtaacaattgcttttttcatgggggaggcggggttagtatttatagtcctaacaagtccagtaattttttataaatcttcagattataaacagcccctaaaaactttacaacgtttacacagttttttaaaaagagactgtatacacttgatttgctttcaaaataaataaggtcagctagtctaggaggttaacgtcgggtaggaatgctgatcatgataggtttggttttctacagattctgttccggtgcctttcctatccaggcaccacctgagaaagttgtcatttgaggtcgcacttggaagttacatctgtgaagtttctgtcattcgtccagatctgtgtgtgtagcatgtgctgaggaagcacgtgctgggctgtgcctcagacagtgcatcaccgggcacccagaggcttgcctggctattcctgttctggtgtgtgtggagtgttggggaggaacagatgcagatcaacctgtggctgttttcccgtctaggttctcacaggtatctcctgacagaggtacttaacaatggctctgctggaaatttctataaataaaatgtccaaaatggtgac

SEQ ID NO: 449299 - DNA, 2124 bp, Homo sapiens
gcgcggggatgcggctgtgggcgccggggccgggtagctgctccaggcgcgcgagctaaccgagtgcggcgagggcctaccaggggcgacagggtttctctccgcaagcgcgcgatgcagcgggcggcggcgctggtccggcggggctgtggtccccggacccccagctcctggggccgcagccagagcagcgcggccgccgaggcctcggcggtgctcaaggtgcggcccgagcgcagccggcgcgagcgcatcctcacgctggagtccatgaacccgcaggtgaaggcggtggagtacgccgtgcggggacccatcgtgctcaaggccggcgagatcgagctcgagctgcagcggggtatcaaaaagccattcacagaggtcatccgagccaacatcggggacgcccaggctatggggcagcagccaatcaccttcctccggcaggtgatggcactatgcacctacccaaacctgctggacagccccagcttcccagaagatgctaagaaacgtgcccggcggatcctgcaggcttgtggcgggaacagcctggggtcctacagtgctagccagggtgtcaactgcatccgtgaagatgtggctgcctacatcaccaggagggatggcggtgtgcctgcggaccccgacaacatctacctgaccacgggagctagtgacggcatttctacgatcctgaagatcctcgtctccgggggcggcaagtcacggacaggtgtgatgatccccatcccacaatatcccctctattcagctgtcatctctgagctcgacgccatccaggtgaattactacctggacgaggagaactgctgggcgctgaatgtgaatgagctccggcgggcggtgcaggaggccaaagaccactgtgatcctaaggtgctctgcataatcaaccctgggaaccccacaggccaggtacaaagcagaaagtgcatagaagatgtgatccactttgcctgggaagagaagctctttctcctggctgatgaggtgtaccaggacaacgtgtactctccagattgcagattccactccttcaagaaggtgctgtacgagatggggcccgagtactccagcaacgtggagctcgcctccttccactccacctccaagggctacatgggcgagtgtggttacagaggaggctacatggaggtgatcaacctgcaccctgagatcaagggccagctggtgaagctgctgtcggtgcgcctgtgccccccagtgtctgggcaggccgccatggacattgtcgtgaaccccccggtggcaggagaggagtcctttgagcaattcagccgagagaaggagtcggtcctgggtaatctggccaaaaaagcaaagctgacggaagacctgtttaaccaagtcccaggaattcactgcaaccccttgcagggggccatgtacgccttccctcggatcttcattcctgccaaagctgtggaggctgctcaggcccatcaaatggctccagacatgttctactgcatgaagctcctggaggagactggcatctgtgtcgtgcccggcagtggctttgggcagagggaaggcacttaccacttcaggatgactatcctccctccagtggagaagctgaaaacggtgctgcagaaggtgaaagacttccacatcaacttcctggagaagtacgcgtgaggacgcctgagccccagcgggagacctgtccttggctcttcctcccaatgcccgtcaggctgaactcgcctcccccgtgactctgcctcgggcctcgcagaggccgctggtcacttcgtcatcattttgcccctggagacgtctttctttgtgccttgatgttgagagcgcctctcttttgagcaaacaagcattctatatgcaaccagagtagaggggacctgctcagcaggtgtgaccagggttctctgaatctgttattgtttttgcttctggaaagttcatttggggtttacaacaactaggatgtgttgggtgagatgtttcagatctggagaaatgagcaggtgtcgggaaatgtgtgacttaaccgtggtgagggctggaaatccaaactcaccaccatgatctgtgaaataaagcccttagcggtgtgaa

SEQ ID NO: 449300 - DNA, 1478 bp, Homo sapiens
gcgcggggatgcggctgtgggcgccggggccgggtagctgctccaggcgcgcgagctaaccgagtgcggcgagggcctaccaggggcgacagggtttctctccgcaagcgcgcgatgcagcgggcggcggcgctggtccggcggggctgtggtccccggacccccagctcctggggccgcagccagagcagcgcggccgccgaggcctcggcggtgctcaaggtgcggcccgagcgcagccggcgcgagcgcatcctcacgctggagtccatgaacccgcaggtgaaggcggtggagtacgccgtgcggggacccatcgtgctcaaggccggcgagatcgagctcgagctgcagcggggtatcaaaaagccattcacagaggtcatccgagccaacatcggggacgcccaggctatggggcagcagccaatcaccttcctccggcaggtgatggcactatgcacctacccaaacctgctggacagccccagcttcccagaagatgctaagaaacgtgcccggcggatcctgcaggcttgtggcgggaacagcctggggtcctacagtgctagccagggtgtcaactgcatccgtgaagatgtggctgcctacatcaccagcagcctctatgctgtgatttccacaccgggtccgtgcagaggaaacagaaactcccaactgtccttacccaccgacatcacagcccctatgaagaaagtagccacaatctcaaataacaaaagggaatgttctaaaactttttcttccttaaaaaatggagaaaattgcacttgtgcttgctgtgtggtatataaaccaggattagtcccagggtcgtgaggtttctggtgaaaaggttaaatcgtagaagctagtatattttttatatttttgtaacaattgcttttttcatgggggaggcggggttagtatttatagtcctaacaagtccagtaattttttataaatcttcagattataaacagcccctaaaaactttacaacgtttacacagttttttaaaaagagactgtatacacttgatttgctttcaaaataaataaggtcagctagtctaggaggttaacgtcgggtaggaatgctgatcatgataggtttggttttctacagattctgttccggtgcctttcctatccaggcaccacctgagaaagttgtcatttgaggtcgcacttggaagttacatctgtgaagtttctgtcattcgtccagatctgtgtgtgtagcatgtgctgaggaagcacgtgctgggctgtgcctcagacagtgcatcaccgggcacccagaggcttgcctggctattcctgttctggtgtgtgtggagtgttggggaggaacagatgcagatcaacctgtggctgttttcccgtctaggttctcacaggtatctcctgacagaggtacttaacaatggctctgctggaaatttctataaataaaatgtccaaaatggtgac

SEQ ID NO: 449301 - DNA, 1414 bp, Homo sapiens
gcgcggggatgcggctgtgggcgccggggccgggtagctgctccaggcgcgcgagctaaccgagtgcggcgagggcctaccaggggcgacagggtttctctccgcaagcgcgcgatgcagcgggcggcggcgctggtccggcggggctgtggtccccggacccccagctcctggggccgcagccagagcagcgcggccgccgaggcctcggcggtgctcaaggtgcggcccgagcgcagccggcgcgagcgcatcctcacgctggagtccatgaacccgcaggtgaaggcggtggagtacgccgtgcggggacccatcgtgctcaaggccggcgagatcgagctcgagctgcagcggggtatcaaaaagccattcacagaggtcatccgagccaacatcggggacgcccaggctatggggcagcagccaatcaccttcctccggcaggtgatggcactatgcacctacccaaacctgctggacagccccagcttcccagaagatgctaagaaacgtgcccggcggatcctgcaggcttgtggcgggaacagcctggggtcctacagtgctagccagggtgtcaactgcatccgtgaagatgtggctgcctacatcaccaggagggatggcggtgtgcctgcggaccccgacaacatctacctgaccacgggagctagtgacggcatttctacgatcctgaagatcctcgtctccgggggcggcaagtcacggacaggtgtgatgatccccatcccacaatatcccctctattcagctgtcatctctgagctcgacgccatccaggtgaattactacctggacgaggagaactgctgggcgctgaatgtgaatgagctccggcgggcggtgcaggaggccaaagaccactgtgatcctaaggtgctctgcataatcaaccctgggaaccccacaggccaggtacaaagcagaaagtgcatagaagatgtgatccactttgcctgggaagagaagctctttctcctggctgatgaggtgtaccaggacaacgtgtactctccagattgcagattccactccttcaagaaggtgctgtacgagatggggcccgagtactccagcaacgtggagctcgcctccttccactccacctccaagggctacatgggcgagtgtggttacagaggaggctacatggaggtgatcaacctgcaccctgagatcaagggccagctggtgaagctgctgtcggtgcgcctgtgccccccagtgtctgggcaggccgccatggacattgtcgtgaaccccccggtggcaggagaggagtcctttgagcaattcagccgagagaaggagtcggtcctgggtaatcgtggcagccggtggctcttcctttctgaccagttcccactgcgcagggactggctgttgggtt

SEQ ID NO: 449302 - DNA, 455 bp, Homo sapiens
agcgcaggggccgggcggcgcgggcgccgggcgcggggatgcggctgtgggcgccggggccgggtagctgctccaggcgcgcgagctaaccgagtgcggcgagggcctaccaggggcgacaggcacgttgcatgcatgccttgggcgcagcctttgcgaaagccggttgggtgtgcgttggtgcttcagcggcgccgtggagggtccgggtcgccgggggatgggcaccagcgccgaagccaggctggcaccgctcgctgaaagagcccttggctgggcttgtgtgggggagtgctgcacgcctgggcagtgcgcgacgtgtttgttctttttctctttttgtgccagggtttctctccgcaagcgcgcgatgcagcgggcggcggcgctggtccggcggggctgtggtccccggacccccagctcctggggccgcagccagagcagcgcggccg

SEQ ID NO: 449303 - DNA, 3692 bp, Homo sapiens
taaaagggtacgcacgaaaggacccttgagagtttggcccgacaatgtacagtgcaatcagtatgagacaggtatcaaaaagccattcacagaggtcatccgagccaacatcggggacgcccaggctatggggcagcagccaatcaccttcctccggcaggtgatggcactatgcacctacccaaacctgctggacagccccagcttcccagaagatgctaagaaacgtgcccggcggatcctgcaggcttgtggcgggaacagcctggggtcctacagtgctagccagggtgtcaactgcatccgtgaagatgtggctgcctacatcaccaggagggatggcggtgtgcctgcggaccccgacaacatctacctgaccacgggagctagtgacggcatttctacgatcctgaagatcctcgtctccgggggcggcaagtcacggacaggtgtgatgatccccatcccacaatatcccctctattcagctgtcatctctgagctcgacgccatccaggtgaattactacctggacgaggagaactgctgggcgctgaatgtgaatgagctccggcgggcggtgcaggaggccaaagaccactgtgatcctaaggtgctctgcataatcaaccctgggaaccccacaggccaggtacaaagcagaaagtgcatagaagatgtgatccactttgcctgggaagagaagctctttctcctggctgatgaggtgtaccaggacaacgtgtactctccagattgcagattccactccttcaagaaggtgctgtacgagatggggcccgagtactccagcaacgtggagctcgcctccttccactccacctccaagggctacatgggcgagtgtggttacagaggaggctacatggaggtgatcaacctgcaccctgagatcaagggccagctggtgaagctgctgtcggtgcgcctgtgccccccagtgtctgggcaggccgccatggacattgtcgtgaaccccccggtggcaggagaggagtcctttgagcaattcagccgagagaaggagtcggtcctgggtaatctggccaaaaaagcaaagctgacggaagacctgtttaaccaagtcccaggaattcactgcaaccccttgcagggggccatgtacgccttccctcggatcttcattcctgccaaagctgtggaggctgctcaggcccatcaaatggctccagacatgttctactgcatgaagctcctggaggagactggcatctgtgtcgtgcccggcagtggctttgggcagagggaaggcacttaccacttcaggatgactatcctccctccagtggagaagctgaaaacggtgctgcagaaggtgaaagacttccacatcaacttcctggagaagtacgcgtgaggacgcctgagccccagcgggagacctgtccttggctcttcctcccaatgcccgtcaggctgaactcgcctcccccgtgactctgcctcgggcctcgcagaggccgctggtcacttcgtcatcattttgcccctggagacgtctttctttgtgccttgatgttgagagcgcctctcttttgagcaaacaagcattctatatgcaaccagagtagaggggacctgctcagcaggtgtgaccagggttctctgaatctgttattgtttttgcttctggaaagttcatttggggtttacaacaactaggatgtgttgggtgagatgtttcagatctggagaaatgagcaggtgtcgggaaatgtgtgacttaaccgtggtgagggctggaaatccaaactcaccaccatgatctgtgaaataaagcccttagcggtgtgaagcatccggtcctttgaacagaagggcctggaaggcccctggggctgagaaagggtccgcccggtggcctggaggcaggcgccgggagcgcagtagcacgtggactgggcaggatgttgcactagcttggggtagatgctgggggctgcggccacggtcagagggccccactgtgaggcgtgggtgtgagccaggctgcaggaggaactgggcctccgcttcccagcaacgcagccaggcctgagaattctgtgcgcccggcgggctttgggaatgaggggttcccttgaacatgcgtaggctggaaccccgtctgagaggtctccctgaatttcagtgacacatagtgcagcccggcagtgtcccacttccgtggagagagccgctggaatggtgtggacccatcccgcgggtgaccggtgcctgttctcccctgaccgagcctgtgagcacatcgccccctgctggcgacagcggggaaatgagggctgaaaatatcctccccacaagggcaatccccgggacctgccgagcagccaaggccctgtcctttcttgaatggtggcgagctgaatctggtcggtttcctagcttttaggtggtaaaagtgcctggcagcttggctgccgtggaggagtcagtcgtggttggaggttcattgccgtgctttcatgcagagtgttttgccttcatgttagcttccggctcccctcccaggctgcagactctgacctgtggcatcaggcttctcccagtacaggagggtgccatcccccagcatgcggcttctctgccattagcagccctgggcgggccgaccacactcgaggctgcggtgctacgggcttagccctcgcctccctcactgggagcttccccatcctccctgccttccccagtgggaagttagggaagctcaggagcctgggaccccgcatgtcccaaaatgggattggagaagctggagagaaagcagaagaggccgaggagtgaggcagcagcctctatgctgtgatttccacaccgggtccgtgcagaggaaacagaaactcccaactgtccttacccaccgacatcacagcccctatgaagaaagtagccacaatctcaaataacaaaagggaatgttctaaaactttttcttccttaaaaaatggagaaaattgcacttgtgcttgctgtgtggtatataaaccaggattagtcccagggtcgtgaggtttctggtgaaaaggttaaatcgtagaagctagtatattttttatatttttgtaacaattgcttttttcatgggggaggcggggttagtatttatagtcctaacaagtccagtaattttttataaatcttcagattataaacagcccctaaaaactttacaacgtttacacagttttttaaaaagagactgtatacacttgatttgctttcaaaataaataaggtcagctagtctaggaggttaacgtcgggtaggaatgctgatcatgataggtttggttttctacagattctgttccggtgcctttcctatccaggcaccacctgagaaagttgtcatttgaggtcgcacttggaagttacatctgtgaagtttctgtcattcgtccagatctgtgtgtgtagcatgtgctgaggaagcacgtgctgggctgtgcctcagacagtgcatcaccgggcacccagaggcttgcctggctattcctgttctggtgtgtgtggagtgttggggaggaacagatgcagatcaacctgtggctgttttcccgtctaggttctcacaggtatctcctgacagaggtacttaacaatggctctgctggaaatttctataaataaaatgtccaaaatggtgac

SEQ ID NO: 449304 - DNA, 3138 bp, Homo sapiens
cagggcactgagtgattctggatgggcttctgacctggggacaatttaaacagcattacaaccgacattttggttttcttggggattttataggccaggtacaaagcagaaagtgcatagaagatgtgatccactttgcctgggaagagaagctctttctcctggctgatgaggtgtaccaggacaacgtgtactctccagattgcagattccactccttcaagaaggtgctgtacgagatggggcccgagtactccagcaacgtggagctcgcctccttccactccacctccaagggctacatgggcgagtgtggttacagaggaggctacatggaggtgatcaacctgcaccctgagatcaagggccagctggtgaagctgctgtcggtgcgcctgtgccccccagtgtctgggcaggccgccatggacattgtcgtgaaccccccggtggcaggagaggagtcctttgagcaattcagccgagagaaggagtcggtcctgggtaatctggccaaaaaagcaaagctgacggaagacctgtttaaccaagtcccaggaattcactgcaaccccttgcagggggccatgtacgccttccctcggatcttcattcctgccaaagctgtggaggctgctcaggcccatcaaatggctccagacatgttctactgcatgaagctcctggaggagactggcatctgtgtcgtgcccggcagtggctttgggcagagggaaggcacttaccacttcaggatgactatcctccctccagtggagaagctgaaaacggtgctgcagaaggtgaaagacttccacatcaacttcctggagaagtacgcgtgaggacgcctgagccccagcgggagacctgtccttggctcttcctcccaatgcccgtcaggctgaactcgcctcccccgtgactctgcctcgggcctcgcagaggccgctggtcacttcgtcatcattttgcccctggagacgtctttctttgtgccttgatgttgagagcgcctctcttttgagcaaacaagcattctatatgcaaccagagtagaggggacctgctcagcaggtgtgaccagggttctctgaatctgttattgtttttgcttctggaaagttcatttggggtttacaacaactaggatgtgttgggtgagatgtttcagatctggagaaatgagcaggtgtcgggaaatgtgtgacttaaccgtggtgagggctggaaatccaaactcaccaccatgatctgtgaaataaagcccttagcggtgtgaagcatccggtcctttgaacagaagggcctggaaggcccctggggctgagaaagggtccgcccggtggcctggaggcaggcgccgggagcgcagtagcacgtggactgggcaggatgttgcactagcttggggtagatgctgggggctgcggccacggtcagagggccccactgtgaggcgtgggtgtgagccaggctgcaggaggaactgggcctccgcttcccagcaacgcagccaggcctgagaattctgtgcgcccggcgggctttgggaatgaggggttcccttgaacatgcgtaggctggaaccccgtctgagaggtctccctgaatttcagtgacacatagtgcagcccggcagtgtcccacttccgtggagagagccgctggaatggtgtggacccatcccgcgggtgaccggtgcctgttctcccctgaccgagcctgtgagcacatcgccccctgctggcgacagcggggaaatgagggctgaaaatatcctccccacaagggcaatccccgggacctgccgagcagccaaggccctgtcctttcttgaatggtggcgagctgaatctggtcggtttcctagcttttaggtggtaaaagtgcctggcagcttggctgccgtggaggagtcagtcgtggttggaggttcattgccgtgctttcatgcagagtgttttgccttcatgttagcttccggctcccctcccaggctgcagactctgacctgtggcatcaggcttctcccagtacaggagggtgccatcccccagcatgcggcttctctgccattagcagccctgggcgggccgaccacactcgaggctgcggtgctacgggcttagccctcgcctccctcactgggagcttccccatcctccctgccttccccagtgggaagttagggaagctcaggagcctgggaccccgcatgtcccaaaatgggattggagaagctggagagaaagcagaagaggccgaggagtgaggcagcagcctctatgctgtgatttccacaccgggtccgtgcagaggaaacagaaactcccaactgtccttacccaccgacatcacagcccctatgaagaaagtagccacaatctcaaataacaaaagggaatgttctaaaactttttcttccttaaaaaatggagaaaattgcacttgtgcttgctgtgtggtatataaaccaggattagtcccagggtcgtgaggtttctggtgaaaaggttaaatcgtagaagctagtatattttttatatttttgtaacaattgcttttttcatgggggaggcggggttagtatttatagtcctaacaagtccagtaattttttataaatcttcagattataaacagcccctaaaaactttacaacgtttacacagttttttaaaaagagactgtatacacttgatttgctttcaaaataaataaggtcagctagtctaggaggttaacgtcgggtaggaatgctgatcatgataggtttggttttctacagattctgttccggtgcctttcctatccaggcaccacctgagaaagttgtcatttgaggtcgcacttggaagttacatctgtgaagtttctgtcattcgtccagatctgtgtgtgtagcatgtgctgaggaagcacgtgctgggctgtgcctcagacagtgcatcaccgggcacccagaggcttgcctggctattcctgttctggtgtgtgtggagtgttggggaggaacagatgcagatcaacctgtggctgttttcccgtctaggttctcacaggtatctcctgacagaggtacttaacaatggctctgctggaaatttctataaataaaatgtccaaaatggtgac

SEQ ID NO: 449305 - DNA, 3219 bp, Homo sapiens
gcgcggggatgcggctgtgggcgccggggccgggtagctgctccaggcgcgcgagctaaccgagtgcggcgagggcctaccaggggcgacagggtttctctccgcaagcgcgcgatgcagcgggcggcggcgctggtccggcggggctgtggtccccggacccccagctcctggggccgcagccagagcagcgcggccgccgaggcctcggcggtgctcaaggtgcggcccgagcgcagccggcgcgagcgcatcctcacgctggagtccatgaacccgcaggtgaaggcggtggagtacgccgtgcggggacccatcgtgctcaaggccggcgagatcgagctcgagctgcagcggggtatcaaaaagccattcacagaggtcatccgagccaacatcggggacgcccaggctatggggcagcagccaatcaccttcctccggcaggtgatggcactatgcacctacccaaacctgctggacagccccagcttcccagaagatgctaagaaacgtgcccggcggatcctgcaggcttgtggcgggaacagcctggggtcctacagtgctagccagggtgtcaactgcatccgtgaagatgtggctgcctacatcaccaggagggatggcggtgtgcctgcggaccccgacaacatctacctgaccacgggagctagtgacggcatttctacgatcctgaagatcctcgtctccgggggcggcaagtcacggacaggtgtgatgatccccatcccacaatatcccctctattcagctgtcatctctgagctcgacgccatccaggtgaattactacctggacgaggagaactgctgggcgctgaatgtgaatgagctccggcgggcggtgcaggaggccaaagaccactgtgatcctaaggtgctctgcataatcaaccctgggaaccccacaggccaggtacaaagcagaaagtgcatagaagatgtgatccactttgcctgggaagagaagctctttctcctggctgatgaggtgtaccaggacaacgtgtactctccagattgcagattccactccttcaagaaggtgctgtacgagatggggcccgagtactccagcaacgtggagctcgcctccttccactccacctccaagggctacatgggcgagtgtggttacagaggaggctacatggaggtgatcaacctgcaccctgagatcaagggccagctggtgaagctgctgtcggtgcgcctgtgccccccagtgtctgggcaggccgccatggacattgtcgtgaaccccccggtggcaggagaggagtcctttgagcaattcagccgagagaaggagtcggtcctgggtaatctggccaaaaaagcaaagctgacggaagacctgtttaaccaagtcccaggaattcactgcaaccccttgcagggggccatgtacgccttccctcggatcttcattcctgccaaagctgtggaggctgctcaggcccatcaaatggctccagacatgttctactgcatgaagctcctggaggagactggcatctgtgtcgtgcccggcagtggctttgggcagagggaaggcacttaccacttcaggatgactatcctccctccagtggagaagctgaaaacggtgctgcagaaggtgaaagacttccacatcaacttcctggagaagtacgcgtgaggacgcctgagccccagcgggagacctgtccttggctcttcctcccaatgcccgtcaggctgaactcgcctcccccgtgactctgcctcgggcctcgcagaggccgctggtcacttcgtcatcattttgcccctggagacgtctttctttgtgccttgatgttgagagcgcctctcttttgagcaaacaagcattctatatgcaaccagagtagaggggacctgctcagcaggtgtgaccagggttctctgaatctgttattgtttttgcttctggaaagttcatttggggtttacaacaactaggatgtgttgggtgagatgtttcagatctggagaaatgagcaggtgtcgggaaatgtgtgacttaaccgtggtgagggctggaaatccaaactcaccaccatgatctgtggcatcaggcttctcccagtacaggagggtgccatcccccagcatgcggcttctctgccattagcagccctgggcgggccgaccacactcgaggctgcggtgctacgggcttagccctcgcctccctcactgggagcttccccatcctccctgccttccccagtgggaagttagggaagctcaggagcctgggaccccgcatgtcccaaaatgggattggagaagctggagagaaagcagaagaggccgaggagtgaggcagcagcctctatgctgtgatttccacaccgggtccgtgcagaggaaacagaaactcccaactgtccttacccaccgacatcacagcccctatgaagaaagtagccacaatctcaaataacaaaagggaatgttctaaaactttttcttccttaaaaaatggagaaaattgcacttgtgcttgctgtgtggtatataaaccaggattagtcccagggtcgtgaggtttctggtgaaaaggttaaatcgtagaagctagtatattttttatatttttgtaacaattgcttttttcatgggggaggcggggttagtatttatagtcctaacaagtccagtaattttttataaatcttcagattataaacagcccctaaaaactttacaacgtttacacagttttttaaaaagagactgtatacacttgatttgctttcaaaataaataaggtcagctagtctaggaggttaacgtcgggtaggaatgctgatcatgataggtttggttttctacagattctgttccggtgcctttcctatccaggcaccacctgagaaagttgtcatttgaggtcgcacttggaagttacatctgtgaagtttctgtcattcgtccagatctgtgtgtgtagcatgtgctgaggaagcacgtgctgggctgtgcctcagacagtgcatcaccgggcacccagaggcttgcctggctattcctgttctggtgtgtgtggagtgttggggaggaacagatgcagatcaacctgtggctgttttcccgtctaggttctcacaggtatctcctgacagaggtacttaacaatggctctgctggaaatttctataaataaaatgtccaaaatggtgac

SEQ ID NO: 449306 - DNA, 1474 bp, Homo sapiens
gcgcggggatgcggctgtgggcgccggggccgggtagctgctccaggcgcgcgagctaaccgagtgcggcgagggcctaccaggggcgacagggtttctctccgcaagcgcgcgatgcagcgggcggcggcgctggtccggcggggctgtggtccccggacccccagctcctggggccgcagccagagcagcgcggccgccgaggcctcggcggtgctcaaggtgcggcccgagcgcagccggcgcgagcgcatcctcacgctggagtccatgaacccgcaggtgaaggcggtggagtacgccgtgcggggacccatcgtgctcaaggccggcgagatcgagctcgagctgcagcggggtatcaaaaagccattcacagaggtcatccgagccaacatcggggacgcccaggctatggggcagcagccaatcaccttcctccggcaggtgatggcactatgcacctacccaaacctgctggacagccccacttccccatcctccctgccttccccagtgggaagttagggaagctcaggagcctgggaccccgcatgtcccaaaatgggattggagaagctggagagaaagcagaagaggccgaggagtgaggcagcagcctctatgctgtgatttccacaccgggtccgtgcagaggaaacagaaactcccaactgtccttacccaccgacatcacagcccctatgaagaaagtagccacaatctcaaataacaaaagggaatgttctaaaactttttcttccttaaaaaatggagaaaattgcacttgtgcttgctgtgtggtatataaaccaggattagtcccagggtcgtgaggtttctggtgaaaaggttaaatcgtagaagctagtatattttttatatttttgtaacaattgcttttttcatgggggaggcggggttagtatttatagtcctaacaagtccagtaattttttataaatcttcagattataaacagcccctaaaaactttacaacgtttacacagttttttaaaaagagactgtatacacttgatttgctttcaaaataaataaggtcagctagtctaggaggttaacgtcgggtaggaatgctgatcatgataggtttggttttctacagattctgttccggtgcctttcctatccaggcaccacctgagaaagttgtcatttgaggtcgcacttggaagttacatctgtgaagtttctgtcattcgtccagatctgtgtgtgtagcatgtgctgaggaagcacgtgctgggctgtgcctcagacagtgcatcaccgggcacccagaggcttgcctggctattcctgttctggtgtgtgtggagtgttggggaggaacagatgcagatcaacctgtggctgttttcccgtctaggttctcacaggtatctcctgacagaggtacttaacaatggctctgctggaaatttctataaataaaatgtccaaaatggtgac

SEQ ID NO: 449307 - DNA, 2444 bp, Homo sapiens
gcgcggggatgcggctgtgggcgccggggccgggtagctgctccaggcgcgcgagctaaccgagtgcggcgagggcctaccaggggcgacagggtttctctccgcaagcgcgcgatgcagcgggcggcggcgctggtccggcggggctgtggtccccggacccccagctcctggggccgcagccagagcagcgcggccgccgaggcctcggcggtgctcaaggtgcggcccgagcgcagccggcgcgagcgcatcctcacgctggagtccatgaacccgcaggtgaaggcggtggagtacgccgtgcggggacccatcgtgctcaaggccggcgagatcgagctcgagctgcagcggggtatcaaaaagccattcacagaggtcatccgagccaacatcggggacgcccaggctatggggcagcagccaatcaccttcctccggcaggtgatggcactatgcacctacccaaacctgctggacagccccagcttcccagaagatgctaagaaacgtgcccggcggatcctgcaggcttgtggcgggaacagcctggggtcctacagtgctagccagggtgtcaactgcatccgtgaagatgtggctgcctacatcaccaggagggatggcggtgtgcctgcggaccccgacaacatctacctgaccacgggagctagtgacggcatttctacgatcctgaagatcctcgtctccgggggcggcaagtcacggacaggtgtgatgatccccatcccacaatatcccctctattcagctgtcatctctgagctcgacgccatccaggtgaattactacctggacgaggagaactgctgggcgctgaatgtgaatgagctccggcgggcggtgcaggaggccaaagaccactgtgatcctaaggtgctctgcataatcaaccctgggaaccccacaggccaggtacaaagcagaaagtgcatagaagatgtgatccactttgcctgggaagagaagctctttctcctggctgatgaggtgtaccaggacaacgtgtactctccagattgcagattccactccttcaagaaggtgctgtacgagatggggcccgagtactccagcaacgtggagctcgcctccttccactccacctccaagggctacatgggcgagtgtggttacagaggaggctacatggaggtgatcaacctgcaccctgagatcaagggccagctggtgaagctgctgtcggtgcgcctgtgccccccagtgtctgggcaggccgccatggacattgtcgtgaaccccccggtggcaggagaggagtcctttgagcaattcagccgagagaaggagtcggtcctgggtaatctggccaaaaaagcaaagctgacggaagacctgtttaaccaagtcccaggaattcactgcaaccccttgcagggggccatgtacgccttccctcggatcttcattcctgccaaagctgtggaggctgctcaggcccatcaaatggctccagacatgttctactgcatgaagctcctggaggagactggcatctgtgtcgtgcccggcagtggctttgggcagagggaaggcacttaccacttcaggatgactatcctccctccagtggagaagctgaaaacggtgctgcagaaggtgaaagacttccacatcaacttcctggagaagtacgcgtgaggacgcctgagccccagcgggagacctgtccttggctcttcctcccaatgcccgtcaggctgaactcgcctcccccgtgactctgcctcgggcctcgcagaggccgctggtcacttcgtcatcattttgcccctggagacgtctttctttgtgccttgatgttgagagcgcctctcttttgagcaaacaagcattctatatgcaaccagagtagaggggacctgctcagcaggtgtgaccagggttctctgaatctgttattgtttttgcttctggaaagttcatttggggtttacaacaactaggatgtgttgggtgagatgtttcagatctggagaaatgagcaggtgtcgggaaatgtgtgacttaaccgtggtgagggctggaaatccaaactcaccaccatgatctgtgaaataaagcccttagcggtgtgaacaacaaccaacaaacacacaaaaaaaaaaaaatttggggggcgctggggctcggaaaaaggtttcctaagaacccaatctcggtggggcgcggggccaagtgaagggtacggtgagcaccttgggcatcagcggtgtgtccccagagaggaaaacccctggggccaggacaaaggggctgggtgttctcccaccaaaattaaaaaaagcggcgggggggacacccggcgggggttgtggacaaatcccaggaggaggccggggggacatgcgggctcacacacggaggtccaagggagcgatataattaagcgcgagggg

SEQ ID NO: 449308 - DNA, 698 bp, Homo sapiens
gcgcggggatgcggctgtgggcgccggggccgggtagctgctccaggcgcgcgagctaaccgagtgcggcgagggcctaccaggggcgacagggtttctctccgcaagcgcgcgatgcagcgggcggcggcgctggtccggcggggctgtggtccccggacccccagctcctggggccgcagccagagcagcgcggccgccgaggcctcggcggtgctcaaggtgcggcccgagcgcagccggcgcgagcgcatcctcacgctggagtccatgaacccgcaggtgaaggcggtggagtacgccgtgcggggacccatcgtgctcaaggccggcgagatcgagctcgagctgcagcgggtgagcgcgcgctgggccccggggaggctggggccgctgagcaagggaaaaaccgcagcagccccagctggggtccttcccacgacgtccacccccatggccagctcctcagtcagccaagcctggctaaaacgagagaatgccccctcccgcccgttcacttactggtgcccagcaccgggcactcagtgaggccttgcaatacggttcacttgttgaattgaattcgtcaattgttgagcgggccgtgctgccaggcaccgcacgttgtgtgtctgccctactctcgtggaaccaaggtccagtggagagaggaacataagcgaatgaagaaagaagca

SEQ ID NO: 449309 - DNA, 154 bp, Homo sapiens
ggctgctgcagaggacagaggtgaacagcaaacgggatgaacactcactgtgtgctccatgacagccaccccggcccccacagcctcacaccacaggatgggaccagtatgatcctgagaggctcccagagatgtccagccttgaccaagaccg

SEQ ID NO: 449310 - DNA, 2554 bp, Homo sapiens
agtactcgttttctgggtttttgttattttttagtggtaacacaagcctatagggcatttatagccacctattatactgtttccataagcctggctaccttttagggaagctattttttctctttcatttttactgtcacagcacatacacacacacctttttgttttaaaggattaagtactgtttgaagatcagtggtaacagaaaatttgggagggagaagaagaaattaagacatgacttgttagaaaattaagacttcagtttctagaattatcttttcatcaagatttggtagacattgagtttaaatggaaaggaaattatttaagcctgtgtatgttagatccacaatacaccattggtattgaaatataaaggttaaaaaaaaggcttatgacctctttaatgagataaatatgtatttgtcttgtaagcaggcagaaaatctacctctaattttaacactaatactttgaaacccacaatcaaatagagtgaattctccaagttacataagcaaggaaaacattatttgaaatatgccatgttttcgttgcctttggacacctcatcattcaactctaattttaccgagtcccgggatttgtactgtcccattgtacttgcaatctacaatttatataatagaaaaacaaccaaacccattcatacaaggatctgaagttataaggttaagggcagaaagtttcccataagtataaaacatttccaggtcatgaagagtagtttaggttgagtgacaaaagcctaggtgtggttgtttttcattcattttgcatctcacaccaagacatttttgctgcaaggtcatctgctgcttaaaatgtacaattaggtatataaaataagtacaatggtgaaaacacaaagccaggtaaagcagcatgccccactaaatttttcagtatacatagggacagacaagtgagttttggttgtatctaaatattttaatttcaggttccttctgtgccctgggccactatttcccaggggtgtgacagagatgcctgccagatccatatcaactagaagtctgatttctgttgctgcccttcctcagcaactatggcagtatacttttatcaccaagcaccactcccttgtccctgaatcacattttaatagagtacaatatcttctgtacaatatttctgaaacacttatgtctgaaatatatgctgtattgtatgttaacccatgacatatatgaactacaaggcttgcataatcagtgagctagtggataaatcaagacaggagcaaatgggagaaagatgaataaacaaatgaaaaaagatgaataaatgaataagagagatgaataaacaaatttacattacatgtgatagttatcatggtatggccttcatgacaagatggatgagaatatcactgataggatattagccttctttcatatctttatattgaaatatgggctttacttcaatttgaaggtctttcatgaacaataaaagagagtagaaggactgtctgagaaggcaggagacatataaaacagatgactgaaagactgactagctcctggaaagggaaacatttggaacatccagagtaagggcaaatgggcttctaccagcacaacaaagagcctccaggtggcaacatggaagcaggttatcagagaaaataaatgtgcaaattccttatttacaatgactcacttaaccccacaaacatgtttcactgctgccttccccagttgtcgcttatgtactgttgttacctttcagttacatgcctttgatcctaaaattctctacttttgttgccttatcagttctttgcaatctgcctgtggttatcagcacttaaagcacaattttgaaggggaaaaaaatgataatcaccttagtcccaaagaaataatttgtcaaactgccttattagtattaaaaacagacacactgaatgaagtagcatgatacgcatatatcctactcagtatcattggccttttatcaaatggggaaactatacttttgtattacatagttttagaaatcgaaagttagagactctttataagtaatgtcaaggaacagtaatttaaaaacaaagttctaacaaatatattgtttgcttaatcacaatgccctcaacttgtatttgaataactaaataggacatgtcttccttggagctgtgggcattagttcagaagcactacctgcatcttaattttcaaaacttaagttttattagcaaatcctcttctctgtaagacttagctatgaagtggtatattttttccaaatatttttctgaaaacatttgttgttgtaactgcacaataaaagtccgtgccaacaaaaaacacacaaaaaaaaaaattggcggggctggccggaaaagtttaaaccactctggcggggggccaggaagaatggaaggccagaaccggcgacgggggtctccccaaaacggggcgggttaaccggttggtttgttcagcacccccccccccccgccgaaacagacaaaaaagaacaaaatcggaaaaac

SEQ ID NO: 449311 - DNA, 1609 bp, Homo sapiens
gcggcggcggcggcatctcctcctcacatgaccccactgtttgtccccgtgatcagcgcgagcggctcccgtatctcctccgtcccctcctgccgcgcggcgtgagcgccgggctcggggcccccccggccgcccgccccctcccctccctccctcccctcccctcccctcccccccgggccccgcgccccccccgcccccgccccccccatggacatgctggacccgggtctggatcccgctgcctcggccaccgctgctgccgccgccagccacgacaagggacccgaggcggaggagggcgtcgagctgcaggaaggcggggacggcccaggagcggaggagcagacagcggtggccatcaccagcgtccagcaggcggcgttcggcgaccacaacatccagtaccagttccgcacagagacaaatggaggacaggctgtgatccaaaatcccttcagcaatggtggcagtccggcggccgaggctgtcagcggggaggcacgatttgcctatttcccagcgtccagtgtgggagatactacggctgtgtccgtacagaccacagaccagagcttgcaggctggaggccagttctacgtcatgatgacgccccaggatgtgcttcagacaggaacacagaggacgatcgccccccggacacacccttactctccaaaaattgatggaaccagaacaccccgagatgagaggagaagagcccagcacaacgaagtggagcggaggcggagggacaagatcaacaactggatcgtccagctttcgaaaatcattccagactgtaacgcagacaacagcaagacgggagcgagtaaaggagggatcctgtccaaggcctgcgattacatccgggagttgcgccagaccaaccagcgcatgcaggagaccttcaaagaggccgagcggctgcagatggacaacgagctcctgaggcagcagatcgaggagctgaagaatgagaacgccctgcttcgagcccagctgcagcagcacaacctggagatggtgggcgagggcacccggcagtgacgcccgccaccaccacgcagccgccgccgcccacgccggcctctgctgcccccttccccagcccttagcacagagagggacacatgcccctcccccagctgcgtttttttatagtagatttttaacaaaaaacggggagaaataatgcatttctgtggatacagtgcccaccgccctcctccacttggaaacggtatcctccctgcccatccgtctgtctgtcgcccttctcccggccctcactaagccccggcacttctagtggtctcacctggaggcaagagggaggggacagaggccctgccacgtcccgctgcctcctgctctctggaggtactgagacagggtgctgatgggaaggaggggagcctttggggggccacccggggcctggacctatgcagggaggccacgtcccaccccacctcttgtttctgggtccctgctcccctttgggggtgtgtgtgtgtgttttaattttctttatggaaaaattgacaaaaaaaaaatagagagagaggtatttaactgcaataaactggccccatgtggcccccgc

SEQ ID NO: 449312 - DNA, 1642 bp, Homo sapiens
cccagtgcagggcctggaccgtgctccatagcaagcactgatcttgggctattggttttggaggaaagagggagcacaaggatggaaggggccagggaagagaggtcacggtgggagaaggagagtccgcatccatcggagggtttgtcactcaggcctgagtgggaggcactggaggcagggagaggccagtcagcagcatgcggccacagcccagagaagccagaggggtttgctggtgggtgggccccagccttttcaagggaacggcaggtctggggagctgccgatctcggggtgtgagggtaacgggcaggctgtggcccacccctccttctcaggctcactggacccctgaccggtttcatcaccattatccaaggctttgaaaagaccccctggccttcctgccacatgtgccctagctatagggcttcgttcccctccacaaatggtgcagacagcatgagccaccctggcagggggctgggggtccgtggggtaggagttgggggtagctgagcgttctttcctgtccccacggtgcctggtgctggggcttggcagccagggttgggacagcctggctttagcaggtcctgagtcaggggtctcaggctccgcagcacacagtccccaggcaggtgtcaggatgggatgtggccagagaaaggcatgtgctctgtctggggatagctgccacccagctgacacagttggcatgagattgtggagttttatggagtaaaatcacaaatctgggttttttaagtaaaaccttctatgagttgccatctctggccttcaacataggatttgggtctttcctgggtgagctggtgctttgtgggccaggccctgggagctgcaagtaccagttgggatctgccattgccctgtggaaggattttaagcaggggtgaaacatggtcagacttggattctagagatgaggaaaacaaaacaaaatcacggtgccagagtctctggggagactggagaatgcagtgcaggggccgcaggagccaaaaaggggcactggtcctgcgaagagtggctctgtccatccctgccttccagtatgtgcccactgtgaccagagctccatttctcaaaagaagccagtgatgccaattaccatgagaaatttccttatttttaactgtcgattaaaatttgtacaagtatggtggggcaggcctgcaaaatgatctccaagtgcctggcctttgatgcccgtcctaaaagcatgtgtggcactggagggcccacgtttctttgttcctcttgagaagctggggtgggggccggctgggctcagggtgcggcccctcagcacttctagtggtctcacctggaggcaagagggaggggacagaggccctgccacgtcccgctgcctcctgctctctggaggtactgagacagggtgctgatgggaaggaggggagcctttggggggccacccggggcctggacctatgcagggaggccacgtcccaccccacctcttgtttctgggtccctgctcccctttgggggtgtgtgtgtgtgttttaattttctttatggaaaaattgacaaaaaaaaaatagagagagaggtatttaactgcaataaactggccccatgtggcccccgc

SEQ ID NO: 449313 - DNA, 2272 bp, Homo sapiens
gcggcggcggcggcatctcctcctcacatgaccccactgtttgtccccgtgatcagcgcgagcggctcccgtatctcctccgtcccctcctgccgcgcggcgtgagcgccgggctcggggcccccccggccgcccgccccctcccctccctccctcccctcccctcccctcccccccgggccccgcgccccccccgcccccgccccccccatggacatgctggacccgggtctggatcccgctgcctcggccaccgctgctgccgccgccagccacgacaagggacccgaggcggaggagggcgtcgagctgcaggaaggcggggacggcccaggagcggaggagcagacagcggtggccatcaccagcgtccagcaggcggcgttcggcgaccacaacatccagtaccagttccgcacagagacaaatggaggacaggtgacataccgcgtagtccaggtgactgatggtcagctggacggccagggcgacacagctggcgccgtcagcgtcgtgtccaccgctgccttcgcgggggggcagcaggctgtgacccaggtgggtgtggacggggcagcccagcgcccgggccccgccgctgcctctgtgcccccaggtcctgcagcgcccttcccgctggctgtgatccaaaatcccttcagcaatggtggcagtccggcggccgaggctgtcagcggggaggcacgatttgcctatttcccagcgtccagtgtgggagatactacggctgtgtccgtacagaccacagaccagagcttgcaggctggaggccagttctacgtcatgatgacgccccaggatgtgcttcagacaggaacacagaggacgatcgccccccggacacacccttactctccaaaaattgatggaaccagaacaccccgagatgagaggagaagagcccagcacaacgaagtggagcggaggcggagggacaagatcaacaactggatcgtccagctttcgaaaatcattccagactgtaacgcagacaacagcaagacgggagcgagtaaaggagggatcctgtccaaggcctgcgattacatccgggagttgcgccagaccaaccagcgcatgcaggagaccttcaaagaggccgagcggctgcagatggacaacgagctcctgaggcagcagatcgaggagctgaagaatgagaacgccctgcttcgagcccagctgcagcagcacaacctggagatggtgggcgagggcacccggcagtgacgcccgccaccaccacgcagccgccgccgcccacgccggcctctgctgcccccttccccagcccttagcacagagagggacacatgcccctcccccagctgcgtttttttatagtagatttttaacaaaaaacggggagaaataatgcatttctgtggatacagtgcccaccgccctcctccacttggaaacggtatcctccctgcccatccgtctgtctgtcgcccttctcccggccctcactaagccccggcacttctagtggtctcacctggaggcaagagggaggggacagaggccctgccacgtcccgctgcctcctgctctctggaggtactgagacagggtgctgatgggaaggaggggagcctttggggggccacccggggcctggacctatgcagggaggccacgtcccaccccacctcttgtttctgggtccctgctcccctttgggggtgtgtgtgtgtgttttaattttctttatggaaaaattgacaaaaaaaaaatagagagagaggtatttaactgcaataaactggccccatgtggcccccgcaaaaaaaaaaaaaaaaaaaaaaaaaaaaaaaaaaaaaaaaaaaaaaaaaaaaaaaaaaaaaggggggggcgcgcgcaaagactcatcccgcaggaggggcccacaggatcaacgccagcccccagcagttagtcggacacaaggaggggcccccatatatggggcggtgacaaattaatatgatgcgagagacggcggcgcacatactacaacaacaggcacgtcgagcaggcgagcaaacaggcacgaaacgcggaggagcacacctgcttgagagaaagaacacccacaaatcaacgcgggcgggaggggagcacccaacaggaggacaacaacaacccacccagcaagcgataataagataaacgcgcaggagaggaacacaatacaaacaacagacgcaacgggagatcatacggagggtagtcacacccacggacgcaaagatgcacagcggggatg

SEQ ID NO: 449314 - DNA, 1622 bp, Homo sapiens
  misc_feature (280)..(280): n is a, c, g, or t
  misc_feature (286)..(286): n is a, c, g, or t
  misc_feature (303)..(303): n is a, c, g, or t
  misc_feature (307)..(307): n is a, c, g, or t
  misc_feature (311)..(311): n is a, c, g, or t
gcggcggcggcggcatctcctcctcacatgaccccactgtttgtccccgtgatcagcgcgagcggctcccgtatctcctccgtcccctcctgccgcgcggcgtgagcgccgggctcggggcccccccggccgcccgccccctcccctccctccctcccctcccctcccctcccccccgggccccgcgccccccccgcccccgccccccccatggacatgctggacccgggtctggatcccgctgcctcggccaccgctgctgccgccgccagtttttgtngataanaaaaaaaaagaaaagangtgnatanaaagagtcgagctgcaggaaggcggggacggcccaggagcggaggagcagacagcggtggccatcaccagcgtccagcaggcggcgttcggcgaccacaacatccagtaccagttccgcacagagacaaatggaggacaggctgtgatccaaaatcccttcagcaatggtggcagtccggcggccgaggctgtcagcggggaggcacgatttgcctatttcccagcgtccagtgtgggagatactacggctgtgtccgtacagaccacagaccagagcttgcaggctggaggccagttctacgtcatgatgacgccccaggatgtgcttcagacaggaacacagaggacgatcgccccccggacacacccttactctccaaaaattgatggaaccagaacaccccgagatgagaggagaagagcccagcacaacgaagtggagcggaggcggagggacaagatcaacaactggatcgtccagctttcgaaaatcattccagactgtaacgcagacaacagcaagacgggagcgagtaaaggagggatcctgtccaaggcctgcgattacatccgggagttgcgccagaccaaccagcgcatgcaggagaccttcaaagaggccgagcggctgcagatggacaacgagctcctgaggcagcagatcgaggagctgaagaatgagaacgccctgcttcgagcccagctgcagcagcacaacctggagatggtgggcgagggcacccggcagtgacgcccgccaccaccacgcagccgccgccgcccacgccggcctctgctgcccccttccccagcccttagcacagagagggacacatgcccctcccccagctgcgtttttttatagtagatttttaacaaaaaacggggagaaataatgcatttctgtggatacagtgcccaccgccctcctccacttggaaacggtatcctccctgcccatccgtctgtctgtcgcccttctcccggccctcactaagccccggcacttctagtggtctcacctggaggcaagagggaggggacagaggccctgccacgtcccgctgcctcctgctctctggaggtactgagacagggtgctgatgggaaggaggggagcctttggggggccacccggggcctggacctatgcagggaggccacgtcccaccccacctcttgtttctgggtccctgctcccctttgggggtgtgtgtgtgtgttttaattttctttatggaaaaattgacaaaaaaaaaatagagagagaggtatttaactgcaataaactggccccatgtggcccccgc

SEQ ID NO: 449315 - DNA, 2251 bp, Homo sapiens
gcggcggcggcggcatctcctcctcacatgaccccactgtttgtccccgtgatcagcgcgagcggctcccgtatctcctccgtcccctcctgccgcgcggcgtgagcgccgggctcggggcccccccggccgcccgccccctcccctccctccctcccctcccctcccctcccccccgggccccgcgccccccccgcccccgccccccccatggacatgctggacccgggtctggatcccgctgcctcggccaccgctgctgccgccgccagccacgacaagggacccgaggcggaggagggcgtcgagctgcaggaaggcggggacggcccaggagcggaggagcagacagcggtggccatcaccagcgtccagcaggcggcgttcggcgaccacaacatccagtaccagttccgcacagagacaaatggaggacaggtgacataccgcgtagtccaggtgactgatggtcagctggacggccagggcgacacagctggcgccgtcagcgtcgtgtccaccgctgccttcgcgggggggcagcaggctgtgacccaggtgggtgtggacggggcagcccagcgcccgggccccgccgctgcctctgtgcccccaggtcctgcagcgcccttcccgctggctgtgatccaaaatcccttcagcaatggtggcagtccggcggccgaggctgtcagcggggaggcacgatttgcctatttcccagcgtccagtgtgggagatactacggctgtgtccgtacagaccacagaccagagcttgcaggctggaggccagttctacgtcatgatgacgccccaggatgtgcttcagacaggaacacagaggacgatcgccccccggacacacccttactctccaaaaattgatggaaccagaacaccccgagatgagaggagaagagcccagcacaacgaagtggagcggaggcggagggacaagatcaacaactggatcgtccagctttcgaaaatcattccagactgtaacgcagacaacagcaagacgggagcgagtaaaggagggatcctgtccaaggcctgcgattacatccgggagttgcgccagaccaaccagcgcatgcaggagaccttcaaagaggccgagcggctgcagatggacaacgagctcctgaggcagcagatcgaggagctgaagaatgagaacgccctgcttcgagcccagctgcagcagcacaacctggagatggtgggcgagggcacccggcagtgacgcccgccaccaccacgcagccgccgccgcccacgccggcctctgctgcccccttccccagcccttagcacagagagggacacatgcccctcccccagctgcgtttttttatagtagatttttaacaaaaaacggggagaaataatgcatttctgtggatacagtgcccaccgccctcctccacttggaaacggtatcctccctgcccatccgtctgtctgtcgcccttctcccggccctcactaagccccggcacttctagtggtctcacctggaggcaagagggaggggacagaggccctgccacgtcccgctgcctcctgctctctggaggtactgagacagggtgctgatgggaaggaggggagcctttggggggccacccggggcctggacctatgcagggaggccacgtcccaccccacctcttgtttctgggtccctgctcccctttgggggtgtgtgtgtgtgttttaattttctttatggaaaaattgacaaaaaaaaaatagagagagaggtatttaactgcaataaactggccccatgtggcccccgcaaaaaaaaaaaaaaaaaaaaaaaaaaaaaaaaaaaaaaaaggggggggcgcgcgcaaagactcatcccgcaggaggggcccacaggatcaacgccagcccccagcagttagtcggacacaaggaggggcccccatatatggggcggtgacaaattaatatgatgcgagagacggcggcgcacatactacaacaacaggcacgtcgagcaggcgagcaaacaggcacgaaacgcggaggagcacacctgcttgagagaaagaacacccacaaatcaacgcgggcgggaggggagcacccaacaggaggacaacaacaacccacccagcaagcgataataagataaacgcgcaggagaggaacacaatacaaacaacagacgcaacgggagatcatacggagggtagtcacacccacggacgcaaagatgcacagcggggatg

SEQ ID NO: 449316 - DNA, 1047 bp, Homo sapiens
gtgtggcgttctagaggatcccattaggccagttctacgtcatgatgacgccccaggatgtgcttcagacaggaacacagaggacgatcgccccccggacacacccttactctccaaaaattgatggaaccagaacaccccgagatgagaggagaagagcccagcacaacgaagtggagcggaggcggagggacaagatcaacaactggatcgtccagctttcgaaaatcattccagactgtaacgcagacaacagcaagacgggagcgagtaaaggagggatcctgtccaaggcctgcgattacatccgggagttgcgccagaccaaccagcgcatgcaggagaccttcaaagaggccgagcggctgcagatggacaacgagctcctgaggcagcagatcgaggagctgaagaatgagaacgccctgcttcgagcccagctgcagcagcacaacctggagatggtgggcgagggcacccggcagtgacgcccgccaccaccacgcagccgccgccgcccacgccggcctctgctgcccccttccccagcccttagcacagagagggacacatgcccctcccccagctgcgtttttttatagtagatttttaacaaaaaacggggagaaataatgcatttctgtggatacagtgcccaccgccctcctccacttggaaacggtatcctccctgcccatccgtctgtctgtcgcccttctcccggccctcactaagccccggcacttctagtggtctcacctggaggcaagagggaggggacagaggccctgccacgtcccgctgcctcctgctctctggaggtactgagacagggtgctgatgggaaggaggggagcctttggggggccacccggggcctggacctatgcagggaggccacgtcccaccccacctcttgtttctgggtccctgctcccctttgggggtgtgtgtgtgtgttttaattttctttatggaaaaattgacaaaaaaaaaatagagagagaggtatttaactgcaataaactggccccatgtggcccccgc

SEQ ID NO: 449317 - DNA, 1757 bp, Homo sapiens
  misc_feature (1614)..(1615): n is a, c, g, or t
  misc_feature (1619)..(1619): n is a, c, g, or t
  misc_feature (1621)..(1621): n is a, c, g, or t
  misc_feature (1628)..(1628): n is a, c, g, or t
gcggcggcggcggcatctcctcctcacatgaccccactgtttgtccccgtgatcagcgcgagcggctcccgtatctcctccgtcccctcctgccgcgcggcgtgagcgccgggctcggggcccccccggccgcccgccccctcccctccctccctcccctcccctcccctcccccccgggccccgcgccccccccgcccccgccccccccatggacatgctggacccgggtctggatcccgctgcctcggccaccgctgctgccgccgccagccacgacaagggacccgaggcggaggagggcgtcgagctgcaggaaggcggggacggcccaggagcggaggagcagacagcggtggccatcaccagcgtccagcaggcggcgttcggcgaccacaacatccagtaccagttccgcacagagacaaatggaggacaggtgacataccgcgtagtccaggtgactgatggtcagctggacggccagggcgacacagctggcgccgtcagcgtcgtgtccaccgctgccttcgcgggggggcagcaggctgtgacccaggtgggtgtggacggggcagcccagcgcccgggccccgccgctgcctctgtgcccccaggtcctgcagcgcccttcccgctggctgtgatccaaaatcccttcagcaatggtggcagtccggcggccgaggctgtcagcggggaggcacgatttgcctatttcccagcgtccagtgtgggagatactacggctgtgtccgtacagaccacagaccagagcttgcaggctggaggccagttctacgtcatgatgacgccccaggatgtgcttcagacaggaacacagaggacgatcgccccccggacacacccttactctccaaaaattgatggaaccagaacaccccgagatgagaggagaagagcccagcacaacgaagtggagcggaggcggagggacaagatcaacaactggatcgtccagctttcgaaaatcattccagactgtaacgcagacaacagcaagacgggagcgagtaaaggagggatcctgtccaaggcctgcgattacatccgggagttgcgccagaccaaccagcgcatgcaggagaccttcaaagaggccgagcggctgcagatggacaacgagctcctgaggcagcagatcgaggagctgaagaatgagaacgccctgcttcgagcccagctgcagcagcacaacctggagatggtgggcgagggcacccggcagtgacgcccgccaccaccacgcagccgccgccgcccacgccggcctctgctgcccccttccccagcccttagcacagagagggacacatgcccctcccccagctgcgtttttttatagtagatttttaacaaaaaacggggagaaataatgcatttctgtggatacagtgcccaccgccctcctccacttggaaacggtatcctccctgcccatccgtctgtctgtcgcccttctcccggccctcactaagccccggcacttctagtggtctcacctggaggcaagagggaggggacagaggccctgccacgtcccgctgcctcctgctctctggaggtactgagacagggtgctgatggagagganntggngncacggcngacatgggaggcagtccccactggtggacatcctggggggtgttatttcgaatgcacacagagtagaagcagcccaaaaaagggatccgagacctgagataaaacaccaatatgcaaaatgtatgaatg

SEQ ID NO: 449318 - DNA, 1679 bp, Homo sapiens
gcggcggcggcggcatctcctcctcacatgaccccactgtttgtccccgtgatcagcgcgagcggctcccgtatctcctccgtcccctcctgccgcgcggcgtgagcgccgggctcggggcccccccggccgcccgccccctcccctccctccctcccctcccctcccctcccccccgggccccgcgccccccccgcccccgccccccccatggacatgctggacccgggtctggatcccgctgcctcggccaccgctgctgccgccgccagccacgacaagggacccgaggcggaggagggcgtcgagctgcaggaaggcggggacggcccaggagcggaggagcagacagcggtggccatcaccagcgtccagcaggcggcgttcggcgaccacaacatccagtaccagttccgcacagagacaaatggaggacaggtgacataccgcgtagtccaggtgactgatggtcagctggacggccagggcgacacagctggcgccgtcagcgtcgtgtccaccgctgccttcgcgggggggcagcaggctgtgacccaggtgggtgtggacggggcagcccagcgcccgggccccgccgctgcctctgtgcccccaggtcctgcagcgcccttcccgctggctgtgatccaaaatcccttcagcaatggtggcagtccggcggccgaggctgtcagcggggaggcacgatttgcctatttcccagcgtccagtgtgggagatactacggctgtgtccgtacagaccacagaccagagcttgcaggctggaggccagttctacgtcatgatgacgccccaggatgtgcttcagacaggaacacagaggacgatcgccccccggacacacccttactctccaaaaattgatggaaccagaacaccccgagatgagaggagaagagcccagcacaacgaagtggagcggaggcggagggacaagatcaacaactggatcgtccagctttcgaaaatcattccagactgtaacgcagacaacagcaagacgggagcgagtaaaggagggatcctgtccaaggcctgcgattacatccgggagttgcgccagaccaaccagcgcatgcaggagaccttcaaagaggccgagcggctgcagatggacaacgagctcctgaggcagcagatcgaggagctgaagaatgagaacgccctgcttcgagcccagctgcagcagcacaacctggagatggtgggcgagggcacccggcagtgacgcccgccaccaccacgcagccgccgccgcccacgccggcctctgctgcccccttccccagcccttagcacagagagggacacatgcccctcccccagctgcgtttttttatagtagatttttaacaaaaaacggggagaaataatgcatttctgtggatacagtgcccaccgccctcctccacttggaaacggtatcctccctgcccatccgtctgtctgtcgcccttctcccggccctcactaagccccgccggggcctggacctatgcagggaggccacgtcccaccccacctcttgtttctgggtccctgctcccctttgggggtgtgtgtgtgtgttttaattttctttatggaaaaattgacaaaaaaaaaatagagagagaggtatttaactgcaataaactggccccatgtggcccccgc

SEQ ID NO: 449319 - DNA, 1902 bp, Homo sapiens
gcggcggcggcggcatctcctcctcacatgaccccactgtttgtccccgtgatcagcgcgagcggctcccgtatctcctccgtcccctcctgccgcgcggcgtgagcgccgggctcggggcccccccggccgcccgccccctcccctccctccctcccctcccctcccctcccccccgggccccgcgccccccccgcccccgccccccccatggacatgctggacccgggtctggatcccgctgcctcggccaccgctgctgccgccgccagccacgacaagggacccgaggcggaggagggcgtcgagctgcaggaaggcggggacggcccaggagcggaggagcagacagcggtggccatcaccagcgtccagcaggcggcgttcggcgaccacaacatccagtaccagttccgcacagagacaaatggaggacaggtgacataccgcgtagtccaggtgactgatggtcagctggacggccagggcgacacagctggcgccgtcagcgtcgtgtccaccgctgccttcgcgggggggcagcaggctgtgacccaggtgggtgtggacggggcagcccagcgcccgggccccgccgctgcctctgtgcccccaggtcctgcagcgcccttcccgctggctgtgatccaaaatcccttcagcaatggtggcagtccggcggccgaggctgtcagcggggaggcacgatttgcctatttcccagcgtccagtgtgggagatactacggctgtgtccgtacagaccacagaccagagcttgcaggctggaggccagttctacgtcatgatgacgccccaggatgtgcttcagacaggaacacagaggacgatcgccccccggacacacccttactctccaaaaattgatggaaccagaacaccccgagatgagaggagaagagcccagcacaacgaagtggagcggaggcggagggacaagatcaacaactggatcgtccagctttcgaaaatcattccagactgtaacgcagacaacagcaagacgggagcgagtaaaggagggatcctgtccaaggcctgcgattacatccgggagttgcgccagaccaaccagcgcatgcaggagaccttcaaagaggccgagcggctgcagatggacaacgagctcctgaggcagcaggtgggtgcggggcctggagcgggtcagggcccaggagccccagatgcaaggcgctggccctcagctcccttgacctccgtcgtgtccgccagatcgaggagctgaagaatgagaacgccctgcttcgagcccagctgcagcagcacaacctggagatggtgggcgagggcacccggcagtgacgcccgccaccaccacgcagccgccgccgcccacgccggcctctgctgcccccttccccagcccttagcacagagagggacacatgcccctcccccagctgcgtttttttatagtagatttttaacaaaaaacggggagaaataatgcatttctgtggatacagtgcccaccgccctcctccacttggaaacggtatcctccctgcccatccgtctgtctgtcgcccttctcccggccctcactaagccccggcacttctagtggtctcacctggaggcaagagggaggggacagaggccctgccacgtcccgctgcctcctgctctctggaggtactgagacagggtgctgatgggaaggaggggagcctttggggggccacccggggcctggacctatgcagggaggccacgtcccaccccacctcttgtttctgggtccctgctcccctttgggggtgtgtgtgtgtgttttaattttctttatggaaaaattgacaaaaaaaaaatagagagagaggtatttaactgcaataaactggccccatgtggcccccgc

SEQ ID NO: 449320 - DNA, 1965 bp, Homo sapiens
gcggcggcggcggcatctcctcctcacatgaccccactgtttgtccccgtgatcagcgcgagcggctcccgtatctcctccgtcccctcctgccgcgcggcgtgagcgccgggctcggggcccccccggccgcccgccccctcccctccctccctcccctcccctcccctcccccccgggccccgcgccccccccgcccccgccccccccatggacatgctggacccgggtctggatcccgctgcctcggccaccgctgctgccgccgccagccacgacaagggacccgaggcggaggagggcgtcgagctgcaggaaggcggggacggcccaggagcggaggagcagacagcggtggccatcaccagcgtccagcaggcggcgttcggcgaccacaacatccagtaccagttccgcacagagacaaatggaggacaggtgacataccgcgtagtccaggtgactgatggtcagctggacggccagggcgacacagctggcgccgtcagcgtcgtgtccaccgctgccttcgcgggggggcagcaggctgtgacccaggtgggtgtggacggggcagcccagcgcccgggccccgccgctgcctctgtgcccccaggtcctgcagcgcccttcccgctggctgtgatccaaaatcccttcagcaatggtggcagtccggcggccgaggctgtcagcggggaggcacgatttgcctatttcccagcgtccagtgtgggagatactacggctgtgtccgtacagaccacagaccagagcttgcaggctggaggccagttctacgtcatgatgacgccccaggatgtgcttcagacaggaacacagaggacgatcgccccccggacacacccttactctccaaaaattgatggaaccagaacaccccgagatgagaggagaagagcccagcacaacgaagtggagcggaggcggagggacaagatcaacaactggatcgtccagctttcgaaaatcattccagactgtaacgcagacaacagcaagacgggagcggtgagcaccccggaccctcagtgtctgcggtggtcccggcccccgacccttgcatgcagaaagtccaacagccatggggctcgggagtcatccctggggtggaggccggtgggcggtgcctgccctaaggctcctggtcccctcgccccccagagagtaaaggagggatcctgtccaaggcctgcgattacatccgggagttgcgccagaccaaccagcgcatgcaggagaccttcaaagaggccgagcggctgcagatggacaacgagctcctgaggcagcagatcgaggagctgaagaatgagaacgccctgcttcgagcccagctgcagcagcacaacctggagatggtgggcgagggcacccggcagtgacgcccgccaccaccacgcagccgccgccgcccacgccggcctctgctgcccccttccccagcccttagcacagagagggacacatgcccctcccccagctgcgtttttttatagtagatttttaacaaaaaacggggagaaataatgcatttctgtggatacagtgcccaccgccctcctccacttggaaacggtatcctccctgcccatccgtctgtctgtcgcccttctcccggccctcactaagccccggcacttctagtggtctcacctggaggcaagagggaggggacagaggccctgccacgtcccgctgcctcctgctctctggaggtactgagacagggtgctgatgggaaggaggggagcctttggggggccacccggggcctggacctatgcagggaggccacgtcccaccccacctcttgtttctgggtccctgctcccctttgggggtgtgtgtgtgtgttttaattttctttatggaaaaattgacaaaaaaaaaatagagagagaggtatttaactgcaataaactggccccatgtggcccccgc

SEQ ID NO: 449321 - DNA, 2057 bp, Homo sapiens
gcggcggcggcggcatctcctcctcacatgaccccactgtttgtccccgtgatcagcgcgagcggctcccgtatctcctccgtcccctcctgccgcgcggcgtgagcgccgggctcggggcccccccggccgcccgccccctcccctccctccctcccctcccctcccctcccccccgggccccgcgccccccccgcccccgccccccccatggacatgctggacccgggtctggatcccgctgcctcggccaccgctgctgccgccgccagccacgacaagggacccgaggcggaggagggcgtcgagctgcaggaaggcggggacggcccaggagcggaggagcagacagcggtggccatcaccagcgtccagcaggcggcgttcggcgaccacaacatccagtaccagttccgcacagagacaaatggaggacaggtgacataccgcgtagtccaggtgactgatggtcagctggacggccagggcgacacagctggcgccgtcagcgtcgtgtccaccgctgccttcgcgggggggcagcaggctgtgacccaggtgggtgtggacggggcagcccagcgcccgggccccgccgctgcctctgtgcccccaggtcctgcagcgcccttcccgctggctgtgatccaaaatcccttcagcaatggtggcagtccggcggccgaggctgtcagcggggaggcacgatttgcctatttcccagcgtccagtgtgggagatactacggctgtgtccgtacagaccacagaccagagcttgcaggctggaggccagttctacgtcatgatgacgccccaggatgtgcttcagacaggaacacagaggacgatcgccccccggacacacccttactctccaaaaattgatggaaccagaacaccccgagatgagaggagaagagcccagcacaacgaagtggagcggaggcggagggacaagatcaacaactggatcgtccagctttcgaaaatcattccagactgtaacgcagacaacagcaagacgggagcggtgagcaccccggaccctcagtgtctgcggtggtcccggcccccgacccttgcatgcagaaagtccaacagccatggggctcgggagtcatccctggggtggaggccggtgggcggtgcctgccctaaggctcctggtcccctcgccccccagagagtaaaggagggatcctgtccaaggcctgcgattacatccgggagttgcgccagaccaaccagcgcatgcaggagaccttcaaagaggccgagcggctgcagatggacaacgagctcctgaggcagcaggtgggtgcggggcctggagcgggtcagggcccaggagccccagatgcaaggcgctggccctcagctcccttgacctccgtcgtgtccgccagatcgaggagctgaagaatgagaacgccctgcttcgagcccagctgcagcagcacaacctggagatggtgggcgagggcacccggcagtgacgcccgccaccaccacgcagccgccgccgcccacgccggcctctgctgcccccttccccagcccttagcacagagagggacacatgcccctcccccagctgcgtttttttatagtagatttttaacaaaaaacggggagaaataatgcatttctgtggatacagtgcccaccgccctcctccacttggaaacggtatcctccctgcccatccgtctgtctgtcgcccttctcccggccctcactaagccccggcacttctagtggtctcacctggaggcaagagggaggggacagaggccctgccacgtcccgctgcctcctgctctctggaggtactgagacagggtgctgatgggaaggaggggagcctttggggggccacccggggcctggacctatgcagggaggccacgtcccaccccacctcttgtttctgggtccctgctcccctttgggggtgtgtgtgtgtgttttaattttctttatggaaaaattgacaaaaaaaaaatagagagagaggtatttaactgcaataaactggccccatgtggcccccgc

SEQ ID NO: 449322 - DNA, 2342 bp, Homo sapiens
cccagtgcagggcctggaccgtgctccatagcaagcactgatcttgggctattggttttggaggaaagagggagcacaaggatggaaggggccagggaagagaggtcacggtgggagaaggagagtccgcatccatcggagggtttgtcactcaggcctgagtgggaggcactggaggcagggagaggccagtcagcagcatgcggccacagcccagagaagccagaggggtttgctggtgggtgggccccagccttttcaagggaacggcaggtctggggagctgccgatctcggggtgtgagggtaacgggcaggctgtggcccacccctccttctcaggctcactggacccctgaccggtttcatcaccattatccaaggctttgaaaagaccccctggccttcctgccacatgtgccctagctatagggcttcgttcccctccacaaatggtgcagacagcatgagccaccctggcagggggctgggggtccgtggggtaggagttgggggtagctgagcgttctttcctgtccccacggtgcctggtgctggggcttggcagccagggttgggacagcctggctttagcaggtcctgagtcaggggtctcaggctccgcagcacacagtccccaggcaggtgtcaggatgggatgtggccagagaaaggcatgtgctctgtctggggatagctgccacccagctgacacagttggcatgagattgtggagttttatggagtaaaatcacaaatctgggttttttaagtaaaaccttctatgagttgccatctctggccttcaacataggatttgggtctttcctgggtgagctggtgctttgtgggccaggccctgggagctgcaagtaccagttgggatctgccattgccctgtggaaggattttaagcaggggtgaaacatggtcagacttggattctagagatgaggaaaacaaaacaaaatcacggtgccagagtctctggggagactggagaatgcagtgcaggggccgcaggagccaaaaaggggcactggtcctgcgaagagtggctctgtccatccctgccttccagtatgtgcccactgtgaccagagctccatttctcaaaagaagccagtgatgccaattaccatgagaaatttccttatttttaactgtcgattaaaatttgtacaagtatggtggggcaggcctgcaaaatgatctccaagtgcctggcctttgatgcccgtcctaaaagcatgtgtggcactggagggcccacgtttctttgttcctcttgagaagctggggtgggggccggctgggctcagggtgcggcccctcacttcccagggctgtggtctcggtggggcctgcactgttcctgggtgtcctcgggctgagcctctgccctgtgaggacggccgctcaggcatgagccgtcagcgaacccgtggctgtgactctgttttccgcagttggagcggaggcggagggacaagatcaacaactggatcgtccagctttcgaaaatcattccagactgtaacgcagacaacagcaagacgggagcgagtaaaggagggatcctgtccaaggcctgcgattacatccgggagttgcgccagaccaaccagcgcatgcaggagaccttcaaagaggccgagcggctgcagatggacaacgagctcctgaggcagcagatcgaggagctgaagaatgagaacgccctgcttcgagcccagctgcagcagcacaacctggagatggtgggcgagggcacccggcagtgacgcccgccaccaccacgcagccgccgccgcccacgccggcctctgctgcccccttccccagcccttagcacagagagggacacatgcccctcccccagctgcgtttttttatagtagatttttaacaaaaaacggggagaaataatgcatttctgtggatacagtgcccaccgccctcctccacttggaaacggtatcctccctgcccatccgtctgtctgtcgcccttctcccggccctcactaagccccggcacttctagtggtctcacctggaggcaagagggaggggacagaggccctgccacgtcccgctgcctcctgctctctggaggtactgagacagggtgctgatgggaaggaggggagcctttggggggccacccggggcctggacctatgcagggaggccacgtcccaccccacctcttgtttctgggtccctgctcccctttgggggtgtgtgtgtgtgttttaattttctttatggaaaaattgacaaaaaaaaaatagagagagaggtatttaactgcaataaactggccccatgtggcccccgc

SEQ ID NO: 449323 - DNA, 1020 bp, Homo sapiens
ccacgccggcctctgcagcccccttccccagccccccggacacacccttactctccaaaaatagctggaaccagaacaccccgagatgagaggagaagaagcccagtcaaccaaaacccggaaaaaagtttgggggcatcgagcgactggagcggaggcggagggacaagatcaacaactggatcgtccagctttcgaaaatcattccagactgtaacgcagacaacagcaagacgggagcgagtaaaggagggatcctgtccaaggcctgcgattacatccgggagttgcgccagaccaaccagcgcatgcaggagaccttcaaagaggccgagcggctgcagatggacaacgagctcctgaggcagcagatcgaggagctgaagaatgagaacgccctgcttcgagcccagctgcagcagcacaacctggagatggtgggcgagggcacccggcagtgacgcccgccaccaccacgcagccgccgccgcccacgccggcctctgctgcccccttccccagcccttagcacagagagggacacatgcccctcccccagctgcgtttttttatagtagatttttaacaaaaaacggggagaaataatgcatttctgtggatacagtgcccaccgccctcctccacttggaaacggtatcctccctgcccatccgtctgtctgtcgcccttctcccggccctcactaagccccggcacttctagtggtctcacctggaggcaagagggaggggacagaggccctgccacgtcccgctgcctcctgctctctggaggtactgagacagggtgctgatgggaaggaggggagcctttggggggccacccggggcctggacctatgcagggaggccacgtcccaccccacctcttgtttctgggtccctgctcccctttgggggtgtgtgtgtgtgttttaattttctttatggaaaaattgacaaaaaaaaaatagagagagaggtatttaactgcaataaactggccccatgtggcccccgc

SEQ ID NO: 449324 - DNA, 1399 bp, Homo sapiens
attaggcgcgttctgcgtctgtggggacgctcctagagagagtcggccgcagcgagggcacagacaggctcgtggacatcacgactgcaccatggacgtcagccagcaggccccggggcagagtggcatgggggcaggaatggtggttacaccaacggcatgagctcattttccaagatggatctagagcaggtcccacccacgcagaacgcgcctaatagtaggccagttctacgtcatgatgacgccccaggatgtgcttcagacaggaacacagaggacgatcgccccccggacacacccttactctccaaaaattgatggaaccagaacaccccgagatgagaggagaagagcccagcacaacgaagtggagcggaggcggagggacaagatcaacaactggatcgtccagctttcgaaaatcattccagactgtaacgcagacaacagcaagacgggagcggtgagcaccccggaccctcagtgtctgcggtggtcccggcccccgacccttgcatgcagaaagtccaacagccatggggctcgggagtcatccctggggtggaggccggtgggcggtgcctgccctaaggctcctggtcccctcgccccccagagagtaaaggagggatcctgtccaaggcctgcgattacatccgggagttgcgccagaccaaccagcgcatgcaggagaccttcaaagaggccgagcggctgcagatggacaacgagctcctgaggcagcagatcgaggagctgaagaatgagaacgccctgcttcgagcccagctgcagcagcacaacctggagatggtgggcgagggcacccggcagtgacgcccgccaccaccacgcagccgccgccgcccacgccggcctctgctgcccccttccccagcccttagcacagagagggacacatgcccctcccccagctgcgtttttttatagtagatttttaacaaaaaacggggagaaataatgcatttctgtggatacagtgcccaccgccctcctccacttggaaacggtatcctccctgcccatccgtctgtctgtcgcccttctcccggccctcactaagccccggcacttctagtggtctcacctggaggcaagagggaggggacagaggccctgccacgtcccgctgcctcctgctctctggaggtactgagacagggtgctgatgggaaggaggggagcctttggggggccacccggggcctggacctatgcagggaggccacgtcccaccccacctcttgtttctgggtccctgctcccctttgggggtgtgtgtgtgtgttttaattttctttatggaaaaattgacaaaaaaaaaatagagagagaggtatttaactgcaataaactggccccatgtggcccccgc

SEQ ID NO: 449325 - DNA, 1076 bp, Homo sapiens
gcggcggcggcggcatctcctcctcacatgaccccactgtttgtccccgtgatcagcgcgagcggctcccgtatctcctccgtcccctcctgccgcgcggcgtgagcgccgggctcggggcccccccggccgcccgccccctcccctccctccctcccctcccctcccctcccccccgggccccgcgccccccccgcccccgccccccccatggacatgctggacccgggtctggatcccgctgcctcggccaccgctgctgccgccgccagccacgacaagggacccgaggcggaggagggcgtcgagctgcaggaaggcggggacggcccaggagcggaggagcagacagcggtggccatcaccagcgtccagcaggcggcgttcggcgaccacaacatccagtaccagttccgcacagagacaaatggaggacaggtgacataccgcgtagtccaggtgactgatggtcagctggacggccagggcgacacagctggcgccgtcagcgtcgtgtccaccgctgccttcgcgggggggcagcaggctgtgacccaggtgggtgtggacggggcagcccagcgcccgggccccgccgctgcctctgtgcccccaggtcctgcagcgcccttcccgctggctgtgatccaaaatcccttcagcaatggtggcagtccggcggccgaggctgtcagcggggaggcacgatttgcctatttcccagcgtccagtgtgggagatactacggctgtgtccgtacagaccacagaccagagcttgcaggctggaggccagttctacgtcatgatgacgccccaggatgtgcttcagacaggaacacagaggacgatcgccccccggacacacccttactctccaaaaattgatggaaccagaacaccccgagatgagaggagaagagcccagcacaacgaagcccacctcttgtttctgggtccctgctcccctttgggggtgtgtgtgtgtgttttaattttctttatggaaaaattgacaaaaaaaaaatagagagagaggtatttaactgcaataaactggccccatgtggcccccgc
